United States Patent Application Publication US 2013/0332133 A1 - sequence listing, part 36

SEQ ID NO: 256097 - DNA, 595 bp, Unknown
  Bacterial polypeptide expressing nucleotide sequence isolated from the Sargasso Sea
gttgattgctgcggcgggaagcggtcggcgcatgggtgcggatcgcaacaagctgctgctgccgttggccggacgccccgtcattgcctggaccctggaggcggccctgcgttccgagcggatcgaatggatcgggatcgtcggccaggaggtagatcgagaggccatccttgcggtgctggatgcacccagcaagccggtgcactggatccagggcggcagcacgcggcaggagtcggtgctttgtggtctggcggggttgccggagcaggctcggcacgtcttgattcatgacggcgcccgctgtttggctgaaccggagttgtttgatcgctgtgcagctgtggtggaggccggcacggcgctgattgctgcaacgccggtgagcgacacgatcaagcgcgtgggatctgatggtgtgattcgcgatacgccggatcgatcggagctttgggctgcgcagacgccgcagggctttgccgttgatcagctgcgtcgcggccacgctgaggcggtggcccagggctggacggtcaccgacgatgcgtcgttgtacgagcgtctggggtggcctgtgcaggtcttggatgccggc

SEQ ID NO: 256098 - DNA, 188 bp, Unknown
  Bacterial polypeptide expressing nucleotide sequence isolated from the Sargasso Sea
gatgactgatctccgccccgggctgaccgccatcgtcccggccgcgggcatcggcagccgaatgggggccgaatgccccaaacagtatctgcagctggcgggtcggaccattctggaacataccctgacccggctgctctcccacccggccatcgctcaggtgatcgtggcgctggctcctcatgacc

SEQ ID NO: 256099 - DNA, 625 bp, Unknown
  Bacterial polypeptide expressing nucleotide sequence isolated from the Sargasso Sea
attgcttcttcccttaggaacaagtacaatattagggactagcttggaaccattcttaaagcattcaagaatcaggaagatttatttggcagcatctctccaggatcaccaattgataaaaaagttgatacctgaagaagttgtccttgttaaaggtggcaagcgcagacaggactcggtacataatgcactggtggaggttatgaaggaaaaaaatattcctgacgctgtattgatacatgacggagcccgtcctttttgcagctcaaatttgatagatcgcattttgtacgcaacactcaggcatgatgccgcaattcctgtactacccattaatgacactgtccgccgtataactgacgaaaaaaccaatgttgtagaccggaggggattatattccgttcaaacccctcagggatttcgccctgaactgatatatgccgcatcatcgagggcaaaagcaaaaaatatagatgttacagacgatgcatctctgcttgaaaataccccccaaaatgttgcgtctgtagaaggggaagtgcataatataaaaatcaccacttcagctgatttagaacaagcccgatggattataaattcattgaatcatgttagaatcaagtaa

SEQ ID NO: 256100 - DNA, 691 bp, Unknown
  Bacterial polypeptide expressing nucleotide sequence isolated from the Sargasso Sea
aatgaccgctattcctgctattgcgactgtgatcccggccgctggtgttggcaaacgaatgaaggcggataagcccaaacagtacctgccactttgcggtgtaactgtactggagcagactctgcgtcgcttaaaacaagttgctgctttacagcagttttatctggcgttaagcccggacgatccctattttccaacattgcctttagcgactgactcaggcattcaacgggtggatggcggcgctgaacgcgccaactcagtgctgaatgctctagttcagattgatgcgaaagtctatccttgggtactggtacatgacgcggctcgccccgtagtgcgggttagtgatatcgaacttttaattgatagctgcatcgaatccaatcagggcggcattttagccacgccagtacgcgataccatgaaacgtggttctgacagggtcgagcacactgtggatagagcaggtttatggcatgcctatacgccgcaattgtttcctacagctttgctcagagatgcattgcaacaggctttagcccagggtgtggccattaccgatgaggccagtgctatggaatgggcaggattacctgtgcttttggtgcaagggcatgccgacaatataaaaattactcaggctgaagatttagctttggccgctttttatctggagcattctatatga

SEQ ID NO: 256101 - DNA, 490 bp, Unknown
  Bacterial polypeptide expressing nucleotide sequence isolated from the Sargasso Sea
aggcgccgagcgggccttttccgtgctcaatgcgttgcacgtggccgcaggggagtgggtactggtgcacgacgccgcccgcccctgtctgacccacggcgatctcgatgcgctgattgccaccgccatggcctgtgatggcgccatcctcggcagccgggtgcgcgacaccatgaagcgctccgacggggcgggcaacatccttgccaccgtcgatcgcgagcagctctggcatgccctgaccccccagatgtttcccacccgtcccctgctgcgggcactggaagaggggctggcgctgggagccaccatcaccgatgaggcctccgccatggagcgtgccggtttcacggtgcggatggtggaaggacgagccgacaatatcaaggtgacccggccggaggatctctctctggcggggctctatttgcagcaacagaacgcgcgccagccggcgcaacccgattcacccacagaggagctggcatga

SEQ ID NO: 256102 - DNA, 483 bp, Unknown
  Bacterial polypeptide expressing nucleotide sequence isolated from the Sargasso Sea
ttgtacgttcaagtggtggcaaagaacgtgctgattcagtacttaatagtttgttatttttagcacccaatcctcctgattgggtattagtgcacgatgcagcgcgcccattggttgacctagcagacatagagcgccttataagtgagtgccttagtgtaaatgaaggcggaattttagccactaaagtaaaagacaccatcaaacgcggcgatacacactcaaagcaaaccgtcccccgagacgacctatggcaagcgcttacccctcaattttttaagtacagtgaccttaaaaatgcgctgcaaaatgcgctgcaaagtggggtgcctattaccgacgaagccagtgcaattgagtgggtaaacaaaccagtaaaacttatagcgggtcgtagcgataatattaaaataaccacgccagaagatttagctttggcagggtttatattaaacaaacaacaaaacgagagtgcagtatgat

SEQ ID NO: 256103 - DNA, 588 bp, Unknown
  Bacterial polypeptide expressing nucleotide sequence isolated from the Sargasso Sea
cctggacgcttgacgcggcaatggaggcggaacagatctcttggatcggcctggtcggccaggaggtggaccgggacgagattgtctcgctgctcgacaacgtccagaaacccgttgtgtggattcaggggggaagcacccgccaggaatctgtgctgcgtggtcttgatgctctgcctgcgcaggccaaccatgttctgatccatgacggagcccgttgcctggcagagcccgatctgtttgatcgctgtgctgtggctcttgaacagggtggagccctcatcgcggctacgcctgtcaccgacacgattaaaaaggtgaatggtgacggccagattctggagacgcctctgcgtgccgagctatgggccgctcagaccccgcagggctttgcggtggatcaactcaggcagggccatgccgaggcgttgaaaaaaggctggactgtcaccgacgacgcctcgctctacgaacgactcggatggccggttcgcgtgctcgatgcgggaccgtccaacatcaaagtgacaacgccgttcgatctgacggttgcggaagcggtgctggccctcaggcgatcaggctgag

SEQ ID NO: 256104 - DNA, 439 bp, Unknown
  Bacterial polypeptide expressing nucleotide sequence isolated from the Sargasso Sea
tcggttctccggggactggcggggctgccggcggatgccacgcaggttctgattcacgacggtgcgcgctgtctggccgagccggcactgtttgatcgctgtgcggatgccctggcgggtggtcaggcgttgattgcggcaacaccggtgaccgacacgatcaagcgggtggatggccagggcgtgatcaccgcaacccccgaccgttcggaactgtgggcggcccagacgccgcagggctttcaggtggatcagctgcgccagggccacgccgaagcgcaggcgaagggttggagcgtcaccgatgacgcctcgctgtatgagcgtctcggttggccggtgcaggtgttggatgccggaccggccaatatcaaggtcacgacgcccttcgatctcacggtggcggaagccgtcctggcgctcagggcaccaggctgag

SEQ ID NO: 256105 - DNA, 677 bp, Unknown
  Bacterial polypeptide expressing nucleotide sequence isolated from the Sargasso Sea
tgctgttatagttgctgcagggaaaggttctcgcatgggagaggatcgcaataaattgcttcttcccttaggaacaagtacaataattgagactagccttaaaccattcttaaagcattcaagaatacggaaaatatatttggtagcatctctccatgatcatcaattaataaaaaaattgatacctgaagaaataatcttgattaaaggtggtaagcgcagacaggactcagttcataatgcactagtggaggttatgaagggtaaaaatactcctgaagcagtattgatacatgacggagcacgtcctttttgcagcttaaatttgatagatagcatattagacgcgacaaaaaggcatgatgccgcaattcctgtacttcccattaatgacactgtacgccgcataactgaggaaaaaaccaatgttgtggaccggagtggcttatatattgttcaaacccctcagggatttcgtcctgaattaatatatgccgcatcaaaagaggcaaatgcaaaaaatacaaaagttacagacgacgcatccctgctagaaaaaatctcccaaagagttgcttctgtagaaggggaagtgcataatataaaaattaccaccccagctgatttggagcaagccagatggattataaattcaatgaatcatgttagaatctaat

SEQ ID NO: 256106 - DNA, 640 bp, Unknown
  Bacterial polypeptide expressing nucleotide sequence isolated from the Sargasso Sea
aaacggatgcaaagtgcggtaccaaagcaatacctgaagctgcacggtaaaaccgtgcttgaacacagcgtggcaaaattacgcgctgtcagtgctgttaatcaaatctggttggcacttgctgctgatgatccttattttgatgccactgagctgacacacagcgatattaaccgcgtcaaaggcggtgccgaacgtatgcattcggtgttaaatgcattgcagtttattgatgagcatcagtttccctgggtgttggtgcatgatgccgccagaccactggtgcgcaaagcggatatcgagctgttgataacgcgatgtctgcagcagggcgagggcggtattctggccagcccggtgcgggatacgatgaagcgtggggcatgttatgtggctgaaaccgtcagccgtgaacacctgtggcatgcactgacgccacagtttttccccaccgccatgttaaaagcggcgttgcatgatgcaatacaggctggcgtgaatgtcaccgatgaggcgtcggcgatggagtgggccggtcacagggtaatgctggtagagggccacagcgacaatattaaaattacgcagccggctgatctggcgctggcggcgttttatctggagcaggtaactgaatgaa

SEQ ID NO: 256107 - DNA, 358 bp, Unknown
  Bacterial polypeptide expressing nucleotide sequence isolated from the Sargasso Sea
cgcctgttggcgctgcgcgaaaccagtcgcgtggggggcattctcgccgcgccggtacgcgacacgatgaaacgtgcggaacccggcaaggtagccattgcgcacacggtcgaccgtaacgatctgtggcatgcgctgacgccgcaatttttccctcgtgagctcctcctcgactgcctgacgcgcgcgctcaatgaaagcgcgatcattaccgatgaagcctcggcgctggagtactgtggcttccatcccgaactggtcgctggccgagctgataatattaaagtgacgcgcccggaagacctggcgctggcagaattttaccttacccgttcccgacaccaggagaaggcttaat

SEQ ID NO: 256108 - DNA, 751 bp, Unknown
  Bacterial polypeptide expressing nucleotide sequence isolated from the Sargasso Sea
atggataccgtattagaggccgcgccgcaggtcgaaacccaagttgcagttcaaattgatcctttctcgcaccatgtggtggcgattgtgcccgccgcggggattggcagtcgcatgggcgcgggcaaacccaagcaatatttaaccttgctggggcaaagcattctggcccataccttagacaagttattgtcccatccgcaaattaaccaagtgattgtggcgctgcatcccgaggatactgagttcgccgcgttgcctcaggccaagcatcccaagctagtgactgttattggcggctctgagcgcgccgactctgtactcgcggccctcgataaggcgcctgataatggttgggccttagtacacgatgcggccagaccctgcctgacggcgcaagacatagataaattgctagcatcgcgggtgcactttccccaaggggcgattttggctatgcctgtgcgggataccatgaagcgcgccaatagcttaggtgaaattagctcgaccgtttgccgcgataatctctggcatgcgttgacgccgcaattattcccaacctccttgttgcgattacatttaaaagccgcgcttgccgcgggtgctgtcgtgaccgatgaggcctcggcgatggagtgggcgggcatttccccaggtttagtcgcggggcgggcggataacattaaagtcacccatcccgatgatttggagttggcagagctttttttactgcgcgcgaatgcttgaa

SEQ ID NO: 256109 - DNA, 700 bp, Unknown
  Bacterial polypeptide expressing nucleotide sequence isolated from the Sargasso Sea
aatgaattttgaacatgctgttgcagttatagttgctgcagggaaaggttctcgtatgagaaagaatcgcaataaattgcttcttcccttaggagcaagtacaatacttgagaaaagcttggaaccattcttaaagcattcaagaattaggaaaatttttttggcagcatctgtccaagatcatcatttgataaaaaagttgatacctgaagaagtaatactggttaaaggtggcaagcgcagacaggactctgtacataatgcacttgtggaggttatgaaggggaaaaatatccctgatgttgtattgatacatgacggtgcgcgtcctttttgtagctcaaacttaataaatcgtgtgttggacgctacacaaaggtatgatgccgcaatacctgtactcccgattaacgaaaccgtccgtcgtataacagtagagaaaaccaatgttgtagacagggaaggattatattctgttcaaactccacagggatttcgtccggagttgatttataaagcttcgtccaaggcacaggaaaaaaatatagaagttactgacgatgcatctttgctagaaaaaatctcccaaagaattgcttctgtagaaggggaagtgcataatataaaaattaccaccccagctgatttagagcaagctagatggattataacttcaatgaatcatgttagaatcaagtaa

SEQ ID NO: 256110 - DNA, 700 bp, Unknown
  Bacterial polypeptide expressing nucleotide sequence isolated from the Sargasso Sea
atgacttttgatcatgccgttgcagttatagttgctgcagggaaaggttctcgtatgagagagaatcgcaataaattgcttcttcccttaggagcaagtacaatacttgagaaaagcttggaaccattcttaaagcattcaagaattaggaagatttatttggcagcatcagtccaggaccattatttgataaaaaagttgatacctgaagaaataatactggttaaaggtggcaagcgtagacaggactctgtacataatgcacttgtggaggttatgaagggaaaaaatatccctaatgttgtattgatacatgacggtgcacgtcctttttgtagctcaaacttaatagatcgcgtgttggacgctacaaaaatgtatgatgccgcaatacctgtactcccgattaacgaaaccgtccgccgtataacagtggaaaaaaccaatgttgtagacaggagagggttatattctgttcaaacccctcagggatttcgtcctgagttgatttataatgcttctaccaaggcacaggcaaaaaatacagaagttactgatgatgcatctctgctagaaaaaatttcccaaagagttgcttctgtagaaggggaagtgcataatattaaaattaccaccccagctgatttagaacaagctagatggattataaattcaatgaatcatgatagaatcaagtaac

SEQ ID NO: 256111 - DNA, 643 bp, Unknown
  Bacterial polypeptide expressing nucleotide sequence isolated from the Sargasso Sea
catgggcgcggatcgcaacaagcttctgctgccattggccggaaagcctgtgatcgcctggacgctgaaggctgcgttggccgctgaacagatccactggatcggtgtggtgggtcaggagatcgatcgcgaaccgattcttgatctcgtgggggatgctgacaagccggtcacctggatccagggcggcagcacgcggcaggagtcggtgttgcgtgggctggcggggctacctgccgctgctgaacaggtgttgatccacgacggcgcccgctgcctggcggaaccggcgctgttcgatcgctgcgcgcaggccctggccacaggccaggcgctgatcgcagcaacccccgtcaccgacacgatcaagcgggtggatggcgatggggtgatcactgagacgccggaccgatcggagctctgggctgctcagactcctcagggttttcaggtggaccagttgcgccaggggcatgcccaggctgaagcgatgggttgggccgtcacggacgacgcctctctgtatgagcgcctcggctggcctgtgcaagtgctggatgccggaccgtccaacatcaaggtgaccacaccgtttgacctgacggtggccgaagccgtgctggctctcaggcaacaaggctga

SEQ ID NO: 256112 - DNA, 673 bp, Unknown
  Bacterial polypeptide expressing nucleotide sequence isolated from the Sargasso Sea
aatgacatcgccccgcgttgttgcggttatccccgcagccggagttggcagccgaatgcaggctgaccgcccaaagcaatacctcaccttaaatggtaaaaccattcttgaacacacgattgacgcgctgctacagcatccgttaatcgatgacgtgatcgtagcgataagcccaggtgacgcgtattttgatcaatatcggttacgtgaaaaacccattcgcgttgtagatggcggaaaggaacgcgctgatagtgtattgaacgggcttatgtcacttggcgagaacgattgggcactggttcacgatgccgcgaggccttgtatagaagagagcgatatttccgcgctgctcgaattaatgagcagtgatgacgtttctggcggtattctagctacccctgttcgtgacaccatgaagcgggtcagaccttcaacaaatgttatttctcacactgaagaccgggacggtctttggcacgctttaacgcctcaactttttccagcaacattgctaaaacgcgcgcttcaaaatggtttatcacagggcgcgaatatcacagacgaagcctctgccatggagcttgaaggctacaaagttgccatggtaagcggaagtccggcaaatataaaaataacgcatccggccgatcttcctttggcagaattttat

SEQ ID NO: 256113 - DNA, 751 bp, Unknown
  Bacterial polypeptide expressing nucleotide sequence isolated from the Sargasso Sea
atggatatcgtcttagaagccacgccacagactgaaacagaagtcgctattcagctggatcctttctcacctaatgtggttgcgattgtgccagccgcagggattggcagccgcatgggcgcgggtaaacccaagcaatatttaactttgttgggacaaagcattctggctcataccttagacaagttattgtcccatccgcaaattaaccaagtgattgtcgcgctgcatcctgaggataccgagtttgccgcgttgccccaggccaagcatcccaagctggtgactgttattggcggctctgagcgcgccgactcagtgctggcggcactcgataaggcgcccgacaatggttgggctttagtacacgatgcggctagaccctgcttaacggcgcaagacatagataaattgctggcttcgcgggtgcactttccccaaggggccattttggcgatgccagtccgcgataccatgaagcgcgccaatagcttaggtgaaatcagctcgaccgtttgccgcgataatctctggcatgccttgacgccgcagttattcccaacctccttgttgcgattgcatttaaaagccgcgcttgccgcaggggccgttgtgaccgatgaagcctcggcgatggaatgggcgggaatttcccctggattagtcgctgggcgggcggataacattaaagtgacccatcccgatgatttggagttagcagaactttttttactgcgtgctaaggcttgaa

SEQ ID NO: 256114 - DNA, 952 bp, Unknown
  Bacterial polypeptide expressing nucleotide sequence isolated from the Sargasso Sea
cgatttattgattatcttacactgtccggcgacacatctgacaacattcctggtgtagagaaggtaggtcccaagacagcgatcaagtggattaatgagtatggatctttagatggggtgattcaaaacgctgatcaaatcaaaggtaagattggcgagaatctaaatacagctttagataggctcgatttattcaagaccttggtcaccataaaatgtgatgtcgaaatggattcaaacatctcagatttaaccataggcgaatcaaatgaaggacttttgtatgagcaactcagtgatttgggtttacatggactgatcaagcaatttgaaatcgagccatcagaaaaagaatcagctgctgataaaaactatcaaacgataagaacagagaaagagttggatgaattgatgggtttgatcaatcaggctgactatgtttcatttgatacagaaacaacaagcttagattatatgcttgcagaattggtgggcatttcaattgcattgaaaccaaatgaggctttttatataccaatcaatcacaactatgaaggcgcagaaaaacagctggagcaggattttgtattggaagctttaaaacccttcttggaatcagatgaaattccaaagattggacataatctgaaatatgaccgacacatccttcaaaatgctggcattgatttgaaaggaacacttttggatacaatgcttttttcttatgtgaataacagcaccatcacacgacataatttagatgctgtttcaaagagatacttaaatataaaccccacttcttatgaagatgttgctggtaaaggggcaaaacaaattcctttctcagaagtatccatagacgtggcatctgattatgcgtctgaagatgcagacatttctctgaagctctatgagcatattgaaccattggttcaaaaggaaagcaaattgg

SEQ ID NO: 256115 - DNA, 724 bp, Unknown
  Bacterial polypeptide expressing nucleotide sequence isolated from the Sargasso Sea
aatgaaattcatagcaaaaaaagaacagatagtagacattttacagatgggagcagctatagcagaaagaaggcaaacaatacctattttagccaatttaagaatcaaagcagagaattctttggtagaaataacagctacagaccttgaaatccaaataaaatcagcatccaaggtctcaaaagtagaagaagagggggaaacaaccgtttcagcaaggaaaatgtcagagttatgcaggatgcttcctgctaatgaagatttagaatttagtgtaaaccagggcaaattaacagttaagtctaggaattttcatgcagattttgcaactctatcggcggctgactttccagaattagaagtcggagagcatgaaaaaaccttaaaaataagctcttcctcgcttaaaaggctttttaacaagacacagttttgtatggcaacacaagatgttaggtattatttaaatgggcttcttttagagataaacgatggaaatttagtggctgttgcaaccgacggacacaggcttgcctcagcatcaaatcaaatagagctaaaagaggatgaaataataaggaatatactgcctagaaaggctgttacagagttagcaaaaatacttaaagacgaggacgaatcaatagaattaagcattggaagctcaagcttaagaataaaagataaaggcctggatttttcttctaaattgatagatggaaaa

SEQ ID NO: 256116 - DNA, 909 bp, Unknown
  Bacterial polypeptide expressing nucleotide sequence isolated from the Sargasso Sea
tgatattacttacagactatacaaaatttttagtaaaaatcttaaattagaaaaattaactaatatttatgaaacttttgaaaaacctttaattgaaatattggcctttatggaaattaatggaattaaagttgataacaaatcattagaaaaattatcaaaaaaatttgaaataaaaataaaaaatctagaaaaagaaatttttaaattttcaaaaaaagaatttaatattgcttcaccaaaacaacttggagaaataatctataatgagctaaagattgcagttttaaaaaaaactagaaaaggaagttttgctactagcgccagtgttctagaggatttatcttttagaggacataaatttccacaattgattttagattggagacaagtttctaaacttaaaaatacatattcagattcactgcgagaacatattaattctcgtacaaaaagggtccatacttcctttttattagctgcaacttctacaggaagactggcttctagtaatccaaatttgcaaaatattccaattaaatcagaagatggaaaagaaattagaaaagcgtttattgcagaaaaaggattcacattaatttcagccgattataatcaaattgagatgagaatattagctgatctagctgatgttaaagggttaaaaaaagcattcaaaaataatgaagatatacattctttaaccgctagtgaggtttttaatattgatattaaaaaagttgatcaagatatgagacgaaaggcaaaagcaattaattttggaattatatatggaatttcacaatatggtttagctaaacaaattatggtttcaaataatgaagctgaagaatttttaaattcatactttttaaagtttcctgagattaaggcttatatggaagccac

SEQ ID NO: 256117 - DNA, 875 bp, Unknown
  Bacterial polypeptide expressing nucleotide sequence isolated from the Sargasso Sea
ccttatcaacgcatggacgaaatccagcgccgtttcgacgaggacaagccggccctggcgcgctataacctgaaggattgcgaactggtcacgcgcatctttgcgaaaaccgaactgctgtcgttcctgctggagcgcgcaaccgtgaccggcctgcccgcggaccgcagcggcggatcggtcgcggcgttcacgcatctatatatgccgcgcatgcatcgtcagggttacgtcgcgccgaatctcggcgacgtagccggtgccgcgagccccggcggattcgtgatggattcgcggcccggcctctacgattccgtgctggtgctcgactacaagagcctctacccgtcgatcatccggacgtttctgatcgacccgctagggctcgtggaaggcatgctgaatcccgccgacgatcaatcggtgccgggttttctcggcgcacgcttctcgcgcacgcgccattgcctgccttcgatcgtcggccaggtgtggcaggcacgcgaagccgccaaacgcgcgcacaacgggccgctttcgcaggcgttgaaaatcatcatgaacgctttctacggcgtgctcggttccaccggatgccgtttcttcgacccgcgcctcgcgtcgtcgatcacgatgcgcggccacgaaatcatgcacgccacgcgcgagctgatcgaggcgcaaggctacgaagtcatttacggcgacaccgattcgactttcgtctggctgaagcacgcgcacagcgaagaagatgcgagccggatcggccgcgcgctggtcgagcatatcaatgcgcaatggcggcaggatctgcaggcacgcttcggactcgagagcgcgctggagctgcaattcgagcggcactacaagcg

SEQ ID NO: 256118 - DNA, 289 bp, Unknown
  Bacterial polypeptide expressing nucleotide sequence isolated from the Sargasso Sea
atgttgaggagtggtgctgaaagaaatgctataaatgcacccattcaaggaagcgctgctgatattatcaaaattgcaatgataagaattcatgaaaagtttaaagaacagtccttaaaatcaaaaatgttacttcaggttcatgatgagcttgtttttgatgtacataaatcagaaaaagatattgttaagaatatagtccaagatactatggaatctgctgtacaacttgatgttccccttaaaattgacttagaatttggaaaaaactggttagaggcacattaat

SEQ ID NO: 256119 - DNA, 745 bp, Unknown
  Bacterial polypeptide expressing nucleotide sequence isolated from the Sargasso Sea
tcatcgaattttactgcaaaggcttctctattgagacgattatttgataagtcaaaattcgctatctcaacagaagaaacaagatattacctgaatggtgtatacatgcacattgcatcatctgatggtggtgaggtccttcgatgtgtggctactgacggtcacagacttgcaagaattgactcggacttgcctgaaggcgcctcagatatgcctggcgtgatagtgccaagaaaaaccgttggagaattgcgcaagttacttgatgatgatgaacttaaaattgctgtttctgtatcagaaacaaaaattagatttgccactccagaaataacattaacgtcgaaagttatagatggaacttttccggactatactagagttataccaaatgaaaatgtaaggcggcttgaagtcgatgccagtgactttgctaaagcagtagatagggttgcaactgtttcttcagagcgatcacgagccgtaaagttatcactggatgaagatagattggtactatcagtaaatgctccagatagtggagcagcagaagaggagcttgccgttgcatatggtgatgagcctttagagataggttttaatgctaaatatcttttggagattgcaagccaagttgatcgagaaaatgctgtctttttgttcaactcctcgggtgaccctaccttaatgcgagaaggaaatgataccagcgctgtttacgttgttatgccaatgcgcgtttaaa

SEQ ID NO: 256120 - DNA, 877 bp, Unknown
  Bacterial polypeptide expressing nucleotide sequence isolated from the Sargasso Sea
aatgaaagcgagcattgagcagacagaacttctaaaagctatggccaaagtgcagtccatagttgaaagaagaaccaccatacctatactatctaatgtacttattgaagctaaggattcttctttatacttaagaactacagatttagatattgaagttttggatagggtggaagcaattattgaaacgccaggttcacttaccgttggtgctaataccctttacgaaattgttagaaagttaccagacggatctagggttgaatttttaaatgaaattggatcaagtcaattagaaattattgcttcaagatctagattttttctttcaacattgcctaaagaagattttcctgtaatggcttcagaggagtatgattttgattttactattaaagctaaggtagtaaagagactctttgataagtcaaaatttgctatgtcttctgaagaaacaagatattatttgaatggtgtttatttacatccatgtgttgaaaatgaaaaaaatattttaagagctgttgctactgatggacatagactagctcaaatagatatagagaatccgggactaaaagaaaatttctctggtattattgtacctaagaaaactgtttcagagttaagaatggtattagaaaacgaaaacgacgatatttcaatttccatttcgaataataagataagattttctaataattttttaaccttaacatctaaaattgttgatggtacttttcctgattataagagagtaattccattagacaatgataaaaaattacaagtaaatgcaaatgaattttctgaagctgtagatagggtttgtacagttagttcagagagatctagagcggtaaaactttctctaagc

SEQ ID NO: 256121 - DNA, 853 bp, Unknown
  Bacterial polypeptide expressing nucleotide sequence isolated from the Sargasso Sea
aggtgaattcaatgttgcagttgggtcatattcacttgatgaaaatacatttggtgataaaaatgtagctttaggatatgtagctttaggtaaaaatactgaagcaggtaacaatactggaattggcgctgaagccttaaaattaaatactacaggtacttataatactggattggggtcttcagctggtgatgctttaggaacaggttctcaaaacgttttaattggtgctagtactgaccctagcgcagctgatgcaacaaaccagacagtaattggttataactcaacagggcaggcagataattcagtaacgctaggtaatgctgatgttactgcagtttatatggctcaggatgcgggagctacggttcatgctgctggtatcacatctgcatcaaatggaaatatcactatagatccaaatggttcaggcacactggctctaggttcagcggataatactgcgaccactgtagatgctattgcattcagcatagacgcaactggtggtgcgtcaaatattagtttagcggctgatggagcagctgatgatttaactgtagcggttactggttctcaagatgcttcgctggtacttagttcagcaggtacaggagcagatgcagttcaacttactgctagcgcggggggtatggatatttcagcatcgagtggtgttgattttaaagcaagcacaatcgctaatttttccgcatcaactgttagtataacatctgctgcaaccttggatgcaactcataatgggaaggttcttatttgcaataattcatctgattttaatttgactgttccagaagatactttgccggcaggatttaattgccttatt

SEQ ID NO: 256122 - DNA, 327 bp, Unknown
  Bacterial polypeptide expressing nucleotide sequence isolated from the Sargasso Sea
gtttgtatttacccgaaattcgcgaccgtaatgcaatgcgccgccaagcagcagaaagggccgcaattaacgccccaatgcaaggcaccgccgcggatatcattaaaaaagccatgatcagcattgccgattggataaaaaccgatacccaaggtgaaatcgccatgattatgcaagtccacgacgaattagtgttcgaagtcgatgccgataaagccgaagcactcaagctcaaggtgtgtgagctcatggccaaagcggccaatctggacgtggaacttctggcggaagccggtattggtgataactgggatcaagcccactagc

SEQ ID NO: 256123 - DNA, 691 bp, Unknown
  Bacterial polypeptide expressing nucleotide sequence isolated from the Sargasso Sea
atgaagtttgcaattgtaaaatcagatttaataaaaccgttaagtcacattaattcagtggttgaaagaaaaaatgcaattgcgattttgtcaaatttggtgattgaagcagttagtaaagaaataaattttatagctacagatatggaaattgatattaaagagaaaattattgcaaatataatatcagatggcaaagttacggtaccggcacaaactttacacgacattgtaaaaaaatttcctgatggctcggaaatccttatgcaagcaaatgataataatttaacaatagaatgtggtaagtcaaaatttactctaccaactttgccttttgatgactttccagttatgacagatatattagatggtaaagaattttcaattagttctgcagatataaaaaatttaattgataacacaaagtttgcaatatctttggaggaaacaagatattatttgaatggcatctatattcatcaagatgaagaaaacaaaaaatttttaaaaggagtagctacagatgggcataggttagctcaagttaaattaaaacttccagaaggtgcagatggaataccaccaattattattcctagaaaaacggttaatgagttaagaaaattgttagaagaaaccgatgtggatatattagtaaaggtttctaataataaaattaagtttatgtaaa

SEQ ID NO: 256124 - DNA, 907 bp, Unknown
  Bacterial polypeptide expressing nucleotide sequence isolated from the Sargasso Sea
tattttaaaataggtcataatattaaatatgatcttagaattttagagaaatatggtcttaaattaacatctatagctgatactatgttgttgtcttatgctatagataatggagtcaccaaacataatatggatgacttggcttatttacatttaaatcatacaaatattaaatttaaagagcttgttgggtctggtaaaaaagaaataacatttgattatgtagaaataaatcaagcgcttgaatatgctgcggaagatgctcttgttacactaaaactctataatttattaaataatagaattaaaaatgaaaaaagtaattttgtatataatgaaattgatttacctttaattaatgttttatcttcaattgaaaaaaatggaattaaagtagacactaagtatcttaataaattaagcaaagaatttgaaaaagaaagctccattttagaaaaaaaaatttttaaattagcaggtaaagattttaatataggatcaccaaaacagttaggtgaaatcttattcatagatttaagtattcagggagggaaaaaaactaaaactggcactttttcaactgattcttcaactttatccaacttatcagatcaaggttatgaaattgcaagtttaatcttagaatggagagaattaacgaaactgaaatctacttatactgacgctttgcaaaatcaggcaacaaaagataactcaagagttcacacttcatatggtatagccaatactcttacaggtcgattaagttctaatgatccaaatcttcaaaatattcccatacgcacaaataatggtagaaaaataagaaaagcttttgtttgtgaaacaaaaaaaaatttaatgagctttgattattcacaaaatagaattaagacttgcagctgaa

SEQ ID NO: 256125 - DNA, 616 bp, Unknown
  Bacterial polypeptide expressing nucleotide sequence isolated from the Sargasso Sea
atggaatttaaaataaatagttcagatcttcttaaggcactgtctcatatccatggaatagtagaagttagacataccttgccaatactttcaaacatcatactaaaagcaaaagataatgaattaactctgtcatcgacgaatttagatatattttgtgcagataaaattaaatcagaagtctcaatagcaggtgaaatctcagtttcggcagtaacgttttttgaaattgttaaacgacttccaccaggttcggaagtcgtgatgacaatggaagaaggagaaaatgaaattaaacttagatgtggaaggtctaaattcaatttatcaactcttaaaactgacgattttccaattatttctgataatgatttatcaacaaactttgtcttaagtgccgatgagttgattagaattatagacaaaacaaaatttgcagtgtcaaacgaggaaacgagatattatttaaatggtatttttctgcataaagctgatagaaattctatacaatttttaagggctgttgctacagacggtcatcgtttggcacaatatgatatcccacttccacagggcgctgaagatataactggcgttattatcccaaaaaaaaact

SEQ ID NO: 256126 - DNA, 629 bp, Unknown
  Bacterial polypeptide expressing nucleotide sequence isolated from the Sargasso Sea
gcttcagaaactcattaaatctgagagacctgattacctttcggtagtttttgacacgccggtcaaaaccttcaggcatgatatttttcccgaatacaaagcaaacagacaaaaaacccccgaggatttaattgcacagattgaacctctgcatcaggctatcatcaatcttggattgccactcattgcagttgatggagttgaggctgatgatgtgatcggaacccttgccgtggaggctgagaaaaaaaacatcaaaacattgatcgcaactggcgacaaggatatggcgcagttagtcacagataatatccatctcattgacacaatgaaggacataaaaatgggtccaacagaggttttggagaaatttgggattttgccagagcgatttattgattacttaactttggccggcgacacatctgataatattccaggtgtagaaaaggtcggtcctaagacagccatcaagtggatcaatgagtacggatctttagaaggcgtgattcaaaacgcagatcaaatcaaaggcaagataggagataatctcaatgcagctttggatgagttggatttattcaagactttggtcaccataaaatgcgatgttcaaactgaattctaat

SEQ ID NO: 256127 - DNA, 490 bp, Unknown
  Bacterial polypeptide expressing nucleotide sequence isolated from the Sargasso Sea
aaggagttcctgacgaagtacaagcagcgctacccgagggtgttcgccttcctggagctgcaggaacggctggccctaagccgcggttacgtggagacgatcctgggtcgccgccgcccgttccacttcgaccgcaacggtctgggtcggttgctcgggaaggatccgctggagatcgatctggatgtggcccggcgaggcggcatggaggcacagcagctgcgggccgccgccaatgctccgatccagggctccagcgccgacatcatcaaggtggcaatggtgcagctacaggcggcgctgcagagccaggcactgccggcgcggctgctgttgcaggtgcacgacgaactggtgctggaagtggagccggacgcgttggaagccacccgcaacctggtggtgaccaccatggaaaacgccgtgcagctcagtgttcctctggtggcggaaacaggggtcggcgccaactggatggaagcgaaatagg

SEQ ID NO: 256128 - DNA, 562 bp, Unknown
  Bacterial polypeptide expressing nucleotide sequence isolated from the Sargasso Sea
aatttcggagttatctatggtatggggataaaaaagtttgcccgttcaacaggagtaagtactccagaagcaaaagaattcctaataaaatacaaagaaagatattccaaaattttcaaatttcttgaacttcaagaaaggcttgccttatcaaaaggttatgtaaaaacaatttttggtcgaaaaagagaatttaagtttgataaaaatggacttggaagactaataggaaaagatccttacgaaattgacctgcaatccgcgagaagagctggcatggaagctcaatcactaagagccgcagccaatgccccaattcagggttcaagtgcagatattattaaaattgcaatggttcaactaaataaaaaattcatagaaatgaatgttccagcaaaaatgcttttacaagtacatgatgaattattgtttgaagttgaaccagattctttggaaattacgacgaaattagtaaagaagactatggaagattgtgtaaaattaaatgtgcctcttttagttgatattggaattggagacaattggatggagacaaaataaa

SEQ ID NO: 256129 - DNA, 532 bp, Unknown
  Bacterial polypeptide expressing nucleotide sequence isolated from the Sargasso Sea
caaagaacaaatgctaaaaccgtgaactttggaattatttatggagtttcagcttttgggttaagtcagcaaacaactctaaatagaacagaatctaaagatcttatagagtcttactataaaacctacccaaaactcagagattttatttctaatcaaatttcttttgccagagaaaacggatacgtagaaacaatcttaggaaggagacgatatttaaataatataaactctcaaaattcaataattagaagtgctgacgaaaggaatgctgtaaacagtcccattcagggaagcgccgcagacataattaaattagcaatgattggaattcaaacaaaaataaatgatgctaaattaagatcaaaaatgctccttcaagttcatgatgaactgatttttgaagtccctaaaaatgaaatcccaaaaatgaaagaaataattaaatttgaaatggaaaatgcattccctttatctgtaccattatcagttgaaattggtgaaggagagaattggcttaatgcacactaat

SEQ ID NO: 256130 - DNA, 634 bp, Unknown
  Bacterial polypeptide expressing nucleotide sequence isolated from the Sargasso Sea
aataaaattaataatcttgaaaaagaaatatttaaaatttcaaaaaagacatttaatattggatctactaaacaattaggtgaaataatgtataatgaattaaaaatagcaaatacaaaaaaaacaaaaaaaggcagttttgcaacaagtgcgcaagtcttagaagatctttcttttaaagggcataagctcccaaaattagttctggattggagacaggttacaaaactcaaaaatacatattcagattcattgcaagagcatattaataaaaaatctcgaagagttcatacttcatttcttcttgcagcaacatccacaggtagattagcttcaagtgatccaaacttacaaaatattccaataaaatcagatgatggaaaagatattagaaaatcttttatagcagaaaataaatctttattaatttcagcagattataaccaaattgaaatgagaattttagctgatttggcagatgttaaagaattaaaaaaagcttttaaaaacaatgaggatattcattctttaactgctagtcaggtatttaatgttaaggttaaagatgtaaattctgaaatgagaagaaaagcaaaagctataaattttggaattatttatggaatatctcaat

SEQ ID NO: 256131 - DNA, 152 bp, Unknown
  Bacterial polypeptide expressing nucleotide sequence isolated from the Sargasso Sea
gatgactgtctctaacgataccgatcgaatcatcatgcatgccgatatggatgccttttatgcatccgttgagcagcgtgaccaccctgagttgaggaatcgacccctcgcggtcggcggtagtggcccgcgtggcgtcgtagccgccgcaa

SEQ ID NO: 256132 - DNA, 675 bp, Unknown
  Bacterial polypeptide expressing nucleotide sequence isolated from the Sargasso Sea
ttgaattaaggttaatagcgcatatagctgacgagataaaaatgttggatgcgtttaataatgatttagatattcattcagatactgcttccaaagtctttggagtccctataaatgagatgtcatcagatttaagaaggaaagctaaagctataaactttggaattatatatggtatttctgcttacggtctagcaaaacaattgaagtgctctgcaaatgaagctaaagaatttatagattcgtatttcaaaagatttccaagaataagagattatatggaagagattaaatctaacttagaagaaaatggatatgtagaaactctgttcaatagacgaatttatataaatgatagtaatgctaaaaatcaaaggttaaaaggatttgctgaaaggcaggcgattaatgcacctattcaaggatcagctgctgatataataaaattggcaatggtgaaaatacacaaaagtttattaaatcataaaaatgatgtttcaatgctgatgcaagttcatgatgagcttgtatttgagataagagaaaatagtatcaataaatattcaaagattatccaagaaattatggagtatgctaatttacctaaagtttcattgaacgttaacttaaaagttgacactggttttggagataattgggctgaggctcattaga

SEQ ID NO: 256133 - DNA, 166 bp, Unknown
  Bacterial polypeptide expressing nucleotide sequence isolated from the Sargasso Sea
tacactaaataaacttaaaaacacttatattgatcaacttcccgaatatgttcattttaaaagcggaaacatccactccacatttcatcaaactgtaacagccacagggcgtctatcatcagaaaatccaaatttgcagaatattcccgttcgttccactgaagga

SEQ ID NO: 256134 - DNA, 877 bp, Unknown
  Bacterial polypeptide expressing nucleotide sequence isolated from the Sargasso Sea
gttagaggaaaatatgtaattaatcatattaataaaatttgtaaaaatgaatcaatcttaaaaattggccaaaatataaaatatgatattagaattttaaataagtatggagtaacatttaattcaattgcagacacaatgctaatttcctactcaattgataatgggatttataagcacaatttagatgatctttcatttaatcatttaaatcatacaacaactaaatataaagaagttgttggtacaggaaaaaatgaaattacttttgataaagtaactattgataatgcaattaattatgccgcggaagattctctattaacattcaggctttttcaaaatctttatcctcgtttaataaaagaaaaggctaattttgtttatcataatatcgacttgcctcttgtagaagtattatcttcaattgaagcaaatggcatagaggtaaataaaaagtttttaacaagtttaagtaatgaatttgaaaatgaaagtaaaaaaattgaaaagaatatttataaactttcaaaagaagagttcaatattggctcacctaaacaattaggagagatattatttgttaatctaaaaatacctggtggaaaaaaaacaaaatcaggtacatattctactgattcttcaactttaaataatttagcttcagatggatttgaaattgcaaaactcgttcttgattggagagaattaacaaaacttaaatcaacatatacagatgctttatttagattaacagatagcaaaagtagagttcatacatcatttggtttagctagtactttaacaggtcgattaagttctacagatccaaatcttcaaaatatcccaattaggactgaaaatggaaaaaaataag

SEQ ID NO: 256135 - DNA, 954 bp, Unknown
  Bacterial polypeptide expressing nucleotide sequence isolated from the Sargasso Sea
accatttaaatattgaaaactcaaaaaaaaccgcaggtcaattagaggaaaattatgtattaaagcatattaaatctctttgtgagaatccatctattttaaaaattggtcaaaatattaagtatgatatgcgattacttaataagtataaaattaattttaaatcaattgctgacacaatgttattatcttattctttagataacggattaacaaaacacaatatggatgatttagcatattatcactttcaacatacttgtataaaatttaaagatgttgtgggtacaggaaaaaatgaaataacatttgattatgttccaattgataaagcattagaatatgcagcagaagatgcattaattacttttaaattatttcattgcttatttccaagatgcataaaagaaaaaaatttatttatatataaagaaatagacttatatttgatagacgctctttcttcaatggaagaaaatgggattaaagttgataataaatatttacaaaaactaagtaatgaatttgaaaaagatagtaaaaatttagaaaaagaaatttttaatatatcaaaaaaagaatttaatataggttctccaaagcaattaggcgaaattctttttacggacctaaatatacctggaggaaaaaaaacaaaatcaggaattttttcgacaaattcttcaacacttaatgatttatcatttaaaggttatgaaatagctaaattgatattagagtggagagaaataacaaaacttaaatcaacttatactgatgctctaaatgaacaaacaaataatgtaactaaaagagttcatacatcttttggtattgcaaatacacttacaggaaggttaagttcaaatgatcctaatttacaaaatatacctattcgtacagaaaaaggaaaaaaaattcgaaatgcatttatagcagataaacaaaattaaa

SEQ ID NO: 256136 - DNA, 552 bp, Unknown
  Bacterial polypeptide expressing nucleotide sequence isolated from the Sargasso Sea
tgatctacggcatgggagcccagcgcttcgccagggaaaccggcgtgagccagagcgaagccaaggagttcctggccaagtacaagcagcgctacccgaaggtgttcgccttcctcgagctgcaggagcggctcgccctcagccgcggttacgtggaaacgattctcggccgccggcggccgttccacttcgatcgcaacggcctggggcggctgctgggcaaggacccgctggagatcgacctcgatgtggcccgccgcggcggcatggaggcgcagcaactgcgggcggcggccaatgccccgattcagggctcgagtgccgacatcatcaaagtggcgatggtgcagctgcaagacgccctgcagcgtcagggcctaccggcccagctgctgctgcaggtgcacgacgaactggtgctcgaggtggcgccggacgccctggacgccatccgagagctggtggtgcagaccatggaacaggccgttgcgctgagtgttcccttggtggtggagaccggcgtcggcgcgaactggatggaggcgaaataaa

SEQ ID NO: 256137 - DNA, 819 bp, Unknown
  Bacterial polypeptide expressing nucleotide sequence isolated from the Sargasso Sea
gcgcggggcggtcgcacttctcgctgcccacgttgccgcgtgaggattcccccgtgatggcgtcgagcgagtacgacaccaacttctcgaccaaggccgcgatcctgcgccgtctgttcgacaaggcgaaattcgcgatctcgaccgaggaaacacgctattacctcaacggtatctacctgcattccgcgaccgcctcggccgggcagatgctgcgcgccgtggccacggacgggcaccgccttgcctgcatcgacgccgaactgcccgatggtgcggatgcgatccccggcgtgatcgtcccgcgcaagaccgtgaccgaggtgctcaaattgctggccgatgacgacgccgacatcgcggtgtccgtgtccgagacgaagatccgcttcgccactccggaaatcactctgacatccaaggttatcgacggctcgttccccgattatacccgtgtgatcccgcagcagaaccagaagcggatggaggtcgatgcctccgatttcgccaaggcggtggaccgggtttccaccgtctcctccgaacgctcgcgcgcggtgaagctcgccctggacgaggatcgcctgatcctgtccgtcaacgcgcccgattccggtgccgcggatgaggaactggccgttgcctacgcggatgaacggctggaaattggcttcaacgcgaagtacctgctggaaatcgccagtcaggtggaccgcgaaaacgcggttttcctgttcaactcctccggcgatccgaccctgatgcgcgaaggcaatgacgacagcgcgatttacgtcgtcatgccgatgcgggtctgac

SEQ ID NO: 256138 - DNA, 553 bp, Unknown
  Bacterial polypeptide expressing nucleotide sequence isolated from the Sargasso Sea
cctgatcgccctcgtgcagatccctccaaaaactcgtccgcgcctattccttgttgacgcttatgcgctgatctatcgctcatactttgcgttcatcaaacgtcccctcatgaacgcagctggtgagaatacatcagcgccgttcgggtttacccgctttctcttagatatacgggagcagtttgagccggactaccttgccgttgttttcgacgcgggtgattcgtttcgcgatcaggagtatccggaatacaaggccactcgtgagaagatgccagacgatctgagggatagtcttggtcgcatccgacagatcgtggaggctttcaacgatcccgttgtggagttggacggatacgaggccgatgatgtaattggaacgctcgctcgacaggcagctgaacagggcctggaggcggtaatagtttccggtgataaagatttctaccagcttgtccagccacacatccaccttatgaaccctggacgagggggatcctcaggggttgccgcggactgggtgaccgaagagaacgctgacgtaaggttcggc

SEQ ID NO: 256139 - DNA, 919 bp, Unknown
  Bacterial polypeptide expressing nucleotide sequence isolated from the Sargasso Sea
catgactatgagggctgtccagaacaattatccatggatgaggttattacaggccttggtcctattatagaagaaaatcaagataaaattgttggacagaatctaaaatttgatattccaatattatcaagacatggtattaacataacaaagtttttggcagacacaatgttaatgtcatatgtgttaaatagtacagccacaagacatgggatggatagactcgctgactattatttaaactataccactacaaaatatactgatgtaacaggaacggcatcaaaacaaataccattctctgaagtaaagcttgatgtggcaacagactatgctgcagaagatgctgacataactcttagactatttaatgttttgcaacagcactttaaagagaggcctattcaagaaaaacttttacataatcttgaatatcctctcgttcatgtgctttccaaagttgagcaaaatggtgcaaaaattgataagaaaaaattagccaatcactctatggagttgagtgaaaagattgatgaactatcttcttcagctttcaagattgcaggcgaagaatttaatctagattctccaaaacaacttctagaaatactatatgaaaaattaggattacctgttctgaaaaaaacaccaaaaggtcaaccatctacaaatgaagacacactccaaaggctatctgaagaatatgaattaccaaaaattattttgcaatatagaacacttgcaaaattaaagtctacttatacagatagtttaattaatattgaaaaccctaagacaaatagaattcatacatcatatcaacaagctgtaacttcaactggcaggctatcatctactgaaccaaatttacaaaatatacctataaaaactgcagaaggcagaagaattagagaggctt

SEQ ID NO: 256140 - DNA, 914 bp, Unknown
  Bacterial polypeptide expressing nucleotide sequence isolated from the Sargasso Sea
cccagcacatttgttgtacgagatagtcagaaaacttccggatggtgctcaaattgaattatctactgataatgataactcacagataacaataaattctggtagatcaaagttttcccttccatgcttatcaaaagaggaatttcccgtagtttctaacgatgatttaccacataattttcaaatttcttcaaaagtactaaaaaaattactagataaaactaaatttgcaatttctacagaggaaactaggtattacctcaatggtgtatattttcacaaaccagaaaatgttgatgtaccagttctacggagtgtagcaacagatggtcataggttagcttacacagaatctcagcttccagaaggagtttctgatattcctagtataattgttcctagaaaagcagttagcgaagtcagaaggcttcttgatcagtcggatgaagatataaatatttcactgtcagattctcagatgcgatttaatattggaactacaactatcaacactaagttaattgacgggacctttccagactaccagagagtaattcctgaacaaaataataagtttatgaaagtagataggtccgattttatagctgctgttgacagagtctcaactatatctacagagaaatctagggcaattaaattgtctatagagtcgaatatgatgaaaatctcagctaatagtgctgatacagcaactgcgtacgaagagctgtctatagagtatgactcagaattaattgaaataggatttaattcaaaatatttattagatattacaaatcatgttgaaggctcagtcattaatttttctttatctgattcagtctctcctgcgataatcacagatgattcggatacacagtccctttttgttttaatgcctatgagggtataat

SEQ ID NO: 256141 - DNA, 880 bp, Unknown
  Bacterial polypeptide expressing nucleotide sequence isolated from the Sargasso Sea
acttcaaagtatatcatgcgaagttcttcaggagggagctgtaactacacctgcccatatactttatgacattgtgagaaaacttcctgatgaagcgatgatagagttagaaagtaaagaaggaaaaaaactgggaataaaatcggacaaaatttctttttcattgatgtgtctccctcctaatgattttccggacatacattcaggagaatatcctgaaggttttgatatagaagcttcaagtcttagtagattaatagacaaaactctcttttcggtttctactgaagagacaaggtattatctaaatggaatctatttacattcaataaaagatgatgaacaagaagttttaagggcagtggcaactgatggccataggctttctaggctaagtgcttctctgccaaagaatgtaaaaaatcttgagggcgtaattattcctagaaaaactgttactgaaataaaaaaaataattgataatctagaaggtaaagtaaaaatacaaatagctaagaataaaatcaaatttactattgataatgttattattacttccaaattattagacggagcatttccagattatgaaagagttataccagaaaataatactaaagagcttatagtagataagctagaatttattgccgctgtggatagagtttcaactctatcatcagacaggacacgagcaattaaatttagccttgtcaaaaaaaatttagaaattactgcagaaaatccagaccaaggaagtgctaaagaaaatattaatgttcattatgatggagatgatttggaaattggctttaattcaaaatatttaattgacattgctagacaaattacaggagctaatattaagtttatgttgtct

SEQ ID NO: 256142 - DNA, 937 bp, Unknown
  Bacterial polypeptide expressing nucleotide sequence isolated from the Sargasso Sea
cacctgtaaagagatagagcaggggaactacgttgatttgttagagattgacgctgcatcaagaaccaaagttgaggatactcgcgagcttcttgataacgtgcaatacaaacccactcgcgggcgttacaaagtgtaccttatcgatgaggtacacatgctttcaaaacatagctttaatgcgctgttaaaaacgctggaagagccaccgccacacgttaagttcttactggcgaccactgatcctcaaaagcttccgataaccatcttatcccgttgcttgcagtttaacttgaaagccatgtctcgggagcaaattgttggacagctgcagcatattttagagcatgaacagctgccttttgagccacaagcgctagcgcttttggcaagagccgctcaaggcagtatgcgtgatgcgctgagtttaactgaccaagcgattgcacagggtggaaatcaagtgttggcatcggtggtaaccgatatgctggggttgatggacaagaaccagttgcttaaagtggttcatgcggtggtaagtaaaagtcctgctgatgtattgcagttagttaatgacatcgcagagcaagcccccgattatgacaacgtacacagcgaattggctagcctgctacaccaaatagcgttaacgcaatgggtgcctgaagcatgtaagctagaaaccacatcggctaaagcgatatttcagttagcgaaaactattccagcagagcaagtgcagttgctttatcaaatcgcgctacaaggaagaaaagacttaccgtttgctgctgatggaaaaagtgcgtttgaaatgacattgatgcgaatgatgtcgtttgctccaaacacccccatcgacgacacggcaagtgaaattgaaaacgggaggagtgagcatagtttacctgtagatcatgcttcttccagtggg

SEQ ID NO: 256143 - DNA, 789 bp, Unknown
  Bacterial polypeptide expressing nucleotide sequence isolated from the Sargasso Sea
aatgagtaaagagaaactattactggtcgatggttcctcctatttgtatagagcattccatgcattgcctgatctgaggtcgtcagatggaagaccgactggtgcgatctatggtgttctgaacatgcttcagaaactcattaaatctgagagacctgattacctttcggtagtttttgacacgccggtcaaaaccttcaggcatgatatttttcccgaatacaaagcaaacagacaaaaaacccccgaggatttaattgcacagattgaacctctgcatcagtctatcatcaatcttggattgccacttattgcagttgatggagttgaggctgatgatgtgatcggaacccttgccgtggaggctgagaaaaaagacatcaaaacattgatcgcaactggtgacaaggatatggcgcagttggtcacagataatatccatctcattgacacaatgaaggacataaaaatgggtccagcagaggttttggagaaatttgggattttgccagagcgatttattgattacttaactttggccggcgacacatccgataatattccaggtgtagaaaaggtcggtcctaagacagccatcaagtggatcaatgagtacggatctttagaaggcgtgattcaaaacgcagatcaaatcaaaggcaagataggagataatctcaatgcagctttggatcagttggatttattcaagactttggtcaccataaaatgcgatgttcaaacgaattctaatttctctgattttatcataggagagtcgaatgagga

SEQ ID NO: 256144 - DNA, 780 bp, Unknown
  Bacterial polypeptide expressing nucleotide sequence isolated from the Sargasso Sea
tttttaaaatcattatctataaagtttgaaaaaaaaataaaaatattagaagagaaaatatttcgattagcaaaaaaagaatttaaaattggttcaacaaaacaacttggggaagttatgtataatgaattgaaaatttcatcacttaaaaaaactaaaaaaggtagttttgcaacaagcgcaaatgtcttagaagatttagcttttaaaggtcatgagttacctaaatttgttttagattggaggcaggttacaaaactaaaaaatacttacacggactctttagtagaacatttaaatccaaattcaaaaagagtacatacctcttttcttttagctgctacatctactggaagattagcttctagtgatcccaatttgcaaaatattccaattaaaagtgaggatggtaaagatataagaaaaggatttattgcagaaaaaaactattcattaatttcagcagattataaccaaattgaaatgagaattctggctgatctagcagatgtaaaagaacttaaaaaagcttttataaataatgaagatattcattctttaacggcaagccaagtttttaatgttggacttaaaaaagttgactatgatatgagaagaaaagcaaaagctataaattttggaattatttatggaatttcgcagtatggtttagcaaaacaaataaatgtttccaacactgaagcagaggattttttaaactcttattttattaaatttccagaaataaaagaatatatgaattcgactatcaaatattgc

SEQ ID NO: 256145 - DNA, 724 bp, Unknown
  Bacterial polypeptide expressing nucleotide sequence isolated from the Sargasso Sea
ataatgtataatgaattaaaaatatctgcactaaaaaaaactaaaaaaggaagttttgcaactagtgcaagtgtaatggaagatttagcttataaaggacatgagctaccaaaattaattttagaatggaggcaaatatctaaactaaaaaatacatattcagaatccttaccaacttttgttaataataaaactaaaagagttcatacctcttttttacttgctgcgactacaactggaagattagcttcaagtgaccctaacttacagaatatacctattaaaacagatgatggtaaaaatattaggaaatcttttatagcagaaaaaaataatctcttagtgtccgctgattataatcaaattgaaatgaggatacttgctgatttagcagatgtaaaagaacttaaaaaagcctttaaaaataatgaagacattcatactttgactgcgagccaagtgtttaatattgatattaaaaaagttgatagcaacactaggcgaaaagccaaagcaattaattttggaattatatatggaatttcacaatatggacttgccaaacaaattatggtctcaaatagtgaagcacaagaatttttaaattcatattttaaaaaatttcctgaaataaaagaatatatggatagtacaataaaattttgtagaaaaagtggttacgtaaataatatttttggaagaagaacgtatatcactgggataa

SEQ ID NO: 256146 - DNA, 952 bp, Unknown
  Bacterial polypeptide expressing nucleotide sequence isolated from the Sargasso Sea
aatgaagcttattatattcctctaggacataaaacatttaagtgtcttaataaagaatcagttttgaagaaaattaaaccttgctttgaagatccaagcattaaaaaggttggtcagaacattaagtatgattttattgttttaataaacaatggaattgaaattgatcccgtggaagacaccatgttgttatcttatgttttagatgctggaaataacaggcataatatggatacactttcagagatacatctaggccacaaaactatttcttataaagatgttgtcggcacaggaaaaaaacaattgaatttttcagatataaacttagaagaagcaaccaaatatgccgccgaagacgcagatgtaaccttaagactttataatcttttattagagagagttaataatgaaaaattaaaaaaaatttatgaagtctttgaaaaaccaatgattaagttgctttcaaaattagagataaatggagttaaagttgacgatgtatatttaaaacaattgtcaaaaaaatttgaagcaagattaaaaaaaatagaaaaagaaatttatgtagtttcaggtaaagaatttaatattggttcaccaaagcaacttggagaaataatttataatgatttgaaaattgcaaaattaaaaaaaactaaaaagggaagcctagccacaagtgcaaaaattttagaagatttggcattaacaggacataaatttcccaatttagtcttggaatggagacaggtatcaaaattaaaaagcacctatactgatgctttgcaggagcatattaacaataaaacaaaaagggtccatacttcatttcttttagctgcgactaacacaggtcgacttgcatctagcgatccaaatttacaaaatattccaatcaaaactttagacggtaaagaaattcgaaaagcttttattacagagaaaaata

SEQ ID NO: 256147 - DNA, 942 bp, Unknown
  Bacterial polypeptide expressing nucleotide sequence isolated from the Sargasso Sea
ggttacaagcgataaggattacatgcagttgataggcgagaaaattgttatgcttaaccaccgcaacgagcgtatagggatcagtggagtgcaggaaaaatttggctgcgttcctgagcaggtggtcgagatgctggggctgatgggcgattcctcagataatattcccggagtaagaggagttggtgaaaaaaccgcggtcaagctaatatcagaatttggaagcatagaaagtgtttatgaaaatcttgaaagaatcagcagcaaaagcctgaaggaaaaactggaaactgatcatgaaaatgccttcctttccagagaactggccactattgaatgtcatgtacctctgtcttccacgttggaggatgttcatcttggagaaacagatttatacaataatgataaattatatgccttgcttgaagagcttgagttcagaacactgatgaatcgccttataaaaaaaaggggcactgtttcagtgggtcaggagtcaggacctacagatgttgcacaaagggagtcctcccaggatgaaaatcaggagctgttttcttcggaagaagaaactgatcatggctatcttgaagtagaatgctctctaattgaaactgcagaacaattacgaactctaatcagtgaattttcgaatacaatcatactggctattgacctggatattaaaggtgagcatcagctggatttgtggctgaagggactggcgatttgtgctgatggtgaaaaagcagtttatattgatttagatcgcactggagcagaatggacggaaattatcgggcagctgaaaacagtactggagtctgctgagtatccgaaaatattatatgaccttaaaaaagccctgcagctttttccaaaattgggaatagagattgagggagttgaatcagatattttactggctgcccacatgacaga

SEQ ID NO: 256148 - DNA, 952 bp, Unknown
  Bacterial polypeptide expressing nucleotide sequence isolated from the Sargasso Sea
tactgctttaagaattactgtttatggaagttatacaaattattatcgccaaaaattattagcaatagatttgctgcttcatattattcatatgaaaagccactattggaagttttagctagaattgagcataatggtgttaatgttgatgttaagaagttaacgcaattatcaaaagagtttgaagaaaatatcgccaaattaactaaagaaatttacgagatttcaggtagtgagttcaatattgcttctactaagcagcttggcgaggtgctttttgagaaaatgggcttaacttcgaagaaaaaatcgaaaaaaactggtaatttatcaactaaatctagtgttttagaagagttatcggagcaaggccacgagattgctgacaaaatactggcttttaggaaattttcaaaactaaaaaatacttatactgacgctctacctaaggaaattaatgctcaaagcgatcgaattcatactactttgtcttcaatttcgacgattaccggacgcttgagctcaagcaatccaaacttgcaaaatattccaattcgtagtgatgaaggcaaaaaaattcgccaatgttttgttgcgcaaaagggtaatgtgttaatttgtgctgactattcgcaagttgagctacgagtgttggctcatatcgctaatattaaagagttagtcaaggcctttaaagaggataaagatattcacagcattaccgcagcgcaagtttttggtatggctgaggatgaagttactagcgaagctagatcgcaagctaaagcaattaattttggcattgtttatggcataagtgcttttggcttagctaagcagttaggaatttcgaggaccgatgctgctgagtatatcaaaaactatcttgaaacttaccctgggattgatgattttatgaaaaattatcaagattttgctaaagaaaatggct

SEQ ID NO: 256149 - DNA, 760 bp, Unknown
  Bacterial polypeptide expressing nucleotide sequence isolated from the Sargasso Sea
atcattatcaaaattatttaatgatattaaaaaagatgtattaatagttaccggggacagggatatttttcagctaatttcaaaaaaaacaaaaattctttatacaaaaaaaggaatatctgaaacagacaccatggatgaaaaatcatttaaagaaaaatatgaaattacaccttcacagtacattgagtatttagctttaaaaggtgatccctctgataatattcctggattgccaggcgtaggtgaaaaaacagcaattacacttttaaaaaaatataaaaatttagataatattcttcaaaatcttgatgaacttacaccaaaactaaaaaatacatttataacaaataaagatactttatttataagtaaagcgttagccactatcaaaactgatttagaactagatttacctgatttgaagttgagtgattctgcatatttctctgatgatgttttagaaaatgcacaggaaaaagtaaaaaatctcgaactaaacaaatacaccttaaaaaacaataatgaaattgataaagaaataaaaaatcctgaagataaaaatatcgatgaatatgaatctatagagggtgaaaattttatcttaagttttgaaaatgaaacctatttttttaatagcaaaaaatttggaaaatatactgggaatttttcaaacataaataattatgttctaattacatcgcaaaccacgatttcactaactgaagataagttagattttgataaatttgatgcatat

SEQ ID NO: 256150 - DNA, 634 bp, Unknown
  Bacterial polypeptide expressing nucleotide sequence isolated from the Sargasso Sea
aaaagcatttttaaatcaagaagacattcattctttaactgcaagtcaagtgtttggggtagataaaaaaaaagttaatccagaaatgagaagaaaagctaaagcaattaattttggaattatttacgggatatctcaatatggattagctaagcaaattggagtttcaaatgttgaagcagaagaatttttgaaatcttactttgtaaagtttcctgaaataaaagaatatatgaaaagaacaattaatttttgtagaaaaagtggatatgtccaaaatatatttgggagaaaaacccatatagttggaattaatgataaaaattttaatgtaaggaattttaatgaaagagctgcaattaatgcgccaattcaaggatcagcatcagaaattatgagattagcaatgatcagaataaataatgaaataaatttaattaacaaagaaaatttaaaaatgttgcttcaaattcatgatgagttaatttttgagacaaaaaatgatgacttaaaaaagtcttcaaaattaataagaaatataatgatgagtgtcaaaaatagtgaacttcactcattttcaataccattgttggtagatgttaattcaggtaataattggggagaattacattag

SEQ ID NO: 256151 - DNA, 1021 bp, Unknown
  Bacterial polypeptide expressing nucleotide sequence isolated from the Sargasso Sea
aaaaagctaaaattagttggtatatcaatatgttttagtgaaaatatttcttactatattcctataaaccatacaacttcagatgggtcaaaaaaaattgataatcagttagaggaaaattatgtaattaatcatattaataagatttgtaaaaatgaatcaatcttaaaaattggtcaaaacataaaatatgatattagaattttaaataagtatggagtaatttttaattcaattgcagacacaatgttaatttcctactcaattgataatggtatttataagcataatttagatgatctttcatttaatcatctaaatcatacaacaattaaatataaagaagttgttggtacaggaaaaaatgaaattacttttgataaagtaactattgataatgcaattaattatgctgctgaagattctctattaacatttaggctttttcaaaatctttatcctcgtttaataaaagaaaaggctaattttgtttatcaaaatatcgatttgcctcttgtagaggtattatcttcaattgaagcaaatggtatcgaggtaaataaaaaatttttaacaaatctaagtaatgaatttgaaaatgaaagtaaaaaacttgaaaagaaaatttataaactttcaaaagaagagttcaatattggttcacctaaacaattaggagaaatattatttgttaatcttaaaatacctggcggtaaaaaaacaaaatcaggaacatattctactgattcttcaactttaaataatttagcctcagatggatttgaaattgcacaactcgttcttgattggagagaattaacaaaacttaaatcaacttatacagatgctttatttagattaacagacggtaaaagtagagttcatacatcatttggtttggctaatactttaacaggtcgattaagttctacagatccaaatcttcaaaatattccaattagaactgaaaatggaaaaaaaataagaacagcttttgttagtggaaaaggggaaaaaatta

SEQ ID NO: 256152 - DNA, 727 bp, Unknown
  Bacterial polypeptide expressing nucleotide sequence isolated from the Sargasso Sea
aaagcaaaaaaagattacttacttatttctgcagactataatcaaatagagatgagaattttagcagatttggcagatgtaaaagaacttaaaaaagcttttaaaaataaagaagatatccattctttaacagctagccaaatatttaatattgatattaaaaaagttaatcaagaccacaggcgaaaggctaaagctattaattttggaattatttatggaatttcacaatatggattagctaagcaaataaacgtatctaattatgaagcagaggaatttttagattcatattttgctaagtttccagaaattaaagtttatatggataatacgataaaattctgtaggaaaagcggatatgttaacaatatttttggaagaagatctcactttaatggaattaatgataaaaactttaatgtaagaaattttcaagaacgtgccgcgattaatgcaccaattcaaggttctgcttctgaggtaatgagactagctatgataagattagataagaaattatcagagcaaaaaaattcaaattcaaaaatgctcttgcagattcatgatgaattaatttttgaaattccaaaaaaagacgaaaaagtaatgattaaattaattgagaaagaaatgaccagtgtagctcagagtgattatcattctttttccactcctttaacagttgatattaatgtaggagataattggggagtggtacattaaa

SEQ ID NO: 256153 - DNA, 535 bp, Unknown
  Bacterial polypeptide expressing nucleotide sequence isolated from the Sargasso Sea
gatgagttatcaggttcttgcacgaaaatggcgtccgcgctcgttccgcgaaatggtcggccagacccatgtgctcaaggccttgatcaatgccttggacaaccagcgcctgcaccatgcctacctgttcaccggtacccgcggcgtgggcaagacgaccatcgcccgtattatcgcaaagtgcctgaactgtgaaaccggcatcacctccacgccctgtggcacctgttcggtgtgccgtgagatcgacgaaggccgtttcgtcgacctgatcgagatcgacgccgccagccgtaccaaggtagaggacactcgcgaactgctcgataacgtgcagtacgcccccagccgtgggcgcttcaaggtctacctgatcgacgaagtgcacatgctctcgacccactcgttcaacgccttgctcaagacgctggaagagccgccgccctacgtcaagttcatcctcgccaccaccgacccgcagaagctgccggccaccatcctgtcgcgctgcctgcagttctcgttgaagacatga

SEQ ID NO: 256154 - DNA, 903 bp, Unknown
  Bacterial polypeptide expressing nucleotide sequence isolated from the Sargasso Sea
atttagtaggaagtggaaaaaagcaattaaatttaaaagaagtagaaataaaacttgcaaaagattatgcagcagaagatgctgatattactttaaggttatataaactttttcttcaaaatttaaaatctgaaaaattattagaaatatatgagaattttgaaaaaccaatgattgaaattttagctctaatggaaataaatggagttaaaatagataaagattttttagcaaaactctcaaataaatttaataaaaaaattgaacaattagaaaaagatatttttaaaataactaaatcaaaatttaatattggatctactaaacaattaggggaaatattgtataaccaattaaaaatagcttctcttaaaagaaccaaaaaaggtagctttgcaacaagcgcaagtgtattagaagatttagcttttaaggggcataaacttccaaaattaattttagactggagacaacttacaaaattaaaaaatacatattcagattctttacccgaacatcaaaacccaaaaacaaaaagaattcatacttcttttttattagcagcgaccacaacaggaagattagcatctagtgatccgaatttgcaaaatattccaataaaaacagaagatggcaaagaaataagaaaatcatttattgcggaaaaaggatgttttttagtttctgctgattacaatcaagtagaaatgagaattttagctgagattgcagatgtaaaagaattaaaaaaagcatttataaataatgaagatattcactcaattacagcaagtcaggtttttaataaaaaaattaatgaagttgataaagatatgagaagaaaagcgaaagcgataaatttcggaattatttatggtatatctcaatatgggtttagctaaa

SEQ ID NO: 256155 - DNA, 811 bp, Unknown
  Bacterial polypeptide expressing nucleotide sequence isolated from the Sargasso Sea
aatgcttcctatcactgaactaatcggcaaaggaaaaaatcaaactacgatagataaagtacccattgaaaaagttgcattttatgcaatggaagattccgacatagcatttcagctaacccaagttttgaaagataagttaaagaaaaataggttacttgattattttacaaaaatagaaatgccattacttaatgtactgattcaaatggaatttacaggaacatttgttgactcaaaattattaaaaacaatgtctaatgatataggtgagaaaataaaatcaattacttcgtccatatttgctttatctggaaaagattttaatattaattcaactcaacaattggcaacaattttatttgataatcttgatttacctcaaataaaaagtagaagtaccgcagaaaatattttaaaagaacttagaaaatatcatgagcttcctcagctcattttggattatagaaagtatttcaaattaaagaatacatatcttgattctttgcaaaatttagtttccacagatacagggagaattcattctacatttaatcaaacaattgctgctactggaagattatcaagtacaaacccaaattttcaaaacatccctattagaaaagaagagggtaaggaaataagaaaagcatttcgtgctgaaaaaaaaggttggcagatattttcctttgattattctcaaatagaattaagaatcatggcccattacagtaaagattctaatttgataaatgcatttaacgacaaaaaagatattcattccgaaacagcaagcagtgtttttaatgtt

SEQ ID NO: 256156 - DNA, 919 bp, Unknown
  Bacterial polypeptide expressing nucleotide sequence isolated from the Sargasso Sea
atgaaaattgacgtagaacgcaatgatttgcttagagtgatgagcagagcgcaatcaatagtggaaagaagaacaactattcctatattgagcaatgttttaatagaagcacatgataagaaggtaagttgtaggactacagaccttgatattgaaattattgatacgcttgaggcaactatagaaggaagtggagcagtaactgtaaatgctaataccctttatgaaattgttagaaaattgaaagagggagcacgccttaatttacagtatgatcaacaaaaaggtcgacttgaactaaggtctggtaggtcaagtttttctctagccactttgtcaaaagatgattttcccatgatggcatcgtctgaatatgagtgtaatttttctatcccttctaatgatgtaaggaggttgcttgagaaatcaaagtttgcaatgtcatcagaagagacacgttattatttgaacggcgtatacctccattgcagtgaagaagatggaaaaaaagtcttgcgtgctgtagctacagatggacatcgattagcaagaattgattgtgaccttcctgatgccgcagatcaaatccctggggtaataatcccaaggaaaacagttggagaagttcgatcgattttggatggaatagaggaaagaattgcagtgtcagtgtctccaaataaaatcagattttctaactctggaactacaataacttccaaggtcatagatggaacatttccagattactcgagagtaataccaaaagagaataaaaatagaatggaagtggatgcagatgaattctccagggctgtagatagggtttcaactgtctcgttggataaggctagagctgttaagttaattttatctgaagataaattattgttatcggttaattcacctgaaagtggtg

SEQ ID NO: 256157 - DNA, 730 bp, Unknown
  Bacterial polypeptide expressing nucleotide sequence isolated from the Sargasso Sea
atgggcagcacaaccaagcctctgttgctgctggtggatggccattccttggctttccgcagcttctacgccttctccaaaggaggtgagggtggcttgagcacccaggacggcattcccaccagcgtgacctacggcttcctcaaggcgctgctggataactgcaaaagcctgaagcccaatggcgtggtgatcgcctttgacaccgccgaacccaccttccggcacaaagcggatgaggcgtacaaagccaaccgtgatgtggcccctgaccatttcttccaggacgtggacaacctgcaagagatcctcaaaggttgcctcgatatccccctctgcctcgctcctggctacgaggctgacgatgttttaggcaccctggccaatcgcagcgccaatgagggatggcgggttcgcatcctttccggcgaccgcgacctgtttcagctcgttgatgatcaaagggacatcgctgtcctctatatgggcggtggcccctacgccaagagcagcggccccagcgagatccgcgaagacggagtcgtcaacaagctcggggtgcttcccaacaaggtggtggacctcaaagcgctcaccggcgacagcagcgacaacattccaggagtgcgtggtgttggccccaagaccgccatcaatttgctgaaggagaacggtgatctcgatggtgtgtatcaagcgcttgaggcgctcaccgatcccaaagccacca

SEQ ID NO: 256158 - DNA, 758 bp, Unknown
  Bacterial polypeptide expressing nucleotide sequence isolated from the Sargasso Sea
agaagatgggagagacattaggaaagcatttgtagctgaaaaagaacatgttttagtatcagctgattataatcaaattgaaatgagaattcttgcagatttagctgatgtaaaagagttaaaaaaagcttttaaaaataaagaagatattcataatttgactgcaagtcaggtttttaatgttgatataaataaaattgatcaggaaaaaaggagaaaagcaaaagcaattaattttggtattatttatggtatttctcagtatgggcttgcgaaacaaattatggtttcaaataacgaagcagaggaatttttaaactcatattttattaaatttcctgaaattaaagaatacatgaatcataccataaaattttgtagaaaaaatggatatgtaaataatatttttggaagaagaactcatattattggaattaatgataaaaaccataatgtaagaaattttcaagaacgagcggcaattaatgctccaattcaaggatcagcatctgaaataatgagacttgcaatgataagattagaaaaaaaatttaaaattttaaataaggttaaatcaaaaatgcttttacaaattcatgatgaattaatttttgaggtaccaaattttgaaaaagaagagatttgtaatattatcaaagaagaaatgatgagcgtaagagagagcgatttgcatgctttttcaataccacttacggtcgacataaatgtaggcgataattggggaatacttcattaat

SEQ ID NO: 256159 - DNA, 474 bp, Unknown
  Bacterial polypeptide expressing nucleotide sequence isolated from the Sargasso Sea
gtgaagatgagcccctgctgtggcggcagtgccaccctgatggcccgcgagatccgcgccgcgatcaaagccgagctggggctgaccgcctcggcgggggtggcgccgaacaagtttctggccaagctcgcctccgagcagcgcaagccggacggcctgttcgtgatccgcccgcaggaggtggatgagttcgtgcgccagctgccgcttggcaagttgcctggcatcggccgcaagaccgcggatcggctggagtcgctcggcctttactcctgtgaagatgcccgccagctcggcaacgaggagctgatcgcccgtttcggcaagctcggggagatgctggccgggcggatctggggccacgacgagcagccagtgcaggcgcagcgggtgcgcaagaccataggggtggagacgacgctcgccagcgacgtgctggatgaggccgcctgctgccaggtgctcagccagctt

SEQ ID NO: 256160 - DNA, 889 bp, Unknown
  Bacterial polypeptide expressing nucleotide sequence isolated from the Sargasso Sea
ttggaagatccaagcataaaaaaagttggtcaaaatattaaatatgattttatcatttttaaaaaatgcggtattgaactgaatcctatagatgacactatgcttctctcttacacgttagatgctggaaataatagacataatatggatattttatctgaattacatctaagccataaaactatctcttacaaagatttagttggaactggaaaaaaacaacttaatttctccgaagtagatataaaatctgcaaccgagtacgcagctgaagatgcagacataactttaagattgtatgagattttatacaaaagagttttagatgaaaaattagaaaaaatttacgagctatttgagaaacccatgataaaaattctctcaaaacttgaaaccagtggaataaaggtggatgaaacatatcttaaaaatctttctaaaaaatttgaggaaagattaataaggattgaaaaagaaatttataaattatcaggcaaaaaatttaatattgggtcaacaaaacaattaggagaaataatttataatgatctaaaaattgcaaaattaaaaaaaacaaaaaaaggcagtttagcaactagtgccaaaatcttagaagatttagcattaacaggtcataaatttccaaacttagttttggaatggcgacaagtttcaaaattgaaaagcacgtacacagacgctttacaagaccatataagtaaacaaacaaaaagagttcacacctcatttttattagcagcaacaaatacaggaaggctagcctccagtgacccaaatttacaaaatatacctataaaatctttagatggaaaagaaataagaaaagcttttgtagaggataaaaacaatattttagtttcagcagact

SEQ ID NO: 256161 - DNA, 870 bp, Unknown
  Bacterial polypeptide expressing nucleotide sequence isolated from the Sargasso Sea
aaatttttaaagaaaattgaagttttagaaaaagaaatttttaaattgtcaaaaaaaacctttaatatagcatcaacgaaacaactaggagagatcatgtacaatgagctcaagattgcatctttaaaaaaaacaaaaaaaggaagttttgctacaagcgcaactgtacttgaggatttagcatataaaggaaataaatttccaagattagtacttgattggagacaggttactaagttaaaaaatacatattcagatgctttacaggagcatataaacccaactactaaaagagttcatacctcatttttattggcagcaaccactacaggtcggttagcttcaagcgatccaaatttacaaaatatacctattaaatctgaagacggcaaagatataagaaaggcatttgtatcagataaaaatcataaattaatttctgcagattataatcagattgaaatgagaatattgtcagatcttgcagatgtgaaagaactaaagaaagcattttataataatgaagacattcattcattaactgcaagccaagtctttaatgttgatattaaaaaagtaaatcaagatatgagaagaaaagcaaaggcaataaattttggaataatttatggtatatcacaatatggactcgcaaaacaaattaacgtctcaaattctgaggcagaagaatttttaaactcttattttttaaagtttccagaaataaaagattatatgaattcaacaattaaattttgtagaaaaagtggctatgttcaaaatatatttggacggagaacttatttaactggaattaatgataaaaattttaatgtaagaaattttcaagagcgagcagctataaatgct

SEQ ID NO: 256162 - DNA, 209 bp, Unknown
  Bacterial polypeptide expressing nucleotide sequence isolated from the Sargasso Sea
attgaataaaataatccgaaagattatccacattgacatggacgcgtactacgcttctgtagagcagttggataacccagagcttcggggtaaaccggttgcggttggtggcgggaaaaaaaggggcgttgttgctgcggcctcctatgaagccagggagtttggtgtccgatccgcaatgccctctgtgattgccttgaagaggtgtg

SEQ ID NO: 256163 - DNA, 779 bp, Unknown
  Bacterial polypeptide expressing nucleotide sequence isolated from the Sargasso Sea
aatgaatactcctgcaaaaaaaatttttttgatagatggctcctcttatttatacagagcctttcatgctatgccgcctctaacaacttcaactggcctcccaacaggcgcagtcaaaggcgttacaaatatgttgcgtaacttacgcaatgagaatcctgattcatactatctttcagtttttgatgccaaggggaaaaactttcgtcacgatatttataaagactacaaagctaatcgtcctcctatgcctgaggatttaagagagcagctttctccactaaaagaaatatgtaatgcaatgggaatgccggttattgaggttccaggagtagaagctgacgatgttcttgcaaccttagctttgatgggttcccagcaaggcatgcctatgatcatatcttccttggacaaagaccttatgcaactggtcgaggatccactagtaaagatgatgaataccatgaacaatcaaatttatgatgttgcaggagttaaaaaaaagtttggtgttcatcctaaccaaataattgattatcttgctcttgttggagatgcttcagacaatattcctggtgtgcccaaagtaggacctaaaactgctgttaaatggctaactgaatttaagaccttgaagggcattattgaaatttcagactcattgacaggagttgtagggcagaattttagagactcaattccagatttagacagaaatgttgagcttgtaactttaaaaaaagatgttgatttaaaggtttcttttgaggatctgctta

SEQ ID NO: 256164 - DNA, 589 bp, Unknown
  Bacterial polypeptide expressing nucleotide sequence isolated from the Sargasso Sea
ccaaatatttaatattgatattaaaaaagttaatcaagatcacagacgaaaggctaaggcaattaattttggaattatttatggaatttcacaatatggattagctaagcaaattaacgtctctaattatgaagcggaggaatttttgaattcatattttgccaagtttccagaaattaaagtttatatggataatacaattaaattttgtaggaaaagtggatatgttaataatatttttggaagaagatcccattttaatggaataaacgacaaaaactttaacgtcagaaattttcaagaacgtgccgcaattaatgctcccattcaaggttctgcttctgaagtaatgagattggcaatgataagattagataagaaattatcagagcaaaaaaatttaaattcaaaaatgctgttgcaaattcatgatgaattaatttttgaaattccaaaaaaagatgaaaaagtaatgattaaattaattaataaagaaatgactagtgtcgctcagagtgactatcattccttttcaactcctttaacagttgatattaatgttggagataattggggtatgttacattaa

SEQ ID NO: 256165 - DNA, 604 bp, Unknown
  Bacterial polypeptide expressing nucleotide sequence isolated from the Sargasso Sea
tttaatcacggcttttgaaaacggcgaagatattcactcggcgactgctaaggaagtgtttggttcagccgatgatcaagctaggcgaagtgcaaaagccataaattttgggctcatttatggaatgtcagcattcgggctaggcaaggctctgggagtgactcgcccagaagcagctgattatattgcttcttattttggtaagtaccctggtgtaaaaatatacatggatgagatgaaagccaaggctaaagatcagggttatgtggagacagcttttggcagaaggctttatttacctggtattcattctggcagaacgcgcatggcagcagagcgagcagctatcaatgctccgatgcaggggactgctgcagacattatgaaattagctatgatcaacatgcatgactatataaaaggtacaggtaaagatattcatctgattttacaggtacatgatgaagttatcgttgaatgcccagaaaaagatactaagacaacgttaaatgctttagagcaaatcatgaccgacgtcaccaaattatccgttcccttagtggttgaaagcggcgttgcaaacaactggggcaaagcccactaa

SEQ ID NO: 256166 - DNA, 736 bp, Unknown
  Bacterial polypeptide expressing nucleotide sequence isolated from the Sargasso Sea
tatgaagatatcaattgatagaggtatacttctaaaagcccttaatcatgttcaaagtgttgttgaaagacgtaataccatacccattttgtcaaatgttaagattgatgctaatgagaagaatctctctcttgttgcaactgacttagacttagagattattgagtctattgatgctaatgtcgcaggttcaggttctacaactgtatctgctcatactttatatgatattgtcagaaaaatccctgaaggctcaatgattgaaatggagttaaatagtaatgaccagatggaaataaaatctgggcaatctaattttgatttaccttgcttaccagatgaagattttccagaaatgtcatcgggagaaatgccgtgtggttttagtatcgactcaggtaatttagcaagacttattgataaagcaaagtttgcaatttcaacagaagaaactagatattacttaaatggaattttccttcattcagttgaaaacgaattaagatcagtagctactgatggtcatagattggcatgtatcaaatcagacttgccagcaggcgcagaagacattcccagcataattataccaaggaagactgttggagaagtaagaaagcttatagaggactcttctggaacattagatataaaagtctcagatacaaaaatacaatttacttttaatgatattcaattgacctcaaaattaattgatggaactttccctgattat

SEQ ID NO: 256167 - DNA, 615 bp, Unknown
  Bacterial polypeptide expressing nucleotide sequence isolated from the Sargasso Sea
aggatgtacactctttaacagcaagtcaagtttttaatgttgacacaaaaaaagttaatcaagatatgagaagaaaagcaaaagctataaattttggaataatatatggaatttcgcaatatgggcttgcgaaacaaataaatgtttctaacaatgaggcagaagaatttttaaatgcttattttttaaaatttcctgaaataaaagaatatatgaattctacaattaaattttgtagaaaaagtggatatgttcaaaatatctttgggagaagaacttatttatcaggtataaacgataaaaattttaatataagaaattttcaagagcgagctgcaattaatgctcctattcaaggatcagcatcagaaattatgagaatagccatgattagaatacaaaataaatttgacgagataaaaaataataagtcgagaatgttactacaaattcacgatgagttaatattcgaatcctctgaagaagatttaaagagtattgtaaaattaatagaaaaagaaatgacaagtgttaaagatagtgaatttcactctttttcaatacctttatctatagatattaattttggtgaaaattggggcatgcttcattaat

SEQ ID NO: 256168 - DNA, 874 bp, Unknown
  Bacterial polypeptide expressing nucleotide sequence isolated from the Sargasso Sea
ggagcgctacatttaagaacaactgatttagatattgaagttgttgataaagttatagctaatgtagaacaagagggaaccacaacagtaggagcacacacactttatgagattgttcgtaaattaccggacggatgttccattcagctaatgtcggacaacgtgtcttctagactagaggtattggctggtaggtctcgtttttctttagcaaccttaccgagagatgattttcccgtgatggcaagctcggaatatgaatgcaatttttcaattgattcccaaattttgcggagattgtttgataaagcaaaatttgctatgtccactgaggaaacaagatattatttaaatggtgtctattttcatattgctgaaatcgattcaaagaaatttttgagaacagttgcgactgatgggcatcggttagcacaaattgacggtatgccgccggaaaattcagaaactatgcctggaataattatacctcggaaaaccgtaagtgaattgcgaattattttggaaagtaatgataatgaaattgccgtttcagtttctgaaactaaggtcagatttgctacttcagagatgacactgacttccaaggtcatagatggaactttccctgattatactcgtgtcataccagtgggaaatcacaaaagattagaagttgatgctgctagtttttcccaatctgttgatagggtatcaaccatatcttctgaacgcgctcgagctgtaaagttgaccttaacaaataataagctgatactttcagttaattcaccagaaagtggagcggctaatgaagagcttccggtgaattatgatgatgatagtttggaaattggatttaacgctaaatatttgc

SEQ ID NO: 256169 - DNA, 814 bp, Unknown
  Bacterial polypeptide expressing nucleotide sequence isolated from the Sargasso Sea
ttattatattcaagacttcgtgaagagaatctttttaacatttatgagatatttgaaaaaccattaattaaaatacttgcaaaaatggaaatttttggaattaaaattgatcacaaatttttatctatactatcaaaaaaatttgataataaaataaaaatattagagaaagaaatttttaaaatttccaaaaaagaattcaaaattggatcaactaaacaacttggtgaaattatgtataatcagttaaaaattgctagtttaaaaaaaacaaaaaaaggaagttttgcaactagtgcttcagtacttgaggatcttgcatttaaaggtaataaatttccacagttaattttagactggagacaaatatctaaacttaaaaacacttactctgacacacttccagaatttataaatccaaaaaccgatagagttcatacctcatttttattggctgcaactacaacaggaagattagcttctagtgaccctaatttgcaaaacatacctataaaaacagaagacggtaaagaaataagaaagtcatttatagctgaaaaaggcaacatattaatttcagcagattacaatcaaatagaaatgcgaatacttgctgatattgcgaatgttaaacagttaaaaaaagcttttaaaaacaatgaggatattcattcactcactgctagccaagtttttaatattgatttaaaaaaaataactagcgaaatgagaagaaaagccaaggctattaattttggaataatttacggcatttctcaatatggattagcaaagcagattatgatttcaaatt

SEQ ID NO: 256170 - DNA, 814 bp, Unknown
  Bacterial polypeptide expressing nucleotide sequence isolated from the Sargasso Sea
aaagattatgcagccgaagatgctgatattacttttagattatataaaaaattttttaaaagcttaaaagaagagaagatgattaatatttatgaagtctttgaaaaaccgatgattaaaattttagcatttatggaaattgagggaataaagattgacagtaaatttcttaaaattttgtcttcaaaatttgaaaaaaaaattgaaaaaattcagaatgaagtttttaagatatcaaataaagagtttaacatcgcatctccaaaacaattaggtgaaatcttatataatgacctcaaaattgcagatttaaaaaaaactaaaaaaggtggttttgcaacaagtgcttcagttttagaagatcttgcttttaaaggtcataagtttccacaactaattcttgactggagacaagtctctaaattgaaaaatacttattctgactctcttcctgaacatataaatccaaaaactaaaagagtgcatacttcctttttacttgcagctactacaactgggagattggcatcaagtgatccaaatttacaaaatattccaataaaatctgatgatggtaaagatatcagaaaatcttttatagcagaaaaggatcatattttaatttctgcagattataatcaaattgaaatgagaattttagcagatttagccgatgttaaagaattgaaaaaggcatttaaaagaaatgaggatattcactcccttactgctagtcaaatattcaacacagatattaaaaaagttaatcaggatcaaagaagaaaagcaaaggcaattaattttggaataatat

SEQ ID NO: 256171 - DNA, 647 bp, Unknown
  Bacterial polypeptide expressing nucleotide sequence isolated from the Sargasso Sea
aaaagagttaaagaaagcattcaaaaataaagaagacattcattcacttactgcaagtcaagtttttaatacaagtattaacaaagttgattctgatatgagaagaaaagcaaaagctataaactttggaataatttatggcatttcgcaatacgggctagcaaaacaaattggtgtttccaatattgaagcagaggaatttttaaattcatattttttaaaatttccagaaataaaagaatatatggaatctacaattaaattttgtagaaagagtggatatgtaagtaatatttttggaagaagaactcatataacaggaattaatgataagaattttaatataaggaattttcaggagagagcagcaattaatgcacctatacaaggatcagcttcagaaataatgagaatggcaatgataagagtaagtgaaaaattagatgagattaaagaagcaaagtgtaaaatattgctacaaattcacgatgaattaatttttgaagttcagaaagatgacataaaaaaatactctcaaattatacaagaagaaatgtctagtgttaaaaatagcaatctgcactctttttcaataccgttgttagttgatataaatgttggtaataattggggagatcttcattaat

SEQ ID NO: 256172 - DNA, 868 bp, Unknown
  Bacterial polypeptide expressing nucleotide sequence isolated from the Sargasso Sea
aagaagaattattaaagcccttaaaattatttgtaatgatccttctatattaaaaattggtcacaatattaaatatgatttaaggatacttgaaaaatataatgtgaaaatgttctctattgcagatacaatgttgctttcatacgcattagacaatggtgtcactaaacacaacatggatgatttggcatatttacattttcagcattcaaatattaaatataaagaaattgttggatctggcaaaaaagaaattacatttgatttagtagaaattgataaagcacttgattatgctgcagaagacgcacttattacattaaagttatttaattttttaaatggaagagttaaaaaagaaaaaaataattttgtttataatgaaattgatttacctttaattacagttttagcttcaattgaaaaaaatggaataaaagttgatacaaaataccttgctaagcttggaaatgactttgaaaaagaaagtttattattagaaaaaaaaatttataaattagcaggaaaagattttaacattggttccccaaaacaactaggcgaaattttatttattgatcttaaaattgagggagctaaaaaaacaaaatctggaacgtattctactgatgtatctacattatctagtttatctgagcaaggatatgagattgcaagtttaattttagaatggagggaattaacaaaattaaaatctacttacacagactcactacaaagccaagcaacaaaaaataactcaagagtccatacttcttacggactagctaatacacttacaggcagattaagttcaaatgatcctaatcttcaaaatattccaattaggacagaaaaaggtaaaaaa

SEQ ID NO: 256173 - DNA, 636 bp, Unknown
  Bacterial polypeptide expressing nucleotide sequence isolated from the Sargasso Sea
aaaaagcttttttaaataatgatgacgttcattcacttacagcgagccaagtatttggcgttagtataaataaagttgataaggatatgagaagaaaagccaaagcaataaattttggaattatttatggaatatcacaatatggattagcaaaacaaataggcgtaacaaatacggaagcagatgagtttttaaattcttattttttaaagtttccagaaataaaagattatatgtcaaatacaattaaatattgtagaaaaagtggatatgtaaaaaatatttttggaagaaaaacacacgtaattggaattaatgataaaaactttaatataagaaattttcaagaaagagcagcaattaatgctccgatacaaggttctgcatcagagctaatgagattagctatgattagaataagtgatgaaatatcaaaaaagaaaaaaaaaaatttaaaaatgttactccaaattcatgatgagctaatttttgaaactaatgaagacgatattaatacagcaactaaactaattaaagatgcaatgactagtgtaaaagacagtgacttccactcattttccattcctttgcttgtagatattaattcaggtgataattggggtgaacttcattaat

SEQ ID NO: 256174 - DNA, 776 bp, Unknown
  Bacterial polypeptide expressing nucleotide sequence isolated from the Sargasso Sea
aatgagtgaatttatagtttctgccagaaaatacagaccacaaacctttgaaacggttgtcggacaagcttctattacagaaactttaaaaaatgccattaaaaacaatcaccttccacaagccttattattttgcggtccaagaggtgttggtaaaaccacatgtgctagaatacttgctaaaaacatcaatgagtatgaaggaattacagacgaagaagattttgcatataatatttttgaattagatgcagcatccaacaattctgttgatggaataagaagtttaattgatcaagttcggattcctcctcaaattggaaactataaagtttatattatagatgaggttcatatgttgagtcaaaatgcatttaatgcctttttaaaaacacttgaggagccgcccaaacatgccatttttatattggctacaactgaaaaacataaaatcatacctactatattatctagatgtcaaatatttgattttcaaagaataaaggtaaaagatattgccaatcatcttgcagaagtagctaccaaagaagccattactgcaaacccagaagcattgtatttaattgctcaaaaagctgatggagcattgcgtgatgcattgtctatttttgatcaaatggttacatttagtggaaataacattacctacgaaagtgttgttaaaaatcttaatatacttgactatgaatggtattttaaaattgttgatcattcaattaaagaagacatcccatcagttcttgtattgtttcatc

SEQ ID NO: 256175 - DNA, 794 bp, Unknown
  Bacterial polypeptide expressing nucleotide sequence isolated from the Sargasso Sea
taatgaaaaaattaatcaactagagaaagaaatttataaaattgctggcaaaacttttaatataggttcacctaaacagctgggagaaattttatataatgatcttaaaatttctaatttaaaaaaaactaaaaaaggaagcttggcaactagcgctaaagttttagaagatctagctttaaatgggcataaatttccatcacttgttcttgagtggagaggtcttacaaaactaaaaaacacatattctgatgcactccaagatcatattaatagtcgaacaggaagagttcacacctcctttttgttagccgcaactaacactggtagactggcatcaagtgacccaaatttacaaaacattccgataaaaactgaaaacgggagagaaataagaaaagcttttattgctgaaaaaaataataatttgatttctgctgattacaatcaaatcgaaatgagaattttggctgatatggccgatgtaaaagaacttaaaaaagcgtttgtaaataaagatgatattcactcgttaacagctagtcaagtttttaataaatccataaaagacatagatagtgatttaagaagaaaagccaaagcaataaattttggaataatttatggtattacacaatacggacttgcaaaacaaatttctgtatcaaatcaagaagctcaagaatttattgactcttatttcaaaaaatttccagaaataaaagattatatgagtgatactgtgaaaacatgcagaaaaaaaggatatgtatcaaatatatttggaagataga

SEQ ID NO: 256176 - DNA, 728 bp, Unknown
  Bacterial polypeptide expressing nucleotide sequence isolated from the Sargasso Sea
catgagccaagctcccctcgttctggtcgacggttcctcttatctgtaccgcgccttccacgccctgccgccgctgactacttccaagggcatgcccaccggagcggtaaaaggcgtgctgaacatgctcaagagcctgcgcaagcagtacccgaacagccccttcgccgtagtcttcgacgccaagggcggcaccttccgcgacgagctgttcgccgagtacaaggccaatcgcccgtccatgccggacgagttgcgcgtccaggtcgagccgctgcatgccagcgtgcgtgccctcggcctgccgctgctgtgcgtcgaaggcgttgaagccgacgacgtgatcggcaccctggcgcgccaggcggccggggaaaagcgcgacgtggtcatctccaccggcgacaaggacatggcgcagctggtctgcccgcacgttacgctggtcaacaccatgaccggaagtgtctacgacgccgatggcgtaaaggagaaattcggtgtcggccctgagctgatcatcgactacctggccctgatgggcgacaaggtcgacaacattccgggcgtgcctggtgtgggtgaaaaaaccgccctcggcctgctggtcggcgtcggcggtggcctcgacgtgatctacgccaacctcgacaaggtgcccgagctgccgatccgcggcgccaagggcctgccggccaggctcgaggagcaccgcgagatggcctacc

SEQ ID NO: 256177 - DNA, 667 bp, Unknown
  Bacterial polypeptide expressing nucleotide sequence isolated from the Sargasso Sea
aaatataaagaagttgttgggacaggaaaaaatgaaattacttttgataaagtaactattgataacgcaattaattatgctgctgaagattctttattaacattcaggctttttcaaaatctttatcctcgtttaataaaagaaaaggcaaattttgtttatcaaaacatcgatttgcctcttgtggaggtactatcttcaattgaagcaaatggcatagaggtaaataaaaagtttctaacaagtctaagtaatgaatttgaaaatgaaagtaaaaaaattgaacaaaatatttataaactttcaaatgaagagttcaatattggttcacctaaacaactaggagagatattatttgttaatcttaaaatacctggtggtaaaaaaacaaaatcaggcacatattctactgattcttcaactctaaataatttagcctcagatggatttgaaattgcacaacttgttcttgactggagggaattaacaaaacttaagtcgacttatacagatgctttatttagattaactgacggtaaaagtagagttcatacatcatttggtttagctaatacattaacaggtcgattaagttctacagacccaaaccttcaaaatatcccaattagaactgaaaatggaaaaaaaataagaacagcttttgtta

SEQ ID NO: 256178 - DNA, 688 bp, Unknown
  Bacterial polypeptide expressing nucleotide sequence isolated from the Sargasso Sea
aatcaaattgaaatgagaattttagctgacttagcggatgttaaagaattgaagaaagcgtttaataataatcaggatattcattcacttacagctagccaagtttttaatattgatattaaaaaagttaattctgatatgagaagaaaagcaaaagcaataaattttggaataatttatggaatttcacaatatggtcttgcaaaacaaataatggtttcaaatcaagaagcaaaagaatttttaaaatcgtattttcttaagtttcccgaaataaaaagttatatggactcaacaattaaattttgcagaaaaagtggatatgttagtaatatttttggtaggagaagtcatattactgggattaatgataaaaattttaatgttagaaattttcaagaaagagcagcgataaatgcaccaattcaaggttctgcatcagaaatcatgagattagcaatgataaggttaaataaaaaattggaagatataaaacatgatcaatgcaaaatgttacttcaaattcatgatgaattaatttttgaagtttcaagatctgaagaaaagaaagtagctaaaattattaaagatgaaatgacaagtgttaaagatagtgatttgcattcattttcgactcctttaacagtagatttaaatattggagacaattggggcttacttcattaat

SEQ ID NO: 256179 - DNA, 814 bp, Unknown
  Bacterial polypeptide expressing nucleotide sequence isolated from the Sargasso Sea
atggattttcaaccgaacgttattctaatagatggaacctcatacatttatcgagcattccatgcgttgccacctttaactacatcaaccgggaaacctactggagcaactagaggatttgcagcaatgttgaataaattaataaaaacgtatcctgaaataccaatggttatggtctttgatgcaaagggaaaaaattttagaaatgattattatgaaaaatataaagcaaatagacctccaatgcctaatgagcttaaacatcagattgaggatataaaaaaattatgtggactatttaattttacagtccaggaagttgaggatgttgaagcagatgatgttattgctactttagtttctaatttttctgaagataaaattttaatatcttcaccagacaaagatttaactcagctagtgaataaaaatgtgattcaacataattcgatgagtgatattttctttgatgaaaatggtgttaaagagaaatttggagttttcccaaataaagtcgctgaattactagctttagtaggagataaatcagataacattccaggaattacaaaagtgggagaaaaaactgctgctaaatggcttaatgaatatggaagtttagatgaagttataaaaaatgctgaaaatatcacgggaaaagttggtgaaaatcttagagaggaaaaaaatgttttacagagaaatttctttttggttagcttaaaaaatgatattaatttagggcttcaaaaaagtgacatctcaactccaaaaccaaatagtaatgggctacaagaattctataggggtttag

SEQ ID NO: 256180 - DNA, 850 bp, Unknown
  Bacterial polypeptide expressing nucleotide sequence isolated from the Sargasso Sea
aaaaattcagttttaaaaaaacttaaaccgattttagaggacgcaagtattaaaaaagttggtcaaaatattaaatacgattttatcatatttaaaaatgaaggtatcgaattaagtccagtagatgacaccatgttgctttcgtatacattagatgctggaaacaacagacataatatgaatactttatctgaattacatctaggacataaatctatatcctataaagaaatagttggcacaggaaaaaaacaattaaattttgcagaagtagatctgaaatctgctacagaatatgcagctgaagatgcagacgtgacttataggttatatgagcttttatctgatagggtggctaaggaaaatctggaaaaaatttatgaaatttttgaaaaaccaatgataaaaatcttatcaaagttggaaactaacggaataaaggtagatgatatctatttaaaaaaactttctaaaaagtttgaagaaagattaataaaaattgaaaagcaaatttataaaataacaggaaaagaatttaacattggatcgccaaaacagttaggagaaattatctataatgaattaaagatagcaaaattaaaaaaaacaaaaaaggggagtttagctacaagtgctaaaatcttagaggatttggctatgacaggacataaatttccaaacctagttttagaatggcgtcaagtttcaaaattgaaaagtacctataccgacgctttgcaagaccatattagtaaaaaaaccaagagagttcatacctctttcttattggcagctactaacaccggtaggcttgcttcgagtgatcctaacttacaaaatattcctatta

SEQ ID NO: 256181 - DNA, 871 bp, Unknown
  Bacterial polypeptide expressing nucleotide sequence isolated from the Sargasso Sea
accattccgatcctgtccaacgtcctgctgagcgcgggccgcgaccgactggccttcgccgccaccgacctggacatggagatggtcgatgaggccgaggcccaggttcaggtcgagggtcagatcacggcccccgcccacaccctgtacgaaatcgtgcgcaagctgccggaaggcgccgaggtctcgctgctctattcgggcgacgatccccgcctggtcgtctcggccggccggtcgcgcttcaacctgccggtcctgccggccggcgacttccccgtcatgtccaccgacagcgccggcgcctcctatgtcctgcccaaggaggatctggcccgcctgatcgacaagacccggttcgcggtctcgaccgaggaaacccgctactatctgaacggcctctatcttcacacggtcgccgaacagggcatccccctgctgcgcgccgtcgccaccgacggccaccgcctggccctggccgagaccccggcgcccgagggcgcggccggcggccctggcgtcatcgtgccgcgcaagacggtggaccaggtccgccgcctgctggacgacgccggcggcgcggtggaggtcaccgtctcggcccagaaaatccgcttccagatgggcgaggcgtccctgacgtccaaggtcatcgacggcgccttccccgactatctgcgcgtgatcccacgcggcaacgacaaacaggccgacatcgacaacgccctgttcgccaaggccgtcgaccgcgtcgccaccatctcggccgagaagagccgttcggtgaaactggccttcgacaacgaccgggtgaagctgaccgtgcgcaacatggaagccggccaggccgaggaagaggtcgagatcggct

SEQ ID NO: 256182 - DNA, 322 bp, Unknown
  Bacterial polypeptide expressing nucleotide sequence isolated from the Sargasso Sea
tctggagatcgaccttgatgtggcccgccgcggcggcatggaggcgcagcaacttagggccgccgccaatgctccgattcagggatcgagtgccgacatcatcaaagtggcgatggtgcagctgcaagcagccctacacaaccaagggcttccagctcagctgctgctccaggtgcacgatgaactggtgctggaagtcgcaccagacgccctggagaccacccgaaagttggtggtgcagaccatggagaacgccgtgaaactcagcgtgcccttggtggcagaaacgggagccggagcgaactggatggaagcgaaatag

SEQ ID NO: 256183 - DNA, 772 bp, Unknown
  Bacterial polypeptide expressing nucleotide sequence isolated from the Sargasso Sea
gcgctgatcaacgcgctggacaacaaccgcctgcaccacgcctatctgttcaccggtacgcgcggtgtcggtaagaccacgatcgcgcgtattctggccaagtgtctgaactgtgagaccggcgtcagttcggaaccctgtggtaactgctcatcctgtctggaaattgaccaggggcgttttgttgacctgatcgaggtcgacgccgccagccgcaccaaggttgaagacacccgcgagctgctggaaaacgtgcagtacgcacctacccgtgggcgcttcaaggtctacctgatcgacgaagtgcacatgctgtccagtcacagtttcaatgcactgctgaaaaccctcgaagagccgccggaacacgtcaagtttctgctggccaccactgatccgcagaaactgccggttaccattctctcgcgctgcctgcagttctcgctcaagaacatgccgccggaaaaggtggtcgagcacctgcagcacgtactcaccgacgagcagattggctttgatcaggagtcgctgtggcttctgggacgcgcggccgatggctcgatgcgtgacgcgctgagtctgaccgaccaggccattgcctttggcaacggccagttgcaggtggctgaagtacgcaacatgctgggcactatcgatcatggccaggtgttttctgttctcgaagcgctgattgccggtgatgcgcgggccctcatggcggcggtggccgagttggcggagcagggcgcggacttttccggcgtgctggccg

SEQ ID NO: 256184 - DNA, 769 bp, Unknown
  Bacterial polypeptide expressing nucleotide sequence isolated from the Sargasso Sea
ttctgcggatgactttcctgagcttgaagttcatgaagatcaagaacttgtcaaagtaagctctagcaacctaaagagaatattggctaaaacttctttttcgatggcatcacaagacgttcgttattatctaaatggcttgcttttagagctttcaggaaacgaaattaagggtgttgctacagacggacacaggctagctctttcttcatatgaaggcccagataataaccccgacatgagaaatattattcccagaaaagcagtattagaattgacaaaactacttccagcagatgatttagatattgacttattggtaggacccacttatttaggcattaaggctgaaaatttaaccttttcctctaagcttatagatggaaagtaccctgattacgaaaaggtttttccttctggggagtctagacctttattggttggcaaagaaactttgcagtctgccttatctagagcttcagtactgtctaatgaaaaatacaggggggtaagatttgagctttcgaaagacaccttaaggcttacagccaacaatcctgaacaagaatcagcagaggaagtattagaggttgattaccagggtgccgacctagaggttggcttcaatataggctatcttatcgatgtgcttggttctcttgaagatgagacagttaagttcgaattttacggagaagattcgagctgcgttattaaagagccaagctcagaacaagaggtttatgtaatcatgccaatgaggctttaa

SEQ ID NO: 256185 - DNA, 920 bp, Unknown
  Bacterial polypeptide expressing nucleotide sequence isolated from the Sargasso Sea
gtattgcgcgccgaagatgggcaattgtcactgacagcaacggatatggatatggatattgccaccgaggtcggctgcgctgttgtaacatctggcactgttacaacgtcagcacacatgctgtacgacattgcgcgcaagctgccggacggtgcagaagtggaattaaccgtcgcagatgggcatgtcaacattatcgctggtcggtctagctttcgtttgccaactctgccagttgaagattttccggcgattagtagtaataatttgccggtgaatttcaatttgacagcagcggatctgcgcgatctggttgatactacacgttttgccatttccaacgaagaaacccgctattatctaaacggtatttaccttcataaagctgaagacggtaatttgtgtgcagtggctacagatggtcatcgcctcgcgctgacccgccagtcattaccaccaggtgcatcacaaatgccatctataattttgcctcgcaaagcagtcagtgaattgcgcaagcttcttgatgattatgatggtgatgtgtcaattggtttgtcagaaacacgagttaaatttggttttggcgcagtgcgtctgacaagtaagttaattgatggaacctttcctgattatactcgagtaataccgggaagtaatgaccggatcatgcaggttgatgcatcttctttttccgcggccgttgaccgagtgtcgaccatttcctcagaaaaatcacggtcggtaaaaatgggactaaaagctggtttattgactttatcagcaagcaatactgatgcgtcaagtgcgatggaagaacttgaagtcagctataatgggccggaaatggatatcggctttaatgctcgctatcttttggacattgccggtcaggtgaataacgacattgttgaatttgc

SEQ ID NO: 256186 - DNA, 601 bp, Unknown
  Bacterial polypeptide expressing nucleotide sequence isolated from the Sargasso Sea
gttgtctacactttacgctttcgactcgatgtctgtgctttatcgcggatatttcgcaatgatccggaatccgcttatcaattccaaaggaatcaacacctccgggatacgtaccgttttgatgcagttggtaaaaatcattgaagaagtcctgccgcaataccttgcagtcgcatccgatgggcctgaagacaccttccgccacatacgatatccggaatacaaggcaactcgtgaaaaaatgccagaagatttggtggagcaacttccctatttacctcgagcgatgcaagcgctcaaacttccctatttgctgatccccgggtatgaggcagacgacatcatcggcactttgatgagcttatgccttaacaacaacattcgtggggttatggtcaccagcgacaaggattacctccaacttgttagtgaaacaaccgaaatgctgaatcataaaaatgaaatcgtagggttgagcggggttcaggaacgtttcggttgtcgtcctgatcaagtaatcgaggtgcttgggttaatgggtgacagttcagacaatatccccggagtccgtggtgtcggggaaagaccgcgatcaagctga

SEQ ID NO: 256187 - DNA, 592 bp, Unknown
  Bacterial polypeptide expressing nucleotide sequence isolated from the Sargasso Sea
gttcattcagctaccgcttcagaaacatttaatatttcccttgaagaggttacaccagagcatcgaagaagcgctaaagccattaactttggattaatctatggcatgtctgcttttggattaaccaggcagcttgggattccacggcatgaagcgcaagcttatcttgatacatactttgagagatacacgggagttagaaagtatatggatactacaaaagaacttgctaagaaaaatctctttgtagaaactattttaggaagaaagctccatgtggctgctattaatgattcgaatggactaagacgtcaagctgctgaaagagccgctattaatgccccattacagggctctgcagcagatattattaaaaaagcaatgattgatgtagaccaatggattggaaaaaataactcagatataaaaatgattatgcaggttcatgacgaactaatttttgaggtaaaaaaaggtttcgctgatgaagcactcaaaaatattataagccttatggaaggctcagttaaattagacatccctttaatagtggatgcaaacacaggagcaaattggaatgaagctcattaat

SEQ ID NO: 256188 - DNA, 931 bp, Unknown
  Bacterial polypeptide expressing nucleotide sequence isolated from the Sargasso Sea
agaccaaggggcaaacccttgcggtcaatgtaacacctgtaaagagatagagcaggggaactacgttgattgtttagagattgacgctgcatcaagaaccaaagttgaggatactcgcgagcttcttgataacgtgcaatacaaacccactcgcgggcgttacaaagtgtaccttatcgatgaggtacacatgctttcaaaacacagctttaatgcgctgttaaaaacgctggaagagccacctccacacgttaagttcttactggcgaccacggatcctcaaaagcttccgataaccatcttatcccgttgcttgcagtttaacttgaaagccatgtctcgggagcagattgttggacagctgcggcatattttagagcatgaacagctgccttttgagccacaagcgctagcgcttttggcaagagccgcccagggcagtatgcgtgatgcgctgagtttaactgaccaagcgattgcacagggtggaaatcaagtgttggcatcggtggtaaccgatatgctggggctgatggataagaaccagttgcttaaagtggttcatgctgtggtaagtaaaagtcctgctgatgtattgcagttggtcaatgacatcgcagagcaagcccccgattatgacaacgtacacagcgaattggctagcctgctgcaccaaatagcattaacgcaatgggtgcctgaagcatgtaagctagaaaccacatcggctaaagcgatatttcaattagcgaaaactattccagctgagcaagtgcagctgctttatcagattgcactgcaaggaagaaaagacttaccgtttgctgcggatggaaaaagtgcgtttgaaatgacattgatgcgaatgatgtcgtttgctccaaataccctcatcgacgacacggcaagtgaaatgaaaacgggaggagtg

SEQ ID NO: 256189 - DNA, 304 bp, Unknown
  Bacterial polypeptide expressing nucleotide sequence isolated from the Sargasso Sea
caattctcaaaataatatgcttagaagcagttctgaaagaaatgcaataaacgctcctattcagggtagtgctgctgatattatcaaaattgctatgataaatattaattctgagttcaaaaaacagtctttaaaatcaaagatgcttcttcaagttcatgatgagcttgtttttgatgtacataattctgaaaaagatcagattcaagatatcgttaaaaccactatggaatctgctgttaagctaaaagtacctctaaaaattgacctagaatttggtaaaaactggttagaagcacattaa

SEQ ID NO: 256190 - DNA, 628 bp, Unknown
  Bacterial polypeptide expressing nucleotide sequence isolated from the Sargasso Sea
aaaaacctcacaaatgcttttaataataatattgatgttcattcttcaaccgctgcagaggtttttagcatagcaattgaagaggtaaataaagatcaaagaaggagcgccaaagctataaattttggtttaatgtacggcatgtctgcttttggactcacaagacagctgggaattacaagagctgaagcgcaagcatatttagatacttattttgcaagatataccggggtaagagattacatggataatattaaagccaaagcgaaggaagatatgtttgttgagaccattatgggaagacgtctttatcttaatgaaataaatgccgcaaatggattaagaagacaggctgcagagagagcagctattaatgctccactacagggatctgcagcagacataattaaaaaggcaatgctcgatatcgataaacttattttaaatgaaatgcccgatgtaaaaatgataatgcaggttcatgacgaactagtgtttgaatgcccaaaagaaaacgctgacttagtgatggagaaaatgaaagaaactatggagcaaaccgtagaactaaaaatacctttgattgccgaagcagctgttggctcaaactggaatgaagcgcattagt

SEQ ID NO: 256191 - DNA, 928 bp, Unknown
  Bacterial polypeptide expressing nucleotide sequence isolated from the Sargasso Sea
ttgaaacaaggtaaaatcacacttgcagctcatactctttacgatattgtaagaaaacttcccgatggagctgagattaaaattgaacttgttgatttaaatgtgcaagtttcagcgggtaaatctaaatttattcttccaactttatcggttgacgattttcctgttatgacagaaattgaaaagggtaatgaattttccatagaatccgttgatcttgcaaatttgattgataacactaagtttgcgatttcttcggaagaaactagatattacttaaatggtattttttttcatgttcctgaactaaacaaagataagttaagagcagtagcaacggacggacatcgtttagctcaagctgaaattccacttcctgaaggtgctgaaactatgcctggtataattttgccaaaaaaagcagttggagaaataagaaaactgactgatggaaccgatggtaaaattaaaattattatttccagtactaaagcaaaatttatttttccaaattccgttttaacaactaaattgatagatggttcatttccagattatcaaagggttatacctaaagaaaatctaaataaattagtagtttttaactcggatttttcaaaagctattgatcgagtttctactgtatctatggaaaaatcaagagctgttaagctttcgttaaataaaaatttattatcgttaaatgttaatagtcatgatttaggcaatgcatctgaggatttagaaatagactataattatgataatttagatataggatttaatgcaaaatatcttctagatatagcatcacaaattcaagggaaagaaatagaaattttattatcagattcagcttcgcccgccttgattacagatccagaccaagatggtgttatttttgtcttaatgcctatgagagtttaat

SEQ ID NO: 256192 - DNA, 247 bp, Unknown
  Bacterial polypeptide expressing nucleotide sequence isolated from the Sargasso Sea
gttgaaacaattttcaaaagaaaaaattaatattagaggaataacagataagaattttgccttaagaggttttgcagaaagacaagccattaatgccccaatacaaggtagcgcagcagatataattaaactagccatgattgagatacataatgaaattaaaatgaaaaatatcgatgcaaaaatgttattacaagtacacgatgagcttatttttgaagttgaaataaaaagcaagatgatttaa

SEQ ID NO: 256193 - DNA, 550 bp, Unknown
  Bacterial polypeptide expressing nucleotide sequence isolated from the Sargasso Sea
catgagacgaaaagcaaaagcaattaattttggaataatttatggcatatcacagtatggcttagcaaaacaaataggagtttcaaatacagaggctgaagaatttttaaattcatattttttaaaatttcctgaaattaaagcatatatgaattcaacaattagtttttgtagaaaaactggatttgtaaataatatatttggacgaagaacacacttaaaaggaatcaacgataaaaatttcaacattagaaactttcaagaaagagctgcaattaatgctccaatacaaggatctgcatcagaaattatgagacttgcaatgataagactcaataatagactccaaaatgaaaatacatctaattgtaagatgttattacaaattcatgatgaattaatatttgaagttttaaaggataacgctcacaaaatgagtaaaatcattagagacgaaatgactagcgttaaagacagtgaaacccactctttttcgattcctttactagtagatgttaatattggagataattggggccttcttcattaa

SEQ ID NO: 256194 - DNA, 826 bp, Unknown
  Bacterial polypeptide expressing nucleotide sequence isolated from the Sargasso Sea
aaatgtgaaaaaggagtcagctcaaaaccttgtaatgaatgcaatgcctgtattgccgtcgacgagggacgttttgtcgatttaattgaagttgatgctgcctcacgtacgggagttgatgatactcgagacttattagaaaacgttgcattttctccaactattggaagatacaaggtctacttaattgatgaagttcacatgttttctaagagtagttttgctgcattattaaagacactcgaagaaccaccagaacatgttaaatttgtgtttgcaacgacagagaataaaaaaatcccagttacaattttatcgcgttgtttacagtttaacttaaaccatttgacagccgatcaaattagtaaacaaatagaaatgatcttaaatagcgagaatattacttatgataaaccatcggtggaactaattgcgcatagcgcctatggcagtatgagggatgctttaagtctattagaccaagcaatagcttatggtaatggcgagcttacagaatcagaagtacgcatgttaatgggcaccattgataatcaagatttgtatagccttgtacaatcattagttaattcagattctgagactcttttaaacaccgtggaaaaaatttcgatgcaaaatccagattatgattttttattatctgaattattaagtttgttgcaaaaaatagcgactgttcaattattaccggataactctgaaaatatactaaaaaaagataaagctgtagttgaattcgctggttcaatgacaaaagaagaggttcaactttattatcagattggcatgatgggtcgtaaagatc

SEQ ID NO: 256195 - DNA, 866 bp, Unknown
  Bacterial polypeptide expressing nucleotide sequence isolated from the Sargasso Sea
aaaaacaacctttacatttgatcaagtagaaattcaaaaggccaaagaatatgctgcagaagatgcagatgtaacattaaggttatataaaattttaaagaaaaatctaataaatgaaaaacttgaaaatatttatgaattatttgaaaaaccattaattgaaatattagcaaatatggaaattcaaggcgtgaagatagataataaatttttaagtgttttatcaaaaaaatttgaaaaaaaaatttcattaatcgaggataaaatttacaaaatttcaaaaaaaaaatttaatattggttccacaaaacagcttggagaaataatgtatgaggatttgaagatagcgtcacttaaaaaaaccaaaaaaggaagctatgcgacaagtgcatcagttttagaggacttagcttttaaaggaaatcaatttccaaaacttgtcttagagtggagacaaatttctaaattaaaaaatacatactcagactctttacaagaacatattaacccaaaaacaaaaagagttcacacatcctttttgttagctgcaacaacaacagggagattggcctcaagcgatccaaatttacaaaatattccaattaaaactgaggatggaaaagatattagaaaatcatttgtatctgaaaaaggaaatattcttatttcggctgattataaccaaattgagatgagaattttagctgatttagcggatgtaaaagaattaaaaaaagcatttaacgaccaacaagatatccactcacttactgctagccaggtatttaatgtagatattagcaaaataaattctgatatgaggaggaaggcaaaagcaattaattttggaattatttacggaattt

SEQ ID NO: 256196 - DNA, 550 bp, Unknown
  Bacterial polypeptide expressing nucleotide sequence isolated from the Sargasso Sea
taaaagaaggaaagcaaaagcaattaattttggtattatttatggaatttctcaatatggattagcaaaacaaataaatgtcacaaatacagaggcagaggaatttctaaactcttattttttaaaatttcctgaaataaaagagtatatgaattctactataaaattttgtaggaaaagtggatatgtaaataatatatttggaagaagaactcatattactggaatcaatgataaaaattttaatgtacgaaattttcaagagagagctgctatcaatgcacccattcaaggttctgcctcagagataatgaggttagctatgattagagttaataataaattaaaggatatgaataataatgatcttaggttgttacttcaaattcacgatgaattaatttttgaggttcctaataaaaatgtagacaaaatttccaaagtcatcaaggatgaaatgacaagtgttattaatagcgatttgcacactttttcaattcctcttttggtagacttaaatattggaaataattggggcctgcttcactaa

SEQ ID NO: 256197 - DNA, 703 bp, Unknown
  Bacterial polypeptide expressing nucleotide sequence isolated from the Sargasso Sea
atggatactgttgattcatacattttacatgcagatttggatgcattttacgcctctgtagagcaaattttaaatccagaactacgaaataagccagtggtagtaggaggtctccctgaaaacagaggagtagtagcaactgcttcatatgaagcaagagcttttggtatacattctgcgatgtctatgagacacgcaatccaattgtgcccggatgcaatcattgttcctccaaacttccctgaatatcgatcttattcatcaagagtaatgtcaatactcaagcaatattcagagatactagaaaatgtttctttggacgaagcttatatagacatttctgataatgtatcgcaaccaagcgacgctctaaacatcggactcgacatcaaaaatcaggttatatcagaaactgggttaatcatttcaattggcatcagttcaaacaaaaccaccagtaaaatcgcgtctgacctgaacaaaccagatggactagtatttattcccacaggagaagaactcaaatttacacatgaattgagtgttaacaaaattcccggaataggacctaagttcactcaaaaacttaatcaattaggcataaacactataggacaactatctcaacaacctacggatttttttaaacgtatatttggcaatcaaggacaaaaaataaaatctaaatctataggtacttaca

SEQ ID NO: 256198 - DNA, 427 bp, Unknown
  Bacterial polypeptide expressing nucleotide sequence isolated from the Sargasso Sea
ttaccggatggttctgaaatcattgtaagcgctaatgaaaataatttgattttatcatgtggtaaatctgagtttatgcttccaactttgccttttgatgattatccgataatgactgaaatatcaggtggtaagtctttttctatcagctcagttgatttacaaaatcttatagataatacgaagtttgccatttctttagaggaaacacgatattatttgaatggtatatttttgcaccaaaacgataaccttcttagagctgttgctacagatgggcatagattagctcaagctgaaataaatttacctactggcgctgaaggaatgccttcaatcattattcctagaaaaaccgttggagagttaagaaaattgaaagatgatacagaggctgacataccaataaccgtttctagtaacaaaa

SEQ ID NO: 256199 - DNA, 777 bp, Unknown
  Bacterial polypeptide expressing nucleotide sequence isolated from the Sargasso Sea
aaaaaaaaatgaaaaatttggagaaagaagtatttaaaatttctaaaaaagaattcaatattgcatcgccaaaacaattaggagaaataatttataatgatctcaaaattgcaggactaaaaaaaacaaaaaagggaagttttgcaacaagtgcaagtgttttagaggatttagcttttaaaggacacaagtttccccaattaattctagattggagacaagtatcaaaattaaaaaatacctattcagactccctacctgaacatattaattcaaaaactaaaagagttcatacatcatttcttttagcagcgactacgactggtagacttgcatctagtgatccgaatttacaaaatattccaataaaaactgaagatggaaaagatattagaaaagcattcaaagctaaaaaaaatcatttattaatttctgcagattataatcaaattgagatgagaattttagctgatcttgcaaatgtgaaggaacttaaaaaagctttcaaaaataacgatgacattcattctttaacagctagtcagatatttaatattgatattaaaaaggtagatgaagatcaaagaagaaaagctaaggcaattaattttggaattatatatggaatttctcaatatggtctggcaaaacaaataaatgtatctaattatgaagcagaacaatttttagatgcatattttgctaaatttcctgaaatcaaaacttatatggatgatacaattaaattttgtagaaaaagtgggatatgtaagtaat

SEQ ID NO: 256200 - DNA, 658 bp, Unknown
  Bacterial polypeptide expressing nucleotide sequence isolated from the Sargasso Sea
atgacaaaaaatacaaatagagttttagcattaaaatatagaccgaaaaattttaaagaattaataggtcaaaatattatggtagaaactataacgaattctataaaattaaataaattaccaaatgcatatttgttaaccggtattcgtggggttggaaaaactacaacagcaaggttaattgcaaaagcattaaattgtaataaaaattttcttaaagaagaagattgtctttgcagtcattgtgaagaaattgctaactcaaagcatttagatgtattggaaatggacgctgcatcaaaaacaggaatagacgatgtaagagaattaatagactcatccaggtataatccaaccagcgcaaaatataaaatatttataatagatgaagttcatatgctttcaaaacaagcatttaatggacttctaaaaactttagaagaaccgccaccccatttaaaatttatttttgcaacaacagaagtgaagaaaattcctgtaactattatatcaagatgtcagcgatttgatttacatagagtgccagttcaaattttattagaaaatttaaaaaaaatttcaaaaaaagaaaacggaaagatatccgaagcagcattaaagttgatagcaaaggcttcggaaggatccgtaagagatt

SEQ ID NO: 256201 - DNA, 818 bp, Unknown
  Bacterial polypeptide expressing nucleotide sequence isolated from the Sargasso Sea
tgatacaatgttaatgtcttatgttttaaacagcacggccactcgccatggaatggataggcttgcggattattatttaaattacactacaacaaaatatacagatgttactggaacagcatcaaaacaaattagtttttctgaagtaaggctagaagttgcaactgactatgcatctgaagatgctgatataactttaagattatataacgtactagcaccgatgcttaaagataaacccactcaagaaaaattacttcatgatattgaataccctttagttcatgttcttgctagggtagaacaaaacggagcaaaaatagataagaacaagttatctaagcattctaaagagttaagtaagaaaattgatgagctttcatctcaagcctttaagatcgcgggtgaagaatttaatttagattcaccaaaacaattacttgaaatactttatgagaaacaagggttaccagttctaaagaagacaccaaaaggacaaccttcaactaacgaagatactttgcaacgactttctgaagaatatgagttgccaaagattatcttgcaatacaggacattggcaaaattaaaatcgacttatactgatagcctaataaatatagagaatcctaaaactgagagaattcatacttcctaccagcaagcagtgacctctactggaagactgtcatctacggagcctaatttacaaaatattccaattaaaacagctgaaggaagaagaattagagaggcttttgtgcctgaaaaaggcaatgttttaatttcagccgaattattctcaaattggaattaag

SEQ ID NO: 256202 - DNA, 862 bp, Unknown
  Bacterial polypeptide expressing nucleotide sequence isolated from the Sargasso Sea
tacgtcgacgacgacgagggcgaccagcggcggggccccaaccagacgggccgcaagaaggcggcctacgcgggcgggctggtgctcgagcccaagaaaggcttctacgaccgcttcgtgctgctgctcgacttcaactcgctctacccgtccatcgtgcaggagtacaacatctgcttcaccaccgtcgcgcggccgacgccggacgaggagggcaactacccgctggccaacgtgccgccgccctcggccgagaccggcgtgctgccgcgcatgatcggcaacctggtggcgcggcggcgcgacgtcaagagcatgctcaagtccgagaaggacgccgcgcgcaaggcgcagctcgacatccggcagaaggcgctcaagatcatggccaactcgatgtacggctgcctcggcttcagcgggtcgcgcttctactgccgcgcgctcgccgagctgatcacggcgcgcgggcgcgacgcgctgacgcacgcgtgcgagatcgccaacaacaacaacgccgaggtcatctacggcgacaccgactcggtgatgatccactcgggcacggacaacctggcggaggcgcgcaagatggcggaggcgctgaagcgcgaggtcaacaagcactaccgctgcatggagatcgacatcgacggcgtgatgcagtcgatgctgctgctcaagaagaagaagtacgccgcgctgatggtcgaggagaagcccggcggcgagctcgtcaccacgcgcgagaccaagggcctcgacctcgtgcgccgcgactggtgcacgctgtcgcgccaggcgggctcgcaggtgctcgacttcatcctgtcgggcaaggcgcgcgacgaggtggtctccg

SEQ ID NO: 256203 - DNA, 743 bp, Unknown
  Bacterial polypeptide expressing nucleotide sequence isolated from the Sargasso Sea
tccccaaagcaattaggtgaaataatttataatgatttaaaaattgctggattaaagaaaacaaaaaaaggaagttttgcaacaggtgcaagtgttttagaggatttagctttcaaaggtcatgagtttccaaaattaattttagactggagacaagtttcaaaattaaaaaatacttattcagatgctttacctgaacatttaaattcaactacaaaaagagttcatacttcttttttgttggctgctacaacgactggaagattagcttcaagtgatcccaacttacaaaacataccaattaaatcagaagacggtaaagatataagaaaagcgtttactgcaaaaaaagggcacctattaatttctgcagattacaatcaaattgagatgagaattttagcagatcttgcagatgtaaaagaacttaaaaaagcttttaaaaataaagaagatatacactcattaactgctagccagatatttaatattgacatcaaaaaagttaatcaagaccatagacgaaaggccaaagctattaattttggaataatatatggaatttctcaatacggattagctaaacaaataaatgtttctaattatgaagctgaggaatttttaaattcatattttgcaaaatttccagaaattaaagtttatatggaaaatacaataaaattttgtagaaaaagtggatacgtaaataatatttttggaagaagatctcattttaatggaat

SEQ ID NO: 256204 - DNA, 918 bp, Unknown
  Bacterial polypeptide expressing nucleotide sequence isolated from the Sargasso Sea
aatgaagcctattatattcctataggacataaaaatataaaagggcttaataaagaattagttttaaaaaaaattaaacctttacttgaagatccaagcattaaaaaagttggacagaacattaagtacgatcttattattttagaaaaaaatggaattaatattgatccagtagaggatactatgttgttgtcttatgttttagatgcaggaaataacaggcataacatggatactctttccgagttacatctgggccacaaacctatttcttataaagacgttgttggttcaggaaaaaaacaattaaacttttctgatgtaagcttagaggaagcaactaagtatgctgctgaggatgcagatgtaaccttaagactttataatttattattggaaagagttaataatgaaaaattaaaaaagatttatgaagtttttgaaaaaccaatgataaaattactttcaaaattagaaataaatggagttaaagttgatgatacgtatttaaaaaaattatctaaaaaatttgaagaaagattaaaaaaaatagagaaagcaatttatgaagtttcaggaaaagagtttaatattggttcaccaaaacaacttggtgaaataatttataatgatttaaaaattgcaaagttaaaaaaaactaaaaaagggagtttagccacaagtgcaaaagttttagaagacttggcatcaacaggacataaatttcctaatttagtcttagagtggagacaagtatctaaattaaaaagtacctatacggacgctttacaagagcatattagtaataaaacaaaaagagttcacacatcatttcttttagccgccactaatactggacgtctagcctctagcgatccaaatttacagaatattccgattaaaacttttgacggcaaa

SEQ ID NO: 256205 - DNA, 736 bp, Unknown
  Bacterial polypeptide expressing nucleotide sequence isolated from the Sargasso Sea
aaaagcttttatttcagaaaaaggaacttcacttttatctgttgattataaccaaattgaaatgaggatactttctgatttagcagatgtgaaggaattgaaaaaagcatttaataataatgaagatattcactctttaacagcgagccaaattttcaacattgatattaataaagtcactaaagagatgagaagaaaagcaaaagcaattaattttggtatcatttatggtatttctcaatatggattagcaaaacaaatttctgtttcaacagctgatgctgaaatctttcttaagtcatattttaaaaaattcccagagattaaagactatatgtcgtccacaataaaacattgtagaaggagtggatttgtaaacaatatttttggtaggaaaacacatattatcggcatcaacgacaagaattttaatattagaaattttcaggagagggcagcaattaatgcaccaatacaaggttcagcctcggaattaatgcgaatagctatgataagaatttttaataaacttaaagatgatacaaaatttaaaacaaaattattattacaaattcacgatgaactaatatttgaaatacctaataacgaactagatagaatcaaaaaactaattaaaacagaaatgaccagtgttaaatcaagtgagcatcacactttctccatacctattctagtagatgtaaatattggggataattggggtatgttgcattaa

SEQ ID NO: 256206 - DNA, 297 bp, Unknown
  Bacterial polypeptide expressing nucleotide sequence isolated from the Sargasso Sea
cgcttagatcatttcaggaaagagcagcaataaatgctccaattcagggtactgcagcagatataataaaattagctatgataaaaataaatggtaaaatcaaagattcaaaggactgcaaaatgttactgcaggttcatgacgaattaatatttgaaataaaaaagaataaattaaaccacttcaaggagataataattaaggaaatggaaaatgctttaaaacctaaatttgatttctctattcccttagtggttgattataaccatgctttaaattggagtgatgctcattaat

SEQ ID NO: 256207 - DNA, 739 bp, Unknown
  Bacterial polypeptide expressing nucleotide sequence isolated from the Sargasso Sea
ctgccccacaatttcgaattaccggcaaaagctcttcgaactcttattgatagaactaaatttgctatttccaccgaggaaacgcgttactatcttaatggaatttatattcacgtttcagatgtagatggcacgactaaactccgggcagttgcaacggatggtcataggttggccaaagtcgaggttgactgtccccagggtgcggagagtatgccgggagtgatagtacctagaaaagccgtaacagagcttagaaaattagctgaagaatttggagaaaatattcgagtgtcagtttccgatacaaggatcaggttttcatttgatggcgtggtttttacaacaaaattaatagatgggactttcccagattatgggagggttatacctactggtaacgacaaagtgctagaagttaatacttccgatttttcagaggccgtaagccgagtatcagctatttcctcagataaatcacgtgcgattaagttagggttaactgctggaaacctgcttttatctgtaataagcactgaaaatggttctgctgttgaagagcttggtgtagattattcggctgatggtgtggaaataggctttaactctaggtacttgttggatattactcagcagatagaaggtgatttagctaggtttactctggcggattcggcgtcgccaactttggttcaaaatactagcgatgataccactctatacgtattaatgcctatga

SEQ ID NO: 256208 - DNA, 558 bp, Unknown
  Bacterial polypeptide expressing nucleotide sequence isolated from the Sargasso Sea
atcaagatcatcgaaggaaagccaaagctataaattttggtattatttatggaatttcgcaatatggtttagcaaaacaaattaatgtttccaattatgaagcagaacaatttttaaattcatattttgctaaatttcctgaaattaaagtttatatggataacacaattaaattttgtagaaaaagtggttatgtatataatatttttggaagaagatctcacttcaatggtattaatgataaaaattttaatataagaaatttccaagaacgtgcagcaataaatgcaccaatccaaggatctgcagcagaaattatgcgtctagcaatgatcagattagaaaaaaaattgacagaacaaaaaaatataaaatctaaaatgttattacaaattcatgatgaattaatatttgaagttcctaaaaatgatgaaaaaacaatggtcaagcttattaaagaagagatgatcagtgtaactaaaagtgactatcattctttttctacaccattaacagttgatattaatgttggtgataattggggattgcttcattaat

SEQ ID NO: 256209 - DNA, 701 bp, Unknown
  Bacterial polypeptide expressing nucleotide sequence isolated from the Sargasso Sea
aataagaaaatcgtttatcgctgaaaatggttattctttagtatctgcggattacaatcaaattgaaatgcgaattttagcagagattgcagatgtaaaggagttaaaaaaagcgtttataaataatgaagatattcactctattacagctagccaagtttttaataaaaaaattaaagatatcgatgaagattctagaagaaaagctaaagctattaattttgggattatttatggaatttctcaatatggtttagctaaacaaataggtgtttcaaatttagaggctgaagattttttaaatgcttactttattaagttcccagaaataaaagattacatgaatgaaacaattaaattttgtagaaaaagtggttatgtgaacaatatttttggtagacggactcatttaaatgggattaatgataaaaattataatgtaagaaattttcaagaaagagcagcaattaatgcaccaattcaaggttcagcatcagagataatgcgtttagccatgataagacttaactcaaaactttcagaatatgagagtaaatatattaaaattttacttcaaattcatgacgaattaatttttgaaattaaatcatcaaaagtcaaagaaatatcaaaaattattactgaaacaatgaatggagttgagtcaagcgcataccataagtttactgttccacttttaa

SEQ ID NO: 256210 - DNA, 370 bp, Unknown
  Bacterial polypeptide expressing nucleotide sequence isolated from the Sargasso Sea
gataaggtaaatcaagacctaagaagaaaggccaaagcaataaactttggaataatctatggaatttctcagtatggtttggcgaagcaaataaatgtctctaattttgaagctgaggaatttgtaaattcgtatttctcaaagttccctgaaataaaagtttatatggatcgaacgattaaattttgtagaaaaagtggttatgtaagtaatatttttggaagaagatctcactttataaatataaatgataaaaattataatgtgagaaactttcaagaacgtgcagcaattaatgctccaatacaagggtctgctgcagaaataatgagattaccaatgataagaattgataaaaaattaaaggagc

SEQ ID NO: 256211 - DNA, 843 bp, Unknown
  Bacterial polypeptide expressing nucleotide sequence isolated from the Sargasso Sea
taaaagcacttattgtgaaggtcttctatcaagagaaagtaaaaaaacttcaaggattcatacctctttcggtatggcaagcacattaactgggagactttcttcaaatgacccaaatctccaaaatattcctattaaaaccgtagagggaagaaaaattagaaaagcctttgtagcttcaagtaataattttattttttccgtagactactcacaagttgaattaagaatattagcacatgttgctaaagtagattcacttttaaaagcttttgagaacaatgaagatattcatagtgttacagcaatggatgtgtttcaggtcgataagacatcacttaattctgacttgaggcgaaaagctaagacaataaattttgggattatatacggaatttcaccctacggacttgctacacagctagatatatccaattcagaggcaaaacaatatattgaaagttattttgaaaaatatccaggaattaaggaatatatggagaaaacagttaatgattgtcgaagtaaaggtttcgtagttactccttttgggagaagaatatttataccttttataaatgacaaagtagccaatagaagaaattttgcagaacgctctgctatcaatgcgccaattcaaggtggagctgcagatttaattaaattagccatgccaaaaatttatgaatttttaataaatgaaaaacttttatcaaaaatgcttattcaagttcatgatgaactcattttcgaagttcctcagaatgaaataaaaataatgaaagaaaatattcctaagattatgactaattcacataaaaattttttagatttgagtgtacc

SEQ ID NO: 256212 - DNA, 739 bp, Unknown
  Bacterial polypeptide expressing nucleotide sequence isolated from the Sargasso Sea
agaaaatcttttatagcagaaaaaaataatctcttagtgtccgctgattataatcaaattgaaatgaggatacttgctgatttagcagatgtaaaagaacttaaaaaagcctttaaaaataatgaagatattcatactctgactgcgagccaagtatttaatattgatattaaaaaagttgatagcaacactaggcgaaaggccaaagcaattaattttggaattatatatggaatttcacaatatggacttgccaaacaaattatggtctcaaatattgaagcacaagaatttctaaattcatattttaaaaaatttcctgaaataaaagaatatatggattctacaataaaattttgtagaaaaagtggttacgtgaataatatttttggaagaagaacgtatatcactgggataaatgataaaaattttaatgtaagaaattttcaagaaagggctgcaatcaatgcaccaattcaaggatctgcatccgaaataatgagacttgccatgattaggatccataaacttttagaaaattcaaaaaatttaaaatctaaaatgttattacaaattcatgatgaattaatatttgaggtacctgaaaatgaagttaaaaaaacatgtgaaatgataaaaaaagaaatgtcaggtgtaagcaaaagtgatttgcatgctttttctattcctttaactgtagatataaattcaggagaaaactgggggatacttcattaat

SEQ ID NO: 256213 - DNA, 768 bp, Unknown
  Bacterial polypeptide expressing nucleotide sequence isolated from the Sargasso Sea
catggcgctctcccccaccctggcggaggccgcggacctcaaggcgctgctgcgaggatacgaaggagccgtggtcctggagccggaggtggggtactacgaacaccccgtggccacgctggacttcgcctccctctacccctccatcatgcaggcgcacaacctgtgctacgccacgctggtgctcccgtcggaagccgcctggcgcgtgccgcagatgcgccagatgaacgtagaatacgagacacaccaggtgcgggacaagctctaccactttgccacgcgggagacgggcgtgctgccgcacatcctggcgcgcctgctggcggagcgccgccgcgtcaagaagcagatgaagggcgaggaagaccccaccctccacgcgctgctggacggcaagcagctggcgctcaaggtgagctgcaactccgtgtacggcttcacgggcgtgcgcgcggggtacctgccctgccttcccatcgcatccaccgtgaccacggtggggcgccagatgatcgagaatacgcgggacgccgtgctgaccaagtaccccggctcgcgcgtgatctacggcgataccgatagtgtcatggtcgtctttggcggcgtcacgccggacgcggcgggcgtgcaggcggcgtttgcgctgggcgaggaagcggcgggctggatcaccgccaacaccttcccctcgcccttcatcacgctggagatggagaaggtgtcgtggccctacatcctcttcaagaagaagcggtacgccgggtg

SEQ ID NO: 256214 - DNA, 399 bp, Unknown
  Bacterial polypeptide expressing nucleotide sequence isolated from the Sargasso Sea
atatggaccatcaaatggatttcgcaaaaacaaatcaatacgtagaaacaatttttaaaagaaaaattaatattaagggaattgctgataagaattttgctgttagaggttttgcagaaagacaagctattaacgcaccaattcaaggtagcgcagcagatattattaagttagcaatgattgaaattcacaaggaaataaaacttaaaaatattgaggctgaaatgcttttacaggtacatgacgaactaatttttgaagtcgaaagtaaaaaatatgacaatttagtaagtaatgtaaaaacaattatggagtcagtacatttaaaatataaagatttttcagttccactcactgttgattttggttttggtgatcattggggacaggcacattaga

SEQ ID NO: 256215 - DNA, 820 bp, Unknown
  Bacterial polypeptide expressing nucleotide sequence isolated from the Sargasso Sea
tttagccgaaatggagattaatggaattaaagttgatagtctttttttagaaagtttatcgaaaaagtttgataaaaaaattagaaaattagaaaatgatatatataaaattgcaaataaagaatttaatattggctcacctaagcaacttggtgaaataatttacaatgatttaaaaattgctgttttaaaaagaacaaaaaaaggcagttttgctacaagtgccagtgtccttgaagatttatcttttaaaggacataaatttccgaaattaatattagattggaggcaggtttcaaaattaaaaaatacctatactgactctttaagggaacacatcaatgacaaaacaaaaagggttcacacctcttttttattagcagcaacaacgacaggaagattagcttcaagtgacccaaacttgcaaaatattcctataaaatcagaggacggtaaagagattagaaaagcttttattgctgaaaaaggatatacgcttatttccgcggattacaatcaaatagagatgagaattttagctgatcttgcagatgtaaaagagttaaaaaaagcttttaaaaacgatgaagatattcattctttaactgctagccaagttttcaatattgatattaataaggttgaccaagatacaagaaggaaagcaaaagcaattaattttggaattatttatggcatttcacaatatggtttagcaaaacaaattatggtttcaaataatgaagctgagagttttttaaaatcttattttttaaagtttcctgaaatcaaagaatacatgaatagtacaataaaattt

SEQ ID NO: 256216 - DNA, 792 bp, Unknown
  Bacterial polypeptide expressing nucleotide sequence isolated from the Sargasso Sea
catgaatggaaaacaaaaagctgattatttagtgttaatagatggaacagcctacttatatagggcatatcatgctttgcctcctttaaaaaattcaaaaggcgaaaatacaggagccattcatgggtttctgaaggcattaaataaaattatagaggattttaatcctaaacatataggtttagtctttgatgcaaaaggaaaaaacttcagacataaaatatatagtgaatacaaagctaataggtctgcaatgccccctgaactaatagaacaaattcccaaactttacgaaatattagattatatgggttacccaccgatcataataaatgatgtagaagctgatgatgttatcgggacattatcaaataagttcaaaaccgttccagaagttaagatcttttcgggcgataaggactttgcccaacttgtaaatgataaagtgactattattaatccagttactttagaaattatggatataaaaggagtaaagaaaaaatttggcgttgaaccagaaaatattatagattatttagcacttgttggagacaagtcggataacatcccaggcgtgcctggtgttggaggaaaaactgcttcaaaattaataaatcaatatggaaatacagagaaaattataaaacaaaaagatttgatccctggtaaagttggggaggcaattaagcttaatccagatcaactgcaattatctaaaactcttgcaactattaggcaagatgttgaaatttctttatctctaaatgatttaaaaaaacaagaatcaaa

SEQ ID NO: 256217 - DNA, 567 bp, Unknown
  Bacterial polypeptide expressing nucleotide sequence isolated from the Sargasso Sea
tatgaaattaactattgagcgcggtcttttaatgaaggttcttgggcacgtccaaagcgtggtcgagcgtagaaacactattcctgttttgtctaacgttaagtttgatgcgcaaagcgagagtttgagtctcaactctacggatatggatatagatatagtggagaccgtgccagcagctgttgaaacatctggctctacaacggctccagcacatacactttttgatattgtaagacagcttccagaaggtagtcaggtagaacttgataacacagaagatagccaaaatttggtactcaactctggccggtccaaatttactttgagttgtttgcccacagaagactttcctgtgctttccggggatgaacttccccataattttgaattgccagcaaaagctcttagaactcttattgataggactaaatttgctatctcaaccgaggaaacccgttattatcttaacggaatttatatccacgtttcagatgtcgacggtacccctaaactcagggcagtagcaacggatggtcataggttgggcaaagtggaggttgactg

SEQ ID NO: 256218 - DNA, 739 bp, Unknown
  Bacterial polypeptide expressing nucleotide sequence isolated from the Sargasso Sea
ttaggaaaggaaattagaaaagcttttaagacgagagataataattttagattattttctgcagattattcccagattgaattaagaattatggctcatttttcaaaagagccaactcttattgaagccttttctaacgatgaagatgttcatactagaactgctgctttagtttacgatctgcctatacagctagttacttcagatcagcgtcgacaagctaagattgtaaattatggtattatgtatggcgcaggaccttttagaatggctcaagagttatctattagcattaaaaatgcaaaaaagattattgataattatttcaatacttataaaaacattaaaaattatatagaccagaacattgataaagctgcagaaattggttatgttgaaacatattttggtcgaaaaagaagcacggtaaatttgaattcctcaaacgcaaatatagttaatgcagaaaaaagagctgctgtaaacatgccaattcaaggaactgctgcagagttaatcaaaattgctatgattgatattagagatgctatgaactctaaaaacttaaaatcaaaaatggttcttcaggttcatgacgagctattatttgaattgcataaaagtgaagaagaaattatgacaaatattattgtcgaaaaaatggaaaattctataaaattagatgttcctttaaaagttgactttaaaattggagatagttggtatgatatacattaaa

SEQ ID NO: 256219 - DNA, 691 bp, Unknown
  Bacterial polypeptide expressing nucleotide sequence isolated from the Sargasso Sea
actctttcaattaaatttgataaaaaaattaatattttagaaaaagaaatatttaagatttcaaaaaaaaatttcaaaattggatccacaaaacaattaggtgaaattatgtacaatgaactcaaaattgcatcattaaaaaaaaccaaaaaaggcagttttgctactaatgcaaatgttttggaagatttagcattcaaggggcacaagcttcctaaattagttcttgattggagacaagtgacaaaacttaaaaatacttattctgattcacttcaagaacatattaatcctaaaacaaaaagagttcatacttcatttttactcgctgccacaactacaggacggttagcttcaagtgaaccaaatttacagaatatacctataaaatctgaagatggtaaagatattagaaaagcatttatatcagaaaaaaattttagcttaatttctgcagattataaccaaatagaaatgagaattttggcagatcttgcggatgtaaaagaacttaaaaaagcttttaataataatgaagatgtacactcattaacagcaagtcaggtatttaatgttgatgtcaataaaattgatactgacaaaagaagaaaagcaaaagcaattaattttggaattatttacggaatttctcaatacgggttagcaaaacagataaatgttacaaatactg

SEQ ID NO: 256220 - DNA, 504 bp, Unknown
  Bacterial polypeptide expressing nucleotide sequence isolated from the Sargasso Sea
catggggtcgaggattctcattcattgtgacctcgatgctttttttgcggctgtagaaactcttcaccatgatttggacccttcaatccctttgatattaggctctgaccctaaaggtggcaaaggccgtggaatagtttcaacctgtaattatgctgcaagaaaatttggaatacgttctgcaatgccgattagtgaggcatggcgtaggtgtcccggtcaaccgattggacaaggaatctatctctcaagtacacgcggtctttactccagggcaagtcgcaaggtcatggaaattttagagaaatatgcagataaatttgagaaggcaagtatcgatgaagcctatcttgatgttactgattattgccaaggagattgggataaagccctttcactatgccgtgatttacaaaatgaggttatggaaaaactcggtctgtcctcgtctttcggtattggtcctactagaattttggctaagatgggaagtgaagagaataa

SEQ ID NO: 256221 - DNA, 844 bp, Unknown
  Bacterial polypeptide expressing nucleotide sequence isolated from the Sargasso Sea
catgcccgaggccaccgccaagccccttctgctgcttgtggatggccattccctggcattccgcagcttctacgccttcagcaaggggggggaaggcggtctggccaccaaagacggccggcccaccagcgtgacctacggctttctcaaagccctgctggacaacagcaaaaccctgaagccagagggcgttgccatcgccttcgacacagccgagcccaccttccgccacaaggcggacgccaactacaaggcccaccgggatgtggcccctgaggtgttcttccaggacctcgaacagctgcagcagatcctcaaaacgcacctgcagctccccctctgcatggcaccgggctacgaagccgacgatgtgctgggaaccctggcgaaccgagcggccgactccggatggagcgtgcggatcctctcgggagaccgcgacctgttccagctggtggatgacagccgcgacatcgcggtgctctacatgggtggcggcccctacgccaaaagcagtggcccaacactgatccgcgaagaaggggtgctcggcaagctcggcgtgatgcccgacaaggtggtggacctcaaggccctcaccggggacagctccgacaacatccccggcgtgcgtggtgttggcccgaaaacagccatcaacctgctgaaggacaacagcgacctcgatgcggtgtacgccaccctcgagcaagtggaagccgaagggccgaaagcaagccggggcgccatcaaaggtgctctgaaagggaagctgcgcgccgaccgcgacaacgcctacctgtcgcgcaagctggccgagattctcgtggatgttcccctgccc

SEQ ID NO: 256222 - DNA, 640 bp, Unknown
  Bacterial polypeptide expressing nucleotide sequence isolated from the Sargasso Sea
tatgaattttaaactaaatagcactgatttactaacagctcttagccatattcatggaattgttgaagtaagacatacattgccaatactatcgaatataattttaaaagctgagaataatgaattaataatatcttcaactaaccttgatatatattgctcagacaaggttgatgctgaaatttctaaacctggtgagacatctgtatctgccgtaactttttttgagatagctaagcgactaccgcccggttcagaagttcaatttgatctaaatgatactcaaaatgagattgttttaaaatgtggaaggtctaaatttaatctttctacactcagtacagatgattttcctattatttctgagtctgatctcttcataaactttgttattagcgctgaagaattaattagaatgattgataagacaaaatttgcaatatcgagtgaggaaacaaggtattatttaaacggtatttttttccataaggctgagagaaattcaatcaattttttaagagcagttgcgacagatggtcatcgattagcccaatatgatattccccttcctcagggcgccgaagaaatgtcaggtattataataccaaaaaaaacaatattagaacttagaaagttttag

SEQ ID NO: 256223 - DNA, 541 bp, Unknown
  Bacterial polypeptide expressing nucleotide sequence isolated from the Sargasso Sea
catgggggcgcagcgtttcgcacgggagaccggcgtctcccaggcggaggccaaggacttcctgacgaagtacaagcagcgctacccgaaggtgttcgccttcctcgagctgcaggaacggctggccctgagccgcggttacgtggaaacgatcctgggtcgccgccgcccgttccacttcgaccgcaacggtctgggtcggttgctcgggaaggatccgctggagatcgatctggatgtggcccggcgaggcggcatggaggcacagcagctgcgggccgcggccaatgctccgatccagggctccagcgccgacatcatcaaggtggcgatggtgcagcttcaggcggcgctgcagagccaggcactgccggcgcggctgctgttgcaagtgcacgacgaactagtgctggaagtggagccggacgccttggaagccacccgcaacctggtggtgaccaccatggaaaacgccgtgaagctcagtgttcctctggtggcggaaacgggtgtgggcgccaactggatggaagcgaaataa

SEQ ID NO: 256224 - DNA, 327 bp, Unknown
  Bacterial polypeptide expressing nucleotide sequence isolated from the Sargasso Sea
atccttacgaaattgacttgcaatccgcaagaagagctggcatggaagcacagtcactcagagccgcagctaatgcaccaattcagggttcaagtgcagacattattaaaattgcaatggttcaactaaataagaaattcatagaaatgaatgttcccgcaaaaatgcttttacaagtacatgatgaattattgtttgaagttgaaccagattctttggaaattacgacgaaattagtaaagaagactatggaagattgtgtaaaattaaatgtgcctcttttagttgatattggtattggagataattggatggagacaaaataaa

SEQ ID NO: 256225 - DNA, 951 bp, Unknown
  Bacterial polypeptide expressing nucleotide sequence isolated from the Sargasso Sea
tttttcaaagaaaaagatttacttaatttagaaaatgaatcaagttttccccaacaaattgatttcaatatagctatatcgaaaattaaaaaaatttttcaagataaatcaattttaaaagtaggacataacattaaatttgataatcttattttaaaacaaccgaaaaatggttccattgatgtaaatccagttggcgatacaatgtgtatgtcatatgtattaaatctaggtaaaattcagaatcataaattagatactttatctaatgtagaattaggttatcaaaccatcacatttgaggatatttgtggtaaaggtgtaaatcagaaaagctttgacaaaattaaccccaatgatgccttagattatgctgcagaggatgctgatgtagcattagctctttataaagtgttatttccaagattaattttagaaaaaaaatactttgtatatgaaaaattagaacgttctttaattccagttcttgttgatatggaaaatcaaggtataaatgttaacccaaaaagcttaaaaaaaatttctggtgaattaggaacccgaatattaattttagaaaaggaaatattcaaaaaaactgaatgtaaatttaatattggctctcctaaacagcttggcgaaatattatttgaaaaattaaaaatagaaggaggtaaaaaatctaaaactggtgcttggcaaacaagtgtaaatattttgaatgaactttctcaaaaagggtatgaaatagcaaatctattactagactggagacatttttctaaattaaaaagcacttattctgaagcattattaacacaaataaatgatcaaactgacagaatacatacaaattactcaatggtaggcactagtactggaaggttgtcatcatctgaaccaaatcttcaaaatataccaattagaacagatgaaggtaggttaataaga

SEQ ID NO: 256226 - DNA, 954 bp, Unknown
  Bacterial polypeptide expressing nucleotide sequence isolated from the Sargasso Sea
agctaatttagtaggcgtctcaattgctataaatgaaaactcaggttattatatccctataaaccataaagacttagcatataataaaagattaaaagaacaaataaaagaaactgaactaattaaattacttaaaccaatttgtaatgatccatctattttaaaaataggtcataatattaaatatgatcttagaattttagagaaatatgatcttaaattaaaatctatagctgatacgatgttgctatcatatgctattgataatggtattacaaaacataacatggatgatttggcctacttacattttaatcatacaaatataaaatttaaagaacttgttggatcaggaaaaaaagaaataacatttgattttgttgaaattaataaagcggttgaatatgcagctgaagatgcccttattactttaaagctatataattttttaaataatagacttaaaaatgaaaaatgtaattttgtatatagtgaaattgatttaccattaataaatgttctgtcttctattgaaaaaaatgggattaaagtaaatactaaatatcttaataagcttagtgtcgaatttgaaaaagatagcttggttttggaaaaaaaaatttatgaacttgcaggaaagaatttcaatataggttcaccaaaacaattgggagaaattttatttattgacttaaatataaagggtggaaaaaaaactaaatcaggaacgttttctaccgactcttcaacactatccagtttatctgataaaggttatgaaattgctagtttaattttagattggagagaattgacgaaattgaaatctacttatacggatgccttgcaaaatcaagcaacaaaaaataattcaagagttcatacatcatatggggtcgctaatactcttacaggcagactaagttctaatgatcctaatcttcaaaatatacc

SEQ ID NO: 256227 - DNA, 493 bp, Unknown
  Bacterial polypeptide expressing nucleotide sequence isolated from the Sargasso Sea
tggtctagcaaaacaaattagtgtttcaaataatgaagctgaggattttttaaattcttactttgtaaaatttccagaaattaaggactatatgaatgaaacaattaaattttgtaggaaaagtggttatgtaaataatatttttggtagaagaactcatctaagcgggataaatgacaaaaattataatgtaaggaattttcaagaaagagcagcaattaatgctccaattcaaggttcagcagcagaaataatgcgattggcaatgataaggttaaactctaaattttcagagtataaaagtgatactataaaaattttacttcaaattcatgatgaattaatctttgaagtaaaatcatcaaaatcaaaagaaatttcaaaaacaattagagaagttatgaacagtgttggttcgagtgagtatcataagtttactgtcccacttttgatagatttgaatttaggagaaaattggggcttgttgcactaa

SEQ ID NO: 256228 - DNA, 781 bp, Unknown
  Bacterial polypeptide expressing nucleotide sequence isolated from the Sargasso Sea
ctgccttttgatgattacccaatcatgacccatattacgggaggaaaaaatttttctataagttctgcagacctacaaaatttaatagataacacaaaattcgctatttctgttgaagaaactaggtattatttaaacgggatataccttcatcaaaataaagacgaagataatcttagagctgtagctacagatggtcacagacttgctcaagtagagataagtttgcctgatggggctgatggaatgtcctcaattatcgttcccagaaaaactgtgggggaagtaaggaaattaattgatgatactgaaggaaatataaatattattgtttcttcaaacaagattaaatttaatataaataactgtacactaacttcaaaattaattgatggttcttttccagattatcagagagttattccaaaagataataccaataacatgatagtttcaacaaaggaatttaaagatgccgtagatagagtttcgactatttcaattgaaaaatctagagcagtgaaactttcgttaagtaaaaacaatttaattttaaaagttaatacccacgatacgggaaatgctagcgaagagttggaagttaactttgatggcaatccaatggaaatcggatttaattcaaaataccttttagatatagctcttcaaatgcaaggcaaagagatgcaattttctttatcagactcatcttcaccagcattaataactgatccagaacaagaaggtatcatttttgtgttaatgcccatgagggtttaaa

SEQ ID NO: 256229 - DNA, 901 bp, Unknown
  Bacterial polypeptide expressing nucleotide sequence isolated from the Sargasso Sea
ggggcaccaagaaggtgaacagattcccatggacgaggtattggctgctgttcgccctatatttgaatcaggcgagatcaaaaagtgtgcccataatgcgaatttcgacatgactatcttgtccagttacgggatcgaatgccaaggggtcgatttcgacaccatggtggctgcccatctactcagtcgcggacaactcgggcttaaaaacttggcactggacgttctgggttgcgagatgacaccgattagtcagttgattgggactggaaaaaagcagataacatttgatcaggtagatatcttggacgcagccccctatgctgccgcagacgctgacatgacaggcagattgagacaggccttcgaagaacccgttgttcgagagggcatgagttctctgatgaatgatatagagatgcctttagttccaatcctggtgacgatgcaacgtaacggtataaagctggatacggctggccttcgggagatgtctgaggatctgcgtgagcagatgtatcaaacggaagaagaactctacaaatcaatcggccataccgtgaacatcaattctcctcaacaactaagcgacttgctgttcaatgagatcggtctgcccaagactaaacgcaccaagacaggttattcaactgatgccaactctttagaaggactgaagggactgcaccctgtagtagatcagatacttgaataccggcaagtgtccaaactcaagtccacctatgtggatgcgcttccagacatgctcaatcctgccactgggcgggtgcatacgagctttaatcagactggttcggcaacggggcgcatgtccagtagtgatccaaaccttcaaaacataccgatccgtactgagatgggacggcaagtacgcaaagcg

SEQ ID NO: 256230 - DNA, 958 bp, Unknown
  Bacterial polypeptide expressing nucleotide sequence isolated from the Sargasso Sea
gatgcagatattaccttttagattatataaaaaatttattaaaaatttaaaattagaaaagatgattaatatttatgagatatttgaaaagccattaataaaaattcttgcttttatggaaatggaaggagttgaagtagatagtaaatttttaaaatcactatctttaaaatttgaaaaaaaaattaaaaatttagaaatagaagttttcaaaatttctaaaaaagaatttaatattgcttctccaaaacaattaggagaaataatctataatgatcttaagattgcaggattaaaaaaaactaaaaaaggaagctttgcaacaagtgctagtgttttagagaatttagcttttaaaggacataaatttccaaagttagttttagattggagacaggtttcaaaattaaagaatacctattcagattcattgccagagtatattaatccacaaactaaaagagtgcatacatcatttttattagcagccactacaacgggtaggttggcatcaagtgatcctaatttgcaaaatattcctataaaatcagaagatggcaaagatattagaaaagcttttactgctaaaaaaaatcacttattaatatctgctgattataatcaaattgaaatgagaattttagcagatctcgctgaagttaaagaactcaaaaaagcttttaaaaataatgaggatatacatgctttaacagcaagtcagatttttaatattgatataaaaaaagttgatcaagatcatcgaagaaaagctaaagcaataaattttgggatcatttatggcatctcacagtacggcttagcaaaacagattaatgtttctaattatgaagcagaagaatttttagacgcatattttgctaaatttcctgagattaaagtttatatggataatacaattaaattttgtagaaaaagtggatatgtaaataatattttt

SEQ ID NO: 256231 - DNA, 767 bp, Unknown
  Bacterial polypeptide expressing nucleotide sequence isolated from the Sargasso Sea
tatgaaaaaagcattatatagaaaatacagacctacaaaattgtcagaactagtgggacaggaagaagcagtttctttaattaagaatcaaattgaaaaagataatcttggccatgcctaccttttttctggacctagaggtgttggtaagacatctttagcaagaatcatagccacccagctaggctgtgatccaatttttgatgtttcagaaatagacgcagcatcccacaataaagttgaagatatacgagaaatgaacgagagcgttaacttcattgcaagcagtccaggtaaaaaaagattattcatactagatgaggttcatatgttatcgaatgcagcatctaatgcttttttaaaaacattagaagagccaccagaacacattatatttatactcgctacaactgaaccagaaagagtacttgaaacaatcaaaagccgcacaacacaaatagcttttaaaaagataagtgaagatgaaataattaaaactttaaaaaagataggaaaaaaagagggaattaatctagacagtgaagtagtaaaaatgattgctaatttttcggatggctcacttagagattcaataaacttatacgaacaaacagaaaatacttttggatcaaaagcttctgtagatgatctttttagcttattaggtaaattgagctctaaggaattcgaaataataataaactctgtagagactcaggatacagcttctgttttaagtgttattagagacgcctactcaaaaggac

SEQ ID NO: 256232 - DNA, 811 bp, Unknown
  Bacterial polypeptide expressing nucleotide sequence isolated from the Sargasso Sea
gatcgcagcacatattttgaacccatctgcaaaatcatataaactagatgctcttagtcttgagtaccttaattatagcatggtcccgattgaggatttgattggtaaaggaaaagatcagattactatggattatgtcccattagataatgtatcctactacgcttctgaagatgctgatatttctttgcagcttgctaagttatttattccacgattagaagagaataaccagatggatttttttcaaaaaatagaaatgcctcttattaatgttttaatgcaaatggaaaaagaaggcgtatatgtagaacaaaatatactaagtgaaatgtctagaaatattggagatagattagacaatttagtaaaaaacatttataaaatatctggttctgagtttaatattaattccactcaacagttagctgtaatcctgttcgatgaattaaaattgaaccagataaaaaaaaggtctacagctgaaaatattttaaaagaattagctaatgatcatgaactaccagaattaattctagaataccgtaaactaaataagctaaaaaatacctatgtagattccctaccggcttctgtcaacaaggaaacgaacagaatacattctacttttaatcaaacaattgcttcaacgggacgattatctagtacagggccaaattttcagaatatacctatccgaacagaagaagggcgcgaaatcagaaagtctttcattgcacagaaaaataactggaaaattttatcagctgattattctcaaattgaattgagaataatggctcatttatct

SEQ ID NO: 256233 - DNA, 812 bp, Unknown
  Bacterial polypeptide expressing nucleotide sequence isolated from the Sargasso Sea
caatcggccctccatgccggacgagctgcgcgtccaggtcgagccactgcacgccagcgtgcgcgccctggggctgccgctgctgtgcgtcgaaggggttgaagccgatgacgtgatcggcaccctggcgcgccaggcggccggggaaaagcgcgacgtggtcatctccactggtgacaaggacatggcgcagctggtctgcccgcacgttacgctggtcaacaccatgacgggaagcgtctacgatgctgatggcgtaaaggagaaatttggtgtcggccctgagctgatcatcgactacctggcgctgatgggcgacaaggtcgacaacattccgggtgtgcctggtgtcggtgagaaaaccgctttgggcttgctggttggtatcggcggcggcctcgacgtgctctacgccaacctcgacaaggtgcccgagttgccgatccgtggcgccaagggcctgccagccaagctcgaagagcaccgcgagatggcttacctgtcctatcagctggcgaccatcaagaccgacgtgccgctgaatatcgagatcgagtcgctgcatcccggcgaaccggatcaggccgcgctggtggagctttacggcgagctggagttcaagaactggctggacgacctgctgcgtcagaacaaggcgctggcggccaaggctgctgctccggctggcgatctgttcgccgagccgactggtgacaccgttgaggaaaccgccgagccagcaccagccagcaatggtgattaccagttggtactggagcaggcgcagttcgatgcctggctgaagaaactgg

SEQ ID NO: 256234 - DNA, 823 bp, Unknown
  Bacterial polypeptide expressing nucleotide sequence isolated from the Sargasso Sea
tggcataaaaatctctgagtttttggcagacacaatgctcatgtcatatgtgcttaatagcaccgccacccgccatggaatggatagactcgcagattattatcttaactacacaaccacaaaatatactgacgtaacagggactgcctctaagcaaattagttttgcagaggtacaaattgatgttgcaacagattatgcagccgaggatgcagatgtaacgctaagactttttaatactttatctgcgttaataaaagagaaaccaattcaagagaaactattaaaagaaattgaatatcctcttgtgcatgtactttcaagagtagagcaaaatggagcaaaaatagataagaaaaaacttggaaatcactccaaagagcttggcgacaagattgctgacttatctgcccaagctttcaaaatagctggagaggaatttaatcttgattccccaaaacaactcttagaaattttatatgaaaagcagggattaccagtattgagaaaaacacccaaaggacaaccatctaccaatgaagagacacttcaaaggctatcagaggaatatgaactaccaaagataattcttcaatatagaacactggcaaaactaaaatctacttatacagatagcttaataaatattgagaatcctaaaacacaaaggattcacacctcatatcaacaagccgtaacgtcaacaggaagactttcgtctacagaacctaacttacaaaatattcctattaaaaccgctgaaggcaggagaataagagaggctttcgttccagaaaaaggtaacacattaatttctgctgat

SEQ ID NO: 256235 - DNA, 859 bp, Unknown
  Bacterial polypeptide expressing nucleotide sequence isolated from the Sargasso Sea
aaaaattcagaaagaagtttttaaactctcaaaaaaagaatttaatattgcttctccaaaacaacttggtgaaattttatacaatgatcttaagattgcagacttaaaaaaaactaaaaagggaagttttgcaacaagtgcctcagtactagaagatctcgcttttaaaggtcataaatttccacaattagtcctagactggcggcaagtttcaaaattaaaaaatacatattcagactctttacctgaacatatcaatcctgctacaaaaaaagttcatacttcttttttattagcagcaacgactacaggaagactagcttcaagtgatcctaatttgcaaaacattccaattaaatcagaagatgggagagatattcgcaaagcctttattgctgagaaggataatattttaatttctgcagattataatcaaattgaaatgagaattttagccgatttggctgatgttaaagaattaaaaaaagcttttcaaaataatgaggatatacactctctaactgctagccaaatttttaatattgatattaataaagtgaatcaagaccaaagaagaaaggctaaagccatcaactttggaataatttacggaatttctcagtatggattagcgaagcaaattaatgtctctaattttgaagctgaggagtttctaaattcatattttttaaagttccccgaaataaaagtttatatggatcgaacaattaaattttgtagaaaaagtggttatgtaagtaatatttttggaagaagatctcattttataaatataaatgataaaaattataatgtgagaaactttcaagaacgtgcagcaattaatgctccaatacaa

SEQ ID NO: 256236 - DNA, 597 bp, Unknown
  Bacterial polypeptide expressing nucleotide sequence isolated from the Sargasso Sea
cagctagccaggtatttaatgtaggtcaaagtaaagtcgacacagacatgagaagaaaggctaaagcaataaattttggaattatttatggaatatcgcaatatggattagcaaaacaaataaatgtttcaaataatgaggccgctgaatttttaaattcttactttttaaaatttccagaaatcaaagattatatgtcatcaactataaagttctgtagaaaaagcggttatgtaagtaatatttttggaagaagaacacacattactggtataaatgataaaaattttaatgtaagaaattttcaagaaagagccgctatcaatgctcccatacaaggttctgcctcggaaataatgcgtttagccatggttagattaaatgataaattaaataataaaaaaaataaatctgttagaatgatacttcaaatacatgatgagttaatatttgaggtacctaaaaatgacttcaaagccatatccaagataattaaagatgagatgactagtgttagaaatagcgatcttcactctttttctatacctctatcagttgatataaatgttggtgataattggggattattacactaat

SEQ ID NO: 256237 - DNA, 580 bp, Unknown
  Bacterial polypeptide expressing nucleotide sequence isolated from the Sargasso Sea
accgctgcagaggtttttagcgtagcaattgaagaggtaaataaagatcaaagaaggagcgccaaagctataaattttggtttaatgtacggcatgtctgcttttggactcacaagacagctgggaattacaagagctgaagcgcaagcatatttagacacttattttgcaagatataccggggtaagagattacatggataatattaaagccaaagcgaaggaagatatgtttgttgagaccattatgggaagacgtctttatcttaatgaaataaatgccgcaaatggattaagaagacaggctgcagagagagcagctattaatgctccactgcagggatctgcagcagacataattaaaaaggcaatgctcgatatcgataaacttattttaaatgaaatgcccgatgtaaaaatgataatgcaggttcatgacgaactagtgtttgaatgcccaaaagaaaacgctgacttagtgatggagaaaatgaaagaaactatggagcaaaccgtagaactaaaaatacctttgattgctgaagcagctgttggctcaaactggaatgaggcgcactagt

SEQ ID NO: 256238 - DNA, 941 bp, Unknown
  Bacterial polypeptide expressing nucleotide sequence isolated from the Sargasso Sea
tcgagcattcccgcattgccgccactcaccagctccaagggtgttccgaccggggcggtcaaaggtgtgattgccatgatccggaagttgatggcggacaatcccgagtcccccgtcgcggtcgtcttcgacccgcgtggcgggtcgttccgcaacgaactctacccggaatacaaggcgaaccgagcaaaaatgcccgacgatctgcgcagtcagatcgagccgattcacaccatcatccggctgatgggcctgccgttgctcgtcgtcgacggcgtcgaggctgatgacgtgatcggcacactcgcaaccgaggcgcgcgcgaagggagtggaggtgctcatttccacgggcgacaaggacatggcgcagctcgtgtcacctgaagtgacgctcatcaacacgatgaacgacagcgtcatggatgaagccggtgtcgaagagaagttcggggtgcggcccgatcagatcatcgactacctcgcgctggtgggcgacacctccgacaacattcccggcgtgccgaagtgtggtccgaagacggccgcgaagtggctcaggcagttcgagacactcgatggggtgatcgagcacgccgaagacgtgaaaggcaaggtgggcgaaaacctgcgcgcgagtctcgacactctgccgctgtcctatcagctcgcgacgatcaagctcgacgtcgagatggagcttggcgtcggcgatctggcgcacggcgagcctgacgtcgatacgttgcgggacatcttcaccgacctagagttcaagcagtgggcggacgaactggccgccgaggcagccgccgacgtgccgcctgcggagtatgagaccgtgctggacgagccggcgcttgcggcattggccgggcgcctcaatggctcggaccggattgcgctcgtggtgcatacggacgtcgacgactacatgaagtg

SEQ ID NO: 256239 - DNA, 730 bp, Unknown
  Bacterial polypeptide expressing nucleotide sequence isolated from the Sargasso Sea
atgtcatatcaggtgttagccagaaaatggcgccctgccacattcgaacagatggtcggccaaagtcatgtgttgcacgcattaaccaatgcgttaacccagcaacgtttacaccatgcgtatctttttactggcacgcgcggcgtgggcaagaccagtttggcgcgtctctttgccaaaggtcttaactgtgagaagggcgtaacggcttccccctgtggtgtgtgtggcagctgtgtcgaaattgcccaaggccgttttgttgacttaattgaagtcgatgccgcctcgcgtaccaaagtcgatgacactcgtgaactcttagataatgtgcaatatcgtccgacccgaggccgttttaaggtttatctgatcgacgaagtacacatgctttcccgcagcagttttaatgcgctgctaaaaaccctcgaagaaccgccagagcatgtgaagtttttgctggcgaccaccgatccgcaaaagctgccggtgactgtgttatcccgctgtttgcaatttaatttaaagagtttaacccagcaggaaattggcactcagctacagcatattttaacccaagagcaattgccctttgagcacgaagccctaactctgctcgccaaagcggccaatggcagcatgcgtgatgctttaagcttgaccgatcaggccatcgccttcggtggcggcacggtaatgctcaacccaagtgcaatctatgcgggcagca

SEQ ID NO: 256240 - DNA, 328 bp, Unknown
  Bacterial polypeptide expressing nucleotide sequence isolated from the Sargasso Sea
gttgaataaaataattcgaaagatcatccacattgacatggatgcatactacgcatcagtggagcagctggacaatccagagcttcgggggaaacctgttgcggttggtggcggaaaaaaaagaggcgtcgttgctgcggcatcctatgaggccagggagtttggtgtgcggtctgcgatgccctctgtgatcgccataaagaggtgtgagaacctgatctttgttcgtcctaggtttgatcggtataaggagatatccttccaaattcgacagatatttgcggattatacggatctgattgagcctttatctttggatgaggccttc

SEQ ID NO: 256241 - DNA, 768 bp, Unknown
  Bacterial polypeptide expressing nucleotide sequence isolated from the Sargasso Sea
caataaaatcagaggatggaaaagatattagaaaagcttttactgcaaagaaaggacatttgttggtttctgccgattataatcaaatagagatgagaattctagctgaccttgcagatgttaaagagcttaaaaaagcttttcaaaataatgaagatattcattctttaacagctagtcagatttttaatgttgatattaagaaaattgatcaagatcaaagaagaaaggctaaagccataaattttggaattatttatggaatatctcaatatggtttagcaaaacaaattaatgtttctaactatgaggcagaggaatttttaaaagcatatttttctaaatttcctgagattaagatttatatggataatacaattaaattttgtagaaaaagtggatatgtaaataatatatttggtagacggtcttattttaatggaattaatgataaaaatttcaatgttagaaattttcaagaacgtgcagctataaatgctccaattcaaggatcagcatcagaaattatgcgtttagcaatgataagattagataaaaaattaaatgaaaataaaaatataaaatcaaaaatgttattacagatccatgatgaattaatttttgaagttcctaaaaatgatgaaaaggcaacaataaaaattataagaaatgaaatgaatagtgtggttaaaagtgaatatcattctttttccataccattaaccgttgatgtaaatattggggataactggggcatacttcattaat

SEQ ID NO: 256242 - DNA, 836 bp, Unknown
  Bacterial polypeptide expressing nucleotide sequence isolated from the Sargasso Sea
ttaattttttctaaaaacataaaattagaaaaattgcataatatttatgaaatttttgaaaagccactaatcaaaattttagcattaatggaaatttatggtgttaaggtagatcaagaatttcttcaacttctttcaagtaaatttaaaaaaaaaattggtaatttagaaaaagaaatttacaaagtcgcaaaaaaagaatttaacattggctctaccaagcaacttggcgaagttatgtataatgaaatgaaaatttcatcattaaaaaaaacaaaaaaaggtagttatgctactagtgcacaagtattagaagatcttgcttttaaaggtcataaacttccaaaattagttttagattggagacaggtaacaaaattaaaaaatacttattcagattctttgcaagaacatataaattttaaaacaaaaagagttcatacgtcatttttgttagcagcaacttctacaggtagactagcttcgagtgatccaaatttacaaaatattcctataaaatctgaagatggaaaagagattagaagagcatttgtggcagaaaaaaataataaattaatttcagcagattataatcagattgaaatgagaattttggcagatttagcagatgtaaaagagttaaagaaagcatttaaaaataaagaggatgttcattcacttactgcaagtcaagtttttaataccagaattaccgaagttaattctgatatgagaaggaaagcaaaagcaataaattttggaataatttatggtatttcacaatatggattagcaaaacaaattggcgtttctaatgttgaagcagaagagttttt

SEQ ID NO: 256243 - DNA, 794 bp, Unknown
  Bacterial polypeptide expressing nucleotide sequence isolated from the Sargasso Sea
gcaaacagacaaaaaacccccgaggatttaattgcacagattgaacctctgcatcaggccattatcaatcttggattgccactcattgcagttgatggagttgaggccgatgatgtgatcggaacccttgccatggaggctgagaaaaaaaacatcaaaacattgatcgcaactggcgacaaggatatggcgcagttggtcacagataatatccatctcattgacacaatgaaggacataagaatgggtccaagagaggttttggagaaatttgggattttgccagagcgatttattgattacttaactttggccggcgacacatctgataatattccaggtgtagaaaaggtcggccctaagacagccatcaagtggatcaatgagtacggatctttagaaggtgtgattcaaaacgctgatcaaatcaaaggcaagataggagataatctcaatgaagccttggatcagttggatttattcaagactttggtcaccataaaatgcgatgttcaaacggattctaatttctctgatttaatcataggagagtcaaatgaggatcttttacatgagcaactcagtgatttaggcttgcatggactgatcaagcaatttgatatccaatcacctgaaaagaaaccagatgtcgaaagcaattatcaaataataagaacaaagaatgagctggatgagctgatagaggtgatgaaaaaggctccttatatttcatttgatacagaaacgacaagcttagattatatgaacgcggaattggtcggtgtctcaattgc

SEQ ID NO: 256244 - DNA, 655 bp, Unknown
  Bacterial polypeptide expressing nucleotide sequence isolated from the Sargasso Sea
atggatattgacatactagaaaaattcaaatgtactgttcttaaatcaggttctataaccgttacagcacatattttatatgatatcattcgaaaactaactgatggctctgaaatattaattgaatttactggtggaacagcaagtctttcttgtaataaatcaaagtttcaacttccagttcttcctgtagaagattatcctacattgtttcagggagacttaccaattaattttaatttatctgttgaagagttatgtagattaattgatactacaaaatttgcgatttcaatggaagaaaccaggtattatcttaatggaatttatattcataaagaagataaaaaactcgtatcagttgctactgatggacatagattagctagaacaagcataaatttaccctcaggtgctgatttaattaatggagtaattgtacctagaaaagctatttatgaaataagaaagttaattgaagactactctagtgatgaagaggtttcagttagtatttcagatactaaaattagagttagtgtaagtgacacaactattactagtaaactaattgatggaaattttccagactatgaaaaggttatacctaaagaaaataaaaacattattagcttagatagtgccatttttcaga

SEQ ID NO: 256245 - DNA, 650 bp, Unknown
  Bacterial polypeptide expressing nucleotide sequence isolated from the Sargasso Sea
aatggctcatttatcagaagataaaaacctcacaaatgcttttaataataatatgatgtttcattcttcaaccgctgcagaggtttttggcgtagcaattgaagaggtaaataaagatcaaagaaggagcgccaaagctataaactttggtttaatgtacggcatgtccgcttttggactcacaagacagctgggaattaccagagctgaagcgcaagcatatttagatacttattttgcaagatataccggggtaagagattacatggataatattaaagctaaagcgaaggaagatatgtttgttgagaccattatgggaagacgtctttatcttaatgaaataaatgccgcaaatggattaagaagacaggctgcagaaagagcagctattaatgctccactacagggatctgcagcagacataattaaaaaggcaatgcttgatattgataaaattatttcaaatgaaatgcctgatgtaaaaatgataatgcaggttcatgacgaacttgtgtttgaatgcccaaaagaaaacgctgacttagttatgaagaaaatgaaagaaactatggagcaaaccgtagaactaaaaatacctttgattgccgaagcagctgttggctcaaactggaatgaggcgcattagt

SEQ ID NO: 256246 - DNA, 476 bp, Unknown
  Bacterial polypeptide expressing nucleotide sequence isolated from the Sargasso Sea
catgaaattcgtaatatccagggaagcccttctgcgcccactgcaattggtagcaggtgttgtagaaaagcgtcagactctgccagtactttcaaacgtactgcttgaaattgaaggtcagcagctgtcgctcacaggtaccgaccttgaagttgagctggtaggccgggtcactcttgatgaagtcggccaggaaggttcgattacggttccagcgaaaaagctgatggatatctgtcgctctctgccggatggtgctcagattgagatcgagcaggatgaagcgcgcgttaatgttcgctcaggtcgttcgcgtttcacgctttctactctgcctgcgacggaattcccgaatgtggatgcgattgccgacgagcagtctttctctctgcctcaagccagcctgcgtcatattattgatcgctcaagctttgccatggcacagcaggatgttcgttactacctgaacggtatgc

SEQ ID NO: 256247 - DNA, 612 bp, Unknown
  Bacterial polypeptide expressing nucleotide sequence isolated from the Sargasso Sea
ttgaaaaggaagacataaattctgacgaaagaagagttggtaaaaccattaattttggagttatttatggaatgggaataaaaaaattcgcacgatctacaggggtaagtacgactgaagcaaaagaatttttgattaaatataaagaaaggtatgccaagatttttaaatttctagaacttcaagaaaggcttgctctatcgaaaggttatgtagagacaatttttggaagaaagagagaatttaaatttgataaaaatggacttggtagattaataggaaaagatccatatgaaatagatttgcaaactgctaggaaagcgggaatggaggctcaatctttaagagccgccgcaaatgctcctattcagggttctagtgctgacattattaaaatagctatggttcaattaaacaaaaaattattagagatgaatattccagttaaaatgcttttacaggttcatgatgaattattgttcgaggtccagccagatttcttagaaatcacaaagaatttagtaaaggaaactatggaagattgtgtgaaattaaacgtaccacttctagtcgatatcggagttggaaataactggatggaaaccaaataat

SEQ ID NO: 256248 - DNA, 824 bp, Unknown
  Bacterial polypeptide expressing nucleotide sequence isolated from the Sargasso Sea
aatggaaatcagaggaataaaattggataaagatttcttattaaaactttcaaaaaaatttgaaaaaaaagtagctgaattagaaaaagatattttcaaaatatcaaaaaagaaattcaaaattggttcaacaaaacagcttggtgaaataatgtataatgatttaaaaatttcagcattaaagaaaacaaaaaaaggaagctttgccacgagtgctattgttttggaagatctggcatttaaaggacatacattacctaagttagtcttagagtggagacaaatttcaaagctccaaaatacatattcagactcacttccagaatttatcaatcctgtttcaaaaagggttcatacatcttttttgttggcagctacaacgactggaaggttagcatcaagtgatccaaatttacaaaatattccaattaagtctgaagatggaaaagaaataagaaaagcctttatttcagaaaaaggaaattcacttttatctgctgattataatcaaattgaaatgagaatactttctgatttagcagatgtgaaagaattaaaaaaagcgtttaataataatgaagatattcattctttaacagccagccaaatttttaacgtagaaattaataaagttactaaagagatgaggagaaaagcaaaggcaattaattttggtataatctacggtatttcacagtatggactagctaaacaaatttctgtttcaacagctgatgctgaaatttttctaaaggcgtattttaaaaaatttcctgagataaaagactacatgtcgtccacaataaaacattgtagaaggaatg

SEQ ID NO: 256249 - DNA, 294 bp, Unknown
  Bacterial polypeptide expressing nucleotide sequence isolated from the Sargasso Sea
tgatgccgcctcgagagggcttgttgatgatgtaagagaaatactcgagaatgttcaatatagaccaacaagtggtctatttaaggtttatcttattgacgaagtccatatgtttgggccttctgcctttaatgcgcttttgaaaactcttgaagagcccccaaagcatgttatttttatcttagccacaacagaaccacataagattcctaagaccatactctctagatgtctacaatttaatttaaaacttgtctcagacgatctgctttcaaaaatcttgaacaaattttt

SEQ ID NO: 256250 - DNA, 788 bp, Unknown
  Bacterial polypeptide expressing nucleotide sequence isolated from the Sargasso Sea
aataaatggtattagactggacaaaaattttttaaaaaaattatctctaaaatttaataaaaaaattcaaaatcttgaacaaaaaatatttaagatttcaaaaaaaaaatttaatattggttcaacaaagcagttaggcgaaataatgtataatgatttaaaaatatctgctttaaaaagaactaaaaaaggaagttttgccacaagtgcatctgttttagaagatttagcttttaaaggaaatgaatttccaaaacttatattagattggagacaaacaagtaagttaaaaaacacttattcagatactttgccagatcatattaatactaaaactaatagagtgcatacttcttttttgttagccgctacaacgactggaagacttgcgtctagtgatcctaatttacaaaacattccaattaaaactgaagaaggaaaagatattcgtaaagcttttattgctgaaaaaaatagaaaactaatttctgcagattataaccaaattgaaatgagaattttagctgatcttgcggatgttaaagctctgaagaaagcatttataaataatgaagatattcattcattgacagcgagccaagtattcggaaaagatatcaaaaaaattaattctgaaatgagaagaaaagcaaaagcaattaattttggaattatttatggaatatctcagtatggtttggctaaacagataggagtttctaatattgaagctgaagattttttaaattcatattttttaaaatttcctgaaattaaagattatatgt

SEQ ID NO: 256251 - DNA, 859 bp, Unknown
  Bacterial polypeptide expressing nucleotide sequence isolated from the Sargasso Sea
gtaccgggttttcgcggtgcgcgtttctcccgaagccagcattgcctgccggcgattgtcgagcgcgtatggcagggccgtgaggcggccaaacgcgagcacaacgcgccgctgtcgcaggcgctgaaaatcatcatgaacgccttctacggcgtgctcggctccagcggttgccgctttttcgacacgcgcctggcctcctccatcaccctgcgcggccacgagatcatggcccgcacccgtgcgctgatcgaagccgaaggctatgcggtgatctacggcgacaccgactccacttttgtctggctcaagcgcccgcatgctgaagaagacgccgcacagatcggccgcacactggtggccaaggtaaatgcctggtggcgcgatcacttgcgtgatgagtacggcctggaaagcgccttggaactgcagttcgaaacccattaccggcgctttctgatgccgaccattcgcggcactgaggaaggcagcaagaagcgctacgccggcctgatcacccagcctgacggtggccacaagatggtctacaaaggcctggaaaccgtgcgcagcgactggtcgccgctggcccagcaatttcagcgcgaattgtatgagcgcatcttcctcggccagccctaccaggactatgtgcgtgactacgtcgagcgcaccctgagcggcgagctggatgagcaactggtctaccgcaagcgcctgcgccgcctgctcaccgattacgaacgcaacgtaccgccccatgtccgcgccgcgcgcctggctgacgagttcaacgccgcccacggccgcccgctgcaataccaacgcggcggctggatcagctacgtgatcaccaccg

SEQ ID NO: 256252 - DNA, 694 bp, Unknown
  Bacterial polypeptide expressing nucleotide sequence isolated from the Sargasso Sea
gaagtgctcggcatggtccatttttcgatggcccagcaggacatccgctactacctgaacggcatgctgctggtggtagatggcgaccaactgatggcagtcgcaaccgacggccaccgcctcgcgttctcgtcgatgaagatcgaaggctcgttcgcgcgtcaggaagtgatcattccgcgcaagacgattctcgaattgcagcgtctgctggaagacatcgacgacacgctgaagatcgacattgcgccgacccaggtgaagttcaccttcggccaggtcgaactggtgtcgaagctggtggaaggcaaattccctgacttccagcgcgtgattccgaagtcgcacaagaatcagttcgtgatcggccgtgaagaactgcagcgctcgctgcaacgcgccgcgattctgacttcggacaaattcaagggcgtgcgctgcattatcgagccgggccagttgaagatcatgtcgaccaacgccgatcaggaagaggcgcaggaagaactggaaatcgcgtacgacggcgacagcgtcgatattgggttcaacgtcacgtatctgctcgacgtgctcgcaaacctgaaggtcgacatgttgcaagtgagccttggcgacgccagctccagcgcgttgatcacgattcccgagaacgacgaattcaaatacgtcgtgatgccgatgcgcatctaac

SEQ ID NO: 256253 - DNA, 718 bp, Unknown
  Bacterial polypeptide expressing nucleotide sequence isolated from the Sargasso Sea
atgcgcactagtgattcaatcagaaaaaagcataaaaaatatttatttgatgctataaaaaacttttacaaagagccattggttattgaaaaaggaaaggggttttatgtttcagatagtgatggaaattcatatttagatttttttggtggcattctcactgtgtccgttggtcatgcgaatgatgaagtaaatacagcagtgaaagcacaggtcgatcgactaagtcatatttcgtctctttatcctagtatacctgttgttgaacttgcagaaaagcttgttggattggctccagacaatctggaaaaagtattttttaatgcatctggaactgaagcagacgagacagctgttatgatggctcaactttataccggaaatacagaggtcatagctttacgtcacggttattcagggcgttccttgctcgcgcaatcattgaccggccatgcgccatggagagcactgcctagccaggttggctcggtcaaacatgctttagcgccatattgttatcggtgccctctgaaaatgacatatccagaatgtgggattgcctgtgcaggagatgtggaagaacttattaagacaaccactactggtaaagtagctggtatcttggcagaacctattcaaggtgtcggaggatttattacccctccagatgaatattttagtaaagtatcggatatcattcatgaccacggtgggatat

SEQ ID NO: 256254 - DNA, 403 bp, Unknown
  Bacterial polypeptide expressing nucleotide sequence isolated from the Sargasso Sea
ttgtcgacgggaatttcccggattataagagagtcctgccaaaagtgggtaacaaaagttgtgactgccaataggcaagaactcaaaaatgctttttctagggtttcgatactttctaatgagaagtatagaggcgtgagagtgatgctatcacctggagagctaagggttctagctaataacccagaacaagaagaggccgaagaggtggtagttgtagattacgatggagattctctagagattgggttcaacgtgacttatgtgattgatgtcttaaatactcttcatagcgatgatgtgaagataaccctctcggacgcaaacagcagtgcgcttctggaggcgctttccgataatgcccctgaagcactctatgtagtaatgccgatgagactttaga

SEQ ID NO: 256255 - DNA, 670 bp, Unknown
  Bacterial polypeptide expressing nucleotide sequence isolated from the Sargasso Sea
tatgaaattaaaagttaatagctcagatctttcaaaggcattgtctcaccttcagggagtagtagaattaaggcatactcttcctattttatctaatgtaataattaaagctgaggatactcatctaaaactttcatccactaatcttgatatattatgttctgaacaaatttcagcaaatatagatataaatggtgaaatttcagtgccagcaataacacttcatgaaatagtaaaaaaattacctcaaggttcagatattgatataagtatggatgaaacaggcaatagcataaatattaaatcaggtagatcgcggtttaacttatctacattgcctaccgatgatttccctgacatttctcaggatgatctatcagttaggtttgtgatgagcgtagacgatctaaaaactatgattgacaaaactaagtttgctatttctaacgaagaatctcgatattaccttaatggaattttctttcattcagcccataaaaatggaatagacgttttgcgttctgtagcaacagatggacataggctggcacagtatgatatgccacttccacatggtgctgagaagatgtcaggtattataattccaaaaaaaacaactttagaattaagaagaatacttgatgatgctaatggtgatgtacaaatagag

SEQ ID NO: 256256 - DNA, 893 bp, Unknown
  Bacterial polypeptide expressing nucleotide sequence isolated from the Sargasso Sea
actaggccctgcgattgaagcaaatcaagagaaagctataggacagaatctgaaatttgatatacctattttggcaagacatggaattgttatcacaaaatttttagcagatacgatgttgatgtcatatgttttaaatagcactgcgactcgccacggcatggataggctagccgacttttatttaaattacaccactacaaaatataccgatgtaacaggaacagcatcaaaacaaatacccttttctgaagttaaacttgatattgcaacagattatgctgctgaagatgcagacattaccttaaggctctttaatgtgttgcaaccgttgttaaaggagaaacctactcaagaaaaacttctacatgatcttgaatatccattagtccatgttctttcaagagttgaaaagaacggcgcaaaaattgataaagaaaaattagccagccattcaaaagagttaagcaaaaaaatttctaagctgtcttctgaagcattcaaaatttcaggagaagaattcaatcttgattctccaaaacaacttcttgaaattctgtatgaaaaattaggactacctgttctaaagaaaacaccaaaaggacaaccatcaactaatgaagatactctacaaagacttgcagaagaatacgagatgccaaagattattttgcaatatagaactttagcaaaactaaagtctacttacactgatagtcttattaatatagaaaatcctaagaccgaaagaattcatacctcatatcaacaagcagttacttctacaggcaggctttcgtcaacagatccaaacctacaaaatattcctataaaaactgctgagggaagaaggattagagaggcttttgttccgaaaaaggcaatgttttatt

SEQ ID NO: 256257 - DNA, 736 bp, Unknown
  Bacterial polypeptide expressing nucleotide sequence isolated from the Sargasso Sea
attagaaaagcatttatagctgaaaaaaataatttacttatttcagcagattataatcaaattgagatgcgaatattagctgatatggcagatgtaaaagaattaaaaaaagcttttaaaaacaatcaagatattcacgcattaacagcaagtcaggtatttgatgttccaattaataaagttacagatgattatagacgtaaagcgaaagctataaattttggaataatttatggaattactcaatacggactagcaagacaaatttctgtatctaatcaagaagcgctagatttcattaatgcttattttaaaaaatttcctgaaataaaagaatatatgagttcaactattaaaacgtgtagaaagcaaggttatgtcacaaatatttttggaagaagaatacatttaagaggtattaatgataaaaattttagtgtcagaagttttcaagaacgtgcagcaatcaatgcacctatacaagggtctgcggcggatataattcgattagctatgattaaaatagataaaatcctcgaagagaaacaaaatgcaaaaatgttgctacaaattcatgatgagttaatttttgaatgtttgaaaaaaaatgaagcaacggttaaaaaaattatcaaagacgccatggtatctgtttcaagctctgatcatcatatgttttcgataccacttgaagtaagtattaattcaggtaacaattggggagaggcccattaaa

SEQ ID NO: 256258 - DNA, 673 bp, Unknown
  Bacterial polypeptide expressing nucleotide sequence isolated from the Sargasso Sea
taatataaaaactaaaaaaatccattcaacttttagtcaaacagttacctcaacaggaagattgtcttctaggaatccaaactttcaaaatattcctattcgtacagaattaggtagagaaattcgcaaagcatttaaatctgaaaataaagattggaaaatattttctgcggattattctcaaattgaattaagaattatggctcatttatcaaaggacaaagctttagttgatgcctttaataaaggtgaagatatacattcaagaacagcagcagatgtttttaacgtttctattgatgaagttattccagatatgcgccgtacagcaaaaatagtaaattatggactattgtatggagcgggtccatttcgaatgagtcaagagttaggtatgccgcaaaaagaggcaaagtcaattattgaagcatactttgaacgttattcaggaataaaaaaatatattgattctgttattgaatttgctcgtgataataaatttgttgagacaattttaggtcgtcgtcgtcaagtctgggatattgatagcaaaaatcatcttcacaaagaagctgcaaagagaatggctattaatatgcctattcaaggtaccaatgcagaaatgatcaaaatcgaaatgattgatatccaaaatgaattaatatcaaaaaaa

SEQ ID NO: 256259 - DNA, 514 bp, Unknown
  Bacterial polypeptide expressing nucleotide sequence isolated from the Sargasso Sea
tggtattttatatggaataagcccatacggtttagctaaacaattagatgttactaacagtgaagcaaaaatatatatagaaaattattttgaaaaatatccaaaaatcaaacagtatatggacgatcaaattgcatttgcaaaaacaaatttgtatgtggaaacaatttttggcagaagatgtaatataaaaaatataaatgataaaaattttgcagtgaggggatttgctgagagacaagcaattaacgctcctatacaaggtacggctgctgatataattaaattagcaatgatagaattaaataaaatgattattaatgaagaattagaagttaaaatacttcttcaagtgcatgatgaattaatttttgaaattatggagtcaaaaaaagatacttcagttgagaaaattaaatatgtaatggaaaatacgcatttagaattcaaagattttcaagtgccacttatagttgattatggcgttggagaaaattggggagatgcacattaa

SEQ ID NO: 256260 - DNA, 908 bp, Unknown
  Bacterial polypeptide expressing nucleotide sequence isolated from the Sargasso Sea
ttttaaatcattaaaaacagaaaaattattgaatatttatgagttatttgaaaaaccactaataaaaatactagcagagatggagataaaaggtattaaacttgataaatcttcactaatcaaactgtcttcaaaattttcaactaaaatcgaaaaattagaaaaatctatttttaagatttcaaaaaaaatatttaacattggatcaaccaaacaacttggtgaaataatgtataacgatttaaaaatagcagctttaaaaaaaactaaaaaaggaagttttgctactagtgcttcagttttagaagatttagcttttaaaggttatgaatttccaaaactcatcttggaatggaggcaaattagtaaacttaaaaatacttactcagatgcattgccagaacatataaatcaaaatactaaaagagttcatacatcttttttgttagcagctactacaacaggtagacttgcatctagtgatccaaatctgcaaaatattccaataaaatcagatgatggtaaggatataagaaaagcgtttgtttcagaaaaaaataataaattgatttcagcagactacaaccaagttgagatgagaattttagctgatctagcagatgtgaaacagctaaaaaaggcatttttaaataatgaggatattcatactttgacagccagtcaggttttcggaaaagaaattaataaaattgattcagaaaccagaagaaaagcaaaagcaattaattttggtataatttatggtatttcacaatatggtttagccaaacaaatcaatgtttcaaacaatgaagcagaagaatttttaaattcttattttaaaaaatttccggaaattaaagattatatgaaaaacacagtgaatttttgtagaaaaagtggctatg

SEQ ID NO: 256261 - DNA, 526 bp, Unknown
  Bacterial polypeptide expressing nucleotide sequence isolated from the Sargasso Sea
ataattaattttggaattatatatggaatttctgcctacggtttagctttacaactagaaatcccaaatagtgaggcaaaaatgtacatggatcaatattttaagaaatatccgggtattaaagattatatgagaaacacgattcaagaatgtagatcgaatggttatgtcaaaacacctttcgggagaaggatatttattccatttataaatgataaagttgttacaagaaaaaattttgctgaaagatctgctattaatgctcctattcagggtggggctgcagatatgataaaattaactatgccacaagttcagaaatttttagtagatgaaaaattacagacaaagatcttactacaggtccatgatgaattattattcgaatcgcctcaaagtgaaatagatataatcaaaaacaagattcctgaaataatgacaagttcacataaaaaatttatttctttaaaagtgccaatcaaagtcgatataggtgttggaaatagttgggatgatgctcattgag

SEQ ID NO: 256262 - DNA, 943 bp, Unknown
  Bacterial polypeptide expressing nucleotide sequence isolated from the Sargasso Sea
ccgaatagtaggcgtttctttttgcagtggtataaatgatgcttattatattcccatagcacacaaaggcatcaaaagtctaagtagagactttgtgataaaaaagataaaaagtattcttgaagacaaaagtattaaaaagataggtcagaatattaaatatgacctaatgatttttaaaaaatatggagttaatattgacccgatagaagatacaatgcttctttcatatacattagacgcaggaaacaataggcataatatgaacactttgtctgaaattcatttaagtcataaaactatttcatacaaagatgttgtaggatctggaaaaaaacaattaaatttctccgaagtcggcctgcaagccgctacaaaatatgctgcagaagatgcggacatcacattaagactttataatattttaaaaaatcgggtagatgaagaaaaattaaacaaaatatatgatgtattcgaaaaaccaatggtaaaattattgtccaaaatagaaatgaatggaattaaaatagatgacaattatttaaaaaaattatcaaaaaaatttgaagaaagactaaaaaggaaagaaaaagaaatttttaaaattacaggcaaagaatttaatatagcttcaccaaaacaacttggggaaattatctataatgatctaaaaattgctaaattaaagaaaactaaaaaaggcagtttggcaactagcgctaagatactcgaggatctcgcactaacaggacacaaatttcctaaattagtaattgaatggagacaggactctaaattaaaaagcacttatactgatgctttacaggaccacataaacaaaaaaacaaaaagagttcacacttcatttttattagcagctactaatactggaagacttgctttcagcgaccctaatttacaaaatattcccattaaatcggcc

SEQ ID NO: 256263 - DNA, 913 bp, Unknown
  Bacterial polypeptide expressing nucleotide sequence isolated from the Sargasso Sea
aaatcatttgggtcataaaactatatcttttaaagatttagttggaagtggaaaaaagaaaattacatttgcagaagttgatctaaaaaaagcgacagaatatgcaggagaggatgccgatgtaacttttagattatttaaattattgaaaaaaagactagataacgaaaagttaaccaaaatttatgagatcttagaaaagccgatggtacatgtactgtcagatattgaaacaaatggcgtaaaaattaataaagaacatttaaaaaaattatcaataaaatttactaataaaattttcaaaatcgaaaaagaaattttttcattagtaaaaagggagttcaacataggatctccaaaacaacttggtgaaattatttataatgaattaaagattgcaaatttaaaaaaaacgaaaaaagggagtttggcaactagtgcaaaaattcttgaagacctagcttttaaaggtcacaagtttccaagtttggtgctagattggaggcaactatcaaaactcaaaaatacttacaccgatgctttacaagaccacataaattctgaaacgaatagggtccacacatcttttttgctagcagcgacaaatacaggtagacttgcgtctagtgatccaaatttacaaaatataccaataaaaacagaagacggtagagaaataagaaaggcgtttatagctgaaaaaaataatattttaatgtccgcagattataatcaggtagagatgagaatactcgctgacctagctgatgttaaagagttaaaaaaagcatttattaataaagacgacatccatagtattaccgcaagccaagtttttgatgtcccagttaaagatgttgataaaaatttgagaagaaaagcaaaagctattaattttggtataatttacgga

SEQ ID NO: 256264 - DNA, 975 bp, Unknown
  Bacterial polypeptide expressing nucleotide sequence isolated from the Sargasso Sea
ttggccttccgcagcttctacgccttcagcaaagggggggaatggggactcgccaccaaagacggcatccccacaagcgtcacctatgggttcctcaaggcccttctcgacaactgcaagaccctgatacctcagggtgtagcgatcgccttcgacacccccgagcccaccttccgtcataaggcggacccgaactacaaagcccatcgtgatgaagcacctgaggtctttttccaagacctcaatcagctgcaggagatccttcgccaccagctgcagttacccctctgcctagcgcctggctacgaagccgacgatgttcttggcaccctggcgaaccgggccgccgatgcgggttggcgagttcgcatcctcagcggcgatagggatctgttccaactggttgatgacgaccgggacatcgcggtgatgtacatgggtggtggtccttacgcacgcagcagcgggccaaccctgatcaacgaagagggcgtggttgccaagctcggcgtcgccccaatctccgtggtggatctcaaggccctcaccggtgacagctccgacaacatcccaggcgtgaaaggtgtcggtcccaaaaccgccatcaatctgctcaaggagaacggtgatctggatgccgtctaccgggcgctgcgcgaagtggaggcggaaggtcccaaagcaagccgaggtgcgatcaaaggggcgctcaagggcaagctcagcaacgaccgcgacaaggcctacctctcacgcgagctagccgagatcctggtggacatccccctgccggaggagcccgtactggagctggggccagtggacgccgaagggctcgaatcgcggcttggagcccttgaactcaacagcctggtgcgacaggtacctgccttcgtcgccaccttctccaccggtgggtctgcggccaacaagcaccagctgcagagcaccaccaccaccggatcgcgaaaccac

SEQ ID NO: 256265 - DNA, 907 bp, Unknown
  Bacterial polypeptide expressing nucleotide sequence isolated from the Sargasso Sea
taaatatttatggagttattttgaaaaaccattaattaaaatactagcagagatggagataaaaggtattaaacttgataaatcttcgctaaacaaactgtcttcaaaattttcaacgaaaatagaaaaattagaaaaatctatttttaagatttcaaagaaaacatttaatataggatcaaccaagcaacttggtgaaataatgtataatgatttaaaaatagcagctttaaaaaaaacaaagaagggaagctttgcaactagtgcttcagttttggaggacctagcttttaaaggttatgaatttccaaaactcatcttggaatggaggcaaattagtaaacttaaaaacacttactcagatgcattaccagagcatataaatcaaaatactaaaagagtacatacatcctttttgttagcagctactacaacaggtagacttgcatccagtgatccaaatttacaaaatattccaataaaatcagatgatggtaaggatataagaaaagcttttgtttctgaaaaaaaccacaaattgatttcagcagactacaatcaagttgagatgagaattttggctgatctagcagatgtaaaacagctaaaaaaggcttttttaaataatgaggatattcatacattgacagctagtcaggtttttggaaaagaaattaataaaattgacacagaaacaagaagaaaagcaaaagcaatcaactttggaataatttatggtatttcacagtatggtttagcgaaacaaatcaatgtttctaacaatgaagcagaagaatttttaaattcttattttaaaaaatttccagaaattaaagattatatgaaaactactgtgaatttttgtagaaaaagtggctatgtaagtaatatatttggaagaaaaact

SEQ ID NO: 256266 - DNA, 901 bp, Unknown
  Bacterial polypeptide expressing nucleotide sequence isolated from the Sargasso Sea
attgtgatgctgaaccaccgcaacgagcgtataggaataagcgaagtgggagaaaaattcggatgcgctcctgagcaggtgattgagatgctgggcctgatgggagattcttcggataatattcctggagtaagaggagttggagaaaaaaccgcggttaagttgatatcagattttggaagtatagaacgtgtttatgaaaatcttgaaacaattaccagcaaaagcctgaaagaaaaattggggaatgatcgggaaaatgcatttctttctagggatctagccactattgactgtcatgtgcctctatctgtctcactaaaagatgtccatcttggagaaacagatttatataacaatgatgaattatatgccctgctcgaagagctagagttcagaactttgatgaaccgtcttgtaaaaaagagggaggctgtatcagcaagtcaggagtctggatctactgatgctgaagctagtaaattatcaagtaatgaaaatcaggaactgctttcttcggaaattgaaattgatcatgcctatctggaagtcaaatgctctttaattcaaactggagaagaattacgatccatattaagtaaattttctaataaaaataggatagctcttgctttggatgtgaaaggtgagcatcagcttgatttttggctgaatggactggcgatttgtggtgatggtgtaaatgcagtttatattgatttagataatactgaaacagaaaggaaagaaattattgggttacttaaaacacatctggagtctgctgagcatccgaaaattttctatgatcttaaaaaagcagtacagcttttttcaaaattaggaattaagattgagggtgttgaatcaggatatattaattgctgcacacatgactgat

SEQ ID NO: 256267 - DNA, 751 bp, Unknown
  Bacterial polypeptide expressing nucleotide sequence isolated from the Sargasso Sea
ttagacggaaaagagattagaaaagcttttgtagctgaaaaaaataatttacttatttcagcagattataatcaaatagaaatgagaattcttgctgatatggctgacgtgaaagaattaaagaaagcttttaaaaataatcaggatattcattctttaacagcaagtgaagtctttaatgttccgatttcaaaagtaacagatgattatagaagaaaagcaaaggcaataaattttggaattatttatggtatcactcaatatggattagcaaaacaaatttcagtgtcaaatgaagaagctttaagttttattaatgcatattttaaaaaatttcctgaaataaaagattatatgaagttgactgttaaaacttgtagacagcaaggctttgtcacaaatatttttggaagaagaattcatcttagaggaatcaatgataaaaattttagtgtacgtgcatttcaggaaagagcagcaattaatgccccaatacaaggatcagcagcagatataatcaggttagccatgattaaaattgataaaattcttgaggaaaaaaagaaagcaaaaatgcttttacaaatacatgatgaacttatttttgagtgttttaaaaaagatgagattgaagtgaaaaaaattgtcaaagcagccatgacgtcagtttcaagttcagatcatcacatgttctcaatacctttagaagtaagtgttaactctggaaacaattggggagaggcccactaaa

SEQ ID NO: 256268 - DNA, 356 bp, Unknown
  Bacterial polypeptide expressing nucleotide sequence isolated from the Sargasso Sea
cgagacgttgttgggccgacgtatccacctcgatcagattaacgccaagaacccgatgcagcggaactatgccgaacggcaggccatcaatgcgccaatccaaggatcggccgcggacatcatcaagcgcgcaatgattcatgtcccaaaggccatcactgccgccggactagacgcccgcatgctccttcaggtacacgacgaactgttgttagaagcgccggaagaccaggttgagaaaacgaccgacgtcgtgaaggaaacgatgcaggccgcgacctatccggccatcgagttgaaggtcccgctggtagttgacgcgggcgttggcgacgattgggcgaccgcacactgac

SEQ ID NO: 256269 - DNA, 853 bp, Unknown
  Bacterial polypeptide expressing nucleotide sequence isolated from the Sargasso Sea
aataaatttaattaaacctattttagaagacccttctattttgaaaattggacataatatcaaatttgacatgaatgtattaagacaaaatcataatggtaacattgaagtttccccagttgatgatactatgtgtatgtcgtattgtaccaatcttggaaaagtacaaaatcataaattagatacactcgcacaaacagagctcaattatacaacaattaaatatgaagatttgtgcggtaaaggtgtaaaccaaaaaacttttgatttaatcaatccacttgaagctcttaactacgcagctgaagattcagatgtcgctcttgctctttatcaaaatttaaagttaagattaatgtttgataaaaaaaattttgtttatcaaaaattagaacgtgaattaatatcggttttatctgacattgaaaatgaaggtataattgtaaatgaaaaaacacttaattcactttcagaagcattaactaaaaatattatagaattagagaaaaaaattttttcaataacaaaagaagaattcaacattggttctcctaagcaattaggtgaaatactttttgacaaattaaaattagataagggaaaaaaatcaaaaactggtgcttggcaaactagtgtttcaattttagaggatttatcaaataaaggacatgaaatagcagatttacttttagattggagacatttttcaaaacttaagagcacgtactcaaaagctttaattgaacagataaatattaaaacaaaaagaatacatactagttattcaatggttggaactagcacaggaagattgtcttcatcagatcctaatcttcaaaatattccaataaaa

SEQ ID NO: 256270 - DNA, 325 bp, Unknown
  Bacterial polypeptide expressing nucleotide sequence isolated from the Sargasso Sea
ataagggataaaaacccaatggttagaaattatgcacacaggcaagctatcaatgcccccatacaaggagctgcggctgatataataaaaagagctatgataaaatttaaaaaaatagcaaaagaagatgtgtttaagaatactaaattacttttgcaagtacacgatgaactaatttttgaaataaaaaatgattcgtctcttccgttagcaataaaaaaaatttctaatctaatggccaatgcacacttacctttagtttcatttgatacacccattgtggtctctgtggggcaaggggaaaattgggatgctgctcattaat

SEQ ID NO: 256271 - DNA, 705 bp, Unknown
  Bacterial polypeptide expressing nucleotide sequence isolated from the Sargasso Sea
attgataaaaagaactaaaaataccgatactcaattctgtagagattgcctacatcaaacaaagaaattaagtgatttatgcgataaatgcttatctccaagagtaattcatcacaaagaattaaagaatttatcaattgctcatatagattgtgatgctttttatgcttctgtggaaaaaagagataactctgatctaaaaaacaaacctcttatcataggtgggggtaatagaggtgtagtttcaacagcttgttatattgcgagaacaaaaggtattcactctgcaatgccgatctttaaagcaagaaaattatgcccagaagcaataattttaaaaccaaatatgagtaaatataagaaggtaagctatgaaataagagatttaatgaaagagcttaccccgcttgttgaaccaatatcactagatgaagcatttctagatttatcaggaacatttaagttacatcaaaaaataccagctatattgctagctgaattagttaataaaataaaaaagcatataggaattaatgtttcagttggattatcatacaataaatacttagcaaaagtatgttcggatttagataaaccaaaagggttttcagtgattgggcaagaagagtcaaaagattttttatccaataaacctgtaagtttattatggggtgtaggtaaaaaattcacaaataaattaaactc

SEQ ID NO: 256272 - DNA, 616 bp, Unknown
  Bacterial polypeptide expressing nucleotide sequence isolated from the Sargasso Sea
tgaagatattcatacactaactgctagtcaagttttcaatattgatatcaaaaaagttgatagtgaaaaaagaagaaaagctaaagctataaactttggtataatatatggaatttcacaatatggacttgcaaaacaaattatggtttcaaatgttgaagctcaggaatttcttaattcatatttcaaaaaatttcctgaaataaaagattatatggatagaactataaaattttgcagaaaaagtggatacgttaataatattttcggaagaagaacacatatttcaggtataaacgataaaaattttaatgttagaaattttcaagaaagagcagcaataaacgcacctattcaaggttcagcttcagaaataatgaggttagcaatgattaaaattcataaatatttagaaaattcgagtaccctgaaatctaaaatgctactacaaattcatgatgaattaatatttgaagtgccaaaaaatcaactaaaacaagcatgtgaagttataaaaaatgaaatgacaggtgttagcaaaagtgatttacatgctttttctatcccattaactgtagatattaattcaggagacaactggggaattattcattag

SEQ ID NO: 256273 - DNA, 879 bp, Unknown
  Bacterial polypeptide expressing nucleotide sequence isolated from the Sargasso Sea
atacaaataaaaactttttctgatttaatagaaattgaagaggagggtgaaactacagtttctgcaagaaaaatgtcagaattatgcagatcactgccagaaggagaaaaccttaacttttctctatcaaacggaaaattgactgttagctcaagtaattttcatgcagatttcgcaacaatttcttcagatgattttcctgaaatagaaatcaacgaagaacagaccccaattactgtagagtctagtgttctaaaaagattattatctaaaacatcgttttctatggcctcacaagatgtgagatattatttaaatggcatgcttttagagatagaaggcaataagataaacggagtagcaactgacgggcacagattggccttttcatcagcaacaactaatgctgcagatttagaagtaagaaacatactcccaagaaaagcagttctagaactttcaaaacttctttcaccgaaagaagggactgtagagctcctcataggagcttcctatgtagatgtgcggtctgaaaatcttaatttttcaagcaaattaatagatggaaagtatccagactataataaagtttttccaaccggggagccactacctctagaaataagtaaagaaacccttcaatcagctctctctagggcttctgttttgtcgaatgaaaagtacagaggtgtaagattccaattatctcaaaataagcttaaacttaccgctaacaatccagaacaagaatcagctgaagaagaagttgatgtgatttataaaggttcagaccttgaagttgggtttaatataggatatttattagatgttcttaactccatagaaagtgaaactgtttcctttgaattctatggcgaa

SEQ ID NO: 256274 - DNA, 606 bp, Unknown
  Bacterial polypeptide expressing nucleotide sequence isolated from the Sargasso Sea
attcattaacagcaagccaagtgtttaataaaagtattaataaaattgatgaagatatgagaagaaaagcaaaagcaattaattttggaattatttatggaatttctcaatatggattggcaaagcaaattaatgtttcaaatattgaggcagaagattttttgaattcatactttaataagtttccagaaataaaaaactatatggaacaaaccattaaatcatgtagaaaaaatggatatgtaaaaaatatttttggaagaaagactcacattacaggaatcaatgataaaaattataatgttcgtaactttcaagagagagctgcaattaatgctcctattcaaggatctgcatccgaaatcatgagattggccatgataagaataagtaaaaaatttaaagaattaaaaaatgaaaattgtaatgttttacttcaaattcatgatgagcttatttttgaatcgcataaagattcagttgaaaaacatactaaaattataaaagaagaaatgattagtgttaaagaaagtgaacttcattcattttcaatacctttattagttgatataaatataggtaaaaattggggtgacttgcattaac

SEQ ID NO: 256275 - DNA, 922 bp, Unknown
  Bacterial polypeptide expressing nucleotide sequence isolated from the Sargasso Sea
cttgtatggttttactaatcaagtgctaaaattaattgaattagaaaaaccagattatgttgcatgtgctttcgactccaaagaaaagacctttaggcataaaatgtataatgattataaagctcagagaccagagatgccaaatgaattacaattacagttgccccatttatgggaattattggattcattacgcttaccaacattaaaaaagcctggttttgaagcagatgatttaattgggaccttggcatttgaagcaaataagaataggctcgatacatatattgttagcggggataaagattttatgcaattaattaatgagaatatatttttatattcaccgggaactcgctggaaacctaaagcgacaatttacgattcaaaaggagtagaaaataagtggggggttaagcctaacaaaataattgaccttcttggtttaatgggggatgcctctgacaacattccgggagcatccggaattggtgaaaaaacagcagtcaaattaataaaagattatggttctcttgaaaatgcattgaaaaatgctgaaaatattaaaaataaacgtattcaaaatggtttaaaaaataatcaggacctgactttactatgcaaaaaattagtaaccataaaaacagatttagatttaaaactttcaataaaggacttaaaattaaaaaaaattaataaaaataattcacttaaaaaattcagggagcttgagttttttgccttagaaaaacttatttcaaatggtgaagacgatcatgtaaaattaaaaccaaaaagtaactttaaaactgtaacaaataaagatcagttgaaaaaattagttacccattgcatcaattcaaaaaaattaacatttatcatagaggttacatctaaaaatccatttttaacatccatcatt

SEQ ID NO: 256276 - DNA, 919 bp, Unknown
  Bacterial polypeptide expressing nucleotide sequence isolated from the Sargasso Sea
aatgttttctcaaaactaagaacttggatagaagatccgaaaaaagaaaaagcactccaaaattctaaatttgataggcaaatattttttaatcatggacttgatcttaaaggcgtaacctttgacaccttaatagcagactacctccttaataaccaggagaagcatgggttaagtgaaattagttttagattatttgaatttaagcccccttcatttaaagaaacagtagggaaaaataaagacttttcatttgttgatattaatgaagcaagtatttactgcggttatgacgtatttctaacttttaagattgtcaaaatttttaaagaaaaattttcaaaggaaaaagatgaattaatcaaattgttcgaagaaattgagctgcctttagagccggtattgtctcaaatggaaatgaatggaataaccatcgatatcccttatttagataaactctcaaaagaactaaaaagtaccttagaagatattgaaagtaaagtttatgaattagcagaagaaaattttaatctatcttcaccaaaacaactcggtgagatcttatttgaaaaattaaatttggataaaaagaaatcacgcaaaacaaaaacaggatggagtacggatgcagtagttcttgagagattagtcgacgagcatgaaataatccaacatttaataaaacatagaactctcagcaaattacttagtacttatattgatgctctcccaaatcttattaacgaaaagacaggaagagttcatacaaactttaatcaagctgccacagcgactgggagactaagtagtagcaatcctaatcttcaaaatatccctgttaggactgaatttagtaggagaatcagaaaagcattcttgcctgaaagaaatggaaacttttatccgctgatatctcaga

SEQ ID NO: 256277 - DNA, 841 bp, Unknown
  Bacterial polypeptide expressing nucleotide sequence isolated from the Sargasso Sea
cagtcaagtagagttaaatattgcaaaagattatgcggcagaagatgctgatataacttaccgtttatataaaatatttttgaaatcgcttaaatcagaaaaattactaaatatttatgaaattttcgaaaaacctttaattaaaattttagcatcaatggaaatcaatggcataaaattggataataattttcttaaaaaattatctattaagtttgaaaaaaaacttcaagatttagaaaaacaaatttttaaaatttcaaaaaaaaaatttaatattgcatcgactaaacagttgggtgaaataatgtataatgacctcaaaattgcatcgttaaaaaagactaaaaaagggagttttgcaactggtgcagcagttctagaggacttagcttataaagggaatgaatttcctaaattggttttagaatggaggcaatctagtaaattgaaaaatacgtattcagattctttaccagagcatttaaatcccaatacaaaaagagtgcatacatcttttctattagcagcaaccacaacaggtagacttgcatctagtgatccaaatttacaaaatattcctattaaaactgaggagggaaaagatattcgtaaagccttcatatcagaaaaaaataaaaaactaatatcagcagactataatcagatcgaaatgagaattttggctgatctagctgatgtaaaagaactaaaaaaagcttttaaaaataatgaggatattcactcattaactgccagccaagtttttggtgcagacataaaaaaaattgatgctgatatgaggagaaaagcgaaagctattaattttggaataatttat

SEQ ID NO: 256278 - DNA, 776 bp, Unknown
  Bacterial polypeptide expressing nucleotide sequence isolated from the Sargasso Sea
gaaaatcataactgaaaaatcaaaattattaaaaccattaagccatatacaaggtatcgttgaaaaaagaaatactataccaatattatctaacgttgtcatgagagctgttgataataatttatcgttatcagctactgacatggatatagacattttagagacttttgattgtaaagttattaattcaggaacaataactgtaactgctagtatattatacgacattataagaaaattaatggatggttcagaagtactaattgaatttaatggtggcaccgcaagtcttgagtcaaataaatctaaattccagttaccagttttgccagtggaagattatcctaatttatctcaaggggattttccaattaacttcaatctatacgttgaagagctatgtaaaattatagataaaacaaaatttgcaatctctatggaagagacaagatattatttgaatggaatatatttgcataagaataataataaacttgtatcagttgcaacagatgggcataggttagctagaacaagtgtagatcttcctgatggagcaaatctaacaaatggagttataataccaaggaaagctatatatgaaataaggaagcttattgatgattattcaaatgatgaaatggtttctattagcttatcggacaataaaataagagtaacaattggaaattcagtaataaccagtaaacttattgatggcaacttcccagattatgagaaagttataccaacagaaaattcaaatattgtatctt

SEQ ID NO: 256279 - DNA, 826 bp, Unknown
  Bacterial polypeptide expressing nucleotide sequence isolated from the Sargasso Sea
ggcgattcggaacgaggagtagtggcgtcagctagctacgaagctcggtcacggggcgtccgatcagcgatgtcaagcatcgtggcgaagagtctttgtcccgaggcagtgtttgtcggcgcaaattttgcgcgctatcgagagatctcgcgccaagtccagcaactcttgtacgcggtcacaccgcaattggaaccaatagcgttggatgaggctttccttgatgtcagtggagcgcacagattgttcggaagttcagagcaaatagcgtggcagattcgaaacgatgtgtatgaaggtgtaggtcttgactgttcggtaggtgttgctagctcgaagctgctcgctaagttggcttccgtcgcagctaaaccaaaggcaagtctcgcgggggttacgccaggccttggcgtatttgttgttcatcctgatgttgctaccgatttcctggaggcacatcctgtcgaggcgttgtggggagttgggagagcaacccttgagaagttgaaagccttaggtatttcgtcagtgggggatttggcatcagttccaaatgagattctggttgaagaacttggtgcttctcatgggaatcacctttcgaagttgagccaaggcattgatcttcgagaggttgactctgaaagagagaggaagtccattagtcatgaagaaactttcgcgtccgatatttatgaccgagctgctttagttagcgaaattgttcgactctctgacgcagtttcagctagggcacgggagcagggcctggccgccagaacgattcacctaaaagtgcgacgtcccagatatgtcatacgtcacc

SEQ ID NO: 256280 - DNA, 897 bp, Unknown
  Bacterial polypeptide expressing nucleotide sequence isolated from the Sargasso Sea
ggaggtttactaccaaagacggatttccacaagtgtcacttatggatttctaaaaagccttctggataattgtaaaaatattagtcctgagggtgtttgtattacttttgataccgaaaaacctactttcagacatgaattagatccaaattataaggccaatagagatgtagcaccagatgttttttttcaggatattgaacaactagaaatcattttagaagaaagccttaatttaccaatttttaaatctccaggatacgaagcagatgatctcctaggcacaattgcaaatgatgcttcttctaaaggatggtgcgtgaatattctttctggagatagggacttatttcaattagtagatgatcaaaaagatatttatgtactttatatgggtggtggtccatatgcgaaaagtggaaatccaactcttatgaatgaaaatggagtaaaagaaaaattaggtgttgcgccagaaagagtagttgatctcaaagccctaactggtgatagttctgataatattccaggtattaaaggagtagggccaaaaactgcaattaatctactaaaagagaacgatacgcttgatggaatctatcaggctttggacaagattcagcagaacaacgataagaaatataaaggattcatcaaaggttcagttatagaaaagctcagaaacgataaacataatgcttttctttccagggatttagcaaaaataaatactgaggtgcctttaattttaagtaacggttatgaattaaaaaatataaatcaagaactactttcagagtcactgaaaaaattagaactatcaacactacttagacaaattgatattttcaattcaactttcagcagaggtggttttgacaaaaataatgtagctaa

SEQ ID NO: 256281 - DNA, 772 bp, Unknown
  Bacterial polypeptide expressing nucleotide sequence isolated from the Sargasso Sea
catgtcttatcaagtgctcgcccgcaaatggcgtcctgcaaaatttgaacaaatggttggtcagtcccatgtgttaatggcactcactaatgccttaagccaacagcgtcttcaccatgcttatttatttaccggaacccgtggggtaggtaaaaccagtttggctcgtctgtttgctaaagggcttaattgtgaaaccggtgttacggcgaacccttgtggtgaatgttcaagttgtatcgaaattgcccaggggcgctttgttgatttaatcgaggttgatgcggcgtcaagaaccaaagttgatgacacgcgtgagctgcttgataacgtgcaatatcgtccatctcgtggccgctttaaagtgtatcttatcgacgaagtccacatgctgtcgcgcagcagttttaatgcgttattaaaaaccttagaagagcctccagaacacgttaaatttttgctggcgaccactgacccacacaaattaccggtaacggtattgtctcgttgtttgcaatttaatttaaagagcttgtcacagcaagaaatcagcaaacaactcgagtacgtcatcacccaagagcaattaccttttgagccacaagcattaaatgtgttggctaaagcggcaaatggcagtatgcgagatgcattgagtttaaccgatcaggcgattgcttttggcagtggtcaggtgatgcttgaacaagtacaaaccatgctcggtagcattgatgagcagcatgttatcgcgttattaaaaaccttgtgc

SEQ ID NO: 256282 - DNA, 550 bp, Unknown
  Bacterial polypeptide expressing nucleotide sequence isolated from the Sargasso Sea
cacagacgaaaggccaaggctattaattttggaattatttatggaatttcgcaatatggattagctaagcaaataaatgtttctaattatgaagctgaggaatttttaaattcatattttgcaaagtttccagaaatcaaggtttatatggataatacaataaaattttgtaggaaaagtggatatgtaaataatatttttggaagaagatctcactttaatggaataaatgacaaaaactttaatgtcagaaattttcaagagcgtgctgcaattaatgcacccattcaaggttctgcttctgaggtaatgagactagctatgataagattagataagaaattatcagagcaaaaaaatactagttcaaaaatgctcttgcaaattcatgatgaattaatttttgaaataccaaaaaaagatgaaaaagtaatgataaaactaattgagaaagagatgaccagtgtagctaatagtgattatcattctttttccacccctttaacagttgatattaatgttggagataattggggaatgcttcattaaa

SEQ ID NO: 256283 - DNA, 811 bp, Unknown
  Bacterial polypeptide expressing nucleotide sequence isolated from the Sargasso Sea
aatggaaagttgactgtgagttccagtaacttccatgctgactttgcaacaatatcttctgatgattttccagaaattgaaattagcgaggaacaaattcctgtatctttagaatctaatgttttaaaaagaatactctcaaaaacctcattctctatggcatcccaagatgtcagatattacttgaacggaatgttgttggaaataaatggcaataagataaatggtgttgcaacagatggccacagactggcatattcttctgcagcaactagcaattccgaagccgatatgagaaatatacttcctcgcaaagcggtgcttgagcttgctaagctgctttcagctggagacgatataattagtcttctgataggcccttcgtatgtggtcattagaacagaaaatttaagcttctctagtaagctcattgacggaaagtacccagactacgataaagttttccctacaggtgagccgctacccttagagataagcaaggaagtgcttcaatctgctttatcaagagcatctgtcctatccaatgaaaaatatagaggtgtacgatttcagctctctgagaacaagctaaaacttacagcaaacaaccctgaacaagagtctgccgaagaggaactagacgttgtctaccaaggctcagaattagaagtgggatttaatatcggatatcttcttgacgtattaaattcaatagaaacagagaaagttaaattcgaattttatggagaagattctagttgcattataaaagaaagcaattcagaagatgatgtatatgtcattatgccta

SEQ ID NO: 256284 - DNA, 637 bp, Unknown
  Bacterial polypeptide expressing nucleotide sequence isolated from the Sargasso Sea
tcattctttgactgcaagattaatttttgagaaagaagaaatatcatccgacgaaaggagagttgggaaaacaataaattttggagttatctatggtatgggtataaaaaagtttgcccgttcaacaggagtaagtactccagaggcaaaagaatttctaattaaatacaaagaaagatattcaaaaattttcaaatttcttgaactccaagaaaggcttgccttatcaaaaggttatgtaaaaacaatttttggtcgaaaaagagaatttaagtttgataaaaatggacttggaagattaatagggaaagatccttacgaaattgacctgcaatctgcaagaagagctggcatggaagcacagtcattaagagccgcagctaatgcaccaattcagggttcaagtgcagacattattaaaattgcaatggttcaactaaataagaaattcatagaaatgaatgttcccgcaaaaatgcttttacaagtacatgatgaattattgtttgaagttgaaccagattctttggaaattacgacgaaattagtaaagaagactatggaagattgtgtaaaattaaatgtgcctcttttagttgatattggtattggagacaattggatgcagacaaaataa

SEQ ID NO: 256285 - DNA, 853 bp, Unknown
  Bacterial polypeptide expressing nucleotide sequence isolated from the Sargasso Sea
ttaaaatttgaaaaaaaaattaaaaatttagaaaaagaaatttttaaaatttctaaaaaagattttaatatagcttcacccaaacaattaggtgagataatttataatgatcttaagattgcaggattaaaaaaaactaaaaaaggaagctttgccacaagcgcaagtgttttagaggatttagcatttaaaggacataaatttccaaagttagttttagattggagacagatttcaaaattaaaaaatacttattctgaaacactgcctgaacatgttaatccaaaaacaaaaagggttcatacatcttttctattggcagcaacaactactggtcgattggcatctagtgaccctaatcttcaaaatataccaataaaatcagaggacggaaaagatattaggaaagcttttactgcaaagaaagggcatttgttgatttctgctgattacaatcaaatagagatgagaattctagctgaccttgcggatgttaaagagcttaaaaaggcttttcaaaataatgaagatattcattctttaactgctagtcagatttttaatgttgatattaagaaaattgatcaagatcaaagaagaaaggctaaagccataaattttggaattatttatggaatatctcaatatggtttagcaaaacaaattaatgtttctaattatgaggcagaggaatttttaaaagcatatttttctaaatttcctgagattaagatttatatggataatacaattaaattttgtagaaaaagtggatatgtaaataatatatttggtagacggtcttattttaatggaattaatgataaaaattttaatgttagaaatttcaaga

SEQ ID NO: 256286 - DNA, 658 bp, Unknown
  Bacterial polypeptide expressing nucleotide sequence isolated from the Sargasso Sea
ctaaggataatggctcacttatcagatgatatttttttaacctatgcgtttaataatgatattgatgttcactcttcaacagcggctgaggtttttggagtttcttttgaagatgtttctcaagaccaaagaagaagtgccaaagcaattaattttggattaatgtacggaatgtcagctttcgggttaacaagacaacttggaattccaagaggtgaagcacaagaatatttagataaatattttgcaagatatacaggtgttcgtgattatatggacaatataaaaataaaggcaaaagaagataagtttgttgaaacgattatgggaagacgactttatttaaatgaaattaacgcagcaaatggtttaagaagacaagcagcggaaagggctgctatcaacgctccacttcaaggatcagcagctgacattataaaaaaagctatgttagacattgatgagctgattctaaacgaaatgtcagaggtaaagatgattatgcaagttcatgatgaattagtttttgagtgcccaaaagataacgctgatatagtcatgcaaaaaatgaaaactactatggaacaaaccatagaacttaatattccattaattgctgaagctgcaattggtacaaattggaacgaggctcactaac

SEQ ID NO: 256287 - DNA, 699 bp, Unknown
  Bacterial polypeptide expressing nucleotide sequence isolated from the Sargasso Sea
ctgcagattacaatcaaattgagatgagaattttagcagacctggcagatgtaaaagaacttaaaaaagcttttaaaaataaagaagatattcactctttaacagctagccaaatatttaatattgatattaaaaaagttaatcaagatcacagacgaaaggctaaggctattaattttggaattatttatggaatttcacaatatggattagctaagcaaattaacgtttctaattatgaagcggaggaatttttaaattcatattttgctaagtttccagaaattaaagtttatatggataatacaattaaattttgtaggaaaagtggatatgttaataatatttttggaagaagatcccattttaatggaataaatgacaaaaactttaatgtcagaaattttcaagaacgtgccgcaattaatgctcctattcaaggttctgcatctgaagtgatgagattagctatgataagattagataagaaattatcagaggaaaaaaattctaattcaaaaatgctcttgcaaattcacgatgaattaatttttgaaattccaaaaaatgatgaaaacataatgattaaattaattgagaaagaaatgaccagtgtggctaagagtgattatcattctttttcaactcctttaacagttgatattaatgttggagataattggggcatgttacattaaa

SEQ ID NO: 256288 - DNA, 1702 bp, Unknown
  Bacterial polypeptide expressing nucleotide sequence isolated from the Sargasso Sea
catgttgccgcaatatttgatggagaaaataacaaagcttcaagaaccgctctataccctgattacaaagcaaaccgccccccacctccagaagacctatccaaacaaatcagttgggccaaagagctttgtgaacttttagggtttaaaacccttactatccctggtgtagaagctgatgacaccattgcaaccatcacaaagttttgggctcaaaacaatggtgaggtcacaatttgctctagcgataaggacctttttcagctggtttccgacaaagttcaaatcctaaatgtttacaaaaataatctaattgtaacacctgaaaaggtattagacatccatggcatacacccccatcagatgcttgattacttagctcttgttggagactcttccgataatattccaggagtaagtggctttggtccaaaaactgcttcatcacttttacaacaatatgaaactttggactacctacttgaaaacccctcttctgtacttggaaaaaagaagcaagaaactctccagaaagaagctgaccaagccagattaagtagagaattagctaggcttaatgaagccgttgaagttgaaaagaccgttgagagctacctagtccaagataaagacgaatcttctttaaaagaactaatgaaagaacttgagttttttagcattctaaaagagcttaaccctcagaaaaaagaaaagccctctagctatactcttgttaacaactcggaagatcttgatgagctggtaaaagaactaaaaaaagagacttccttaacttttgatactgaaacaagccacctacatcctttaaaaggagaaatcgtcggcatcagcttttctaaatcagaaggtgaggcctgttatatcccttttaatggcaagctagctaaaaacgaattagttgaaaaactgaaacctctttttgagtcatctattgcatggaatggtcacaatattaagtatgacattttagtcttacagcaaattggaattactccaaaagttataggatttgatactgctcttgcgtcttatgttctcaatgcacactctcatcgtcatgggctggatgagctttctcttcaatactttggtaaaagtaaaatccctattaaagacttaatcggctcgggaaaaaagcagctgactatggaccaagtaccgattgagcaagtcagcacttacgcctgtgaagatgctgattacaccttccgattaaaagagctactttccaaacaaattgagacaagaggcctaagagaactactctttgaacttgaaattcctctcgttactgtcttaactgatttagaagaacgcggcatctatgtcgaaaaagagatgcttagcaccttttctactgaaatcaaaggcataattcaagctcttgaagaagaggttcatcaacttgctggagagcccttcaaggtaaactctccaaaacagctcagcgatattctctttacaaagatgggcatttcccctcctaaaaaaatagcaacgggctactctactaatgctgaagtactcgaaatgttaaagtaccatcatccgattgcagaaaaggttctagagtatagaaagtatgaaaagcttcgctctacgtatattgatgcactacctttggaaatcaaccccaaaactaaccgcattcattgttcctttaatcagattacagcctcta

SEQ ID NO: 256289 - DNA, 1756 bp, Unknown
  Bacterial polypeptide expressing nucleotide sequence isolated from the Sargasso Sea
aatgaacaatcagttatagcagttgacacagaaacatcttcactcaatcctttagaagctaatcttgttggtatttcattcagttatgcaccaaataaagcttgctatatacctttggctcataaaaatattaaaggtttgaaaaaagaattagtattaaaaaaaattaaaccaatcttagaagacccaagtataaaaaaagttggacaaaacattaaatttgattttcttgttcttagccaaaataatattgaaataacttctctagaagacacaatgttaatttcctatacactggacgctggaactaatagacacaatctggatgcactctcagaaattcacttaaatcacaagactatttcttataaagagctagttggtactggaaaaaataaattaaatttttctgacataacattagatgaagctactcaatatgcagcggaggacgccgatgttacattaagactttataatcatctcagagcacgacttgatgaagaaaaattaaataaaatctacgaggattttgaaaagcctatggtaaaattattatctaaactagagtttaacggcatcaaggttgatgatacatatctcaaaaaactttctaaaaattttgaagaaaaattaaaaaagatagaaaaagaaatatactcaatagcaggcaaagaatttaacattgcttctccaaaacagcttggtgaaataatttacaatgaacttaaaattgctaaattaaagaaaacaaaaaaaggaagcttagcaaccagcgcaagcattcttgaagatcttgctcttgcaggccataaatttcataatttagtgttagaatggagacaaatttcaaaacttaaaaatacctattcagacgcattacaaggtcatataagcaaaaaaactaaaagagttcatacatcattcctgttagctgcaacgaacactggaagattggcttccagcgatccaaatttgcaaaatattccaatcaagtcagaagaaggtaaggaaataagaaaagcattcattgctgataaaaaaaatattttgatttctgctgattacaaccaaatagaaatgagaattttagctgatatggctgatgtaaaagaattaaaaaaagcttttaaaaataatgaggatattcatagcttgactgcaagccaagtttttaatgtgccaatcaaggaagttaacgaagatcttagaagaaaagctaaaacaattaatttcggtattatttatggaatcacacaatatggattagctaaacaaatttcagtatccaatcaagaagctttagattttataaatgcttattttaaaaaatttcctcaaataaaagattatatgaattcaacaataagaacatgtagaaatcaaggttatgtgagtaatatttttgggagaagaattcatctaaaaggtataaacgataaaaattttagcattagaagttttcaagaaagagcagcaattaatgctccaatacaaggttcagcagcagatattattagactagctatgataaaaataaatcaacaaattgaagaagataaaaaactacaaacaaaaatgttgttgcaaatacatgatgaattaatatttgagtgtttggaaaaagatgaagaatatgtaaaaaaaattattaaagaatcaatggcatcaatatcgaaatctgaacatcatatgttttcaattccattagaagttaatataaactcaggatataattggggagaagcacattaat

SEQ ID NO: 256290 - DNA, 3064 bp, Unknown
  Bacterial polypeptide expressing nucleotide sequence isolated from the Sargasso Sea
aaagccacgtgttgcacgcgctcacgaatgcgttaacgcaacaacgtttacaccatgcttatcttttacgggtacacgcggtgtgggcaagaccagtttggcgcgcctcttcgccaaaggcctcaactgtgaaaagggcgtaacggcttccccctgtggtgtgtgtggcagctgtgtcgaaattgcccaaggccgctttgttgacttaatcgaagtcgatgccgcctcgcgcactaaagtcgatgacacccgtgaactcttagacaatgtgcaatatcgtccgacccgtggccgttttaaggtctacctgattgacgaagtacacatgctctcccgcagcagttttaatgcgctgctaaaaaccctcgaagaaccacccgagcatgtgaaatttttactggcgacgaccgatccgcaaaagctgccggtgactgtgttatctcgctgcctgcaatttaatttaaagagcttaacccagcaggaaattggtactcagctacagcatattttaacccaagagcaattgccctttgagcacgaagccttaacgctgctcgccaaagcggccaatggcagtatgcgtgatgccttaagtttgaccgatcaggccattgccttcggtggtggcactgtgatgctcaatcaagtgcaatctatgctgggcagcatcgatgagcagcatgtgctgggtttactcaaagccttaaccgatgccgatattggcgttttgatgcagagctgcgcacaggtgctcgcctatggtgcggacgcccaagaagtgctgcgcagtttattggaattattgcatcaaattaccctgactcaatttgctcctgccgcggcgcagcaatccctttatagcgcgcaaattcaagcctttgccgagcagttagcgccggaacaagtgcagttgtattaccagattttactgactggccgtaaagacttaccccatgcaccggatcctaaatcgggcctcgaaatggcactgctccgagcggtggcatttgttcccgaaaagcccgtgaaacgttggcaagttgaagagactgctaaggtgagtttgcctgctcagcagccaacgtctactacgcccgcatcaaatatgcccgcggcggaaccagctgtaaatcaagcagtggctgaaaaaaaaactccgctaaccgctgagcgtgactcacagactctgccacaagctgcaatgtctgagcctatggctaagagtgagaacgctacagcttcgcaacaagccttatctgctgaggatatgttagctgtcgatgatgcgattgatgatgaggctgaactgaatgccgcattaattgccgagcagcaagtgatcttaagccaagcccaaagccaaggctttggcgcaagtgtggcatcgagtactgaggccgtctcaactccagaagcaaaagctgactcaagcgctgaatcgagctcagtttctatgcctgcatcgaatattgatgccgagcataatcaagctgcaacagtggatactgctagcgttgaccagaagccttctccagcggcaataacagcagctgttgacttatctcttgatgatatcgaggacgatactcaagcgagtgttaatcagagtgcagatgcgctagcgccagatgaatattctgcagaggatttcggacaatacgattatgccgccgcgccgctcgatgcctatcaggatgattattcacaatttatggctgaggagcagggcggattctctggcttggaagagagttcgtttaatcgcgacagtgctcagtctatcggtcatagggatgttgtgcatgagtctgctgtggccctccaatcgcagtctattggcgaaagcctagcttcaacaacctctcaggcttcaacacctccagcttcaactacagtgtccctcgaggatgacgatattttatcggcggtattagcggcgcgtgactccttgttatccgatcttgatgcactcagcaccaaggaaggtgatggaaaaaagtcggcaacggaagttaagcttaaaactccgagccagagtgcgcataccgcgccagtctctcatgtgacttcacaaaacacgtcttcagttgatgcatctatcgagccgcaaggggttagtcacgcgtccgataacgactttgagctaccctttgacgatgatttcgaggccgagctccatcttgactcacaatcaaatgtcacgccaactcagccgcttggtccaaacgatcgccctccatgggaagaggcgcccgtcgtggggatggatgatgccaacgcatcggctgcaagttctaacctacagcttgaaaacgctgttgtgccgcaaacaactgttgatgatttaggcgctgcgaccgtcgccgctcaaatatcgccaacggatagcgaggtgacacgggttgtgcaagcgttagagcaagcggctgtacaagaaagcgagccagttacgcaaagccttgagccgaatacgccgcagcctcaggcgcaggaacttacacaaccaaaaactcaaccacaaactcagcagttaactcagcagccagcatcggtgcagtcacagtcaagcgagacggtttcttctgcgtcatccaccgcattaactctggcgcaatcgattaccggtcatcctttagacttgcactggtataagctcatggcgagcctagagattggcggccgtgtgcgtcagttagcggtaaactcgatttgtcaggtgcaggctaaccctttgccgttgctgctaaaacctgaccagaaacacttggcggcacccgtggcgattgagcagctagagcaggctctgaccgccgcgttggggaacccgaggcaggttgaggtggtcataggaactgatcccgcgcgggaaacccccttggaaatgcgtaaacgtttccaccaagagttactgcagcaggcgcgccaatcgctaatgatggacgataatgtgcaatggctgattaaccgttttggcgccgagctggatcaggataccttactctatccgcaagagttgctagcccagcgtagtggactcattcccgcactgcctgagcccgagtaa

SEQ ID NO: 256291 - DNA, 2329 bp, Unknown
  Bacterial polypeptide expressing nucleotide sequence isolated from the Sargasso Sea
gactagaaaaagtgatggacttccaacaggtgctgtaagtggtttttgcagtatgttatttaaattattagaggactcaaaatctgatcaaaacttacaaaaaccaacacattttgcagtaatattcgattcagcaagaaaaacttttagaaatgaaatttatagcgattacaaagctaataggtcagaggcgcctgatgatttggctcctcaatttgagtatataagaaaatcagtcctagcattcaatttaccatctgtggatcttcctaattatgaagcagatgatttaatagccacatatgttgatcaaattcttaaaaagggtgcaaaggttacaattgtttcatcagataaagatttaatgcagctttacaaaaaaggagttcgaatttttgaccctatgaaaaataaatttataactgatgatgatgttttaaaaaagtttggagtagatgcttcaaaagttattgatgtacaatctttagcaggagatagtagtgataatgttcctggcgtgccagggataggtgttaagacagccgcagagctaattaacaaatatggcactttagaaaacttactaaaatctgctcatgagattaagcaaaataaaagaagagaaacattaatagagaacaaagataaagcattaataagtaaaaaacttgtaacactagatcataactctcctgttaatagagagttaagtgaatttaaattgcaaaatatagataaagataaattatataaatttttaagagaaatggaatttaacaggttgttaagctctgcaatttctgcttatggagaacctgaactacaaagtaataagattgaaactcaaattatacaaaaacaacaaaccataaataataaaaattattatttaattaatagtttagatgaaattgataaatggatagaggaggcagaagaagttggtgaagttgctgtagacacggaaaccacatcattagatcctcaccaagcagatttagtgggtatttctctttgctccaaagttggaaaagcatgttacataccagttggtcataagtcacccaagtgtcttaaaaaagatgcagtaattaaaaaattaaaaaaaatattagaagatcctagtataaaaaaaataggtcaaaatataaaatttgattttatcgtattttataagtgtggaataacgctttcatcaatggaagatacgatgctgatgtcttatgtcttagatgcaggaaaaaatagacataatatggatactttatcagaaattcatttagggcataaaactatttcttttaaagagatggtaggcacagggaagaaagaaattaattttagtgaggtagaattagataaagcaaaagattatgctgctgaagatgctgatgttacttttagattatacaagaaatttatcaaaaatttaaaatcagaaaaaatgataaatatttatgaaatttttgaaaagccattaattaaaattcttgcacttatggaaatagagggagttgaaattgatagtaagtttttaaaatctctttcatctaaatttgaaaaaaaaatccaaaaacttgaaaaagaagtctttaaaatttcaaaaaaagaattcaatatcgcatccccaaagcaattaggcgaaataatttataatgatttgaaaatagctggattaaaaaaaactaaaaaaggaagttttgcaacaagtgcaactgttttagaggatttagctttcaaaggccatgagtttccaaaattaattttagattggagacaagtttcaaaattaaaaaatacctattcagatgctttacctgaacatttaaacccaaatacaaaaagagttcatacttcgtttttgctggctgctacaacgactggaagactagcatctagtgatcccaacttacaaaatataccaattaaatcagaagatggaaaagatataagaaaagctttcactgcaaaaaaaggtcacctattaatttctgcggattacaatcaaattgagatgagaattttagcagacctggcagatgtaaaagaactgaaaaaagcttttaaaaataaagaagatattcactctttaacagctagccaaatatttaatattgatatcaaaaaagtaaatcaagatcatagacgaaaggctaaggctattaattttggaattatttatggaatttcgcaatatggattagctaagcaaataaatgtttctaattatgaagcagaggaatttttgaattcatattttgctaagtttccagaaattaaagtttacatggataatacaattaaattttgtaggaaaagtggatatgtt

SEQ ID NO: 256292 - DNA, 1448 bp, Unknown
  Bacterial polypeptide expressing nucleotide sequence isolated from the Sargasso Sea
aatggaatttaataggctcttaagtcaagtaatttcattttatggagaagttaaaacaacaaaaactaaatttagtgaaaatcacaattcaaaaatagaaaaagaatattttaagaattataaattaattaaaacaattgatgaaatcgattattggattaaaaaagccgaggaaaaaggggaaatcgcaatagacaccgaaacctcttctttggatcctcagaccgcagatctcattggtatttcgttatgtttcgaagctggagaggcttgttatataccgatcggacataaaaaaaatgtaagtttgagtctagaaaaagtgatcaaaaaaatcaaaattcttttggaggactctagtattaaaaaaattggtcaaaatataaaatttgactatatcgttcttcatcatcacgggataaacatgacatcaatggaagacaccatgctcatgtcttataccttagatgcaggcaaaaataggcacaatatggatacactttctgaaattcatttaaatcataagacaatatcttataaagacattgtaggatctggaaaaaaacaaattgcttttaacgaagtagaaattttaaaagcaaaggattatgcagcggaagatgcagacgtaacatatcgtctttttaaaatttttgaaaaaaatctaaaaacagaaaaactaaaagaaatttatgaagtcttcgaaaaaccttttattaaaattctggcatcaatggagattaatggagtgaaaatagatagtaatttccttaatgacttatcaaaaaaatttgagctaaaaataagaaatctagaaaaaaaaatttttaaaatttctaaaaaagagtttaatattggctcgactaagcagcttggtgagataatgtataatgaattaaaaatatctgcactaaaaaaaactaaaaaaggaggttttgcaactagtgcaagtgtaatggaagatttagcttataaaggacatgagctaccaaaattaattttagaatggaggcaaatatctaaactaaaaaatacttattcagaatccttaccaacttttgttaataataaaactaaaagagttcatacttcttttttacttgctgcgactacaactggaagattagcttcaagtgaccctaacttacagaatatacctattaaaacagatgatggtaaaaatatcaggaaatcttttatagcagaaaaaaataatctcttagtgtccgctgattataatcaaattgaaatgaggatacttgctgatttagcagatgtaaaagaacttaaaaaagcctttaaaaataatgaagacattcatactttgactgcgagccaagtgtttaatattgatattaaaaaagttgatagcaacactaggcgaaaagctaaagcaattaattttggaattatatatggaatttcacaatatggacttgctaaacaaa

SEQ ID NO: 256293 - DNA, 1117 bp, Unknown
  Bacterial polypeptide expressing nucleotide sequence isolated from the Sargasso Sea
aatatgtcgtctgaacttggtcaaaaagttgatgaattaaagaatagtattgaaaaggaggcaggagtggaattcaatattaattcgactcaacagttagcaaatatactattcgacgttattggtttgagagaggtaaagaagcgttcgacggcagaagatgttttagaacagttaaaaaatgatcataaaattccttatttagttttgcagtaccgaaaattaaataaattaaaaaatacttatatagatgcacttcctgaattaatacatgttgatacaaaaagaatacattctacttttaaccaaactattgcctcaactggtcgattatcttcaagcaatccaaattttcagaatattccaattaggactgaagaaggaagaaaaattcgtaaagcatttagatctaatgactctaaaaaaattattttttcagctgattattctcaaattgaattacgaataatggcacatcttagccaagataaagctttagtggatgcttttgtaaagggtgaggatgttcactcaagaactgcatctttggtttttaatgttccaattgatgatattagcaccgatatgagacgtactgcgaaaatagttaattttgggttgctttatggtgcaggaccatttagaatgagtaatgaattagggattcctcaaaaagaagcgaagcaaattattgaaacttattttaatagatattctggtataaaagattatattgaaaaaacaattgagcaagcaaaaaagcatcaatttgttgaaactgtacttggtcgtagacgacctgtctgggatattgaaagtaaaaatcatttgcatcgagaggctgctaagcgaatggcaattaatatgccaattcaaggtacaaatgcagaaatgataaagttggctatgattgcaatacaaaaaaaattaacaaaagagaatatgaaatctaaaatgattctacaggtccacgatgaattagtatttgaagttcctaaaaatgaattagattcgcttaaatctattgtgataaataaaatggaaaatgcattgtctttaagtgtgcctataattgttgattgcggacatggaaaatcatggtttgaggctcattaat

SEQ ID NO: 256294 - DNA, 1394 bp, Unknown
  Bacterial polypeptide expressing nucleotide sequence isolated from the Sargasso Sea
catgcatcagcttcgccagcatgcgcaggaaagcagtattgtattgtacgaagccgatattcgcgttgccgatcgctacttaatggagcgctttgtgtatggtgcggtggaatttctggctccgcaagatttcgacgatacgcctcagatcgttatagaaaatgcgcaaatcagaccctgtcaattcagaaccacatttacatcacttagcatagacatcgaatgcaatgagcaagaagaactctttagcattgcgttagccggtgaaggactcaacgttgtgctgcttctatgcccgccacgttttgttgggcaaacattacaaggacaagaagacagcgcgtacgagctcattaccgttgaatcagaaaaagtactgcttgaagcatttttttcttatcttacatcctacgacccagatatcattttaggctggaacgttaaacagttcgatatggcggtacttgaacgccgcgctagggctaactcgctaaagtatgctatcggccgccatggcagagaggcttctgtaagacagtgggaagatcaaaccctcgttgatgtgccaggacgatgcgttattgatggtatcgaagcactaaaaacaatgacttatcaattcgagtcgttctcgctcgatcacgtatctgaagaactgcttggcgaaaataagcttattcaggctgcagacaagcttgaagcgataaagcgtctttatcatagcgaccctgttgcactcgctaactataactttaaagatacggaactggtcaatcgcattcaggataaaacccaatttatcgattttctggcactgcgcagtattctcaccggcctagatatgagtcgccccggagggtcagtggccgcgtttttaaatgtgtacttgcctaagcttcaccgcaagtcttatgtcgcgggggtaagacctgaaaatggaggcttggctagtccgggtggttatgtcatgcgttcccagccaggtttatataaagacgttttagtcctagattttaagagcctgtatccttccatcattcgtacatttaaaatcgatccgttgggacttgcagaagggcttaagtccccccacacggcgatagagggttttaaaggcgcagtatttagccgcgaatctcattttctaccttccatcattgaaaacctatggcttcagcgcgacgaagccaaaaaacagaatgacgcaccgcgctctcaggccatcaaaatattaatgaactccttctatggtgtgcttggtagtggcggctgccctttctacgatcctcgcctggctagctcaatcacattaaggggtcacgagatcatgcaaaccactgcgagttggattgaagaactgggctatacggttatttacggcgataccgactcaa

SEQ ID NO: 256295 - DNA, 1241 bp, Unknown
  Bacterial polypeptide expressing nucleotide sequence isolated from the Sargasso Sea
aatgaaagataaaaaactgtttcttattgatgcttatgctctaatctacagagcatattatgcttttataaaaaatccaagaatcaattctaaaggatttgacacaagtgcgattatggggtttttaaattccatttttgatattattaaaagagagaatccagactatttttcagttgtctttgataaaggtggctcaacagacaggattgaaatttttgaagattataaagctaatagagattctacaccagaaccaatattggattcagttccaataattcatgaaatacttgatgcattaggaattaaaactctacaattaagtggttatgaagctgatgatataataggtactgttgcaaaacaagctgaaaaagagggcttaaaaacatacatggtaacaccagataaagattttgctcaactggtttcagaaaacatttttttgtataaaccagcaagatttggtagtgggatagaaatttggggagtggatgaagttaaaaataagttcgaaattaatgatccattacaggtgattgattttttaggtatgatgggagactcagtagataatataccaggactccctggagttggcgaaaaaactgcaaaaaaatttcttaaggagtatggttcaattgaggaactttataaaaatcttgatgatataaaaggtaagttaaaagagaaaatttcagaaaataaagaattaggtttattatcaaagaagcttgctacaatcataatagatgttcctattgattacaaaatagaagaacttaaaattgttgaatcaaataatgaaaaattattatcaatttttgaagatttagaattcaaaaggcttaaagaaaattattttaaaatttttaaacagcaagaaaataaacctccgcacaataatgaattaaattttgaaatagataaaaaaaatgaagaaaattatttatctcaaaaactagaatctgaaaaaggaataagaattttgatcgataaagtattatcatcaaaatctctttctatagattatttaattagtgagagtaattcatacatttccttttgcttaagcagcacaatttcatattatgtaaattttaatttaaaggatatatcatatacacttaatctatttaaagagatatttgaaagtaaaattttaaagattatctataatcacaagcattttttaaaaattttaaaagcaaataaaataaatatagatgataattttt

SEQ ID NO: 256296 - DNA, 541 bp, Unknown
  Bacterial polypeptide expressing nucleotide sequence isolated from the Sargasso Sea
catgagaagaaaagccaaagcaattaattttggaattatttatggtatatctcaatatggtttagctaaacagattatggtttcaaataatgaagcagaagaatttttaaattcatattttttaaagtttcctgaaattaaagattatatgaattcgacaataaaattttgtagaaagagtggatatgttaataatatttttggaaggagaacgcatattactggaataaatgataaaaattttaatattagaaatttccaagagagagctgcgatcaatgctccaattcaaggatctgcttcagaaataatgagacttgcaatgattcggttaaataaaaaattaattaactccagtacaaaaattttacttcaaattcatgatgaattaatatttgaaaccccaatctcagaagttaaaaaaattactaaagttatagaaaatgaaatgacaggagtatctgatagcgattttcactctttttcgacagcattgacagtagacataaatgtaggtgataattggggcatacttcattaa

SEQ ID NO: 256297 - DNA, 1057 bp, Unknown
  Bacterial polypeptide expressing nucleotide sequence isolated from the Sargasso Sea
gcaatttcacaggctcaatcagttgttgagcgcagaaatacgatccctattttatcgaatgtgttaattgaagcagatggcgatgtcgccaaatttcgtgctaccgatctagatattgaagttattgacaaagctccagctcaaattgaacagccaggctcaacaacagtttctgccataactttgcatgagattgttcgaaagttgccggacggagcccttgtaactttaacgggtgataccgataaaggtcgtttggctgttgaggctggccgatcaaacttttcgctagctacgttgcctaaggaagattttccaataatggcaagctcagagtattcatctaattttactgcaaaagcttctttgctgagacgattgtttgataaatcaaaatttgctatttcaacagaagaaacaagatattacctgaatggtgtatacatgcacattgcatcctctgatggtggtgaggtccttcgatgtgtggcaaccgacggtcacagacttgcaagaattgactcggacttgccagagggtgcttcagatatgcctggcgtgatagtgccaagaaaaactgttggagaattacgcaagctacttgatgatgatgaacttaaaattgctgtttctgtatcagaaacaaaaattagatttgctactccagaaataacattaacgtcaaaagttatagacggaactttcccggactatactagagttataccaaatgaaaatgtcaggcggcttgaagtggatgctagcgactttgctaaagcagtagatagggttgcaactgtttcttcagagcgatcacgagccgtaaagttatcactggatgaagatagattgatattatcagtaaatgctccagatagtggagcagcagaagaggagcttgccgtttcatatggtgatgaggctttggagataggctttaacgctaaatatcttttggagattgcaaatcaagttgatcgggaaaatgccgtctttttattcaactcctctggtgatcctaccttaatgcgagaaggaaatgataccagcgccgttt

SEQ ID NO: 256298 - DNA, 575 bp, Unknown
  Bacterial polypeptide expressing nucleotide sequence isolated from the Sargasso Sea
gatattaaaaaagttaaattctgatatgagaagaaaagcaaaagctataaattttggaataatttatggaatttcacaatatggtcttgcaaaacaaataatggtttcaaatcaagaagcagatgaatttttaaaatcatattttttcaagtttcccgaaataaaaagttatatggactcaacaattaaattttgtagaaaaagtggatatgttgccaatatttttggtaggagaagtcacattactggtattaatgataaaaattttaatgtcaggaattttcaagaaagagcagcgataaatgcgccaattcaaggttctgcatcagaaatcatgagattagcaatgataaggttaaataaaaaattggaagatacaaaaaataataaatataaaatgttactccaaattcatgacgagttaatttttgaagttccaaggtctgaggaaaagaaaatagctaaaattattaaagatgaaatgacaagtgttaaagatagtgatttacactcgttttcaactcctttaacagtagatttaaatattggagacaattggggcttacttcattaat

SEQ ID NO: 256299 - DNA, 1296 bp, Unknown
  Bacterial polypeptide expressing nucleotide sequence isolated from the Sargasso Sea
tatgatatttagaccagacgtaattttaattgatggatcatcatatatatatagagcatttcatgctcttccacccctgagcacatcaaaaggaaaaccaacaggagcaacacgaggtgtggcatctatgttgcgtaaacttatctcgacatatccaggcgtgccaatggttatggtttttgatgcaaaagggcccacttttagaagtgactattatcaggcatacaaagcaaatagaccatctatgccaaacgagttaagagtgcaaattgatgatattaaaaaactttcaaaactatttaatttttcagtgcaagaagttgcaggggttgaggctgatgatgttatagcaacacttgcagaaagactaggtaaaaaactaaaagtattgatatcttctccagataaagatcttactcagctggtaaaaaagaatgttatacagcataactcagtatctaatgaattctttgatgaaaaatatgtagaagaaaagtttggggttcttccaaataaaattgctgaattattggcattggttggagataaatctgacaacatccctggaatcactaaagttggcaacaagacagcttctaaatggctcaatcaatatggtgatattgataatttgcttgctaaatcagatgaagtgacgggagttgttggtgagaatctaagaaatgagaaagatatcttacagagaaacctttttttagtctcgcttaaaaaagatctggaattaaacttagaaatagattctctaaatatacctgaagctgcaaatgatgagctaaaagatttctataaagatctggaatttaattcatttatagaagataaagctgagaaaaagatatccaagaactatatttctattaaaaacataaaacagttagaagagattgagaaagagctagataattgtaaatatttttcttttgacacagagacaacatctttaatagctcatgaagctgaattagttggcttttcttttgctctaaaatcaaatacaggtgcttatgtgccaattagacataatgaacaaacagatttagatgctgatgaaacaacaaaatggttaaaagcaattctagaaagaaaccaagaaaaaattgtgggacaaaatttaaaatatgatttagctgtacttaagaaatacgatattgagattaacaagttttgtgctgacacgatgttaatgtcttacgccattaatagtactgctacaagacataaccttgatgctttagctgagcattatttaaatgttcaaaccataaagtatgccga

SEQ ID NO: 256300 - DNA, 1108 bp, Unknown
  Bacterial polypeptide expressing nucleotide sequence isolated from the Sargasso Sea
atgaaaattattatagatagatccaatttattaaggcccctcagtcacgttcaaagtgtagtcgagagaagaaatacaataccaattttatctaatgtggtaattaaagcggatgaaaaccatttgtttttatctgcaactgatatggatattgacatcttagaaaaatttgagtgtaaagtaattactccaggttccataacagttacagcacatatattgtacgatattatccgaaaattgactgatggctctgaaatagtaattgaatctaacgatggtacagcaagcctttcatgtaataaatcaaaatttcaactaccaattcttcctgttgaagattatccaacattgtcacagggagaacttccgataaattttaagttatatgtaaaagatttatgtaaattaatagatactacaaaatttgcaatttcaatggaagaaactagatattatttaaatggaatttatcttcataaagatgataaaaagcttatatcagtagcaactgatggtcatagattggctagaacaagcatcaatttgccttcaggtgcagatataataagtggatcaattattcctagaaaagctatttatgaaattagaaaattaattgaagattattctgatgatgaggatgttttagtaagtttatcagaaacaaaaattagagtttgtgtcaatgatactaccattactagtaaattaattgatggtaacttcccagattatgaaaaagttatacctaaagataataacaatctaattagtttagattgcataaaattctcagagtctgtagatagggtctcgactattttctctgataaatctaaatctgttagaatgtcattatcagaaaataaattaacattggaagctaatagtccagatactggttcagcaatagaagaaattgaattggcttactcaaatgaagaaataagtataggctttaattcaaaatatttgcttgatgtgacatctcaagttggtactagaattttaaacatatctttaaaagactcaggatctcctgcattaattagtataccagatgacccagagtcattatttgttttaatgcccatgagggtataat

SEQ ID NO: 256301 - DNA, 734 bp, Unknown
  Bacterial polypeptide expressing nucleotide sequence isolated from the Sargasso Sea
gctttcactgcaaaaaaaagggcacctattaatttctgcagattataatcaaattgagatgagaattttagcagacctggcagatgtaaaagaacttaaaaaagcttttaaaaataaagaagatattcattctttaacagctagccaaatatttaatattgatattaaaaaagtaaatcaagatcacagacgaaaagctaaggctattaattttggaattatttatggaatatcacaatatgggttagctaagcaaataaacgtctctaattatgaagcagaagaatttttgaattcatattttgccaaatttccagaaatcaaagtttatatggataatacaattaaattttgtaggaaaagtggatatgttaataatatttttggaagaagatctcattttaatggaataaatgacaaaaactttaatgtaagaaattttcaagagcgagccgcaattaatgctcccatccaaggttctgcttccgaagtaatgagattagccatgataagattagataagaaattatcagaagaaaaaaattctaattcaaaaatgctcttgcaaattcatgatgaattaatttttgaaattccaaaaaaagatgaaaaagtaatgattaaattaattgagaaagaaatgactagtgttgctcagagtgattatcattctttttcaactcctttaacagttgatattaatgttggaggtaattggggcatgttacattaaa

SEQ ID NO: 256302 - DNA, 466 bp, Unknown
  Bacterial polypeptide expressing nucleotide sequence isolated from the Sargasso Sea
ttggttttagaatggaggcaatctagtaaattgaaaaatacatattcagattctttgccagagcatttaaatcccaatacaaaaagagtgcatacatcttttctgttagcagcaactacaacaggtagacttgcatctagtgatccaaatttacaaaatattcctattaaaactgaggagggcaaagatattcgtaaagcattcatatcagaaaaaaataaaaaacttatatcagcagactataatcagatcgaaatgagaattttggctgatctagctgatgtaaaagaactaaaaaaagcttttaaaaataatgaggatattcactcattaaccgctagccaggtttttggtgcagatataaaaaaaattgatgctgatatgaggagaaaagcgaaagctattaattttggaataatttatggaatatctcaatatggtttggccaaacaaatggcgtatcaaa

SEQ ID NO: 256303 - DNA, 744 bp, Unknown
  Bacterial polypeptide expressing nucleotide sequence isolated from the Sargasso Sea
agataagaaaatcatttattgcagaaaaaggattctctttagtttcagcagactataatcaagttgaaatgagaattttagcagaaatagcagatgtaaaagaattaaaaaaagcatttataaacagtgaagatattcactctattactgcaagccaagtttttaataaaaaaataaaagatgttgattcagatatgagaagaaaagcaaaagcaataaactttggaattatttatggaatttctcagtatggtttagccaaacaaattggagtttctaatgtcgaagctgaagactttttaaaatcttattttacaaagtttccagaaatcaaagattacatgaatgaaaccattaaattttgcaggaaaagtggttatgtgaacaatatttttggaaggagaactcatttaaatggaataaatgataaaaattataacatcagaaattttcaagaaagagccgcaattaatgctccaattcaaggatcagcctcagaaataatgcgtttagcaatgattagattgaatgaaaaatttttacaatatgataccgacataacaaaaatattattacaaatccatgatgaattaatttttgaaattaaaacttcaaatataaatgaaataacaaaattaattagagaaataatgataagtgttgagtcgagtgatcatcataagttcacagttccacttctgatagatttaaattctggagagaattggggtatgttgcactaat

SEQ ID NO: 256304 - DNA, 2651 bp, Unknown
  Bacterial polypeptide expressing nucleotide sequence isolated from the Sargasso Sea
gatgagcgcaataaaaaaaacagatcatttttatttagtagatggatctggttatatttttagagcttattatgctcttcctcccttatctaggaaaagtgacggtttacctacaggagctgttagtggttttagcagtatgctcttcaaacttttagaggaggttaggtcagatgactcaaaaaataagcctacacattttgcagtaatatttgactctgcaagaaaaaattttagaaatgaaatatataaagattataaagcaaataggtcagaggcacccgatgatttagcaccacaatttgaatatataagaaaagcagttaaagcctttaatctaccttcaattgaacaaattaattatgaggctgatgatttgatagcaacatatgctaaacaaataattagtcttggagcaaaggttacaattatttcttctgataaagacttaatgcagcttgtatcaaataaaatcagattgtttgatccaatgaaaagtaaagttattggagaaaaagaagtaatagaaaaatttggtgtaaaacctaaccaggtaattgatgtccaatcattagcaggggactcctcagataatattcctggtgttccaggaattggtattaaaacagcatctgaattaataaataaatttaaaacattggaaaatcttattaagaaagcgggagagatacctcaaaaaaaaagaaaagaaactttaataaataataaagatttagctttaataagtaaaaaattagtaactttaaaagatgatgtcccaattaaaactaaaatcgatacttttgatattaaaaaagttgataaaaataaactttatgagtttttaagggaaatggaatttaatagacttttaagtcaagcaataagtttttatggagaacctgaaggaaaagtagttcaacaaaataccaaatcgatctcaaaaaaaattgatgttgcaaagtataaaacaataaacaaaataaatgatttagataaactaataaaaaaacttgaggacaaatcattaatatctgtagacactgagacatcatcattaaaccctctagatgctgatctcgtgggtatatcggtatgttattctccaaatgaggcatattatattcctgttaaacataaaacagaaaactgtttaaataaaagagtaatcatagaaaaaataaaaaaaattcttgaagataaaagtataaaaaaaattggtcaaaatattaaatttgataatttaattttaaaaaaagagggtattaatattaatccgatcgaggatactatgttattatcctatactctagatgcaggcctaaaccgccataatttagatacgttatctgaaattcatctagatcacaaaactatctcttacaaagatttagttggttctggaaaaaataaattgatttttgaagaagtagatttaaaaaaatcaactgaatatgcaggtgaagatgcagatgtgacttttagattatttgatattttaaaaggtcgattagatgaagaaaaattaaacataatctatgaaaccttcgaaaaacctttggttcagattctttcacagatagaaatgaatggtattaaaattaatactgactatcttgaaaaattatcgaaaaattttgcaaataaaataaaaaaaattgaaaaagaaatttttaaaatagcaaaaaaagaattcaatatagggtctccaaaacaattaggagaaataatttacaatgaattaaaaatcgctaatttaaaaaaaacaaagaaaggtagtctagctacaaatgcaaatattcttgaagacttagctttcaaaggacataaatttcccagattagttctagattggcgtcaattatcaaaattaaaaaatacatatactgatgcactacaagatcatgttaattcaaaaactaatagagtacatacttcatttttattagccgcaactaacacaggaaggctagcttctagtgacccaaatttacaaaatataccaattaaaacagatgatggccgggaaattagaaaggcatttatagctgaaaaaaataatattttaatttcagcggattataatcagattgaaatgagaattttagctgatttagcagaggtaaaagaacttcgaaaagcttttttaaacaacgaagatattcacgcgcttactgcaagccaagtatttgccgtacccataaaaaaggtagatgataatttgagaaggaaagcaaaaactataaattttggtattatctatggaattactcaatacggtcttgcaaaacaaatttctgtgtcaaatcaggaggctttagattttatcaattcatattttaaaaaatttcccgaaatcaaagattatatggaaaaaacaattaagttttgcagaaaaaacggatatgtaaataatatttttggtagacgcatacatcttaggggaataaatgacaaaaattttagcgtaagaagctttcaagaaagagctgcgattaacgcaccaattcaaagttcagcagctgatataataagacttgcgatgattaaaattgatgacttaattaattcaaacaaaatgcacaaagcaaaaatgcttcttcaaatacatgaagagcttgtttttgaatgtcaaaaatcgaatcaaaaac

SEQ ID NO: 256305 - DNA, 874 bp, Unknown
  Bacterial polypeptide expressing nucleotide sequence isolated from the Sargasso Sea
atgagtttaaaatctgaaaactctaaaaaaccaattttacttttagtcgatggccactcacttgcttttagaagcttctatgcatttagcaaagggattgatggaggtttaactaccaaagagggatttccaacaagtgtcacttatggatttctaaaaagccttctggataattgtaaaaatattagtcctgagggtgtttgtattacgtttgataccgaaaaacctactttcagacatgaattagatccaaattataaggccaatagagatgtagcaccagatgttttttttcaggatattgaacaactagaaatcattttagaagaaagccttaatttaccaatttttaaatctccaggatacgaagcagatgatctcctaggcacaattgcaaatgatgcttcttctaaaggatggtgcgtgaatattctttctggagatagggacttatttcaattagtagatgatcaaaaagatatttatgtactttatatgggtggtggtccatatgcgaaaagtggaaatccaactcttatgaatgaaaatggagtaaaagaaaaattaggtgttgcgccagaaagagtagttgatcttaaagccctaactggtgatagttctgataatattccaggtattaaaggggtaggtccaaaaactgcaattaatctactaaaagagaacgacacgcttgatggaatctatcaggctttggacaagattcagcagaacaacgataagaaatataaaggattcatcaaaggttcagttgtagaaaagctcagaaacgataaacataatgcttttctttccagggatttagcaaaaataaatactgaggtgcctctaattttaagtaacggttatgaattaa

SEQ ID NO: 256306 - DNA, 1654 bp, Unknown
  Bacterial polypeptide expressing nucleotide sequence isolated from the Sargasso Sea
catgtatcgcaaatggagaccacagtcttttgaagaaatttcaggacaagaccatatttcatcgactttaaaacaagcgattctgcaacaacgaatctcccactcctatttattttgcggtcctagaggaaccggtaaaaccaccaccgctagagtcttaagcaaagcgataaactgtctagcgattgaggaagggaatccttgcaataactgtattatgtgcacttctagcaatgaagggaaattcttagacaccatagaattagatgcagcaagtaatagaggaatcgatgagatacgcagtatcaaagaaaaaatcaatttccttccgactgagggttcgaaaaaagtctacataatagatgaagcacatatgctaacagatcaagcatctaacgcattcctaaaaaccttagaagaacctcctagccacgtaactttcattttatgtactacagagccccaaaaaatactgcccaccattctgtctagatgccagaggtatgacttcagaaaaatcacacatcctatagtcgtccaaagattgcaatcaataattgaatcagaagggatagttgcggaaaactcatctttggaagtcattgcccagtcttgtgacggaagcctcagagacgctgaaactatcttggaacaaatgatagtgtctaccaatggaaatcttaccagagcagatgtagagagcttcattggtataagcaatccctcccaatgggtagaacttgtaaacctaatcctaaatcatgacacagccggatccatcaggttggtaaacgagtccttaagtcttgggatcgaatcctcttccatacataaaaacgtaatgaatttattaagatctgtcatgctataccaactagatccatccttactacaaacttctatatacaatttagaatcagacatcaaacctttggcaaacagagctaataactcacaaataattcaatatctaagtctatggaatgaagttagttttaaaaacactgaatcaggtattctgttgcttgaattgctaatcgtaaagcttacaacaactaattcaccagaagtagtccaccataatcaaacacctgaagcatctcctgttcccaagaatgtgaccactacatcagccaaggaagaatctaaagaaacccgagcatctcaagaaaccaaaccatatgttactaaagaatacgtatctcaagaacaacctaataccaatgaaggtagtggatcaaaccacaccatacctaaacccaccgaagttaattccgaatcagagctcttatccacatggaacgaaataatacgatctctggggcgccaaaagggagagaaattcaacctgggagctcttcttagagattgtgataaaacttccttggaaatagtcgacggtaaaatgacattgtatttcaaaaacagagctaactttgaacgaatggaagaggaaatgtccagcccaatatcctataataaggtaagcgacacattcaagaaacatctcaaccaagatgtagaaatcaacttagatatcatcaacaataatggtactcagaaaacaagctcaaacgcattgcaaaacagcccacttgttagagtcgctatgggcatgggagcacatgtagtacaggagaaatcagatgaatag

SEQ ID NO: 256307 - DNA, 1111 bp, Unknown
  Bacterial polypeptide expressing nucleotide sequence isolated from the Sargasso Sea
aatggattttagagttagtcgagaggcttttttaagagttctaacacatgtcagttcaattgttgacagtagatcgactattcccattttatccaatatttatattaaatgtgacaacaaccaaattgaaataagatcgacagatatggacatctctattcgagagtttgtttcaactgactcttcaaaaaatggtgaagcaacggttaactcaagaatacttactgatataattcgtaaaacaaaaaaaaactctattgtaaaatgtaaattagagggaaacagattaataataaattctgataactctgttttcgaattaaacgcattaactgcagacgagttcccaaagtttgtaccgttagatccaacaaactctttcgagctatctatacctcagattaaaagactctttaacaaaacaaaatttgcaatatctgccgaagagacaagatattatctcaatggtatttactttcatactgtcaccaatggagcaaattctaccttaagatgtgttgctactgacggtcatagattagctaagacagagttagatctagcaaatgtaattaacatatcaggcatcattctcccaagaaaatttatacttcagttagaccgtatgttaggggactttgaaggtaaggtaaaaataatatgcacagatactcaggtaagcttagaagcagataatttcataataataagtaagcttatcgatggaactttcccagattacgaaaaagtaatacctgtatctaatgacaaattactgcaagttgaagctgaaccatttttcaatgctattgatagagtctcgactgtaaatcaagacaaaacacccacagttaaattacaatttgaaaataatagtattaagattatggctacaagcaccgatagcaataaaggagacgaagaggttgcagcaaactacgctgctgagggtttagaaattctttttaattcaaaatatattttggatttacaagatgtgattgaaggagatactatgatcttagagttactcaaccaatcatcgccagtcatagtcaaggacccaaaagattcaacaagtttatatattttaatgccaatgagaatttaa

SEQ ID NO: 256308 - DNA, 1605 bp, Unknown
  Bacterial polypeptide expressing nucleotide sequence isolated from the Sargasso Sea
tagacaaagataaactttataaatttttgagagaaatggaatttaatcgactattaagttcagtaatttctgtatacggagaaccagaattatcaaaaaataatttaaatataaaaccaaaatctgatttcctagaaataaataaaaaaaactattttttgataaaaaatatagaggagcttgatcattggattaatgaagctgaacaggaaggagaattagctatagatactgaaacaagttcattagatgccaatcaagcagatttagtaggtatttctttaagttcaaagattggtaaagcgtgctatattccagttggacataattcaaaaaattctcttcaaaaaaatttagtaataaaaaaattaaaacctattttagaagacaaaagcgttaaaaaaataggacagaatattaagtttgattttatagtattatatagacaaggaattaatatgaattcgatggaagataccatgttaatgtcatatgtgcttgatgcaggtaaaaatagacacaatatggatactctttctgaaattcatcttaatcataaaactatatcttttaaagaattagttggatcaggcaaaaatcaaattagttttaaagaagtagaacttagtaaggctatggaatattcagctgaagatgctgatgttacttatagattatataaaatttttaatgaaagtctcaaattagagaaattaacgaatatctatgagctttttgaaaaacctatgattaaaatattagcaaatatggaaatgagtggtgtaaaaattgatagtaaatttttaaaaaaattatccataaaatttgaagaaaagctcaaaaacctagaaaaaaaaatttttaaaatatcaaaaaaagaatttaacataggttcaacaaaacaacttggtgaaataatttataatgatctgaaaattacttcattaaaaaaaacaaaaaaaggaagctttgcaacaagtgcctctgtacttgaagatctagcttttaaagggcacgaatttccaaagctaatattagattggcgtcaaatttcaaaactaaaaaatacttattcagattcattaccagaacatataaatcctaatactaatagagttcacacttccttcatgcttgcagcaactacaactggaagactcgcttcaagtgatccaaatttgcaaaacattccaattaaaacagaagatggaaaaaatataagaaaggcatttattgctgaaaaaggatttactttgatttcagcagactataatcaaattgaaatgagaattttagctgatttggcagacgttaaagaattaaaaaaagcattcaaaaataacgaggacatacattccttaacagcaagtcaagtttttagtactgatataaaaaaaattaatcatgacttaagaagaaaagctaaagcaatcaattttggtataatttatggaatatctcaatatgggctagcaaaacaaataatggtttccaataatcaagctgaagaatttttaagttcatatttcttaaaattcccagaaataaaaaaatatatgaatgaaactataaatttttgtagaaaaagtggatatgtaaaataat

SEQ ID NO: 256309 - DNA, 844 bp, Unknown
  Bacterial polypeptide expressing nucleotide sequence isolated from the Sargasso Sea
gttcacacttcatttttgcttgccgcaacaaatactggaaggcttgcttctagtgatccaaacttacaaaatataccaataaaatctgacgatggaagagaaataagaaaagcattcgttccagaaaaaaataatattttaatatctgcagattataatcaggttgagatgagaatattagctgatttagcaaatgttaaagaattaaaaaaagcttttaccaacaacgaggatattcatagccttacagccagccaggtttttgatgtttctataaaaaaagtggactcaaatttaagaagaaaagcaaaagctatcaattttggaattatttatggaataacacagtatggtttagcaaaacaaatttcagtttcaaataatgaggcattagaatttataaattcttattttaaaaaattcccagaaataaaagaatatatgagatctacagtaaagttttgtcaaaaaaatgggtatgttaataatatttttggaagaagaattcacttgagaggtataaatgataaaaacttcgctgttagaagttttcaagaaagagcagcaatcaatgcaccaattcagagttctgcagctgatataattagactcgcaatgataaaacttaatggattaataaaatctaaaaaattagataaagctaaaatgcttttacaaatacacgacgaattggtatttgaatgtcaaaaaaatcaccaaaaagaggtggaaaaaatcctgaaaaaaactatggagtcagtctcaagctctgaacatcacatgttttcaattcctttggatgtaaacataaattcaggaaataactgggatgaggcacactgat

SEQ ID NO: 256310 - DNA, 448 bp, Unknown
  Bacterial polypeptide expressing nucleotide sequence isolated from the Sargasso Sea
ctgatcgccctcgtgcagatccctccgaagactcgtccgcgcctattcctcgttgacgcttatgcgctgatctatcgctcatactttgcgttcatcaaacgtcctctcatgaacgcagctggtgagaatacgtcagcgccgttcggcttcacccgcttccttctagatatacgggagcagtttgagccggactaccttgccgtcgttttcgacgccggtgattcgtttcgcgatcaggagtatccggaatacaaggccactcgtgagaagatgccagacgatctgagggatagtcttggtcgcatccgacagattgtggaggctttcaacgatccggttgtggagttggaaggatacgaggccgatgatgtgattggaacgctcgctcgacaggcgactgaacagggcctggaggcggtgatcgtttccggtgacaaggatttctacc

SEQ ID NO: 256311 - DNA, 2386 bp, Unknown
  Bacterial polypeptide expressing nucleotide sequence isolated from the Sargasso Sea
tttgacggcgttcgagcagggcttcatccttacccgccactggcgggacaccgcatccggcatcgagatcgagttctggctggcaaccgaacacggtccgcgccgcgtgcggctgcgcccgcaggaagccgtcgcgttcatcccggccgagcagcaggcgcttgccgaacgcgcgctggcaggcgagcgcgaagccgagttgcgcccgctcgcgctgcgcgacttccggcagcgcccggtcgtcggcctctattgcaagcgctatcgccatctgtccgggctgcagaagcgcctggcggccgccggcgtcgacgtctatgaagccgacgtgcagccgcccgaccgctacgcgatggagcgcttcatcacggcctgcgtgcagtttcgcgggcagcccgatcgcgacggcacgctgaccggcgccgagctgaaaaccgcgaccggctatcgcccggcgctgcgctgcgtgtcgctcgacatcgaaacgagcgtgcacggcgagctgtattcgatcgcgctcgaaggctgcgggcaacggcaggtctacatgctcggtccgccgaacggagcagacagcgacgaagcaaatgccatcgacttccgcctcgactactgcgacagccggccagcgatgctcgcgcggctcaacgaatggttcgacgaacacgatcccgatgcggtgatcggctggaacctcgtgcagttcgacctgcgcatcctgcatgcgcattcggagcaatacgggatcccgctgaagctcgggcgcggcggcagcgtgctcgactggcgcgcgcacggccagcagcccgatcatttcttcgcgggcgcggccggccggctgatcctcgacggcatcgacatgctgaaatccgcgacgtggaccttcccgtcgttcagcctcgaatacgtgtcgcaggcgctgctcggcgaaggcaagtcgatcgacaacccgtaccagcggatggacgagatccagcgccgcttcgatcacgacaagccggcgctcgcccgctacaacctgaaggactgcgagctggtcacgcgcatcttcgacaaggccgacctgctgtccttcgcgctcgaacgcgcgagcgtgacgggcctcgcggccgatcgcaccggcgggtcagtcgcggccttcacgcacctgtacctgccgcgcatgcaccggctcggctatgtcgcgccgaatctcggcgacgtgacggggcagaacagccccggcggcttcgtgatggattcgcgccccgggctctacgactccgtgctcgtgttcgactacaagagcctctatccgtcgatcatccgcacgttcctgatcgatccggtcgggctgatcgaagggctcgcgaatcccggcgacgacgcatcggtgcccggctttctcggcgcacgtttctcgcgtaccgcgcattgcctgcccgatgtcgtgcggcgcgtatgggaaggccgcgacgttgcgaagcggcagcgcaatgccccactgtcgcaggcgctgaagatcatcatgaattcgttctacggcgtgctcggctcgacgggctgccgcttcttcgacccgcgcctcgcgtcgtcgatcacgatgcgcggccacgagatcatgcaccgcacgcgcgagctgatcgaagcgcagggttacgaagtgatctacggcgataccgattcgacgttcgtgtggctcggccgcgcgcacgatgacgacgaagccggcgccaagggccgcgcgctcgtcgagcacgtgaaccgctggtggcaaacgcatctgcgcgaaaccttcgggctcgagagcgcgttggagctgcaatacgagcggcactaccgccgcttcctgatgccgaccgtgcgcggcgcggaagaaggcagcaagaagcgctatgcgggcctcgcggcagcggccgatggtggcgaggacctcgtcttcaaggggctcgaaacggtgcgcaccgactggacaccgctcgcgcagcagttccagcgcgagttgtaccggcgcgtgttcagccgcgagccgtaccaggatttcatccgcgacaccgtgcgacgcacgctggccggcgaattcgacgaccagctcgtctaccgcaagcgcgtgcgccggccgctacgcgagtacgaacgcaacgtgccgccgcacgtgcgcgcggcgcggatcgccgacgagttcaaccaggcgcagggccggccgctgcagtatcagcgcggcggctggatcagctacgtgatgacgacggccggccccgaaccactcgaaaccatgcgctcgccgatcgactacgcgttctacctgagccgccagttgcagcccgtcgcggacgcgatcctgccgttcctgcgcgacgatttcgagcgcgtgatctccgggcaggggcagttgttccaggagtag

SEQ ID NO: 256312 - DNA, 873 bp, Unknown
  Bacterial polypeptide expressing nucleotide sequence isolated from the Sargasso Sea
aagatcatataaataaaaatacaaatagggtacatacttcttttttattagccgctacaaacactgggcgacttgcgtccagtgaccctaatttgcaaaatataccaatcaaaactgatgatggcagggaaataagaaaagcgtttatatctgaaaaaaataacgttttaatatctgctgattataaccaggtagagatgagaattttagctgacttagcggacgttaaagaattaaaaaaggcatttatcaataatgatgatattcatagtattacagcaagccaagtttttgatgtttcaattaataaagttgaccaaaatttaagacgtaaagctaaagcaattaactttggtataatttatggaataacacagtacggtcttgcaaaacaaatttcagtatcaaataatgaggcgctagaatttattaattcatattttaaaaagtttcctgaaataaaagattatatgcaggctacagttaagtcctgcagaaaaaatggatatgttagtaacatttttggaagaagaattcatcttcgaggtataaatgataaaaattttagtgttagaagttttcaagaaagagctgccattaatgctccgatacaaagttcggctgccgacatcataagattagctatgattaaattacatgaactttcgaaatctaaaaaaataaatggcgcaaaaatgcttttacaaattcatgatgaattggtttttgaatgtttaaaaagtcaacaaattgaagttgaaaaagttattaaaaaatctatggaatcaatctcaagctctgattatcatatatttacaattcctctagatgtgaacattaattcgggaaataattgggatcaagcacactgat

SEQ ID NO: 256313 - DNA, 577 bp, Unknown
  Bacterial polypeptide expressing nucleotide sequence isolated from the Sargasso Sea
tgccgcagaagtttttggtgtttcaatagacgatgtaagtcaagatcaaagaagaagcgcaaaagcaattaactttggtctaatgtatgggatgtcagcttttggtttaacaaggcagcttggcattcctagagcagaagcacaagaatacctcgatacttattttgctagatacactggtgttagagactatatggataatataaaagctaaggcaaaagaagataagtttgttgaaactattatgggtagacgactttatttaaatgaaattaacgcagctaatggtttgagaagacaagcagcggaaagagctgccattaatgctccgcttcagggttcagcagcagatattatcaagaaggctatgctcgacattgatcagcttttattaaatgaaatgcaagaagtaaaaatgattatgcaggttcacgatgaattagtttttgaatgcccaaaggaaaatgctgataaagttatgaaaatgatgaaagatactatggagcaaacagtagaattaaatattccattgattgcagaagctgctattggaaataattggaatgaagctcactaa

SEQ ID NO: 256314 - DNA, 928 bp, Unknown
  Bacterial polypeptide expressing nucleotide sequence isolated from the Sargasso Sea
tatgaagatatcagttgaaaaagatattcttcttaagagtctaaaccatattcaaagcgtagttgaaagaaggaacactattcctattctctcaaatgtaaaaatcatagcaaacaacgaaggaatctcacttacagcaactgatttagatctagaaatcatagagagcctagataaagccaataccattgaagatggtgagattaccacatccgctcatacactttacgatattgtaagaaagttacctgacggatcgtcattggatattaagactaaagataatgataaattagcattatcatgtggacagtcaaattttgaattatcaactctacctatagaggattttccagaaatgtcctcaggtgaaatgccttgcaattttgttatagactccgaagagtttgctaatatgattgataaatctaaattcgctatctctactgaagaaactcgatattatcttaatggtattttctttcatgctataaacaatactttaagaagtgttgctacagatgggcacagattagcttgtattcaggcaaatttaccatcaggtgcagatgatatcccaagcatcattataccaaggaaaactataggagaggttagaaaattaattgaagatattgaaggaaatatcaatttatttatttctgaaaccaaaataagatttgaagtaacaaatatttctttaacatcaaaattaattgatggaacttttcctgattatgagagagtaattcctaaaacaaatacaaaaattatgactgtcaagacacaagactttgcctcttcaattgatcgtgttgcaacaatttcttctgataagtctaaagcggtaaaatttgcgatcaaagataattctttaacattaactgttattaatcctgatgctggtacagcggttgaaaaaagttga

SEQ ID NO: 256315 - DNA, 538 bp, Unknown
  Bacterial polypeptide expressing nucleotide sequence isolated from the Sargasso Sea
tttgagcggtgttcaggaacgtttcggttgtcgtcctgatcaagtaatcgaggttcttgggctgatgggtgacaattcagacaatatccctggagtccgtggtgtcggggaaaaaacagcgattaagctgatccaacagtacggcagtattgaaaaggtctatgaaaatcttgaagaggttcctggaaaaagtcttaagtccaaacttgaagaggggcgcgatcaggccatgctctccagggaactggtaaccatccttcgtgaggtaccacttgaaatcactctggaagacttacaactggaccaaagcccattgtctgaaaataaggaattcctggatctccttcaagaattggaattgaacactcttctgaggaggattaaagaaggatccgtttcttcccaaaatcaagattcttcagggaatcctcaacaatccaagaacaaaccactgtcgcaggccgttcagctagaattgctcgatgaaccctctgccagaacacagaaagcaattctctcccacacaatagaaacctag

SEQ ID NO: 256316 - DNA, 1366 bp, Unknown
  Bacterial polypeptide expressing nucleotide sequence isolated from the Sargasso Sea
gatgattccaattgaagatttaattggagaagggaaaaaccagataactatggcagaagttgaattggatcaatcaggatattatgcctgtgaagatgcagatatagctctacagcttacaaatatatttttgaaagagcttaagaatgctggcttggatcattttttcaataaaattgaattaccgctaattgatgttcttttaaatatggaatatgaaggggtatatgtagataaaaaaatgttagaaaacatgtctatagatttaggtaaaaaaattaaaaattttactaaagaaattattaagcaagctggaactgaattcaatattaattccactcaacaactagcagctattttatttgataagttaaaactgacaaaaattaaacagagatctactgctgagcccgtactagaagcacttcgaaaggaacattctttaccaaatctaatcctagaatacagaaaattatcaaaattaatgaatacctatgttgatagtctgcctctattaataaataaaaatactggtagaatacacacaacttttgctcaaactattgcttctacaggacgcttatcaagtagcaatccaaacttccaaaatataccaattcgcactgaagaaggtcgagaaattcggaaagcatttaaagcacaaagaaaggactggttaattttatctgctgattactctcaaatagaattacgaattatggctcacttaagtaaagatccatctctaataaagtcattcaataataatgaagatatccatacaagaactgcaagtgatgtatatggcgtaaatttaacagaagtattgccggatatgcgtcgaactgcaaaagttgtgaattttggtattatgtatggcgccggccctttccgcttgagtcaagaattaggaattcctaggaacgaagcccaagtaattattgatacttattttgaaagatatattgggattaggaattacatggataacactattcaaaatgcagaaaaacataaatacgtggagactttattaggaagaagaaggaatatatggaatattgatagtgaaaataggatgcaaagagaagcagcgaaaaggatggctattaatatgcctatacagggtactgcagcagagatgataaagctcgcaatgcttgatattaataaaactttaaagaatgataattatcaatcgcgtatgatattacaaatacacgatgagttattatttgaatcaccaaaagatgaaataagcgagcttgaaaaaatggtcaaagataaaatggttaatgccatgcctcttgaagttcctttagtagtagattgtggtcagggaatcagttggtttgatgctcattaa

SEQ ID NO: 256317 - DNA, 1522 bp, Unknown
  Bacterial polypeptide expressing nucleotide sequence isolated from the Sargasso Sea
tatgaaacaagcactttatagaaaatatagaccaacaaaattgtcagaattggttgggcaagaagaggctgtttcattgattaataaccaaatcgagaatgaaaatcttggacatgcatatctcttcttaggacctagaggggttggtaaaacatctttggcaagaattattgctttacagctaggttgtgatccaatttttgacatatccgaaattgatgcagcatcacataataaagttgatgacatacgagaaatgaacgaaagcgtaaactttattgcaagcagcccaggaaagaaaagagtttttattttagatgaagttcacatgctttctaacgccgcttcaaatgcttttcttaagaccctagaagaaccaccagagcatataatttttatacttgcaactacagaaccagaaagggttttagaaacaattaaaagcaggaccactcaaatagtctttaaaaaaataacggaagatgaaattattaaaactttaaagaagataggtaaaaaagaaaagatagatttagatgttgaaattataaaaatgattgcaaattcatctgacggatcacttagagatgcaataaatctttttgagcaaacccacaacacatttggggcaaaagcttctattgatgacttgtttagtttgcttggcaaattaagcagcaaagactttgaaataataattaatgctgtagaaacacaagacactggcgctgttcttactgtaataagaggagcttatgcaaaagggttgcaacccaatgatattgttgattctgtatcagaattttttagaaatcttttttatctcaaatacttacctgatgacaagaagctaagttcacttacaccaaatttaaaaaaactccttgaggaagctaataagaaaatacctgcaaagcaattagttagaatacttgatttaattgatgaaattaatactgttatttcaacaacatcttcagctcacttaaagttggaattatttatgatgaaaataataaaaccagagtttggttcagatgtaaaatctataggatacagggtagatcttcttgaaggaaaattaattacagatgtaaaacctaaaaaagaagagaagcctgaagttaaggttgaagaagaaaaaatagaagtaccaaaatcaaaaaaaaatataaagaagaaaaataaagaatcattagaaaattttgatgtatattggccaaagatattagaggaacttagagaaaagctctcttcaagaaaattttcctacctaacagctgtaagtccagaagttgaaagcaatggtgccttaaacttatttgtagataaagataacgaatttctgctaaaagagctggaaaagtctgaagaagtaattgacttattaatatcagaagttgcagaaaaaatgggaatagacgtaaatataaaaatattattaagtgaaaaatctaaatcaggagattcaaaaggtttagatgctgctcaagaagtattcgaagtagaagatttaaattaa

SEQ ID NO: 256318 - DNA, 1162 bp, Unknown
  Bacterial polypeptide expressing nucleotide sequence isolated from the Sargasso Sea
tatggcttatactgttttagctagaaaatatagacctcaaaaattatcagaattgataggacaagatacacttgttaaagttttaactaattcatttaaacttaatcgtatagcacattcttttcttttaactgggtcaagaggtataggcaaaacttctactgcaaggattattgcaaaaggtcttaattgtcttgcatcttcagctaataatcttccaactattgatccttgtggagagtgtgaatcctgcatttccataactcaaagccgtcacatagacgttattgaaatggatgctgctagtaggactggtgttgctgatgtaagggaaatcattgataatattgattataagacagtttatgctcgttataaaatttatataattgatgaagttcatatgttatctaattctgcttttaatgctcttcttaaaaccttggaagaaccaccagcacatgtaaaatttatctttgctaccactgaaatcttgaaaatcccaacaacaataatttcgagatgccaacgttttgatttagaaaggattgataatcatttaataaataagcatctgtctgatgtctgtaataaagaaaaaattattttctcagaaggtgctttaaaaatgatttctaacgtttcagaaggttctgttagagatgcattatctatattagatcaagcaattatatatagtgatggcagattagaagctaatcatattatagagatgcttggattattagatcagaatagatcatttaaattatttgagttaatttttgaacaaaaaaatagtgaaatgctatcagaattagaaaaagaaataaaagatgggattgatcccttttcaattctgaacggattaatggatattaattggaaattaatggtatcaaaaattaaaaaggaggaattttatacatatgatctatcagatgaaaatttagagttactacaaaatttctccaacaaaatatctacttctatattatcaaggtgttggcagattttattgaaaattcacgatgaaatgaaatatgcaccagatattttatctacattacaaatgggtttgctaagattaagttttttttcaaactcccctgaccaagatgaattattaaaaatattaaataatttaaaaaatccttcagaa

SEQ ID NO: 256319 - DNA, 1801 bp, Unknown
  Bacterial polypeptide expressing nucleotide sequence isolated from the Sargasso Sea
atggcgggagcaaaagttacaataatttcctcagataaagatttaatgcaattagtatctaaagaaatcaggttatttgatccaatgaaaagtaaagttataggaagtaaagaggttcacgaaaaatttggtgtaaagccaagccaggttattgatgttcaatcattatccggtgattcctcagacaatataccgggtgttccaggtattggaataaaaactgcagctgagttaattaataaatacaaaaatattgaaactttgttgaatagagcagaagagattcctcaaaaaaaaaggaaacaaactctaatcgaaaataaagaggcagctttaatgagtaaaaaacttgtgacattaaaaaacgatgtaccagtcaaaactaaaattgagagttttataataaaagaaataaaaaaagataaactttataattttttgagagaaatggagtttaatagattgctaagtcaagtgataagtttttacggagagccagacaaaaaaaaggaaaatcaagatttaagtttaagtaaaattaatacaaaaaaatacgaaactattactgatattaatgaattaaaaaaatgggtgaatattttaaaaaaacagaaaattatttcagtagatacagaaacttcttctctaaaccctattgatgcagacttagtgggaatttcattctcatatgtagaaggtaaagcttgttatatccctgttgtaaataaaaaagaaaaatgtttaaccgtcgaacaggtaattaaagaaataaaaccaattttagaagatcaaagtataaaaaaaattggacaaaatataaaatatgacaatataattttaaaaaaaaataaaattaatgtgtacccaatcgaagatactatgctggcatcctacacacttgatgcaggtctaaatcgccataatcttgatatattatctgaaattcatttgggacataaaaccgtttcatttaaagatttagttggaagtggaaaaaagaaagtttcctttacagatatagatttaaaacgagctacagaatatgcaggtgaggatgctgatgtaacttttagattatttaaattatttaaacaaagactagataaagaaaaacttactaaaatttatgaaatatttgaaaaaccaatggtaaaagttctttctgaaattgagacaaatggtgttaaggtagataaagaatatttaaaaaaactatctaaaaattttaacaataaaatactgaaaatagaaaaagaaatttattctttagctaaaaaagaatttaatataggttcaccaaaacaacttggtgaaattatttacaatgatctcaaaatcgcgaatttaaaaaaaacaaaaaaaggaagtttagcaacaagtgccactatcttagaagatttagctttcaagggacataaatttccacgattagttttagattggcgacaattatcaaaacttaaaaatacttactcagatgccttacaaaatcatataaatttaaagactaaaagggttcatacatcttttttattagctgctacaaatacaggcaggttggcctctagtgatccaaacttacaaaatattcctataaagacagaagacggaagagaaattaggaaggcttttatacctgaaaaaaataatattttgatttcagctgattataaacaaatagaaatgagaatactcgcagacctagcagatgttaaagagttaaaaaaagcttttgttaataaagaagacattcatagtataacagcaagccaagtctttgacgtttctattggaaaagtaa

SEQ ID NO: 256320 - DNA, 2288 bp, Unknown
  Bacterial polypeptide expressing nucleotide sequence isolated from the Sargasso Sea
tctgacccgtcacgggcgggatgtgcgcggccgcaacggacatggcgaacgcaccgagatcgtgatgtggctctggagcgagcaggggccggtgcggctggtggtaccggggcaggagccggtcttcttcctgccccagagccatatggaagaagccgccgagctgttcaagggggcgggggtaagcgggcggtttcggcgcttgccgatgcacaccttcgatggccgcgccgtggtgggctgctactttgccaccttgagcgcctttcaccgcgccatcgagttactgctgatccgcgggctggagcacttcgaggcggatattcggctgccagagcgctacctgatggagcgttttatcaccgccggcgtgcgcttcgaggggcgtaccctcaagaaagggggcaagcacggctactgggaggtgaacgaggcacgctgcgcgccgcaggcagtgacgccgaccctctcctgggtatccctcgacgtagagtgtgccatggatggggcgctcttctcggtggggctctacagcgaagatgatgcgcgggtcatcatgatcggtacgccggaggcggatgccgacagctggagtacccaggtcgagtgggtggcggacgagagcgccctgctgagtgcgctggagcgctggtttgtgcggcacgacccggatctggtcattggctggaacgtggtcaacttcgactttcgcctgctgttgcgccgcgccgagctcaacaagcggcggttgcggctggggcgcggccacgagctctgcttctggcgctcatcgcgcaatgatccccagagcggcagcgtcatcattcccggacgcatggtgctcgatggcatcgataccctgaagagcgccacctggcagttcccgagctacagcctggatgcggtggcgagcgagttgctcggccgtggcaaggatatcgaggatgtggccaaccgcggggagaagatcaccgagctgttccactccgacaaggaggcgctggcccgctacaacctggaggattgcaggctggtgtgggagatcttcgatttctgccacctcatcccctttgccatcgagcgtgcctccctcaccggccttgagctggaccgggtagggggctcggtggcggcatttaccaacctctacctgccgcggctccatcgcggcggttacgtggcccccaatctgccggctgacggcgggctggctagccccggcggatatgtgatggactccaaacccggcctctatcgccgcgtgctggtgctcgatttcaagagcctctatcccagcatcatccgcaccttctgcatcgatcctatggggctcatcgaggggctgcagcatcccgaccacgccattgcgggctttcgcggcgccatgttctcccgcgagcgccacttcctgccggatctgatcgctactctgtgggcggcgcgggatcgggccaaggccgccagcaacaaggcgctctcccaggccatcaagatcatcatgaactccttctacggggtactgggctcggggggctgtcgcttctacgatccgcgcctcgcttcctccatcaccttgcgtggtcacggcatcatgcagcagacccgggagtggatcgaaggggagggcttcgaggtgatctatggcgacaccgactccaccttcgtgcacctggggcgggatgccagccccgagcaggcggacgagattggccggcggctggcgaagatgatcaacgacaactgggctgcgctgatcacgcgcgaattcaacctgccaagctatctggagatccagtacgagacccattatcgccgctttctgatgcccaccattcgcgggctggagaaggggagcaagaagcgctatgccgggctggtggcgggccatcaggcaggtgaagaggagcagctggtgttcaaggggctcgaatcggtgcgcaccgactggacaccccttgccaaggcgttccagacccgcctctatgaaatggtgtttcacgaccaggatcccagcggctatgtgcgcaccatggtggacgagacccgggccggccagcacgacgagctcttggtctatcgcaagcggctgcgccagaaactcgaggagtaccagaagaacgtgccaccccatgtgcgggcggcgcgtctggcggacgaggagaacctgcgccgcggcctgccccagcgctaccagcacaggggctccatcgcctacctgatgactctcaatggccccgagccgctggaataccggcgcagcgccatcgactacgagcactacatcgaca

SEQ ID NO: 256321 - DNA, 880 bp, Unknown
  Bacterial polypeptide expressing nucleotide sequence isolated from the Sargasso Sea
tatggattttcaaccgaacgttattctaatagatggaacctcatacatttatcgagcattccatgcattgccacctttaactacatcagctgggaaacctactggagcaactagaggatttgcagcaatgttgaacaaattaataaaaacgtaccctgaaacacctatggttatggtctttgatgcaaagggaaaaaattttagaaatgattattatgaaaaatataaagcaaatagacctccaatgcctaatgagcttagacatcagattgaggatataaaaaaattatgtggactatttaattttactgtacaggaagttgaggacgttgaagcagatgatgttattgctactttagtttctaatttttctgaagataaaattttaatatcttctccagataaagatctaactcaactagtgaatgaaaatgtgattcaacataattcaatgagtgatattttctttgatgaaaatggtgttaaagaaaaatttggagttttcccaaataaggtcgctgaattacttgctctagtaggggataaatcagataacatcccaggaattacaaaagtgggtgaaaaaactgccgctaaatggcttaatgaatatggaagtctagatgaagttattaaaaatgctgaaaacatcacgggaaaagttggtgaaaatcttagagaggaaaaaaatgttttacagagaaatttctttttggtcagcttaaaaaatgatattaacttaggacttcaaaaaagtgacatctcaactccaaaagcaaatagtagcgggctacaagaattttataggagtttagagttcaatacatttattgaacatgaggacaataaaagtgcaggtgtagagtataagtctgtaaaa

SEQ ID NO: 256322 - DNA, 1242 bp, Unknown
  Bacterial polypeptide expressing nucleotide sequence isolated from the Sargasso Sea
gttgagcggggttcaggaacgtttcggatgccgtcctgatcaagtaatcgaggttcttgggttaatgggtgacagttcagataatatccccggagtccgtggtgtcggggaaaaaactgcgatcaagctgatccagcagttcggcagcattgaaaaggtctatgaaaatcttgacgaggttccgggtaaaagtcttaagtccaaacttgaagaagggcgcgatcaggccatgctctccagggaactggtaaccattcatcgtgaggtaccacttgaaatcgctctggaagacttacaactggatcaaagcccattatctgaaaataaggaattcctggatcttcttcaagaattggaattgaataccctcctcaggaggattacagaaggatccgtttcttcccaaaaacaagattcatcggggagtcctgaacaagccaagaacaaaccactgtcgcaggccgttcagctagaattgctcgacgaaccctctgccagaacacagaaagcaattctctcccacacaatagaaactgaagaagaatggaattccctcaggaaaaaaattaatgaaaacccaaaagtatcattagcactttatactcgtgaagatcatcaacttgacttccaaattcagggaatggccttatccgtggaaccgggcgaagcctatttcatttcacatcatcattttaaaaacaattccaacatctggtccaaagatcttcaggttgttctggaagattccgggattgcaaaattggtttatgatctgaagaaaacgctccactcgcttaacgctgagggaatcggtttgaaaggagttgaaggtgatgtgatgatcgccgcacacctatcagatcctcttagccgacgatacgatttggatttcctcattgggcgaagattgaaccgggaacgcagttccgctgatgctgaaatcctccctgacagaaaagtaagctgtgaagatgccagtaacattcttgaactccatgacttgtttgaaaagcaattgaaacaagacgagatgattaattcttatcggtatattgaaattcctctcgcagaaaccttggcgcgaatcgaatggtctggagttcgggtggatacggaaaaactagaggaaattagtcaggattttgaggaaaggctcgatgaattgcgtgagagaattcacgaacaggcagaagaaacttttaatgtcaactcggtggtggaactgcaaaatgtgctttatga

SEQ ID NO: 256323 - DNA, 275 bp, Unknown
  Bacterial polypeptide expressing nucleotide sequence isolated from the Sargasso Sea
gccagaaagaaatgcaatcaacgctcctattcaaggaagtgcagcggatattatcaaaattgctatgattagagttcatgaaaagtttaaagaacagtctttaaaatcaaaaatgttacttcaggttcatgatgaacttgtttttgatgtctataaatcagaaaaaaatatagtcaagactattgtcaaagacacaatggaatcagctgttaagctgcttgttcctcttaaaattgatttagaattcggtaaaaactggttagaggcacattaat

SEQ ID NO: 256324 - DNA, 1269 bp, Unknown
  Bacterial polypeptide expressing nucleotide sequence isolated from the Sargasso Sea
tagacatcagattgaggatataaaaaaattatgtggactatttaattttacagtccaggaagttgaggatgttgaagcagatgacgttattgctactttagtttctaatttttctgaagataaaattttaatatcttctccagacaaagatttaactcagctagtggataaaaatgtgattcaacacaattcaatgagtgatattttcttcgatgaaaatggtgtaaaagaaaaatttggagtttttccaaataaagttgctgaattactagctttagtaggagataaatcagataacatcccaggaattacaaaagtaggagaaaaaactgctgccaaatggcttaacgaatatggaagtttggatgaagttataaaaaatgctgaaaatatcactggaaaagttggtgaaaatcttagagaggaaaaaaatgttttacagagaaatttctttttggtcagcttaaaaagtgatattaatttaggacttcaaaaaagtgatatatcaactccaaaagcaaatagtagtggactacaagaattttataagggtctagaatttaatacatttattgaacatgaggataataagagcgcgagtgtagagtacaagtctgtaaaatctcttgaagagctagagaaactttcatctcaattcaataattgtgactattttagctttgatactgaaacaacgtcattggatgtaaatattgcacaaatagttggtttttctttttgctttgaatctggaaaagccttttatgtgcctttagaacataacgagagcacagatctttcaaaggatactggaataaaatggttaaaagaaatccttcctaaaaactcatcaaagcttatagggcagaatttaaaatatgacttagcagttctttcaaaagaaggaatttacctagagtcctttcttgctgatacgatgcttatgtcatacgtattaaacagcactgcatcaagacacaacctagatgcactctctgagtattatcttaattttaaaactattaaatatgaggatgtagtaggaaaaggagcaaagaaatataaatcatttgctgatgtgccaattaaagaagcaacaaattatgctgctgaagatgctgatataactttgcggttatatgaaaagttgtgtgatttgcttgatgcaggagctcaagacattttaaaaaatatggaatacccattattaattgttttaatgcaaatggagaaagatggagcacgtgtaaacacgggacatctaaaaaa

SEQ ID NO: 256325 - DNA, 1264 bp, Unknown
  Bacterial polypeptide expressing nucleotide sequence isolated from the Sargasso Sea
attgaaatatataagaaaatcagtaaaagcttttaatttaccatccatagaacttttaaatttcgaagctgatgatttaatcgcaacttatgcaaaacagattataaaattaggagcaaaagtaacaataatttcttctgacaaagatttaatgcaactcgtttcaaaagatattagattgtatgacccgatgaaaagtaaaattattggagaaaaagaagtaatagaaaaatttggagtaaaacctagtcaagttattgatgtccaatccttagccggagactcttccgacaatatccctggtgtgcccggaatcggcattaaaactgctgctgagctgattaacaaatataaaaacctagatactttactaaataaagcatccgagattaaacaaaacaaaagaagagaaacattacttgaaaataaagataaagccttattgagcagagaattagtgaccttgaaatctaacgtcccggttaaagatgaattgagcagttttattttgaaagatgtcaataaagaaactttatataattttttgagagaaatggagtttaatagacttctaagtcaagcaattagtttttacggtgaatatggcggaagtttagagaaaagaaaagacgatataaacaaaaagtctgaaattaatactaacaattataaaagcatacttaatgaaaccgatttagataagttaataaaaaaattaaatgtaaaatcaacaatatctgttgattgcgaaacttcttcacttaacccaattgatgctcaattagtaggaatttcttttagttatgaagtaaacgaagcttattatatacccgttgcacataaaaattttaaaagtttaagtaaagatattgtaatcaaaaagttaaaaaagattctggaagatccaagtataaaaaaaataggtcaaaatataaaatatgattttatgatttttaaaaaatatggaataaatttagaaccagtcgaagatactatgcttctttcttatactttagatgctggaaataacagacataatatggatacattgtcggagattcatttaggtcataaaacaatttcatacaaagaaatagtgggcacaggtaaaaaacaattaaacttttctgatatcaatttaaaagaagccacaaaatacgcagccgaagatgctgacgtaactttacgtctttataatgttttaaaagatagagtagacaaagaaaaactcaataagatttacgaggtattgaaaaaccaatga

SEQ ID NO: 256326 - DNA, 1150 bp, Unknown
  Bacterial polypeptide expressing nucleotide sequence isolated from the Sargasso Sea
gctggcaagtcaggcgcgcaggccgtcatatcaacgaaggaactctatgcaactggtcaagaccgaacgcgataacctcctcaggccgctgcaaaccgtgagcggcatcgtcgaacgccgccatacgttgccgatcctcgccaatttgctgattaccaagaacggccctgacgtgtcgttcctgtcgaccgacctcgagttgcagatcaccacgcgtgccgattttggcgtgggcggcgattcggtcgcgaccacggtggcagcaagaaagctcctcgacattttgcgcgcgatgcccgacgggcaagttacgctgaccttgaacgacaagcgtttgaccgtgcaatccggcaagagccgctttgcgctgcaaactctcgcggccgacgagttcccgaccgtcgctcaggctaaagactacggcgcgaacctggtggttccccagaaaacgttccgccagttgctcggcatggtccatttttcgatggcccagcaggacatccgctactacctgaacggcatgctgctggtggtagatggcgaccaactgatggcagtcgcaaccgacggccaccgcctcgcgttctcgtcgatgaagatcgaaggctcgttcgcgcgtcaggaagtgatcattccgcgcaagacgattctcgaattgcagcgtctgctggaagacatcgacgacacgctgaagatcgacattgcgccgacccaggtgaagttcaccttcggccaggtcgaactggtgtcgaagctggtggaaggcaaattccctgacttccagcgcgtgattccgaagtcgcacaagaatcagttcgtgatcggccgtgaagaactgcagcgctcgctgcaacgcgccgcgattctgacttcggacaaattcaagggcgtgcgctgcattatcgagccgggccagttgaagatcatgtcgaccaacgccgatcaggaagaggcgcaggaagaactggaaatcgcgtacgacggcgacagcgtcgatattgggttcaacgtcacgtatctgctcgacgtgctcgcaaacctgaaggtcgacatgttgcaagtgagccttggcgacgccagctccagcgcgttgatcacgattcccgagaacgacgaattcaaatacgtcgtgatgccgatgcgcatctaa

SEQ ID NO: 256327 - DNA, 1507 bp, Unknown
  Bacterial polypeptide expressing nucleotide sequence isolated from the Sargasso Sea
aatgagcaataattcaaaagtcttagcactgaaatacagacctcaagtctttaaagatttaataggtcagaatatcattgtagaaacaattgaaaaatctatttcgcaaaataaaattcccaatgcttttttatttacaggaattaggggtgtcggcaaaacgacaatagcaagaattttagcgaaatctttaaattgtgaaaattctgaaaaaaataattgtttaaaaaataagtgtaaaaattgtgatgaaatatccgagtctagacacatcgatgttctagaaatagatgcggcgagcaaaactggtgttgatgatgttagggacttaatagaattttcaagatatggaccaacatcttcaaaattcaaaatttttataatcgatgaggtccacatgttaagtaagcaagcttttaatgccttactaaaaactctagaggaaccacctgtttatttaaagtttatttttgcgacaactgaggttaacaaaattccagtaacagtcttatcaagatgtcaaagatttgatttatcaagaatcaagtctgaggagttaagtgaatttttagcaaagattgctgaaatggagaaaatagatatcaatcaagatgttataaacctaatctcaaaaatttcagaaggttcagtcagagacggattgtcattattagatagaatatcacttaccaatgatggaaaccaaaaagggactataagcttagaaagcgcaagggaaatatttggatattttgataaagagtttaccataaacctaatagagaaaatatttgatggagatgaagacaaaactctagatctatacagacagatttatcaaaaaggaatagaaccaaaaatttttttaaatggttttttggaaatcatctattatttaaaaaattttaaaaatttagaaagagcaagtttttctaccgatttaactgaaaataattttacaaaaatcaaagaaatgtctgagaaattagatgctcatacactacttcttttctggcaatttactatagagacaatggatgaagttaatattgtaaatgacccaaacttatctatagagatgtttttgatacgcttgctttatttaaaaggtaatcaaactaaaactgataatctatcaccaaatcaaaacaataaaattgacaacaattttgagaaaaagaaaatagctataaaccaactaaaatcttcttctcaagaaaaacaaaaaaagattttagaagaaaataaatctatgaataatttagaaattaaatcattcaatgacctagttaatatttgcaattcaaaaaaagaattagaattaaaatatgagttagaaactaatgtaaatttaataaactttaaaaatggttatattgaaatttcttttaatgaaaatcttaaaaaagattttgttaaaatattatcatccaagctttatgagtggactaataccagatggataatttctctttcacaaaataaaggacaagaaacgattaaaaaa

SEQ ID NO: 256328 - DNA, 626 bp, Unknown
  Bacterial polypeptide expressing nucleotide sequence isolated from the Sargasso Sea
gatgagtaaagaaaaattattactggtagatggttcctcctatttgtatagagcattccatgcgctccctgatctgagatcatcagatgggaggccaactggagcgatctatggtgttctgaatatgctccaaaagctgataaaatctgaaaggccagactatctttcagtcatttttgacacaccggtcaaaacttttagacatgatatttttcctgattacaaagcaaataggcaaaaaacccctgaagacttaatcgctcagattgagccactgcatcaactcatcatcaatcttggattaccgctcattgcagttgatggagttgaggccgatgatgtgattggaacccttgcgctagaagccgataagaaaggcatcaaaacattgattgcaactggtgataaggatatggcgcagttggtcacagaaaatattcatctcattgatacgatgaaggacctcagaatgggtcctgcagaggttaaggaaaagtttggtattcagcccgatcgatttattgattatctgacactggcaggcgacacatctgacaacattcctggcgtagagaaggtgggtcccaagacagcgatcaagtggattaatgagtatggatctttag

SEQ ID NO: 256329 - DNA, 1102 bp, Unknown
  Bacterial polypeptide expressing nucleotide sequence isolated from the Sargasso Sea
atgaagttcacggcagaaaaatcccaaatagttgattctttgcagaatgcagcggctgttgctgaaagaagacaaaccattccgatattagctaacttgcgtctgaaaacttcttctggaaagcttgaagtaacagcaacagacttagaaattcaaatcaaatcctattcagagctcttgaaggttgaggaggagggagaaacaactgtttctgcaagaaaaatgtcagaattatgtagatctttaccagatggagaaaatgtagaatttaagctaaatgaaggaaaacttactgttagctcaaaaaactttaacggcgactttgcaacaatttcggctgatgacttccctgaattggaggttaatgaagaacaagatacagcagatataccgtctgatgcgttaaaaagaatacttaccaaaacctctttttcaatggcatctcaagacgtacgctactatctaaatggactgcttttagagctgtcagggggaactctgaagggggtggccactgatggtcataggcttgctctttcttctacaaccacaaaagaaaagggcctagaaatgagcaatattttacccaggaaggctgttttagagcttgctaaattacttccacctgatgattcgtctgtacaaatacttataggaccaacatacataggagttaatacagataatttatgtttttcttcaaaacttattgatggcaaatatcctgattatgaaaaagtatttccttcaggcgaacctcttcctttgttgattgggaaagaaacgctccaatctgcactatccagggcttctgttttgtcgaatgaaaaatacagaggagtgaggtttgagttgtcaaaaagctctctaaggttaacagctaacaaccctgagcaagaatcagcagaagaggttctggacgttgactatgatggagcggaccttgaagttggattcaatattggatacttaattgatgtgttgagtgttcttgaagaagagagcgtaaaatttgaattttatggagaagattcaagctgcgtaatcaaagaaccaagctctgaggaagaggtttacgttatcatgccaatgaggctttaat

SEQ ID NO: 256330 - DNA, 1090 bp, Unknown
  Bacterial polypeptide expressing nucleotide sequence isolated from the Sargasso Sea
catgcctgaggcctccaccaagcccctgctcttgcttgtggacggtcattccctggctttccgcagcttctatgccttcagcaaaggcggcgaagggggtctggccacccaggacggccgccccaccagcgttacctacggtttcctcaaatcccttctggacacaggcaagtcgttgaaaccagagggtgtggccatcgccttcgacacggcggaacccacctttcggcacaaggcggatgccaattacaaggcacaccgcgacgtggcgccggaggtgttctttcaggatctggatcaacttcaggagatcctgcggcaacagttggacctaccgctgtgcatggcgccgggctacgaagccgatgacgtgctggggactctggccaaccgtgcagccgatgacggttggggagtccgaatcctgtcgggtgaccgcgacctgtttcaactcgtggacgacaaccgcgacatcgcggtgctctacatggggggtggtccctatgcaaaaaacagtggcccaaccctgattcgcgaagagggcgtgctgggcaagctcggcgtgatgcccaacaaggtggtggacctcaaggccctcaccggtgacagctccgacaacatccccggcgttcgcggcgttgggcccaaaacagcgatcaacctgctgaaggacaacaacgacctcgatgcggtttacgccacgctggacgaggttgaggcagaaggaccaaaggccagccgcggcgccatcaaaggtgccttgaagggcaaactccgcaacgacaaggacaacgcctacctctcccgcaaactggcggagatcctggtggacatacccctgccacaggagcccagcctgcccttatcaacggtgaatgccgaaggactgagctcctgcctcgaggacttggagctcaacagcttgctgcgtcaggtgggtggattcgtcgcagccttctcggcagggggctacggcgccaacgtggaagctgctgcgccggcacagccgtcgtcgaggcagagaccaccaaggacaatcagggattggaggagacggttgggagcgttcccggccctgcgtcccagctga

SEQ ID NO: 256331 - DNA, 949 bp, Unknown
  Bacterial polypeptide expressing nucleotide sequence isolated from the Sargasso Sea
aatagttaactcaggggaaatttctgttcctgcaataactttctttgaaattgttaaaagattgccttctggatcagacgtaatactgagtatgggtgatgaagacacagagctaatattaaagtgtggaaggtctaaatttaatctttccacgttaaggactgaggactttccaatactttcagataaagatttatctactaattttgtaattagcgctgaggaactaagcaggatgatagataaaacaaagtttgcgatatctaatgaagaaacaagatactatttaaatggtattttttttcacaaagcagagagtaattctattaaatttttaagagccgtagctactgatggacatcgattggctcaatacgatattcctcttccccaaggcgctgaagaaattactggaataatcatccctaaaaaaacagtttttgaattaagaaaggtattagatgatgctgatggtgacgtaagcgtatctttaaacgaaaataaaattaagttctcatttaataatttgaaaataatatcaaaagtaatagatggcacttttcctgattatacaaaagttattcctcaaaataatgataaaaaatttaaaacaaataattctgaacttaaaaatgctattgatagagtatcagctgtagcaattaatgaggaaacaaaatcaaaggcaattaaattaacaattgaaaataataaactaaatctcagcgttgaaagtcaatctaagggatccgcaaaagaagagattgatattagttatagtaatgaaaaagttgatattggttttaattctaggtatctactggatatctgtaatgagattgatggtgatgaaatagatgtaaacttaatcgattcaatatcacctgctatcattttagataaaactgacgaaaatttattctttgttttaatgccaatgcgtatttga

SEQ ID NO: 256332 - DNA, 706 bp, Unknown
  Bacterial polypeptide expressing nucleotide sequence isolated from the Sargasso Sea
aatggattttagagtaagtcgagaggcttttttaagagtcttaactcacgttagttcaattgttgacagtagatctacaattccaattctttctaacatttatattaaatgtgataataaccaaatagaaattagatcgacagatatggatatttccatcagagaattcgtatcaactgattcttcaaaaaatggcgaagcaaccgtaaattcaagaattttaactgatataattcgcaagacaaaaaaaaactctattgtaaaatgtaaattagagggaaatagattaattataaattctgataactcagtctttgagttaaatgcattgacagcagatgaattcccaaaatttgttcctttagaacaaacaaactcattcgaactaacaatctcgcagattaaaagactttttaataaaactaaatttgctatatctgctgaagagacgagatactacttaaatggtatatacttccatactatcactaacggaccaaagtcaactttgaggtgtgttgctactgacggccatagacttgctaaaacagagctagatttaacaaatgtcataaatatatctggaattatactcccaagaaaatttatacttcaattagaccgcattttaggtgattttgagggtaaggttaaaataatatgcactgatactcaagtgagtctagaagcagataattcattataa

SEQ ID NO: 256333 - DNA, 1577 bp, Unknown
  Bacterial polypeptide expressing nucleotide sequence isolated from the Sargasso Sea
tatagcattccctgactataaagcacaaagagcagaaacacctgaagaactcaaacctcaattcgaacgagtaagacaaatgatggaaacgtttgctgtcccaactttttctttagatggatatgaagcagacgatctaatcggaactattagcgcccaagcggaagagcacggtctagaaactatcatactcacaggagaccgagatactttccaattaatatcaccatataccaaggtggatctgggatctaacgcaagggataggaaattgtacggtgaatccgagctaatagcacgctacaacggattaacagcagaacaacaacccgactttaaagcgcttttgggcgacaattctgacaatatacctggagttccaagagtaggagaaaaacgagccatcgccttactgaactcgtatgttaatctggaagggatatacggaaacctagaatctattcatccccctagtgtaaaaacttctctaactgagagtaaaaatatagcgtttaccaatcgtgagttaatgaccatagatcgccaagtaccgattacggtagatttcgaatccgccctattcggcggatatgatatggaacaagtaatcaccctacttaaagagttagagttcaatagtattattagccgtatacctggaacgaaacaggtaataaatagtgatatggctatcagcaagccagtagcaaataccgatactgtgtatacctgcgtagacaatcaagaaaaatttgactctatgatgttgtctcttcagaaagcccataaaatagcgttcgatacagaaacaagcgatttgaaccctatgctagcaagcatagtaggacttagcttttcaactaacgcaggttctgcgtggtacattcctttagggcattcagaaggcctgcaattgtccttagaatacgtaattggacaactcaaacctatattcgaaaatactgataaacaaatgtgcgctcataatgccaactacgacctaatgatcctatccaaatacggaatccacgtgacaaacctaacttttgacaccatggttggggcgcatctactcggcaactcttcattaggtcttaaaaatttaagccaaactcttctgggtatagagatgcaacctataactgaattgataggaacagggaaaaaacaaatatcgttcagtgatgtttccattgaagaggcctatccgtatgctgctgcagatgcggactgtaccttgcagttgtggaatcactttgagccagagatagatagttcgtttgcaaaaaatatcatgagcaatattgaaatgccattaataccagtcattattgaaatgcaaagaaacggaatcactctagaaaaagataaccttgaaagtatgtcagaagaattacaatcggacatggaaatcctacacgagagtatagtatctcacgtcggtcactccttaaacataaactctcccagtcaacttagccaagttctatttaatgaattagaccttccaaaaaccaagaaaactaaaaccgggtattcaacggacgcaaattcattagaatttctaaaaacagccc

SEQ ID NO: 256334 - DNA, 1087 bp, Unknown
  Bacterial polypeptide expressing nucleotide sequence isolated from the Sargasso Sea
atgatatttagaccagacgtaattttaattgatggatcatcatatatatatagagcatttcatgctcttccgcccttgagcacatcaaaaggaaaaccaacaggagcaacacgaggtgtagcatcaatgttgcgtaaacttatttcgacatatccaggcgtgccaatggttatggtttttgatgcaaaaggacctacttttagaagcgactattatcaggcatataaagcaaatagaccatctatgccaaatgagttaagagtgcagattgatgatattaaaaaactttcaaaactatttaatttttcagtgcaagaagttgcaggggttgaggctgatgatgttatagcaacacttgcagaaagattaggcaaaaaactaaaagtactgatatcttctccagataaagatcttacgcagctagtaaaaaagaatgttatacaacataactcagtatctaatgaattctttaatgaaaaatatgtagaagaaaagttcggagtgcttccaaataaaattgctgaattattggcattggttggagataaatctgacaacatccctggaatcactaaagttggcaataagacagcttctaaatggctcaaccaatatggcaatattgataatttgcttgctaaatcaaatgaagtgacgggagttgttggtgaaaacctaagaaatgagaaagatatcttacagagaaacctttttttagtctcacttaaaaaagatctggaattaaacttagaaatagattctttaaatatacctgaagctacaaatgatgagttaaaagatttttacaaagacctagaatttaattcatttatagaagataaagctgagaaaaaggtatccaagaactatatttctattaaaaatataaaacagttagaagaaattgagaaagagctagataattgtaaatatttttcttttgatacagaaacaacatctttaatagctcatgaagccgaattagttggtttttcttttgccctaaaatcaaatacaggtgcttatgtgccaattagacataatgaacaaacagacttagatgctgatgaaacaacaaaatggtaaa

SEQ ID NO: 256335 - DNA, 1138 bp, Unknown
  Bacterial polypeptide expressing nucleotide sequence isolated from the Sargasso Sea
gctgcaggccgttactcaacgaaggaactctatgcaactggtcaagaccgaacgagacaccctcctcaggccgctgcaaacggtcagcggcatcgtcgaacgccgccatacgttgccgatcctcgccaacctgctgatcaccaagaacggctcggacgtttcgttcctgtcgaccgacctggagctgcagatcaccacgcgcgccgatttcggcgtcggcggcgaccaggtcgcgaccaccgtcgcagcgcgcaagctgctcgacatcctgcgcgcgatgcctgacggccaggtcacgctgtcgctcgccgacaagcgcctcaccgttcaatccggcaagagccgtttcgcactgcagacgctggcggccgacgagttcccgaccgtcgcgcaggcgaaggatttcggcgccacgctcaccgtcccgcagaagtcgttccgccaattgctcggcatggtgcacttcgcgatggcgcagcaggacatccgctactacctgaacggcatgctgctcgtcgtcgacggcgaccagctgatggccgtggccaccgacggccaccgcctcgcgttctcgtcgatgaagctcgaaggcggcacgttcggccgccaggaagtcatcgtgccgcgcaagacgattctcgagctgcaacgcctgctcgaagacatcgacgacaccgtcaccatcgacatcgcgcaaacccaggccaagttcacgttcggccaggtcgagctcgtgtcgaaactcgtcgagggcaagttccccgacttccagcgcgtgatcccgaaggcgcacaagaacacgttcgagatcggccgtgaagagctgcagcgctcgctgcagcgcgcggccatcctgacctcggacaagttcaagggcgtgcgctgcatcatcgcgccgggccagctgaagatcatgtcgaccaacgccgatcaggaagaggcgcaggaagaactcgaaatcgcctaccagggcgataccgtcgacatcggcttcaacgtcacgtatctgctcgacgtgctcgcgaacctgaaggtcgacaccgtgcaggtgagcctcggcgacgccagctcgagcgcgctgatcaccgtgcccgagaacgacgagttcaagtatgtcgtgatgccgatgcgcatctga

SEQ ID NO: 256336 - DNA, 1966 bp, Unknown
  Bacterial polypeptide expressing nucleotide sequence isolated from the Sargasso Sea
ggggattcatctgataatgtcccaggtgttgcaggtgtgggtgtcaagacagcagtaaaactgttaaaaaaatatggtgatcttgacaaagtctttgaaaatgtagataaaatcacaaataagcgagttcataacgggttaattaattgtaaagatgatgcttatttaagtaaagaattggtaactataattaaagatgtggaattgaagcattcattagatgattttatgattaaatcatttgataataatgtgcttagaaaaaaatatgaagagttagagttctatgctttattaaaacaactagtaggtactaatgatgagctgcaaaatgacaaaatagataaaaaatatattactgtaaaaagtttaaaatctttaaagcaactaataaaagatttagagcagtgcgatattttatcgattgatctagagacaacatcagtagatcctatgacagctgaaattgttggtatcagtctttcacttcagccagatactggattctacataccaattctttatcctgaaaagaaaaacaataattttggtgatgatgatttaaatgttgctttagccttattgaaagagatgcttgaaaatagtaaggtaaaaaaagtaggtcaaaatataaaatatgattcactaatcttttcaaggtttggtataaacataaccggaatatattttgatacaatgattgcagcacatattttgaacccatctgcaagatcatataaactagatactcttagccttgagtatcttaattatagcatgatccctattgaggatttaattggtaaaggcaaagatcagattactatggatcatgtctcattagataaggtctcctattacgcttctgaggatgctgatatttctttacagcttgccaagttatttattccactgctagaagagaacaaccaaatggatttttttcaaaagatagaaatgcctcttattaatgttttaatgcaaatggaaaaagagggtgtatatgtagaacaaaatatattagatgaaatgtctagaaatattggagatagattagacaaattagtaaaagacatttataaaatgtctggttctgagtttaatatcaattccactcaacagttagctgttattctgttcgacgagttaaaattgaatcagataaaaaaaaggtctacagctgaaaatattttaaaagaattagccaatgatcatgaattaccagaattaattctagagtaccgtaaactaaataagctaaagaacacctatgtagattctctaccttcttccataaataaagaaacaaacagaatacactctacttttaatcaaacaattgcttcaacaggaagattatctagtacaggaccaaattttcagaacatcccaattcgtacagaagaagggcgcgaaattagaaagtctttcattgcacagaaaaataattggaaaattttatcagctgattattctcaaattgaattgagaattatggctcatttatctaaagatactgaattgcttgatgcatttaataataatatagatattcattctagaacggctagtttgatctataacttatcaatagataaaataattcctgagatgagaagaacggctaaggtagttaattttggaattatgtatggagctggagcattccgcataagtcaggaattgggaatatctagaagtattgctcaaaatataattgatgaatatttcaataaatactcaggaataaaattctatatagatcaaattttagataaagcaaggaaggataaatatgtagaaacaatattcggtcgccgcaggcctatttgggatgctgatagtgataatgctctaaaaagaaaagcttctgaaagaatcgcaattaatatgccaatccaaggttcagctgctgaattaatcaaaattgcaatgatagatatttataagaagctcgcaaaagaaa

SEQ ID NO: 256337 - DNA, 1102 bp, Unknown
  Bacterial polypeptide expressing nucleotide sequence isolated from the Sargasso Sea
aatgaaattcacggctgaaaaatcacaaattgttgattcattacaaaatgctgcagcggttgctgaacgcaggcaaacaatccctatattagcaaatctaaggcttaaggtaatttctggcaagcttgaggtagcagcaacggatttagaaatacaagtaaaggcttattgtgaattattaaacgttgaggaggagggtgaaacaacagtttcagctagaaaaatgtctgagctctgcaggtctttacctgattctgaaaatgttaattttgagctaaaggatggcaaattaactgttagttctaaaaactttcatggagattttgccacaatctcagccgatgattttcctgaattagaggtaaatgaagaccaaaccaacactacggtaatgtccagtgcgttaaaaaggattcttacaaaaacatctttttcaatggcctcccaagacgttcgctattatctaaatggacttcttttagagcattcctctggtgaattaaaaggggtggctaccgatggacatagactggctctttctgtttcagaaaccaaaggaggaggtccagaaatgaggaatatccttccaagaaaagctgctttagagcttgctaaacttctctctcctgatgaaacacccatagaaatgcttgttggtccaacatatataggcataaaaacagataatttaaattttgcttctaagctaatagatggtaagtatccagattatgaaaaagtatttccttctggagaaccactgccaatggtggttggaaaagaaactcttcagtctgctctttcacgagcttctgtgctgtctaatgaaaaatacagaggagttaggtttgaactatcaaaaggagcactaaaactaaccgcgaacaatccggaacaggaatcagcagaggaagttttggaggtagattacaatggatcagatctggaggtaggttttaatattggctatctaatcgacgtgcttagttctcttgaagaagaaagcgtaaagtttgaattttatggagaagattctagttgtgtaataaaagaacctagctctgagaatgaggtatacgttatcatgccaatgaggctttaa

SEQ ID NO: 256338 - DNA, 1231 bp, Unknown
  Bacterial polypeptide expressing nucleotide sequence isolated from the Sargasso Sea
aatgtcaaataaatcgaaagtattagctttaaaatatagaccacaagtttttaaagatttgattgggcagaaagttattactgaaacattaattaactcgttaaaaataaaaaaaatttctaatgcctatctttttacaggaatcagaggagttggtaaaacaacaattgctaggattttggcaaaatcgttaaattgtaaaaatggatttgaaaaaatttgtgaagaaaacttatgtgataattgtaaatcaataactgactcaaaccatctagacgtgcttgagatggatgctgctagcaaaacaggggtagatgatataagggatttgatcgaattttctagatacggcccttcaattgcaaagtttaaaatttttataatagatgaagttcatatgttaagtaagcaagcatttaatgccttacttaaaactttagaagagccacctgagtatctaaaatttatatttgcaacaacagaaataagaaaaattcctataacgataatctcaagatgtcagagatttgatttgtcaagaataaaggcagaagagttatttaattatctcaaaatagtttctaataaagaaaatggaaacataaccgatgaagcattaaagttaatagttaaaatgtctgaaggatcagtcagagacagcctgtctttattggatagagctatagctacaaaagcaaacgatagcgaaattaatttagaatacgctcaaaaaatttttggatattttgatcggtctaaattgattgagttaattaaacttatttttagcggaaaagaacaagaaactttaaagttttatagaaatatttacgaacaaggagtagaacccaaaacttttttaaatgattttctcgaaattctttattattttaaaaatatccaatttttaaatttggaaaactctaattttacattaaacaatgcagaatttaatgaaattaaaaatgtttcaaattctttagacaaaaaggatattcttttattttggcaatttacaattaaaactttaaaagaattagatatagtttcagatcagaacatatctatcgaaatgtttttgataagacttttgtatttagtcgataatagttccgtaaaagaaaaaaatgaaatgaaaggtgatattgaagtaaaaacacaaactaaaattttaggttcaattgaaaatacagaagaagatgctatcaaatttggaggtaaacaaaaatag

SEQ ID NO: 256339 - DNA, 1351 bp, Unknown
  Bacterial polypeptide expressing nucleotide sequence isolated from the Sargasso Sea
gcgactggtccgcgcatctttgcgaaaaccgaactgctgtcgttcctgctggagcgcgcaaccgtgaccggcctgcccgcggaccgcagcggcggatcggtcgcggcgttcacgcatctatatatgccgcgcatgcatcgtcagggttacgtcgcgccgaatctcggcgacgtagccggtgccgcgagccccggcggattcgtgatggattcgcggcccggcctctacgattccgtgctggtgctcgactacaagagcctctacccgtcgatcatccggacgtttctgatcgacccgctagggctcgtggaaggcatgctgaatcccgccgacgatcaatcggtgccgggttttctcggcgcacgcttctcgcgcacgcgccattgcctgccttcgatcgtcggccaggtgtggcaggcacgcgaagccgccaaacgcgcgcacaacgggccgctttcgcaggcgttgaaaatcatcatgaacgctttctacggcgtgctcggttccaccggatgccgtttcttcgacccgcgcctcgcgtcgtcgatcacgatgcgcggccacgaaatcatgcacgccacgcgcgagctgatcgaggcgcaaggctacgaagtcatttacggcgacaccgattcgactttcgtctggctgaagcacgcgcacagcgaagaagatgcgagccggatcggccgcgcgctggtcgagcatatcaatgcgcaatggcggcaggatctgcaggcacgcttcggactcgagagcgcgctggagctgcaattcgagcggcactacaagcgctttttcatgccgacgattcgcggcgccgaggaaggcagcaagaaacgctatgccgggctgactgttttgccggacggcagcgaaaacatcgtctacaaagggctcgaaacggtgcgcaccgactggacgccgcttgcccagcagttccagcaggaactctacgggcgaatcttcaggcaacagccgtatcgggactatgtacgcgactatgtgcgcgatacgctggcgggaaaactggacgatcagctcgtgtaccgcaagcgcttgcgccgctcgctcggcgagtacgaacgcaacgtgccgccgcatgtgcgcgcggcacgcgtggccgacgagttcaaccggcaacagggacgtccattgcaataccagaacggcggctggatcagctatgtgatgacaaccgccggaccggaaccgctcgagaccttgcgctcggcgatcgactacgaacactatctgacgcggcagttgcaaccggttgcggatgcgatcctgccgctgttgcgcgacgattttacgacgttgatgtcggggcaggaacagttgttctgac

SEQ ID NO: 256340 - DNA, 536 bp, Unknown
  Bacterial polypeptide expressing nucleotide sequence isolated from the Sargasso Sea
caaagcaaaagctataaatttgggcataatatatggcattagtccatatggattagctaaacaattatcaatatccaatacggaaggtaaaatatatattgaaaagtatttttcaagattccctaaaataaaagattacatgaatcatcaaattgaatttgctaaagttaactcctatgtcaaaacaatgtttaatagaaagtgtaacataaaaggaattaatgataaaaactttgctgttagaggttttgcagaaagacaatctattaatgctccaattcaaggaactgcagcagatataattaaacttgcaatgatagaaattcacaaaaaaattaaatcaaaagaaattaatgcaaaaatgcttttacaagttcatgatgagctagtatttgaaatagaagaacaaaatttgaaagatagtattttaaatataaaaaaaattatggaaactgcacatttgaaatataaagattttaatgttccattgattgtggaatgtggatatggacaaaattggggagaatctcattgag

SEQ ID NO: 256341 - DNA, 1202 bp, Unknown
  Bacterial polypeptide expressing nucleotide sequence isolated from the Sargasso Sea
gacgaagagagcggtaacgagaagaagggaccgtcctacgccggtggtttggtgctcgaaccgaagaagggcttgtacgacacccacgtcctcgtgctcgatttccagtctctgtacccgtccatcattcaagaatacaacatttgctacacgaccgtcaagcgacacttcaccgaagaggacgaaagctcgagcatcgagttaccgccgccgatctcgcacgacagagatttcgccgtcttaccggctgtcatcgcgagaatcgtgcagagtcgtagagaggtcaagggattgatggggagagaaaacgatcccggccgcaagaaacaatacgatctccgtcagttggcgctcaagctcaccgccaactctatgtacggttgcttgggcttcgcccagtctcgtttctttgccgaaccgatcgccgcgttgatcacgtcacagggtcgtaaaattcttcagcacacagtggacatcgcctcgggcaagtgcgacttggacgtcatctacggcgacaccgattccattatggtgaacacgaaatcgcacaatctcgtcgaatccaagtcgctcggagggaaactcattcgtttcgtcaacaaggagtatcgtaaattggtcttggaggaggattatgtcttcagatcgatgctcttgttgaagaagaagaagtacgcggcgatgaaggttgtcaacggcccgaataagacgagcacttacaagctcgagatgaagggtatcgacatcgttcgtcgcgattgggcgccgatcgtcaaggatttgggtaagcagacgctcgaggcacttttggacgtcgacggagacctcgaagagcgcgtcggtgagattcacgacggcttgcgaaggattcgaatggacatgattgaaaacgacgtgccgatgagcaaatacgtcattaccaagcagctcacgaaggcgatcgaagagtacccggacgccaagcatcaaccgcacgtcatggtggccaaacgtcgcgccgaggctgggaagcgggacggtaccaaggcgggagagacggtgccgtacatcatcgcgctgcagagcgacgcgacgttggaagaaatcgccgccggcaagggtggcggttccggtggtaagggtttggccgagcgcgcgtatcacccggaggagatcgtggagatgggattgaaggttgacttgcactactactgtctcagcag

SEQ ID NO: 256342 - DNA, 744 bp, Unknown
  Bacterial polypeptide expressing nucleotide sequence isolated from the Sargasso Sea
aatgaaattcattacagaaaagtcacaaatagttgactctcttcaaaacgctgcagcagtagctgaaaggcgccagacaatacctattttagcaaatttaaggctaaaaacagttaatggaaaattagaagtaactgcaactgatctagaaatacaaataaaaacgtattcagatttaattggaattcaagaggagggcgaaactacagtttctgccaggaagatgtctgaattatgcagatcattgccagagggagaaaatgttaacttttctttatcaaatggtaaattgaccgtaagctctagtaatttccatgccgattttgcaacaatttctcctgatgattttcctgaaatagaaattaatgaggagcaaacaccaattactgtcgagtccagtgttttaaagagactattatctaaaacatcattttctatggcttcacaggacgtaagatattatttaaatgggatgcttttagagatagaaggcaataagataaatggagttgcaaccgatggccacagattggccttttcttcagcaataactaacgcggcagatttagatgtgagaaatattctccctagaaaagcagttcttgaactttcaaaacttctttctccgaatgaggggactgtagagcttcttattggtgcttcttatgttgatgttcggtctgaaaaccttagtttttcgagtaaattaatagatggaaagtatccagactataataaagtttt

SEQ ID NO: 256343 - DNA, 1276 bp, Unknown
  Bacterial polypeptide expressing nucleotide sequence isolated from the Sargasso Sea
caagtgtcttaaaaaagaagcagtaattaaaaaattaaaaaaaatattagaagatcccagtattaaaaaaataggtcaaaatataaaatttgattttatcgtattatataagaatgggataaccctttcatcaatggaagatacaatgctgatgtcttatgtcttagatgctggaaaaaatagacataatatggatactttatcagaaattcatttgggacatagaactatttcttttaaagacatggtaggaacaggcaagaaagaagttaattttagcgaagtagaattagataaagcaaaagattacgctgctgaagatgccgatgttacttttagattatacaagaaatttatcaaaaatttaaaatcagaaagaatgataaatatctatgaaatttttgaaaagccattaattaaaattcttgcatttatggaaatagagggagttgaaattgatagtaagtttttgaaatctctttcgtctaaatttgaaaaaaaaatccaaaaacttgaaaaagaagtatttaaaatttctaaaaaaaaattcaatatcgcatccccaaagcaattaggtgaaataatttataatgatttgaaaatagctggtttaaagaaaactaaaaaaggaagttttgcaacaagtgcaagtgttttagaggatttagcttttaaaggtcatgagtttccaaaattaattttagactggagacaagtttcaaaattaaaaaatacttattcggatgctttacctgaacatttaaacccaaatacaaaaagagttcatacctcgtttttgctggctgctacaacgaccggaagactagcgtctagtgatcccaacttacaaaacataccaattaaatcagaagatggtaaagatataagaaaagctttcactgcaaaaaaaggacacctattaatttctgcagattataatcaaattgagatgagaattttagcagacctggcagatgtaaaagaactaaaaaaagctttcaaaaataaagaagatattcactctttaacagctagccaaatatttaatattgatattaaaaaagttaatcaagatcacagacgtaaggctaaggctattaattttggaattatttatggaatttcgcaatatggattagctaagcaaataaacgtttctaattatgaagcagaagaatttttgaattcatattttgctaaatttccagaaattaaagtttatatggataatacaattaaattttgtaggagaagtggatatgttaataatattttt

SEQ ID NO: 256344 - DNA, 1102 bp, Unknown
  Bacterial polypeptide expressing nucleotide sequence isolated from the Sargasso Sea
aatgaaattcatcacagaaaaagcacaaatagttgattctcttcaaaatgccgcagctgtagctgagagacgccaaacaatacctattttagcaaatttaaggctgaaaacagttaaaggaaaattagaagtaactgctactgatttagagatacaaataaaaacttattctgacttaattgaaattcatgaggagggcgaaactacagtctctgcaagaaaaatgtcagaattatgtaggtcattgccggaaggggaaaatgttaacttttctctatcaaatggaaaactgaccgtgagttctagtaattttcatgctgattttgcaacaatttcttcagatgattttcctgaaatagagatcaatgaagagcaaaccccaattactatcgagtccagtgttctaaaaagattattatctaaaacgtcattttctatggcttcacaagatgttagatattatttaaacggtatgcttttagagatagagggcaataagataaatggagttgcaactgatggccatagattggctttttcatcagcaacaactaatgatgcagatttagatttaagaaatattctaccaagaaaggcagttcttgaactttctaaacttctttcaccgaatgaggggactgtagaacttctagtaggcgcctcctatgtcgttatacgttctgaaaaccttagcttctcaagcaaattaatagatggaaaatatccagactacaataaagtttttccaacaggggagcctctgcctttagagattagcaaagaaatccttcaatccgcgctctctagagcatccgttttatcaaatgaaaagtacagaggtgtaagattccaattatctgaggataaacttaaacttacagctaacaacccagaacaagaatcagcagaagaagaagtagatgttatctataaaggttctgaactagaagttggattcaatataggatatctgttagatgttctaaattctatagacagtgaaactgtttcttttgagttctacggtgaagactctagttgcattatcaaggaacaaaattctgaagatgacgtgtatgtcattatgccaatgaggctgtaa

SEQ ID NO: 256345 - DNA, 2368 bp, Unknown
  Bacterial polypeptide expressing nucleotide sequence isolated from the Sargasso Sea
cctgacgcgccatgctattacacgcggttcaacgctcgtgttgcagtattatctcgccaccgtttcaggccctgtgctggtggagttacctggttctgagtacatttgtttttgccatcaaagcgatatggctgcattacagttacaaacgccggggctggcgctacgctttgtgccgcttatgcttaaaagttttaaaagacaatccgtggcggcgatttatgcccagtcgagcagtgtgtttcgtcacttgcagcggatagcgacagatgcgggtattcccttatttgagtcggatattcgtcccgagcagcgttttttaatcgaacgttttgtggcactcgatgtggcatttttagggtatcaagtaagcaatgtgagtttacaagaccgcttgcccgtatttagcgccatacgggccaaagcagttgcgccgcagccggaaataaaattgcgttcaatctcgcttgattttgaatgcagctttgacggattactctattctgtggccctttatggacgcgatgcgcaatctcagctctatgaaaaagttatcatggtgggtgagccgcagcctgatgctgcaatttacattgaatgggtgaacgacgaggcggcgcttatccatcgtctcatcgcttggtttactgagtttgatcccgatgtgatcattggttggtcggtggtgacctttgatttggccctgttatatcggcgtgctttactgcaccggatcccgctgcgtatcggtcgaggtggcgcgctccttgagtggaaggtggagaataaatttcggccagaaaccttaagtttgcctgggcgagtggtgctcgatggtatcgattggttaaaggcggccttttatcaattcgagcgcttctccttggagtttgtcgcccaagcgttgctgggcgaaggcaaagcgattcatgatgtagaaaatcgagcgcaagagattgatgcgctatttgccgaaaataaacaaggtcttgcacattataatctgaccgatagtcgcttagtgtgggatatttttgagcatactcagttgtgggattttgccctcgctcgcgccgagttaacgggattagaactagggcgggtaggcgcctcggtcgccgcattcaaccatttgtatctaccgcatttacatagaacgggtttcgtcgcgcccgcagagcctgcaagtcaagggattgaaagccctggcggttatgtaatggattcagtccctggtttttatcaacatattttagtgtttgactttaaaagtctttatccatcgataattcgtacttttttgatcgatccgaaagggctcattgaaggtctggataacgaggaacatattttgggcgagtctgaaatcgttcccggttttttaggggctcgttttagtcggcatcaaccgatcctgccaaaactcatccaaaatctctcagaacaacgcgaaaaagccaagcgggaggcaaatgcgcctttatcgcaagcaattaaaatcattatgaattcgctctatggggttttaggctctcaaggctgcgtgttccatgatgcgaaactggcaagctccatcaccatgcgcggtcatcagattatgaaacagactcgcgcttggatagaggaaatgggttatcaagttatttatggggacacggattccacctttgtttatttgggctctgatcctgatctcggtgatattaatgccttaggtaagcagattgccgcgcgaattaatcagcaatggcagagtaaaatcgtaaaggagtttcagctagaaagcttccttgagctacagtttgagcgccattacgaacagttttttatgccgaccttgaggggatcggaggagggtagtaagaagcgttatgttggtgcttggcgcaataggaatggagggctggaaatcacttttaaggggatggagcaggtgcgaagtgattggagccccttagcgcgtaaggttcaagctgaactttatgagcgaatgttcaatcagcgagatatcagcggttatctcgctggtgtcataagcgaactgcagacaggaaagcgggatgctgaattagtgtttagtaaacgaatgcgccgaaatcttgaagagtacaccgcaaaatcttccccccatgtcaaagtcgcacgtcagctatgtgagttaacaggaaaggtatcctatggcaagagaggagctcagattgattatgtcatcactgtaaatggtcctgaacctgtttcacatagatcgtctataattgattatcaatactacgttgataagcaaatttgtcccattgcagagcctattttttcaataatgaaattgaattacacagacattgtctctaaacagttgctattaatttaa

SEQ ID NO: 256346 - DNA, 2434 bp, Unknown
  Bacterial polypeptide expressing nucleotide sequence isolated from the Sargasso Sea
ttgaatccccccgagagtcttgcttatgacactgctgcgcctgtgagtgtacagggacgcgtcctcacgcgccatgctattacgcgcggtgcaacgcttgtgttgcagtattatctcgccaccgtttcaggccctgtgctggtggagttaccagactctgagtacatttgtttttgtcatcaaagtgatatggcggcattgcaattacaaacgccggggctggcactgcgcgttgtgccgcttacgcttaaaagctttaaaagacaaagcgtggcggcgatttatgccccatcgagtagtgtgtttcgtcacttgcagcggatagcgacggatgcggggatccacttatttgaggcggatatccgtcccgagcagcgctttttaatcgagcgctttgtggcgctcgatgtggcatttttagggcattttgtcggcaaagtaggcatagatggacagttgcctgtttttagcgccatccgcgccaaagcggttgcgccgcagcctgcaattaaactgcgctctatctccctcgattttgaatgcagttttgacggtttactctattccgtggccctttatggacgcgatgcgcaatctcagccctatgaaaaagtcattatggtgggcgaggcgcagccagatgctgcaatctatatcgaatgggtgaacgatgaagcggcgcttatccatcgtctcatcgcttggtttactgagtttgatcccgatgtgattattggttggtcggtggtgacctttgacttagccctgctatatcggcgtgcgttgctgcaccggatcccgctgcgcattggtcgaggtggcgcgctccttgagtggaaggttgagaataaatttcggccagaaaccttaagtttaccggggcgagtggtgctcgatggtatcgattggttaaaggcagccttttatcaattcgagcgtttctctttggaatttgtcgctcaagctttactgggagaaggcaaagcgattcatgatgtggaaaatcgatcccaagagattgatgcgttatttaccgaaaataaacaagggcttgctcactataatctgaccgatagtcgcttagtgtgggatatctttgaacatacgcaattgtgggattttgccctcgctcgcgccgagttaacggggttagaactagggcgcgtaggcgcctcggtcgccgcatttaaccacttgtatctaccgcatttacatagagcgggtttcgtcgcgcccgctgagcctgccagtcaagggattgaaagccctggcggttatgtgatggattctgtccccggtttttatcagcatattttagtgtttgactttaaaagcctttatccatctattatccgaacttttttgattgatcctaaggggttgattgaaggtttagataatgaggacggatctgcattagatgagcctgaaactgttccgggttttttgggcgcgcgttttaatcggcatcaaccgattctgcccaaactcatccaaaatctctcagagcaacgtgagaaagctaagcgggaggcgaatgcgcctttatcgcaagcgatcaaaatcattatgaattcgctctatggggttttaggctcccaaggctgtgtgttccatgatgcgaaacttgcaagctccatcaccatgcgcggtcatcaaattatgaaacaaacccgcgcgtggattgaggagatgggctaccaagtcatttatggagatactgactccaccttcgtctatttaggcccagaacccgatctcagtgatattaatgccttaggtaagcagattgccgcgcgaatgaatcagcaatggcaaagtaaaattgcgcaggagtttcagctagaaagttttctcgagttgcaatttgagcgccactacgaacagttttttatgccgaccctgcggggttcggaggaggggagtaagaagcgctatgttggtgcttggcgtaaccatagcggagcgttagaaatcacttttaagggaatggagcaggttcgtagcgattggagccccttagcccgcaaggtgcaggctgaactctatgagcgcatgtttaaccaacgggatattagtggttatttggctgatgttatcggcgaacttcaagcgggcaagcgcgatgatgagttagtgtttagtaagcgtatacgccgtaatttagacgaatacacggcgaagtcttctccccatgtgaaagtcgcgcgccagctttgtgagttaacaggaaaggcatcctttggcaagcgaggggcgcagattgattatgtgattactgtaaacggtcctgaacccgtttcgcatagatcgtctacaattgattatcagtactacattgataagcaaattggccctattgcagagcctgttttttcaataatgaaactaaattacaccagcattacgtcgaatcagttgttgttaatttagt

SEQ ID NO: 256347 - DNA, 1900 bp, Unknown
  Bacterial polypeptide expressing nucleotide sequence isolated from the Sargasso Sea
atgagttatcaggtactggcaagaaaatggcgaccgcaacattttggtcaattggtcggccaggagcatgtgaaaacggcgttgaccaatgcgctgaatcacaacagattgcaccatgcctatttgtttaccggtactcgtggtgtcggtaaaaccaccatagcccgtatttttgccaaaagtttaaactgcgaaacaggtgttacttccacgccttgtggcgtctgcagcgcctgcgttgaaattgatcagggcttttttgttgatctgttggaaattgacgctgcgtcccgcactaaagtagaagacacccgggatttactggataacgtgcagtacgcgccaagccgcggccgttataaagtctatttaatcgacgaagtgcatatgctgtcgcgtcacagctttaatgcactgttgaaaacgctggaagagccaccgccacatgtgaagtttttgctggcgacgactgatccacaaaaactaccagtcaccgtattgtctcgttgtttgcaatttagcttaaaggccttgagcccggagcagattaaacagcacttatcttatgtattggcgcaggaaggtattccggcagcggaagatgctttagccttgttagctcgtgctgccaaaggcagtctacgcgattcgttaagcctgactgaccaagccatagcccagagtaatgccaatatcacagtgccgctggtgcgcgatatgttggggtatctggagcagcagtgggcagagcttctgttagctgcggtgattaaccgggatctagctgcgctgaaacagcatcttgaccaattagtgcagcagcacagtcattttgctcatgtgctggatgatatgttggccttattgcatttagcggccttaagtcagtttaactggcaggccgctgatttggtgacagaacacagtgcttttgtgcagcaattagcagagcagcaaagccctgagcaattgcagctattttatcagttactgatttcaggcaaaaaagaattggcctttgcacctgagccacgtataggcctggaaatggcgttattacgagctgtggcttttgtgccaggtgccgctgatacaacaccagccatgcgcgcttccgctcctgtgtcgcatgcggctgaactcaaagctaagtttaatttacccgaaactacagctaaagagccagaacctgagctgcatatggcagcatcattgccatcagagcctgaagttgtagtcgaaacactcccagaacagctcgttcctgcagaagttgcagttacacagccatcggctcccgctggtatagccgcctctattctggcgcgccgtggcattaaagttgatgctgttagcgccgatagggcagtggagaatcagaccgaaaaaaagtctgaaccagttgccgctgtagctaaggctgcagagcctgctgctatacaaagaacacaagctgctccagctgcagttcatcagcccttgctacaacagcagcctgtattacagcagcaagccccgatgaatcagccgtctcagacagcgacagctggtattcagcacagtccggttatgactgctgtggtgtctgaacagcaagaaccggtaatgtccgcttatctggatgaacctgatacgtcagatacctcaacagaggatgccgattttgcagccgactgggcctggcaggaatttcagcagcaacatcagcccgagcctgtgccagaacaacagtcagttactgcagcaccagaatctaaagctcagtaccgttttgatggcgtgatcacagcagaaaacttttcagtgcgtcttgccgctcaggtcgatgagtgggccgctttagtcgatagcctgaacttaggcggtttattgcgcttatatctgttgcatagtgctatag

SEQ ID NO: 256348 - DNA, 325 bp, Unknown
  Bacterial polypeptide expressing nucleotide sequence isolated from the Sargasso Sea
aaaaggaataaatgataaaaactttgctgtaagaggttttgcagaaagacagtctataaatgcccctatacaggggacagctgcagatattattaagctatcgatgatagaaatttataattgtatagttcaaaaaaatattgatgcacatatgctattacaagtccatgacgaattagtttttgaaataaaagaaaatacaattgaggagtctataaaacttattaaatatattatggaaaatacacatttaaaatataaagattttaaggtccccttgacagttgattatgggataggaaatacttggggtgagtcacattaa

SEQ ID NO: 256349 - DNA, 625 bp, Unknown
  Bacterial polypeptide expressing nucleotide sequence isolated from the Sargasso Sea
aatgaaagttattgttgaacgtagtgatttattgaaagctatgaaccgggcacagtccatagttgaaagacgtaacactatacctatactctctaatgttctaatagaggctttggatactgaaattagtcttaggacgacagatctcgaaatcgaaattgttgagaaagtaccggcaaaaattgaaatagagggaagtattaccgttggagcccatgttttgtatgatatcataaggaagattccagaaggcgctccaattaattttagttcagatcagatagcttcccggttagaagtaaaagctggtaggtcaaggttttcgcttgcgactttaccgagagatgactttccaataatggcaacatctaaataccaaagtaacttttcaatacctacggtagttttacaaaaattgtttgaaaaaactaaatttgctatgtcaacagaagagactagatattacttaaacggcgttttttttcatgtggcgaaaaattcagactccctcagtttgaggacggtggctacagatggtcaccggctagcccaaatagatgaaactctcccagataactgtgaagaaatgccaggggtcatcgtttcacgaaaaactgttggcgag

SEQ ID NO: 256350 - DNA, 745 bp, Unknown
  Bacterial polypeptide expressing nucleotide sequence isolated from the Sargasso Sea
gatattagaaaagcttttactgctaaaaaagatcacttattaatatctgctgattataatcaaattgaaatgagaattttagcagatcttgctgaagttaaagaactcaaaaaagcttttaaaaataatgaggatattcattctttaaccgcaagtcagatttttaatatagatataaaaaaagttgatcaagatcaacgaagaaaagcgaaagcaataaattttgggatcatttatggcatctcacaatacggcttagcaaaacagataaatgtttctaattatgaagcagaagaatttttagacgcatattttgcaaaattccctgagattaaagtttatatggataatacaattaaattttgtagaaaaagtggatatgtaaataatatttttggaagaagatctcattttaaaaacataaatgataaaaattttaatgtaagaaacttccaagaacgagcagcaattaatgcaccaattcaaggatccgcatcagaaattatgagattagcaatgattagattagaaaaaaaattaatagatgaaaaaagttcaaaatcaaaaatgttattacaaattcacgatgaattaatatttgaagttccaaaaggagataaaaaaacaatgatcaagattatcaaagaagaaatgatgagtgtagctaaaagtgattatcattctttctctactccattaacagtagatgttaatgttggtgataattggggaatgcttcattaat

SEQ ID NO: 256351 - DNA, 303 bp, Unknown
  Bacterial polypeptide expressing nucleotide sequence isolated from the Sargasso Sea
ccgcaagaagagctggcatggaagcacagtcactaagagctgcagccaatgccccaattcagggttcaagtgcagatattattaaaattgcaatggttcaactaaataaaaaattcatagaaatgaatgttccagcaaaaatgcttttacaagtacatgatgaattattgtttgaagttgaaccagattctttggaaattacgacgaaattagtaaagaagactatggaagattgtgtaaaattaaatgtgcctcttttagttgatattggaattggagacaattggatggagacaaaataaa

SEQ ID NO: 256352 - DNA, 997 bp, Unknown
  Bacterial polypeptide expressing nucleotide sequence isolated from the Sargasso Sea
atgaagatatcagttgagagagatattcttcttaagagtcttaatcatattcaaagtgttgtagaaagaagaaatacaattccaattctttcaaatgtaaaaattatagccaataatgagggaatttcttttacggctactgatctagatcttgaaattatagaaaaactcgataaagcaaatactattgaagaaggtcaaattacaacatctgctcatacgctttatgatattgtaagaaaactacctgaaggttcatcattagatattgcaacaaaagataatgaaaaattagagctatcatgtggacaatcaaattttgagttatcgacattacctattgaagatttcccagaaatgtcttcaggtgaaatgccatgtaattttattatagattcagaagagcttgctaatatgatcgataaatcaaaatttgccatttccactgaggaaactagatattatctaaatggtatttttttccatgcaatcaataattcccttagaagtgttgctacggatggacacaggttagcctgtattcagtcagatttacccgccggggctgatgatattccaagtattattatcccaagaaagactattggtgaggtgagaaaattaattgaagatattgaaggaaatattaatttatttatatccgaaaccaaaatcagatttgaagtaacaaatatttctcttacttcaaaattgattgatggaacctttcccgattatgagagagttattccaaagacaaatacaaaaattatgacagttcaaacaaatgattttgcttcctcaattgatcgcgttgcaacaatttcttcggacaaatctaaagctgtaaagttcgtgattaaagataattcattaacattaactgttattaatcctgacgcaggaacagcagtagagaaagttgatgttacttatgaggcagacgatttagaagttggtttttatgcaaggtatttgcttgatatagcttcacaaa

SEQ ID NO: 256353 - DNA, 1084 bp, Unknown
  Bacterial polypeptide expressing nucleotide sequence isolated from the Sargasso Sea
tgcaggaaaatttggctgtgttcctgagcaggtggtagagatgctggggctgatgggagattcttcagataatattcctggagtaagaggagttggtgaaaaaaccgcaatcaagctgatatcagaatttggaagcatagaaagtgtttatgaaaatcttgaaagaatcagcggcaaaagcctgaaggaaaaactggaaactgatcacgaaaatgccttcctttcaagggaactggccactatagactgtcatgtgcctctgtctgtcaacttggaggatgttcatcttggagaaacagatttatacaataatgatgaattatatgccttactcgaagagcttgagttcagaacactgatgaatcgccttataaaaaaaaggagcactgtttcagcgggtcaaaagtcaggacctgcggatgctgaacaaagggaatcctcccaagatgacaatcaggaactgttttcttcagaagaaactgatcatggctatcttgaagtagaatgctcgctaattgaaactgcagaaaaattacgaactctaatcagtgaattccccaataaaagtaggctggctcttgtcctagatattaaaggtgagcatcagctggatttgtggctgaagggaatgtcgatttgtgctgatggtgaaaaagcagtttatattgacttagatcacactgaagcagaaaggataaaaattatcgggcagctgaaaacagtcctggagtctgctgagcatccgaaaatattctatgaccttaaaaaagccctgcagattttttcaaaattaggaatacagattgagggagttgaatcagatattttactggctgcccacatgacagatccactgggaagacgttacgaccttgattatctgttgggacgcaagctgaatatgaaaaggaaatccagggaatctgtcgatgcatcaaatcagagccagatgaatatgtttgaagaacctgaagaagaagattacattaggcattgtgaaaacgtggccatcgtttttcagcttcatggactgcttaaagcacagctcaagcaaaccggaataaaggagcataccgcaacatag

SEQ ID NO: 256354 - DNA, 376 bp, Unknown
  Bacterial polypeptide expressing nucleotide sequence isolated from the Sargasso Sea
gagggaatttaaatttgataaaaatggacttggaagattaatagggaaagatccttatgaaattgacctgcaatctgcaagaagggctggcatggaagcacagtcattaagagccgcagctaatgccccaattcagggttcaagtgctgacattattaaaattgcaatggttcaactaaataagaaattcatagaaatgaatgttcccgcaaaaatgcttttgcaagtacatgatgaattattgtttgaagttgaaccagattctttggaaattacgacgaaattagtaaagaagactatggaagattgtgtaaaattaaatgtgcctcttttagttgatattggaattggagacaattggatggagacaaaataa

SEQ ID NO: 256355 - DNA, 1487 bp, Unknown
  Bacterial polypeptide expressing nucleotide sequence isolated from the Sargasso Sea
agaagagggatatagttgtgttatttcttcattagataaagatttaatgcagttagtcgaggatccaagtgtttcaatgataaacacaatgaccaataaaaaatttaatgaaaaagatgtaattgaaaagtttggagttaagcctaatcaaattagagatatgctagcgcttgttggagattcatctgacaatattccaggtgttccaaaagtgggacagaagacagccgctaaatggttaaatgagtttggagatttagagtcaattaaagaaaacgcctcatcaatcaaaggagttgttggtgagaatctgagaaattcattagatgatttagatagaaatattaaccttgtatccctaaaacaagatgtagatattcaggttaagtttagcgatctgttaacactaaatcctgatgatgatgagcttaataagattttttcggagttagaattcgcaacagcaaaaaataatgacgaaaaaaataagaagcaaaagaaagattcaaaatatgaaacagttttatctgaaaaaagtttagagaagtgggcaaaaaagatagataaatctaaagcatttgcaatcgataccgagacggattcagttagcactgtttcagcaaatcttataggcatttcaatttctgtaaaagaaaatgaagggtgttacattcctataggacactcatatgagaattgtcctgagcagctttccctagaatgtattcaaaaaaaactgggacctgctatagaaaaaaatcaaaaaaaagctgtcggccagaatttaaagtttgatattccaattttatctcgacatggcataaatctctctgagtttttagcagatacaatgctcatgtcatatgtgcttaatagcaccgccactcgccatgggatggataggctagcagagtattatctcaactacacaactacaaaatatactgatgtaacagggactgcctctaagcaaattagttttgcagaggtgcaaattgatgttgcaacagattatgcagctgaggatgctgacataacgttaagacttttcaatactttatctgctttattaaaagagaaaccaattcaagagaaattattaaaagaaattgaatatcctcttgtgcatgtgctttcaagagtcgagcaaaatggagcaaaaatagataaaaataaactcgggaatcactctaaagaacttggagaaaaaattgcagatctctctgcccaagctttcaaaatagctggagaggaatttaatcttgattccccaaaacaactcctagaaattttatatgaaaagcagggattaccagtattgagaaaaacacctaaaggacaaccatctaccaatgaagagacacttcaaaggctatcagaagaatatgaactaccaaagataatcctgaaatataggacattagcaaagctaaagtctacttatactgatagcttaataaacattgagaatcctaagacacaaagga

SEQ ID NO: 256356 - DNA, 652 bp, Unknown
  Bacterial polypeptide expressing nucleotide sequence isolated from the Sargasso Sea
gatgttaaagaacttaaaaaagctttcaaaaataatgaggatattcactctttaacagcgagccaaatatttaatattgatattaaaaaagtaaatcaagaccatagaaggaaagccaaagcaataaactttggaataatttatggtatttctcagtatggtttagctaaacaaataaatgtttctaattatgaagctgaagaatttcttgaatcttattttgctaaatttcctgaaattaaagtttatatggatagcacaattaagttttgccggaaaagtggctatgtaaataatatatttggaagaagatctcattttaatggaataaatgataaaaattttaacgttagaaattttcaagagagagcagcaattaatgctccaattcaagggtcagcatctgaagttatgaggttagcaatgatcagattgcacaaaaaattaaatgaagaaaaaaatttgaaatcaaaaatacttcttcaaatacacgacgagcttatttttgaagtcccaaaaaaagaggaaaagacaatggtcaagttaatacagaatgagatgaccagtgttactcaaagtgattatcattccttttctactcctttaacagttgatgtaaatgttggtgataattggggaatgcttcactaat

SEQ ID NO: 256357 - DNA, 1141 bp, Unknown
  Bacterial polypeptide expressing nucleotide sequence isolated from the Sargasso Sea
atgaaagataaaaaactgtttcttattgatgcttatgctctaatctacagagcatattatgcttttataaaaaatccaataatcaattctaaaggttttgatacgagcgcaattatggggttttttaactccatctttgatattcttaaaagagaaaagcctgattattttgctgtagcttttgacgttggaggatcggttgatagatatgaaatatatggacaatataaagctaatagagactctacaccagaaccaatattggattcagttccaataattcatgaaatacttgatgcattaggaattaaaactttacaattaagtggatatgaagctgatgatatcataggtacagttgcaaaacaggccgaaaaagagggtttaaaaacttacatggtaacacctgataaagattttgctcaactggtttcagaaaatatttttttatataagcctgcaagatttggtggtggtattgaaatatggggaatagatgaagttaaaaataagttcgaaattaatcatccattacaggtgattgattttttaggaatgatgggagattcagtagataatatacctggacttccgggtgttggagaaaaaactgcaaaaaaatttcttaaggagtatggatcaatggaggagctttataaaaatcttgaagatataaaaggtaaattaaaagagaaaatttcagaaaataaagagttaggcatgttatctaaaaagcttgctacaattattactgatgttcctattgattataaaatagaggaactaaaaattggtgaatcaaataataaaaaaatattatcaattttcgatgatttagaattcaaaagacttaaagagaattatttcaaaatttttaatcaaaaagaaaatgaaccggcgtataataatgaattgaattttgaaatagataataaagatgaaaaaaattatttatcccaaaaactagaatctgaaaaaggaataaggattttgattgataaagtattatcatcaaaatctgtttctatagattatttaatcagtgaaagtaattcatatttttccttttgcttgagtagcacaatttcttattatataaattttaatataaaagatatatcatatacaattaatctatttc

SEQ ID NO: 256358 - DNA, 1174 bp, Unknown
  Bacterial polypeptide expressing nucleotide sequence isolated from the Sargasso Sea
attgaatgatccaaataatttatttcttattgatgggtcgggatatatttttagagctttttatggcctaccttcaatgagcaacaatgacggtgttccagtaaatgcagtatttggttatactaaaatgcttctaaagcttattgatgattttaaaccaatttatgtagcagttatatttgacgttgctagaaaaacttttagaaatgatttgtataatttgtataaagcaaatagatctgatcctcctgatgaattaattcctcaattttcaattatacgagatgctactaatgcgattggattacacgttgttgaaatggaagggtatgaagctgatgacttaattgctacatattcagacatagcatcaaaaatgaataaaaatgttataattgtatctagtgataaagatttgatgcagctagttgatcaaaatacaacattattcgatcctatgaaacaattctggataaatgatgataaagtttttgaaaaatttggagtttatccaaataaagtaattgatgttcaatctcttgcgggtgatactagtgataacatacctggtgtgccaggaattggtattaaaacagcagcagaattgattaacgaatatggagacctcgatcaattattaaatagagcctctgagataaaacaaaataaaaggagagaaaatttattagagtttgcagatcaagcaatattgtctagatcattagtaacacttaaaaaagatgttcctattaaatctcagatagaagaatttaaaataagttctgaattagagttaagtaaattaataccttttttaaagacacatggttttaaaagcatactaaataaatatgaaaatagtagagaactacaaactaatatctctaaatctgagataaaaattaatcctgttaacaacataaacgaatataactctatttccagaaaatacgaattaattgaaaataaagatcaattaatgaaatttttagagaattattttagtaaatcagtaattgcatttgattgtgaaactaattctttaaatgcaaaaactgcagatttagtagggatttcactttcatgtgaagaaggttcagcctgttatataccattaagacatggagaaaaattaaatgataatcaatcagactttaattttgataatgtaaaa

SEQ ID NO: 256359 - DNA, 961 bp, Unknown
  Bacterial polypeptide expressing nucleotide sequence isolated from the Sargasso Sea
agacttagagatacagatcaaatcttattctgatttagtggaggttcaagaagagggtgagaccactgtttctgcaagaaagatgtctgaactttgtagatctttaccagaaggagagaacgttatattctctctctctaacggcaagcttactgtaagctcaagtaatttccacgctgattttgcaacaatttcttcagacgacttccctgaaatagagataaatgaagaactttcacctcttgtcgttaaatcagctttattgaagagaatactatcaaagacatccttttctatggcctctcaggatgtcaggtactatttgaatggaatgcttttagaaattcaaggcgataaactaaatggagttgctacagatggtcatagattagccttttcttctgcaaattcaggaaactcagaacttgatgtaagaaatattttgccaagaaaagccgttttggaactcgcaaagcttttgtccccaggcgaaaatgaagtaaatcttttaataggtccttcttacgttgaagttaaaacagataatttaagcttttctagcaagttaattgacggaaaatatcccgattacgataaagtttttcctacaggaaaccctctgccgttagagatagataaagaaactcttcaagcagcactgtccagagcctctgtcttatctaatgaaaaatatcggggtgtaaggtttcaactatctgcaaataaattgaagttaacggcaaataatcctgagcaagagtctgcagaagaagaattgaatgttgattacagcggcacagaccttgaagttggtttcaatattggttacttattagacgtcttaaattccattgaaggaaattctgtaaattttgaattttatggtgaagactcaagttgcattatcaaagagaagggttcagaagacgacgtatatgtaattatgcccatgaggctataa

SEQ ID NO: 256360 - DNA, 454 bp, Unknown
  Bacterial polypeptide expressing nucleotide sequence isolated from the Sargasso Sea
ttgttaggatcaaaccatattcgtgtcaagtttgatgatgtctgcttcacatcaaaactgattgatggaaacttcccagagtatcagcgtgttatcccggcaaacccagaaaataaactaaaagttagcaccgaaaagcttaaaggggcactatccagagcagcaatactatcaaacgagaaatatagaggcattaggctgatagttaagaagaatgacctggttatccaggcgcacaatcccgagcaagagcaagctgaagaacaaatggatgtggattatgacggggcagagattgagatagggtttaatgttaattatttaatcgatgctttgaatgctattgattctgaggatgttcatgtgcttcttatggataacaactcaagctgtttgattcaagacacaaataatagctcatacaagttcgttgtaatgcctatgcgcctgtaga

SEQ ID NO: 256361 - DNA, 3455 bp, Unknown
  Bacterial polypeptide expressing nucleotide sequence isolated from the Sargasso Sea
tacagcatcacaaactggttctatggtatttactacgtatgaaggtggagctgcgaagcaggtgatggacttgagtgcaactaatgccaatacggtaacaataggtacaggatctaattctgccaatctaaaagtatttggaacgttaacagctgcttcaacggcatacgaaaatgatttacttccagcagttgatggtggtggagttaatgaagctggcttaggtgcttctgattatagatggaaagatttatatctttatgatgcaggtgttgcaagctttggtggtgctagtatacctgtagtgacacttacacatgatgatggcgagagtgattcaaacccaggtttaattttggatacggatagtagactgtactttgatgatgtaaatcaacatattggtagaaagaatggtgaagctggtgtattagaaattgtttctgcaactgaagttgaaattaatgcaggtccattgctggatcttgatgcaaattcagtgactgttgatgcaaattctgtagctattaatgcagcccagagtgatggagtagcaatcactgctgcgttaggtaacattgaacttaatacaccatcaaataaagctgtagtactgaaatctaaccaagcagtaacagtttctcacgtgtctgatggaggtgcacaggattttacaattgcgcaaactggcgcagttgatgcatctttatttattaattctgcaggtactgctgcagatgcaattgcattaactgcttctgctggtggtattgatatactcgcctctggagcagctgcaggtgaagacattgatataacagctactggatcatcagtaaacttatcatcaaatgaagcggttgcggatgcaattgcattaactgcttctgctggtggacttgatattgatggtgtgaattcaacaattgcaatcaccaatacgacggacggagatgaagacgatataactatttctactgtaaatgcgaataattcttccattatattaagttctgcaggtaatggtacagatgcaattgcattaactgctgccgcaggtgatatcgatattgatgcggcaaatgtaacaatggatgcaacggctggtgtatccatccaaggtgctactgcatcagatcttaccgttgctggatctggtgaaacgttaacgcttgaagcttcaggtggaggaacaaatcaagtaattatttcatctgcaggtactggaacagacgccttagatattaatgcaccaaatggcggtatagatatagatgctgctgtgggtagtgcagttgcattgaatgctggaagttttaatattacttccaatacttcaaataccggtacagttaaggttataggtgctgatgcagaatctgcgaaattatttctttctgcagatgaagatgatagtaatgcagataaatggttaattgctgctgcagatgatggtgcggtaactatttccaatactgctgatggatcaaatttttctcctaagttaacaatagctagtgatggtacagtgactgcaggtagtttttctggaaatatgaattcaaatgatttgcaaacggatcaagttatgacaatagcatcaagtaatgttgcgggagttgctgttgatatagatgcttctgcaggtggtgcggcaattgatgcagtaaaagcatcaaactttactgttactggatctggcgaaagcttaactctgtcagctgctggaggtggagctcaacaggttgtagtgaattcagcaggtacagcagaaaatgcgattcagttaaatgcttctgcagggggtgtcgatattgatgctttagcagccaaagatgtaaatgtagcaggtggtcaagttgctcttgtttcaaaagatgatgcagcatctgcaatttctttgacaactaatgtaggtactagtgaaacaatcgtagttacaaatacacagggtaatactgaaaatgcattaacattagaagcaactgcaggtggagttaatgtagatgcagcagctggtaaagatgttgatctatcaggtggtcaagttgctatttcttcaaaggataacgcagctaatgcgatcactcttacagccaatcagggtgcttctgaaacaatcgtagttacaaatacgcaaggtacaggtgaaggagcaataacacttacttcaaccgcaggtggagttgatgtagacgctgctgcaacgaaagatgtaagtgtagcaggtggtcaagttgctcttgtttcgaaagatgatgcagcttctgcaatttctttgacaactaatataggtactagtgaaacaatcgtagttacaaatacgcaaggtactggttctggtgcactaacatttacagctacagctggaggggttgatatagatggagcggatgtagtaaatataggttcaagcaaggacgatccagctgcaatcgtaattgatgcaagcgcaggtggtgttgatatacttgcaagcggcgcagctgcaggtgaagatattgatatatcagctacgggatcatcggtaaacttatcttcaaacgaggcggttgcggatgcaatcacattaaatgcatctgcagggggtatagatataacttcagcaggtgtgatggatattacgacttctgcaggtaattcaaatataaccatagatccgaatggttctggaaccctggccttaggttccgctgataatacagcagtaactgttgatgcgattgcattgactttaactgcagcagctacaggaagcattacaattgatgcagataatggtaatgaggctactgaagatgtaataattcgtggaaataattttagtgtgactgatgctggtgtaatgaatgttgctggtgcacttacagctgcatcattcagtggagatatgacatctaatgctctaactactgattctcaaaacttgacggtttcaactaccacaagtggaaatataatcctcgatgctgttgatgatatagatattgatgctgatggggatcaaattaacatgaaatttggaggagaaacggggcatctaagtttttccaatggaaatactggcgatataaagatcaagcaggaaaccgatggtaaaaatattattttccttgatcaagctgatgttacaacatttacaattgaagatgctgctacaggtattgttgttccaggagaagttaaaacaacgaaactatcatatacagatggaactgatgctattaccgttgctgcagatggtgcgcttacagttgctttaagagctactgctgatgctggaattgatgtggataacttagtattagataataattcactaacttcatcatctggtgcacttacattgactagtgcagcagcagccacttggtctactggtgctggtgcattaactatagatggtgcaggtggtattaacattggaacaactgccgatcaagcagtggattttg

SEQ ID NO: 256362 - DNA, 513 bp, Unknown
  Bacterial polypeptide expressing nucleotide sequence isolated from the Sargasso Sea
ccggcgtgagccagagcgacgccaaagagttcctggccaaatacaaacagcgctatccaaaggtttttgccttcctggaattgcaggaacgcctggccctcagccgcggctacgtggaaacgatcctcggacggcgccgtccgttccacttcgaccgcaatggtctgggacggctgctgggcaaggatcccctggagatcgatctggatgtggcccgccggggcggcatggaagcccagcaactgcgggccgcagcgaatgctccgattcagggatccagtgccgacatcatcaaagtggccatggttcagctgcaggctgcattgaagagtcaagggctcccagctcgactgttgctgcaggtccatgacgaactggtgctggaagtggaacccagcgccctggatgccgcccgggatctcgtggttcagaccatggaaaatgcggtccagctcagtgtgccgctggtggcggaaaccggcgtcggcgccgactggatggaagcgaaatagt

SEQ ID NO: 256363 - DNA, 793 bp, Unknown
  Bacterial polypeptide expressing nucleotide sequence isolated from the Sargasso Sea
caattttgaattatccactttgcccgtagaagatttccctgaaatgtcttcaggcgaaatgccttgtaattttattatagattctgaagagcttgccaatatgattgataaatctaaattcgctatctctactgaagaaactcgatactatcttaatggtattttttttcatgcaataaataattctttgagaagtgttgctactgatggacatagattagcgtgtatacaatcaaatttaccagaaggtgcagatgatattccgagtatcatcataccaaagaagactattggcgaagttagaaaattaattgaagatattgaagggaatattaatttatttatttctgaaaccaaaataagatttgaagtaacaaatatctctctaacatcaaaattaattgatggaacttttcctgattatgagagagttattcctaaaacaaatacaaaaattatgactgtaaagacacatgattttgcttcttcaattgatcgcgtagcaacaatttcgtctgataaatctaaagcagtaaaatttgcgatcaataataattctttaacattaactgttattaatccagatgctggtacagctgttgaaaaagttgatgttagttatgaggcagatgatttagaggtaggttttaatgcaagatatttactcgatatagcttctcaaatatctggagatacgatgacctttattctagaggacccaggagcgccagccttaattaatgactctgctcatgaagatgcaacatatgttttaatgcctatgagggtatga

SEQ ID NO: 256364 - DNA, 1060 bp, Unknown
  Bacterial polypeptide expressing nucleotide sequence isolated from the Sargasso Sea
atagaaaaagctcaattagttggtatctcactttcctacaataaagagatttcttattatatcccaatcaatcatactacctctgatggatctgaaagagttaataatcagttagatgaaaaatatgtaataaatcttattaataatatctgtgaaaataaatcgatcttaaaaattggtcaaaacataaaatatgatatcagaattttaaataagtatggagtaacgtttaattcaattgcagacacaatgttaatttcctactcaattgataatgggatttataagcacaatttagatgatctatcgtttaaccacctaaatcatacaactattaaatataaggaagttgtaggcacagggaagaatgaaattacttttgataaagtagcaattgataaagcaactaattacgctgctgaagattctctattaacattcaggctttttcaaaatctctatcctcgtttaataaaagaaaaggctaattttgtttatcaaaacatcgatttgcctcttgtagaggtattatcttcaattgaagcaaatggtatcgaggtaaataaaaattttttaacaactctaagtaatgaatttgaaaaggaaagtaaaaaacttgaaaagaatatttataaactttcaaaagaagagttcaatattggctcacctaaacaattaggagagatattatttgttaatcttaaaatacctggtggaaaaaaaacaaaatcaggcacatattctactgattcttcaactttaaataatttagcctcagatggatttgaaattgcgcaactcgttcttgattggagggaattaacaaaacttaaatcgacttatacagatgctttatttagattaacagatggtaaaagtagagttcatacatcatttggtttagctaatactttaacaggtcgattaagttctacagatccaaatcttcaaaatataccaattagaactgaaaatggaaaaaaaataagaacagcttttgttagtggtaaagggaaaagattagttagttttgattattctcaaatagagcttagattgg

SEQ ID NO: 256365 - DNA, 559 bp, Unknown
  Bacterial polypeptide expressing nucleotide sequence isolated from the Sargasso Sea
gtttaattatgaaacagcattaccttctcgtcaggttataatacccagaaagggtgttttagaaatatctcgcctaattagtgaagacgataaatcgcttaaagtacaaatcggtgcaaatcatctacgtattttttcaaacgactttatcttcacatctaagttagttgatggtcgcttccctgattatcgtcgtgtattgccgcaaaatggtgataaggaagttatcgctagcaagccagttttaaaggaagcattttcgcgagctgctattttatctaatgaaaaattcaggggtgtgagattaaacctttcttctggtgagttgaagataaccgccaataaccctgagcaggaagaagctgaagaaattgtagacgttcagtatcagggtgatgatttagaaatcggatttaatgtggcctatcttattgacgttttaaattcacttggctctgagagcgtgaaagtaagtttgtcagattcaaatgcaagtgcgctaattgaagatgaagcagatgatgccgcattgtatgtaattatgccgatgcgtctgtaa

SEQ ID NO: 256366 - DNA, 838 bp, Unknown
  Bacterial polypeptide expressing nucleotide sequence isolated from the Sargasso Sea
acgtcatttttattagcagcaacttctacaggtagattagcatccagcgacccaaacttacaaaatattccaataaaatcagacgatggcaaagatattagaaaagcttttgtctcagaaaaaaataataaattaatctctgctgactataatcaagttgaaatgaggatattagctgatctagcagatgttaaacaattaaaaaaagcatttttgaataatgaagatatacatacattgacggcaagccaagtttttggaaaagaaataaataaaattgatgctgagactagaagaaaagcaaaggcaattaattttggaattatttatggaatatcacaatatggtttggcaaagcaattaaatgtttctaataatgaagcagaggaatttttaaattcctattttaaaaaatttccagaaattaaagactacatgaaaacaactataaacttttgtagaaaaagtgggtatgtaagtaatatatttggaagaaaaacacatctaactggaattaatgacaaaaattataatataagaaattttcaagaaagagcagccataaacgctccaattcaaggttcagcttcagaaataatgcggttagcaatgataagaataaataaagaaatttctaataataaacaaaaaagtcttaaaatgcttctacaaatacatgatgagttaatttttgaggaaagttcaaaagaaacaaaaaaaagtactaaattaattaaagatttgatgttgagtgtaaaggatagtgaattgcactcattttctataccacttttggtagacataaatactggagaaaattggggcgaacttcattaat

SEQ ID NO: 256367 - DNA, 890 bp, Unknown
  Bacterial polypeptide expressing nucleotide sequence isolated from the Sargasso Sea
aaatacatactcagactctttaccagaacacttaaatcctaatacaaaaagaattcatacatcttttcttttagcagctaccaccactggaagactcgcatcaagtgatccaaatttacagaatattcctattaaaactgaagatggtaaagatatacgaaaatcatttgtagctgaaaaaggatattctttaatttctgcagattataatcaaattgaaatgagaattttagcagaaattgcagaggtaaaagagctcaaaaaggcatttataaataatgatgacattcactcaataacagcaagccaagtgtttaacaaaaaaattaaagaagttgatacagatatgaggcgaaaagctaaagctattaattttggaattatttatggtatttcacagtatggattagccaaacaaattggagtttcaaatgttgaggctgaagattttttaaatgcttactttctaaaatttccagagataaaagaatatatgaacgagacaataaaattttgtagaaaaagtggttatgtaaataatatttttggtagaagaacacatctaaatggaataaacgacaaaaattataacataagaaattttcaagagagagcagcaattaatgcaccaattcaaggatcagcatcagaaataatgagattagctatgattagactaaataataaaatttcagaagatgaaaatacaaaaatattacttcagatacatgatgaattaatttttgaaattaagtcaacaagagtgaaagaaatgtcgaaaataattagagaaattatgaatggggttgagtcaagcgaataccacaagtttacagttcctcttttaatagatttgaattctggagaaaattggggattgttgcactaat

SEQ ID NO: 256368 - DNA, 913 bp, Unknown
  Bacterial polypeptide expressing nucleotide sequence isolated from the Sargasso Sea
cttgaacttcttttccaataaattggaaaaaaaaattagtaatttggaaaaagaaatttacaaagtttcaaagagagaatttaaaattggctctaccaaacagcttggtgaagttatgtataatgaaatgaaaatttcatcattaaaaaaaacaaaaaaaggtagttttgctactagtgcacaagtattagaagatcttgcttttaaaggtcataaacttccaaaattggttttagattggagacaggtaacaaaattaaaaaatacatactcagactctctgcaagaacatataaactttaaaacaaaaagagttcatacatcatttttgctagcagcaacctccacaggtagattagcttcaagtgatccaaacttacaaaatattcctataaaatctgaagacggaaaagagattagaagagcttttgttgctgaaaaaaataataaattaatttcagcagattacaatcagatcgaaatgagaattttagcagacttagcagatgtaaaagagctaaagaaagcattcaaaaataaagaagacatccattcacttactgcaagtcaagtttttaataccagaattaccgaagttgattctgatatgagaaggaaagcaaaagctataaactttggaataatttatggtatttcacaatatggattagcaaaacaaatcggtgtttcgaatgttgaggcagaagaatttttaaattcatattttttaaaatttccagaaatcaaagattacatggaatctacaattaaattttgcagaaagagtggatatgtgagtaatatatttggaagaagaactcatataacaggaattaatgataagaattttaatataaggaattttcaggagagagctgcaatcaatgcacctattcaaggattctgcttctga

SEQ ID NO: 256369 - DNA, 826 bp, Unknown
  Bacterial polypeptide expressing nucleotide sequence isolated from the Sargasso Sea
aggatcaggaggaataagacacaaacttgatacactaatcgaatattattttggccacaaagcaatatcatttaaggagcttgtaggtagtggaaaagataagaaaactttccaagaattaagtattgtagaagctggaaaatacgctgctgaagatgctgatatgactttaaggctgtggaaaagattgaaatcttcattagtccaagataagcaagttaaaatatatgaaattattgaaaaaccattagcgcaagtcataatgaacatggagaatcatggaatttcgatagataagaataaattatatgaattatcaaaagtttttaaaaagaaattaaatatcttagaaaaagactgcttcaaattaattgatgaagaaattaatcttggttcgccaaaacaagtaggtgaagtattattcgataaacttgagttaccaggtggaaaaaaaacatcgactggctcatggtcaactagtgcagaagtattggaaaatcttgctaatgaaggtcataattttccaaaacttttacttgaatggagagcactatcaaaactcaaaacaacctattctgacgctttacctacatatttaaatgagaagacaaatagaattcactcttctttttcaatggcaaccacttctacaggaagattagcttcatcagatccgaatctacaaaatatacctattagaagtgaagatggaagaatgataagaaaagcttttattccagaaaagggaaatattctgattagctcagattatagtcagatagaactaagattaattgcgcatattgctgatgaaagaaaccttata

SEQ ID NO: 256370 - DNA, 852 bp, Unknown
  Bacterial polypeptide expressing nucleotide sequence isolated from the Sargasso Sea
tttagagccggtattgtcccaaatggaaatgaatggcataacaattgacatcccttatttggataaactctcaaaagaattaaaaagtaccttagaagatattgaaaataaagtttatgatttagcagaggaaaatttcaatctatcttcaccaaaacaacttggtgagatcttgtttgaaaaattaaatttggataagaaaaaatcacggaaaacaaaaacaggatggagtacagatgcagtagttctggaaagattagtcgacgaacatgaaataatccaacatttaataaaacatagaactcttagcaaattacttagcacctatattgatgctcttccaaatcttattaacgaaaagacaggaagagttcatacaaactttaatcaagctgcaacagcgactgggagactaagtagtagcaatcctaatcttcaaaatatcccggttaggactgaatttagtaggagaatcagaaaagcattcttgcctgaaaaaaattggaaacttttatcagctgattattctcagatcgaattaagaatactcgctcacttagcggatgaagaaatactaataaatgcatttcataaaaatgatgacattcattctttgactgcaagattaatttttgagaaagaagaaatttcttctgatgagaggagagttgggaaaacaataaatttcggagttatctatggtatgggaataaaaaagtttgcccgttctacaggcgtaagtactccagaagcaaaagaattcctaataaaatacaaagaaagatattcaaaaattttcaaatttcttgaacttcaagaaaggcttgccttatcaaaaaggttatgtaaaaa

SEQ ID NO: 256371 - DNA, 1021 bp, Unknown
  Bacterial polypeptide expressing nucleotide sequence isolated from the Sargasso Sea
atttatgggttaaaaaacttgcttactagaaatcaagataaaataattggccataaccttaagtttgatattggtgtattgcagaattatgacatccatataactagatttcattctgatactatgttgatgtcctatatcgtgaatagtacagccgcaagacataatcttgatgcactttctgagcattacctatctcgaaaaacaataaaatttgaagatgtgattggtaaaggcccaaaaaaattaagaaactttagtgaagtaacaatcaaggatgccacaaattatgcttgcgaagatgttgatattgcaattcatctctatgaagttttgagtgcaaaagttgacgagatactaaataaacttcttgaagagattgagtatcctctagtctttgttctcctggatatggaaaaaaaaggagctttaattgatgcaagtcatttgaaaaaattatcagataaatttggcagagagctactagatttagtaaccagcatccataatgattcgggagtcgtttttaatcttgattcaccaaaacaattaagtgaagttctatttgaaaagatgaacatttcgacaaaaggtcttaaaaagacatcaagtggttattattcaacttcagaatctattcttcagaaactctccaatgaaaatgacgtagtgaaagatatactgaagtatcgatccctagcaaaattaaaaagcacatatactgacaaaattgtagaaatttgtgatcaaaattcaaaggtgcatacatcttaccaccaggcagtaacttcaacaggaagattatcatcatcagatccaaatttacaaaatataccaataagaactgaagagggaataacaattagggaagcatttgtagcgcctaaaggaaaaaaaattctagcaatagattactctcagattgaattaagattaatggcacattactctcaagatccattgatgttggaatcgtttaataataacgaggatatacataaaagaacagcctctgaaatat

SEQ ID NO: 256372 - DNA, 151 bp, Unknown
  Bacterial polypeptide expressing nucleotide sequence isolated from the Sargasso Sea
aatgcgaaaaattatccacgtcgacatggattgtttttacgccgcagttgaaatgcgcgacaacccagccttgcgcgatattcccattgcgataggcggcagtgccgaccgtcgaggggttatttctacctgtaactatcccgccccgtaa

SEQ ID NO: 256373 - DNA, 960 bp, Unknown
  Bacterial polypeptide expressing nucleotide sequence isolated from the Sargasso Sea
gatgctaatgtcttacgccattaatagcactgctacaagacataaccttgatgctttagctgagcattatttaaatgttcaaaccataaagtatgccgatgtaatgggtaagggagctaataaatataaaagttttagtgaagttcccataaaagaggctacaagctatgccgccgaagatgctgatataacttttcagttatatgaaaaattcaaagagacaataaataaagaaactgaaaagttactacaagacattgagtatcctttagtgcatgttttgttagaaatggagaataaaggcgcattaattgatacaaaccaccttaaaaagctttcaaatgattttggttcaaaactaattggccttacaaaaaaaattcatgacatatcgggaagcgtttttaatattgattctccaaaacagctcagcgaagttctttttgaaaaaatgaaaatagattccaagggtctaaaaaagacttctactggatactattcaacttcagaatcagttctacaaaaactatcagctgagaatgaagttgttagagatattttagagtacagaacactagccaaactaaagaatacttatactgataaaatttctgatatatgtgatgcaaactcaagagttcacacatcttatcaccaggcagtaacatcaacaggcagattatcgtcatctgaccccaatttacaaaatattccaataagaactaatgaggggataacaataagagaagcatttattgcccctaaaggtaaaaagcttttagctatggattattctcaaattgagcttcgacttatggcccactactctaaagatccaataatgcttgattcatttagaaatgatgaagatattcataaaagaacagcagcagaaatcttcggagttgaaataactgatgttgacgatcagatgcgcagaagggccaagaccattaattt

SEQ ID NO: 256374 - DNA, 981 bp, Unknown
  Bacterial polypeptide expressing nucleotide sequence isolated from the Sargasso Sea
catgggttaagtgaaattagttttagattatttggatttaagcctccttcatttaaggagacagttggaaaaaataaagacttttcatttgttgatattgatgaagcaagtatttactgcggttatgatgtttttctaacttttaagattgtcaaaatttttaaagaaagtttttcaaaggaaaaagatgaattaatcaaattgttcgaagaaatcgagctgcctttagagccggtattgtcccaaatggaaatgaatggcataaccatcgacatcccttatttggataagctctcaaaagaattaaaaagtaccttagaagatattgaaagtaaagtttatgatttagcagaggaaagtttcaatctatcttcaccaaaacaacttggtgagatcttgtttgaaaaattaaatttggataagaaaaaatcacggaaaacaaaaacaggatggagcacagatgcagtagttctggaaagattagtcgacgaacatgaaataatccaacatttaataaaacatagaactcttagcaaattacttagcacctatattgatgctcttccaaatcttattaacgaaaagacaggaagagttcatacaaactttaatcaagctgctacagcgactgggagactaagtagtagcaatcctaatcttcaaaatatccctgttaggactgaatttagtaggagaatcagaaaagcattcttgcctgaaaaaaattggaaacttatatcagctgattattctcagatcgaattaagaatactagctcacttagcggatgaagaaatactaataaatgcatttcataaaaatgatgacattcattctttgactgcaagattaatttttgagaaagaagaaatttcttctgatgagaggagagttgggaaaacaataaatttcggagttatctatggtatgggaattaaaaagtttgcacgttccacaggagtaagtactccagaagcaaaa

SEQ ID NO: 256375 - DNA, 184 bp, Unknown
  Bacterial polypeptide expressing nucleotide sequence isolated from the Sargasso Sea
gatggtagtttggaaagttcacccctcttttttaaaaagaaaaattatccacattgatatggactgcttttatgctgctgttgaaatgagagataacccctctttagttggcaagcctgttattgttggaggagacccacatagtcgcggtgttgttgcaacatgctcttatgaagcaagaagg

SEQ ID NO: 256376 - DNA, 805 bp, Unknown
  Bacterial polypeptide expressing nucleotide sequence isolated from the Sargasso Sea
gaaagagtaaaccaagaaagtcttaataaaatctatgaaatctttgagaaacctatggttaaactgctctcagatatggaaatgaatggtataaaaattgatgattcatacttaaaaagattatcaaaaaaatttgatgaaagattaaaaaagatagaaaaagaaatctataatctatccggtaaagagtttaatattggatcaccaaaacaacttggagagataatttacaatgatctcaaaatagcaaaattaaaaaaaacaaaaaagggaagtctagccaccaatgccaaaattctagaagacttagcattaacaggtcataagtttcctaatttagttttggaatggcgacaagtatctaaattaaaaagtacatatagtgatgccttgcaagatcatattaattttaaaacaaaaagagtacatacatcctttcttttagcagcaacaaacactggaagacttgcttcaagcgatcctaatcttcaaaatattccaattaaaacatctgatggtaaagaaataagaaaagcttttattgctgaaaaaaataatattcttatttcggctgattataatcaaattgagatgagaattttagcagatatggctgatgttaaagcattaaagaaggcttttaaaaataatcaagacatccactctttaactgctagtcaagtttttggttcaccaatagataaagtaacagaagatcttagaagaaaagcaaaagcaattaattttggtataatttatggcatcactcaatatggtttggcaaaacagatttctgtatcaaatc

SEQ ID NO: 256377 - DNA, 790 bp, Unknown
  Bacterial polypeptide expressing nucleotide sequence isolated from the Sargasso Sea
gataatgagtatttaaaaaaattaagtagagaattttctaaagaaattaatatattagaagaaaaaatatttacaatatcaaagacaaattttaatattggttcgcccaaacagctaggagaagttttatttggtaaaatgcaaattaaaggaggtaaaaaaactaaatccggcacattttcgacagattctaatactttagaagaaatagcatctcatggtgaaaaaatagcaaaatatattttaagttggagagaattatcgaaattgagatcaacatattccgaggctttagttgatcaaatatcaaaaacaacaaaaagagtacacacttcatatgctaacgctactactatcactggtagacttagttctaatgatccaaatttacaaaatattccaataagaactgaaaatgggagaaagataaggaaagcttttatagctgaaaaaggatataatttggttagttttgattactcccaaattgaactccgattagctgcagaaatttcaaaagatcaaaatttgataaaagcttttaaagatggtgaggatattcactctaaaacagcttctgaaatatttagtattaaaataaaagatttaaactctgagcatagaagaaaagccaaagctataaactttggtattatttatggtataagcccttatgggctcgcgaaacaactttctataactaattctgaaggaaaaaattatattgaaaattattttaaacgttttcctaaaataaaagaatatatggaaaatcaaacaaaattctgta

SEQ ID NO: 256378 - DNA, 868 bp, Unknown
  Bacterial polypeptide expressing nucleotide sequence isolated from the Sargasso Sea
tatgagagatgttcctgttgaaaaactgactgattatgccgctgaagatgctgatcttacttttcaattaaagcaaatttttgatgaagagatgaaaacaaaccaagttgaggaaatattttgggatattgaggttccaatgatccgtgttcttgcagatatggaaaaagagggaataagcatagatagcacatacttaaataatttagacagagtatttgaatctgagcttgataaattaaaaagtggaatttttgaaaaatctggtgaagagtttaatcttaattctccaaagcagcttggggatattttatttgataagctgaaattagtctcaaagccaaaaaaaactaaaactggacaatactctacttcggaagaggttttatctagtctagctaatgaacatgaaattataaggaacatattagaatggagatcattagataaacttcaaaatacttatgttagatctttgccaaatgaggtaagttctagaacaggtaggattcatacaaaatttaatcagactgttacaactactggtcgtttaagtagtaacaatcctaatctacagaatataccaatcagaacagaaaatggtcaaaaaattagagaagcatttattccaaaaaatcaagattttgagcttcttgcagctgattattctcagattgaattaagagtaatagcatcaataagtaaggataagagtatgattgatgcattcgttaaaaatcaagatattcataccataactgcctcaaaaatttataatgcagatccagaaaatattacaagagaacaaagaggcaacgctaaaaccgtaaattttggaatatatatggtgtttctgcatttgggttaa

SEQ ID NO: 256379 - DNA, 913 bp, Unknown
  Bacterial polypeptide expressing nucleotide sequence isolated from the Sargasso Sea
aagattagtaattttaaggcagacactatgttgatgtcctatgttttaaatagcaccgcatccagacataatctggatgcacttgcaaaattttatttaaatagggagaccataacttatgaaacagttgttggttcagcttcaagacaaatccctttttcaaaagtttttttagagcaagctactgcatatgctgcagaggacgcagatataacaatatctttgtatgaaactctacttgataaacttaccacgcaaccagaactcttaaaattattggataatcttgaataccccctgctcaaagttttatcaattattgaaagaaatggagcaaagatagatgttgaaatgctggaggagtattctgcagaattgtcaaaaaagattaactctttatctaaagaagcttatgccttagctgggcaagaatttaatcttgattctcctaagcaattggttgaaattttatttaataaacaaaaacttccagttcttcaaaagacacctaaagggcaaccttcaacaaatgaagctattctgcaaagattagctgaagaatacccccttccaaagattattatccagtaccggacacttgccaagttaaagtcaacttatacggatagcttaacgaaacttgaaaatgaagcaacaaaaagaattcatacatcatatcatcaagctgtaacttcaactggaagattatcctctgctaatccaaatttacaaaatatacccattaaaacccccgaaggaagaaaaataagagaagcatttatacccgaagaaggcaactcaatattgtcagttgattattcgcagattgagttaaggataatggcacacctctctaaagattctagcttatgcgacgcatttttagcaaatctggatgttcattcagcaacgg

SEQ ID NO: 256380 - DNA, 708 bp, Unknown
  Bacterial polypeptide expressing nucleotide sequence isolated from the Sargasso Sea
caagagagggaaataaattcgttgcatccgactactcgcaaattgagctgcgtattatggcgcacctttctggcgataaaggtctgttagatgcctttgcgcatggtaaagatattcataaagcaaccgctgcggaagtttttggtgtgccactagatgaagtaaccactgaacagcgtcgcagtgcaaaagcgattaactttggcttaatttacggtatgagtgcctttgggttgtcgaagcaacttaatatcccacgtaatgaagcacaaaaatatatggatctttacttcgagcgctacccaggcgtgcttgagtacatggattcaacacgtgagagcgcgaaagaaaaaggttatgtagaaaccgtatttggtcgcagactttatttgcctgatattaaagccagtaatggtgcacgtagaaaaggcgcagagcgcgctgcgataaatgcgcctatgcaaggtacagcggctgacatcatcaagatggcaatgattaaggtagacgactggatcagaaaaaatgcatctgatgatgtgaccatgatgatgcaggtgcacgatgaattggtttttgagattaaagaagacaaggttgagacctatgtctctactattacagcgctaatggaaagcgcagctaccctcaatgttccgctagttgttgaggccggtgtgggcgaaaactgggatgaagcgcactagt

SEQ ID NO: 256381 - DNA, 712 bp, Unknown
  Bacterial polypeptide expressing nucleotide sequence isolated from the Sargasso Sea
cctgcaaaatgtgctttatgaaaaattcaaactccatgagcgtttcaaagtcaaacccaggaaaatcaaactgggtaacggcatgtcaacggatgaagaaacactggaaaaactttgtgaggacccccttcctagggcgatcttggattatcgttctctgaacaaactcaaaaacacctatgtcgatcaacttcctgatcacgtgcatcctagatcaggacacattcattccaggtttcaacaaacttcaactgcaacaggacgtctttcatctgacaacccgaatatgcagaatatccccatccgcagtgtagaaggccggcgaatccgtgaagcctttgttccttctgattctaaccggatccttatttcagcagactacagtcaaattgaactgcgtattgttgcgcattattcgaaagacccaacctttctggaagcctaccgaaataatgaagacatccatgccctcaccgcgtcaacgatcttcaaagtccaggtcgatcaaatcacccgtgaaatgcgttccaaagcaaaggaggtaaatttcggtctgatttacaagatgggccctgagaggctttccatcgtaacacaaactaataagaacgaagctaaagcattcattgagcgtttttttgaaaaatacagcactatccatgcacttcaagagcgttatctcgcccaggcccgtaaggaaggatttaccacc

SEQ ID NO: 256382 - DNA, 857 bp, Unknown
  Bacterial polypeptide expressing nucleotide sequence isolated from the Sargasso Sea
tattacaaaaagaattcatacctcattcttacttgcggctacaactacaggaagattagcatcaagtgaccccaatttacagaatattcctattaaatctgaggatggtaaagatatcagaaaagcttttgtttctgagaaagatcatattttaatttcggcagattataatcaaattgagatgagaattttagccgatttagcagatgtcaaacaattaaaaaaagcgtttaaaaataatgaggatattcattcactaaccgctagccaaatttttaatattgatataaaaaaagttaatcaagaccaaagaagaaaagcaaaagcaattaactttggtattatttatggaatttcacagtatggattggccaaacaaataaatgtttcaaatcatgaagctgaagaatttttgaatgcctattttgctaagtttccagaaataaaaatttatatggaccatacaattaagttttgtagaaaaagtgggtatgttaataatatttttggaagaagatctcattttacaaatatcaacgataaaaattacaatgtaagaaattttcaagaacgtgcagcaattaatgcacctattcaaggttcagcagctgaaataatgagattagctatgataaggatagacaaaagactaaatgacaaaagggatctaaaaacaaaaatgttgttacagatacatgatgagctcatttttgaaacgcataaagaagaggcaaagagaatcagtcaaataataattgaagaaatgtcgagtgttgcaaatagtgatcaacattctttttcaatacctttaacagtagatttaaatattggggataactggggtgcacttcattaat

SEQ ID NO: 256383 - DNA, 829 bp, Unknown
  Bacterial polypeptide expressing nucleotide sequence isolated from the Sargasso Sea
taaagaagtcgttggaagtggtaaatctcagatcacatttgataaagttgatttaaagaacgcgttaaaatatgctgctgaagatgcagatattacctacaaactttatttattttttaaaaaaagaatcaatcatgaaaaaaataattatatttattccaatattgaaaagcctttaattaattgtatccaaactatggaatttaatggtgtaaaggttgataaagagtacttaaaaaagctttcaacagatttttcaaaaagaatattaaaattagaaagtaagatatacaaatatactggtacagagtttaatattgcatcaccaaagcagctatctgaagtattatttgataaactcaaacttaaaccgccaaaaaaaacaagaacaggagaaaaatctacaggaatagaagtacttgaagatcttgcatacggtggcaacaaagttgctgaaactattatagaatggagacagctttcaaagctaaagaatacttatacagaggccttacaaactcatattgttaaatctacaggaagaattcatacttcatatgcaatggcttcaaccagcacaggtagacttgcatcctctgatccaaatttgcaaaatattccaatcagaacagaagaaggcagatcaattcgtaaagcatttattcctgataaaggtcaaactatttttgcggcggactacagccaaatagaattaagagtattggctcatatggctgatgtatctcaactcaaagatgcttttaataataatgaggatatacatcaattaactgcgtcagagatctttaatatcaaacacaaagatgtc

SEQ ID NO: 256384 - DNA, 871 bp, Unknown
  Bacterial polypeptide expressing nucleotide sequence isolated from the Sargasso Sea
atgaaatatggcttgaaaatagcctcaataaaaaatgataccatgatgatgagctatgtcctcgatgcttcagctacaagacataacttagatgccttagcttcttattatttaggctacaaaacatcaacatacgaagatgtagctggtaaaggagctaaacaaatttctttcgatgatgttcctatagacattgcgacaaattatgctgcagaagatgctgacatcactttaagattatatgaagagttaagtccaaaattaaagaatattgaatctttaaataaactgaatgaagaaattgaaatacctttaattgaagttttatcagacatggaaaggaatggagctatcttaaatgcaaaagtactcaatgctcaatccaaagaccttgaagaaagaataataagactcgagaataaagcctataagctagctggtgaagaatttaatcttggatctaccaaacaattaagagaaatcttttttgataagctcaattacagagtaataaaaaagacgccaggagggcaaccttcgacagatgagaaagtattggcagagctggctgaagaatatgaattgcccaaagttttgcttgagcatagaactctcagcaagctcaaatcaacctatacagataaactaccaaatcaaatttcttctttgtctggaaaagtccatacttcatttcatcaagctgtaaccactacaggtagactgtcatcttctgaccccaatttacaaaatattccgataagaacagaagatggtcgaaggatcaggcaggctttcgaaccttcaaatggaaataaatttatttcagctgactattcccaaatagaactaagggttatggcacatctttcca

SEQ ID NO: 256385 - DNA, 269 bp, Unknown
  Bacterial polypeptide expressing nucleotide sequence isolated from the Sargasso Sea
gttggaggaattcaacgtgcgaaaaattattcacatcgatatggactgctattttgcagcagtagaaatgcgtgactttcccgagtaccgtggcaagcctttagccgtgggtggcagtcgtgaacgtcgcggtgtgatcagcacttgtagttacgaggcgcgtaaatttggggtacgttcggcgatggcgacttcctatgcctttaagctgtgtcccaatcttattcttgttcccggtcggatgcaggtttacaaagaagtatcgctac

SEQ ID NO: 256386 - DNA, 952 bp, Unknown
  Bacterial polypeptide expressing nucleotide sequence isolated from the Sargasso Sea
ttaaaatatgatttagctgtacttaagaaatacgatatgagattaaacaagttttgtgctgacacgatgttaatgtcttacgccattaatagcactgctacaagacataaccttgatgctttagctgagcattatttaaatgttcaaaccataaagtatgccgatgtaatgggtaagggagctaacaaatataaaagttttagtgaagtccccataaaagaggctacaagctatgccgccgaagatgctgatataacttttcagttatatgaaaaattcaaagagacaataaataaagaaactgaaaagttactacaagacattgagtatcctttagtgcatgttttgttagaaatggagaataaaggcgcattaattgatacaaaccacctcaaaaagctttcaaatgattttggttcaaaactaatcggcctcacaaaaaaaattcatgatacatcgggaagtgtttttaatattgattctccaaaacaactcagtgaggttctttttgaaaaaatgaaaatagattctaagggtctaaaaaagacttctactggatactattcaacttcagaatcagttctacaaaaactatcagctgaaaataaagttgttagagatattttagagtacagaacactagccaaactaaagaatacttatactgataaaatttctgatatatgtgatgcaaattcaagagttcacacatcttatcaccaggcagtaacatcgacaggcagattatcgtcatctgaccccaatttacaaaatattccaataagaactaatgaagggataacaataagagaagcatttattgcccctaaaggtaaaaagcttttagctatggattattctcaaattgagcttcgacttatggctcactactctaaagatccaataatgcttgattcatttagaaatgatgaagacatccacaaaagaacag

SEQ ID NO: 256387 - DNA, 829 bp, Unknown
  Bacterial polypeptide expressing nucleotide sequence isolated from the Sargasso Sea
tttttattagctgcaacatctacaggtcgattagcatctagtgatcctaatttacaaaatattccaattaaatctgaagatggaagagatataagaaaagcattcattgcggaaaaaaataataagtttatttctgcagactataatcaaattgaaatgagaatattagcagatcttgcagatgtaaaagaattaaaaaaagcatttttaaatcaagaagatattcatttacttacggcaagccaagtatttggaataagcataaaaaaagttgacgaagatatgagaagaaaggcaaaagcaatcaattttggaataatttatggcatttctcaatatggattggctaaacaaattggcgtatcaaatatagaggcagaggaattcttaagctcttattttttaaaatttccagagattaaggattatatggatacaacaataaaatcttgtagaaagaacggatatgtgaataatatttttggaaggagaactcattttataaatattaatgataaaaattataatattagaaattttcaggaaagagcggccattaatgctcctattcaaggctcagcatcagaaataatgagaatggcaatgataagattaagtaaaagatttgcaggacaaaatgataaaaattgtaaaattttattacaaattcacgacgaactaatttttgaaacaaaaaatactgatttaaaaaaatactcaaaaattattgaagaagaaatgagtagcgtaaaaaatagcgatcttcattccttttcaatacctctagtaaaggatattaacattggtaacaattggggagaacttcact

SEQ ID NO: 256388 - DNA, 602 bp, Unknown
  Bacterial polypeptide expressing nucleotide sequence isolated from the Sargasso Sea
agctctagcagcgcgacccgacgcacacgaactccccgggatcgtattgcgccaccgcgcgacgctcagggcgatcgcgatgtgcgcgtcgtatctctctctcggttcaaaatcgcgggatggacgtttgcggtgtgagtggaacaacacgcgcaccgccaccggccggctctcgtcttccaaccccaacctccaggcggttagtcgaggcgagctcgagctcggcaccgtcggaggggggacctcgcttaacctacgtggcgcatttgtcgctccgcgcgggaaggtactcctcgcggcagactactcgcagatcgagctgcggatgctcgctcacctctccggggacggaaagctcgccgcgttgcttcaaatgggaggcgatgtcttccaatacatctggaactcgggacgaaatgcgcctctgaatgcgcccgtgagcgcagacgagcgcgacagggcaaaggcgactgtgtacgatattctatatggccagggggtgagcggtctggcagagaaacttggcgtcggccgggacgtcgcgaggagtctcatcgcgacgttcttctcgacgtttcccggcgtcggcgcgttcgtgcgtc

SEQ ID NO: 256389 - DNA, 733 bp, Unknown
  Bacterial polypeptide expressing nucleotide sequence isolated from the Sargasso Sea
tctattgagatcaatagcgaaaagtttcggcggtcagttgaagaggtcgcttttgccatggcacaacaagacgtgcggtatttcttaaatggtatgctgattgaaattggccaaggtaagattaagctcgttgctacagatggacataggctcgcgctgactgaaatggatgtaggagccagcacgcatggcggcggggtgagtcaaaaagcgataataccgcgtaaaggcgtgctggagttgcttaagatcctagatggaagtgaaaagttttctctacaattatcggataagctgattacggtcagatcggggaattaccaattcacttctaaactggttgagggtcagtttccagactataacaaagttgtgccccagggtggtggtacagagcttacaatcgaaagacaaagcttaagagaggccttgcaaagggcttcaattctttcaaacgagaaatatcgaggaattaggttgctagttgataaaggcagcctaaaaatacaggccaataaccctgagcaagaggaggctgaggaggttttggagatttcgtacgatgggggcgggctggaaataggctttaatgtaagctacatattagacgtattaggtgctatatcaggttctgaagcaaaactaacactcagtgatggcaatagttctgctcttattgagggtttagatgactctaattctctttacgtggttatgcccatgaggctttaaa

SEQ ID NO: 256390 - DNA, 832 bp, Unknown
  Bacterial polypeptide expressing nucleotide sequence isolated from the Sargasso Sea
gtgttacaagattaccgaaaaagagttcaatttaaattcaccaaaacaactttctgaaatattttttaatgaattgaaatacccagtattaaagaaaacacctaaaggagctccttctactgatgcaagtgtgttggatgagttagccaaaaattatgatttaccaaaacatattttaaaatatagagaattagaaaaaattagatctacctatgtagatggtttattgcctgaagtaacatatgattcaaaaatacacactcattacaatttatttggaaccacaacaggcaggctgtcatcagaaaaacctaatttacaaaatatacctaacaaaacagaattgggacagcaaattagagatttttttatttctaaaccttcgatgaaatttgtcctttcagattattcccaaatagagttacgggtccttgcgcacttaagtcaagattcagaaatgataaaaatattaaatgaagaaaattccgacatacattctgaaactgctgcaagaatatttgatcagccactaaatgatgttaattctgaaatgagaagaaaagcaaaagaagttaattttggattaatttatgggatggaagcatttggtctttccaaaagtttagatatatctcaaaaagaagctaagaaattaatagatgcttattttgatcaatttccaaaagtaaaaggatttttagaaaacgttgtatctaatgctgaacaaaacacatatacaaaaaccttgtttggaaggaaaagattcataagagaattatcttcttcaaattttcaattaaaggcaatgggtaagcgtatcgctatgaatgca

SEQ ID NO: 256391 - DNA, 865 bp, Unknown
  Bacterial polypeptide expressing nucleotide sequence isolated from the Sargasso Sea
ccggaatataaagctactcgtgaaaaaatgccggaggatcttgttgagcagctcccatatctgccgaggttggtggaggcgcttaatctgccgtacttgattcttccaggatacgaggcagacgatattgtgggtacgctgatgaggctttgtcatgaagcggaaatagaaggtgtgatggttacaagcgataaggattacatgcagttgatcggcgagaaaattgtgatgctgaatcatcgaaacgagcgtataggaatcagcggagtgcaggaaaaattcggctgtgttcctgagcaggtgatagagatgctggggcttatgggagattcatcagataatattcctggagtaagaggagttggtgaaaaaaccgcggtcaagctgatatcagaatttggaagcatagaaggagtttatgaaaatcttgaaataatcagtggcaaaagcttgaaggaaaaactggaaactgattatgaaaatgccttcctttcaagggaactggccactattgactgtcatgtacctctgtcttacacgttggaggatgttcatcttggagacacagatttgtacaataatgatgaattatatgccttgctcgaagagcttgagttcagaacactgctgaaccgcctaataaaaaaaaggggcactgtttcagctggtccgggagccaaaactgcagatgctgatcaaagggaatcctcccaggatgataatcaggagctgctttcttctaaagaagaaactgatcatggccatcttgaagtcgaatgctctgtaattaaaactgcaacacaattacgaactataatcaatgaattttctaaaaaaagcagactggcccttgcattggatatta

SEQ ID NO: 256392 - DNA, 792 bp, Unknown
  Bacterial polypeptide expressing nucleotide sequence isolated from the Sargasso Sea
acctcctttcttcttgctgcaacctccactggtaggctagcatcaagtgaaccaaatcttcagaatattccaataaaatctgaagatggcaaagatattagaaaagcatttatagctaaaaaagatcacgttttaatatctgctgactataatcaaatagaaatgagaattttagcagatttggctgaagtaaaagaacttaaaaaagcttttaaaaataacgaggatattcattctttgacagcgagccaaatattcaatgttgatattaaaaatgtaaacaatgatcaaaggagaaaagcgaaagctattaattttggaattatttatggtatttctcaatatggattggcaaaacaaataaatgtttcaaattatgaggcagaagattttttaaattcctattttgcaagatttcccgaaataaaaaattatatggatcaaacaattaaattttgtaggaaaagtggatacgtaaataatatttttggaagaagatctcattttattaatattaatgataaaaactataacataagaaattttcaagaaagagcagcaattaatgcacctatccaaggctctgcagctgaattaatgaggttagctatggttagattatcaaaaaagttaaatgaagcgaactatcaaaaaactaagatgctcttacaaattcatgatgaattaattttcgagactcctagagaagaagtaaaaagaatcagtaagataatattagacgaaatgaccagtgtatcaaaaagtgataagcattctttttcgataccctta

SEQ ID NO: 256393 - DNA, 907 bp, Unknown
  Bacterial polypeptide expressing nucleotide sequence isolated from the Sargasso Sea
attaataatgaaatctcagaatttaagaaagacaaaaaacttattttattatataaggatttagactttccaatgcttgaaattttgagctcaatgaacaagaaaggcgtaaaagtctcattaaaaaaaatcgataaactttctgatgaaataaatgttgatttaaatatttataaaaaaaatattaaatctataactaaaaaagattttaatttgaattcaccaaaacagttatctgaaatcctttatgaagatatgaaatatcctattattaaaaagactccgaaaggagctccttcaacagatgcttctgtgttagaagaattatctaaatcacatgagctgcctaagttaattttaaaatatagagaatatgaaaaattaagatcaacttatatagaggggcttaaaactgtcattgtaaataatagagttcatacctcttataatttgtttggtacaataactggtcgtttatcatcagaaaaacctaatctacaaaatattcctaataaaacaaaaatgggtcagaaaatacgagagttttttgttgcggattcaaaacacacttttgttatagctgattattcacaaatagaattaagagttcttgcacacttaagcgatgataaaaatatgataaatatgcttaaaaatagagacgcagatattcactcagaaacagcagccaaaatatttaatacaaatattgattccgtaactaaagatatgagaagaaaagctaaagaagtaaattttggtttaatttatggaatggaatcatttggattatcaaaaagcttggatatttcaaaaaaagaagctgatgaattgataaaagcttattttggtcagtttccaaaagttaaaggttttcttgaaaagatagttgttgatgcaacaaaaa

SEQ ID NO: 256394 - DNA, 787 bp, Unknown
  Bacterial polypeptide expressing nucleotide sequence isolated from the Sargasso Sea
tccaaatttacaaaacattccaattaaaactagtgatggaaatgatattagaaaagcttttgtggctgaaaaaaataaaagtcttatctcagctgattataatcaaattgaaatgagaatactttcagatttagcagatgtaaaagaattaaaaaaagcatttaaaaatgatgaagatattcattcattaacagctagtcaggtgtttaacacagatataaaaaaagtaaattctgatatgcgcagaaaagcaaaagcaattaattttggaattatttatgggatttcacaatatggacttgcaaaacaaattggggtctcgacaacagaggcttctgaatttttaaactcttattttctaaaatttccagaaataaaagaatacatgtcatcaaccataaagttttgtcgtaaaagtggatatgttaataatatttttggcagaagaacacatattactggtataaatgacaaaaattttaacattcgaaattttcaagaaagagcagcaataaatgcaccaattcaaggatcagcgtcagaaattatgagaatggcaatgataagaatttcagaaaaattaaaagataataaaaattatgatacaaaaatgattttacaaatacatgatgagttaatatttgaggcaccaagcaaagatactacaaaaataagtaaaataataaaaaaagaaatgactagtgttcaaaatagtgagttacattcttttactataccattatcagtggacataaatgtaggtgataattggggggtattacattag

SEQ ID NO: 256395 - DNA, 989 bp, Unknown
  Bacterial polypeptide expressing nucleotide sequence isolated from the Sargasso Sea
aaatctgctcctgatgaattcaaggtacaagtaaaagttttacaaaaattaatagaaaaattcaatattccacaagtgtctgtagaaggctatgaagcagatgatgtacttgggacactttcaaaaagtttcaatgacaataatgaagaggttttaatagttactggagatagagattcttttcagctaataggtgataaaacaaatgtactttacacaaaaagaggaatttcagaagttgagagatttggtaaagcggagtttgaagaaaaatatcaaatttcaacttcacaatatattgaatatttaggattaaaaggtgattcatcagacaacatcccaggactgccaggagtcggtgaaaaaacagcaattaatttactttctgattatgaaaatatagaaaatatatataagaatcttgatgacttaacaccaaaattaagagatacgttccaagaaaacaaagatttgctgatgcttagcaaggatcttgcaacaataaaaagagatttagacattaatctacctgaaacaaaaataaaagattctattttttttaatgaggaagtacttgataatgcaaaagatgaaattatgaaatatgagctgacaagatttttaggtgaaagaaaagatactactcaaattaataattctgaagaactagaaattgtacttattaaagaaaaaattgctgatgaaagtataatttttaattttgaaaataaaaattactttgtgactaataattcatttggtgaatttaaatcattagaacaatttaataatgtgatttcaatgtcatcacaaacatttgctttaaattcagaatttgagcttgatattgaaagattcttagcttttgattgttgtttgtttttaattgatccaagtattaaaccagacaatctattaaatattgttttctacattgataaatattctgaaataaataaaaaatctaatctgagtgaatatctattatt

SEQ ID NO: 256396 - DNA, 763 bp, Unknown
  Bacterial polypeptide expressing nucleotide sequence isolated from the Sargasso Sea
acaaatatacctaacaaaactgatttaggacaagaaataagagatttttttatcgctaaaccatctatgaagtttattctttctgactattcccaaatagaattaagagtattagctcatttaagccaggattcggaaatgataaatattttgaagaaagaaagcgcagatattcatgctgaaactgcagctcgaatatttaatgaaccgattgataacgttaattctgaaatgagaagaaaagcaaaggaagtaaattttggacttatatatggaatggaagcctttgggctttccaagagcttaaatatatctcaaaaagaggcaaaaaaactaattgatgcatattttgatcaatttccaaaagtaaaaggatttttagaaaatgtagtaagtaatgccgagaaaaatacttttactacaactttgattggaagaaaaagatacataaaggaactgtcttcgtcaaattttcaattgaaagccatgggtaaacgcatagcaatgaatgcaccaattcaaggcactgcatccgatattatgaaaattgccatgattaaagttaggtcaaaccttccaaaatttaataatgcaaatttacttcttcaaatacatgatgagattgttgttgaatctaataataaagatattgaaaaagtttcaaatatggtgtcagacaatatgaagagtgcagtaaagcttgacgtaccactttacgtaaatactaaattaaacaattcgcttgcaaattttaataattagt

SEQ ID NO: 256397 - DNA, 892 bp, Unknown
  Bacterial polypeptide expressing nucleotide sequence isolated from the Sargasso Sea
ggcgactcctccgataacattcccggcgtacccggcgtgggcgagaaaacggctcaggcgctgctgcaggggttgggagggctggatacgttgtacgctgagccagaaaaaattgccggtttgaccttccgtggtgccaaaacgatggcggcgaagctggaacagaataaagaggtggcctacctctcgtatcagctggccacgattaaaaccgacgtcgagctggatctgagctgtgaagagctgcacgtgctgccgccggcggcggatgatctgttggctctgttcaaaaagtatgaatttaagcgctggatcaccgatgttgaatccggcaaatggatgcagtcaaaaggcgtgaagccagccgtaaaaccgacagaagcggtggcagtagcggaagaagaagccgaggtggtggcgacgctgtctgcggaaaactacgtcactattcttgatgagcagacgctgatcgaatggatcgacaagctgaaacaagcgccgctgtttgcgtttgatacggaaacggacagcctggataatatttctgccaatatggtgggtctgtcgtttgccatcgagcccggcgttgccgcctatgtaccggttgcgcatgattatctcgatgcgccggatcagatctcccgagaacgcgtactgacgttgctgaaacccctgctggaagacgagaatctgctgaaggtcgggcaaaacctgaaatatgaccgcggaattctggcgaactatgacattgagttacgcggtatcgcttttgacaccatgctggaatcctacattcttgatagcgtggcgggccgtcatgatatggacagccttgccgaccgctggctgaagcataaagcgattagctttgaagagattgcaggtaaaggta

SEQ ID NO: 256398 - DNA, 694 bp, Unknown
  Bacterial polypeptide expressing nucleotide sequence isolated from the Sargasso Sea
tatgtctacactattcgcggtagattccatggcagtcctctatagaggatattttgctatgatccgtactccgttgataaattcaaaaggcttgaacacaagtggaatcaggacttttttaatgcagttgataaagataattgaagaagataaacctgattatctggccgtggcttctgattcaatggagccaactttccgtcataaaaggttcccagaatataaagctactcgtgaaaaaatgccggaggatcttgttgatcaactcccatatcttccgaggttggtggaagcgcttaacctgccttacttgattcttccaggatacgaggcggacgacattgtgggtacactgatgaggctttgtcgtgaagctgaaatagaaggcgtgatggtaactagtgataaggattacatgcagttaatcagcgagaaaattgtaatgctgaaccaccgaaatgagctcataggaataagcgaagtggaagacaaattcagttgtgctcctgagcaggtcattgagatgctgggactgatgggggattcctcggataatattcctggagtaagaggagttggagaaaaaactgcggctaagctgatatcagattttggaagcatagaaggtgtttatgaaaatcttgatagagttaccagcaaaagcctaaaggaaaaactgaataatgatcaagaa

SEQ ID NO: 256399 - DNA, 918 bp, Unknown
  Bacterial polypeptide expressing nucleotide sequence isolated from the Sargasso Sea
gacttgaaaattgctaaattaaaaaaaacaaaaaaaggtagtttagctacaagtgcaaagattctagaagatcttgctttaacaggtcataagtttcctaacctagtcttagaatggagacaagtttcaaagcttaaaagtacatatactgatgctcttcaagaccatattaatgaaaaaacaaaaagagttcatacatctttccttcttgcagctactaacactggtagactggcatcaagtgatccaaatctacaaaatatacccatcaaaacttctgatggtaaagagattagaaaagcttttgttgcagaaaaaaataatactttaatttctgctgattataatcaaattgaaatgagaatacttgcagacgttgctgatgtgaaagagctaaaaaaagcttttaaagataatcaagatattcattctttaacagcaagccaaatatttaacttaccgataaataaaatttctgaagatcaaagaagaaaagccaaagcgataaatttcggtattatttatggaattacacaatatgggttagcaaagcaaatatcagtttcaaatgatgaagcacaagaatttatcgattcatactttaaaaaatttcctgaaattaaagattatatgcaatctactgttaaaagttgcagatctaaaggatatgttacaaatatttttggaagaagaattcatcttagaggtataaatgataaaaattttagtgttagaagctttcaagaacgagctgcaattaatgctcctattcaaggatctgcagctgatattattagattggcgatgattaatattgataaaattttatcaaaaaaccaaaaagcaaaaatgttacttcaaattcatgatgaattaatttttgaatgtttgaaatctgacgaacagaaagttaaaaaa

SEQ ID NO: 256400 - DNA, 731 bp, Unknown
  Bacterial polypeptide expressing nucleotide sequence isolated from the Sargasso Sea
aatgattattcttattgatggatttagtgttgcttttagagctttttatgctttgccagagagtttaatgacatctgacggaacccctaccaatcttattcatggatttctctcaatgattaacaaagtaataaacgaatataaatcagaacaaatgattgttacatgggatttgcctggaaaaacttttagaaacgatatatataaagaatataaatcaaatagatctccagcacctgataattttaaggtgcagatacctcttttacacgatttattagattcatttaatatccctcaggtctcggaagttggttacgaagctgatgacgtacttgggtctttagcaaaaaaatataatgataaaggtcaagaagtaatgatcgttacaggagatagagacactttccagttaatatcaaaaaatacaaaaatactttatacaaaaagaggaatatcggaaatagacatagtagatgaaaagttttttcttaataaatatggatttaaaacagatcaatatattgaatacttagcactaaaaggagatccatcagataacatacctggattagctggggtcggagaaaaaactgcaacatcattattgaaaaaatataaaacaatagagggaatctataaaaatttaaatgatttaacaccaaaaataaaaaattcatttcaagaaaataaagaaatgttaaaaacgagcaaagatttggcaactatta

SEQ ID NO: 256401 - DNA, 850 bp, Unknown
  Bacterial polypeptide expressing nucleotide sequence isolated from the Sargasso Sea
atggagggggcatatttgaacatagaaatacctctggccgggactctcgcagttcttgaaatgacaggaataaagctggatgttgaagagttgaataaagttgcactcgagtttgaaggacgcctaaatgatttacgtattaaaataactgaactgtcaggggaagaatttaatccaaattctgtcattgaactgcagaatattctatacgaaaaacttagactgcatgagaagttcaatattaaaccaaaaaaaatcaaacttggcaaccgaatgtccacggatgaggaaacattggaaaaacttgctgaggatgatttgcctcgcaccatcttggattatcgtacacttaacaaactgaaaaacacttatcttgatcagcttcctggatatgttcattcagatagcggtaacatacattcaacatttcatcaaaccggaacagcaacaggacgtctttcatcagaaaatccaaatttgcagaatattcctgtgcgttcaagtgaaggaagacgcgtacgtcgagctttcattgcatcaggaactgaaaagattctgatttctgccgattacagtcagattgaacttagagttgtagcacattattcaaaagacccaacttttctggatgcgtaccgtcaaaaccttgatattcattcactgacggcttcaaccatttttggtgttgaggaaaaagatgtgacacgtgagatgcgcgacagagcgaaagaagtcaatttcggactgatttatcgaatgggtgcagatagactgtcaatagtgaccaaaactcctaaagtggaggcaaaagaatttattgaacgttattttgagaaatacagcactattc

SEQ ID NO: 256402 - DNA, 769 bp, Unknown
  Bacterial polypeptide expressing nucleotide sequence isolated from the Sargasso Sea
aggtcggtttagctcaaccgatcccaatttacaaaacatccctatccgcaccgaagaagggcgccgcatccgtcaggcatttattgccccaccaggcaagaaaattgtggctgtcgattattctcagatagaattgcggatcatggcgcatctgtcgcaggataaagcattacttgaggcctttgcccacggacgggatattcaccgtgcaacggcggcagaagtttttggtgtggcgctggacgaagttacgtccgatcagcgacgtagtgccaaagctgttaatttcggcctgatatacggtatgtccgcatttggccttgccaaacaactcggcgttagccgcagcgaagcgcagcagtatgttgatcgttactttgaaaggttccccggcgttctggattatatggaacgtacccgcaagcaagcgcacgagtccggttatgtcgaaacattgtttggcaggagattatacttaccggagatcaatgcgcagaatatggcgcggcgaaaaggtgccgaacgtgctgcaatcaacgcacctatgcagggcactgctgcagatattatcaaaaaagctatgattgtcgttgataactggttacgccaacagactgaacctgctgcgacaatgataatgcaggttcacgacgaactggtatttgaagtcgatgcagataaggtctcgtcagttaagccgcaattggttgagttgatggccaaggcggcacagttagatgtgccgttgctggcagaagctggcgatggt

SEQ ID NO: 256403 - DNA, 730 bp, Unknown
  Bacterial polypeptide expressing nucleotide sequence isolated from the Sargasso Sea
gatgaagaaaccctggaaaaactttgtgaggatccccttcctcgggcgattctggattatcgttctctgaacaaactcaaaaacacgtatgtcgatcaacttcctgatcacgtgcattccaggtcagggcatattcattcgaggtttcaacaaacagcaactgcaacagggcgtctttcatcggataacccgaacatgcagaatatcccgatccgcagtgcagaaggccgacgaatccgggaagcctttgttccttctgattccagccgaattcttatttcagcggattacagtcaaattgaactgcgtattgttgcgcattattcgaaagacccgacctttctggaggcctatcgaaataatgaagacatccatgccctcactgcgtcaacgatcttcaaagtcccagtcgatcaaatcaaccgtgaaatgcgttccaaagcaaaggaggtgaatttcggtctgatttacaagatgggccctgagagactttccatcgtaacacaaactaacaagagcgaagcaaaagcattcattgagcgtttttttgaaaaatacagcaccatccatgcacttcaggagcggtttctcgcccaggctcgtaaggaagggtttaccacgactctacttggacgaagacgctatctacccgacattaatgcgaaaggaatgctgaaacgaatggctgagggcgcagcagtgaacacaccgattcagggctcagcagcag

SEQ ID NO: 256404 - DNA, 891 bp, Unknown
  Bacterial polypeptide expressing nucleotide sequence isolated from the Sargasso Sea
aattaagataattgaagaagataatcctgattatcttgcagttgcatcggattcaatggagccaacctttcgccataaaacatacccagaatataaagctactcgagaaaaaatgcctgaagatcttgttgagcaacttccttatttgcccaagctcgtagaggctctaaatcttccttatttgatccttccaggatatgaggcggatgacatcgtggggactttaatgaggctttgtcgtgaatctgaaatagatggggttatggttacaagtgataaggattacatgcagttaattacagagaaaattgtgatgcttaatcaccgtaatgagcatataggaatcagtgaagtagaggaaaaatttggctgcgttcccgaaaaggtggttgaaatgttagggttaatgggagattcatcggataacattcctggagtaagaggtgttggcgaaaaaactgcagtcaagttaatatctgaatttggaagcatagaaggtgtttatgaaaatcttgaaagagtcagcagcaaaagcttgaagttaaaactggaaatagatcatgaaaatgcctttctctccaaggaactagcaactattgactgtcatgtccctctatctgtcaaactggaggattttcatcttggacaaactgatttgtataataatgatgaattatatgatttacttgaagagcttgagttccgaacactaatgaatcgactgataaaaaagaggaaaaatgtttcaatgtctgatgaattgagacataaagatgatgaaaatagtaaaacataccaggagaataatcataatttgtccgctgcggaagaagaaactgatagttcatttctggaagtcgaatatattttaattcaaactgcagaacaatt

SEQ ID NO: 256405 - DNA, 834 bp, Unknown
  Bacterial polypeptide expressing nucleotide sequence isolated from the Sargasso Sea
tgctgaatattatcttaactacacaaccacaaaatatactgatgtaacaggaacagcctctaaacaaattagttttgcagaggtaaaaattgatgttgcaacagattatgcggcagaggatgctgatataactttaagactttttaatactttatctacattattaaaaaagaaaccaactcaagagaaattattaaaagaaattgaatatcctcttgtgcatgtactttcaagagtagagcaaaatggagcaaaaatagataagaacaaacttggaaaccattctaaagaacttggagaaaaaatttcagacctttctgcccaagctttcaaaatagctggagaggaatttaatcttgattccccaaaacaactcttagaaattttatatgaaaagcagggattaccagtattgagaaaaacacctaaaggacaaccatctactaatgaagagacacttcaaaggctatcagaggaatatgagcttccaaagataattctgcaatatcgaactttggcaaaactaaaatctacttatactgatagcttaataaatattgagaatcctaaaacacaaaggattcacacttcatatcaacaagctataacatcaacagggaggctttcttctacagagcctaacttgcaaaatattcctattaaaactgctgaaggcaggagaataagagaagcttttgttccagaaaaaggcaacacacttatttctgctgattattctcaaatagaattaagaataatggctcatttatcagaagataaaaatctcacaaatgcctttaataataatatagatgttcattcttcaaccgctgc

SEQ ID NO: 256406 - DNA, 805 bp, Unknown
  Bacterial polypeptide expressing nucleotide sequence isolated from the Sargasso Sea
ttcagatgttaccggaacagcatcaaaacattttagtttttctgaagtaaaactagaagttgcaactgactatgcatctgaagatgctgatataactctaagattgtataacgtactagcgccgatgctaaaagacaaaccaactcaagaaaagttacttcatgatattgaataccctttagttaatgttcttgcgagggtggaacaaaacggagcaaaaatagataagaacaaattatcaaagcattctaaagagttaagtaagaaaattgatgagctttcatctcaagcttttaaaatcgctggtgaagaatttaatttagattcaccaaaacaattacttgaaatactttatgagaaacaagggttaccagttttaaagaaaacaccaaaaggacaaccttcaactaatgaagatactttgcaacgactttctgaagaatataagttgccaaaaattatcttgcaatacaggacattggcaaaactaaaatcgacttatactgacagcctaataaatatagagaatcctaaaactgagagaattcatacctcctaccagcaagcagtgacctctactggaagattgtcatctacggaacctaatttacaaaatattccaattaaaacagctgaaggaagaagaattagagaggcttttgtgccagaaaaaggcaatgttttaatttcagccgattattctcaaattgaattaagaataatggctcacttatcgaaagatgaaaatttaacccatgcatttaataatgatatagatgttcattcatcaacagcagctgaagtt

SEQ ID NO: 256407 - DNA, 943 bp, Unknown
  Bacterial polypeptide expressing nucleotide sequence isolated from the Sargasso Sea
ggaattaaaatagatatcaaatctcttaaatctttatcatctaaatttgaaaaaaaaattgataagattcaaagagaagtttttaaattatcaaaaaaggaatttaatattgcctcacctaaacaacttggagaaattttatacaacgatcttaaaattgctgacctaaaaaaaaccaagaaaggaagttttgccacaagtgcatcagttttagaggatcttgctttcaagggtcataaattcccgcaattaattttggattggagacaactttctaaattaaagaacacatactcagattccttacccgaacatatgaatcctgaaacaaaaaggatacacacatcttttttacttgcagccactacaactggtagactggcatctagtgatccaaacttgcaaaatattccaattaaatcagaggatggtaaagatattagaaaagcatttatagctaaaaaagatcatttattaatttctgctgattataaccaaattgaaatgagaattttagctgatttagcagatgttaaagaattgaaaaaagccttcaaaaacaatgaggacattcattctcttactgctagtcaaatattcaataccgatattaaaaaagtgaatatagatcaaagaagaaaagccaaagctatcaattttggaattatttatggaatatctcaatatggattagcaaagcaaattaatgtatcaaattatgaagctgagaaatttttaaattcatattttgcgaaatttccagaaattaaatattacatggaacagacaataaaattttgcagaaagagtggatatgtaaataatatttttggtagacgttctcattttttgaatataaatgataaaaattacaacgttagaaattttcaagaaagagcagctataaatgcacctatacagggctctgcagcagagattatga

SEQ ID NO: 256408 - DNA, 816 bp, Unknown
  Bacterial polypeptide expressing nucleotide sequence isolated from the Sargasso Sea
cctttagagccggtattgtctcaaatggaaatgaatggcataaccatcgacatcccttatttagataaactctcaaaagaactaaaaagtaccttagaagatattcaaagtaaagtttatgaattagcaaaggaaaattttaatctatcttcaccaaaacaactcggtgagatcttgtttgaaaaattaaatttggataaaaagaaatcacggaaaacaaaaacaggatggagtacagatgcagtagttcttgagcgattaatcgacgaacatgaaataatccaacatttaataaaacatagaactcttagcaaactacttagtacttatattgatgcccttccaactcttattaacgaaaagacaggaagagttcatacaaactttaatcaagctgctactgcgactgggagactaagcagtagcaatcctaatcttcaaaatatcccagttaggactgaatttagtaggagaatcagaaaagcattcttgcctgaaaaaaattggaaacttttatcagctgattattctcagatcgaattaagaatacttgctcacttagcggatgaagaaatactaattaatgcatttcataaaaatgatgacattcattctttgactgcaagattaattttcgagaaagaagaaatatcatcggacgaaaggagagttgggaaaacaataaattttggagttatctatggtatggggataaaaaagtttgcccgttcaacaggagtaagtactccagaggcaaaagaattcctaataaaatacaaagaaagatattcaaaaattttcaaatttcttgaactc

SEQ ID NO: 256409 - DNA, 856 bp, Unknown
  Bacterial polypeptide expressing nucleotide sequence isolated from the Sargasso Sea
tgaagatgctgatattacttttcaattaaaagagcattttcaacccatattagaaaaagtaggtactaaaaaactatttgatgaaatgaaaattcctttagtagaagttcttgcagacatggaaaaagaaggaatcaatttagatgttgattttttaaaaactatgtcaaaacaattagcagaagaaagcaatactttagaacaaaagatatatgaaattgctggagaaactttcaatttagcttctcctaaacaattaggagatatattatttgacaaacttaaaattggaggagccaaacaaaagaaaaccaaaaccggtcaatatgcaactggtgaggaaattttaagttatttagcaaaagacaatgaaattgttcaaaatattctagaatggaggcagttagttaaattacaaaacacttatgttgatgctttgcctaaccaagtaaatgctagtactggaagagtgcacacagattatatgcaaactgttgctgctactggacgattaagttctaataatcctaatttacaaaacattccaattcgaacagaaagaggaagacaaataagaaaagcgtttattgcacgtgatgaaaattacatcttattagctgccgattattctcaaatagaacttagaattattgcagctttatctggtgaagaaaacatgataaaagcgtttcaaaacaatgaagacattcaccgatctacagcttcaaaagtttttaatgtacctttagaagatgttacaaaagaacaaagaagcaatgccaaaactgttaattttggtattatttatggagtttctgcctttggtttaagtaatcaaaccaatttatctagaaaa

SEQ ID NO: 256410 - DNA, 328 bp, Unknown
  Bacterial polypeptide expressing nucleotide sequence isolated from the Sargasso Sea
atggccacaacttcaacaggaagattagcttcctctgatccaaatcttcaaaatattcctatccgaagtgatgatggcagaatgataagaaaagcctttattcctgaaaaagggaatgtattaataagctctgactacagtcaaattgaacttaggttaattgctcatattgctgacgagaaaaatttgattaatgcctttcttgatgaaattgatattcattcatctacggcctctgaagtttttaatattccattaaatgatatgacacctgatattagaagaaatgcaaaagctattaactttggtataatttatggtatttcag

SEQ ID NO: 256411 - DNA, 910 bp, Unknown
  Bacterial polypeptide expressing nucleotide sequence isolated from the Sargasso Sea
aaatcaagataagattgttggacagaatctaaaatttgatatcccattattatcaagacacggtattaacataacaaagtttttggcagacacaatgttaatgtcatatgtattaaatagcacagccacaagacatggcatggatagactcgctgattattatttaaactatacaactacaaaatacaccgatgtaactggaactgcctccaaacaaataagttttgcccaagttaaattagatgtagccactgattatgctgctgaggatgcagatattactttaagactatataacgtgttatctccattgctaaaagaaaagcccattcaggaaaagttactcgaggatcttgaatatccgcttgttcatgttttatcaagagttgagcaaaatggtgcaaaaattgataagaaaaaattagctaaccactctaaggagttgagtgaaaagattgatgaattatcttctgcagcctttaagattgctggtgaagaatttaatttagattctccaaagcaacttctagaaatactatatgaaaaattaggattacctgtgctaaaaaaaacacccaaaggtcaaccatctacaaatgaggacacgcttcaaagattatctgaagaatatgaattgccaaaaattattctgcaatataggacgctagcaaaattaaagtctacttatacagatagtttaataaatattgaaaatcctaagacaaaaagaattcatacatcatatcaacaagccgtaacttcaactggcaggctgtcatctactgaaccaaatttacaaaatatacctataaaaactgctgaaggcagaagaattagagaggcttttgttcctgagaaaggcaatatattaatatcagcagattactctcaaatagagcttaggataatg

SEQ ID NO: 256412 - DNA, 865 bp, Unknown
  Bacterial polypeptide expressing nucleotide sequence isolated from the Sargasso Sea
ccgtggatcgttcagatgtggcaggatcagggcgaagcaaagttctgttttactgaagttccgctagaagcagctagcgagtacctatgctctgctgtcgacctggctgggcggctcgcgaaccatcttgctgagaaagtggagcaggtaggcttaacaaaactgcttaccgatcttgagatgcggctggtcccaatgctgagtcggatggagctgtccgggattgctattgacgatgagttttttcagtcgatgcgagggaggctcaagcgtgaactggacctgatcgagtccgaaatttttcaactggctggtggtgagttcaacctgaactctacacagcaacttcgtcaggtcctgttcgataagcttgaaatgccggtactaaagaagaccaagacgggcccatccacagacgcctcggtccttgaggagcttgcttccatggggcacgatattccgcgtctgatgatggagtatcgagagcttgaaaagctccgatcgacctatgtcgaagctctgccacagcttgtgaatcctagttctggaaggatccacacgtgcttcaatcagaccgttgccgcgacgggaaggctctcgtccagcgccccgaacctgcagaacatcccgattaggactgatcttggccgcgagattcgaaaagggtttgttgcctcacccggtaacgtttttctcgccgtggactattctcagatcgaacttcgtgtgatggcgcacttctctgaagacagcgcttttgtgatggcattcaagcaggggattgatgttcacagacaaacggcttctgtaatctttgatgtccctgtagacgaagtgagcggagggatgcggcaccaggccaaaa

SEQ ID NO: 256413 - DNA, 417 bp, Unknown
  Bacterial polypeptide expressing nucleotide sequence isolated from the Sargasso Sea
aatttcctgaaattagagactatatgaacactacggtggagacagcaaagaaatctggctttgtaaccaccttgttcaatagaaaaattcatttaccaaacataggtacaaaaggtccacttggtggctttgcggagagggctgctataaatgctccaatccaaggtagtgcctcagatataattaaaagagctatgattaaaatacatgagtttctgaaaagttccgaactagatgctgaccttttattgcaagtgcatgacgaactaatttttgaaactaatgatgactctattgatgaaatacaaaaaaaagcctctgaaattatggaacaagcaacactaccatatttagatctggacgtacccctgaaggttgaaggagggcatggaattaattggtctttggctcattgaa

SEQ ID NO: 256414 - DNA, 903 bp, Unknown
  Bacterial polypeptide expressing nucleotide sequence isolated from the Sargasso Sea
aatccccattcacgtagctactagttacgcaggtgaggatgcagacataactttgaggatatgggagattttaaaaattaagctagtagaacaatctgtatattctgtctatcacaatttagacaaacccatgatatcggtattactaaaagcggaactggagggaataaaagtagatcaaccccaactgaaaaggctctcaaaatattttgagatgaaaatcaatgaattggaaaaagaaatttttaaagaaagcaatcaagagttcaatattgggtcaccaaagcaactaggtgatatactatttaaaactcttgggttgcctgatggaaaaagaaataaatcgggtgcttttcaaacaagcgctgatattcttgaacaactttcaataaatggacacgcaatcgcaacactcgttttagaatggcgaaaaatatccaaattgaaatcaacatatgcagactctttgaggtcacatgtaaacccccaaacgggaaggattcatacttcatataatctagctggaacttcaactggaagattgtcttcatcggatcccaatcttcaaaatatcccaattagagatgaggaaggaagaaaaattagagaagccttcatctcaaagcgaggatcagttttattgagcctagactacaaccagatagaattgagaattttagctcatatagcagacgtcaaggagctaaaaaatgcattcaaaaaaaatatagatattcactccagtaccgcttctcagatttttggcgtttctctagaaaaagtcgattcgtctctccgcagaaaagcaaaagcaatcaatttcgggattatatacggcatttctgcttttggcctagctaataacctaaaaattccccgtagtgaggcaaaaatgtttattga

SEQ ID NO: 256415 - DNA, 385 bp, Unknown
  Bacterial polypeptide expressing nucleotide sequence isolated from the Sargasso Sea
gagcgcgtaattccgaaaaatgccgacaagtccgtcatcggtgagcgcgcggaattaaagcaggcattcacccgcactgcgattttatccaacgaaaaatatcgtggcgtgcgtttaaagctggctaatgacagccttgatatcacagcaaataaccccgagcaggagcaggcagaagaagtggttgcggtggaatatagcggtgccgaattggagatcggtttcaatgtcagttacctgctggatgtcctttcagtgttacaccagccgcgggtccgattgtctctgtctgatgaggccagttcggcgttgctggaacatgcagagccgcctgctgagcaggagcccgagcgactgtatgttgtcatgcccatgcggctctgaa

SEQ ID NO: 256416 - DNA, 691 bp, Unknown
  Bacterial polypeptide expressing nucleotide sequence isolated from the Sargasso Sea
attgataaaaaaaactaaaaataccgatattcaattctgtagagattgcctacatcaaacaaaaaaattaagtgatttatgcggtaaatgtttatctccaagagttattaatcataaagaattaaaaaatttatcgatagctcatatagattgtgatgctttttatgcttctgtagaaaaaagagataacgctgatttaaaaaacaaacccctgatcataggtggtggagatagaggtgtagtttcaacagcttgttatattgcgagaacaaaaggtattcactctgcaatgcctatttttaaagcaagaaaattatgcccagaagcaataattttaagaccaaatatgagtaaatataagaaagtaagctatgaaataagggatttaatgaaagagcttaccccgcttgttgaaccaatatcactagatgaagcatttctagatttatcaggaacatttaagttacatcagaaaataccagctgtattgttagctgaattagttaataagataaaaaagcatgtaggaattaacgtttcagttggattatcatacaataaatacttagcaaaagtatgttcggatttagataaaccaaaagggttttcagtgattgggcaagaagagtcaaaagattttttatccaataaacctgtaagtttattatggggtgtaggtaaaaaattcaaa

SEQ ID NO: 256417 - DNA, 849 bp, Unknown
  Bacterial polypeptide expressing nucleotide sequence isolated from the Sargasso Sea
ggatcaacgaagcaacttggtgaaataatgtacaacgatttaaaaatagcagctttaaaaaaaacaaagaaaggaagttttgctactagtgcttcagttttagaggacttagcttttaaaggttatgaatttccaaaactcatcttggaatggaggcaaattagtaaacttaaaaatacttactcagattcattgccagaacatataaatcaaaatactaaaagagttcatacatcttttttgttagcagctactacaacaggtagacttgcatctagtgatccaaatttacaaaatattccaataaaatcagatgatggcaaggatataagaaaagcgtttgtttctgaaaaaaataataaattgatttccgcagactacaaccaagttgaaatgagaattttagcagatttagcagatgtaaaacagttgaaaaaggcgtttttaaataatgaggatattcatactttgacagctagtcaagtttttggaaaagaaataaataaaattgattctgaaacgagaagaaaagcaaaagcaatcaactttggaattatttatggcatatcacaatatggtctagccaaacaaatcaatgtttcaaacaatgaagcagaagaatttttaaattcttattttaaaaaatttccagaaattaaagattatatgagaacaactgtgaatttttgtagaaaaagtggctatgtaagcaatatatttggaagaaaaacacatctcactggaattaatgataagaattttaatgtaagaaattttcaagagagggcagcgataaatgctccaattcaagggtcagcatctgaggtaatgagattagcaatgatcagg

SEQ ID NO: 256418 - DNA, 872 bp, Unknown
  Bacterial polypeptide expressing nucleotide sequence isolated from the Sargasso Sea
ttataaatttccacaattggttttagactggagacaggtttctaaattaaagaatacttattccgactctttgcctgaatatatcaatcctgacacaaaaagagtacatacatcatttttattagcagcaactacaacaggacgtttggcatcgagtgatccaaatttacaaaatatcccaattaaatctcaagatggtaaagatattagaaaagcatttatagctgaaaaagatcatattttaatttctgctgattacaatcaaatagaaatgaggattttagctgacttagctgatgttaaagaattaaaaaaagccttcaaaaataatgaggatattcattcattgactgcaagtcaaatatttaacgtcgatataaaaaaaataaatcaagatcagagaagaaaagcaaaggctataaattttggaattatttatggaatttctcaatatggattagctaaacaaattaatgtatctaattatgaagccgaggaatttctgaattcatatttttcaaaatttccagaaattaaagtttatatggatcagacaattaaattttgtagaaagagtgggtatgttaataatatatttggaagaagatcacactttttgaatataaatgataaaaactataatgtgagaaactttcaggaaagagctgcaattaatgcacctattcagggatcagcatcagaaataatgaggttagctatgattaggttagaaaaaaaattaaacgataaaaagaataaaaaaacgaaaatgttattacaaattcatgacgaactaatttttgagacacataaagatgaagtaaaaagaatcagtaaaataattattgatgagatgtccagtgtagccaaaa

SEQ ID NO: 256419 - DNA, 853 bp, Unknown
  Bacterial polypeptide expressing nucleotide sequence isolated from the Sargasso Sea
ccaatgattaaattattatctaaattagaaatgagtggaattaaaattgatgatctttatttaaaaaaattatcaaaaaaatttgaagaaagattaatgaaaaaagaaaaagaaatttacaaaacttcaggcaaagagttcaacataggctcccctaaacaattaggagagataatttataatgatttaaagattgcaaaacttaaaaagacaaaaaaaggcagccttgcaactagcgcaaaagtgctcgaggaccttgccttaacaggccataaatttccaagacttgtaatcgaatggagacaagactctaaattaaaaagcacttatactgatgctttacaagaccacataaacaaaaaaactaaaagggttcatacttcattcttattagcagccacaaatactggtagacttgcatcaagtgatccaaatttacaaaatattcctattaaatccgctgacggtaaagaaattagaaaagcgttcatcgctgacaaaggcaatatacttatttcagctgattataatcaaattgaaatgcgaatacttgctgatatggctgatgtaaaagaactaaaaaaagcctttaaaaataatgaggacatccattccttaacagcaagtcaagtttttggtgttcccattaataaagtaaatgaagatttaagaagaaaagcaaaggcaataaattttggtattatttatggaataactcaatatggtttagcaaaacaaatttcagtttcaaatcaagaagcacaagattttataaatcaatactttaaaaaatttccagaaatcaaagattatatgagcagtacaataaatttttgtagaaaaaatggatatg

SEQ ID NO: 256420 - DNA, 955 bp, Unknown
  Bacterial polypeptide expressing nucleotide sequence isolated from the Sargasso Sea
atgtctttttttgttaacaatggtttaacaaaacataacttagaggatttgtattattactattttggagaagaaaaagaaaagttcaaagatgttataaaaaatgagtccaagagaaaatataaagatttttctgaagtgccattagaagctgctacaaattatgctgctcatgatgcatatgccacttttaaattatatgaaactctcaatgagcagatagctgagtccttagatagttggatttattatgatattgataaaaaactaagtttagttcttcaagaagtagagaacactggttgtaaaattgatttaaaatttttaaataaactagaaaaagatctcaacaaagagatcgataaaattgaacagaaaatatttaagattgctggtgaagaattcaatattggatccccaaaacaattaactgaaattttcaagaaattagacattaaagtcacaaagaagactaaggcaggagactttcaaacaaatgtgaaagtattagagcagttagagtctgaagatgttgaaatagcctcacatattttgcaatggagacaatactctaagcttgtttctacctacacctcatcattagctgatcacgcagataaaaaagacagggttcatagcacatttaatattgccgcaaccataacaggacgactaagttcatctgaacctaatcttcaaaacatcccaatcagaactgaaattggaaaaaagataagaacagcctttatagctgaaaaagatcacgagctttatagttttgactactcacaaattgaacttcgagttttatgtgaggcgtgtgaagacccaaatttattgaaagctttccaagaagatcaggacattcatgaaagtacgggccaattagtttttaataaaaaaataattaacgataatgacagaaggatggccaagattatttattttggaataa

SEQ ID NO: 256421 - DNA, 823 bp, Unknown
  Bacterial polypeptide expressing nucleotide sequence isolated from the Sargasso Sea
atccgatggccctgaagacaccttccgccacatacgatatccagaatacaaggcaacccgtgaaaaaatgcctgaagatttggtggagcaacttccctatttacctcgagcgatgcaagcgctcaaactgccctatttgcttatccccgggtatgaggcagacgacatcatcggcactttgatgagcttatgccttaataacaacattcgtggagttatggtcaccagcgacaaggattacctccaacttgttactgaaacaaccgaaatgctgaatcataaaaacgaaatcgtggggttgagcggggttcaggaacgtttcggttgccttcctgatcaagtaatcgaggtgcttgggttaatgggtgacagttcagacaatatccccggagtccgtggtgtcggggaaaagaccgcaattaagctgatccagcaattcggcagtattgaaaaggtctatgaaaatcttgaagaggttcctggtaaaagtcttaagtccaaacttgaagaggggcatgatcaggccatgctctcaagggaactggtaaccatccatcgtgaggtaccacttgagatcgatctggaagacttacgactggaccaaacctcattgtctgaaaataaagaattcctggatcttcttcaagaattggaattgaacaccctcctcaggaggattacagaaggatccgtttcttcccaaaaacaagtttcttcggggagtcctgaacaagccaagaacaaaccactgtcgcaggccgttcagctagaattgttagaagaaccctctgccagaacccagaaagcaattctctcccacaca

SEQ ID NO: 256422 - DNA, 754 bp, Unknown
  Bacterial polypeptide expressing nucleotide sequence isolated from the Sargasso Sea
gcctgagaaagattggaaacttttatcagctgattattctcagatcgaattaagaatacttgctcacttagcagatgaagaaatactaataaatgcatttcataaaaatgatgacattcattctttgactgcaagattaattttcgagaaagaagaaatatcttcttctgagaggagagttgggaaaacaataaatttcggagttatctatggtatgggtataaaaaagtttgcacgttctacaggagtaagtactccagaggcaaaagaatttctgataaaatacaaagaaagatattcaaaaattttcaaatttcttgaactccaagaaaggcttgccttatcaaaaggttatgtaaaaacaatttttggtcgaaaaagagaatttaagtttgataaaaatggacttggaaggttaatagggaaagatccttatgaaattgacttgcaatccgcaagaagggctggtatggaggcacagtcattaagagctgcagctaatgcacctatacaaggttctagtgcagatattattaaaattgcaatgattcaactaaataagaaattcagagaaatgaatgttccagcaaaaatgcttttacaagtacatgatgaattgttgtttgaagttgaaccagattctttggaaattacgacgaaattagttaagaatattatggaagattgtgtaaaattaaatgtacctcttttagttgatattggagttggagacaattggatggagacaaaataa

SEQ ID NO: 256423 - DNA, 865 bp, Unknown
  Bacterial polypeptide expressing nucleotide sequence isolated from the Sargasso Sea
cctaatttagttttagaatggcgacaggtttcaaaactaaaaagcacttacacagatgctttgcaggatcatataagtaaaaaaacaaaaagagttcacacttccttcttactcgcagcaactaatactggtaggctagcttcaagtgatccaaatctacaaaatattcctataaaaacctcagatggaaaagaaataagaaaagcctttgtagctgataaaaataatttacttatttcagcggattacaatcaaatagaaatgagaattcttgctgatatggccgatgtcaaggaattaaagagagcttttaaaaataatcaggatatccactctttaacagcgagccaagtctttgatgttccaattaccaaagtgacagatgattttagaagaaaggcaaaggccatcaattttggaattatttatggaataacacaatatggattagcaaaacaaatatcggtgtcaaacgaagaagctttaaatttcattaattcatattttaggaaatttcctgagataaaagattacatgaatactacaattaaaacttgcaggaagcagggttttgtcacaaatatttttggtagaagaattcatttaagaggaattaatgataaaaattttagcgtacgtgcctttcaggaaagagcagccattaatgctccaatacaaggttcagcagcagatattattagattggcaatgataaaaattgataaggttctagacgaaaaaaagaaggcaaaaatgcttttacaaatacatgatgaacttatttttgagtgtttaaaaaaagatgagaatgaagtaaagaagattgtaaaagaagcaatgacttcaatttcaagttcagatcatc

SEQ ID NO: 256424 - DNA, 838 bp, Unknown
  Bacterial polypeptide expressing nucleotide sequence isolated from the Sargasso Sea
aagcaaaagggtgcatacaaactatcatcaaacaggaactacaacagggcgtcttagttcttctggacctaatttacaaaatattcctatacgcagcctacaggggagattaattcgtactgcttttgtggctcctgaagggtgggttttagtttcggctgattattctcaagttgagttacgcattcttgctcatttagctgaggatgaaaacttgatttctgcttttaggtcgggacttgatattcaccgagcaactgctgcacaaatgtttgctaagcgtccagaggaggtaagtgatgatttgcgtgctcaagctaaagctataaattatggaattatttatggcatggggccgcaacgtttatcacagactacaggctgtagctttcaagaagcaaaaagttttattgagaaatattttgataatttttcaaatatccgaggttttattgaaagttctgttcaaaaagtagaggagtgttcttacagtgagacattatttggacgcaggagaaatattgatggccttgatggtcggttaggaaatttagcgcttgcaaacgcaaaaaatattgcagttaattctcctattcaaggaacagctgctgatcttatgaaattagcaatgataaaagttgatcataaaataaaagagttaaaacttgaggcaaagatgttactacaagttcatgatgaacttgtttttgagtgtccacgtagtgaacaaaatcaagttattaatttattaaaagatgaaatgcaaaatgtagctaaacttaaaatttcattggacatcgaagttggagctggtaataactggcttgaggctcattaa

SEQ ID NO: 256425 - DNA, 739 bp, Unknown
  Bacterial polypeptide expressing nucleotide sequence isolated from the Sargasso Sea
ttctcagaaataccaataaatctagcaacaaaatatgctgcagaggatgccgatattacatttagattatggaaaatatttagaccaatgttgtcagaaaaaaaagtgtctgcaatttataataatatagaaattaatttgatttcagtattagctaagattgaaatgaacggaattcgaattgatgaaaatatactttcaaatttatcaactcaatttttgaataaattaaatttgttagaagaaaaaatttatcaactttctaaagaaagatttaatattggatcaccaaagcaattaggtattatgttatttgagaagttggggttcgaaggtggaaaaaaaggaaaaaatggtacttattcaactgatgttgatgtattagaatcattagcttcaaaaggccacaattttcctgaatatgttttagaatggcggcaactttcaaagttaagatctacatatacggaatctcttcaaaatcatattaaaacaaaaactagaagagtacatacctcattcctttcttctggcgccactacaggcagattgtcttcatctaatccaaatttacaaaatattcctataagaactgaagatggtaaaaaaattagatctgcttttatcacagataaaggaaaaaagttggttagctttgattatagtcagattgagctaagaattttagctcatatagcaaaaattaagaatttaattaatgcatttaaagatggacaag

SEQ ID NO: 256426 - DNA, 829 bp, Unknown
  Bacterial polypeptide expressing nucleotide sequence isolated from the Sargasso Sea
gaaaagttcaaagatgttataaaaaatgagtccaagagaaaatataaagatttttctgaagtgccattagaagctgctacaaattatgctgctcatgatgcatatgccacttttaaattatatgaaactctcaatgagcagatagctgagtccttagatagttggatttattatgatattgataaaaaactaagcttagttcttcaagaagtagagagcactggttgtaaaattgatttaaaatttttaaataaactagaaaaagatctcaacaaagagattgaaaaaattgaacagaaaatatttaaaattgttggtgaagaattcaatattggatccccaaaacaattaaccgaaattttcaagaaattagatatcaaagttacaaagaagaccaaagctggagattttcaaacaaatgtgaaagtattagaacagttggagtctaaaggtgttgagatagcctcacatattttgcaatggagacaatactccaagcttgtttctacctatacctcatcattagctgatcatgcagataaaaaagacagggttcatagtacatttaatattgccgcaaccataacaggacgactaagttcatctgaacctaatcttcaaaatatcccaatcagaactgaaattggaaaaaagataagaacagcctttatagcagaaaaagatcatgagctttatagttttgactactcacaaattgaacttcgagttttatgtgaggcatgtgaagacccaaatttattgaaagctttccaagaagaccaggacatacacgaaagtacaggccaattagtttttaataaaaaatcaa

SEQ ID NO: 256427 - DNA, 859 bp, Unknown
  Bacterial polypeptide expressing nucleotide sequence isolated from the Sargasso Sea
ccaaagttaattttagactggagacaggtttcaaaattaaaaaatacttattctgactctttaagagagcacataaatcctaaaacaaatagagtgcactcgtcttttttattggcagcaacaacaactggaagattagcttccagcgacccaaatttacaaaacattcctatcaagtcagaagatggaaaagaaattagaaaagcttttgttgctgaaaaaggttttacacttatttcagcagactataatcaaatagaaatgagaattttagcagatcttgcagatgtaaaagagcttaaaaaagcttttaaaaaaaatgaagatattcattctttaacggccagccaagtttttaatgttgacattaataaagttgatcaaaatacaagaagaaaagcaaaagcaattaattttggaattatatatggtatctcacaatacggattagcaaaacaaattatggtttcaaacgttgaggctgaaagttttttaaattcatattttttaaaatttccagagattaaggactatatggaaaagactattaaattttgtagaaaaactggttatgtaaataatatatttggaagaagatcgtatatttctggaattaatgataaaaattataatattagaaattttcaagaacgtgcagctataaatgccccaatccaaggttctgctgctgaaatcatgagacttgcaatgattagattgaataaaaaaattaaaaacatcaaaattaaaatgcttttgcaaatacatgatgagctaatttttgaagttcctaataatgatgtaaaaaatttatgtgagataattaaagaagaaatgattagtgttaaagaccagtgat

SEQ ID NO: 256428 - DNA, 887 bp, Unknown
  Bacterial polypeptide expressing nucleotide sequence isolated from the Sargasso Sea
actggcagatcgcgtgctgcaactgaagaccatcacctacgaagaggtgtgtggcaagggggcctcgcagatcggctttgacgaagtgccgctcgaccgcgcgaccgaatacgccgccgaggatgccgacatcacgctgcgcctgcaccgcgcgctgttcccgaaggtggcggctgacgacaagctggactacgtctacgagcagatcgaaatgccgacctccatcgtgctgcagaagatggagcgcaacggtgtgctgatcgacggcgagcgcctcgccaagcagagcactgaaatcggccagcgtctgctggcgcttgagacggaggcgcacgcgctggcgggccaaccgttcaacctgagctctcccaagcagatcggcgagatcttcttcaatcagatgaagctgccgatcgtcaagaagaccgccagcggcgcgccatcgaccgacgaagaggtgctgcagaagctggcggaggattacccgctgcccaagctgctgctcgactaccggggcctggccaagctcaagtccacctacaccgacaagctgccgaagatggtcaacccgaacaccggtcgggttcacacgacttacgggcaggccacggctgtcaccgggcgccttgcgtcaaccgatccgaacctgcagaacattccagtgcgcacggaagagggccgccgcattcgcgaagcgttcatcgcgccggaaggcagcgtgatcgtctcggccgactattcgcagatcgagctacgcatcatggcccatctgtcgcaggatgaaggcctgatgcgtgccttccaggaaggccaggacgtgcaccgcgccacggccgccgaagtgttcagcgtgacgccgttggaggtcacggctgaccagcgccgcg

SEQ ID NO: 256429 - DNA, 880 bp, Unknown
  Bacterial polypeptide expressing nucleotide sequence isolated from the Sargasso Sea
gtggtggacttgcaaaatgtgctttatgaaaaattcaaacttcatgagcgtttcaaagtcaaacccaggaaaatcaaactgggtaacggcatgtctactgatgaagaaaccctggaaaaactttgtgaggacccccttcctcgggcaatcctggattatcgttctctgaataaactcaaaaacacgtatgtcgatcaacttcctgatcacgtgcatccaaggtcagggcatattcattcgaggtttcaacaaacggcaactgcaacagggcgtctttcatcggataacccgaacatgcagaatatcccgatccgaagtgcagaaggccgacgaatccgggaagcctttgttccttctaattctaaccgaatccttatttcagcagattacagccaaattgaactacgtattgttgcgcattattcgaaagacccgacttttctggaggcctaccgaaataatgaagacatccattccctcaccgcttcaaccatcttcaaagtcccggtcgatcaaatcacccgtgaaatgcgttccaaagcaaaggaggtgaatttcggtctgatttacaagatgggccctgagaggctttccatcgtaacacaaactagcaagagcgaagcaaaagcattcattgagcgtttttttgaaaaatacagcaccatccatgcacttcaggagcgatttctcgcccaggctcgtaaggaagggtttaccacgaccctacttggacgaagacgctatctacccgacattaatgcgaaaggaatgctgaaacgaatggctgagggcgctgcagtaaacacaccgattcagggctcagcagcagaagagatcaaactggccatgatcaagattcagcaagaattacaaaaccaga

SEQ ID NO: 256430 - DNA, 761 bp, Unknown
  Bacterial polypeptide expressing nucleotide sequence isolated from the Sargasso Sea
tttacaaaatatacctattaaaactgaagaaggtagaaaaattagacaagcttttattgctgaaaaggatagttgtattatttcagctgattattcccaaatcgaactaagaatcatggcgcacctttcaaaggatattaatttaaattcagcttttactgacggaaaggatgttcattcagccacagccgcagagatatttgaggtagatattaataatgtaacaggcgaccaaagaagaaaagctaaagccattaattttggtctaatgtatggtatgactgcttttggacttactagacaattaggtatttctagaaatgatgcacaaatgtatttggattcatatttttcaaaatatgacggggttttaaagtatatgaatgaaattagagagcaagctagaaaaaaacattacgtagagaccatttttggaagacgggttcatgttccagaaataaattctggtaatggattacgtaaaaaagcagctgaaagagctgcaattaatggccctcttcaaggatcggctgcagatattatcaaaaaggctatgttggatgtaaatcaatggatacaagaaaattcttctattaagatgattatgcaagttcatgatgagctcgtttttgaagccgatgaaaattttaaagattcatgttgcaagagtataaaagaaatcatggaaaaagctgttactcttgatgtgcctcttgttgttgacatcaatcatggcaataactggaacgaagctcactaat

SEQ ID NO: 256431 - DNA, 673 bp, Unknown
  Bacterial polypeptide expressing nucleotide sequence isolated from the Sargasso Sea
aacttttaagattgtcaaaatttttaaagaaagattttcaaaagaaaaagatgaattaatcaaattgttcaaagaaatcgagctgcctttagagccggtattgtcccaaatggaaatgaatggcataaccatcgacatcccttatttggataaactctcaaaagaactaaaaagtaccttagaagatattgaaagtaaagtttatgagttagcagaggagacttttaatctatcttcaccaaaacaacttggtgagatcttgtttgaaaaattaaatttggataagaaaaaatcacggaaaacaaaaacaggatggagtacagatgcagtagttctggaaagattagtcgacgaacatgaaataatccaacatttaataaaacacagaactcttagcaaattacttagcacctatattgatgctcttccaaatcttattaacgaaaagacaggaagagttcatacaaactttaatcaagctgctacagcgactgggagactaagtagtagtaatcctaatcttcaaaatatcccggttaggactgaatttagcaggagaatcagaaaagcattcttgcctgaaaaaaattggaaacttttatcagctgattattctcagatcgaattaagaatactcgctcacttagcggatgaagaaatactaataaatgca

SEQ ID NO: 256432 - DNA, 844 bp, Unknown
  Bacterial polypeptide expressing nucleotide sequence isolated from the Sargasso Sea
tgacaccttgttagcagactaccttcttaataatcatgagaagcatgggttaagtgaaattagttttagattatttggatttaagcccccttcatttaaggaaacagttgggaagaataaagacttttcgtttgttgatattgatgaagcaagtatttactgcggttatgatgtttttctgacttttaagattgtcaaaatttttaaagaaagattttcaaaggaaaaagatgaattaatcaaattattcgaagaaatcgagctacctttagagccggtattgtcccaaatggaaatgaatggcataaccatcgacatcccttatttggataaactctcaaaagaactaaaaagtaccttagaagatattgaaagtaaagtttatgagttggcagaggagacttttaatctatcttcaccaaaacaacttggggagatcttgtttgaaaaattaaatttggataagaaaaaatcacggaaaacaaaaacaggatggagtacagatgcagtagttctggaaagattagtcgacgaacatgaaataatccaacatttaataaaacatagaactcttagcaaattacttagcacctatattgatgctcttccaaatcttattaacgaaaagacaggaagagttcatacaaactttaatcaagctgctacagcgactgggagactaagtagtagcaatcctaatcttcaaaatatcccggttaggactgaatttagtaggagaatcagaaaagcattcctgcctgaaaaaaattggaaacttttatcagctgattattctcagatcgaattaagaatactcgctcacttagcggatgaagaatactaa

SEQ ID NO: 256433 - DNA, 793 bp, Unknown
  Bacterial polypeptide expressing nucleotide sequence isolated from the Sargasso Sea
tgatattacatttcaattaaaacaactatttgagcctcaaattaaagaagagcatttgaaaagcctattctacaacatggaaatgcctcttgtttttgtacttaaagaaatggaggagcaaggaataaatattgatgcagaatcattacaaaaatactctagtgcattagaaaaggacctccttgttcttgaaaaagagattaagtctatagctgaggaagactttaacatagactccccaaaacaacttggtgaaatattatttggcaaattgaaaattgatccaaaagcaaaaaaaacaaaaactggacagtttgcaacttcagaggcagtgttgattaaattaaagaaaaagcaccctataattgaaagcatattagactacagacaacttagaaaacttaaaaacacatatgttgacccactgcctgaattaagagattctaaagaccatagaattcacactcactttatgcagaccgtaacggcaacaggcagattaagctccaatcatcccaaccttcaaaatattccaataaaaacagaaaaaggaagggagattagaaaggctttcgttccaagaaatgaaaatttccttttaatggcagcagattattctcaaatagaacttagaattattgccgctcttagtgaagacaaaaatatgattcaagcttttcaggatggtttagatatacattcggcaacagctgcaaaagtttttaataccaaaatacaagatgtaacaagggaagaaagaggtgctgctaaagccgttaattttggaattatt

SEQ ID NO: 256434 - DNA, 920 bp, Unknown
  Bacterial polypeptide expressing nucleotide sequence isolated from the Sargasso Sea
gctgaagatgcagaaattacttttaaattgtatctttttttaaagaaaagagttaaccaggaaagaggtaattacatttatactaacattgaaagagaactaataaatccaatccaatcaatggagattaatggaattaaagttgataagaaatatcttagtgatttatcaattaaattttcgcaaagaatagaaaaacttgagaaacaaatctacaaagaaacaggctcagaatttaacattggttctccaaaacaattatcagagatcctttttgataaattaaaacttaagcctccgaaaaaaactaaaactggtgaaaaatcaacgggcattgaagttttagaagaccttgcatatgaaggaaataaagttgccgacaatattattcagtggcgacaactctcaaaactcaagaacacttatactgatgcactccaaaatcacattgtcagagaaacaggtagaatacatacttcatttgctatggcttcaactaatacgggaagacttgcatcatcagatccaaatttacaaaatattccgataagaactgaagaaggaaagtcaattagaaaagcttttgtacctgatgaagggttcgtcatgctagcagctgattatagtcaaattgaactgagagttcttgctcatatggctgatgttaaacaattaaaggaagcattcataaataatgaagatattcaccaaattacagctgcagaaatttttaatgtaaaattaaaagaagttgataatgaattaaggagaaaagcaaaagcagttaactttggtataatatatggaatttcagcttatggacttgcgaagcagcttgcaatttcaaactatgaagcgggagattttataaaaagatattttcagaaattttcaggtattagagaatttatggatcacac

SEQ ID NO: 256435 - DNA, 787 bp, Unknown
  Bacterial polypeptide expressing nucleotide sequence isolated from the Sargasso Sea
tcctaacctacaaaatatcccaattaaatcagatgacggcaaaaatataagaaaagcatttattgctgagaatgaaaatgttttaatttctgcagactataatcaaatagaaatgagaattttggcagatctagcagatgtcaaagagctaaaaaaggcatttataaacaatgaagatatacatactctaactgctagccaagtatttaatattgacattaaaaaagttgattatgacactagaagaaaggcaaaagcaattaattttggaattatttatggaatttctcagtacggattggcaaagcaaattttagtttcaaataatgaagcagaagattttttaaattcatattttttaaaatttcctgagattaaagaatatatgaaaaaaacgataagtttttgtagaaaaagtggttatgtgaataatatttttggaagaagaacacatctaaaaggaattaatgataaaaattataatgtgagaaactttcaagaaagagcagcgattaatgcaccaattcaagggtcagcttctgaaattatgaggatagcaatgattaggttaaataaaagatttaatgatattaaaaacttaaaaactagaatgttgttacaaattcatgatgaattaatatttgaatcatcaaatgatgaatcaaagaaaattagtggtattataaaagatgagatgacaagtgtagccaaaagcgatttgcactctttttcaatacctttaaccgtagatataaattttggaaaaaactggggaatacttcattaa

SEQ ID NO: 256436 - DNA, 589 bp, Unknown
  Bacterial polypeptide expressing nucleotide sequence isolated from the Sargasso Sea
agcttcaaaaatttttaacaaaaataaaaatgaaattacatctgatttaagaagaagtgcaaaagctataaactttggaattatttatggtatctcaccatttggtttagcaaaacaattaaagtgttcaaattctgaggcaaaagagtttattgattcttattttctaagatttccaaacattagaaattatatggatgaaattaaaagaaaactttattctgatggatatgtagaaaccttatttggaagaagaatgcatattaatgttcaaaaaaatagtaatcaaaatttaaaacttttttctgaaagacaagctattaatgctccaatacaaggaacagcagccgacataattaaactagcaatggtcaaagttcaaaataaattaaaagaaattaattcagattctaaaattttgctacaggttcatgatgaactggtatttgaagtaaaaagtaaagaaattaatgaaataattaccatagtaaaacctataatggaaaatgcaaatttacctgtaaaaccattaaatgtgaaattgagtgtagattatgggtttgctaaaaattgggcaaatgctcattaa

SEQ ID NO: 256437 - DNA, 807 bp, Unknown
  Bacterial polypeptide expressing nucleotide sequence isolated from the Sargasso Sea
gtagattagcctctagtgatccaaatttacaaaatattcctattaaaactgatgaaggaaaagatatacgtaaagctttcatttcagaaaaagggaagaaactaatatcagctgactataatcaaattgaaatgagaatccttgctgatttagcagatgtgaaagaattaaaaaaagctttcataaataatgaagatattcattcactcacagctagtcaagtttttggtattgatataaaaaaagttaattctgatatgagaagaaaagcgaaagctattaattttggaataatttatggaatatcccagtatggattggctaaacaaattggagtttcaaataatgaggctgaggaatttttaaattcttattttttaaaatttcctgaaataaaagattatatgtctaatacaattaagttctgtagaaaaagtggatatgttacaaacatttttggaagaaaaacacatattgttggaataaatgataaaaattttaatgttagaaattttcaggaaagagctgctataaatgcgccaatacaaggatctgcctctgaaataatgcgtatggcaatgattcgattaaataatttaattaaagaaaataaaaaaaagaaatttaaaatgttgttacaaattcatgatgagctaatttttgaaactgatttaaatgaggttaaatctgcaactactataataaaagatactatgacaagtgtaagaaatagcaatcttcattctttctcaatacctttatctgtggatgtaaatattggtgataattggggtcaaaaacattaat

SEQ ID NO: 256438 - DNA, 943 bp, Unknown
  Bacterial polypeptide expressing nucleotide sequence isolated from the Sargasso Sea
aattcagattgcgggagttgaatcggatatattacttgctgctcacatgacagatccgctcgcacggagatacgaccttgattatcttttgggtagtaggctgaatatgaaaaggaaatataggaattctgtccatacatcgaagcagactcagatgaatatttttgaagaatctgatgaagaagattacataagtcattgtgaaaacgcggctattatttacaagctgcatgaggttcttttagcccaattaaagctaactggaatggagggagcataccgtaacatagaaatcccactggctagtactcttgcagttcttgaaatgaatggaataaagcttgatgttgaaggattgaaaaaagtttcacttgattttgaggaacgcctgactgaattgcgcaacaaaataatcgaattgtcaggagaaaaatttaatccaaattctgtaattgaattacagaatattctttatgaaaaacttagactgcatgagaagttcaatattaaacccaaaaaaatcaaacttggcaaccgcatgtctactgatgaagaaacattggagaaattatctaaagatagattacctagaactatccttggttatcgtacaattaataaacttaaaaacacatatattgaccaacttcctggatatgttaattctggcagtggaaaaattcactcaacatttcatcaaaccggcacagcaactgggcgtttatcatcagaaaatccaaatttacagaatattccagttcgtaccaatgagggtcgtcgtgtccgtcgcgcattcattccatcaggatcggaaaatatactgatttcagctgattacagtcaaattgaacttcgtgttgtggcgcattattcaaaagatccaacatttatagatgcataccgtcgtaaccttgatattcattcgctgactgcttctaccatt

SEQ ID NO: 256439 - DNA, 839 bp, Unknown
  Bacterial polypeptide expressing nucleotide sequence isolated from the Sargasso Sea
gatttgaagattgctaaattaaaaaaaacaaaaaaaggcagtcttgcaactaatgcaaaaatactagaagatcttgcattgacaggtcataaatttccaaagctagtactcgagtggaggcaagattctaaattaaaaagtacttataccgatgctttacaagaccacattaataaaaaaacaaaaagagttcacacttcattcttattagcagctactaatacagggaggttagcatcgagtgatccaaatttacaaaatattccaattaaatctgcagatggaaaagaaattagaaaagcatttgttgcagataagggtaatgtacttatttctgcagattataatcaaatagaaatgagaatacttgcagacatggcagatgtaaaagaactaaaaaaagctttcaaaaacaatcaggacattcattctttaacagccagtcaggtttttggcatatctataaatgaaataaatgaggatttaagaagaaaagcaaaagcaataaattttggcattatatacgggataacccaatatggtttggctaaacaaatttcagtttctaatcaagaagcattagattttattaatgaatattttaaaaagtttccagaaataaaggattacatgaacagcacaataaaattttgtagaaaaaacggatatgtaaataatatttttggaagaagaattcatttgagaaatattaatgataaaaattttagtgttagatcatttcaggaaagagccgcaataaatgctccgatacaaggatctgcagcagatataataagattagcaatgattgaaattgatcgcatgacagagaaagaaaa

SEQ ID NO: 256440 - DNA, 794 bp, Unknown
  Bacterial polypeptide expressing nucleotide sequence isolated from the Sargasso Sea
tcctgaatacaaagctaacagacaaaaaacacccgaggatttaattgcacagattgaacctctgcatcaggccatcatcaatcttggattgccacttattgcagttgacggagtagaggctgatgatgtgattggaactcttgccattgaggctgagaaaaaaaacatcaaaacattgatcgcaactggcgacaaggatatggcgcagttggttacagataatatccatctcattgacacaatgaaggacataagaatgggcccagcagaggttttagagaaatttgggattttgccggagcgatttattgattacttaactttggccggcgacacatctgataatattccaggtgtagaaaaggtcggccctaagacagccatcaagtggattaatgagtatggatctttagacggcgtgattcaaaacgctgatctaatcaaaggcaagattggggaaaatctcaatgcagccttggaccagttggatttattcaagactttggtcaccataaaatgcgatgttcaaacggattctaatttttctgatttaatcataggagattccaacgaggagcttttatttgagcaactcaatgatttaggattgcatggactgatcaagcaatttgatatccaaacacctgaaaagaaatcagctgtcgaaagcaattatcacacaatagggacaaagaagcagttggatgagctgatcaaggttatgaaaaaggcttcttatatttcatttgatacagaaacgacaagtttagattatatgcatgcggaattggtcg

SEQ ID NO: 256441 - DNA, 730 bp, Unknown
  Bacterial polypeptide expressing nucleotide sequence isolated from the Sargasso Sea
aacagcttttattagtggaaaaggaaaaaaactagtcagttttgattattttcaaatagaattaagattagcggcagaaatttcaggagataaaaattttattaaagcttttaaaaataatgaagacattcacgcttcaactgctaaagaaatatttaatttgaaagatggtcaaataaataatgattatagaagaaaagcaaaagcaattaattttggaattttgtatggtattagtccatacggtttagctaagcaacttgatatttcaaatacagaagcaaaagattacataaatgagtattttaataaatatccaaagattaaaaaatatatggaacatcaaattgattttgcgaaaacaaatcaatatgtagaaacaatttttaaaagaaaaatcaatattaaggggatatcagataagaattttgctgtcagaggttttgcagaaagacaagctattaatgctccaatacaaggtagtgcggcagatattattaagttagcaatgattgatattcataaagaaataaaactaaaaaatattgaggcagaaatgcttttacaggtacatgatgaactaatttttgaagtagataataaaaaatatgacaatttagtaagcaatgtaaaaacaataatggagtcagtgcatttaaaatataaagatttttcggttccactaacagttgattatggtgctggcgataattggggtcacgcacattag

SEQ ID NO: 256442 - DNA, 684 bp, Unknown
  Bacterial polypeptide expressing nucleotide sequence isolated from the Sargasso Sea
tagctgccgattactctcaaattgaacttagaataattgcttctttgagtgaggaccctaatttgatttctgcatttaataatggtcaagatatacatcaatctactgccagcagggtatttaatatctctttagacaaagtttctagagaacaaaggactaacgccaaggtgataaattttggtataatatatggagtatcagcatttggtttaagtcaacaaactaatctagatagatctaagtcaaaggaacttattgatacctattataaaacgtatccaaaattaaaggattacatgcagaatcaaattaattttgctcgagataacggatatgtctctactgtactcggaagaagaagatatttaaaggatataaattccgcaaattcatttgttcgtggtggagctgaaaggaatgcaattaatgcgccaattcagggcagtgcagcagatatcataaaaattgctatgatcaatattcataaagaacttgtgcaaggaaaatggaaatctaaaatgattcttcaagttcatgatgaactagtttttgatgtaccaaaatcagaatctgatgaattaaaaaaaatggtaaaaaataaaatggaaaatgcttttaagttaaaagttcctttaattgttgatataggtactggaaaacattggttggatgctcattaaa

SEQ ID NO: 256443 - DNA, 853 bp, Unknown
  Bacterial polypeptide expressing nucleotide sequence isolated from the Sargasso Sea
aaaacaactaaatttttcagaagtagatttaaaagcagccacagaatatgcagctgaagatgcagatgtgactttaagattatatgagatcttatctaatagagtatctgctgaaaaattagaaaaaatttatgacgtatttgaaaaaccaatgataacaatactatcaaaattagaaactaatggaattaaagttgatgacgcttatctaaaaaaactttcaaaaaaatttgagaaccgtttagaaaaaattgaaaaaaatatttataaactttcaggtaaaaaatttaatattgggtctccaaaacaattaggtgaaattatttataatgatttaaaaatcgctaagttaaaaaaaacaaaaaaagggagtcttgccacaagtgctaaaattttagaggacttagccttaacaggtcacaagttccccaatttggtattagaatggaggcaagtttctaaattaaagagtacttacacagacgctttacaagaacatattagtaaaaaaaccaaaagagttcatacatcttttttactcgcagctactaatactggcagattggcttctagtgatccaaatttacaaaatattccaataaagacattagacggtaaagaaataagaaaagcatttatagctgaaaaaaataatgtacttatttcagcagactacaatcaaattgagatgcgaatattagctgatatggctgatgtaaaagaattaaaaaaagcttttaaaaataatcaagatattcacgcaataacagcaagccaagtatttgatgttccatattacaaagtgacagatgattatagacgtaaagcaaaggctataaattttggaataatt

SEQ ID NO: 256444 - DNA, 754 bp, Unknown
  Bacterial polypeptide expressing nucleotide sequence isolated from the Sargasso Sea
ctgccagaacatataaatcaaaatacaaaaagagtgcatacatcttttttgttagcagctactacaactggtagacttgcatctagtgacccaaatttacaaaatattccaataaaatcagatgatggtaaagatataagaaaagcttttgtatctgaaaaaaataacaaattgatttcagcagactacaatcaagttgagatgagaattttggctgatctagcagatgtaaaacaattaaaaaaggcatttttaaataatgaagatattcatactttgacagccagtcaggtttttggaaaagaaattaataaaattgacacagaaacaagaagaaaagcaaaagcaataaactttggaattatttacggtatctcacagtacggtttagcaaaacaaatcaatgtttcgaacaatgaagcagaagaatttttaaattcttattttaaaaaatttccagaaattaaagattatatgaaaacaactgtgaatttttgtagaaaaagtggctatgtaagtaatatctttggaagaaaaacccatctcactggaataaacgataagaattttaatgtaagaaattttcaggaaagggcagcaataaatgctccaattcaagggtcagcatcagagataatgagattagcgatgattaggataaatgaagaaatctctaacaataaaaataataatctaaaaatgttgttacaaatacacgatgagttaatttttgaggaaagctcaaaagaaacaa

SEQ ID NO: 256445 - DNA, 862 bp, Unknown
  Bacterial polypeptide expressing nucleotide sequence isolated from the Sargasso Sea
aaatcctaaaacaaaaagggttcatacttcatttttactagcggcaacttcaacaggaagattagcttcaagtgatccaaatttacaaaatattccaataaaatctgaagatggaaaagaaattagaaaaagttttgtagcggaaaaaaatagcaagttaatctcagcagattataatcaaatcgaaatgagaattttggcagatttagcagatgtaaaagaactaaaaaaagcatttaaaaataaagaagacattcattcacttactgcaagtcaggtttttaatactagtatcaaaaaagttaactcagacatgagaagaaaagcaaaagcgataaattttggaataatttatggaatttcacagtatggactagcaaaacaaattggcgtttccaatattgaggctgaacaatttttaaattcatattttttaaagtttccagaaataaaaaactacatggaatctacaattaaattttgtagaaaaagtggatacgtaagtaatatttttggaagaagaactcacataactggaattaatgataaaaattttaatataagaaattttcaagagagagcagcgattaatgcgccaatacaaggctctgcctctgaaataatgagaatggcaatgattagagttagtaaaaaattacaagaatttaatgaaccaaattgtaaaatattattgcagattcatgatgaattaatatttgaagttcacaaagaagatatcaaaaaatactcaaaaattattcaggaagaaatgtctagtgtgaaaaatagtgatctacactctttttcaataccattgctagtagacattaatgttggtaataattggggagatcttcattaa

SEQ ID NO: 256446 - DNA, 751 bp, Unknown
  Bacterial polypeptide expressing nucleotide sequence isolated from the Sargasso Sea
agtaaattaaaaggaggcatttttgaaatgtctggtgaagagtttaatctaaattctcctaaacaacttggggatatactctttgaaaagctaaaattagtctcaaaaccaaaaaaaactaaaactggtcaatactcaacctctgaagaggtattatctggtttggcaagtgaacacgagattattaaaaatatattagaatggcgatcgcttgacaagcttcagaacacatatgtgagatcccttccaaatgaagtaaataaaaggacaggaagaattcatacaaaatttaatcagactgttacaacaacaggtcgtttaagcagtaacaatcctaatttgcagaatattccaattagaacactgaatggtcaaaaaataagagaagcatttattcctagaagtgaagaatttgagctcttagctgctgattactctcaaattgagttaagagttatagcttctattagtaaagacaaaaatatggttgatgcatttattaaaaatcaggacattcacactataactgctgctaaaatttataatgtagatccagatgatgtttcaagagaacagagagggaatgctaagactgtcaattttgggataatatatggtgtctcagcctttggtctcagtcaacaaacaaacttatctagggctgaatctaagattatgatagacagctactttgaaaattatcctgggctaaaggattatatgtcaagtcaaattgactttgcaagaaaca

SEQ ID NO: 256447 - DNA, 678 bp, Unknown
  Bacterial polypeptide expressing nucleotide sequence isolated from the Sargasso Sea
tcgccccaaacaagtttcttgcaaaaatcgccagtgattggaacaaacctgacggactatttgttataaagcccgcagaagttgacgcatttgtaaaaaccctccctgttaaaaaactacacggtgtcggcaaagtcacagcaagtaagatgcactccataggggtccagacctgcggcgatctcagagacctcccagaggaagagttacgggataaatttggcagttcaggtaagcgattatatttgcttgctcaaggcatcgatgagcgccctgttaaaacggagcggataagaaaatcattgagtgtagagacaacgtttagtcaagatgtagttggtgtagaaagctgtttaaaaaagcttcctgaactcatgaaacaactcgatacacgtcttgaaaaaatagaaaaaaactaccgaataactaaacaggtcgttaagataaagtttagtgactttattcaaacaacggctgaaacaatttcaccatctgtgaatccacatattttccaagaattatgtgaggaagggtatgcaagacgcgagagacccgtcagattacttggcatcggtgtgagattggagcctaagcagtctgaggaaagtcataataatgatcagaatcaactatgtttaacactggatggacaccagaccaaagatgactcgatataga

SEQ ID NO: 256448 - DNA, 943 bp, Unknown
  Bacterial polypeptide expressing nucleotide sequence isolated from the Sargasso Sea
cagcaattgaaacaagccgagatgatcaattcttatcggtatattgaaattcctctcgcagaaactttggcacggatcgaatggtttggagttcgagtggatactgaaaaattaatggaaattagtcaggaatttgaggaaaggctcgatgaattgcgtgagcaaattcacgaacaggcaaaagaaacttttaatgttaactcggtggtggacctgcaaaatgtgctttatgaaaaattcaaactccacgagcgattcaaagtcaaacccaggaaaatcaaactgggtaacggcatgtctaccgatgaagaaaccctggaaaaactttgtgaggacccccttcctcgggcgatcctggattatcgttctctgaacaaactcaaaaacacgtatgtcgatcaacttcctgatcacgtgcatcccaggtcagagcacattcattccaggtttcaacaaacggcaactgcaacaggacgtctttcatcggacaacccaaacatgcagaatatccccatccgcagtgcagaaggccgacgaatccgggaagcctttgttccttctgattctaaccggatccttatttcagcagactacagtcaaattgaactgcgtattgttgcacattattcgaaagacccgacttttctggaagccttcagaaataacgaagacatccatgccttcaccgcgtcaacaatcttcaaagttccggtcgatcaaatcacccgtgaaatgcgttccaaagcaaaggaggtgaatttcggtctgatctacaagatgggccctgagaggctttctatcgtaacacaaacaagtaaaagcgaagctaaagcattcattgagcgtttttttgaaaaatacagcaccatccatgcgcttcaggagcgatttcttgctcaggctcgtaaggaaggatttaccacgaccctactggacgaaggcg

SEQ ID NO: 256449 - DNA, 433 bp, Unknown
  Bacterial polypeptide expressing nucleotide sequence isolated from the Sargasso Sea
ttcgtatattttcaatgactttatctttacgtcaaaattagttgacggccgtttccctgattatcgtagggtacttcctcaaaatggcgacaaagaaattattgctagcaaagcggtgttaaaagaagctttttcacgcgcagcaattctatcgaatgaaaaattcagaggcgttcgcttaaatcttgctactggcgagctgaaaattacggccaacaacccagagcaagaagaggctgaggaaaacgtagacgtgcagtacgaaggcgatgaccttgaaattggcttcaacgttgcgtacctcattgatgtactgaattctttaaattcagatatggttaaggttagtctgtctgattcaaatgcgagtgcgttaattgaagataatgctgatgacgctgcgctttatgtcatcatgcctatgcgtttgtag

SEQ ID NO: 256450 - DNA, 622 bp, Unknown
  Bacterial polypeptide expressing nucleotide sequence isolated from the Sargasso Sea
atgcccaaactattcgcagtagattccatggcagttctatacaggggatattttgccatgatccgtactccgcttataaattcaaaaggtttgaacacaagtggaatcaggacatttttaatgcagttgataaagataattgaagaagataaaccagattatctggctgttgcatctgattcaagagagccaacctttcgtcataaaaggtatccggaatataaagctactcgtgaaaaaatgcctgaggatcttgttgagcaactcccatatcttccgaggttggtggaagcacttaatcttccttacttgattcttccaggatatgaggcggacgatattgtaggtacgctgatgagactttgccgtgaggctgaatttgaaggagttatggttacaagtgataaggactacatgcagttaatcggtgaaaaaattgtaatgctgaatcaccgtaatgagtttattggaatcaacgaagtggagcaaaaattcggatgtgttcctgagcaggttattgagatgctgggcctgatgggggattcttcggataatattcctggagtaagaggagttggtgaaaaaactgcggtaaagctcatatcggaattggaagcataga

SEQ ID NO: 256451 - DNA, 700 bp, Unknown
  Bacterial polypeptide expressing nucleotide sequence isolated from the Sargasso Sea
cgagaggggtataaactcttctcagcagattactcacagattgagctaagaattatggctcacctagctaaagacccagctatgatggagagtttcttaaccggtgaagatattcactcatcaactgcgaggaaagtttttaatattaaagacgagccatcaagtgatcaacgtagagcagcaaaagcaataaattttggtttaatctatggaatatcagcatacggactagctaagcaacttaagatagataacgttgaggcaaaaggtattattgatacatactttgctaaatacaaaagagtgaaagaatttatggaggagttaaaagaattagcaagcaagcaagaatatgttgagactatgcatggtcgcaaagtatttttgcctaacatcagtcactccaacttccaagttaggagctcagcagagaggacagctattaatgcacctattcagggtactgctgcggatattataaaaattgctatgatcaacataaaggaatggttgaatagagagaatatccacaatgtttttatgataatgcaagttcatgatgagcttgtgtttgaaatcgaagactcagatattcatagatatggagataaaatttctgaccttatgggttcagctgaaaaactcagtgtcccactccttgtcaacacattcagtggttcaaactggcaagagacttaaa

SEQ ID NO: 256452 - DNA, 825 bp, Unknown
  Bacterial polypeptide expressing nucleotide sequence isolated from the Sargasso Sea
tagcagcaacttctacagggagattagcatcaagtgatcctaatttacaaaatataccaataaaatcagaggatggaaaaaatataagaaaatcttttattgcagaagagaaacatgttttaatttctgcagattataatcaaattgaaatgagaatattagcagatttagctgatgtaaaagaattaaaaaaagctttcaaaaataatgaagatattcattctttaactgctagccaagttttcaatactaaaattcaaaatgtagattcagatatgagaagaaaagctaaagcaattaattttggaattatctatggtatttcgcaatatggtttagcaaaacaaattggagtttcaaataatgaagctgcagattttttgaactcttattttttaagatttccagaaattaaagattatatggaaaaaacagttcagttttgtagaaaaagtggttatgtaaaaaatatttttggaagaagaacccatataactggaataaatgacagaaacttcaatataagaaattttcaagaaagggctgcaattaatgcaccaatacaaggttctgcatctgagttaatgagaatggcaatgatcaggataaatgataagtttggagaaattaaaaatctaaaatgtaaaactttattacaaattcatgatgagttgatatttgaggtaaaaaaagaggaaatgaaagaatattcaaaaattattaaaaacgaaatggctagtgttaaaaacagcgatcttcattcattttctatacccttattagtagatataaatgttggtgataattggggagacttacattaat

SEQ ID NO: 256453 - DNA, 871 bp, Unknown
  Bacterial polypeptide expressing nucleotide sequence isolated from the Sargasso Sea
tgataatgaattaaaatcaaagggtctttctgatgtgatgaataaaatcgaagttcctttaattccagttattgttgaaatgcaaaagactggagtttcaataaattctcaaattcttaatgacttttcatcagaactaaaagaagaaataattaatctcgaaattgaagcaaaaaaaattattaaaaatgatgaaattaatttaagatcaagccagcagctttcagaagtattaattaatacgcttaatatacctgaaaaatggtttaggaaaacagctaaaaaaacacaactaagtactgatgtgagtaatttacagagcctaatgacaagggacctaaatgaagaaactaagaaatttattggtttaattcttagacaccgagaacaaagtaaattacaaaatacatatgctgaaccacttcctaaattaattaattctaaaaccgagagacttcaccctagttttaatcaggtaggaacatctactggacgtttatctagtaatgacccaaatttacaaaatattcctgtaagaactgaaaatagaaatcatattagaaaagcatttgaatcaaataaaggttatgttttaatgtctgcagactactcacaaattgaactaagggttctagcgcatctatcggaagaaccaagtttattaaaagcatttaataataatgaagacattcatgagtcaacagcaaaaacaatttaccaaacaaatgaaatatctaaagaacaaagaagagtagctaaaatacttaattttggtgttatatatggattaggtcctgatggagtctcaaggcaaactgatttatcaagatcccaaggaaaaagagtttatagatatttattttggaaaata

SEQ ID NO: 256454 - DNA, 231 bp, Unknown
  Bacterial polypeptide expressing nucleotide sequence isolated from the Sargasso Sea
gatgactgtctctaacgataccgatcgaatcattatgcatgccgatatggatgctttttatgcatccgtggagcagcgtgaccacccggaactcagagaccgccccgtagcggtcggcggcagcggttcacgcggtgtagtggcggcagctagctacgaggcaagacagtttggtgtgcgctcggccatgccgtcggtcgaggcccgtagacgctgcccggatcttgtgtt

SEQ ID NO: 256455 - DNA, 686 bp, Unknown
  Bacterial polypeptide expressing nucleotide sequence isolated from the Sargasso Sea
ggatgagacagggctaaccgcatctgcgggaatctcgatcaacaaattcctggcgaaagtagcttccgatattaacaaacccaacggccagaaaacgatccacccatcgcaggtggattcgtttatcgatcagctacctgtagaaaaattctttggtgttggcaaagtgactgcaaaaaagatgaatgagatgggtattttcaatggggcagacctgcgtaagtatcagaaagaggagctggtggaccgctttggtaaaaccggtaagcactactacaagatcgttcgcagcattcaagacagtccggtaaatcccaaccgaattcgaaaatcagtcggcgcagagagaacattctctaaagatattaactcagagggttttatgctggacgagctgaaaacgattgcggatgaactggaaaggagaatgatccgctcaaagaatcgaggtcgtacggttactataaagctcaaatacagcgattttaccacacagacacgtagcaaaacggtggaggagtacctatccaaaaaagaagagttttttccgatcattgaggagctgatctaccagaaaaaaatagaaaagtcggtcaggcttttgggaattgctatctcaagtttgcttatagatgagcaagagcctaaggaggagtacagcctacagctaaaattcgatttttaat

SEQ ID NO: 256456 - DNA, 895 bp, Unknown
  Bacterial polypeptide expressing nucleotide sequence isolated from the Sargasso Sea
aacacttatactgactctttacaagaacacattaatccaaataccaaaagagttcacacctcttttttgttagcagctactaatactggtagacttgcttcaagcgatccaaatttacaaaatattccaattaaaagtgaagatggaaaagacattagaaaagcatttatagctgaaaaaggatttgaattaatttcagctgattataatcaaatagaaatgagaattttagctgatcttgctaatgttaaagaattaaaaaaagcgtttaaaaataacgaagatattcactctttaacagcaagtcaggtatttaacattgacatcaaaaaagtaaatcaagatatgcgtagaaaagctaaagctataaattttggtattatttatggaatatctcaatatgggctagccaagcaaatcaatgtttctaatcatgaggctgctgaatttttaaatgcatattttaacaagtttccagagattaaaatttatatggaagatacaataaaattttgtagaagaagcggttatgtaaataatatttttggaaggcgctcttattttaactccataaatgataagaattttaatgtacgaaattttcaagaaagagctgctataaatgctcctattcaaggttctgcttcagagataatgaggctggcaatgattaggttagataagagacttaaggagttaaaaaatgataaaattaaaatacttcttcaaatccacgacgaactaatttttgaggtgcctaaaaatgaggtaaaaaaaactgtcaaaatcattaaagaagagatggctagtgtagttaaaagcgatttacactcattttctataccgttgacaattgatattaatacaggggataattggggtattcttcattaag

SEQ ID NO: 256457 - DNA, 679 bp, Unknown
  Bacterial polypeptide expressing nucleotide sequence isolated from the Sargasso Sea
gaaaaaatcgcgtaaaacaaaaacaggatggagtacggatgcagtagttctggaaagattagtcgacgaacatgaaataatccaacatttaataaaacatagaactcttagcaaattacttagcacctatattgatgctcttccaaatcttattaacgaaaagacaggaagagttcatacaaactttaatcaagctgctacagcgactgggagactaagtagtagtaatcctaatcttcaaaatatcccggttaggactgaatttagtaggagaatcagaaaagcattcttgcctgaaaaaaattggaaacttttatcagctgattattctcagatcgaattaagaatactcgctcacttagcggatgaagaaatactaataaatgcatttcataaaaatgatgacattcattctttgactgcaagattaatttttgagaaagaagaaatttcttctgatgagaggagagttgggaaaacaataaatttcggagttatctatggtatggggataaaaaagtttgcccgttcaacaggagtaagtactccagaagcaaaagaattcctaataaaatacaaagaaagatattcaaaaattttcaaatttcttgaacttcaagaaaggcttgccttatcaaaaggttatgtaaaaacaatttttggtcgaaaaagagaattt

SEQ ID NO: 256458 - DNA, 856 bp, Unknown
  Bacterial polypeptide expressing nucleotide sequence isolated from the Sargasso Sea
ccaatgataaatatattatcaaaaatagaaactaacggaattaaggttgatgataattatcttaaaagtctttcaaaaaaatttaacgatcgtttaataaaaattgaaaaagacatttataaaacttcagggaaagaatttaatataggatccccaaaacagttaggagaaattatttatcatgatttaaaaattgctaagcttaaaaaaacaaaaaaaggaagtctagcaacaaatgctaaaatattagaagatttagctttatcaggacataaatttcctaatttagtattagaatggagacaagtttcaaaattgaaaagtacttatacagatgcattgcaagaacatattagtaaaaaaactaaaagagttcatacttcttttttactcgctgcaactaatactggaagattagcttcaagcgaccccaatctacaaaatattcctattaaatctacagacggcaaagaaattcgaaaagcatttgtagctgataaaaacaatatacttatttctgcagattataatcaaattgaaatgcgaatacttgcagatatggctgatgtaaaagaattaaaaaaggcttttaaaaataaacaagatatacacacattaacagctagccaggtatttgatgttccaattaataaagttacagataattttagacgtaaagcaaaggctattaattttggaataatttatggaattacacaatatggtcttgctaaacaaatttctgtatctaatcaagaagctctagattttataaatgcttattttaaaaaatttccagaaataaaagattacatgaatacaacaattaagacctgtagaaaactaaggttatgta

SEQ ID NO: 256459 - DNA, 682 bp, Unknown
  Bacterial polypeptide expressing nucleotide sequence isolated from the Sargasso Sea
tctcaaatagagcttagattagctgcagaaatttctagtgataaaaattttattaaagcttttaaaaacaatgaagatattcatgcatcaactgctaaagagatatttaatctaaacgatagtcaaataaacaacgattatagaagaaaagcaaaagcaattaattttggcatcctatatggaattagtccatatggtttagctaaacaacttgatatttccaatacagaagcaaaagattacataaatgaatattttattaaatatccaaaaattaaaaaatatatggagcatcaaattgatttcgcaaaaacaaatcaatatgttgaaacaatttttaaaagaaagattaatattaagggaatttctgataagaattttgctgttagaggttttgcagaaagacaagctattaatgcaccaattcagggtagtgcagcagacattattaagttagccatgattgaaattcataagcaaataaaacttaaaaacattgaggctgaaatgcttttacaagtacatgatgaactaatttttgaagttcaaagtaaaaaatatgacaatttagtaagtaatgtaaaaatgattatggagtctgtacatttacaatataaagattttgaagttccactcactgttgattttggtgctggtaatcattggggacaggcacattaga

SEQ ID NO: 256460 - DNA, 886 bp, Unknown
  Bacterial polypeptide expressing nucleotide sequence isolated from the Sargasso Sea
gagtaaggaatgcctatgcagggactgcgaacgaatttttcaagaaaacagtgcacgtcgatgtgccttttgcggcagtccgcgtttcattcaacacccggaacttaacacacttgcgatagctcatctggactgcgatgccttttttgccgctgtggagaaaagagacaacccgagccttgctagcaaaccactcataattggagggggcaaacgaggtgtggttagcacctgctgttacatagccaggcagtatggcgtccactctgcgatgccgatgtttcaggctttgtcggcctgccctgacgccgtagtactaccacccgatatgcctaaataccgtaaggttggaaaagaggtccaaaatcttttgctaaaagtaaccccgcaaatagaacccgtctccatcgatgaagcttacctagatctacagaagttattggacagttcggcaatgagcccggcccgcgcccttatacgccttactaatgatcttgagagaactttgggcatttctgcctctgtgggactttcctctaacaaatttctagcgaagttggcttcggattttgataagccgcgaggtttttctataattggcactaatgaatcaacatcagttatagcgccgttgccggttagaaaaattaacggtgtaggtccctccttaaccaaacgcctggcaaaaatgggaataaatacagtatcccaattgcaaaactggaaagaagacgacctagttcagcgcttcggtgttattggccaccgattagcaaattacgcaaggggaatagaccctagaccggtcgaagaacgaacgcgccgaaagagcatttcatgcgaaactactttagaaaagcatatcaatgacctccaagtattgaag

SEQ ID NO: 256461 - DNA, 898 bp, Unknown
  Bacterial polypeptide expressing nucleotide sequence isolated from the Sargasso Sea
taaagacttttcatttgttgatattgacgaagcaagtatttactgtggttatgacgtatttcttacttataagattgtcaatatttttaaagaaagattctcaaaggaaaaagatgaattaatcaaattattcgaagaaattgagctgcctttagagccggtattgtcccaaatggaaatgaatggcattaccatcgatattacttatctagataaactctcaagagaattaaaaagtaccttagaagatattgaaagtaaagtgtatgaattagcagaagaaaaatttaatctatcttcaccaaaacaactgggtgagatcttgttcgaaaaattaaatttggataaaaagaaatcacggaaaacaaaaacaggatggagtacagatgcagtagttcttgaaagattaattgatgaacatgagataatcccacatttaataaaacatagaactcttagcaaattacttagtacttatattgatgcacttccaactcttattaacgaaaagacaggacgagttcatacaaactttaatcaagctgctacagcaactggaagactaagtagtagcaatcctaatcttcaaaatatcccagtcagaactgaatttagtaggagaataagaaaagcattcttacctgaaaaaggttggaaacttttatcagctgattattctcaaattgaattaagaatactcgctcacttagcggatgaagaaattctaataaatgcatttcaaaaaaatgatgacattcattctttgactgcaagattaatttttgagaaagaagaaatatcatctgaagagaggagagttggtaaaacaataaattttggagttatctatggtatggggataaaaaagtttgctagatctactggagtaataacctag

SEQ ID NO: 256462 - DNA, 793 bp, Unknown
  Bacterial polypeptide expressing nucleotide sequence isolated from the Sargasso Sea
atgtctacactattcgcggtagattccatggcagtcctctatagaggatattttgctatgatccgtactccgttgataaattcaaaaggcttgaacacaagtggaatcaggacttttttaatgcagttgataaagataattgaagaagataaacctgattatctggccgtggcttctgattcaatggagccaactttccgtcataaaaggttcccagaatataaagctactcgtgaaaaaatgccggaggatcttgttgatcaactcccatatcttccgaggttggtggaagcgcttaacctgccttacttgattcttccaggatacgaggcggacgacattgtgggtacactgatgaggctttgtcgtgaagctgaaatagaaggcgtgatggtaactagtgataaggattacatgcagttaatcagcgagaaaattgtaatgctgaaccaccgaaatgagctcataggaataagcgaagtggaagacaaattcagttgtgctcctgagcaggtcattgagatgctgggactgatgggggattcctcggataatattcctggagtaagaggagttggagaaaaaactgcggctaagctgatatcagattttggaagcatagaaggtgtttatgaaaatcttgatagagttaccagcaaaagcctaaaggaaaaactgaataatgatcaagaaaatgcatttctttccaaggagctagccactattgactgtcatgtgcctctatcggtctcactgaaagatgttcatcttggagaaacagatttatataaca

SEQ ID NO: 256463 - DNA, 904 bp, Unknown
  Bacterial polypeptide expressing nucleotide sequence isolated from the Sargasso Sea
tccaaagacaggacaaaatataaaatttgatgctttaattttattgcggcatggtttaaaggtagagggtatccgatttgataccatgatcgcagctcatttgttaaaacctgaatttagaagtttaaagcttgataatcttagcttagaatacttgaattacacaatggtaccaattgaagatttgattggatcgggtaggagtcaaatatcaatggcagaagttgatattgaaaaagtatctttttatgcagctgaagatgctgatatcgctttgcagttaacacgtatttttgagaagaaattgaagaaagagggcttgtataattttttcagcgaggttgagattcctttattatcagtattacttgaaatggaatttaatggaatgtttattgactccgatttactaaaatcaatgtccactaaaattgggaaaaaaattaataaattagtgactaatatttattctgaatcgggatatgaattcaatgttaattctacacagcaattagcgaagattttatttgaaattaaaggccttcctgaggttaaaaaaagatcgacagctgaagatgtacttgaaaaattaaaaaataagcacgttttacctggattgattttagaatatcgaaaattaaataaattaaaaaatacatatattgactcccttcctgaattagtgaatccaattagcggtcgaatccattcaacatttaaccaaactataacagcaaccggacgcctatcttcaaccaatccaaattttcaaaatattcccatacgaacagatgaaggacgtgagattagaagggcttttagatcgaaagacgatgaatggttaattttttcagctgattattctcagatcgaattaagaataatggcgcacctcagtcaagat

SEQ ID NO: 256464 - DNA, 618 bp, Unknown
  Bacterial polypeptide expressing nucleotide sequence isolated from the Sargasso Sea
aaaataatgaagatatacatagttcaactgctgctaatatttttaatattgatagtagtaaaattgactcagaaatgagaagaaaagctaaggctataaactttggaatcttgtatgggatcagtccttatggtttagctaagcaattaaacgtaacaaattctgaagctaaaaattacatagaagattattttaaaaaatatccaaaaataaaaaaatatatggatagtcaaatagaattcgcaaaaacaaatttatatgttgaaacaatttttggaagaaggtgtaacataaaaagtattaatgataaaaattttgcagtgagaggtttttctgaaagacaagcgattaatgcacctattcaaggcacagcagctgacataattaagttagcaatgatagaattacaaaaaatgatatcaacaaataatttaaatgctaaaatcttacttcaagttcatgatgagcttatttttgaagttgaagtttcagataaagaagactcaattgaaaaaattacaaatgttatggaaaatatccaccttaattataaagattttgaagtaccacttttagttgattatggttttggcaataattggggtgatgctcattaaa

SEQ ID NO: 256465 - DNA, 837 bp, Unknown
  Bacterial polypeptide expressing nucleotide sequence isolated from the Sargasso Sea
catggggctaaatctcagaggagttacttttgatacccttttagcagattacattcttaataatcaggaaaaacatggattaagtgaaattagttttagagaatttggatttaagccaccaacttttaaagaaataattggaaaaaataaagatttttcatttgtcgacattaatgatgcaagtacttattgtggttatgatgttctactaacatacaaaatctcgaaaatttttaaagaacgatttaataatgaaaataaggatttaacaaaattatttaaagaaatcgaattacctttagagccagtcttatcagaaatggagatgaatggtatcagaatagataccacttatttaaatgaactatctggagaattaaaaagtacattagaaaatattgaggaaaatgtttttgaaatagcaaagcaagaatttaatttatcctctcctaaacaacttggtgaaatattgtttgagaagttaaatcttgataaaaaaaaatcaaggaaaacaaaaacaggttggagtactgatgcagttgttcttgaaagattagtagaagaacatgagataattccctttctaataaaacatagaactcttagtaaacttttaagtacatatattgatgctcttcccaaccttattagtgaaaaaactggaagagttcatactaactttaatcaagcagctaccgccactgggagattaagcagtagtaatcctaatcttcagaatatccctgtcagaacagaattcagtagaagaataagaaaagccttcttgcccgaaaaaggttggaaattactatcggcagattattctcaaattgaatt

SEQ ID NO: 256466 - DNA, 931 bp, Unknown
  Bacterial polypeptide expressing nucleotide sequence isolated from the Sargasso Sea
tataaaatacaaagaagttgttggaagtggaaaatctcagatcacatttaatcaagttgatttaaagagcgcactaaaatatgcagccgaggatgctgatattacctataaactttatttattatttaaaaaaagaatcaacaatgaaaaaaataattatatatattccaatattgagaagcccttaattgattgcattcaaactatggaattcaatggtataaaagttaataaagaatacctaaaaaagctatcaatagatttctcaaaaagaattttaaaattagaaagtaagatatacaaggatactggtactgagtttaatattgcatctccaaagcagctgtctgaggtattatttgataaacttaaacttaaaccaccaagaaaaacaagaacaggagaaaaatctacaggaatagatgttcttgaggatcttgcctacggtggcaataaaatcgctgaaaccgttattgaatggagacagctatcaaagttaaggaatacttatacagaggccttacaagctcatattattaaatctacaggaagaatacatacttcatatgcaatggcttcaactagcaccggtagacttgcgtcctctgacccgaacttacaaaatatcccaatcaggacagaagaaggcagatcaatacgtaaagcatttattcctgataaagaccaaacaatttttgccgcagattacagccaaatagaattaagagttttagctcatatggctgacgtatctcaactaaaagatgctttcaataataatgaggacatacatcaattaactgcgtcagagatttttaatgtcaaacaaaaagatgtcactaaagatttacgtagaaaagcaaaagctgttaattttggaataatctacgggatttctgcatttggactagcaaaacagttatcaatatca

SEQ ID NO: 256467 - DNA, 631 bp, Unknown
  Bacterial polypeptide expressing nucleotide sequence isolated from the Sargasso Sea
aaaaccggccgggtacacacaagctaccatcaggccaacgcggcaacggggcgtttatcctcgagcgaaccaaacctacagaatattcctatccgcacagaggaaggtcgtcgaattcgccaagcctttattgcgccgcagggacgtaagattttggctgccgactattcgcagattgaattacggatcatggcgcatttatcccaagatgcaggcttactcaaagccttcgccgaagggaaagacattcacagagccaccgccgccgaagtatttggcaccgactttgacagtgtcacctcggagcaacgtcgccgcgccaaagccgttaactttggccttatctatggcatgtccgcctttggattggcgcgtcagctcgacattccccgtaatgaagcgcaaacctacatcgacacttacttcgcccgctatccaggcgtattaaggtatatggaagaaacacgagccagtgcagcagaacttggctatgtctcaacgctatttggtcgccgtttgtatttacccgaaattcgcgatcgtaatgcaatgcgccgtcaagcagcagaaagggccgcgattaacgccccaatgcaaggcaccgccgcggatattattaaaaaagccatga

SEQ ID NO: 256468 - DNA, 899 bp, Unknown
  Bacterial polypeptide expressing nucleotide sequence isolated from the Sargasso Sea
aatgagggatgtctcaatcgataaaattacatattatgcaagtgaagatgcagatataactcttcagttgaaaggtgtttttgacaaagaaattgaagtcaataatttaaataagattttttatgatattgagattccaatgattaatgtattaagcgagatggaaacagaagggataaaaatagatacaagctatctaaaaaaactggataaagaatttgaagaggacctaggaaaattaaaaaaagaaatattcaaaaagtctggtgaagagtttaatctaaattcacccaaacaactaggtgaaattttatttgataagttaaaactagttagcaagccaaaaaaaactaaaactggtcaatattctacatcagaagaagttctttcaagtttagctaatgatcataagattatagagaatattcttgaatggagatctcttgataaacttcaaaatacatatgtaaaatcattacctaacgaggtaagtagtttaactaatagagtccatagtagttttaatcaaactgtaaccacaactggaagactctctagcaataaccctaatttgcaaaatattccaataagaactgcgaacggtcaaaaaatcagaagagctttcatccctagagatagtgattatatattgatggcagctgattattctcaaattgagttaagagtaattgcatctttaagtaatgaagagaatatgattgatgcttttataaataatcaagatattcatacaatgactgcctctaaaatttatgatgttgacccagaaaatgtaacacgtgaacaaagggggaatgcaaaaacagtaaattttggaattatatacggagtttcagcatttggacttagccaacagactgatttaaatagatctgagt

SEQ ID NO: 256469 - DNA, 751 bp, Unknown
  Bacterial polypeptide expressing nucleotide sequence isolated from the Sargasso Sea
tttcaaaatcaaagtttaaaattagaaaaaaaaatttttagtttatcaaaaattgaatttaatattgcctcacctaaacaattaggtgaaattctttttattgagatgggtattaaaggaggaaaaaaaactaaaactggaacctattcaactgattctacaattttagaggatttatctcaccaggggtatgaaatagccaaacttgttttagaatggcgcgaattaaccaaattgcgtaccacttatactgatgctctcttagatcaagcaaaagaaaaaactagtcgcgtacacacatcatatgcaactgctacaacattaacaggaaggctaagctctaatgacccaaatcttcaaaatattccaattagaactgagaacggtaagaaaattcgaaatgcatttatagtagaaaaaaattataaattagtaagttttgattattctcaaattgaattaagactggctgctgaaatatcaaaagacaaaaattttactgaggcatttgtaaatggcgaagatattcatacctcaactgctaaagaaatatttaatttaaaagatcaagatatctcctctgatcaccggagaaaagcaaaagcaatcaattttggtattatttatggtattagtccttacggtttagcaaaacaattatctatatcaaatacagaaggaaaaaaatatattgaagattactttgctaaatatccaaaaattaaaaattatatgtcatatcaaattaatt

SEQ ID NO: 256470 - DNA, 993 bp, Unknown
  Bacterial polypeptide expressing nucleotide sequence isolated from the Sargasso Sea
caattaggggaaataatttataatgatttaaagattggaggattaaaaaaaaccaaaaaaggaggattggcaactaatgcatctgtattagaagatctcgcttataaaggtcataaatttccacaattaattttagactggagacaattatctaagttaaaaaatacttattcagactcacttcctgaacatataaaccaaaatacaaaaagggttcatacatcatttttattagcagcaacatcaactggtagattagcctcaagcgaaccaaatttacaaaatattcctataaaatctgatgatggaaaagatatcagaaaagcttttatagcaaaaaaagattatgttttactttctgcagattataatcaaatagagatgagaatattagcagatttagctgatgtaaaagaacttaaaaaagcttttaaaaacaatgaagatatccattcattaactgcaagccaaatatttgatattgaaattgataaaattactttcgatcaaagaagaaaagcaaaggcaattaattttggaataatatatgggatttctgaatatgggttggcgaaacaaatcaatgtttctaatcatgaggctaaaaattttttaaattcttattttttaagatttccagaaataaaaagttatatggagaaaacaattaaattttgtagaaaaagtggatacgtaaataatatttttggacgaagatcacattttataaatataaatgacaaaaattataatattaggaattttcaggagagagctgctattaatgcacctatccaaggatcagcatctgaaataatgagattagcgatgataaggctcagtaaaaaattaaatttaaaaaaaaattttaaaacaaagatgcttttacaaatacatgatgaattaatttttgaaacacataaagatgacgttgaaggaatcagtaaaataattatagatgagatgagcagtgtatcaaaaagtatctacatc

SEQ ID NO: 256471 - DNA, 265 bp, Unknown
  Bacterial polypeptide expressing nucleotide sequence isolated from the Sargasso Sea
gaggattaggttgctagttgataaaggcagtctaaaaatacaggccaataaccctgagcaagaggaggctgaggaggttttggagatttcgtacgatgggggcgggctggaaataggctttaatgtaagctacatattagacgtattaggtgctatatcaggttctgaagcaaaattaacactcagtgatggtgatagttctgctcttattgagggtttagatgactctaattctctatacgtggttatgcccatgaggctttaa

SEQ ID NO: 256472 - DNA, 595 bp, Unknown
  Bacterial polypeptide expressing nucleotide sequence isolated from the Sargasso Sea
ttgtctacactttacgcgttcgactcgatgtctgtgctttatcgcggatatttcgcgatgatccggaatccgcttatcaattccaagggaatcaacacctccgggatccgcaccgttttgatgcagttggtgaaaatcattgaagaagtcaggccgcaataccttgcagtcgcatccgatggtcctgaagacaccttccgccacatacgatatcctgaatacaaggcaactcgtgaaaaaatgcctgaagatttggtggagcaacttccctatttacctcgagcgatgcaagcgctcaaacttccctatttactgatccccgggtatgaggcagacgacatcatcggcactttgatgagcttatgcctcaataacaacattcgtggggttatggtcaccagcgacaaggattacctccaacttgttagtgaaacaaccgaaatgctgaatcataaaaatgaaatcgtaggtttgagcggggttcaggaacgtttcgattgtcgtcctgatcaagtaatcgaggttcttgggttaatgggtgacagttcagacaatatcccaggagtacgtggtgttggggaaaagaccgcgatca

SEQ ID NO: 256473 - DNA, 687 bp, Unknown
  Bacterial polypeptide expressing nucleotide sequence isolated from the Sargasso Sea
aagatgaaacaggtttaaccgcatccgcgggaatctcgatcaacaaattcctggcgaaagtcgcctccgatattaacaagccaaacggccagaaaacgatccacccatcgaaggtggattcgtttatcgatcagctccctgtaggtaaattttttggtgttgggaaagtgactgcaaaaaagatgaatgagatgggtattttcaatggggcagacctgcgtaagtatcagaaaaaggagctggtagaccgttttggaaaaactggaaagcgctactacaagatcgttcgcagcattcaggacagtccggtaaatcccaaccgaatccgaaaatcagttggtgcagagagaaccttatccaaaaacattaattcagagggttttatgctggacgagctgaagacgatcgcagacgaattggagaggagaatgatccgttcaaagaaccgaggccgtacggttacggtaaaactcaaatatagcgattttaccacacagacacgtagcaaaacggtggaggagtacctatccaaaaaagaagaattctttccgattattgaggagctgatctaccagaaaaaaatagagaagtcggtcaggctactgggaattgctatctcaagtttgcatatagataagcaagagcctaaggaggagtacagtctgcagctaaaatttgatttttaat

SEQ ID NO: 256474 - DNA, 899 bp, Unknown
  Bacterial polypeptide expressing nucleotide sequence isolated from the Sargasso Sea
ctcctatgtcctggagggcggccttcacggccatggcatggacgaattagcccgtgacacgctgggtatagaaacgatcaaatttaaggatgtagctggcactgggaagtcacaggtcaccttcgatcgtgtgcccctggacaaagccctcgattacgctgccgaggacgcggacattacgcttcggcttcacaagacgttcaagccccgtttggcccaggaacacatggtaacggtttacgagaccttggagcgccccttggttcctgtcctagaaaccatggaacgggatggaattaaagttgacgctcaacaactaaagcgtctttcaactgactttggcaagcgcatggccaatctggaagaagatgcccataaaatggccggtcgagaatttaatgtcagctcgccaaaacagctaggcgagatcctattcgatgagatgggacttgagggaggcaaaagaggaaagaccggggcttacgctaccggcgccgatgtcctggaagccttagctgcagaaggccataaactgccgaataccgtcttggagtttcgccaactcgccaaacttaaaagcacctacacagatgctctaactgccgccattaatccgcaaacgggccgcgtgcatacttcctacagtcaagcagctgcctcgacggggcggctttcatcgacggacccaaacctgcagaatatccccgttcgcactgaggagggccgcaaaatccgcaaggccttcgtgccgaaaaagggacacgttttgatctcagctgactattcccagatcgaactccggatccttgcccacgtggctggaattgacagcttgaagcaggcctttcacgacggccaggatattcacgcgctcactgcttcccaggtctttggtgagc

SEQ ID NO: 256475 - DNA, 835 bp, Unknown
  Bacterial polypeptide expressing nucleotide sequence isolated from the Sargasso Sea
aaatttttaaataaactagaaaaagatctcaacaaagagattgataaaattgaacagaaaatatttaagattgctggtgaagagtttaatattggatccccaaaacaattaactgaaattttcaagaaattagacattaaagtcacaaagaagactaaggcaggagattttcaaacaaatgtgaaagtactagagcagttagagtcagaaggtgttgaaatagcctcacatattttgcaatggagacaatactccaagcttgtttctacctatacctcatcattagctgatcatgcagataaaaaagacagggttcatagtacatttaatattgccgcaaccataacaggacgactaagttcatctgaacctaatcttcaaaatatcccaatcagaactgaaattggaaaaaagataagaacagcctttatagcagaaaaagatcatgagctttatagttttgactactcacaaattgaacttcgagttttatgtgaggcatgtgaagacccaaatttattgaaagctttccaagaagaccaggacatacacgaaagtacaggccaattagtttttaataaaaaatcaattaatgatactgatagaaggatggctaagattattaactttggaataatatatggtattagccaatatggacttgcaaaacaattaggtgtaagcaacggtgaggctaaactttttatcgataattattttcaaaaatttccaaatattaatgactttatgaaatttactacagataaagcaaaaaaattaggttttgtggaaaatctttttggaagaaagtctcacataaaagatatcaatgcta

SEQ ID NO: 256476 - DNA, 868 bp, Unknown
  Bacterial polypeptide expressing nucleotide sequence isolated from the Sargasso Sea
gacattgagtatcctttagtgcatgttttgttagaaatggagaataaaggcgcattaattgatacaaaccaactcaaaaagctttcaaatgattttggttcaaagctaatcggccttacaaaaaaaattcatgatacatcgggaagcgtttttaatattgattctccaaaacagctcagcgaagttctttttgaaaaaatgaaaatagattccaagggtctaaaaaagacttctactggatactattcaacttcagaatcagttctacaaaaactatcagctgagaatgaagttgttagagatattttagagtacagaacactagccaaactaaagaatacttatactgataaaatttctgatatatgtgatgcaaactcaagagttcacacatcttatcatcaggcagtaacatcgacaggcagattatcgtcatctgaccccaatttacaaaatattccaataagaactaatgaggggataacaataagagaagcatttattgcccctaaaggtaaaaagcttttagctatggattattctcaaattgagcttcgacttatggcccactactctaaagatccaataatgcttgattcatttagaaatgatgaagatattcataaaagaacagcagcagaaatcttcggagttgaaataactgatgttgacgatcagatgcgcagaagggccaagactattaattttggtcttttatatggaatgagcgcttttggtttatctaatcaacttgaagtctcaagagctgaggctgatatttttttaaataattattttgaaagatatgctgctgttaaaagctttatgtcagagatagggaagaagcaaaaaaagataaattggtaaa

SEQ ID NO: 256477 - DNA, 901 bp, Unknown
  Bacterial polypeptide expressing nucleotide sequence isolated from the Sargasso Sea
ctcaaaaatacttactcagactctttgcaagagcatattaatcctaaaacaaaaagagttcatacatcttttttattggccgcaacaacaacagggagattagcttcaagtgatccaaatttacaaaatataccaattaaaactgaagatgggaaagatataagaaaatcttttgtttctgaaaaaggaaatattttaatatcagcagattataatcaaatcgaaatgagaatcttggcagatttagcagatgtaaaagaattgaaaaaagcttttaataatcaacaagatattcattcacttacagccagccaagtatttaacgtaaaaataagcgaaattaattcagacatgagaagaaaagcgaaagcgattaattttggaattatttatgggatttctcaatacggcttagcaaaacagattatggtgtcaaacaatgaagctgcagaatttttaaattcatactttaaaaaatttccagaaattaaggactatatgaatgacactataaaattttgtagaaagagtggatatgttaataatatttttggtagaagaagtcatattactggaataaatgataaaaattttaatataagaaattttcaagaaagagcggctattaatgcaccaatccagggatctgctgccgaaattatgagattggcaatgataagaatttcaaaaagaattgaggagactaaagaaaaaaaatgtaaaatgttacttcaaatccatgatgaactaatatttgaagttccaaaggaaagtgaaaataacttcacaaatttgataagacaggaaatgacaagtgttaaggatagcgatcttcattcattctcaacgcctctcacagtagatgttaatagtggagaaaattggggcttactacattagt

SEQ ID NO: 256478 - DNA, 961 bp, Unknown
  Bacterial polypeptide expressing nucleotide sequence isolated from the Sargasso Sea
agtgcctcagtgctagaagatctcgcttttaaaggtcataaatttccacaattagtcctagactggcggcaagtttcaaaactaaaaaatacttattcagactcattacctgaacatattaatcccgatacaaaaaaagttcatacttcttttttattagcagcaacgactacaggacgattagcttcaagtgatcctaatttgcaaaatattccaattaaatcagaagatggcagagatattcgtaaagcttttgttgctgagaaggataacattttgatttccgcagactataatcaaattgaaatgagaattttagctgatttggctgatgttaaagaattaaaaaaagcttttaaaaataatgaggatatacactctcttactgctagccaaatttttaatgttgatattgataaggtgaatcaagaccaaagaagaaaggccaaagcaataaactttggaataatctatggaatttctcagtatggtttggcgaagcaaataaatgtctctaattttgaagctgaagagtttctaaattcatatttctcaaagttccctgaaataaaagtttatatggatcgaacgattaaattttgtagaaaaagtggttatgtaagtaatatttttggaagaagatctcactttataaatataaatgataaaaattataatgtaagaaattttcaagaacgtgcagcaattaatgctccaatacaagggtctgctgctgaaataatgagattagcaatgataagaattgataaaaaattaaaggagcaaaaactgaataaaacaaagatgttacttcaaatccatgatgaactaatttttgaaagtcccaaaaatgaattaaaaaaaatatccaaagtaataattgacgaaatgtctagcgttgctgagagtgatcaacattctttttccatacctcttacagtagatttaaacactggagaaa

SEQ ID NO: 256479 - DNA, 704 bp, Unknown
  Bacterial polypeptide expressing nucleotide sequence isolated from the Sargasso Sea
cgagcattcgcgtctcggcggtgcgaaggtcgtgtggatccctgatgccgcccagttaaccgatgctgccgccaatgccctgttgaaaacgctggaagaacccccggcacagacctggtttttcctcgccagcacagagcctgctcgtttgctggcgacattacgcagccgttgtcggttacatcatcttgcgccacctccggagtcgtatgctatctcctggcttgctcgtgaagtgactgcgtcgtcagaagcgctgcttagcgcgttacgtctaagtgccggttcgccaggcgcggcactcacgctgttacaggctgaaagctgggcgcaccgtacagatttttgtgcggcactggtgaatacattaaacgccggtgattggtatatcttgctcgcggcgttaaaccacgatcagtctgccgcccgtttacactggctggcaacgttgtttacggatgcgttgaaacgtccgtatgggattgcccatttaaccaatcccgatgccctggacctgatatcttccatcgcagaacggttatccgttgcccagatacaggcgatactcggtgacgtttgtcattgccgtcagcagttgctgaacgtgacgggcgtaaaccgcgagctggtattaaccgatcttattcttcgtattgagcattacctgcaaccaggcaccgtactgcctgttccccatctttgag

SEQ ID NO: 256480 - DNA, 616 bp, Unknown
  Bacterial polypeptide expressing nucleotide sequence isolated from the Sargasso Sea
gaaaatgtagatattcacgcccaaacagcttcaaaggtttttggaattcctattgcagatcttgattctgaaactagaagaagtgctaaagctattaattttgggataatttatgggatttcttcttttggattatcaaaacaactttcatgttctcaaagtgaagctaagaatttcatagagtcatattttgatcaatttccaaaaattaaaagttacatggatgcaatgatagaaagtgctaaaatgaaaggttatgttgagaccttttttggaagaaggataccaataaagggtattaattctaaaaattttcaagaaagatcatttgcggagaggcaatctattaatgcaccaattcaaggtagtgcagcagatattattaagagagccatgataaaaatatacaatgtttttcaagaaaaaaatgttgaatcaaaaatgttacttcaagtgcacgatgaattagtttttgaatgtccaaaatatgaaataaaaaatgtttcaaatttgattaaaaaggagatggaacaagctaatttacccttttttcctttaaatataccaatagtagttgatgttggtgtagcagataattggtctgaagctcattaaa

SEQ ID NO: 256481 - DNA, 844 bp, Unknown
  Bacterial polypeptide expressing nucleotide sequence isolated from the Sargasso Sea
actacaggaatcaaagttgacgatgcttatcttaaaaaactttcaaagaaattcgaggaaagattgttaaaaattgagagagaaatttacaagatatccggtaaagaatttaatattggatcaccaaaacaattaggagaaattatttataacgatttaaaaatagcaaaattaaaaaaaacaaaaaaaggaagtttagcaacgagcgctaaaattttagaagatttagcattaaccggtcataaatttcctaatttagttttagaatggcgtcaagtttcaaagttaaaaagcacttacacagacgctttacaagaccatataagtaaaaaaacaaaaagagttcatacctctttcttactagctgcaactaataccggtagactagcctcaagcgatcctaatttacaaaatatccctataaagacttcagacggtaaagagataagaaaggcttttgtagtggataaaaataatttactgatttctgcagattataatcaaatagagatgagaattcttgctgatatggctgatgttaaagaattaaagaaagcttttaaaaataatcaagatatccactctttaaccgcgagccaagtctttgatgttccgataacaaaagtgacagatgattttagacgaaaagcaaaagccattaatttcggaattatttatggaatcacacaatatggattagcaaaacaaatatcagtttcaaatgaagaagctttaaactttattaaatcatattttaaaaaatttcctgagataaaagattatatgaatacgactattaggacttgcaggaagcaaggatttgtcacgaatatttttggaagaa

SEQ ID NO: 256482 - DNA, 941 bp, Unknown
  Bacterial polypeptide expressing nucleotide sequence isolated from the Sargasso Sea
atttacgaagtatttgaaaagcctatggttaaattgctctcaaagctagagatgaatgggattaaaattgatgataattatttgaaaaagttatcaaaaaaatttgaagagaggctaaaaagaaaagaaaaagaaatatttaaaatttcaaaaaaagaattcaatataggttctcctaaacaactaggtgaaataatttacaatgaactaaaaattgcaaagctaaaaaaaacaaaaaaaggaagtctagcaacaagtgctaaaattcttgaagatcttgcattatcgggacataaatttccaaaattggttcttgaatggagacaagactcaaaactaaaaagtacatataccgatgcacttcaagatcatattaatagtaaaactaaaagagttcacacctcttttctattagctgcaacaaatacaggaaggttagcttcaagtgatcctaatttgcaaaatattccgataaaaacattagacggaaaagatattaggaaagcctttatagcagataaaaataatgttttaatttcagctgattataatcaaattgaaatgagaatacttgcagatatggcagatgttaaggaattaaaaaaggcttttaaaaacaatcaagatattcatgcaatgacagctagccaggtttttggattatcaatcgataaaattactgaagactttagaagaaaagctaaggcaataaattttggaataatttatggaataactcaatatggtttagctaaacaaatttcggtatctaaccaagaagcacaagattttataaatcaatattttaaaaaatttcctgagataaaagattatatgaattcaacaattaaattttgtagaaaaaacggctatgtgaacaacatctttggaagaagaattcacttgcgaggaataatgataagaattttagcgtcagagct

SEQ ID NO: 256483 - DNA, 741 bp, Unknown
  Bacterial polypeptide expressing nucleotide sequence isolated from the Sargasso Sea
agtattctctgaaatcaatgtggatgtggctatgccatatgcatgtgaggatgcagatataacattaaaactctataaatattttttaaaaaaattaaaacctttaaagagtcaatatgatttatatacaaatattgaattaccacttttaaaagttattgctcagatagagcaaaatggtgtaatgatagatgctaaaaaacttgagaaacaaagcatagaccttgggcaaagaatcgagtcagtagaagaagaggtttacactctagcgaagcaaaaattcaatattggatcaccaaagcaactacaagaaatattttatgacaaattaaatcttccagttattaaaaaaacacctaagggacaaccatccactagcgaagatgtaatgcaagagctatctttaacacatgagctgccgaaattaatattacaatatagaaatctctcaaagctgaagaatacatatacagataaattaggtatacaaattgattcaaaaacaaaaaggctccatacatcatataatcaaacagtgactatcacaggtagactatcgtcatctaaccctaacttacaaaatataccaattaaaacagatgatggtaaaaaaataagacaaacatttatcactaataaagatagcaaaataatctctgcagattattcccagattgagttgagagtaatggcgcacatgtctaatgatcagtctttaatacaaagttttatgaatggtga

SEQ ID NO: 256484 - DNA, 845 bp, Unknown
  Bacterial polypeptide expressing nucleotide sequence isolated from the Sargasso Sea
gctggaacaggcgtcgccttatgcagcagaagatgcggatgtgactttgcggttacaccaaaccttatggccgatgcttgcgcaacattcaggcttgcagaaagtattccgggatatcgaaatgccattggtgccaattttgtccaaaatggaacgcactggggtaaaaattgatggcaacctgctggcgcaacaaagtctggatttagctaaacgtataggcgagatagagcaggaagcttatcagatggcgggtaaagaatttaacctgtcatctcctaagcagttgcaggaaatcttatttgaacagatgggtttacctgtactgaaaaaaacacccacaggcacaccgtccacagcggaagaagtgttagccgagttagcgcttgattatgagtttccaaaacttattacggaacaccggggtttaagtaagcttaaatctacctacaccgacaaactgcctttatcggttaatccggtaacaggccgggtgcatacgtcctatcaccaggcggttgccgccacaggccgcttaagctccacagagcctaacctgcaaaatattccgatccgtagtgaagaaggtcgccgtattcgtcaggcttttattgctgaagcgggtaaaaccattttggcaatcgactattcacaaattgaactacgcatcatggcgcacttatcacgtgaccctgctctgctcaatgcttttgctcaaggcaaagatatccatagagctacagcagctgaagtctttggtgtagagctggaccaggtcagttcagaacaacgccgccgcgctaaagcggtgaacttcggccttatttatggcatgtccgcttttg

SEQ ID NO: 256485 - DNA, 973 bp, Unknown
  Bacterial polypeptide expressing nucleotide sequence isolated from the Sargasso Sea
aaggaaagcttagcaacaagtgctaaagtattggaagatttagctttaacaggtcacaaatttccaaatttaatactagaatggagacaagtatcaaaactaaaaagcacctacacagatgctctacaagagcatataagtaaaaaaactaaaagagttcatacctcatttttgttggctgctacaaatactggcaggttagcttcaagcgaccctaatttgcaaaatattcctatcaaaacacctgatggtaaagaaattagaaaagcattcgttgcagataaaaacaatatacttatttctgcagattataatcaaattgagatgagaatacttgctgatatggccgatgtaaaggagttaaaaaaggcttttaaaaataaccaggatattcatgcgctaacagctagtcaggtatttaatgttccaattaataaagttacagaggaatttagacgtaaagccaaggcgattaactttggaataatttatggaattacacaatacggacttgcaaaacaaatatctgtatctaatcaagaggcactagattttattaatgcttattttaaaaaatttccagaaataaaagattatatgaatacaacaatcaaaacttgtagaaaaaaaggttatgttacaaatatttttggaagaaggatacatttaaggggcataaatgacaaaaatttcagcgttagaagttttcaagagagagctgcgatcaatgccccaatccaaggatcagctgcagatattattagattggcaatgataaaaattgataaaatcttagaagaaaaacagattgcaaaaatgctattgcaaatacatgatgaattaatttttgaatgttcagaaaaaaaagaagcttcagttaaaaaaattattagagactccatggtatctatatcaagttcagatcatcacttgttttctattcctttagaagtcagtataaattcaggtaaca

SEQ ID NO: 256486 - DNA, 846 bp, Unknown
  Bacterial polypeptide expressing nucleotide sequence isolated from the Sargasso Sea
caaaaagagttcatacatcatttcttttagcagccactaacactggtagactagcttcaagtgatccaaatttacaaaatatacctattaaaacttcagatggaaaagaaattagaaaagcattcatagctgaaaaaaataatatccttatatctgccgactacaatcaaatagaaatgagaattcttgcagatatagccgatgtcaaagagctaaaaaaagcattcaaacaaaatcaggacattcacaaacttactgctagtcaagtttttggtgagcggattaatgaaatctctgaagatcaaagaagaaaagcgaaagcaataaattttggtatcatatatggtataactcaatatggcttagctaaacaaatatcagtttcaaatgaagaggctcaagaatttattaactcttattttaaaaaatttcctgaaataaaagattatatgcagtcaacaattaaaagttgccgaaaaaatggatatgtttcaaatattttcggaagaagaattcatttaagaggcattaatgataaaaactttagtattcgaagttttcaagaaagagcggcaattaatgctcctatccaaggttctgctgctgatataattaggttagcaatgattaaaattgacaatattttagaagaaaaaaaaatagcaaaaatgttacttcaaatacacgacgaattaatatttgagtgttcaaaaaaagatgaaaaaaacgttaagaaattaattcaaaatgctatggaatcggtatcaagctctgaacaccataaattttcaattcctcttgaggtaggaataaactcaggcaataattggggagaggctcattaac

SEQ ID NO: 256487 - DNA, 829 bp, Unknown
  Bacterial polypeptide expressing nucleotide sequence isolated from the Sargasso Sea
aataatttataacgatcttaaaatagcagggttaaagaaaactaaaaaaggaagtttcgctacaagcgcaagtgttctagaggatttagcatttaaaggacatgagttcccaaaattaattttagactggagacaggtttcaaaattaaaaaatacttattctgatgctttacccgaacatataaatccaaacacaaaaagagttcatacttcatttttgcttgctgcaacaacaacaggcaggctggcttctagtgatcctaatttacaaaacattccgattaaatcagaagatggaaaagatatacgaaaagcctttacagccaaaaagggccatctactaatttctgcagattataatcaaattgagatgagaattttagcagatctagcagacgtaaaagaacttaaaaaagcttttcaaaataaggaggatattcattcattaacagctagccaaatatttaacattgatatcaaaaaagttaatcaagaccacagaagaaaggctaaggccattaattttggaataatttatgggatttcacaatatggattagcaaaacaaataaatgtttctaattatgaggcagaggaatttttaaattcatattttgcaaaatttccagaaattaaagtttatatggataatacaataaaattttgtagaaaaagtggatatgttagcaatatatttggaagaagatctcattttaatggaattaacgacaaaaattttaacataagaaatttccaagaacgtgctgcaattaatgcgccaattcaaggctcagcttctgaagtaatgagattagctatgataagatta

SEQ ID NO: 256488 - DNA, 907 bp, Unknown
  Bacterial polypeptide expressing nucleotide sequence isolated from the Sargasso Sea
acctatcgtctgtttagtttttttaaagaaaaaatgagtgatgagaaacagttaaaattatatcaaaaaatagaaagacctcttgtgagtgtcattgcacgaatagaaaataatggtgtatttttagataaaaaaaatcttcaattacaaaataaaaagctacagactaaagctaaaaaaattgaaaaagaaatttataagttagcaggaaaaacattcaatataggttcaccaaaacaactacaggaaatattttacgatattttagagattcctattttaagaaaaacccctaaagggcaaccttcaacaagcgaagatgttctgcaagagctttcactcaattatgaaatacctaaacttgtattgcaatttagaaattttatgaaacttattaatacttatactaataaattaggagaacaagtaagtaataaaactggaagattacatacctcttatcatcaagcagtaacaataacaggtagactatcatctactgatccaaacttacaaaatattccaataagaacagacgatggtaaaaaaataaggtctgcatttattgctgaaaaaaactgcaaaatagtctcggcagattactcacaaatagagttacgtgtaatggcccatttatctgaagataaaaatctaacaaaaaactttttgaataatgaagatgttcatgaatcaactgcaaaagagatatttgatattgattcaaaaccagatgcggaacaaagaagatcagctaaaacaataaattttggtcttatatatggaatatcatctttcggtttgggaaaacaattaggtattgatactaattcagccaagcaatatattgaaaaatattttgagaaatatagtggtgttagaaaatttatggaatcatgtaaaaaagaaa

SEQ ID NO: 256489 - DNA, 2092 bp, Unknown
  Bacterial polypeptide expressing nucleotide sequence isolated from the Sargasso Sea
tatgagttcaataaaaaaaacagatcattattatctcatagatggatcaggttatattttccgagcctattatgcgttacctccactatctagaaaaagtgatggacttcctacaggtgcggtaagcggcttttgctctatgctttttaaattactagaagaatcgagatcagacaattcagctaataaaccaacacactttgcagtcatctttgactccgccagaaaaaattttagaaatgatatttatagtgaatataaagctaacagaacagaagcaccagatgatttagttcctcaatttaaatatataagagagtcagtaaaagcatttaatctaccatcaatagaacttcttaactatgaagcggatgatctcatagctacttatgcaaaacaaattacagatgctggtggaaaagttacagtaatctcatcagataaggatcttatgcaactagtatcagataaaattagattatatgatccaatgaaaaacaaagttattggtgagaaagaagttctagaaaaatttggagtgaaacctcatcaagtcatagatgttcaatcattagcgggagactcatcagacaatattccaggggtgcctggtataggagtaaaaacagcagctgaattaattaataagtataaaaatttagatacattactagaaaaagcatcagaaattaaacaaaataaaagacgagaaacattgttagaaaataaagacaaagcattattaagcaaacaattagttacattaaaaaaagatgttccgatcaaagatgatccgaacagttttataattagagaagtaaaaaaagataatctttataattttttaagagaaatggagtttaatagattattaagccaagcaataagtttttatggcgaagaaaactcaaaagattatggctcttatgataaaacaaataaaatatctaaaatagacaccaagctttacaaaagcataattaacgaaaaggatttagacaaattaataggtcttttaaacgaaaaaccgttattttctatagatactgaaacatcctctttaaaccctctagaagctgaattaattggaatttcttttagctatgctccaaacaaagcctattatattcccttaaggcataaaaacgttaaaagtctcagcaaacaactagttttaaaaaagattaaacctttacttgaagatccaagtatcaaaaaagttggtcagaatataaagtttgattttattgttttaaaaaacaatggaattgaaataaatcctatggaagacactatgcttttatcttatgtgttagatgctggaaataatagacataatatggatacactttcagaattacacctaggtcacaaaactatttcttataaagatgttgttggcacaggaaaaaaacagctgaatttttctgatgtaaatcttgaagaagcaaccaaatatgcagcagaagatgctgatgtaacattaagactttataatcttttattagaaaggattaataatgaaaaattaaacaatatctatgaaatttttgaaaaacctatgattaagctcctttctaaattagagataaatggaattaagattgatgatatgtatttaaaaaaattgtccaaaaaatttaaagaaagactagaaaaaatagaaaaagaaatttataaaatttcagggaaagaatttaacattggttcaccaaaacaacttggagaaataatttataatgatttaaaaattgcaaaattaaaaaaaactaagaaaggaagtctggcaactagtgcaaaaattttagaagatttggctttaacgggccataaattccccaatttaatcttggaatggagacaagtatccaaattaaaaagcacgtacacagatgctcttcaagaccatattagtaaaaaaaccaaaagagcacatacttcatttcttttagcagcaactaatacaggccgactagcctctagcgatccaaatttacaaaatatacctattaaaactttagatgggaaagagattagaaaagcttttattgcggaaaaaaataatattctgatctcagctgattacgatcaa

SEQ ID NO: 256490 - DNA, 2438 bp, Unknown
  Bacterial polypeptide expressing nucleotide sequence isolated from the Sargasso Sea
aagtgatggtctaccaactggtgcagtaagtggtttttgttcaatgctgttcaaattacttgaagatgctagatcagatgatacaaaaaacaagcctactcatttcgcagtaatttttgactctgctagaaaaaattttcgaaacgagatttacagtgattacaaggctaatcgagctgaggcaccagaagatttagccccacaatttgagtatattagaaaatcggttgaagcatttaacttaccatccattgaacttttaaattatgaagcagatgatcttatagccacttatgcaaaaaaaattatagaagcaggtgcaaaggtgaccataatatcatccgataaagatctcatgcaattagtttctaataaggtgaggttatttgatccaatgaaaagcagggtaataggtgaaaaagaagtaattgaaaaatttggggtaaaaccagttcaagtaattgatgtgcaatctcttgctggagacagctcagataatgtgcctggggtccctggaattggcattaaaacggcagcagaacttattaataaatataaaaatttagaaaatttattaaaaagggcatcagaaattcctcagaataagagacgagaaacattattatctaacaaagataaagccatgattagcaagcaattagttactttaaaaaatgatgtcccgcttaagaatgatgccgctgatttcataattaaaaatataaataaagataaattatataattttttaagagacatggagtttaatagactgctaagccaagcaattagtttttatggcgagccgacaaataaagatttgaacgaaaaaactgtagtaaaaaaaaataataaaataaatactaagacctacaaaactatttcagaagaaaaacaactaaacgaattaataaaaaaactagatgaaaaatcagttatagcggttgatactgaaacttcttctctaaatccacaagaagctgatcttgtgggtgtatcagtatgttatgaggccaacgaggcattttatattccagtaggtcataaagagagaacaaaattaaaaaaagatgtagttttaaaaaaacttaaaccaattttagaagatccaagtataaaaaaggtcggtcaaaatataaaatacgattttattatatttaaaaataacggcatcgaattaagctcagtagaagacacgatgttactttcctatacattagatgctggaaataatagacacaatatggatactctatctgaattgcatcttggccataaaactatttcgtataaagatttagtaggaactggaaaaaaacaattaaattttgcagacgtagatattaaacatgccactgaatatgctgctgaggatgcagatataactctaagattatatgaagttttatctgaaagagtatctgaagaaaagttagaaagagtttatgaggaatttgaaaaaccaatgatcaaaatcctttcaaggcttgagatgaacggcataaaagttgatgacgcttatcttaaaaaactttctaagaaatttgaggaaagattgataactattgaaaaagaaatttacaaaatatcaggtaaaaaattcaatatcggttcaccaaaacaactgggagagattatttataatgacctaaaaatagctaagttaaaaaaaacaaaaaaaggaagtttagctacgagtgctaaaatcttagaagacttagcttcaacaggacataaattccctaatttagttttagaatggcggcaggtttcaaaactaaaaagcacttacacagatgctttgcaagatcatataagtaaaaaaacaaaaagagttcacacttccttcttacttgcagcaactaatactggtaggctagcctcgagtgatccaaatttacaaaatattcctataaaaacttcagatggaaaagaaataagaaaagcatttgtagcggataaaaataatttacttatttcagcagactacaaccaaatagaaatgagaattcttgctgatatggctgatgtcaaggaattaaagaaagcttttaaaaacaatcaggacattcactcattaacagctagccaagtctttgatgttccgattgctaaagtgacagatgattttagacgaaaagcaaaggccattaattttggaattatttatggaataacacaatatggactagcaaaacaaatatcggtgtcaaacgaagaagctttaagtttcattaattcgtactttaaaaaatttcctgagattaaagattatatgaatacaacaattaaaacttgtaggaaacagggttttgtaacaaatatttttggaagaagaattcatttaagaggaattaatgataaaaattttagcgttcgagcatttcaggaaagagcggcaattaatgctccaatacaaggatctgctgcagatatta

SEQ ID NO: 256491 - DNA, 1512 bp, Unknown
  Bacterial polypeptide expressing nucleotide sequence isolated from the Sargasso Sea
aaaaccacggcatcgaacttagctctgtggaagacacgatgttactttcgtatacactagacgcgggaaataatagacataatatggatacgttatctgaattacatcttggtcataaaaccatatcttataaagagttagtaggaactggaaaaaagcagttaaatttttcagaggtagatcttaaatcagctactgaatatgctgctgaggatgcagatataacgttaagattatatgaagttttatctgagagagtatccaaggaaaagttagaaaaaatttatgaggaatttgaaaaaccaatgataaaaattctctcaaaactagagtcgagtggtgtgaaagttgatgatgcttatcttaaaaaactttcaaaaaaatttgaggaaagattaatgactattgaaaaagatatttataaaatatcgggtaaaaaatttaatatcggatcgccaaaacaattaggagaaattatttataatgacttaaagatagcaaaattgaaaaaaactaagaaaggaagtttagctacgagcgctaaaattctagaggacttagcattaactggacataaatttcctaatttagttttagaatggcgccaagtttcaaaattaaaaagtacttatacagatgctttgcaagatcatataagtaaaaaaacaaaaagagtgcatacctcttttttactagctgcaactaataccggtaggctagcttcgagtgatcctaatttacaaaatattcctataaagacttcagacggtaaagagataagaaaagcttttatagcagataaaaataatttattaatttcagcagattataatcaaatagaaatgagaattcttgctgatatggctgatgtaaaagaattaaagaaagcttttaaaaataaacaagatatacattctttaacagcgagccaagtttttgatgttcctattgcaaaagtgacagatgattttagaagaaaagctaaggcaattaattttggaattatttatggaattacacaatatggattggcaaaacaaatatcagtttcaaatgaagaggctttaagtttcattaattcatattttaaaaaatttcctgaaattaaagattatatgaacacgacaataaaaacttgtagaaagcaaggctttgttacaaatatttttggaagaagaattcatttaagaggaattaatgataaaaattttagcgtacgcgcattccaagaaagagcagcaattaatgctccaatacaaggatcagctgcagatatcataagactagcaatgattaaaattgatagtattcttgaagaaaaaaagaaagcaaaaatgcttttacaaatacatgatgaacttatttttgaatgtttaaaaaaagatgaaagtgaagtaaaaaaaattgttaaagaagttatgacatcagtttcaagttcagaccatcacatgttttcaatacctttagaagtaagtattaattctggaaacaattggggagaagcccattaaa

SEQ ID NO: 256492 - DNA, 1279 bp, Unknown
  Bacterial polypeptide expressing nucleotide sequence isolated from the Sargasso Sea
attgataaaaagaactaaaaataccgatgctcaattctgtagagattgcctacatcagacaaaaaaattaagtgatttatgtgataaatgtttatctccaagagtcattaatcataaagaattaaaaaatttatcgatagctcatatagattgtgatgctttttatgcttctgtagaaaaaagagataacgctgatctaaaaaacaaacctctgatcataggtgggggagatagaggtgtagtttcaaccgcttgttatattgcaagaacaaaaggtattcactctgcaatgccaatctttaaagcaagaaaattatgcccagaagcaataattttaaggccaaatatgggtaaatataagaaagcaagctatgaaataagagatttaatgaaagagcttactccgcttgttgaaccaatatcactagatgaagcatttctagatttatcaggaacatttaagttacaccagaaaataccagctatattgttagctgaattagttaataaaataaaaaagcatgtaggaattaatgtttcagttggattatcatacaataaatatttagcaaaagtatgttcggatttagataaaccaaaagggttttcagtgattgggaaagaagagtcgaaagattttttatccaataaacctgtgagcttattgtggggtataggtaaaaaattcacaaataaattaaactctgatggaattataaatattggccagatacaaaaaatagaaataaaggagttagtcaaaaggtatggggttataggtcttcatatttatcaattatcaaatggagaagattcaagatcaataagatcaaatagacccattaaaagcataagtcatgagacaacatttacaaaaaatattaaaaatagaaaaaaattagaaaacattcttagcgatctatcaagaaaagttgctcttagggcaagaaagaatggattaggtggaaaaacaataaatttaaaattaaaaacaaaaaactttaagtcaatttcaagatctaaaaccattagcaaccctactctattagagagaaaaatatataaaattgctaaagatttattaaccaatataaaagataatgaagaatataggttaataggtgtaggaatttcagagcttgtagatgaaaacttctgtgatttagataatttaattgatacaaatgagaataatgaaaagaaactagatcaagctataaattctttaagagataaatttggaagcaacataataaatcacggaaaaaactatgaataa

SEQ ID NO: 256493 - DNA, 1564 bp, Unknown
  Bacterial polypeptide expressing nucleotide sequence isolated from the Sargasso Sea
tctggaattggtcccaaaaacagcttctcagttaataaatgaatttaatgatattgatggtttaattaaaaatctgataaaaattaacaaagaaaaaagaagaaatattttagcagaatcagaaaatgacattagattaagtttaaaacttgtaacacttaaaaacgatgtccaaatacctgagagcattaatagaattagaacttataatgaattaaaaaatgaaaataataatatttttaattttcttaaagagcagggctttagatcaacatctgaaagattaaaatctaattcttttatatctagttataatgataatatagttccaaaaaaagaaataaaaacaaaatttcaattaattaattcaaagaatgattttgaaaaagttttaagtgaaattaaaaaaaatggtatttgcgctatagatactgaaactaattcactcgatatagaaaaagctaaattagttggtatatcaatttgtaccagtgaaaatatttcttattatattcctataaaccataccagtttagatggttctaaaaaaattgataaccagttagaggaaaaatatgtaattaatcatattaacaaaatatgtgaaaatgaatctatcttaaaaattgggcaaaatataaaatatgatattagaattttaaataagtatggagtaatttttaattcaattgcagatacaatgttaatttcctattcaattgataatggaatttttaaacataatttagatgatttatcatttaatcacttaaatcatactacaattaagtataaggaagttgttggaacagggaaaaatgaaattacttttgataaagtaactattgataaagcaattaattatgctgcagaagattctctattaacattcaggctttttcatcatctttatcctcgtttaataaaagaaaaggctaattttgtttatcaaaatattgatttacctcttgtagaggtattatcttcaatcgaggcaaatggtattgaggtaaataaagattttttaacagatcttagtaatgaatttgagaatgaaagtaaaaaacttgaaaagaatatttataaactttcaaaagaagggtttaatattggctcgcctaaacaattaggagagatattattcgttaatcttaaaatacctggtggtaaaaaaacaaaatcaggaacatattctactgattcatcaactttaaataatttagccttagatggatttgaaattgcacaactcgttcttgattggagagaattaacaaaacttaaatcaacttatacagatgctttatttagattaacagatgataaaagtagagttcatacatcatttggtttagctaatactttgacaggtcgattaagttctacagatccaaatcttcaaaatatcccaattagaacagaaaatggaaaaaaaataagaacagcttttgttagtggaaaaggaaaaaaattagtcagttttgattattctcaaatagagcttagattagccgcagaaatctctagtgataaaaattttattaaagcttttaaaaaccaatga

SEQ ID NO: 256494 - DNA, 907 bp, Unknown
  Bacterial polypeptide expressing nucleotide sequence isolated from the Sargasso Sea
tacaaaattaaaaaatacatattcagatgctttacctgaacatcaaaacccaaaaacaaatagaattcatacttcttttttattagcagcaactacaactgggaggttggcatctagtgatccaaatttgcaaaatattccaataaaaacagaagatggtaaagaaataagaaaatcgtttattgctgaaaaaggatgttctttagtttccgctgattacaaccaagttgagatgagaattttagctgagattgcagatgtaaaagaattaaaaaaagcattcataaataatgaggatattcactcaattacagcaagccaagtttttaataaaaaagttaaagatgttgataaagatatgagaagaaaagcgaaagcaattaattttggaattatttatggaatatctcagtatggtttagctaaacaaattggagtttccaatgtagaagctgaagattttttaaattcttactttataaaatttcctgaaattaaagattacatgaacgaaaccattaaattttgtagaaaaagtggttatgtaaataatatttttggaagaagaacccatttaattggcataaatgataaaaattataacgtaagaaattttcaagaaagagctgcgattaatgcaccaattcaaggatctgcttctgaaataatgcgtttagcaatgatgaggttagatgaaaaatttttacaatatgatgccgatctagtaagtattttattacaaattcatgatgagttaatttttgaaattaaatcttctaaggtaggtgaaataacaaaaataattaaagaaataatgattagtgtaaagtcgagcgatcatcataagtttacagttccacttttagtagatttaaattctggagagaattggggtgtcttacactaa

SEQ ID NO: 256495 - DNA, 802 bp, Unknown
  Bacterial polypeptide expressing nucleotide sequence isolated from the Sargasso Sea
aaatttattcttccaaccttacctgttgatgattatccaattatgacaaatattgaaaaaggtcacgaattcaatctccaatcaatagatcttgctaatttgatagacaacacaaaatttgcaatttcgttagaagaaacaagatactatttaaatggaatttttttacatgttcctaattcagatattcaaaaactaagagctgttgcgactgatggacatagattagcccaagctgagatacctcttcctgaaggagcttcggatatgcctggaataatcttaccaagaaaagctgtaggggagattagaaagttaacggatggcactgatggtaaaattaaagttattatttcaaacactaaggcacaatttgtttttccaaattcaattcttactacaaaattaattgatggttcattcccagattaccaaagagttatacccaaagaaaaccttaacaaactagtagtttcaaaccaagaattttcaaaagcaattgaccgagtatccacagtttcaatagaaaaaacaagagctgtaaaactttcattaagcaacaatttattgtctttaaatgtaaatagccacgatcttggaaatgcatcagaagatttagaaatagactataactacgatattttagaaattggatttaattcaaaataccttttggatatagcatctcaaataaaaggtaaagaaattgaaattttattgtcagactctgcctcaccagcattaattacagatcctgatcaagatggggtgatttttgttttaatgcctatgagagtttgat

SEQ ID NO: 256496 - DNA, 1391 bp, Unknown
  Bacterial polypeptide expressing nucleotide sequence isolated from the Sargasso Sea
tgtgctttcagagattcatctaagtcacaaaaccatttcttataaagatgttgttggcacaggaaaaaaacaattaaatttttcagatgtaaacttagaagaggctaccaagtatgctgctgaggatgcagatgtaacattaagacttcataatcttttaatagagagagttaataatgaaaaattaaaaaaaatttatgaaatctttgaaaagccaatggttaagttgcttgcaaaattagagataaatggagttaaagttgatgatgtctatttaaaacaattgtcaaaaaaatttgaggatagattaagaaaaatagaaaaagaaatttataaagcttctggtaaagagttcaacattggttcaccaaaacaactcggagaaatcatttataatgaattaaaaattgcaaaattaaaaaaaactaaaaagggcagtctagcaacaagtgctaaaattttagaagatttagcattaacaggccataaatttcctaatctagttttagaatggagacaagtatcaaaattaaaaagcacttataccgatgctttgcaatctcacattaacaataaaacaaaaagagttcacacttcgtttcttttagctgcgactaatacaggccgacttgcatcaagcgatcctaatttacaaaatattcctatcaaaactttagatgggaaagaaattaggaaagcatttattgctgaaaaaaataatattcttatctctgctgattacgatcaaatagaaatgaggattcttgctgatatggcagatgtaaaggagttaaaaaaagcttttaaaaataatcaagacattcatgttttaactgctagtcaagtttttgggttatcaacaaacaaagtcactgatgattttagaagaaaagcaaaagcaataaattttggaattatttatggaataacacaatatggtttagctaaacaaatagctgtatccaatcaggaggcgctagattttataaattcttattttaaaaaatttcctgagatcaaagaatatatgaactcaacgattaaaacttgtaggaagcaaggctatgttacaaatatatttggtaggagaattcatcttcgaggcattaatgataaaaattttagtgtaagatcttttcaagaaagagcggcaataaatgctcctatccaaggttctgcagcggatattataagacttgccatgataaaaatagataaaattttagaagataaaaaaaataaagctaaaatgcttcttcaaatacatgacgaattaatatttgaatgtttgcaaaaagatgaaaaagaaattaagaaaatcataaaagatgccatgacttcaatttctagctcagaacatcatatgttttcaattcttttggaggtaagta

SEQ ID NO: 256497 - DNA, 2350 bp, Unknown
  Bacterial polypeptide expressing nucleotide sequence isolated from the Sargasso Sea
atagtttcctcggataaagatttaatgcagctttataggaaaaatgtgagaatttatgaccctatgaagaataaatttataaatgaggaggatgttcaaaataaatttggagttgaggctggaaaggtaatagatgttcaagctttagcaggagacagtactgataatgtcccaggtgtaccaggcatcggggttaaaactgcagctgaattaatcaaagagtatggaaatttagaaaacttattaaaaaatgcgcacaatattaaacagaataagagaagagaaacattaattgaaaataaagataaagcaataattagtaagaaattggtaacattaaaaaaggatgttccagttaaaaataaaatcgaggaatttgaattaaaggaaattgataaacaaaaactttataatttcttaagagaaatggaatttaatagactattaagttctgcaatttcaatttacggggaaactgatttttcacagagcaaaaataaaaatactgatgaaaaaaataattcaaaaattacaaaagaaaactatcatttaattaaaaatgaggaggagctacaaaaatggttaaaagctgcagaggataaaggggaatttgctattgatacagaaactaactcattagatgctcatcaagcaaaacttgtgggaatttctatatcccatacaattggtaaaggctgttatattcctacaggacataaaaatttcaaaaatttagatgaatcaaaaattttaaaaacattaaaaccttatttagaggacaaaagtattaaaaagatcggtcaaaatattaagtttgattatattatttttaataaaagaggaatagatattaattctttagaagatacaatgttgatgtcttatgttctagatgcgggaaaaaatagacataatatggatacactggctgaaattcatttaggacataagacaattcaatttaaagatttagtaggtactggaaaaaaacagataaatttttcagaagtagatgtgaatatagccaaggattatgcagctgaagatgctgatattacatatcgattgtacaaaaactttttaaagtctttaaaagaagaaaatcttttaaatatttacgaaatctttgaaaaaccattagttaaaattttagctaaaatggaaatagaaggtattaaattagatgaaaaatcacttaaaaatctatcttcaaaatttgaaaaaaaaataaaaagcctagaacagaaaatttttaaactctctaaaaaagaatttaatattggctccaccaagcagcttggtgaaataatgtataatgacttaaaaattgcctcattaaaaaaaacaaaaaaagggagttttgcaactagtgcttctgtattagaagatctagcttttaagggctatgactttccaaaattagttcttgaatggagacaaactagtaaacttaaaaatacttattcagatactcttcctgaacacataaataaaaatactaaaagaattcatacatcttttcttttagctgctacaacaactggaagactggcatcaagtgatccaaatttgcaaaacattccaataaaaactgaagaaggtaaagatataagaagagcatttatttctgaaaaaaacaaaaaacttatttctgcagattataatcaaatagaaatgagaatcttagcagatctagcagatgtgaaggaattaaaaaaagcatttaataataatgatgatattcactctcttactgcaagccaagtatttggtactgaaattaacaaggttgactcagatatgagaagaaaagctaaagctattaattttgggatcatttatggaatatcgcaatatggtctcgcgaaacaaattaatgtttcaaacgtcgaggctgaggaatttcttaactcttattttttaaaattccctgagattaaagaatatatgtctgaaacaataaagttttgtagaagaagtggatatgtaaacaatatttttggaagaaaaactcacattacgggtattaatgataaaaactttaatgtaagaaattttcaagaaagagcagcaataaatgcaccaattcagggttcagcatcagaaataatgaggatggcaatgattagattagatgatgagattagcgataaaaaaaataataacctaaaaatgcttttgcaaattcatgatgagttaatatttgaagtagaagaaaaaaatataattaataattcaaaaattataaaaaaaataatgacaagtgtaaaagatagcaacctacactcattctcaatacctttattagtagacattaattctggtgataattggggacaattacattaga

SEQ ID NO: 256498 - DNA, 1318 bp, Unknown
  Bacterial polypeptide expressing nucleotide sequence isolated from the Sargasso Sea
ctatgcctcggaagatgctgatataacttttagattatataaagttttttctaaaaatataaaattagaaaaattatttaatatttatgagatttttgaaaaaccacttattaaaattttggcaataatggaaatttacggtattaaagtagatcaaaaatttcttcaactcctttcaaataaatttgaaaaaaaaattaataatttagaaaaagaaatttataaaattacaaaaaaagaatttaaaattggttctacaaagcagcttggagaagtaatgtacaacgaaatgaaaatttcttcattaaaaaaaactaaaaaaggtagttatgctactagcgcacaggtattagaagatcttgcctttaaaggacacaaacttccaaaactagttttagattggaggcaagtaacaaaactaaaaaatacttattctgattctttgcaagaacacattaatcctaaaacaaaaagagtgcatacctcattcttgctagcagcaacttcaacaggaagattggcctcaagtgatccaaacttgcagaatattccaataaaatctgaagatggaaaagaaatcagaagagcctttgtagcagaaaaaaatagcaagttaatttcagcagattataatcaaatcgaaatgcgaattctggcagatttggcagatgtaaaagagttaaaaaaagcttttaaaaataaagaagatattcactcacttaccgcaagtcaggtttttaataccaatattaaaaaagttaatccagacatgagaagaaaagcaaaagctataaattttggaataatttacggtatttcacagtatggattagcaaaacaaattggtgtttctaatattgaggctgcagaatttttaaattcttatttcttaaaatttccagaaattaaagactacatggagtccacaattaaattttgtagaaagagcggttatgtaaataatatttttggaagaagaactcatataactggaattaatgataaaaattttaatataagaaactttcaggagagagcagcgattaatgctccaatacaaggttcagcttctgaaataatgagaatggccatgattaggattagtcaaaaattagaagaaattaaagagtcaaattgtaaattactattacaaattcatgacgagttaatatttgaagttaaaaaagaatatattgataaatactcaaaaattattcaagaacaaatgtctagtgtgaaaaatagcgatctacactctttttcaataccattgctagtagacattaatgttggtaataattggggagatcttcattaa

SEQ ID NO: 256499 - DNA, 2239 bp, Unknown
  Bacterial polypeptide expressing nucleotide sequence isolated from the Sargasso Sea
atggtaacaaaaaaagaaaagctattaatagttgatgggcatgcgatggtttttagagcatggttctctatacctgaaagactaaatagcaacaaaatagacactaggggtgcatttggttttattaataccttaataaaatcaattagagaaaataatatcacccatattgcagtttgttttgacacaaaagctgctacttttagagatgaaatattccctgaatataaagctcaaagacctccagtagatcctgaccttcataaacagatacctatagcaaaagatttattggaatcaatggatattcctgtatttgaaaaagatggatttgaagcagatgatttagtaggtacaataagtgaaatagcaaattcaaaaaatataaattgtttaattcttactggtgatgcagatcaacttcaacttgttaacgaaaaaactaatgtattaatgtactctggatttggagacataagaatatatgatgaagaaaaagttcaggaaagatatgatggtttaggccctgaatttgtagctgaaattaaagctcttgaaggcgatccatcagataatattcctggtgtaccaggaataggtaaaaaagctgcaagagcattattatcagaatttggtcattttgaatctctttttatgaatattgaaaatattgaaaatatgtctattagaggtgcaaaaagaatacaaaatatcttatctgaaaatattgaaatagctaaaaaagggttaagtctaactcaaatagttagagaagtggatatagatttttcaattgataattgtgaattcattaatcataatattgaagaaataaaggctacttttgaacattatgaactcagaaacagttttaataatttgaaaagtatcattgaatttccaagcgaatttcagcttgaaatcaatgtcgaatctaataataaagatataccaaatgatcagttagtactagtaaatgatcaagaatcatttgaaagaatgattacagatatgaatagtacagatcatttttcttttgatactgaaacaactggcttaaaaacattagaagatgaaattataggtgtatcattttgtaattcagaaactaaatcttattatttagtgataagacacgacaacctaagtgttagttttactaaagaaaattttaagaaattaaaatcattatttgaaaattcaaatatttcaaaatcagctcataatgctaatttcgatattatggttttaagaaactttgggatagatgttgagaatcttaattttgatactgtaattgcagcatcattatgtggaagaaaaagcttaggattaaaaaacttatcttcagaaatattaaatattaatatgactaaaatagaggaattgatcggtacagggaaaaatcaaaaaacattaaatcaggcaaatatatcagaagtttataaatatgccgctgcggattcattgataacttataaactcagaaatttctttaaagaagaattgaaaaagtttaatcaagaagatttattttatgaagtagaaatccctttgattaaagaaattattaatatgcaatataatggattcctaattgattctgaaaaattatctgagatgtcagagaaacttgaggttgagcttaatgagctggatcaagcaattcataatacttatccagaaaaagattttaatttaaattctggtaaacaagttgctgaaattctaattggtgaattaaaggcccctgcaattaaaaaaactaaaacaggtatttctgtagacgcagatgttttagaaaattattccaaaaacaaaaacttagatgaaagagttaatcaaatttcatcgggaatattaagatatagggaattatctaagattaagtctacatatgtagattctttacctaacctaattaataagagaactaaaagaattcatactacttttaatcaattaggtacttctactggtagattgtcaagtcagaacccaaacgtacaaaatattcctgttagaacagatatcggaaggcaagtaagatctgcgtttataactgatagtaaaaataacttccaaatgttagcagtagattattctcaaattgaactaagggttttagctcatctttctaaagaagaaaacttggtaaaagcttttataaatggagaagatatacataattctactgctaaacttatgtattcaactgaagaagtttcatctgaacaaa

SEQ ID NO: 256500 - DNA, 766 bp, Unknown
  Bacterial polypeptide expressing nucleotide sequence isolated from the Sargasso Sea
ttgtctacactttacgcattcgactcaatgtctgtgctttatcgcggatatttcgcgatgatccggaatccgctcatcaattccaagggaatcaacacctccgggatacgcactgttttgatgcagttggtaaagatcattgaagaagtccggccgcaataccttgcagtcgcatccgatggaccagaagataccttccgccacatacgatatccggaatacaaggcaacccgtgaaaaaatgcctgaagatttggtcgagcaacttccctatttacctcgagcgatgaaagcgctcaaactgccctatttgctgatccccgggtatgaggcagacgacatcatcggcactttgatgagcttatgccttaacaacaacattcgtggagttatggtgaccagcgacaaggattacctccaacttgttagtgaaacaaccgaaatgctgaatcataaaaatgaaatcgtcgggttgagcggggttcaggaacgtttcggttgtcgtcctgatcaagtaatcgaggtgcttgggctgatgggtgacagttcagacaatattcccggagtccgtggtgtcggggaaaaaacagcgatcaagctgatccagcaattcggaagtattgaaaaagtctatgaaaatcttgaagaggttcctggtaaaagtcttaaatccaaacttgaagaagggcgcgatcaggccatgctctccaaagaattggtaaccatccatcgtgaggtaccacttgaaatcgatctggaagacttac

SEQ ID NO: 256501 - DNA, 2770 bp, Unknown
  Bacterial polypeptide expressing nucleotide sequence isolated from the Sargasso Sea
tatgactaaaataaaaaaaactgatcatttctatttgattgatggatcaggatatatttttagagcatattatgctcttccacctttgactagaaaaagtgatggactacctactggagctgtaaatgggttttgtaatatgttattcaaattacttgaggactcaaagtcagatgataataaagaaaaaccaacacactttgtagtaatttttgactcagcaagaaaaaattttagaaatgaaatttattctgattacaaaggaaacagatctgatgcaccagatgatttgatacctcaatttgattatataagaaaatctgtagaagcttttaatctaccctcagtagagttattgaattatgaagctgatgatttaattgcaacctattctgaacaaattttgtctgcaggtgcaaaagttacgattatatcttctgacaaagacctaatgcagctttataaaaaaaatattagaatttatgacccaatgaaaaataaatatatttctgatcaagatatattagataaatttggagttgaaccaagcaaagtaatagatgtccaagcgcttgcaggagatagtagtgataacgttccaggtgtacctggcataggcgtgaagactgcagctgaattaataaacgaatacaaaaccttagagaatttattaaaaaaagctagtgaaattaagcaaaacaaaagaagacaaactttaattgaaaataaagataaagctatagtaagtaaaaaattagtaaccttaaaaaaagatgttccaattaaaaatgagataattgagtttaaattaaaaaatgttgataaaaaaaaactttatgattttttaagagaaatggaatttaacagattattaagttcagcaatatcaacatatggtgaaatagggtttgagaaagatcaaaaaattgaaaaaagtataaatcaaaaaattaattcaaaaaattatcaattaatagaaaatgaaaaagatatagataaatggttaaaagaggcagaagaaaaaggtgagtttgcaattgatactgaaacaacatctttggatcctcatcaggctgatttagttggtatttctttatccactaaagttggtcatgcttgttatataccactagcacataaatctaaaaaaaacatgaatgaaaaatcaataataaaaaagattaaaccaattctagaagataagagtattaaaaaaattggtcaaaacattaaattcgattacataatattatttcatagaggaatagatatgacttcaatggaggatactatgttgatgtcttatgttttagatgcaggaaaaaatcgccataacatggatacattgtctcaaattcatttagatcataaaaccatatcttataaagatttagttggtacagggaaaaaacaaattaattttagtgaggtagatttagacttggcaaaaaattatgcatctgaagatgctgatataacttttagactatatcaaatctttataaaaaatctgaaatctgaaaaattactaaatatttatgaaatctttgaaaaaccgctgataaaaattttagcacatatggaaatttgtggaattaaagttgataataactttttgaagattttatcaaaaaaatttgaaggaaagatacaaaaacttgaaaaagaaattttcaaaatttcaaaaaaagagttcaatattggctcaactaaacaattgggtgaaataatgtataatgaattgaaaattgcgaatataaaaaaaacaaaaaaaggtagctttgcaactagcgcacaagtattagaagatttatcatttaaaggacatgaattaccaaaattagttttagattggagacaggtaacaaaactaaaaaatacttattcagactcattacaagaacatataaataaaaattctaaaagggttcatacatcatttttacttgccgcaacatctacaggtagattagcctctagtgatccaaatttacaaaatataccaatcaagtcagacgatggaaaagatataagaaaatcttttatagctgataatcaatcgttgcttatttctgctgattataatcaaattgaaatgagaatcttagctgatttagctgatgtaaaagaattaaaaaaagcttttaaaaataacgaggatattcattccttaactgcaagccaagtttttaatgttaaagttaaagatgttaattctgatatgagaagaaaagcaaaagcaattaattttggtatcatttatggaatctcacaatatggtcttgcaaaacaaataggcgtttctaatgttgaggcagaagaatttctaaacgcatattttataaaatttccagaaattaaaaattatatggaatatacaattaaattttgtaggaaaagtggatttgtaaacaatatttttggaaggcgaacgcatgttacaggaattaatgacaaaaattttaatatcagaaattttcaagaaagagccgcaattaatgctcctattcagggatcagcatcagaaataatgagacttgcaatgataagaattaataagaaatttgagtcaattaaaaacctgaattgtaaaattttattacaaatacatgatgaattaatttttgaagtaaaaaaagatgaagtactagaatatgaaaaattaataaaaaaagagatgtcaagtgttaaggacagtgatttacatacattttcaatacctctttcaattgacattaatcatggtaataattggggtgaactacattaa

SEQ ID NO: 256502 - DNA, 1402 bp, Unknown
  Bacterial polypeptide expressing nucleotide sequence isolated from the Sargasso Sea
tcaaacaatatcttataaagacttagttggaactggaaaaaaacaaataacctttgatgatgtagatattgatcaagcaaaagattatgcagccgaagatgctgatgttacttatagattatacaaaaaatttttgaaagatatcaaagaagagaaattagtaaatatttacgagtcttttgaaaaaccaatgattgaaattttggctaaaatggaaatcagtggaataaaattggacaaagatttcttaataaagctttcaaaaaaatttgaaaaaaaaatagctgaattagaaaaagacattttcaaaatttctaaaaagaaatttaaaattggatcaacaaaacagcttggtgaaataatgtacaatgatttaaaaatttcagcattaaaaaaaacaaaaaaaggaagctttgccacgagtgccagtgttttggaagatctggcatttaaaggacatgaattaccaaagttagtattggaatggaggcaaatttcaaaacttcaaaatacatattcagactcacttccagaatttatcaatcctgcttcaaaaagagttcatacatcttttttattggcagctaccacaactggaaggttagcatcaagtgatccaaatttacaaaatattccaattaagtctgaagatggaaaagaaataagaaaagcctttatttcagaaaaaggaaattcacttttatctgctgattataatcaaattgaaatgagaatactttctgatttagcagatgtgaaagaattaaaaaaagcgtttaataataatgaagatattcattctttaacagccagccaaatttttaacgtagaaattaataaagtcactaaagatatgaggagaaaagcaaaggcaattaattttggtattatttatggtatttcacagtatggactagctaaacaaatttctgtttcaacagctgatgctgaaatttttctaaaggcgtattttaaaaaattccctgagataaaagactacatgtcgtctacaattaaacattgtagaaggagtggatttgttaacaatatttttggcagaaaaacacacattataggtatcaatgataagaattttaatattagaaactttcaagaaagggcagcgattaatgcaccaatacaagggtcagcatcggaattaatgcgaatagctatgataagaatttttaataaacttaatgatgatacaaaatttaaaacaaaattattattgcaaattcacgatgaactaatatttgaaataccaaataacgaactagatagaatcaaaaaaataattaaatcagaaatgaccagcgttaaatcaagtgagcatcacactttctctatacctattctagtagatgtaaatattggggataattggggtatgttgcattaa

SEQ ID NO: 256503 - DNA, 849 bp, Unknown
  Bacterial polypeptide expressing nucleotide sequence isolated from the Sargasso Sea
aaagagttcatacttcattcttattagcagcaacaaataccggtagacttgcttctagcgatccaaatttacaaaatatcccaatcaagtctgctgatggaaaagaaattagaaaagcgtttgttgcagataagggtaacatactaatatctgctgattatagccaaattgaaatgagaatacttgccgatatggcagacgtaaaagaactaaaaaaagcttttaaaaataatgaagatattcattctttaactgctagccaagtttttggtgttcctattaagaaaatagacgaagatttaagaagaaaagcaaaagcaattaactttggtataatatatggaataactcaatatggtttagcaaagcaaatttcagtttcaaatcaagaagctcaagattttattaatgaatactttaaaaagtttcctgagataaaagattatatgaacagtacgataaaattttgtagaaaaaatgggtatgtaaataatatatttggtagaagaatccatttaagaagtattaatgataaaaattttagcatcaggtcatttcaagaaagggcagcaattaacgctccaatacagggatctgcagcagacattataaggttggcaatgattgaaattgatagagtaactgaaaaggaaaaaaaaattagtgctaaaatgttacttcagatccatgatgagttggtttttgaaagttcgataaaaaatcaaaaaaacaatgagaaattgataaaaaaagttatgacctccgtatcagcttctgaacatcatatgttttcaattccattggaagtaaatgtaaattcaggatataattggggggaggcacattaat

SEQ ID NO: 256504 - DNA, 2752 bp, Unknown
  Bacterial polypeptide expressing nucleotide sequence isolated from the Sargasso Sea
atgagcaaaacatccaaaaaagaaaattactatttaatcgatggatctggatatatcttcagagcttactatgcattaccacctttatctagaaaatctgatgggctaccaacaggagctgtagctggattttgcaacatgttattcaaattattagaagatgcaaaatcctctgataataaatctaaacctactcattttgctgtcatatttgactctgctagaaaaaattttagaaatgagatttattctgagtataaagcaaatagatcagatgcacccgatgatttgataccacaatttgactacattagaaaatctgtagaggcttttaatttaccatctatagaactcattaattatgaagcagatgatttaatagcaacttatagtgaacaaataataaaaaaggggggagatgttacaattgtatcttctgataaagatttaatgcagctatataaaaaaaatataagaatttatgacccaatgaaaaataagttcattaatgaagaagatattcaaaaaaaatttggtgtaaaagcagagaaagtaatagatgttcaatctttagcaggagatagcagcgataatgtacctggtgtacctggtataggaattaaaactgctgcagaattaataaatgaatatggaaccttagaaaatcttctgtcaaattctaaaaacattaagcaaaacaaaagaagagaaacacttattgaaaacaaacaaaaagcaatgattagtaaaaagctagttactttaaaaaaagatgtacccgtcaaagttccgtacagtgattttgttctaaaacagattgataaaaaaaaattatataattttttaagggatatggaatttaataggttattgagttcagcaatatcgacttatggcgaagttgattttaaagacgatagaaaagaatttttccgagctaagccagaaactaaaattgataaaagaaagtatatattaataaaaaatgaaaatgaactcagtgaattaatatctaaaattgaacaagaaagtgaaatatctattgatactgagacaagctctcttgatccacaccaagcagaactaattggtatatctatttcacctaaaattggtgaagcttattacatacctttaaaccataaaaattttgagaatttaatggaaaaaaatgtattaaaaaaattgcagaatatcctagaagacaaaagtattaaaaagattggtcaaaacatcaagtttgattatatcatgctttatcatagaggtattgatttagaaccattagaagacacaatgttaatgtcttatgtgttagatgctggaaaaaataggcacaatatggatactttatcagaaattcatttaggtcataaaacaatttcatacaaagatcttgtaggaagtggaaaaaaacaaataaattttagtgaagttaaaattgaagttgcaaaggactacgctgctgaagatgcagatattactttcagactttataagaaatttttaattaatctcaaaaatgaaaaattaatgaatatctacgagacttttgaaaaaccattaattaaaattttagctcatatggaaatggatggtatcaaacttgataaaaaatttttaaataaattgtctgaaaattttcaaaaaaaaatctctgatctagaaaaaaaaatttttaaaatatcgaaaaaagaatttaaaattggatcaaccaagcaacttggagaggtattatataatgacctgaaaatatctgccctaaaaaaaacgaagaaaggtagttttgctactggcgctagtgtattagaagatctcgcttacaaaggccatgagttaccacaacttgttttagaatggagacagctaacaaaattaaaaaatacttattcagattctttaccagaattcttaaatcctaacacaagtagagtgcatactagttttttattagccgctacaacaacaggcagattagcatcaagtgatcccaatttacagaatattccaattaaatctaatgatggaaaagaaattagaaaagcatttatttcagataaaggatacaaccttttatctgcagattacaatcaaatcgagatgagaatattggctgacctagcagatgtaaaagaactaaaaaaagctttcaacaataaagaggacatacattcattaacagcaagccaagtttttaatgtaaaaataaaagatgttacatctgagctcaggcgcaaagcaaaagcaataaattttggaataatttatggtatttctcaatatggtctcgcaaaacaaatctctgtgacaactaatgaagctgatgaatttctcaaatcttactttaaaaaattccctgagatcaaagattacatgtcaactacaataaatttttgtagaaaaagtggatatgttaataatatctttggaagaagaactcatataacaggaattaatgataaaaattttaatgtaagaaattttcaagaaagagccgctataaatgcaccaatccaaggatcagcatctgagttaatgagaatggcaatgatcaatatatttgaaaaaattaaagttaaaaaaataaaagattgcaagttacttttacaaattcatgatgagttaatttttgaggttaagaaagataatatagaaaatataaaaaaattagtagagaatggaatgaaaagcgttcaaaaaagtgatttgcattcattttcaattccaatacttgtagatgtaaatattggcg

SEQ ID NO: 256505 - DNA, 816 bp, Unknown
  Bacterial polypeptide expressing nucleotide sequence isolated from the Sargasso Sea
attgaaccgggaacgcagttccgctgatgctgaaatcccccctgacagaaaagtgagctgtgaagacgccagtaccattcttgaactccatgacttgtttgaacagcaattgaaacaagccgagatgatcaattcttatcggtatattgaaattcctctcgcagaaaccttggcacggatcgaatggtctggagttcgggtggatactgaaaaattaaaggaaattagtcaggaatttgaggaaaggctcgatgaattgcgtgagagaattcacgaacaggcagaagaaacttttaatgtcaactcggtggtggacctgcaaaatgtgctttatgaaaaattcaaactccatgagcgtttcaaagtcaaacccaggaaaatcaaactgggtaacggcatgtctaccgatgaagaaaccctggaaaaactttgtgaggacccccttcctcgagcgatcctggattatcgttctctgaacaaactcaaaaacacgtatgtcgatcaacttcctgatcacgtgcatcccaggtcagggcacattcattcgaggtttcaacaaacggcaactgcaacaggacgtctttcatcggacaacccgaacatgcagaatatccccatccgcagtgcagaaggccgacgaatccgggaagcctttgttccttctgattctaaccggatccttatttcagcagactacagtcaaattgaactgcgtattgttgcgcattattcgaaagacccgacctttctggaagcctacagaaataacgaagacatccatgccctcaccgcgtcaacgatcttcaaagtcccggt

SEQ ID NO: 256506 - DNA, 2719 bp, Unknown
  Bacterial polypeptide expressing nucleotide sequence isolated from the Sargasso Sea
atgccaccaaataaaactaaaaagaagcgtttatatctgattgatgggtatgccatgctttatcgtgctcatttcgcgatgattaggaacccattaatcaatagcaaaggaatgcatacatcggccctattcggatttattaatcaaattatgaaattgattaataatgaaaaacctgatttaatgattgcagcatttgattcatctaaaaaaacgttccgccatgaaaaataccctgaatacaaagccactagagaaaaaatgcccgatgaaatgattggtcaattaccctatttatggaaaatattgcagtctatggatattccaacactcgaagaaccaggttttgaggccgatgatattattggaactcttgctaccaaggcaccctgtgatgagtttgaggtgtttattgttagcggcgataaagattttatgcaattgattaatgaaaacattttcctttatgcaccatcaggcaggcaggcagatataagaatttatgaccgctctggcgtaattgataaatggggagttccacccgaaaaaattattgaccttttaggtttgatgggtgactcttcagataatgtaccaggagtgccaggggttggagaaaaaactgctgtaaagttaattaacgaatatggatctttagaaaaatcacttgaaaatgcaaatgaagtaaaaaataaaagggcgagggaagggcttttaaatgcaagaagtgaagctgtattgagcaaagagctcgttacaattgataccaatatgaatattgatatcgattataaaacgctaaatacaaatacaataaataaagaatctttagctgaaatttttcaggaactagaatttgaaacacttcacaaacagattattggaaatgataaaaaaatatctgttgatgctaataagccaaaaaaagactatttaactctttttaaggaggaagagatcgttcagtttttcaaaacaataaaggagaagcaatggctttcgtttgatattgaaaccacttcggttaatccaatgacctgcgacattgttggtttttctttctcttttaaagagcactcgggtgtatatataccaatacattacccagaaagagaagactccctttttgatgattataccaatagtgtgattgagttgatgcgaccgattatggaaaacagctctattccaaagacaggacaaaatataaaatttgatgctttaattttattgcggcatggtttaaaggtagagggtatccggtttgataccatgatcgcagctcatttgttaaaacctgaatttagaagtttaaagcttgataatcttagtttagaatacttgaattacccaatggtaccaattgaagatttgattggatcgggtagaaatcaaatatcaatggcagaagttgatattgaaaaagtatctttttatgcagctgaagatgctgatgtcgctttgcagttaacgcacattttcgagaagaaattgaagaaagagggcttgtataattttttcagtgaggttgagatccctctattatcagtattacttgaaatggaatttaatggaatgtttattgactctgatttactaaaatcaatgtccactaaaattggaaaaaaaattaataaattagtgactaatatttattctgaatcgggatatgaattcaatgttaattccacacagcaattagcgaagattttatttgacattaaggaccttcctgaggttaaaaaaagatcgacagctgaagatgtactggaaaaattaaaaaataagcacgttttacctggattgattttagaatatcgaaaattaaataaattaaaaaatacatatattgattctcttcctgaattagttaatccgttgagcggtcgaattcattcaacattcaaccaaactataactgcaaccggacgcctttcttctaccaatccaaattttcaaaatattcccatacgaacagatgaaggacgtgagattagaagagcttttagatcgaaagacgatgactggttaattttttcagctgattattctcagatcgaattaagaataatggcgcacctcagtcaagataaggcactggttgatgctttcaataagggtgaagatattcatacaagaacagcggcagatgtttttaatgtttctttagaagatgtacaaccttctatgagaagaactgctaaaattgttaattttggcttattatacggtgcaggaccattccgtatgagtcaggagttgggtattacacaaaaagaagctaaggcgttaattgagacatatttttcaacttattctggtataaaaaactatgttgaatcggttatgaaagtcgctaaaaatagtcgctatgttgaaactttactaggccgcagacgcccagtgtgggatatcgatagcagcaatcatcttcatcgagaagcagctaaaagaatggctataaatatgcccattcaaggcactagcgctgaaatgataaaattagcaatgatagcaatttcaaatcatattagctctaaatcaatgagatctaaactactcctacagattcatgatgaattagtttttgaagttccaaaagatgaattggaagagcttgaaggtttagttttagataagatggtcaatgcattgccattatctgttccaattgaagttgatagcggttatggtcaatcatggtacgaggctcattaat

SEQ ID NO: 256507 - DNA, 961 bp, Unknown
  Bacterial polypeptide expressing nucleotide sequence isolated from the Sargasso Sea
tttggcttttaaaggaaatatatttccacaattagtattagattggagacaagtttctaaattaaaaaatacttattctgactcacttccagaacatttaaatcctaattcaaaaagagttcatacatcatttttacttgctgctactacaactggaagattagcttcaagcgatcctaatttacaaaatattcctattaaaactgaagatggtaaagatattagaaaagctttcgttgctgaaaaaaataaattgttaatttcagctgactataatcaaattgaaatgagaattttagctgatttggctgatgttaaagaattaaaaaaagcttttaaaaataatgtagatattcattctttgacagcaagccaaatttttaatgtagacataaaaaaagtaaataaagaccaaagaagaaaggcaaaagctataaattttggaataatttatggaatttctcaatatggattagcaaaacaaataaatgtatcaaactatgaagctgaagaatttttaaattcttattttgctaaatttccagaaataaaagtttatatggataatacaattaagttttgtagaaaaagcggatatgtaaataatatttttggaagaagatctcactttaatgcgataaatgacaaaaattacaatgtaagaaattttcaagaaagggctgcaattaatgctccaatacaaggatctgcatcagaaattatgcgattagcaatgattagacttgataaaatattaagtgatcaaaaggatttaaaatctaaaatgttattacaaattcatgacgaattaatatttgaagttgaaaaaaatgaaatcaataaaatgacaaaaataattaaagagcaaatggcgagtgtagctgttagcgaatatcattcattttctattccattgactgtagatgttaatagtggagataattggggtgaattacattaa

SEQ ID NO: 256508 - DNA, 1246 bp, Unknown
  Bacterial polypeptide expressing nucleotide sequence isolated from the Sargasso Sea
aatggtaaatatttatgaactttttgaaaaaccaatgataaaaattttagcttttatggaaatagaaggtattaaaatagataataagtttttaaaaattttatcgtctaaatttgaaaaaaaaatagagaaaatccaaaaaaatgtttttaaaatatcaaaaaaagaatttaatattgcgtctccaaaacaacttggggaaattttatataatgaactgaaaatagcagatttaaaaaaaacaaaaaaaggtagttttgctacaagcgcatcagtgctagaagatcttgctttcaaaggacatgaatttcctcaattagttttagattggaggcaggtttctaaattaaaaaatacttactcagattctcttccggagcatattaatcctttgacaaatagggttcatacttcatttttacttgctgcaaccactaccggtagattagcatcaagtgatcctaatttacaaaatattccaattaaaagtgaagatggcagagatataagaaaatcgtttatagcagaaaaagacaatgttttaatttctgcagattataatcaaattgaaatgagaattttagcagatttagctgatgtaaaagaactcaaaaaagcatttaaaaataatgaagacattcattcattaactgctagtcaaatatttaatacagaaattaaaaaagtagatcaagatcaaagaagaaaagcaaaagcaataaattttggtattatttatggaatatctcaatacggtttagctaaacaaataaatgtatctaattatgaagctgaggaatttttaaattcatattttgccaaatttccagaaatcaaagtttatatggatcaaacaatcaaattttgtagaaaaaatggttatgtaaataatatctttggaagaagatcacattttataaatattaatgataaaaattataatgtaagaaattttcaagagcgagctgctattaatgcaccaatccagggttcagcttctgaaataatgagattagcaatgataagattagaaaaaagattaaatgagcaaaaaaataaagatactaagatgcttttacagatacatgatgaattgatttttgaaacaccaaaattcggggttgaaaaaataagaaaaataataactgaagaaatgacaagtgtagtaaatagtgaccaacattcattctctattccattaactgtagacttaaatattggtgataactggggttcacttcactaa

SEQ ID NO: 256509 - DNA, 2692 bp, Unknown
  Bacterial polypeptide expressing nucleotide sequence isolated from the Sargasso Sea
atgtttcttatagatggctatgccatgttatacagagctcattatgcaatgatccgtaatccactaataacatcatatggattgccaacaagtgcattgttcgggtttttaaaccagttattcagaatcttaaataaagaaaaaccggattacgtagctacaatttttgatagaaaagaaaaaacttttcggcataaaaaatatcctgattataaagcaaatagagaccccatgcctgaagaacttcaaatacaattaccacatttatggaaattaattgaagccctccaaataataaatttatctaaaaaagggtatgaagccgatgacattattgggacattggctattgatggtgtaaaaaataatttagaagtatatatagttagtggtgataaggactttatgcaacttattaatgataatgtttttctttatgctccaggaacaaaaaataaacctgataaagtatatgataaagatggagttaaagatcgctggggtgttccaccagataaaattatagatctatttggtttgatgggtgactcttcagataatatacctggagtatcaggagtggggccaaagtcagcaatgaaactcataaatgagtatggtacattagaagaaacactaaacaatgctgatgctgttaccaataaaagggttcgaaatggattattagatggaaaagaaagtgctataattagtaaagacctagttacaatagttactaatgtaccaataaaatataattttgaagatcttgaaaaaaaggaattaaatattaattcagtagaatccttattaacagaatatgagtttcatgcgcttataaatcaacttcctggaacatcagatttagcagaaacagttgtaaaaaaatcaagtaaagattataagattattaaagatttggatgaattaaataaatttgttcaatcaataaaaccaaaaacaatattatcctttgatattgaaactgatgggctaaaccctatgcagaataacatagtagggttgagcttttcaacaaaaataaatacgggtttttatataccaattgaatttaaagataaagaaaaaaatctctttggagaagatgatattggtactgtgattgaaataattcgaccaataatggaagatgaaaaaatattaaaaactggacaaaatattaagtttgatatgctgatatataaacgatatggcgtcaatattaatggactaatatgtgatagtatgttagcagcccatatacttaagccagaggctcgttcatacaagttagataatctaagtatcgaatatctaaattataaaatgatccctatagaagaacttattggaaagggaaaaaatcaaattactatggcagaagttgagctagagaatgcgggatattatgcctgtgaagatgcagatatagcattgcaattaactaatatatttttaaaagagcttaaggattcagatttggatcattttttcaataaaattgaattaccacttattgatgtactattgaacatggaatatgaaggtgcatttgtagatgaggaaatgttaaaaaatatgtctagtgatttaagtaaaaaagttgaaaaactatcaactgaaataattaaagaagctggttcagaattcaacattaattcaacgcagcaattagcaaatatattattcgataaattaaatcttacaaagattaaacaaagatctacagcggaaccagttttagaagctcttcgcaaagagcatcctttgccaaaattaatattagattatagaaagcttacaaaattaaaaaatacttatttagatagtctacctccactgatcaataaaaagacaggtagaattcatacaacttttagtcaaactattgcttcaactggacgtttatcaagcagtaaacctaatttccaaaatataccaattcgaactgaagaaggtcgtgaagttcgcaaggcatttaaagcacaaaaaaagaattggcttatcttttctgctgattattctcaaatagaattgcgagttatggcgcatttaagtaatgatcagtcgcttatagaatcttttaatgaaaatgaggatgttcatactaggactgctagtgatgtatttggtgttaaaataaatgatgttcttccagatatgagacgaactgcaaaagttgtcaattttggtataatgtatggggcaggggcttttcgtctaagtcaagagctaggtataccaaggagtgaggcacaaggcataattgatacttattttaagagatatgctggtataagaaattatatggataagactattgaaaatgcagaaaaacaaaaatttgtagaaactctacttggacgtagaagaaatatttggaatgtagatagtgagaatcatattcaaagagaagcagcaaaaagaatggcaattaatatgccgattcaaggaacagctgccgaaatgataaagcttgcaatgttagatattaatcgaacgttagaaagtgaaaattatagatcccgtatggttttacaaattcatgatgagttattatttgaatcacctgaagaagaaatagataaacttgaagaaatggttagagataaaatggttaatgcaatgcctcttatcgtccctttagtagtagattgtggaagaggaattagttggtttgatgctcattaat

SEQ ID NO: 256510 - DNA, 1313 bp, Unknown
  Bacterial polypeptide expressing nucleotide sequence isolated from the Sargasso Sea
aaaatcgttaaagacctggattgccgagattgaagtggccggagtggtcgccttcgataccgaaacgaattccctcgattccatgcaggccgaccttgtcggactgtccctttccgttgtgggcggcagtgcttgttacgttccactggcgcatgtcgcgccgggcggatcggatggtgaactggatttgggtgacggcggaaaagtggtggagtcgcccaagcagatcaaattagaaaaggcgctgaaactgctaaagccagtactggaagacccaggaattttgaaagtcggccacaatatcaaatacgacatgcacgtgatggctcggtacgggattgaggtcgcgcccgtcgacgatacgatgttgttgtcctacgtgctcgaaggcggcgcacacggccatggactggacgagcttgcgaccctgcatcttggccataccaacatcaaatattccgaggtcacgggaaccggtaaaaaacagatagggtttgccgaagtcgccctagacaaagcgctggattatgcagccgaggatgcagaggtgaccggtcggctttaccggcagttcaaaccgcgtgttgccgaagaacgcatgaccggcgtgtacgagacactggaacgcgggcttattccggtactgtctgacatggaacggactggcattatcgttgatcccgcgtttctaaacgatctgtccaaggatttcgaaaagcggaccgccaatatcgccgaggacgtttacaaactggccgggcacgaattcaacatcggttcgcccaaacagcttggtgaagtactgttcgacgaaatgggtatagacggcggtaagaaaaccaagactggcgcttatgggaccggcgctgatgtcctcgaggggttggctgcgcagggccacgacctgccgcgccgtgtactcgactggcgccagctttccaaattacgcagcacctacacggatgcgctgatcaagcagatcaatcccgcgacaaaacgcattcacacgtcctacgcgcaggcgatagcatcgacgggccgactgtcgtcaacagatcccaatcttcagaacatccctatccggacggaggaaggccgtaagattcggcaggcttttgtcccgcaaaaaggccatgtactgctctccgctgactattcgcagatcgaacttcgccttctggcccatgtcgccggtattgatgtactgcgtgaggcgtttcgcgagggacaggatatccacgctatgaccgccagtgaggtttttggtattcctctggagggtatggagccctcggtgaggagccgcgccaagg

SEQ ID NO: 256511 - DNA, 940 bp, Unknown
  Bacterial polypeptide expressing nucleotide sequence isolated from the Sargasso Sea
gagatagatgaaaagccaaaagaactcattaatttaattttaaaacacagagaacaaagtaagttacagaatacttatgcagagccattacctaaacttgtaaatgaaaaaactggaagattgcacccaaattttaatcaggctggcacttcaactggtcgtttatcaagcagcgatccaaatcttcagaatattcctgtaagaacagaaaataggaaccaaataagaaaagcttttgaatcaacgagtggctatgttttaatgtctgcagattattctcaaattgaattaagggtattagctcatttatcagaagaaccaagtctattaaaagcttttaataacaatgaagatattcacgaatctaccgcaaaaacgatttatcagattaacgatgtatccaaagagcaaagaagggttgctaaaatactcaattttggagtgatttatggcctagggcctgacggagtttcaagacaaaccgacttaacaagaacccaagggaaagagttcatagatatttattttggaaaataccctggcataaaaaattatttaaatagtgtcataaattttgcaaagaaaaatatgtttgtagagactttaacaaaaagaaggagattgattccagaaataaattcaaatgcatttcagttaaggaattcttcagaaagaatggcaattaacatgccaatccaaggaacagctgccgatgtaataaaaattgccatgatcaatatcaataaagaaatcattgaaaaaaagatgctctcgaaaatgattattcaagttcatgatgagttgatttttgaagtacctaaagaagaaatatttttaatggaaagcatgttaagagaaactatgtctagtgctttaaagttaaaggttccattaattgttgatatttattatgcagataattggggagacttgaaataaa

SEQ ID NO: 256512 - DNA, 2279 bp, Unknown
  Bacterial polypeptide expressing nucleotide sequence isolated from the Sargasso Sea
taagtttataactgaagaagatgtttttaaaaaatttggtgttgatgcttcaaaagtaatagatgttcagtctttagcgggagatagtagtgataatgttccaggtgtgcccggaattggcgtaaaaactgctgctgagctgattaataaatatggcaccttagaaaaattattgaaatctgctcatgaaatcaaacaaaacaaaagaagagaaactctcttagaaaataaggataaagcattaattagtaaaaaacttgtaaccttagaccataaatcgccgataaaaagagagctaagtgagtttgaattaaaaagtatcgataaagataaattatataagtttttaagagagatggaatttaacagattattaagttctgctatttcagcatatggtgagtcagttttatcaagctcttctccagaaattaaaagtatagaaaagcaaagtccaattaataataaaaattatcatttaatctcaaatccagatgaaatcgatgagtgggtcaaggaggctgaagaattaggagaggttgccgttgatactgaaacaaactctctagatcctcatcaagcagagcttgtaggaatctcactttcaccaaaaataggtaaggcctgctatattccaattggtcacaagtcatcaaaatgtattaaaaaagatattgttattaaaaaattaaaaaaattattagaggacccaagtgttaaaaaaattggtcaaaatataaaatttgattttatagttttttttaaacacggcataacattgtccgctatggaagatacaatgttgatgtcttatgttttagatgcaggtaaaaatagacataatatggatacattatcagagttacatcttggacataaaacgatctcttttaaagaaatggtaggtactggaaaaaaagaaatcaattttagtgaagtagaagttgataaagcaaaagattatgcagctgaggatgctgatataacttttagactttataagaaatttcttaaaaatctcaaatctgaaaaactgattaatatttatgaaatctttgaaaagccattaattaaaattctagcatttatggaaatagaaggtgttgagattgatagtaagtttttacaatctctctctaaaaaatttgaaaaaaaaatcctaacattagaaaaagatatatttaaaatttcaaaaaaagagtttaacatcggttcacccaaacaattaggtgaaattatttataatgatcttaaaatagcaggtttaaaaagaacaaaaaaaggtggatttgcaacaagtgcctctgttttagaggatttagcttttaagggtaataaatttccaaaattaatcttagactggagacaattatcaaaattaaaaaatacttactcagatgcattacctgagcacgtaaatccaacaacaaaaagagtacacacatctttcttattagcagccaccacgacgggaaggttagcttcaagcgaccctaatctacaaaatattccaattaaatcagatgacggcaaagatataagaaaagcatttaaggctaaaaaagatcatttattaatttctgcagattacaatcaaattgaaatgagaattcttgctgatttagctgatgttaaagagttaaaaaaggcatttaaaaatgatgaggacattcattccttaacagctagccaaatatttaatatcgatatcaaaaaagtaaatcaagatcacagaagaaaagccaaggctatcaattttggaataatttatggaatttctcaatatggtttagcaaaacaaattaatgtaacaaactatgaagctgaagaatttctaaattcatactttggaaaatttccagaaattaaagtctatatggataatacgattaaattttgtagaaaaagtggttacgtgaataatatttttggaagaagatcacattttaatgggataaatgataaaaattttaatgtaagaaattttcaagaacgtgctgcaattaatgccccaatacaaggatcggcctcggagataatgagattagccatgataagattagataaaaagttatctgaaagtaaaatttcaaaaccaaaaatgttactacaaattcacgacgaattaatctttgaagtcccaaaaaaagatgaaaagttgatgaccaaaataataaaaaatgagatgacaagtgtagctcaaagtgactttcactcattttctacccccttaacagttgatgttaatgtaggtgataattggggaatgcttcattaat

SEQ ID NO: 256513 - DNA, 1291 bp, Unknown
  Bacterial polypeptide expressing nucleotide sequence isolated from the Sargasso Sea
aatggataaaaagactaatgtttctgaatctataaacgattataaaactatattttccattgaagattttgatattttattaatgaaattgaaaaaacagaaatttgtttctttagatttagaaacaacttccctttcaccaattaatgcaaaaatagtaggcttatctttttcttttagtgctggctcaggattctatataccagttgctcatgctgaagatattaaccagcttgatttaggatttgtattaaagggattaaaaccacttttagaagataaaaatattaagaaaatagggcaaaatttaaaatatgaatacatgatttttaaaaatcataatatagaattaaatggtttattttttgatactatgattgcctcccatataattgatagctcacttcaaagttatagcctagataatttagctagaaggtttttagactataagatgatttcttataaagatgtcacacaagttgataagaaaaaaataccttttgatgaagtaccaatagataaagcctcagtatactcctgtgaagatgcagacataacccttagattgtttgaatttctaaaagaaaaattagatgaatatgggttatttgaaaattatataaactatgagatacctttcatcaaagttttaggaaatatagaatattcaggtgttaatattgatacaaaaagactttctaaattatctagtgagtttttaggaatcattaataaaattgaaaagaatattactggttttctcggcgaagaaattaatttaaattccccaatgcaattaagagaaattctttttaataaattatcattaaaacctaataaaaaaactaaaacaggtgaattttctacagactcacaaaccttacaaggaattgtagatcagcatgaggttgtttcagaaattttatcttatagattttattcaaaactgcaaaccacatacattgatgctttacctggtctattagataaaaaaacgaaaaagattcatacttcgtataatcaagttgggacttcgacggggaggttatcatctagtagtcctaatttacaaaatattccaattaaaacaaaagagggcaaaagaattagagattctttctcatctgcaaaaaagaatatggtaatattgtcagctgattattctcaaatcgagctaagattattagcacatttttcttcagaccctataatggttgaaagttttaatgcgaatgatgatattcactctataacagctggtgaaatttttaatattgataaagataag

SEQ ID NO: 256514 - DNA, 1298 bp, Unknown
  Bacterial polypeptide expressing nucleotide sequence isolated from the Sargasso Sea
ttagccgtagcttttgacaaaggtggaagtgacattagaaatgaaatgtttccagaatacaaagcaaacagagatgcaactccagaagctattaaaattgccgttccatatattcaagaaattttaaaagctatgcatattcccattatggaaaaacctggctatgaagcagatgatttaataggaacactagcaaaacaagccgaaaaagaaggttatcaagtttttatggttactccagataaagattttgcccagttggtatcagaaaacatttttatgtatcgtcctgctagaatgggaaatggtattgaaatttggggaattccagaagttcaggcaaaatttgaagtagaaaatccattacaagttattgattttttaggaatgatgggtgatgcagttgataatattccgggattacctggtgttggtgaaaaaactgcaaagaaatttttagctcaatatggctcaatggaaaaactattggaaagcacacatgagttgaaaggaaaaatgaaagaaaatattgaagctaataaagaaaaaggtattctttcaaaaaaattagctactattttactagattgtcccgtaacttttaatgaagttgattttgagctatcaaaacctgatgttgctaagaccgaagctatttttcaagaattagaattcagaagaatgcaagaacaatttgacaaaatgtttggtgatggtaatgaatatgatgaaataaacacttctacaaacgatgtccaaaaaactactaaaaaatcgacatctaaaaacgaagaccaaatggatttatttggtttttcagatgattcgaatcaagattcaaaccataattctttttatgcaactctagcaaatacagaacacttttatcaaatcattcaaggggatttagcactgaaattattggtgcaaaatttacaaaaccaatcttccgtttgttttgacactgaaactacaggtttagatgctttaacagcagaattggttggaattgcattttcttatgaaaaaggaaaaggtttttatgttcctttccctgaaaataaagaagaagctatggtattaatacaaaaattacagcctttttttgaaaatgaagctattgaaaaaataggtcaaaatttaaaatatgatttaaaaattctttctaattataatatcactgttaaaggcaaactttttgacaccatgattgctcactaccttattaatcctgatatgcgacacaatatggatgttttaagcgaaacttacttaaaatacagccccaaaaagcattg

SEQ ID NO: 256515 - DNA, 2237 bp, Unknown
  Bacterial polypeptide expressing nucleotide sequence isolated from the Sargasso Sea
tatgaataaacaaaatagattaatcttaattgatggatcggcatatatctttagagcttattatggtttgccacccatgaatagatcagacggcacaccgattaatgcagtttttggttttacaaatatgctagtaaaacttattgaagattatcgagaagacaaaatgattgttgtatttgatgcagcaagagaaaattttagaaataaaatttttaaagactacaaagctaatagaggagaaacccccgaggaactaataccgcaatttgaaataattagagaatgtgttgatgcttttaacattcctcaaattgaaatagagggttttgaagcggatgacattattgctagttattgtatattagctgaaaaacaaaaaattgaatctataatagtttcttctgacaaagatctaatgcaattagttaataagaatgtaacaatgcttgatccaatgaagaataaaagtattggtattgatcaggtaatagaaaaatttggtttaccgccagaaaaagtaatccaaatacaggccttaacaggggacaaagttgataatattcctggcgctcccggtataggccctaagactgctttgcaactcatagaagaatttggtgatgttaaatctttaattaaaaatgctaacaaaataaaccaagaaaaaagaagaaatattatagtagataataaagatgaaattttagtcagtcttgaattagttaaattaaaaagagatataaagctccctctgacaatcgataatattcattcttattcttcaatagatacaaatgagaatctatcacaatttttatctaatcaaggttttaagagtatagctgcaagattaaaaaataattcatttattaagacaaatttagaagataaaactcaagcaaatcaaattgaaaaaaagtattatcttattaaaaaattagaagatctagataaattaattaatcttataaaaaaaacgggattctgtgcaatagacactgaaacaaattctcttaatatagaagaggctattttagtcggtgtttcaatagccattgatgaaaattcagcatactacatacctgtaaatcataaaaatctagaaaacaataaaagaataaaagggcaaattaatgaagtagaattaattaaagcacttcaatcaatttgttataataaatctattttaaaaatcggtcataacataaaatatgatcttagaattttagataagtataatcttaaatttaattctatagctgatacaatgttgttgtcttatgctatcgataatggggtcacaaaacataatatggatgacttggcatatttgcatttaaatcatacaaatattaaatttaaagaacttgttgggtctggaaaaaaagcaataacatttgattatgtaaatataaatcaagcacttgagtatgctgcagaagatgctcttgttacactaaaactttataatttgttaaataatagaataaaaaatgaaaaaagtaattttgtatataatgaaattgacttaccattaattaatgttttatcttcgatcgaaaaaagtggaattaaagtagatactaaatatctttataaattaagcaaagaatttgaaaaagaaagttccattttagaaaaaaaaatttttaaattagcaggtaaagattttaatataggatcaccaaaacagttaggtgaaatcttattcatagatttaagtattcagggagcaaaaaaaactaaaactggaactttttcaacagattcttcaactttatctaatttgtcggaacaaggatatgaaattgcaagtttaatcttagaatggagagaattaacgaaactaaaatctacctatactgatgctttacaaaatcaggcaacaaaagataactcaagagttcacacttcgtacggtatagcaaacactcttacaggtagattaagttctaatgatccaaatcttcaaaatattccaatacgcacaaataatggaagaaaaataagaaaagcatttatttgtgatacaaaaaaaactttaattagctttgattattcacaaatagaattaagacttgcagctgaaatttctggtgacaataattttatagaagcttttaagaacaatgaagatattcatagttctacagcttgtcaaatatttgggactagttcaaaaaaacttgattcagaaatgagaagaaaagctaaagccataaatttggaatttt

SEQ ID NO: 256516 - DNA, 1387 bp, Unknown
  Bacterial polypeptide expressing nucleotide sequence isolated from the Sargasso Sea
taaagatctagtaggtactggaaaaaaacaactaaatttttctgaagttaatatatctgaagctaaagattacgcagctgaagatgcagacattacgtttagattgtacaaaatatttttaaaatcattaaaggcagaaaaattattaaatatttatgagttatttgaaaaacctctaattaaaatattagcagaaatggagattaaaggtattaaacttgataaatcttcactaaacaaactatcctcaaaattttcaactaaaattgaaaaattagaaaaatctatttttaagatttcaaaaaaaatatttaacattggatccactaaacaactaggtgaaataatgtacaatgatctaaaaattgcggctttaaaaaaaactaagaaaggaagttttgctaccagtgcctcagttttagaagatttggcatttaagggttatgagtttccaaaactcatcttggagtggaggcaaattagtaaacttaaaaatacatactctgatgcattaccagaacacataaatcaaaatactaaaagagttcatacatcttttttgttagcagctactacaacaggtagacttgcatctagtgatccaaatttacaaaatattccaataaagtcagatgatggtaaggatataagaaaagcctttgtttctgaaaaaaataataaattgatttcagcagactacaaccaagttgaaatgagaattttggcagatttagcagatgtaaaacagttgaaaaaggcgtttttaaacaatgaggatattcatactttgacagctagtcaggtttttggaaaagaaattaataaaattgattcagaaacaagaagaaaagcaaaagcaatcaactttgggattatttatggcatatcacaatatggtttagccaaacaaatcaatgtttcaaacaatgaagcagaagaatttttaaattcttattttaaaaaatttccagaaataaaagattatatgaaaacaactgtgaatttttgtagaaaaagtggctatgtaagtaatatatttggaagaaaaacacatctcaccggaattaacgataaaaattttaatataagaaattttcaagagagggcagcgataaatgctccaattcaagggtcggcatcagagataatgagattagcaatgatcaggataaataaagaaatctccaataataaaaataatagtttaaaaatgttgttgcagatacacgatgagttaatttttgaggaaagcttaaaagaaacaaaaaaaagtactaaattaataaaggatttgatgttgagtgttaaaaatagtgaacttcactcattttcaatacctcttttagtcgatgtgaatattggagaaaattggggcgaacttcattga

SEQ ID NO: 256517 - DNA, 637 bp, Unknown
  Bacterial polypeptide expressing nucleotide sequence isolated from the Sargasso Sea
gatgaaaatcgaagtaaaaactgaaaatctattaaaatgtctacaatcagttattggtgttgtcgaaagaaagcagacaatgccaattttagctaatgtacttgtaaatgtagcagatgataagctgtctattacagctacagatttagaggtagaactcatctcaaaaaccactgtatcgtctactgagaatgggtcttttacacttccaggccgaaaactcttagatatttgcagggctctcccggtttcatcggatctcacgcttcaacaagacgattcaaaaatttctatttcatcaaaaagaagcaagtttagtctttcaactttaccagaaagcgagtttcctcttatcaaaggtataaacgatgtagaggttatttctgttgatcagtctagtttaaaaaaccttattaacaaaacacacttttcaatggcacaacaggacgtaaggtattatttgaatggtttattggttgaatcagaaggcaataaactcagggcggtggcgactgatggacaccgattagcaatatccgataccgatttaacagacccaagagacggaaaaaaacaggtaattcttcctagaaaaggggtaattgagcttcaaaggcttcttgataaaaaaggaagc

SEQ ID NO: 256518 - DNA, 2173 bp, Unknown
  Bacterial polypeptide expressing nucleotide sequence isolated from the Sargasso Sea
cctgctattggtcgacggttcgagttatctgtaccgggcctaccatgcgatgcctgatctgcgcggacccgaaggtggtccgacgggggcgctctatggaatgatcaacatgctgcggcgcatgcgcaaggaagtcaccgcagagtatagcgcgtgcgtgttcgacgccaagggcaaaacgttccgcgacgactggtatgccgactataaggcgaaccgcccgtcgatgccggaagacctcgctcgccagatcgagccgattcacgtcgccgtgcgcgcgctcggctggccgctgctgatgatcgagggcgtcgaagcggatgacgtgatcggcacgctcagcaccgaagccgagaagcgcggtatgaatgtgatcgtgtcgactggggacaaggatctggcgcagctcgtgtcggatcatgtcaccctcatcaatacgatgacgaacgagaagctcgaccgcgaaggcgtgatcgccaaattcggcgtgccgccggaacgcatcatcgactacctgtcgttgatcggcgataccgtcgacaacgtgccgggcgtcgagaaatgcggcccgaaaacggccatcaaatggctcacgcagtacgagacactcgacggcatcgtcgcacatgcggacgaaatcaaaggtgcggtaggagacaatctgcgacgtgcgctcgattttctgcccatggcgaaaaaactcgtcaccgtcgaacgccaatgcgatctgaccggccacatcgtgtcgatcgaagagagcctgcaaagccggccggaatcgcgtgaggaactgcgcgacgtgttcacccgcaacggcttcaagacctggctgcgcgaagtggaaatcgccgatgctgtggaaggtcccgagaccgacgtgccgccggcgcttaccgtggatcacgaacgtcactacgacaccgtgcagagctgggagcagttcgacacgtggctcgagaaaatcaacgccgccgggttgacggcgttcgataccgaaaccacctcgctcgatccgatgaccgcgcaaatcgtcggcttgtcgctgtcggtcgaacctgggcgcgcggcttacgtgccgctcgcgcaccgtggcccggacgcgcccgtgcaattgccgcgcgacgaagtgctggcgaagctcaagccgtggctggaaagcgccgaacacaagaaagtcggccagcacatgaagtacgacgagcaggtgctggctaactacggcatcgaaatgcgcggcgtcgaacacgacacgctgctggagtcgtacgtgctcgaatcgcaccgcacacacgacatggacagcctcgcgctgcgccatctcggcatcaagacgatcaagtacgaagaggtcgcgggcaagggcgcgtcgcaaatcggcttcgacgaagtcgcgctggacaaggccgccgaatacgcggcggaagatgccgacattaccttgcgtctgcatcaggccttgtattcgcaggtggccgccgagaaaacgctcgactacgtgtatcgcgatatcgaagtccccacctcgcgtgtcctgcgcaagatggagcgcaccggtgtgctgatcgacgcggaaaaactgcgcgcgcaaagcagcgaaatcgccacgcgtctgattcaactggaaagcgaagcgtacgagctggccggcggcgaattcaacctgggctcacccaagcagatcggccagatcttcttcgagaagctcgaattgccggtggtcaagaagaccccgagcggcgcgccgtccaccgacgaagaagtgctgcaaaagctcgctgaagactatccgctgccgaagatcctgctcgaacaccgcggcctgtcgaaactgaaatcgacctacaccgacaaactgccgcgcatggtcaacgccaccaccggccgcgtgcatacgaactatgcgcaggcagtggcggtcaccggccggctggcgtcgaacgatccgaacctgcagaacatccccgtgcgcaccgccgaaggccgccgcattcgcgaggcgttcattgcgccgccgggtcacaagctcgtttccgccgattattcgcagatcgaattgcgcatcatggcgcacatttccggcgacgaatcgttgctgcgggcgttctcgcagggcgaagacattcaccgcgccaccgcggcggaaatttcagcggacgccgctcgaagtgtcgag

SEQ ID NO: 256519 - DNA, 1105 bp, Unknown
  Bacterial polypeptide expressing nucleotide sequence isolated from the Sargasso Sea
aaaatttacaaaatatccaagaaaaaattcaatattgcttcaacaaagcaacttggtgaaattatgtatgaagatttaaagatagcttctctgaaaaagacaaaaaaaggtagttttgccactagtgcatcagttttagaggatttagctttcaagggtaatgaatttccaaaacttgtattagagtggagacaaatttctaaacttaaaaatacttactcagactctttgcaagagcatattaatcctaaaacaaaaagagtacatacatcttttttattggccgcaacaacaacaggcagattagcttcaagtgatccaaatttacaaaatataccgattaaaactgaagatgggaaggatataagaaaatcttttgtttctgaaaaaggaaatattttaatatcagcagattataatcaaatcgaaatgagaattttggcagatttagcagatgtaaaagaattgaaaaaagcttttaataatcaacaagatattcattcacttacagccagccaagtatttaatgttaaaataagcgaaattaattcagacatgagaagaaaagcaaaagcgattaattttggaattatttatggaatttctcaatatggcttagcaaaacaaattatggtatcaaataatgaagctgcagaatttttaaattcatactttaaaaaatttccagaaattaaagattatatgaacgaaactataaaattttgtaggaagagtggatatgttaataatatttttggtagaagaagtcatataactggaattaacgataaaaattttaatataagaaattttcaagaaagagcagctattaatgcgccaatccagggatctgctgccgaaattatgagattagcgatgataagaatttcaaaaagaattgaagaggctaaagaaaaaaaatgtaaaatgttacttcaaattcatgatgaactaatatttgaagttccaaaggaaagtgaaaaaaaattcacaaatttgataagacaagaaatgacaagtgtaaaggatagtgatcttcattcattctcaacgcctctcacagtagatgtaaatagtggagaaaattggggtttacttcattagt

SEQ ID NO: 256520 - DNA, 1069 bp, Unknown
  Bacterial polypeptide expressing nucleotide sequence isolated from the Sargasso Sea
gcttcaccgaaacaattaggtgaaattatttataatgaattaaaaattgcaggattaaaaaaaacaagaaagggcagttttgctacgagtgcagtcgtgctagaggatttagcatttaaagggtatgaatttcctaaattaattttagattggcgacaaacatcaaaacttaaaaatacatattcagattctttaccacaacatattaataataatacaaatagagttcatacttcttttttattggcagcaaccacaacaggaagactagcctccagcgatccaaatttgcaaaatattccaataaaatctgaagatggaaaagatataaggaaggcttttatttctagaaaaggctatagtttagtttcggctgattataaccaaatagaaatgagaattttagccgacttagctgatgtcaaagaattaaaaaaagcatttaaaaataatgaggatattcattctttaactgctagccaggtctttaatattgatataaaaaaaattgatcagaatgcaagaagaaaagctaaagcaattaattttggaataatttatggaatatcccaatatggattagcaaagcaaataaatgtttcaaatcatgatgccgaaaaatttttgaattcttattttttaaaatttccagaaataaaaaaatatatggactctaccataaatttttgtagaaaaagtggttacgtaaataatatttttggaagacgatcttattttaatggaattaatgataaaaattttaatgttagaaattttcaagaaagagcggctataaatgctccaatacaaggctcagcttctgaaataatgagattagctatgattagattagataaaaagtttaaaagtttaaaatatataaagtcaaaaattttactacaaattcatgatgagttaatttttgaagtacctaattcagaaataaaaaaaattatacctataattgaacaagaaatgacaagtgtagcaaatagtgatttacattctttttcaaccccattaactgttgatataaattcaggagataattggggtatacttcattaat

SEQ ID NO: 256521 - DNA, 676 bp, Unknown
  Bacterial polypeptide expressing nucleotide sequence isolated from the Sargasso Sea
agattattcacaaatcgaactcaggatcatggctcatctctcgaaagatcaaggcttaatggatgcttttgcaaatggccaagatatccatcaggcaacagctgcagagatattttccataaatattgatgatgtgacacccaatcaaagacgctctgcaaaagcaataaactttggtctgatctatgggatgtctgcatttggactatcgaagcaattgcagatcacaagagcagaagcacaaaactacatagagcaatattttgagcgatatccaggcgttaaaaactatatggatgagacaaaatccagtgcgaagcaaaatggctatgtagagaccgtgttgggccgaagactttatttggcagatattgaatcatccaactatcagagaagacaatatgctgagcgcagtgcaatcaatgcaccaatgcagggcacagcagccgatttgataaaaatggcgatgactgacttacatagaagaatcagaaatgaatcccttgatgcaaaaatcatcatgcaggtacatgatgagcttgtgattgaggtggatgagaatcaattagacgaattgtctgatctcacagtaaatattatggcagacatctttaagcttgatgtcgatttaaaggttgatgctgatattggaaataattgggatgaggcccactga

SEQ ID NO: 256522 - DNA, 630 bp, Unknown
  Bacterial polypeptide expressing nucleotide sequence isolated from the Sargasso Sea
tagaagcttttaagaataatgaagatattcatagttctacagcatcacaaatattttgtgttgatttaacaaagcttgaccctgaaatgagaagaaaagcaaaagcaattaactttggtattttatatggaataagtccctatggtttggctaaacagttatccgtaactaattctgaagcaaaaatttatatcgaaaattattttaaaaaatatccaaaaattaaacaatacatggatagtcaaatcgaatttgcaaaaacaaacctctatgtagagactatatttggaagaagatgtaatgttaaaaatataaatgataaaaattttgcagtaagaggatttgcagaaagacaggctattaatgctcctattcagggtaccgctgctgatataattaaattagctatgatagagttgaatagaattattcttaaagaagagctaaaagccaaaatgctattacaggttcacgatgaactgatattcgagattgaaaaaagagaaaaagacacttccgtaaaaaaaattaaatttgtaatggagaatactcatttacaatttaaagattttcaagttccacttttagtagattatggttttggaaataattggggtgatgcccactaga

SEQ ID NO: 256523 - DNA, 1525 bp, Unknown
  Bacterial polypeptide expressing nucleotide sequence isolated from the Sargasso Sea
ggccgcttcaaggtctacctcatcgatgaagtgcacatgttgtcgcgccacagcttcaacgcgctgctgaaaaccctggaagagccgcccccctatgtgaagttcctgctggccaccacggatccgcagaagctgccgatcaccatcctctcgcgctgcctgcagtttcatctgaagagtctggatcagacccagatcgccaagcagctcgaatgggtgctggatcaggagggacaaccctttgaaccgcgcgccctgctggcgctggccaaggcggccgacggcagcatgcgcgatgccctgagcctgaccgatcaggcgctggctcacggcaatggcagcgtgcgcctagatagcgtgctggccatgctgggcacgctcgatcatcgccatctgcaccagctgttggaggcggtgctgcgccaggatgcgccggccaccatggccaagatcaccgaaattgccaccctgggccccgattttgatcagctgcacgccgagctggaagggctgctccatcgcatcgccatggcgcagctgctgccggccaccgtgcaggagcagggggcggacgccgatgccctgctgcagctggcccaggccatgagcccggaagaggtgcagctctgctatcaaatcgttctgggcggccgtaaagacttgccttgggcacccgatggccgtaccgcgctggagatgacctgcctgcggatgctggccttctcgccccggcgtgaagtactgcaccccgccagcctgacggcgctgccccccgccatgggagggttggcgccagaggcgagaagtggcgcagcggcgccgggaaagccccagggggctgagccggccccggctgccagtgcagcgccacaggcttcgtctgcggttgccgccaccgcgcctgccgcgaccatggccccagtggtgatggccgagcctacagctgtcgagccagcgccggatagacaggataacggcgccgagctggatccgttgtttgccgagcaggatgagttgctgcgcgaggccgagcagatgggttacgaggcggcgacgttgccggccgcatccggcgacctgccggctgaggcgtctgtggctcccccttcagtgcctgtcatggccgagcccgagccaattgcgcaggccgaggtggtggccgacgcagaggctgtcccctcgacggtttccagcatgcaaagcctgcttggcaagcgcaatctgctgcgcagtcgcttgcgcagcgaaccgtcggcggcgaccagcgctgcgcgcactgctcccgccaaaccggtggctgccgccagaccggcaactgcgatgcaaccagccgccgtcacgccagccccggctttcgagccgcaaccggcgcgggttgatgggcaagggcagacgtctgcccggccagctccgcagacggggtatgacgacttgccgccgctcgatgcctatgaagagagcggcagcgactacgaagagtatttgagccaaggtttcagcgatgcgttcgccagcgtccctctgc

SEQ ID NO: 256524 - DNA, 1240 bp, Unknown
  Bacterial polypeptide expressing nucleotide sequence isolated from the Sargasso Sea
aatggagggcgcataccacaacatagaaataccactagccggtactcttgcagagcttgaaatgactggagtaaagttggatgttggaggattgaaaaaagttgctcttgagtttgatggacgccttactgaattacgtaataaaattactgaactttcgggggaagaatttaatccaaattctgtaattgaactacagaaaattctttatgaaaaacttagaatgcatgagcggttcaacatcaaaccaaaaaaaattaaacttggcaaccgtatgtctactgatgaggaaacattggaaaaacttgctgaagatgaattaccacgcactatcctagactatcggacactaaataaacttaaaaacacatatattgatcagcttccggaatatgttcatttaaacagcggaaacatccactcgacatttcatcaaactggaacatccacagggcgtctgtcatcagaaaatccgaatttgcagaatattcccgttcgttctactgaaggacgaagagtccgtagtgccttcattgcatccggaactgaaaatatcctgatttctgctgattacagtcagattgaacttagagttgtagcacattattcaaaagacccgacttttttggaagcataccgtcgtaacctagatattcactcgcttacagcttcaactatttttggtgttgcagaaaaagatgtgacgcgtgaaatgcgcgacagagcaaaagaagttaatttcggactgatttatcgtatgggcgctgagaggctgtcaatagttagcaaaactaccaaagctgaggcaaaagaatttattgaacgctattttgagaaatacagcactattcacgctctgcaagagcaattcttggaacaggctcgaaaagaaggttttgctgagactttattcggaagaagacgatacttgcctgatataaattcaaaaggacttttgaaaagaatggcagaaggtgcagctataaacactccaatccaaggttctgcagcggaaatcatcaaactggccatgattgatgtggaaaatctgttgagagaaaaaaaaatgcagtcaagaatgatacttacagtgcacgatgagctagtttttgatgcactcaaagaagaggaatatgaattatgcgagattgtcaagcatgcaatggagaacgtggttggcctcgaggttcccctgctggttgaaataggaaaggggcagacctggcttgaagctcattaa

SEQ ID NO: 256525 - DNA, 2326 bp, Unknown
  Bacterial polypeptide expressing nucleotide sequence isolated from the Sargasso Sea
atgcagctttataaaaagggagtaagaatttatgatccaatgaagaacaaatttataaatcaagatgatgttcataataaatttggagttactccagaaaaagtaatagatgtccaatctttagctggtgatagcacagataacgtacctggtgtacctggaataggagttaaaactgctgctgaattgataaatcaatatggaactttagaaaatttattaaaaaatgcatcaaaaataaaacaaaataaaagaagagaaactttaataaataacaaggacgaagcaatcattagtaaaaaactcgttacattaaaaaaagatgtacctgtaaaaaataaaattgaagaattcaaattgaaaagtgttgatcaagaaaagctttatacttttctaagagaaatggaatttaatagactattaagttctgccatctcaaagtatgggggcacaaataatcctggaaccaaagatattgataaaaatttagaaaaaacagcagaaattaagaaaaaaaattatgaattaataaaaaatgagaaggagattgaagattggatgaaagaatctgaggaaataggtgaatttgctatagatactgaaacaacatcattagaccctcacacagcaaagttagtaggcatttcaatctctaacagaattggaaatgcatgttatatcccattaaatcacgtcagtggaaataatcttaatgaaaaaaaagttttaagcgttttaaagaattatttagaggatgagagtattaaaaaagtaggacaaaatattaagtttgatttcattgtcttttatcaccgaggaataaccttaaattccatggaagatactatgcttatgtcttatacactagatgctggtaaaaataggcataatatggatactctttcagagatccatctaggtcataaaactataaaatttaaagatttagttgggacgggaaaaaaacaacttaatttttctgaagtggatatatctgaggctaaagattacgcagctgaggatgcggatattacatttagattgtacaaaatttttttaaaatcattaaaagcagaaaaattattgaatatttatgagttatttgaaaaaccactaataaaaatattagcggagatggagataaaaggtattaagcttgataaatcttctttaaataaactgtcttcaaaattttcaaataaaatccaaaaattagaaaaatctatttttaagatttcaaaaaaaatatttaatattggatcaactaagcaacttggtgaaataatgtataatgatttaaaaattgcagctttaaaaaaaactaaaaaaggaagttttgccactagtgcttcagttttagaagatttagcttttaaaggttatgaatttccaaaactcatcttagaatggagacaaattagtaaacttaaaaatacatactctgatgcattgccagaatatattaatcaaaatactaaaagagtgcacacatcttttcttttagcagcgactacaacaggtaggcttgcatctagtgacccaaatttacaaaatattccaataaaatcagatgatggcaaggatataagaaaagcctttgtctcggaaaaaaacaacaaattgatttcagcagactacaatcaagttgaaatgagaattttggctgatctagcggatgtaaaacaacttaaaaaggcatttttaaataacgaggatatacatactctaactgcgagccaggtttttggaaaagaaattgataaaattgattcagaaacaagaagaaaagcaaaagcaatcaactttggaataatttatggaatttcacaatatggtttagctaaacaaatcaatgtttcaaacaatgaagcagaagaatttttaaattcttattttaaaaaatttccagaaattaaagattatatgaaaacaactgtgaatttttgtagaaaaagtggttatgtaagcaatatatttggaagaaaaacacatctcactggaattaatgataagaattttaatgtaagaaattttcaggaaagggcagcgataaatgctccaattcaagggtcagcatcagagataatgagattagcaatgataaggataaataaagaaatctctaacaataaaaataatagtctaaaaatgttgttacaaatacatgatgagttaatttttgaggaaagctcaaaagaaacaaaaaaaagcactaaattaattaaggatttgatgttgagtgtgaaagatagtgaacttcactcattttcaatacctcttttagtagatgtgaatattggagaaaattggggtgaacttaattgaa

SEQ ID NO: 256526 - DNA, 1399 bp, Unknown
  Bacterial polypeptide expressing nucleotide sequence isolated from the Sargasso Sea
actataaaatttaaagatatagttggaacaggaaagaagcagataaacttcagcgaagtagatttagaagttgctaaaaattatgcttctgaagatgctgatattacttatcgattatacaagatatttttaaaatctttaaaatcagaaaatttaattaatatttacgaaatttttgaaaaaccattaataaaaattttagcaatgatggaaataaatggaattggattagataaaggttttcttaaaaaactgtcttctaaattctcaagtaaaattcaacaatttgaaaaaaagatttataaaatttcaaataaaaaattcaatattgcttctactaaacaacttggtgaaataatgtataatgatcttaaaatttcttcactaaaaaaaacaaaaaaaggtagttttgcaactagcgcttcagtattagaagatctagcattcaaaggacatgaattacccaaattagttttagattggcgacaaaccagtaaacttaaaaatacatattctgactccttacctgagcatctaaattccaagacaaatcgtgtacacacttcttttttattagcagcaactactactggaagactggcttcaagcgacccaaatttgcaaaatatacctataaaatcagaagatggtagagacatcagaaaagcatttatttctgaaaaaaataagaaattaatatctgcagattataatcaaatagaaatgagaattttagcagacctagcagatgtaaaagctctaaaaaaagcatttttaaacagtgaggatattcattctttgacagctagccaagtatttggcgttgagataaaaaaagttaattcagaaatgagaagaaaagcaaaagctattaactttggaataatttatggaatatcacaatacggattggcaaaacaaattggagtttctaataatgaagcagaagagtttttaaattcctatttccaaaaatttcctgaaataaaagaatatatgaattcaactattaaattttgtagaaaaagtggatatgtgcaaaatatatttggaagaaaaactcatattattggaataaatgataaaaattttaatgtaagaaattttcaagaaagagctgcaattaatgctccaattcaaggttcagcttcagaaattatgagattagcaatgataaggttgaatagtgaattgaatttaccaaaaaatcaaaatttaaaaatgttacttcaaattcatgatgaattgatttttgagacaaatattaatgatcttaaaaaatcatcaaagttaattagtgatattatgatgagtgttaagaatagtgaacagcattctttttcaatacctttattagtagatgttaattcaggtaaaaattggggagaacttcattaaa

SEQ ID NO: 256527 - DNA, 1290 bp, Unknown
  Bacterial polypeptide expressing nucleotide sequence isolated from the Sargasso Sea
ttagattatacaaaaaatttcaaaaaagtttgaaggatgaaaaaatgataaatatttatgagatatttgaaaagcctctattaaaaattcttgcacatatggaaattgagggagttaaaatagacaataaatttttaaaatcattatctactaaatttgaaaaaaagattgtcaaaattcaaaatgaagtttttaaaatatctaaaaaagaatttaatattgcatcaccaaaacaactgggagaaatattatacaatgatcttaaaattgcagatttaaaaaaaacaaaaaaaggaagttttgcaacaagcgcttcagttttagaagatttagcatttaaaggtcataagtttcctcaattagtattggattggagacaagtatctaaactgaaaaatacctactcagattccttgccggaacatatcaatcccaacacacaaagagtacatacctcttttttattagcagctactacaactggcagattagcctcaagcgatccaaacttacaaaatattccaattaaatctgaggatggaaaagatattcgtaaagcatttatagccaaaaaagatcatgttttaatttctgcagattataaccaaattgagatgagaattttagctgatttggctgacgtgaaaggattaaaaaaagctttcaaaaacaacgaagatattcattcactcacagctagtcaaatttttaatgttgatataaaaaaagtaaatcaagatcagagaaggaaagctaaagctataaattttggaattatatatggaatttcacaatatggattggcaaaacaaattaatgtcacaaatcatgaagctgaagaattccttaatgcttattttttgaaatttcctgaaataaaaatttatatggaccgaacaataaagttttgtagaaaaagtggatttgtgaataatatttttggaagacgatcacattttattaatatcaatgataaaaactacaatattagaaatttccaagagcgcgcagcaattaatgctccaattcaaggctcagctgcagaaataatgagattagctatgataagacttgataaaaaattaagtgatcaaaaaaatcaaaatacaaaaatgttgttgcaaatccatgacgagttaatttttgaaactcccaaagaagaagtaaaaagaatcagtaaaattataattgatgaaatgtctagtgttgttaagagtgaacagcattctttttccatacctttaacagttgatctaaataccggagaaaattggggtacacttcattaat

SEQ ID NO: 256528 - DNA, 1131 bp, Unknown
  Bacterial polypeptide expressing nucleotide sequence isolated from the Sargasso Sea
catgaaatataccctggactacaaagctaacagagaggcaatgccagatgaacttgtaagtcaaattcaattactctacaaagctttagattataatggactaaaaccaattataatagaaggttacgaagcggatgacgtaattggaacgttaactaaaaagttcaaagatgaaattgaaatattaattttttcaggcgataaagatttttctcagcttgttgatgatagagtttctattataaatccagtaacatataagcctcttgatcatgatggtatatttgaaaaatttaatgtgtacccaaaagaattcatagactttttagccttagttggtgataaatcagacaatattccaggagttgatggtataggtcctaagactgcatcttcattgataagaaagtttggatctactgaaaatatcattaaaaacgcagataaaattactggaaaaaataaagaaaaaataaaaaattctcaaaataatattaatctttctaaaaaattagctgaaataaaatgtgatgtaaaaaatagttatactcttgatcaattaattaaaaaagatattcaattaagcgagttaattcaactttataaaaaacttgaatttaaaaatcttttaaaagatattgatagatcaaatgaaaaaccagataaagataatactaaaataacaaaaaaaaaatattctattatttcagatgagaaaaaattaaataaactcatagaagaaattaatgataaaaagatcatatcattagatttagagactactagcttagattatattaaagcagaaatagtaggaatatctatttcttatacggtagcagaagctttttatatacctgtcatgcatgacgacgactcaataaagcaaattaaacgtgataaagttttaaagaaattacacaaaatatttgaatctaaattaattaaaaaaattggtcataacttaaaatatgacaaaaatgtactttttaactatgggattaatcttcagggtgtgtcagacgacactatggttttatcgtatgtatataactcaggcattatgaggcataacttagattcacttgcttccatgtatttagactatgagactattaagtacgaggaatt

SEQ ID NO: 256529 - DNA, 692 bp, Unknown
  Bacterial polypeptide expressing nucleotide sequence isolated from the Sargasso Sea
tgttttgatttccgctgactactcgcaaattgaattaagaatcatggctcatctatctggagataagaatttaactcatgcatttaataacaacatagatgttcattcagctaccgcttcagaaatatttaatatttcccttgaagaggttacaccagagcatcgaagaagcgctaaagccattaactttggattaatctatggcatgtctgcttttggattaaccaggcagcttgggattccacggcatgaagcgcaagcttatcttgatacatactttgagagatacacgggagttagaaagtatatggatactacaaaagaacttgctaagaaaaatctctttgtagaaactattttaggaagaaagctccatgtggctgctattaatgattcgaatggactaagacgtcaagctgctgaaagagccgctattaatgccccattacagggctctgcagcagatattattaaaaaagcaatgattgatgtagaccaatggattggaaaaaacaactcagatataaaaatgattatgcaggttcatgacgaactcatttttgaggtaaaaaaaggtttcgctgatgaagcactcaaaaatattataagccttatggaaggctcagttaaattagacatccctttaatagtggatgcaaacacaggagcaaattggaatgaagctcattaat

SEQ ID NO: 256530 - DNA, 2776 bp, Unknown
  Bacterial polypeptide expressing nucleotide sequence isolated from the Sargasso Sea
tatgaacaaaataaaaaactcagaccattattatcttattgatggttctggttatatatttagagcttattatgcacttcctcctctcactagaaaaagtgacggtatgcctacaggagctgtaagcggcttctgcaatatgttatttaaattgttagaagattctaagtcagatgagaacaaaaataaacctactcattttgcaataatatttgattcagcaagaaaaaattttagaaacgaaatatattcagactataaagcaaataggtctgatgctcctgatgatttgatacctcagttcgaatatataagaaaatctgttgaggcatttaatttaccttcaattgaattattaaattatgaagctgacgatttaatagctacatattctgaacaaattctaaaagaaggagcaaaggtgacaattgtttcttcagacaaagatttaatgcaattatataaaagtaatattcgaatttacgatccaatgaaaaataaatttatttcaaatgaagatataaacaataaatttggagttaatccagaaaaagtaattgacgtacaagctttagcaggtgatagtagtgataatgttcctggtgtaccaggaataggagtaaagacggccgctgaacttattaatgaatatggaaatttagaaaatttattaagaaattcagaaaaaataaaacaaaataaaagaagagaaactttaattcaaaataaagataaagctataattagtaaaaaattagtaactcttaaaaaagatgtacctataaaaatcaaaatttctgaattcaaattaaaagaaattaataaagatagattatataattttttaagagaaatggagttcaatagattattgagctctgtaatttctacttatggtgatattaattttaaagataaaaataaagattttgataataaacaaaaaaaacaaagtatttcaaaaaataattatcaactaattacaaaagtagaagaaattaacaaattcttaaatgaggctgaagaaaatggagagattgcaattgatactgaaacgagctctttagatgctcatcaggcaaaattaattggaatttccttatctacaaaaattggaaaagcctgctatataccaattggacataaaacaggcattaatcttgatgaaaaaacagttgtacaaaaaataaaaccaatcttagaagatcaaagcattaagaagattgggcaaaatattaaatttgattttattattttaaataacagaggcatcaatatgaatgcgatggaagataccatgttaatgtcatatgttttagatgcaggaataaacagacataatatggatactttgtcagaaattcatttaggtcacaaaactatttcttttaaagatattgtaggtagtggaaaaaagcagattaattttagcgaagtagaaattgacaaagcaaaaaattatgcagcagaagatgcagatataacttacagattatataaattattttctaagaggttaaaattagaaaaattattaaatatttatgaaatttttgaaaaaccattaataaaaattttagcgttaatggaagtaagaggcattaaggtagataaaaaaatacttacaattctttcaaatatatttgatcaaaaaactaaaaaattagaaaaagagatttataaaatttcaaaaaaagaatttaaaattggttctacaaagcaacttggtgaaattatgtataatgaaatgaaaatttcatcgattaaaaaaacaaaaaaaggtagctttgcgactagtgcacaagttttagaagatcttgcttttaaaggccataaacttccaaagttagttttagaatggaggcaagtaactaaattaaaaaatacttactcagattctttacaagagcatattaattcaaatacaaaaagagttcacacttcctttttgttagcagcaactacaacaggaagattggcatctagtgatccaaatttacaaaatattccaataaaatcagaagatggcaaagaaattagaaaagcttttgtagctgaaaaacataataaactaatttctgccgattataatcagattgaaatgagaattttagctgaccttgctgatgtaaaagagttaaaaaaagcatttaataacaaagaagacattcactctttaactgcaagtcaagtttttaatacttcaattactaaagttaatccagacatgagaagaaaagcgaaagctataaattttggaataatttatggaatttcgcaatatggtttagctaaacaaattggagtttcaaatgtagaggcttcagaatttttaaatgcttattttttaaagtttccagaaatcaaaagttatatggatgcaacaattaaatactgcagaaaaagtggatatgttagtaatatttttggaagaagaacacatgtcacaggaattaatgacaaaaattttaatattagaaattttcaagaaagagcagctattaatgctcctattcaaggatcagcttctgaaataatgagaatggcaatgataagagtaaataaaaaattagaagaaatcaaagattcaaaatgcaaaatgttattacaaattcatgatgaattgatatttgaagttaatgaaaatgatgtaaaaaagtattctaaaattattcaggatgaaatgtcgagtgttaaagatagtaatctgcactctttctcgattcctttgcttgttgatattaatgtaggtaataattggggagaactacattaa

SEQ ID NO: 256531 - DNA, 1366 bp, Unknown
  Bacterial polypeptide expressing nucleotide sequence isolated from the Sargasso Sea
aaaaatcaaaaaacccttaatcaaatagatattagtaaagtttacaaatatgctgcagcagattcattaataacattcaaactaagaaatttttttatagaagaattaaaaaaattcgatcaagaaaatcttttctacaatgtagaaatccctttaattaatgaaattatagatatgcaatttagtggaataaatttagatataaatttgctaggaaatatgtcaaataaactagaaatagacctaaacgagatagaaaatactattcataatatttatccagaaaaagaattcaacttaaattcaggaaaacaactttcagaaatattagtagaaaatctaaaggcaccacctataaaaaaaactaagacaggaatttcagttgatgcagaagttcttgaaaaatactcaaaagataaagatctagatgaaagagtgcaacaaatttcttcaggaattctaaaatatagagagctcgcaaaacttaaatctacttacgttgattcattaccaagtttagtgagtaaaaaaacaaaaaaaatacacacaacatttaatcaaattggaacttctactggaaggctttcaagtcaaaatccaaatgtacaaaatattcctgtgagatcaaaaattggaaaacaagtaagatcagcttttattgtagattataaaaaaaattatcaaatgctttcagttgactactctcaaatagaattaagagttttggctcatctttctaaagaagaaaatttagttatggcttttaataatggtgaagatatacataattcaacagctaaactaatgtatgaaaccaatgacgtaaactcagagcaaagaagaattgcaaaaattcttaattttggtgttttatatggactaggcccacacggagttgcacaacaaacagacttatcaagagaacaaggtaagcaatttattgatttatattttggaaaatatccgggtattaaggactttcaaaaactgcaaattgataactcaaaaaagactggctactcaaaaacattgcttggaagaagaagatatcttgaagatataaattctccaaatgctagaattaggggttttgcagaaagaattgcgatcaatatgcccattcaaggaactgctgcagagataataaaggttgcaatgattaaattaggtcaaaaaataaggtatgaaggaatgagatcaaaaatgttagttcaagttcatgatgaactgatatttgaagttgcaccaggagaacttatggaacttggttcaatgataaatgaaatcatgcctgaggctataaaacttgatgtccctgtactagtagatataaaaacaggctcaagctggggtagtttagagtaat

SEQ ID NO: 256532 - DNA, 907 bp, Unknown
  Bacterial polypeptide expressing nucleotide sequence isolated from the Sargasso Sea
cctgaactatcgtacacttaataaacttaaaaacacatatattgatcagcttcccgaatatgttcatttaaaaagcggaaacatccactcgacatttcatcaaactggaacagccacagggcgtatgtcatcagaaaatccaaatttgcagaatattcccgttcgttccactgaaggtagaagagtccgtcgagccttcattgcatcaggaactgaaaatatcctaatttctgctgattacagtcagattgaacttagagttgtagcccattattcaaaagacccgacttttctggaagcataccgtcgaaaccttgatattcattcactgacagcttcaactatttttggtgttgaagaaatagatgttacgcgtgaaatgcgcgacagagcaaaagaagttaattttggactgatttatcgtatgggtgcagagaaactgtcaatagttagcaaaacttccaaatctgaggcaaaagaatttattgaacgctattttgagaaatacagtactattcatgctctgcaagagcgattcttggaacaggctcgaaaggaaggtttttcagagactttattcggtagaagacgctatttgccagatataaattcaaaaggaattttgaaaagaatggcagaaggtgcagctataaacacgccaatccagggttctgcggcggaaatcatcaaactggccatgattgctgtggaaaatctgttaagagagaaaaaaatgcagtcgagaatgatacttacagtgcacgatgagctagtttttgatgcactcaaagaagaggaatatgaactatgcgagattgtcaagcatgcaatggagaacgtggttggccttgaggttccgctgctagttgaaataggaaagggtcagaactggcttgatgcacattaa

SEQ ID NO: 256533 - DNA, 1375 bp, Unknown
  Bacterial polypeptide expressing nucleotide sequence isolated from the Sargasso Sea
ggaacaggcaagaaagaaattaattttagcgaggtagaattagataaagcaaaagattacgctgctgaagatgctgatgttacttttagattatataagaaatttatcaaaaatttaaaatcagaaaaaatgataaatatttatgaaatttttgaaaagccattaattaaaattcttgcatttatggaaatagagggagttgaaattgatagtaagtttttaaaatctctttcatctaaatttgaaaaaaaaattaaaaaacttgaaaaaaaagtatttaaaatttctaaaaaggagttcaatatcgcatcccctaagcaattaggtgaaataatatacaatgaccttaaaatagctggattaaaaaaaacaaaaaaaggaagttttgcaacaagtgcaagtgttttagaggatttagccttcaaaggtcatgagtttccaaaattaattttagactggagacaagtttcaaaattaaaaaatacttattcagatgctttacctgaacatttaaacccaaatacaaaaagagttcatacttcgtttttgctggctgctacaacgactggaagacttgcatctagtgatcccaacttacaaaacataccaattaaatcagaagatggaaaagatataagaaaagcattcactgcaaaaaaagggcacctattaatttctgcggattacaatcaaattgagatgagaattttagcagacctggcagatgtaaaagaactgaaaaaagcttttaaaaataaagaagatattcactctttaacagctagccaaatatttaatattgatattaaaaaagttaatcaagatcaaagacgaaaggctaaggctattaattttggaattatttatggaatttcacaatatggattagctaagcaaataaacgtttctaattatgaggcagaggaatttttgaattcatattttgctaagttcccagaaattaaagtttatatggataatacaataaaattttgtaggaaaagtggatatgttaataatatttttggacgaagatctcactttaatggaataaatgacaaaaactttaatgtcagaaattttcaagaacgtgctgcaattaatgcccccattcaaggttctgcttctgaagtaatgagactagctatgataagattagataagaaattatcagagcaaaaaaattctaattcaaaaatgctcttgcaaattcatgatgaattaatttttgaaattccaaaaaaagatgaaaaagtaatgattaaactaattgagaaagagatgactagtgtagctgaaagtgactatcattctttttctacccctttaacagtcgatattaatgttggagataattgggggatgctccattaaa

SEQ ID NO: 256534 - DNA, 1749 bp, Unknown
  Bacterial polypeptide expressing nucleotide sequence isolated from the Sargasso Sea
ccaagccatttatttctatagatacggaaacatcatctctaaaccccttagaggcagatctagttggaatttcttttagctatgataataatgaagcctattatattcctataggacataaaaatataaaagggcttaataaagaattagttttaaaaaaaattaaacctttacttgaagacccaagcattaaaaaagttggacagaacattaagtacgatcttattattttagaaaaaaatggaattaatattgatcccgtagaggatactatgttgttgtcttatgttttagatgcaggaaataacaggcataacatggatactctttccgagttacatctgggccacaaacctatttcttataaagacgttgttggttcaggaaaaaaacaattaaacttttctgatgtaagcttagaggaggcaactaagtatgctgctgaggatgcagatgtaaccttaagactttataatttattattggaaagagttaataatgaaaaattaaaaaagatttatgaagtttttgaaaaaccaatgataaaattactttcaaaattagaaataaatggagttaaagttgatcatacgtatttaaaaaaattatctaaaaaatttgaagaaagattaaaaaaaatagagaaagcaatttatgaagtttcaggaaaagagtttaatattggttcaccaaaacaacttggtgaaataatttataatgatttaaaaattgcaaagttaaaaaaaactaaaaaagggagtttagccacaagtgcaaaagttttagaagacttggcattaacaggacataaatttcctaatttagtcttagagtggagacaagtatctaaattaaaaagtacctatacggacgctttacaagagcatattagtaataaaacaaaaagagttcacacatcatttcttttagccgccactaatactggacgactagcctctagcgatccaaatttacagaatattccgattaaaactttcgatggcaaagaaattagaaaagcttttattgcagaaaaaaatcatattcttatttcagcagattatgatcagatagaaatgagaatcttggcggacatggctgatgtaaaagagctaaaaaaggcttttaaaaacaatcaggacattcatgccttaacagctagccaagtttttggattgccactaaataaagttactgatgaaactagaagaaaagcaaaagcaataaattttggaattatttatggtattactcaatatggcttagctaaacaaatagctgtatctcatcaagaagctttagactttataaattcttattttaaaaaatttcctgagatcaaagattatatgaattcaacaattaaaacatgcaggaagcagggctatgttacaaatatatttggaagaaggattcatctacgaggaattaatgataaaaattttagcgttagaagttttcaggaaagagcagcaattaatgctcctatccaaggctctgccgcagatataataagattagctatgataaaaatagataaaattctatcaggtaataaaaacccagccaaaatgcttcttcagatacatgatgagttaatatttgaatgtttaaaaaaaaatgagaatgaaataaaaaaaataatcaaagatgctatgacctcaatttctagttcagagcatcatatgttttcaattcctttggaggtaagtattaattcaggcaataattggggtgaagctcattaga

SEQ ID NO: 256535 - DNA, 1279 bp, Unknown
  Bacterial polypeptide expressing nucleotide sequence isolated from the Sargasso Sea
attgataaaaaaaactaaaaataccgatattcaattctgtagagattgcctacatcaaacaaaaaaattaagtgatttatgcggtaaatgtttatctccaagagttattaatcataaagaattaaaaaatttatcgatagctcatatagattgtgatgctttttatgcttctgtagaaaaaagagataacgctgacttaaaaaacaaacctctgatcataggtgggggagatagaggtgtagtttcaacagcttgttatattgcgagaacaaaaggtattcactctgcaatgcctatttttaaagcaagaaaattatgcccagaagcaataattttaagaccaaatatgagtaaatataagaaagtaagctatgaaataagggatttaatgaaagagcttaccccgcttgttgaaccaatatcactagatgaagcatttctagatttatcaggaacatttaagttacatcagaaaataccagctgtattgttagctgaattagttaataagataaaaaagcatgtaggaattaacgtttcagttggattatcatacaataaatacttagcaaaagtatgttcggatttagataaaccaaaagggttttcagtgattgggcaagaagagtcaaaagattttttatccaataaacctgtaagtttattatggggtgtaggtaaaaaattcacaaataaattaaactctgatggaataataaatattggccagatccaaaaaatagaaataaaggaattagtcaaaagatatgggattataggtcttcatatttatcaattatcaaatggaaaagattcaagatcaataagatcaaatcgacctattaaaagcataagtcatgagataacattcacaaaaaatattaaaaatagaaaaaaattagaaaacattcttagtgatttatcaagaaaagttgcctttagggcaaaaaagaatggattaggtggaaaaacaataaatttaaaattaaaaacaaaaaactttaaatcaatttcaagatctaaaactattaataaccctactcaattagagagaaaaatatataaaattgctaaagatttattaactagtattaaagataatgaagaatataggttaataggtgtaggaatttcagagcttgtagatgaaaacttctgtgatttagataatttaattgatacaaatgagaataacgaaaagaaactagatcaagctataaattctttaagagataaatttggaagcaatataataaatcacggaaaaaactatgaataa

SEQ ID NO: 256536 - DNA, 707 bp, Unknown
  Bacterial polypeptide expressing nucleotide sequence isolated from the Sargasso Sea
caacatacttgtctcgattgattactcccaaatcgaactgagacttttagctgaaatagcaaatatagacagcttgaaagaggcctttagagacgggattgatattcacgcgcaaactgcctcggaagtatttaatatttccttagaaaatatggaccctatggtcagaagaaatgcaaaagcaataaattttggtattatatacggtatttctagctttggtttagcacggcaactgcgttgcccgcaaaccgaagccaaagaatatatcgatgcttatttcgatagatacccaggcattcaaacctatatggagcaaaccaagattggcgcaagagagaacggttttgttcaaacgctctttggtagaaaggtccatttatccggcatcaaggaagcgaacccagcccgacggggtttttatgagagggccgccataaacgcacctatccaagggacagcagcagacattataaaacgagccatgattcgtataccaagtctcttgaaagaagaaagcctagacgcaaaaatgctactcaccgtccatgatgaacttttatttgaagtaccaacggcacaattagataaaacctcccaaattatatctgcagcaatggaaggggcggcggcacctgccgtagaaatgtcggtgcctttagtagctgaagtcggtgtcggaagtaattgggcagaagcccactagc

SEQ ID NO: 256537 - DNA, 2254 bp, Unknown
  Bacterial polypeptide expressing nucleotide sequence isolated from the Sargasso Sea
gatgtctaagccaagactaatacttgttgatggttccggatatattttccgagcttattacgccttacccccaatgaataattctaagggcatccccacaaatgcagtttatggtttttgtaatatgatgcttagacttattgaagagcatccaaatgacaaaatactaatcattcttgatgcaggaaggaatacttttcgaaatactttatttcccaaatacaaagcaaatcgtggtgaggcaccagaagatttgattcctcaatttagtattattcgtgaagctattgatgcgtttggtttagatgttattgaaaaaaaagactttgaggccgatgatgttatagcaagttacgttaaatatggtgaagacaataaaatacccaccacagtatttagttcagacaaagacctttttcaactgttatcagctaataatcgcatcatggatccaatgaaaaatattgaaattgatgaagcaaaggtaatggaaaaatttggtgttggccctgacaagattacagatgtacaagctttaattggtgatagtgttgataatattcctggcgtccctggcatcggaccaaaaacagcctctaaattaattaatgaatttggttcttttgagggccttctggcaaataaagagaaaatatcaaatgaaagaattaaaaatcttatacatgatcatgaggaaaaagcaaaaataagccaccaactagtaattctaaaaaatgatcttgaactacctattacaatcgaaaagttaaaagattttgaagactcaccaaaacttaatgactttttcaaaaaatatgaatttaaatcattaattagaaatagcgctcatgaaacaaagccgcatgcggccaaaaaaaacttagaatttaaatcacttattaagacaaaagatataatcgaatatctaaagtctcttcaatctgaaaaaaccttagcgatagatttagagacagatagtttagacgtaaatgaagcaaatatcattggcatttcattatctaatgcacagcaagcttattacctaccttttaaatcacctgaaaatgaaatatctgagacagatcaaaaaaaaatattaaaagaactgaatttattatgtgaagatccttcaattttaaagatttttcataatgctaaatacgatagtgttattttaaaacgctttaacgtaaatactatttcttttcaagataccttattaatgtctttttttgtcaataacggtttaacaaaacataatcttgaggatttgtattattattattttggagaagaaaaagaaaaatttaaagatgtcattaaaaatgagtccaaaagaaattataaagatttttctgaagtgcctttacagtctgcaacaaattacgctgctcatgatgcttatgccacttataaattatatgagacattacacgatcaaatattagatgcccccgatagttatatatattttgatatcgataaaaaattaagcttagtccttcaacaggttgaaaacaatggttgtaagattgatcttaaatttttaacaaaacttgaaaaagatctaaataaagaaattgaaaaaattgaacagaaaattttcaaaatcgcaggtgaggagttcaatattggttcaccaaagcaacttaccgaaatcttcaagaaacttgatgtgaaggtaacaaaaaaaacaaaagcaggagattttcaaactaatgtcaaagtcttagaacaattagagtctgagggagtagagattgcctcgcatattctacaatggcgtcaatactccaagctcgtgtcgacctatacatcttctttagctgaacatgctgataataacgatcgagttcacagcacatttaatattgcagcaactattacgggtagattaagttcatctgaacctaatttacaaaatatccctattagaactgagatcggaaagaaaattagaacagcatttattgcagaaaaagatcatgagttatatagcttcgattactcccaaatcgagcttcgtgtgctttgtgaagcgtgcgaagaccctaatttattaaaggctttccaagaggatcaagatattcatcaaagtacaggccaattagtttttaacaaaaaaacaattaatgctaatgatcgaagaatggccaagattattaattttggaataatctatggaattagccaatatggtttagctaaacagttaggtgttagcaatgctgaagcaaagcttttcatagataac

SEQ ID NO: 256538 - DNA, 1102 bp, Unknown
  Bacterial polypeptide expressing nucleotide sequence isolated from the Sargasso Sea
tatgaattttaatattaatagaaatgagcttttaccagcgcttcaagcagtaagcggcatcgttgatcgcagacaaactctgcctattttatctaatttgcttttcgatattaaagccgaatcgttcacaataaccgcaacagatatggaagttgagctcgttgtagaggtttctgcgaaactaggtcaaagcacgaggctgactctgccggcaaaaaaaatatcagacatatgccgcttatcccccgatggcgctgaactcgaatttaatattaaagaaaacaaaacactaataaagtcaggaaaaagcagatatacattagcaacgctaccagcacaagagttccctttggtcgatgtggctgatgaaaccgtagatttcagtgtcgatcagaacaaactaacagagttgttggccaacacagaatttgcaatggcacagcaggacgttcgttattatctaaacggccttttgttggaaatttcaggcgacaagcttgtagcagtagctacagacggacatcgcctcgcatttgacgagacaaaaatcaacgcctcattaagcaatgtaaaacagataatcgttccaagaaaagcggtaactgagctagtaaagcttcttcattcagcaaaaagcgaggttaatgtaagcgtaagcaagaaccacatacaaattacaacaggcagcctatcttttacaagcaaactgatcgacgggaaatttcctgattacaagaaggttgtgcctgaacccagcagcacagccacgctcgctgatagagaggccttaaaaaacagtttagaaagagtgtcaattttatccaacgaaaaataccgcggcgtaagaattgcgtttggtaaagatgcgcttagtttgacggcacacaacccagagaaagaagaagcggacgaggagttggcggtagagtatcaaggagaagagatggagatcgggtttaacgttgaatatctaaaagacgcactcaaaaccataaaaacaaaaaaagtaatattgagtgttttaaacccgaacagcagctgtttgatacttccagaaaaagaatcctgttgtcagtacgtggtaatgccaatgaagctgtaa

SEQ ID NO: 256539 - DNA, 2726 bp, Unknown
  Bacterial polypeptide expressing nucleotide sequence isolated from the Sargasso Sea
aatgaataaaattcaaaaatctgatcatttttatctgattgatggctcaggttatatttttagggcttattatgctctaccacctttaacacgtaaaagtgatggactaccaaccggtgctgtaagtggattttgcagcatgttatttaaattattagaagactctaaatcaaatcaaaataaacaaaagcccacacactttgcagttatttttgactcagcaagaaaaacttttagaaatgaaatttaccgtgactataaagcgaaccgatctgaagcaccagacgatttagctccacaatttgaatacattagaaaatctgttttggcatttaatctaccttcagtcgaactcgccaactatgaagcagatgaccttattgcaacctatgtagaccaaattttaaaaaaaggtgcaaatgttacaattgtatcttcagataaggatttaatgcaattattcaaaaaaaatgtccgaatttatgatccgatgaaaaatagatttatttctgatgaagatgtacaaaaaaagtttggagtagactcttcaaaagtaattgatgttcaggctttagctggagacagcagtgataatgttcctggtgtgcctggtataggagtaaaaacagcagcagaattgataaataaatatggaaatttagaaacacttttaaaatctgctaatgaaattaagcagaataaaagaagagaaacaattattgagaataaagacaaagcattaattagtaagaaattagttactttaaaaaatgatgctcctgtagacaggtctttaacagagtttcaattaaaggaaatcgataaagataaactttataaatttttaagagaaatggagtttaatagattgctaagctcagcaatttcagcttatggtgaaccgaaacttacctcagaaaaagatattgttaaaactgacgaaaaacaaaaagctatcgatagaaaaaaatattatttaataacaaatcttgacgaaatcgacagctggattaaagaggctgaggaagtaggagaagtggcggtagatacagaaacaagttccctagatcctcatcaagcagatcttattggaatttcacttagttctaaaattggtaaagcttgctatattcctgtagggcataaatcaaaaaaaaatattgataaagatcaaacattaaaaaaacttaaacctttgctcgaagacccgagtataaaaaaaatagggcaaaatattaagtttgatttcattgttctatttaaacacggtattaagattacatctatggaggataccatgcttatgtcgtacgtgttagactctggtaaaaatagacacaatatggatactttatccgaaattcatttaaatcataaaccgatagcatttaaagacttagttggtactggaaaaaaagaaattaattttagttttgttgatttagaaaaggccaaagactatgcagcagaagacgctgatgttacttttagattgtataaaaaatttaataaaagtttgaaagacgagaaaatgatcaatatttacgaaacatttgaaaaaccaatgataaaaattttagctgatatggaaatagaaggtattaaaattgataatgattttcttaagacactgtcttcaaaatttgggaaaaaaattgaaaaaattcaacgtgaagtttataaaatatcaaaaaaagaatttaatattgcatctccaaaacagcttggtgagattttgtataatgatcttaagattgcggacttaaaaaaaaccaaaaaagggagctttgcaactagtgcatcagtattagaagatttagcttttaaaggccataagtttccacaattagttttagattggaggcaaatctcaaaattaaagaatacttattcggatactcttccagagcatattaatccaaaaactaaaagaatacatacctcctttttactggcagcgactacaacaggaagactagcttcaagtgatccaaatttacaaaacattcccataaagtctgaggacggcaaggatattaggaaagcattcattgcagaaaatggtctctctttaatttcagcagattataatcaaattgaaatgagaattttagctgatttagctgatgttaaagaattaaaaaaagcttttagaaataacgaagatattcattctttaacagctagccagatatttaatattggtatcaataaagttaatgaagatcaaagaagaaaagcaaaagcaataaactttggtattatttacggtatctctcaatatgggttagccaaacaaataaacgtatctaaccaagacgctgaggaatttttgaatgcatattttgctaagtttccagaaataaaattatatatggataaaacaatcaaattttgtagaaaaagtggctatgtgaataatatctttggaagaaaatctcatttcataaacatcaatgacaaaaactataatgttagaaactttcaagaacgtgcagccataaatgctccaattcaaggatctgcgtctgaaattatgagattggcgatgatcaggcttgacaaaagacttaaagagcaaaaaaataaaaaaacgaaaatgttacttcaaattcatgatgagcttatttttgaaacttctaaagaagaagtgaaaagaatcagtaaaattataattgaagaaatgtctagcgtagttaaaagcgaacatcactcattttcaatac

SEQ ID NO: 256540 - DNA, 916 bp, Unknown
  Bacterial polypeptide expressing nucleotide sequence isolated from the Sargasso Sea
agacagttaagcaaacttaagaatacttattctgaatcattaccaaactatataaataaaaaaactaaaagaattcacacatcttttttacttgcagcaacgacgactggaagactagcctcaagtgatccaaatttacaaaatattccaataaaaactgaagatggtaaagatattagaaaagcatttattgcaaaaaaaggatttacacttatttctgcagattacaatcaaattgaaatgagaatattggcagatcttgcagatgttaaacaattaaaaaaagcatttcaaaataatgaggacatacattctttgaccgcgagtcaagtttttaatactgatgtaaaaaaaataaataatgatatgagacgtaaggcaaaagcaattaactttggaataatttatggaatttctcaatatggtttagcaaaacaaataggagtatcaaatcaagaagctgaagaattcatgaactcatatttccttaaatttccagagatcaaggaatatatgagctcaacaattaatttctgcagaaaaagtggatttgttaacaatatatttggaagaagaacacacatagttggaattaatgataaaaattataatgttagaaattttcaagagagggcagctataaatgcaccaatacaaggatcagcatctgaaattatgagaatggctatgattagaataaataataaattagaaaaaaataaaagtttaaattgtaaaatgttattgcaaattcatgacgaattgatttttgaagttgaagaaaaagaatcaaaaaaagcaggcaacttaataaaagatgaaatgactagtgtaaaaaatagtgatttacattctttttcaatacctttgtcagttgatataaattttggtagtaattggggtgttctacattaaa

SEQ ID NO: 256541 - DNA, 1450 bp, Unknown
  Bacterial polypeptide expressing nucleotide sequence isolated from the Sargasso Sea
gaaaaatcgtcataacatggatacattatctgaaattcatttaggtcataaaccaatttcatataaagatcttgttggaactggtaaaaaacaaattaattttaaagacgtagatataaaaaaagctttggaatatgccgcagaagatgcagatattacttttagattatataaaattcttaaaacaaatcttaacaaagagaaattattaaatatttatgaaatttttgaaaaacctatgattaaaattttggcaggtatggaaatatcaggaattaaagtcgatgataaatttcttaaaattttatccaaaaaatttgaaaaaaaaattaaggatttagaacaaaaaattttcaaaatatctaaaaaggaatttaatattgcctccactaaacaattaggagaaatattatataatgaattaaaaatttctacattaaagaaaacaaaaaaaggtagttttgcaactagtgcatctgttctcgaggatttagcttttaaaggaaatgagttgccaaaacttgtcttagattggagacaaatctcaaaattaaaaaatacttattcagactcacttcaagaacatataaatccaaaaacaaaaagggttcatacatcctttcttcttgcagcaactacaacaggtagattagcatctagtgatcccaatttgcaaaatataccaataaaaacagaagatggaaaagagataagaaaatcatttattgcggaaagaggaaaaaaactaatatcagctgactataaccaaatagaaatgagaatattagcagatttggctgatgtaaaagaattgaaaaaagcttttaaaaataatcaagatatccattcactaactgctagtcaaattttcaattgtgatatcaaaaaagtaaatgctgatatgagaagaaaagcaaaagcaattaattttggaattatttatggtatatcccaatatggtttagccaaacaaataatggtctcgaaccaagaagcacaggaatttttaaattcttattttttaagatttccagagataaaagattatatgactaaaacaataaaattttgtaggaaaagtgggtatgttaataatatctttggaagaaggagtcatatatcaggtataaatgataaaaatttcaatgtcagaaattttcaagagagggctgcaattaatgcccctatacaaggatctgcgtcagaaataatgagattggcaatgataaggcttaacaaaaaatttgagcaaacaaaaaataatcaatgcaaaatgttactgcaaattcacgatgaattaatttttgaaataccgataaatgaagagaagaatttagtaaaattgattattaatgaaatggcaagtgtcaaagatagcgatttacacacattttcaactcctttaacagtagatgtaaatactggtgaaaattggggtatacttcattga

SEQ ID NO: 256542 - DNA, 1669 bp, Unknown
  Bacterial polypeptide expressing nucleotide sequence isolated from the Sargasso Sea
tttttctttttgctttgaatctggaaaagctttttatgtacctttagaacataatgagagcactgatctttcaaaggatgttggaataaaatggttaaaagaaatccttcctaaaaactcatcaaagcttatagggcagaatttaaaatatgatttagcagttctttcaaaagaaggaatttacctagagtcctttcttgctgatacgatgcttatgtcatacgtattaaacagcactgcatcaagacataacctagatgcactttctgagtattatcttaattttaaaactattaaatatgaggatgtaataggaaaaggagcaaagaaatataaatcatttgctgatgtgccaattaaagaagcaacaaattatgctgctgaagatgctgatataactttgcggttatatgaaaagttgtgtgatcttcttgatgaaggagctcaagatattttaaaaaaaatggaatacccattattaattgttttaatgcaaatggagaaagatggagcacgtgtagacacgggacatctaaaaaaattatcaaataattttggtgatcaacttatgaaattagcaaaaaaaatacacgatgcctccgcctccgtctttaatattgattcgccaaaacaacttagcgaagtgctttttgaaaaactaaaaattgaaacaaaaggtcttaaaaaaacgagcacaggatactactcaacatcagagagtgtgttacaaaaattagccaacgaaaatcctattgttaaagatattcttaattacaggtcattggcaaaactgaaaagcacttatacagataagctatctgaaatttgtgatgcctcttccagagttcatacgtcctatcagcaagctgtaacatcaacaggaagattatcttcttcagaacctaatcttcaaaatataccaattagaactagagaaggagtgacaatacgagaagcttttgtggcttcagaaggcaaaaagattctagcaatggactactcacaaatcgaattaagacttatggcacattattccaaagatcaaattatgctagattcttttaaaaataacgaggacattcataaaagaacagcatcagaggttttctcagttgaaatggaaaatgtaacagacgaaatgcggagaagggcaaagaccattaactttggtttgctctatggaatgagcgcttttggtctttcaaatcaattatcagtatctagggctgaagctgaggagtttcttctaaattacttcactaaatactcctccatcaaggtattcatgaaagatattgttgaacaagcaaaaaaagataaatatgtctctactctctacggcagaaaaattcatgtccctaatattgagtcaccaaattacatgttaagacaagcttcagaaagagcagcagttaatggccccttgcaaggtagtgctgctgatattattaaaagagcaatgattaatatctttaaagaatctggaaagaatgaaaaagatgtaaaaatgatactgcaagttcacgatgagttagtattcgaagttccagaagattatgatgaaaaaaatatttcttacttaattgatttgatggaagagagctcttcgattgatgtgccactaaaagttgagtatggctttggcgcaaattggcgagaggctcattag

SEQ ID NO: 256543 - DNA, 2776 bp, Unknown
  Bacterial polypeptide expressing nucleotide sequence isolated from the Sargasso Sea
aatgaataagattcaaaaaacagatcatttttatctaattgatggatcaggttatatatttagagcatattatgccttaccaccattaactcgaaaaagtgatggattaccgactggagcagtaagtggtttttgcagtatgttgtttaaacttcttgaagactcaaaatcaaatgaaaatcttcagaaaccaactcattttgctgttatttttgactcagcgagaaagacttttagaaatgaaatttatagtgattacaaagccaatcgatctgaggcgccagatgacttagcaccacaatttgaatatataagaaaatcagttttagcctttaatttaccctctgttgaattagttaattatgaagcagacgatttaatcgcaacttatgttgatcagattttaaaaaaaggagcaaaggtaacaatagtttcatcagataaagatttgatgcaattgtatagaaaagatgttcgtatttttgatccaatgaaaaataagttcatctctaatgaggatgtaaaaaacaaatttggggtagatccagataaagttatagatgtacaggctctagctggtgatagcagtgataatgttcctggtgttcctggaattggtgtaaaaactgcagcagaattaattaataagtatggtgatttagagacacttttaaaatcagcagatgaaatcaaacaaaataagagaagagagactctactaaacaacaaagataaagctttaataagtaaaaaattagtaacattaaagcacgatgctccaattgaaatgaaactcaatgattttgaattaaaaaaaattgataaagataaactttataaatttctaagagaaatggagtttaataggttacttagctctgctatttctgcttatggggagccagattttagtggtgaaaaaaaagatattcaattaaaggaaaaaaaaattgaaattgataaaaaaaattattttctaataacagagcacagtaaaattgatgaatggattaaggaggctgaagaaataggagaagttgcagttgatacagaaacaaattctttagatcctcatcaagctgatttagtcggagtatctttgagctctaagattggaaaagcttgttatataccaataggacataattcaaataagtgcattgataaagacatagtgcttaaaaaattaaaacctttacttgaagatccaagtatcaaaaaaataggtcagaatattaaatttgattttattgtattttttaatcatgggataacgctatcagcgatggaggataccatgctcatgtcttatgtgcttgatgctggaaaaaatagacacaatatggatacgttatctgaaattcacttgaatcataaaacaataaaattcaaagaattagttggttctggaaagaaacagataaattttagtgaagtcgatttagaaaaagcaaaagattatgccgctgaggacgctgacataacttatagactatataaaaaattctataaaagtttgaaagaagaaaaaatgattaatatttatgaaatttttgaaaagccattacttagaattttagctgatatggaaatacacggtattaaagttgataaaaagtttctcaaaacattatctaccaaatttgaaaaaaaaattgaaaaaattcagaaagaagtttttaaactctccaagaaagagtttaatattgcttctccaaaacaactgggtgaaattttatacaatgatcttaagattgcagacttaaaaaaaactaaaaagggaagttttgcaacaagtgcctcagtattagaagatctcgcttttaaaggtcataaatttccacaattagtcctagactggcggcaagtttcaaaactaaaaaatacctactcagactcattacccgaacatattaatcccgatacaaaaaaagttcatacttcttttttattagcagcaacgactacaggacgattagcttcaagtgatcctaacttgcaaaatattccaattaaatcagaagatggtagagatattcgtaaagcttttgttgctgacaaggataatattttgatttcagcagactataatcaaattgaaatgagaattttagctgatttggctgatgttaaagaattaaaaaaagcttttcaaaataatgaggatatacactctttaactgctagccaaatttttaatattgatattaataaggtgaatcaagatcaaagaagaaaggctaaagccataaactttggaataatttatggaatttcgcagtatggattagcgaagcaaataaatgtctctaattttgaagcggaagagtttctaaattcatatttctcaaagttccccgaaataaaagtttatatggatcgaacaattaaattttgtagaaaaagtggttatgtaagtaatatttttggaagaagatctcattttataaatataaatgataaaaattataatgtgagaaacttccaagaacgtgcagcaattaatgctccaatacaagggtcagctgctgaaataatgagattagcaatgataagaattgataaaaaattaagggagcaaaaactcaacaaaacaaagatgttacttcaaatccatgacgaactaatttttgaaagtcctaaaaatgaagtaaaaaaaatatccaaagtgataattgaagaaatgtctagcgttgctgagagtgatcaacattctttctcaatacctcttacagtagatttaaacactggagaaaattggggtacattacattaa

SEQ ID NO: 256544 - DNA, 2776 bp, Unknown
  Bacterial polypeptide expressing nucleotide sequence isolated from the Sargasso Sea
aatgagtaaaatacaaaaaactgatcatttttatcttattgatggttctggatatatctttagagcttattacgcgttaccaccattaagtagaaaaagtgacggactgccaacaggggcagttagtggtttctgcagcatgctttttaaacttttagaagactcaaaatcaaatcaaaatttgcagaaaccaactcattttgcagttatttttgactctgccaggaaaacatttagaaacgaaatctatagtgaatataaagcaaacagatctgaggcgcctgatgacttggcacctcaatttgaatatataagaaaatctgttttagcatttaacctaccatctgtagatttacccaattatgaggcggatgatttgattgcaacttacgttgaccaaataataaaaaaaggagcaaaggtcacaattgtttcatcagataaagatttaatgcaattatatcaaaaaaatgtccgtattttcgatccaatgaaaaataaatttgtaactgaggaagacgtcattaaaaagtttggggtagatgcatcaaaagtaatagatgtccaatccttggcaggcgatagtagtgataacgtaccaggtgtacctggaataggagtaaaaactgctgctgagcttattaataaatatggcactctagaaaaattattgaaatcagctcatgaaatcaaacaaaacaaaagacgagaaactctcttagaaaataaagataaagcattaataagcaaaaaacttgtgacattagatcataaatctccaataaagagagagctagatgagtttcagttaaaaagtatagacagagataaattatataaatttttaagagagatggaatttaatagattattaagttctgctatttctgcatatggagagccagacctaacgagctctgttccagaaactaaaaatatagaaaagcaaagtccaattaataataaaaattattatttgatttctaacccagatgaaatagatgagtgggttaaagaggccgaagagctaggagaggttgctgtcgatactgaaacaaattctctagatcctcatcaagcggaactggtaggtatctcgctttcttcaaaaataggtaaggcctgctatattccaattggtcacaaatcatcaaaatgtatcaaaaaagaagttgtaattaaaaagctaaaaaaattattagaggatccaagtgttaaaaaaattggtcaaaatattaaatttgattttattgttttatttaaacacggcataacattatctgccatggaagatacaatgttgatgtcttatgttttagatgcaggaaaaaatagacataatatggatacattatcagagttacatcttggacataaaacaatttcttttaaagaaatggtgggaactggaaaaaaagaaatcaattttagtgaagtagaagctgataaagcaaaagattatgcagctgaggatgctgacgtaacttttagactttataagaaatttcttaaaaatctaaaatctgaaaaattgattaatatttatgaaatttttgaaaagccattaattaaaattctcgcgtttatggaaatagagggtgttgagattgatagtaggtttttaacttctctttcaaaaaaatttgaaaaaaaaatcctaacattagaaaaagatatatttaaaatttcaaaaaaagaattcaacatcggttcaccaaaacaacttggtgaaatcatttataatgaccttaaaatagcaggtttaaaaaaaacaaaaaaaggtggatttgcaacaagtgcttctgttttagaggatttagcattcaaaggtaacaaatttcctaaattaatcctggactggagacagttatcaaaattaaaaaatacttactcagacgcattacctgaacacgttaatccaaaaacaaacagagtgcatacttcctttttattagctgctactacaactggaagactagcttcaagtgaccccaatctacaaaatattccaattaaatcagatgacggcaaagatataagaaaagcatttaaggctaaaaaagatcatttattaatttctgcagattacaatcaaattgaaatgagaattctcgctgatctagctgatgtgaaagaattaaaaaaggcatttaaaaacgaagaagatattcattcattaacagctagccaaatatttaatattgatattaaaaaagtaaatcaagaccacagaaggaaggctaaagctattaattttggaataatttatggaatttcccaatatggtttagcaaagcaaattaatgtaaccaactacgaagctgaagaatttctaaatgcatactttggaaaatttccagaaattaaagtctatatggaaaacaccattaaattttgcagaaaaagtggttatgtaaataatattttcggaagaagatcacacttcaatgggataaacgataaaaattttaatgtgagaaattttcaagaacgtgctgctattaatgctccaatacaaggatcggcttcagagataatgagactagcaatgataagattaaataaaaaaatgtctgaggataaaattactaaaccaaaaatgcttcttcaaattcatgatgaattaatctttgaagttccaaaaaaagatgaaaagttgatgactaaaataattaaaaatgagatgacaagtgtagctcaaagcgactttcattcattttctatccctttaacagtcgatgtcaatgtaggtgataattggggaatgcttcattaa

SEQ ID NO: 256545 - DNA, 353 bp, Unknown
  Bacterial polypeptide expressing nucleotide sequence isolated from the Sargasso Sea
actgaaccaaaattacaaaaatatacctataaaaactgctgaaggcagaagaattagagaggcttttgttcctgagaaaggcaatatattaatatcagcagattactctcaaatagaacttaggataatggctcacttatcagatgataaaaatttaaccaacgcatttaataatgatattgacgttcattcttcaacagcggctgaggtttttggagtttcaattgaagatgtttctcaagatcaaagaagaagcgctaaagcgattaattttgggttaatgtatggaatgtctgcttttggattgacaagacaacttgaattccaagaggcgaagcacaagaatatttaga

SEQ ID NO: 256546 - DNA, 1256 bp, Unknown
  Bacterial polypeptide expressing nucleotide sequence isolated from the Sargasso Sea
agcagaaaaattattaaacatttatgagttatttgaaaaaccattaattaaaatactagcacagatggagataaaaggtattaaacttgataaatcttcactcaacaaactttcttcaaaattttcaaataaaatcgaaaaattagaaaaatctatttttaagatttccaagaaaacatttaacattggatcaactaagcaacttggtgaaataatgtataacgatttaaaaatagcagctttaaaaaaaacaaaaaaaggaagttttgctactagtgcttcagttttagaagacctagcttttaaaggttatgaatttccaaaactcattctggaatggaggcaaataagtaaacttaaaaatacttattcagatgcattaccggaacatataaatcaaaatactaaaagggttcatacatcttttttgttagcagctacttcaacaggtagacttgcatctagtgatccaaatttacaaaatataccaataaaatcagatgatggtaaggatataagaaaagcctttgtttctgaaaaaaataataaattgatttcagcagactacaaccaagttgaaatgagaattttggcagacctagcagatgtaaaacagttgaaaaaggcgtttttaaataatgaggatattcatactttgacagctagtcaggtttttggaaaagaaattaataaaattgattcagaaacaagaagaaaagcaaaagcaatcaactttggaattatttatggcatatcacaatatggtttagctaaacaaatcaatgtttcaaataatgaagcagaagaatttttaaattcttattttaaaaaatttccagaaattaaagattacatgaaaacaactgtaaatttttgtagaaaaagtggctatgtaagtaacatatttggaagaaaaacacatctcactggaattaacgataagaattttaatgtaagaaattttcaggagagggcagcaataaatgctccgattcaagggtcggcatcagaaattatgagattagcaatgatcaggataaataaagaaattgctaataataaaaataattctcttaaaatgttgttgcaaatacatgatgagttaatttttgaggaaagctcgaaagaaacaaaaaaaagtactaaattagttaaggatttgatgttgagtgtgaaagatagtgaacttcattcattttcaatacctcttttagtcgatgtaaatattggagaaaattggggtgaacttcattgaa

SEQ ID NO: 256547 - DNA, 322 bp, Unknown
  Bacterial polypeptide expressing nucleotide sequence isolated from the Sargasso Sea
agctgtattaaaagaagcattctcacgtgcggccattctatctaacgagaagtttagaggcgtacgattaaacttgtcttctggtgagctcaagataacggcgaataacccagagcaagaagaagcggaagaaatcgttgatgttcagtatcaaggtgacgatttagaaattggctttaacgttgcctatctaattgacgtattgaacgcgcttggatctgatggtgttaaagtgagcctatcagactcaaacgcgagtgcgctaatcgaagatgatgctgatgacgccgcgttatacgtaattatgccaatgcgactgtag

SEQ ID NO: 256548 - DNA, 793 bp, Unknown
  Bacterial polypeptide expressing nucleotide sequence isolated from the Sargasso Sea
attggcatcaagtgacccaaatttacaaaatattccaataaaatcagaggatggaaaagatattagaaaatcttttatagcagaaaaggatcacattctaatttctgcggattataatcaaattgagatgcgaattttagcagatttagcagatgttaaagaattgaaaaaggcatttaaaaagaatgaggatattcattctcttacagccagtcaaatattcaatatagatattaaaaaggttaatcaagaccaaagacgaaaagcaaaggcaattaattttggaattatatatggaatttcacaatatggattagcaaagcaaataaatgtgtctaattatgaagctgaagaatttttgaattcatattttgcaaaatttcctgaaataaaagtttacatggatcaaactataaagttttgtagaaaaagtggctatgtaaataatatttttggcagaaaatcacattttgtcaatattaatgataaaaactataatgttagaaattttcaagaaagagctgcaattaatgcacctatccaagggtcggcagctgaaataatgagattagcaatgataagactatataaaaaactatccaatcaaaaaacaaagatgcttttacaaattcatgatgaactaatttttgaaactcataaagatgaagcaaaaagaatcagtaaaataataatagaggagatgtctagtgttgctaaaagtgatcaacattcattttcgatacctttaacagtagatttgaatacaggtgaaaattggggtaccttacactaa

SEQ ID NO: 256549 - DNA, 1127 bp, Unknown
  Bacterial polypeptide expressing nucleotide sequence isolated from the Sargasso Sea
aatattaaatatgataattcaattttaaataaatatggagtcgacgttaaaggctttcacgatactatgttaatgtcttatgtgcttgatgcaggtgtcaatcgacatagcatggatgaactagccagtatccatttaaatagacaaacaattaaatttaaagatgtagttggtagtggcaagtcccagataacttttgacaaggttaaaattaaagatgcgttaaattatgcagctgaagatgcagaaattacttttaaattgtatctttttttaaagaaaagagtcaatcaggagagaggtaattatatttatactaacattgaaagagaactaataaatccaatccaatcaatggagattaatgggattaaagttgacaagaaatatcttagtaatttatcaattaaattttcgcaaagaatagaaaagcttgaaaaaaaaatatacaaagaaacaggttcagaatttaacattggttctccaaaacaattatcagagatcctttttgataaattaaaacttaagcccccgaaaaaaactaaaactggtgaaaaatcaacgggtatcgatgttttagaggaccttgcatacgaaggaaataaagttgctgacaatattattcaatggcggcaactctcaaaactcaagaatacttacactgacgcactccaaaatcacattgtcagagaaacaggtagaatacatacttcatttgccatggcttcaactaatacaggaagacttgcatcatcagatccaaatttacaaaatattccgataagaactgaagaaggaaagtcaattagaaaagcttttgtacctgatgaagggtttgttatgctagctgctgattatagtcaaattgaactgagagttcttgctcatatggctgatgttaaacaactaaaggaagcattcataaataatgaggatattcaccaaattacagctgcagaaatttttaatgtaaaattaaaagaagtggataatgaattaaggagaaaagcaaaagcagttaactttggtataatatatggcatttcagcttatggacttgcgaagcagcttgcaatttcaaactatgaagcgggagattttataaaaagaatattttcagaaatttt

SEQ ID NO: 256550 - DNA, 848 bp, Unknown
  Bacterial polypeptide expressing nucleotide sequence isolated from the Sargasso Sea
aagggtacatacctcgtttttattagcagcaacctcaactggcaggttggcatctagtgatcctaatttacaaaatataccaataaaatcagatgatggtaaagaaattagaagagcatttgcagctgatacaaattctaatttaatttcagcagattataatcagatcgagatgagaatattagctgatcttgcagatgttggagaattaaaaaaagcattcaaaaataacgaagacattcattcattaacggcaagccaagtatttaataaaagtattaagaaaatagataaagatatgagaagaaaagcaaaagcaattaattttggtataatttatggaatttctcaatatggattagcaaaacaaatcaatgtttcaaatgttgaggccgaagattttttaaattcatattttattaagttcccagaaattaaagaatatatggaacaaacaattaaatcatgtagaaagaatggatatgtaaaaaatatttttggaagaaaaactcatatcacaggtattaatgataaaaattataatgttcgtaactttcaagagagagctgcaataaacgctcccatccaaggatctgcctcagaattaatgagactagccatgatcagaattaacaaaaaatttagagaattaaaaaaagaaaattgtaatattcttctacaaattcatgatgagttaatatttgagtcaaaaaaggactcggtcgaatactatacaaagattattaaagaagaaatgacaagtgttaaagaaagtgaacttcattcattttctattcctttgttagttgatataaatataggtaaaaattggggcgacttacactaat

SEQ ID NO: 256551 - DNA, 952 bp, Unknown
  Bacterial polypeptide expressing nucleotide sequence isolated from the Sargasso Sea
taaaggtaataaatttccaaagttaattttagattggagacaaatatctaaacttaagaacacttattctgatacacttccagaatttataaatcccaaaactgacagagttcatacttcatttttattggctgcgactacaactggcaggctggcttcaagtgaccctaatttgcaaaacatacccataaaaacagaagatggtaaagaaataagaaagtcatttatagctgaaaaaggtaatgtattaatttcagcagactacaatcaaatagaaatgcgaatactcgcagatcttgccgatgttaaacagttaaaaaaagcttttaaaaacaatgaagatattcattcactcactgctagccaagtttttaatattgacctaaaaaaaataactagtgaaatgagaagaaaagccaaggctattaattttggtataatttacggtatttcacaatatggtttagctaaacagatcatggtttcaaattctgaggcagaagaatttctaaattcgtattttttaaaatttcccgaaataaaagattatatgcaaaaaactataaaattttgtagaagttcaggatatgttagtaatatttttggaagacgctcacacattacagggataaatgataaaaattttaatgtaagaaatttccaagaaagagcagcaataaatgctcctattcaaggttcagcatcagaaatcatgagacttgctatgataagattaagaaataagattgatgatattaaccagaaaaatattagaatgcttctacagattcatgatgaattggtttttgaagtaaaaaaaactgatttaaaaagtactataaaattgattaaagatgaaatgacgagtgttaaagaaagtgaatttcatacattttcaatgccgttaatagtagatattaaaaccggtgaaaattggggagaactgaagtaa

SEQ ID NO: 256552 - DNA, 1534 bp, Unknown
  Bacterial polypeptide expressing nucleotide sequence isolated from the Sargasso Sea
aaggagaacaccgatctcgatgcggtgtatgaaacgctcgacgcggtggaggcggaaggtcccaaagccagccggggcgccatcaaaggtgccctgaagggcaagctccgcaatgacaaggacaacgcctacctctcccgcaagctggcggagatcctggtggacattccgctgccgcaggagcccagcctgccgttatcgacggtgaatgccgaaggactgagctcctgtctggaggacctggagttgaacagcctgctgcgccaggtgggtggattcgtcgcggcgttctcggaagggggctatggcgccaatgcagaagctgctgcgccggcacagccgtcgtcgaggccgaaagccaccaacgaggattcgggattggaggagacgcttggcagcgttcccgccctgcgcccccagctgatccaggacgtctctgctctgaaggggctggtgcagcgactgatgcgctgcaccgatgccgggtcgccggtggctctggacacggagaccaccgatctcaacccgtttaaagccgaattggtgggcatcggcgtctgctggggtgaggagctcgacgccctggcttacatcccgctcgctcacaacggaagcgctgacagccaaccgattcagctgcctctggaggacgtcgtgaccgccatcgccccttggctcgccagcaaggaccaccccaagacgctgcagaacgccaagttcgatcgcttgatcctgatgcgccatgggctggccctcggcggtgtggtgatcgacacgctgctggcggattacctacgtgatgccgccgctaagcacggcctcgaattgatggcggaacgggaattcggcttccaaccaaccgcctacagcgacctggtcggcaaaaaacagaccttcgctgatgtgcctctggaggcagccagccagtactgcgccatggacgtgcacgtaaccagacgcctggcgctgctgctgcgcaaccagttagaggccatggggcctgcgttgctgaagctgctcgagcaggtggagcagcctctggaaccagtcctggcggagatggaagccacgggcatccggattgacgttccctatctccaggaactctcaacggagatgggaaccacgctggagcgcttggagaccgaagccaaggaagccgccggagtggacttcaacctggcctctcccaaacagctgggggaattgctgttcgacaccttgggactggatcgcaagaaatcccgccgcaccaagaccggttacagcactgatgccacggtgctggaaaagctgggggacgatcaccctgtggtgcccctggtgctggagcaccgcgtgctgagcaagctcaagagcacctatatcgatgccctaccgcaattggtggaagcggaaacagggcgtgtgcacaccgacttcaaccaggccgtcaccgccacagggcgattgagcagcagcaacccgaacctgcagaacatcccggttcgcaccgaatacagccgccgcatccgcaaggctttctgcccccttc

SEQ ID NO: 256553 - DNA, 1024 bp, Unknown
  Bacterial polypeptide expressing nucleotide sequence isolated from the Sargasso Sea
attgcatcgttaaaaaagactaaaaaagggagttttgcaactggtgcagcagttctagaggacttagcttataaagggaatgaatttcctaaattggttttagaatggaggcaatctagtaaattgaaaaatacgtattcagattctttgccagagcatttaaatcccaatacaaaaagagtgcatacatcttttctgttagcagcaactacaacgggtagacttgcatctagtgatccaaatttacaaaatattcctattaaaactgaggagggcaaagatattcgtaaagccttcatatcagaaaaaaataaaaaacttatatcagcagactataatcagatcgaaatgagaattttggctgatctagctgatgtaaaagaactaaaaaaagcttttaaaaataatgaggatattcactcattaaccgctagccaggtttttggtgcagacataaaaaaaattgatgctgatatgaggagaaaagcgaaagctattaattttggaataatttatggaatatctcaatatggtttggccaaacaaattggtgtatcaaacaatgaagccgaagaatttctaaattcatattttattaaatttccagaaattaaagaatacatgaataacacaattaaattctgtagaaaaagtggatatgtaagaaatatttttggtcgaaaaactcatattccaggaatcaatgacaaaaattttaatgttagaaattttcaagaaagggcagctataaatgcacctatccaaggatctgcatcagaaataatgcgacttgctatgattagaatcaacgatgagcttgatactaaaaaaacaaatgaatttaatatgttgcttcaaattcacgatgaattgatttttgaggtaattgataatggtactaaatctgcttctaaaaagattaaagatattatgacaagtgtgaaagatagtgatttgcattcattttcaataccattatcggtagatgtaaacataggtgataactggggagagcttcattaat

SEQ ID NO: 256554 - DNA, 865 bp, Unknown
  Bacterial polypeptide expressing nucleotide sequence isolated from the Sargasso Sea
tttaaacccaaatacaaaaagagttcatacgtcgtttttgctggctgctacaacgactggaagattagcatctagtgatcccaacttacaaaacataccaattaaatcagaagatggaaaagatataagaaaagctttcactgcaaaaaaagggcacctattaatttctgcggattacaatcaaattgagatgagaattttagcagacctggcagatgtaaaagaacttaaaaaagcttttaaaaataaagaagatattcactctttaacagctagccaaatatttaatattgatatcaaaaaagttaatcaagatcacagacgaaaggctaaggctattaattttggaattatttatggaatttcgcaatatggattagctaagcaaataaatgtttctaattatgaagcagaggaatttttgaattcatattttgctaagtttccagaaattaaagtttatatggataatacaattaaattttgtaggaaaagtggatatgttaacaatatttttggacgaagatctcactttaatggaataaatgacaaaaactttaatgtcagaaattttcaagaacgtgctgcaattaatgctcccattcaaggttccgcttctgaagtaatgagattagctatgataagattagataagaaattatcagaggaaaaaaattctaattcaaaaatgctattgcaaattcatgatgaattaatttttgaaattccaaaaaaagatgaaaaagtaatgattaaattaattgagagagaaatgaccagtgtagctgaaagtgattatcattctttttcaactcctttaacagttgatattaatgttggagataattggggcatgttacattaa

SEQ ID NO: 256555 - DNA, 1011 bp, Unknown
  Bacterial polypeptide expressing nucleotide sequence isolated from the Sargasso Sea
aaaaaacaaaaaaaggaagctttgcgactagtgcacaggtattagatgatcttgcttttaaaggacataaattaccaaaattagttttagattggagacaggtaacaaaattaaaaaatacttattcagattccttacaagaacatataaatcctaacacaaaaagagtgcatacttcatttttattggcagcaacttcaacaggaagactagcttcaagtgatccaaacttacaaaatatcccaataaaatctgaagatggaaaagaaattagaagagcgtttgttgctgagaataattgtaagttaatttcagcagattataatcaaattgaaatgcgaattttagccgatatagcagatgtaaaggagttaaaaaaagcatttcacaataaagaagatattcattcacttacagcaagccaggtatttaataccaatattaataaagttgactcagacatgaggagaaaagcaaaagcaatcaattttggaataatttatggtatttcgcagtatggattagccaaacaaattggagtttccaatgtagaagctcaagaatttttaaattcatattttttaaaatttcctgaaataaaagcttatatggaatctacaattaaattttgtagaaagagtggctatgtaaataacatttttggaagaaggactcatataacaggaattaatgataaaaattttaatgtaagaaatttccaggaaagagccgcaatcaatgcacctatacaaggatcagcttctgaaataatgagaatggctatgataagagttaataaaaaatttgatgagattaaagaatcgagctgtaaaatattgttacaaattcatgatgaattaatatttgaagttcataaagatgacataaaaaaatactcaaaaattattaaagaagaaatgtctagtgtaaaaaatagtgatctacactctttttcaataccgcttttggtagatatcaatattggtaataactggggagatcttcattaat

SEQ ID NO: 256556 - DNA, 1183 bp, Unknown
  Bacterial polypeptide expressing nucleotide sequence isolated from the Sargasso Sea
aaaggtattaaacttgataaatcttcactaaacaaactgtcttcaaaatttacaactaaaattgaaaaattagaaaaatctatttttaagatttcaaagaaaacatttaacattggatcaaccaagcaacttggtgaaataatgtataacgatttaaaaatatcagctttaaaaaaaacaaaaaaaggtagttttgctactagtgcctcagttttagaagatttaacttttaaaggttatgaatttccaaaactcatcttggaatggaggcaaattagtaagcttaaaaatacttactcagatgcattaccagaacatataaatcaaaatactaaaagagttcatacatcttttttgttagcagctactacaacaggtagacttgcatctagtgatccaaatctacaaaatattccaataaaatcagatgatggcaaggatattagaaaagcgtttgtttctgaaaaaaataacaaattaatttcagcagactacaaccaagttgagatgagaattttggctgatctagcagatgtaaaacagctaaaaaaggcatttttaaataatgaggatattcatactttgacagccagccaggtttttggaaaagaaattaataaaattgatccagaaacaagaagaaaagcaaaagcaatcaactttggaataatttatggtatttcacaatatggcttagccaaacaaatcaatgtttcaaacaatgaagcagaggaatttttaaattcttactttaaaaaatttccagaaattagagattatatgaaaacaactgtgaatttttgtagaaaaagtggctatgtgagcaatatatttggaagaaaaacccatcttactggaattaacgataagaattttaatgtaagaaattttcaggagagggcagctataaatgcaccaattcaagggtcagcatcagagataatgagattagcaatgatcaggataaataaagaaatctccaacaataaaaataatagtttaaaaatgttgttacagatacacgatgagttaatttttgaggaaagctcaaaagaaacaaaaaaaagtactaaattaattaaggatttaatgttgagtgtgaaagatagtgaacttcattcattttcaatacctcttttagtagatgtaaatattggagaaaattggggtgaacttcattgaa

SEQ ID NO: 256557 - DNA, 2527 bp, Unknown
  Bacterial polypeptide expressing nucleotide sequence isolated from the Sargasso Sea
agtgattataaagcaaatcgatcagaagctcctgatgatttggctcctcagtttgaatatattagaaaatctgtattagcatttaatttaccttcggtcgatcttccaaactatgaggcagatgatttaattgcaacatatgttgaaaaaattcttaaaaaaggtgcaaaagttacaatagtttcttctgacaaagatttgatgcaactttacaaaaaaggcgttagaatttttgatcctattaaaaataaatttatcacaaaggaagatataataaataagtttggagttgatgcttcaaaagtaattgatgtccaatctcttgcaggagatagtagtgataatgttccaggagttccaggaataggtgtaaaaactgctgccgaactgataaacaaatatggaactttagaaaaactcttaaaatctgcgcacgaaattaaacaaaataagagaagagaaacactcatagaaaataaagacaaggctttaataagcaaacaacttgttacgttgaagcgtgactctccaacaaaaagagatttaagtgaatttattttaaaagatattgataaagataaattatataaatttttaagagaaatggaatttaatagattattgagttctgcaatttcaatatatggtgaacctaaattatcaagttctgcaccagaaaaaaaaatattagaaaaccaaaaaccaattaataacaaaaattattatttaatcacaaatgcaaaacaaatagatctatggatccaggaagcagaagaaacaggtgaagttgccgttgatactgaaacaagttctttagaccctcatcaagctgatttagtcggaatttcgctttgttcaaaaattggtaaagcttgttatataccaattggtcataattctttcaaatgtatcaataaagatattgttattaagaaactaaaaccgttattggaagatccaagcgttaaaaaaattggtcaaaatataaaatttgattttatagttttatttaaaaatggaataaatatttgctcaatggaggataccatgctgatgtcatatgttttagatgcaggaaaaaatagacacaatatggatacattatcagaaattcatttagggcataaaactatttcatttaaagagatagttggtaccggaaaaaaacaaataaattttaacgaagtagagatcaatagggccaaagattatgccgcagaagatgcagatattacttttagattgtataaaaaatttattaaaaatttaaagttagaaaagatgatcaatatttatgagatatttgaaaagccattaataaaaattcttgcttttatggaaatggaaggagttgaagttgatagtaaatttttaaaatcactatctttaaaatttgaaaaaaaaattaaaaatctagaaaaagaaattttcaagatttctaaaaaagagttcaatattgcgtctcctaaacaattgggagaaataatctataatcatcttaagattgcaggattaaaaaaaactaaaaaaggaagttttgcaacaagtgctagtgttttagaggatttagcatttaaaggacataagtttccaaagttagttttagattggagacagatttcaaaactaaagaatacctattcagactcattgcccgagcatattaatcctcaaactaaaagagtacatacatcatttttattagcagctactacaacaggtagactagcatcaagcgatcctaatttacaaaatattcctataaaatcagaagatggtaaagatattagaaaagcttttactgctaaaaaagatcatgtattaatttctgctgattataatcaaattgaaatgagaattttagcagatctcgctgaagttagagaactcaaaaaagcttttaaaaataatgaggatatccattctttaactgcaagtcagatttttaatattgatataaaaaaagttgatcaagatcatcgaagaaaagctaaagcaataaattttgggatcatttacggcatctcacagtacggcttagcaaaacagattaatgtttctaattatgaagcagaggaatttttagacgcatattttgcaaaatttcctgagatcaaagtttatatggataatacaattaaattttgtagaaaaagtggatatgtaaataatatttttggaagaagatcgcatttcaatggcataaatgataaaaactttaatgtaagaaactttcaagaacgtgcagcaattaacgctccaatccaaggatctgcatcagaaattatgcgattagcaatgattagattagaaaaaaaattaaaagataaaaaaaatataaaatcaaaaatgttaatacaaattcatgatgaattaatttttgaagttccaaaaagtgatgaaaaaacaatgatcaagatcattaaagaagaaatgatgagtgttgttaaaagtgattatcattctttctctatacccttaactgtagatgttaatgcgggcgataattggggaatgcttcattaat

SEQ ID NO: 256558 - DNA, 883 bp, Unknown
  Bacterial polypeptide expressing nucleotide sequence isolated from the Sargasso Sea
gctgaaatcaacctacactgataaattacctaatcagatctctttaagcactggcaaagtgcatacatcctttcaccaagcggttacttcaactggcagactgtcctcttccgacccaaatcttcaaaatataccgataagaactgaagatggcagaagaataaggcaagcctttgaagctaccaaaggtaataagataatttctgccgactattctcagattgaattaagggtcatggctcatttatctaaagatagtggcctattagaagctttcaaccaaggtgaagatgtgcatgcaaaaacagcgagtgaagtttttgatgttagtctagaagaagtgacccccgatttaagaaggaatgcaaaggcaataaattttggacttatttatggtatttctgcttttggtttgggcaaacagctaggtataaacaggaatctagcagctgagtacatggctatgtattttgagaaatatcctaatgtaaagacctatatggaaaaaactaaagacgatgctagagaagctggatacatagaaacgctatttggtagaaggctttatttaagagatataaatgcaaataatgccattagaaggcaagcctctgaaagaattgccattaatgctcctgttcaaggttcagctgcagatataatgaaaattgcaatgatcaatacacatagatctttaaagaaatctggtttgaaggcaaaactcactttacaggttcatgatgaattaattgttgatacccctaaaaatgaaactgataaggttacaaaattattaactaagtctatgcaagaggccgcgaatttagatgtgcccttggaagtagatataggtatgggcaataattgggatcaggctcattga

SEQ ID NO: 256559 - DNA, 1430 bp, Unknown
  Bacterial polypeptide expressing nucleotide sequence isolated from the Sargasso Sea
ctggaagattccggggactgcaaaattggtttatgatctgaagaaaacgctccactcgcttaacgctgagggaatcagtttgaaaggagttgaaggtgatgtgatgatcgccgcacatctctcagatccccttagccgacgatacgatttggactttctcattgggcgaagattgaatcgggaacgcagtaccgctgatgctgaaatcccccctgacagaaaagtgagctgtgaaaatgccagtaccattcttgaactccatgacttgtttgaaaagcaattgaaacaagccgagatgatcaattcttatcggtatattgaaattcctctcgcagaaactttggtacggatcgaatggtctggagttcgagtggatacggaaaaattaaaagaaattagtcaggaatttgaggaaaggctcgatgaactgcgtgagcgaattcacgaacaggcagaagaaacttttaatgtcaactcagtggtggatctgcaaaatgtgctttatgaaaaattcaaactccatgagcgtttcaaagtcaaacccaggaaaattaaactgggtaacggcatgtctaccgatgaagaaaccctggaaaaactttgtgaggatccccttcctcgggcaatcctggattatcgttctctgaacaaactcaaaaacacgtatgttgatcaacttcctgatcacgtgcatcctaggtcagggcacattcattcgaggtttcaacaaacggcaactgcaacagggcgtctttcatcggataacccgaacatgcagaatatcccgatccgtagtgcagaaggccgacgaatccgggaagcctttgttccttctgattctaaccggatccttatttcagcagactacagtcaaattgaactgcgtattgttgcgcattattcgaaagacccgacctttctggaagcctaccgaaataatgaagacatccatgccctcaccgcgtcaacgatcttcaaagtcccggtcgatcaaatcacccgtgaaatgcgttccaaagcaaaggaggtgaatttcggtctgatttacaagatgggccctgagaggctttccatcgtaacacaaacaagtaagagcgaagcaaaagcattcattgagcgtttttttgaaaaatacagcaccatccatgcacttcaggagcgatttctcgcccaggcccgtaaggaaggatttaccacaaccctacttggacgaaggcgttatctacccgatatcaatgcgaaaggaatgctgaaacgaatggctgagggcgcagcagtgaacacaccgattcagggctcagcagcagaagtgatcaaactggccatgatcaagattcagcaagaattacaaaaccagaagatggggtctaagatgatcctcacggttcatgacgaactggtttttgatgtaccattcgaagaagaacaag

SEQ ID NO: 256560 - DNA, 1204 bp, Unknown
  Bacterial polypeptide expressing nucleotide sequence isolated from the Sargasso Sea
gagtatcctttagtgcatgttttgttagagatggagaataaaggcgcattaattgatacaaaccaactcaaaaagctttcaaatgattttggttcaaaactaattggccttacaaaaaaaattcatgatacatcgggaagcgtttttaatattgattctccaaaacagctcagcgaagttctttttgaaaaaatgaaaatagattccaagggtctaaaaaagacttctactggatactattcaacttcagaatcagttctacaaaaactatcagctgagaatgaagttgttagagatattttagagtacagaacactagccaaactaaagaatacttatactgataaaatttctgatatatgtgatgcaaactcaagagttcacacatcttatcaccaggcagtaacatcgacaggcagattatcgtcatctgaccccaatttacaaaatattccaataagaactaatgaggggataacaataagagaagcatttattgcccctaaaggtaaaaagcttttagctatggattattctcaaattgagcttcgacttatggcccactactctaaagatccaataatgcttgattcatttagaaatgatgaagatattcataaaagaacagcagcagaaatcttcggagttgaaataactgatgttgacgatcagatgcgcagaagggccaagactattaattttggtcttttatatggaatgagcgcttttggtttatctaatcaacttgaagtctcaagagctgaggctgatatttttttaaataattattttgaaagatatgctgctgttaaaagctttatgtcagagatagtggaagaagcaaaaaaagataaattggtaaaaactttatataacagaaaaatacatgtaccaaacatagaagctggaaactatatgatgagacaaggatcggaaagagctgctatcaatggccctttacagggtagtgctgcagatattattaaaattgcaatgattaagattcaagatttaatcaacaatgataagccagacataaaaatgatccttcaagttcatgatgaattaatctttgaagtgcctgctgattttacagatgaagatatcaaaccaattatctcaattatggaagaaaccactaaaattagcgttccattaaaagttgagtatggttttggggctaattggagagaagcacactaat

SEQ ID NO: 256561 - DNA, 973 bp, Unknown
  Bacterial polypeptide expressing nucleotide sequence isolated from the Sargasso Sea
aaaattagtaaggttaaatttaatatttgcttcaccaaaacaattaggagagattttgtttcttaaaatggggattaaaggtggaaaaaaaacaaaaacaggaacttactcaactgactctggaattttagaagatttaaaaaataaaggatatgaaatagcaaaattagttctagaatggcgtgaattaactaaattacgttcaacatacacagaagctctacttagccaggctatagataaaacagatcgagtacatacatcttatgctatagcatcaactattacaggccgattaagttctaatgatccaaatcttcaaaatattccaattagaactgaaaagggtagaaaaattagaaatgcatttatagctgaaaataattataagatagttagttttgactattcacaaattgaactaagactcgcagcagaaatttccaaagataaaaattttattgaagcttttattaaagaacaagatattcacacttcaacagcttcaaaaatatttaatttaaaacctgaaaatattaattctgagcacagaagaaaagctaaagcaattaactttggaataatttatggcattagttcgtatggattagctaaacaattatcaatatcaaatagtgatggaaaaaaatatattgatgaatatttttctcgttaccctaaaataaaaaattatatggattatcaaatacaatttgcaaagaccaatcattatgtagaaacaatttttggtagaaaatgtaacattgttggaatcaatgataaaaatttttctattcgtggttttgctgaaaggcaatctattaatgcgcccatacaaggcacagcttcagatattattaaattagcaatgattgaaattgacaaaaaaataaaattaaaaaaaatttctgcaaaaatgctattaccagttcatgatgaattagtttttgaaatacataaagatcaaaattaa

SEQ ID NO: 256562 - DNA, 861 bp, Unknown
  Bacterial polypeptide expressing nucleotide sequence isolated from the Sargasso Sea
aaaggcaaattttgtctataaaaatattgatttaccactcgtagaagtattaactaaaatcgaagcaaatggtattgaagtaaataaaaaattcttaacaagtctaagtactgaatttgaaaatgaaagtaagagacttgaaaaaaatatttacaaattatcaaaagaagaattcaatattggttcaccaaaacaattaggagaaatattatttataaaccttaaaatacctggtggaaagaaaacaaaatcaggcacctattcaacagactcttcaactttaaataatttagcttcagatggctttgagattgccaaattagttcttgagtggagagaattaacaaaacttaaatcgacatatacagactcgttatttagattaactgatcataggagcagagtgcatacttcatttggtttagccaatacattaactggtaggttaagttcaacagatccaaatcttcaaaatattcccattagaactgaaaatggaaaaaaaataagaactgcatttattagtggaaaaggaaaaaaactagtcagttttgattattcccagatagaacttagattagctgcagaaatatctggtgataaaaattttataaaagctttcaaaaataatgaagatatacatgcatcaacggcaaaagaaatatttaatttgaaagacagtgaaataaacgatgatttaagacgaaaagctaaagcaattaattttggtattttatatggaattagtccatatggcttggctaaacaactagatatttcgaacactgaagcaaaagatttatataatgaatattttaataaatatccaaaaataaaaattatatggataaacaaattgac

SEQ ID NO: 256563 - DNA, 1132 bp, Unknown
  Bacterial polypeptide expressing nucleotide sequence isolated from the Sargasso Sea
gaatatttattattttttcaaaataattttgataatataaaaaaacaatttagagactttaaaaaagatagaaaacttttccagatatacaaagatatagattttccaatgcttaatatattgtcttcaatggaaaaggacggcatatctgtttcattacctaaaatgaaaaaactatcaaaacaattatctaaagaattagaatctttaagcaataaatgttatcagattacaaatcaagaatttaacttaaattctccaaaacaactttctgaaatattttataatgaaatgaattttccagttcttaaaaaaacacctaaaggagcgccgtctacagatgcttcagttttagaggaattatcaaaagaacatgacttaccaaaatatattttaaaatatagagaattagaaaaaattagatcaacatatgttgatggtttaattccggaagtaactaaacataataaaatccacactcacttcaatttatttggaacagcaacaggaagattgtcatcagaaaaaccaaacttacaaaatattcctaacaagacagaattgggtcaaaaaataagagatttctttataagtaaacctaatttttcattcattattgctgattattctcaaatagagttgagggttcttgctcatttgagtcaagattctacaatgattgaaatattgaaaaataaaaaatcagatatacattctgaaactgcttctcgaatatttaatgtaccaataggagatgttacttcagacatgagaagaaaagcaaaagaagtaaattttggcttaatttacgggatggaagcttttggactttcgaaaagtttagatatagaacaaaaagaagcttcacaattaattgaatcttatttttctcaatttcctgagattaaagggtttttagataatatagtcttaaaagcaacaaaagactcatttacagaaactctaattggtagaaaaagatatattcgtgaactaaattcatcaaattttcaagttaaagctgcaggaaaaagaattgctatgaatgcaccaattcagggtactgctgcagatatcatgaaaattgcaaaaaacaaagttttgcataaaataaaagaattagaccaaacac

SEQ ID NO: 256564 - DNA, 937 bp, Unknown
  Bacterial polypeptide expressing nucleotide sequence isolated from the Sargasso Sea
ttgctaaaagaaaagcccattcaggaaaagttactcgaggatcttgaatatccccttgttcatgttttatcaagagttgaacaaaatggtgcaaagattgataagaaaaaattagctaaccactctaaggagttgagtgaaaagattgacgaattatcttctgcagcctttaagattgctggtgaagaatttaatttagattctccaaagcaacttctagaaatactatatgaaaaattaggattacctgtgctaaaaaaaacacccaaaggtcaaccatctacaaatgaggacacacttcaaagattatctgaagaatatgaattgccaaaaattattctgcaatataggacgctagcaaaattaaagtctacttatacagatagtttaataaatattgaaaatcctaagacaaaaagaattcatacatcatatcaacaagccgtaacttcaactggcaggctgtcatctactgaaccaaatttacaaaatatacctataaaaactgctgaaggcagaagaattagagaggcttttgttcctgagaaaggcaatatattaatatcagcagattactctcaaattgaacttaggataatggctcacctatcagatgataaaaatttaactaatgcatttaataatgatattgacgttcactcttcaacagcggctgaggtttttggagtttcaattgaagatgtttctcaagatcaaagaagaagcgctaaagcaattaattttgggttaatgtatggaatgtctgcttttggattaacaagacaacttggaattccaagaggcgaagcacaagaatatttagatacatattttgcgagatatacaggtgttcgggattatatggacaatataaaagcaaaagcaaaggaagataagtttgttgaaacgattatgggtagacgactttatttaaatg

SEQ ID NO: 256565 - DNA, 550 bp, Unknown
  Bacterial polypeptide expressing nucleotide sequence isolated from the Sargasso Sea
atgtcggattcgaggaaaatcatccatatcgacatggacgcgttttatgcgtcggtggagcaactcgatcagcctcaattccgaggcaaacctctggcggtgggagggccttcagaaaaacgcggggtgattgccgctgctagttatgaagcacggaaatttggtgtgaggtccgccatgccgactgcggaagcatttcgacggtgcccagaattgaatctggtttctccgcgttttccgcgttaccgagaaatttcagaacaagttcatgggatttttcgatgctacaccgatctcattgaacccgttgccctggatgaggcttggttggatgtcagtgctaacctgatcagggagccttccggcaccagggttgcggaacggatcaaatcggaaatccttgagcagactgctctcacctgctctgcaggagtgtcctacaacaaattcctggcaaagatcgcaagtgaagaaaacaaaccggatggtctcttcgtcatcactcctgaacaggcatcggcttttctaaaagaacttccagtcagaaaaa

SEQ ID NO: 256566 - DNA, 847 bp, Unknown
  Bacterial polypeptide expressing nucleotide sequence isolated from the Sargasso Sea
ttaaactggagacatttttctaagttaaagagtacttatactgatgcactagttcaacaaataaatccaaaaactaacagagtccataccaattattcaatggtgggtgctagtactggaagattatcatcttcaaatcctaatttacaaaatattcccataaaaacagaggaaggaagattaattaggacagcgtttgagtcaaagccaggttttaaattagtatctatggactattcacaaattgaattaaggttaatagcgcatatagctgacgagataaaaatgttagacgcgtttaataatgatttagacatccattctgatactgcttccaaagtttttggagttcacataaatgagatgacatcagatttaagaaggaaagctaaagctataaactttggaattatatatggtatttctgcttacggtctttcaaaacaattgaagtgcactacaaatgaagctaaagaatttatagattcatatttcaaaagatttcccaaaattagagattatatggaagaaattaaatctaatttagaagaaaatggatacgtagaaactctgtttaatagacgcatttatataaatgatagtaatgctaaaaatcaaaggttaagaggatttgctgaaaggcaggcgattaatgcccctattcaaggatcagcagctgatataataaaactagcaatggtaaaaatacacaaaaatttatttaattataaaaatgatgtttcaatgctaatgcaagttcatgatgagcttgtatttgagataagagaaaatagtattgataaatattcaaagattatccaagaaattatggagcatgctaatttac

SEQ ID NO: 256567 - DNA, 811 bp, Unknown
  Bacterial polypeptide expressing nucleotide sequence isolated from the Sargasso Sea
gctttcgttacgaattgataagcttcaaaaacaagcatataaaattgctggagaggaatttaatttagattcacccaagcagttacttgaaattcttttcaataaacttggactaccaattcttaagaaaactccaaaaggacagccttccaccaacgaggaaacgcttgttcgactatctgaagaatatgaacttccaaaagttattttggagtatagaggtctagcaaaacttaaatcaacttacactgacagtcttgtgaaaatgattcacaatcaaacaaaaagagttcatacctcttatcaacaggctgtgacctcaacaggaaggctttcttcaactgaaccaaaccttcaaaacattcccattaagacagaagagggtagaaagatcagacaggctttcattgcagaaccaggcaatataataatttctgctgattactcacagattgaactaaggatcatggcgcatctttctgaagatacaaatttaactagagccttcaaagaagggctcgatgttcatgcctccactgcctctgagatattttcaattccaattgatgaggtaacctctgatcatcgacgcaaagctaaagcaattaattttggcttaatgtatggcatgtcagcatttggtcttacgcgtcagctcggaatttcaagacaagatgctcaacaataccttgattcttattttgataaatatcagggagtgaatgcatacatggagtcaattagaggcgaggcaaaagcaaaaggttatgttgaaaccgtgatgggcagaagggttcatgtgcctgaaata

SEQ ID NO: 256568 - DNA, 895 bp, Unknown
  Bacterial polypeptide expressing nucleotide sequence isolated from the Sargasso Sea
actaacaacttttgaagaagtcgcaggaaaaggggttaagcagcttacctttaataaagtaaaccttaatgtcgcaagcgattacgctgccgaggatgcggatatcacgttgcaaatgtacgacacgattggtgagcacttaaagaaacaaaagacgttacaaaaagtcctaaaagatattgaactgccgcttattccagtcttatcggacatggaacaaaaaggtacagttatcgattccgatattttaaatcttcagtctaaaaatttaggtcaacgcatcaacggccttgaagaacaagccttctcgatggccggcaaagaatttaatttatcctcacccaaacagcttcaagagattctgtttgacgagatgaacattccggtgatcgaaaaaactccaggcggtcagccttcgactgcagaatccgttttgcaagaactggctaaacaatacgaacttcctcaggtaattcttgaacacagaacgctttccaaactcaaatcaacttacaccgataggttgcctgaacagatttcagagaaaaccggcagggtgcattcaacctttcatcaagcggtgactactacaggaagactatcctcttcagatcctaatttacaaaatattcccattaaaactgaggaaggcaggatgatacgagaggcttttgtggctccgaaaggatttgatttaatctcaattgattactcacaaatagagcttcgtattatggcgcacctttccaaagacgaaggtcttatcacggctttcgaaaacggcgaagacattcattcggctactgccaaggaagtgtttggttctgccgatgatcaagataggcgaagtgcaaaagccataaattttggactcatttatggaatgtcagcattc

SEQ ID NO: 256569 - DNA, 916 bp, Unknown
  Bacterial polypeptide expressing nucleotide sequence isolated from the Sargasso Sea
gcaccgcgtgctgagcaaactcaagagcacctacatcgatgccctaccgcaattggtggaagaggaaacaggacgggtgcacaccgacttcaaccaggccgtcaccgccaccgggcgattgagcagcagcaacccgaacctgcagaacatcccggttcgcaccgaatacagccgccgcatccgcaaggcctttcttccccaggacggctggacgctgctcagtgctgactactcccagatcgagctgcgcatcctcacccacctctccggcgaagaggtgctgcaggaggcctatcgcagcggtgatgacgtgcatgcactgacagctcgactgcttttggacaaagacgaggtgagcaccgatgaacgtcggctgggcaaaacgatcaacttcggtgtgatctacggcatgggcgcccaacgatttgcaagggaaaccggcgtgagccagagcgaggcgaaggacttcctggccaaatacaagcagcgctacccgaaggtgttcgcattcctggagctgcaggaacgcctcgccctcagccgcggttacgtggaaaccatccttggccggcgacgtccgttccatttcgagcgcaacggtctggggcggctgctcggcaaagacccactggagatcgatctggatgtggcccgccgcggcggtatggaggcacagcaactgcgggctgccgccaatgctccgattcagggatccagtgcggacatcatcaaggtggccatggtgcagttgcaggcgactctcacaagccaggggctcccagctcgactactgctacaggtccacgatgagctggtgctggaagtgaaacccgaagctctggaaaaaacccgagacacggtggtgcgcaccatggagaacgccgtgaagctgacggtgccttggtggcagagacgg

SEQ ID NO: 256570 - DNA, 802 bp, Unknown
  Bacterial polypeptide expressing nucleotide sequence isolated from the Sargasso Sea
gatacattacctgaactagtcaacaaaaaaacgaatcggattcatacaaattacatgcaagcggttgcagccaccggaagattgagctccaatcaccctaatttgcaaaacatccccatacgaactgaaaaaggcagagagataagaaaggcgtttactgctcgaaacgaagattttgtgttattagcggctgactattctcaaatagaattaagaattatagcggcattaagcggtgatgaaagtatgatcgaggcatttcaacaaaacattgatgtacactccctaacggcctcaaaggtatttaatgtggatctggatgaggtgaaccgtgatatgaggagcaaggcgaaaatggttaacttcggaataatttatggcatctcggcatttggtctttctcagcgtttaggtattcctaggaaggaagccaaagcaattattgacaactactttatcaagtatccgaaaattaaaaattacatggacgacagcattgcctttgctcaaaaacacgagtatgtagaaactattatgaagcgaagaaggtatttaaaagacattaatgccaagaacgcaattgtaagaggtttcgcggaaagaaatgctataaatgcccctattcagggatctgcagctgacattattaaaaaggcaatgattgaaattcacaaagaaatcaaggagaatgaatttcaatccaaactattattgcaggtacatgatgaattaatttttgatgcccataaagatgaacttaacaagctaatgaagatggtaaaaatcaaaatgaaaattcggt

SEQ ID NO: 256571 - DNA, 730 bp, Unknown
  Bacterial polypeptide expressing nucleotide sequence isolated from the Sargasso Sea
gtagaagttatttctgttgatcagtctaatttaaaaaaccttattaacaaaacacacttttcaatggcacaacaggacgtaaggtattatttgaatggtttattgattgaatcagaaggcaacaaactcagggcggtggcgactgatggacaccgattagcaatatctgataccgatttaacagatccaagagacggaaaaaaacaggtaattcttcctagaaaaggggtaattgagcttcaaaggcttcttgataaaaaaggaagcatcgaggttttgttaggatcaaatcacattcgtgtcaaatttgatgatgtatgctttacatcaaaactgattgatggaaacttcccagagtatcagcgtgttatcccggcaaacccagaaaatagactaaaggttaacaccaaaaagctaaaagaggccctatccagggcagcaatattatcaaacgagaaatatagaggcattaggctgatagttaagaagaacgacctggttatccaggcgcataaccccgagcaagagcaagctgaagaaaaaatggatgtggactatgacgggacagagattgagatagggtttaacgttaattatttaatcgatgctttgaatgctattgattctgaggatgttcatgtgcttcttatggataacaactcaagctgtttgattcaagacacaaacaatagctcttacaagttcgttgtaatgcctatgcgcctgtaga

SEQ ID NO: 256572 - DNA, 925 bp, Unknown
  Bacterial polypeptide expressing nucleotide sequence isolated from the Sargasso Sea
gagaaatttttatttattgatttaaatataaaaggagaaaaaaaaactaaaacaggaactttttctactgactcatcaactttatctaatttatctgatcaaggatatgaaatagctagtttaattttggactggagagaattaactaaattgaaatccacttatacagacgccttacaaaaccaagcaacaaaaaataattcaagagttcatacctcttatggtgttgctaatactcttacaggtagacttagttcaaatgatcccaatcttcaaaatataccaattcgaacaagtaatggaagaaagattagaaaagcatttatttgtgactcaaaaaaaatacttatgagtttcgactactcacaaatagagcttcgcttagctgcagaaatttctggagataataattttataaaagcttttaaaaacaatgaagatatacatagttcaactgcatctcaaatttttaacattaatgtagacagtcttgatccagaaatgagacgaaaagcaaaagcaattaattttggtattctatatggaattagcccatatggattagctaaacagttagatgtaactaattctgaagctaaaaaatatatagaagattattttaaaaaatatccacaaataaaaaaatacatggatgatcaaattgaatttgcaaaaacaaatctttatgttgaaacaatatttggaagaaagtgtaatattaaaagcattaatgataaaaattttgcagtcaggggatttgctgaaagacaagcaattaatgccccaattcaaggaacggcagctgatataattaaattagcaatgattgaattatataaaatgataacttctaatgacttaaatgcgcaaatcttacttcaagttcatgacgagcttatttttgagattgatgagtcatataaag

SEQ ID NO: 256573 - DNA, 690 bp, Unknown
  Bacterial polypeptide expressing nucleotide sequence isolated from the Sargasso Sea
ctgcagactacagccaaatagaattaagagtattggctcatatggctgacgtatctcaactaaaagatgctttcaataataatgaggacatacatcaattaactgcgtcagagatctttaatgtcaaacacaaagacgtcactaaagatttacgtagaaaagcaaaagctgttaattttggaataatttacggtatttccgcattcggactggcgaaacaattatcaatatcaaactatgaagcaagtgattttattaaagaatattttaaaaagtttactggaataaaagaatatatggaaaatacaaaagagctctgtagagaaaatggctatgttgaaacactgtgtgggcgaaagtgtttttttccaaggataaaagataaaaattttgctttaagatcatttcaagaaagagctgctataaacgccccaattcaggggactgcagcagatataataaagttagctatgataaagattaatgataaaataaagtctactaatgaatgcaagatgctgcttcaagttcacgatgagctaattttcgaaatcaaaaatgataaactcaaaaaatttagaaaaataattgtggccgaaatggaaaatgcgctgaagccaaagtttgatctttcggtaccactttctgttgatagtaataatgctaataattggagcgatgcgcattaat

SEQ ID NO: 256574 - DNA, 811 bp, Unknown
  Bacterial polypeptide expressing nucleotide sequence isolated from the Sargasso Sea
aaatggtgcaaaaattgataagaaaaaattagccagccattcaaaggagttgagtgaaaagattgatgaattatcttctgcagcctttaagattgccggtgaagaatttaatttagattctccaaagcaacttctagaaatactatatgaaaaattaggattacctgtgctaaaaaaaacacccaaaggccaaccatctacaaatgaggacacacttcaaagattatctgaagaatacgaattgccaaaaattattctgcaatataggacgctagcaaaattaaagtctacttatacagatagtttaataaatattgaaaatcctaagacaaaaagaattcatacatcatatcaacaagccgtaacttcaactggtagactgtcatctactgaaccaaatttacaaaatatacctataaaaactgctgaaggcagaagaattagagaggcttttgttcctgagaaaggcaatatattaatatcagcagattactctcaaatagaacttaggataatggctcacttatcagatgataaaaatttaaccaacgcatttaataatgatattgacgttcattcttcaacagcggctgaggtttttggagtttcaattgaagatgtttctcaagatcaaagaagaagcgctaaagcgattaattttgggttaatgtatggaatgtctgcttttggattgacaagacaacttggaattccaagaggtgaagcacaagaatatttagatacatattttgcgagatatacaggtgttcgggattatatggataatataaaagcaaaagcaaaggaagat

SEQ ID NO: 256575 - DNA, 697 bp, Unknown
  Bacterial polypeptide expressing nucleotide sequence isolated from the Sargasso Sea
aatgagttttgattattcacaaatagaacttcgcttagctgcagaaatttcaggagatacaaattttataaaagcttttaaaaataatgaagatattcatagttcaactgcttctcaaatttttaatgttaaaactgaaaaacttgatgcagaaatgagacgaaaagcaaaggcaataaattttggtattttgtatggaataagcccctatggattagcaaaacagttaagcgtaactaattctgaagcaaagaaatatatagaagattattttaacaaatatccaaaaattaaaaaatatatggatgaccaaattcaatttgcaaaaacaaatctatatgttgagacaatatttggaagaagatgtaatattaaaagcattaatgataaaaatttttccgtaagaggttttgctgaaaggcaagcaatcaacgctccaattcaaggaacagctgctgatgtaatcaaattagcaatgatagaattaaataagttgataacttctgatgatttagatgctaaaatcttacttcaggtccatgatgaacttatttttgaaattgatgaagctaataaagaggtctcaatagataaaattaaaaatgtaatggaaaatatacaccttaattttaaaaattttgaggtacctcttttagtagattatggatttggaaataattggggagatgcccactaa

SEQ ID NO: 256576 - DNA, 478 bp, Unknown
  Bacterial polypeptide expressing nucleotide sequence isolated from the Sargasso Sea
atggcggtaactcgaaaaattatccatattgatatggatgccttttatgcatcagttgagcaacttgataacccatcaattaggaataagcccgttgcagttggtagttctgacttacgtggagtagttgctactgctagttatgaggctaggcatttcggggtaagaagcgccatgagtagtaaattggctagaaagctatgcccaaatctaatattcgctaaaccaagatttgaaagatataaagagttgtcaaaaataatatcagaagtttttttttcatatactgatttagtagaaactttatcacttgatgaagcgtatctagatgttaccgaaaataaaagaggaataatttcagcttcaagaatagcaagacttattcgagaagatattttaaaaaaaaccggtttaacttcatcagccggaatttctgtaaacaaattggtggctaaaattgctagtgattacaataaac

SEQ ID NO: 256577 - DNA, 817 bp, Unknown
  Bacterial polypeptide expressing nucleotide sequence isolated from the Sargasso Sea
tttgtcagaacaaggatatgagattgcaagtttaattttagaatggagagaattaacgaaactaaaatctacttatacagatgccttgcaaaatcaggcaactaaagattactcaagagttcacacctcatatggtatagctaatactcttacaggtcgattaagttctaatgatccaaatcttcaaaatattcccatacgcactaataatggtagaaaaataagaaaagcctttgtttgtgattcaaaaaaaactttaatgagctttgattattcacaaatagagttaagacttgcagctgaaatttctggtgataataattttatagaagcttttaagaacaatgaagatattcatagctctacagcctctcaaatatttgggattagttcaaaaaaacttgattcagaaatgagaagaaaagcaaaagccataaattttggaattttatatggaataagtccgtacggtttagctaaacaattagatgttactaacagtgaagcaaaaatatatatagaaaattattttaaaaaatatccaaaaatcaaaaagtatatggatgatcaaattgcatttgcaaaaacaaatttttatgtggaaacaatgtttggcagaagatgtaatataaaaaatataaatgataaaaattttgcagttaggggatttgctgagaggcaagcaattaatgcccctattcaaggtacggctgctgatataattaaattagcgatgatagaattaaataaaatgattattaatgaagaattagaagttaaaatacttcttcaggtacatgatgagttaattttgaaa

SEQ ID NO: 256578 - DNA, 937 bp, Unknown
  Bacterial polypeptide expressing nucleotide sequence isolated from the Sargasso Sea
gctgagggacatgaactgccagaacaggttctcgggtggcgccaactcgcaaagtttaaaagtacctacacggatacccttgttgatcagatcaatcctgaaaccggccgcgtacataccaactatggccaagccatcgcatcgacgggacggctcagttccaacgatccgaaccttcagaacatcccgatccgcacagaagaaggacgtaaaattcgccaagctttcataccttcagaaggccatgtgctcgtgtcggccgattattcccagatagagttgcggctgcttgcccacgttgccggtattgacgccctaaagcgggctttccatgacggcatggatatccatgccctgaccgcatctcaggtttttggagtgcccgttgagggcatggacccaatgattaggcgccaggccaaagccattaattttggtattatttatgggatctccgcctttggtttggcccggcaactcagcattccccggggagaggcgtctgactacatccaggcttattttgaaaaatatcccggcatccgggattttatggaacatgcaaaagagacagcccgcgaaaaaggatacgtgaccacgctgtatggccgaaaatgttttgtcccggggataaatgataaaaatcccaacagacgcaattttatggaaagggccgccattaatgcacctatccaagggggtgccgcagacattatcaaacgtgccatgattcagctacctaaggctctaaagacgtccaagctgtctgcaaaaatgcttttacaagtccatgatgagctaatctttgatgtcccaaaaaaagaattggaggataccgtcgaggtagtcaaaaacataatggagagtgctgctgatctgtccgttcccattgtggtagatgccggacacgggaagaattgggacgaagcacattagg

SEQ ID NO: 256579 - DNA, 817 bp, Unknown
  Bacterial polypeptide expressing nucleotide sequence isolated from the Sargasso Sea
aactatggccaagcaatcgcatcgacgggacggctcagttccaacgatccgaaccttcagaacatccccatccgtacggaggaaggccgtaaaattcgccaagcctttataccatcagaggggcatttgctcgtgtcagccgattattcccagatagagctgcgcctgcttgcccacgttgccggtattgaagctctaaaacgggctttccatgacggcatggacatccatgccctgactgcatctcaggtttttggagtgcccgttgaaggcatggacccaatgattagacgccaggccaaagccatcaattttggaattatttatgggatctccgcctttggtttagcccggcagctcagcattccaaggggagaggcgtctgactacatccaggcttattttcagaaatatcccggcatccgggatttcatggaaagtgcgaaagagacggcccgcgaaaaaggatacgtgaccacgctgtacggccgaaaatgttttgtgccggggataaatgataaaaatcccacccgacgcaattttatggaacgggccgccattaatgcacctattcaagggggggccgcagacattatcaaacgtgccatgactcagctgccaaaggccctcaagacgtcaaatctgtctgcaaaaatgcttttacaagtccatgatgagctgatctttgatgtccccaaaaacgaattggagaataccctagaggtcgtcaaaaatgtaatggaaagcgctgctgatttgtccgttcccattgtggtcgataccggacacggtaagaattgggacgaagcgcactagg

SEQ ID NO: 256580 - DNA, 883 bp, Unknown
  Bacterial polypeptide expressing nucleotide sequence isolated from the Sargasso Sea
gcccaaggtgttgatgcagtaccgctccttgagcaagcttaagagcacctacaccgacaagctgccggagcagatcaacccacgcaccgggcgtatccacaccagttatcaccaggcagtggccgctactggccgcctgtcctcgagcgacccgaacctgcagaacatcccgatccgcaccgccgaaggaaggcgcatccgccaggccttcgtcgcgcccaagggctacaagctgatggccgcggactactcgcagatcgagctgcgcatcatggcccacctggccaaggacaaaggcctgctcgatgccttccaccatgacctggacgtgcacagggccactgctgccgaggtgtttggtgtggcgctggaagaggtgaccagcgaccagcggcgcaaggccaaggccatcaacttcggcctgatctacggtatgagcgccttcggcctggccaagcagatcgatgtcgaacgcaaggaggcgcaggcctacatcgaccgctacttcgcccgttacccgggggtgctgacctacatggaaagcacccgcgcgcaggctgccgagcagggctatgtcgagacggtctacggccgtcgcctgtacctgccggaaatccacgcgcagaaccaggccatgcgcaagggcgccgagcgcgcggcgatcaacgcaccgatgcagggcacggcggcggacatcatcaagcgcgcgatgatcgccgtggacggctggctgcaggacagcggcatcgacgctcgcatcatcctgcaggtgcacgacgaactggtgctggaggtacgcgaggaactgatcgacgaggtcagcgccaaactccagagcctgatgagtggtgccgccgacttggacgtaccgctgttgggtgga

SEQ ID NO: 256581 - DNA, 507 bp, Unknown
  Bacterial polypeptide expressing nucleotide sequence isolated from the Sargasso Sea
catgcgcaagatcatccacatcgacatggacgcgttctacgcgtcggtcgagcagcgggacgatccggcgttgcggggcaggccggtggtggtggcctggcgcggggcccgctcggtggtgtgcgcggcgtcctacgaggcgcgcaggttcggcgtgcgttcggcgatgccggcggtgcgcgccgagcggctgtgcccggacgcggtgttcgtgccgccggatttcgcccgctacaaggccgtgtcgcggcagatccgcgagatattcctgcaacacaccgcgctggtcgagccgctatcgctggacgaggcctacctggacgtgtccgggtcgtcgacctgtggcggcatcgccaccgagatcgcgcgcaccgtccgcgcgcagatccgcgaggcgacatcgctcaccgcctcggccgggatcgcgccgaacaagttcctggccaagatcgcctcggactggcgcaaacccgatggccagttcgtggtgccgccggcgcgggtgga

SEQ ID NO: 256582 - DNA, 580 bp, Unknown
  Bacterial polypeptide expressing nucleotide sequence isolated from the Sargasso Sea
gttgaataaaataatccgaaagatcatccacattgacatggacgcgtactacgcgtctgtggagcagctggataaccctgagcttcggggaaaaccggttgcggtcggtggtggaaaaaaaagaggcgttgtcgctgctgcctcttatgaagccagggagtttggtgtgcgatccgctatgccctctgtaatcgccataaagaggtgtgagaacctgatctttgttcgtcctaggtttgatcggtataaggagatatccttccaaattcgacagatatttgcggattatacagatctgattgagcctttatccttagatgaggccttcctagatgttactgtgaataagaaaaatattgagttagctgctgatatcgccaccgatatccgagcgagaattaaagatgaaacaggtttaaccgcatccgcgggagtctctattaacaaatttctcgcgaaagtagcttccgatattaacaagcccaacggccagaagacgatccacccatcgcaggtggattcgtttatcgatcaactacctgtaggaaaattctttggtgtggaaagggacagcaaaaaa

SEQ ID NO: 256583 - DNA, 771 bp, Unknown
  Bacterial polypeptide expressing nucleotide sequence isolated from the Sargasso Sea
catgtcggattcgaggaaaatcatccatatcgacatggacgcgttttatgcgtcggtggagcaactcgaccagcctcaattccgagggaaacctctggcggtgggggggccttcagaaaaacgcggggtgattgccgctgctagttatgaagcacggaaatttggtgtgaggtccgccatgcccactgcggaagcatttcgacgttgtccggaattgaatctggtttctccgcgttttccgcgttaccgagaaatttcagaacaagttcatggaatatttcgatgctacaccgatctcattgaacccgtcgccctggatgaggcctggttggatgtcagtgccaacctgatcagggagccttccggtaccagggttgcgaaactgatcaaatcggaaatccttgagcagactgcactcacctgctctgcaggagtttcctacaacaaattcctggcaaagatcgcaagtgaagaaaacaaaccggatggtctcttcgtcatcactcctgaacaggcatcggcttttttgaaggaacttccagtcagaaaaatacccggagtcggaagggtgactgaagaaaaactccgtgattttggaattgagttcacagaggacttgctcaaaaaagatgcggaatggctcaatcaacactttggcaaatttggaatggtgctttttcagcgggcaagaggaatcgaccaccggcctgttgaacctgaacgggaaaccaaatccgtcagtgttgaaacgacttttgaccgcaatcttac

SEQ ID NO: 256584 - DNA, 787 bp, Unknown
  Bacterial polypeptide expressing nucleotide sequence isolated from the Sargasso Sea
tccgacccgaatgtgcagaacattccgatccgcacggcagagggccggcagatccgcaccgcctttgtcgccgcgccgggcaagaagctgatctcggccgactattcgcaaatcgagctgcggcttgtggcgcatgtcgctggcgagcaatcgatgatcgatgccttccgcgccggtgtcgatattcatgcccgcaccgcatcggaggtattcggcgtgccgccagaccagatggacggcgagacgcgccgccgcgccaaggcgatcaatttcggcatcatctatggcatctccgggttcgggctggcgcgtcagctcggcatccgccagggtgaggcgcgcgactatatcaacgcctatttcgagaatttccccggaattcgcgcctatatggaaaggatcaagctcgaggcgcgcgagacaggccatgtcgagacgctatttgggcggcgcatccatattgccggaattaaggcaagcaatccggcgcagcgcggctttgccgaacgccaggcgatcaacgcaccgatccagggaagcgcggccgatatcatcaagcgtgcgatggtgcgtcttccctcggcgctggccgaggcgggcatcgaggctcgcatgctgcttcaggttcatgacgaactgatcttcgaggcggaggagagcattgccgaggcggctgttaaggcgatccgtgcggtgatggaatccgcggctgacccggtgcttgaacttgcagtgccgctggtggccgaggcaggcatcgccgacagctgggccaacgcgcactgat

SEQ ID NO: 256585 - DNA, 889 bp, Unknown
  Bacterial polypeptide expressing nucleotide sequence isolated from the Sargasso Sea
aaattaatttttaaaattacaggaaaagaatttaatattggctctcctaaacaactaggtgaaattttatttgtagaaatgaaaattaaaggaggcaagaaaactaaaacaggaacctattcaacagactctggaattcttgaagatttatcatcccaaggtcatgagatagcacaacttgttttggaatggagagaagtctcaaaattaagatcaacatatactgattctttacaagaacaaatagatgtagatacaaaacgggtacacacttcttatgctacagcaactactcttactggtagattgagctctaatgatcctaatttacaaaatattcctataagaactgataaaggtaaacaaatacgccatgcatttatagcagaagaacaaaaccagttaattagttttgattattctcaaattgaattaagattggcagcagaaatatcaagagatgaaaactttataacatcttttattaataatgaagatatccattcatcaactgcaaaagaaatttttaatttaagtgatatcaaaccttcatctgaacacagaagaaaagcaaaagcaattaattttgggattttatatggcataagcccatatggtctagctaaacaattgaaaattactaattcagaagccaaattatatattgataattattttcaaaaatatccaaaaattaaagaatatatgaattatcaaatccagtttgccaaatcttctaattttgtttctacaatttttggtagacgatgtaacattaaaggaattaatgataaaaattttaatgtacgtggatttgctgaaagacaagctattaatgcgccaattcaaggaagtgcagctgacattatcaaattagctatgattgaaa

SEQ ID NO: 256586 - DNA, 733 bp, Unknown
  Bacterial polypeptide expressing nucleotide sequence isolated from the Sargasso Sea
ctgtcccttgatcaatctctggtgaaagaactgatagacagcacggcgtttgcgatggcccagcaggacgtccgctattacctcaatggtttgtacatggaaatattaggtggccgtttacgggtcgtggccacggatggtcaccgtcttgctttggcaaccggaccggctttggtagaggccgctgacactggggttattattccgcgcaagggtgtgctggagctgtcgcgtctacttgatggcagcgtgcccctgaagctcgtcattggcaccaatcatatccgtgccgccaatgagcaatttaccttcacttccaagctcattgacggcaagttccccgattatgagcgcgtaatcccaaaaaatgccgacaaatcggtggtcggcgagcgcggcgagttgaagcaggcgttcacacgcaccgcgattctgtcgaacgagaaatatcgtggtgttcggctgaagctgtcagacaataaccttgacatcacggccagtaaccccgagcaagaacaggccgaagaagtggtgggcgtccagtacaatggtggtgagctggagattggcttcaatgtcagttatttgctcgatgtgttgtcggtgctggagcagccgaaggttcggttgtctctgtcagacgaggcgagctccgcgctgcttgaaaacgcggaggcgccctcggaaggcgagccggagcggctctacgtcgtgatgcccatgcggctctgag

SEQ ID NO: 256587 - DNA, 802 bp, Unknown
  Bacterial polypeptide expressing nucleotide sequence isolated from the Sargasso Sea
atgtcggattcgaggaaaatcatccatatcgacatggacgcattttatgcgtcggtggagcaactcgaccagcctcaattccgagggaaacccctggcggtgggagggccttcagaaaaacgcggggtggttgccgccgctagttatgaagcacggaaatttggtgtgaggtccgccatgcccactgcggaagcatttcgactgtgcccggaattgaatctggtttctccgcgttttccacgttaccgagaaatttcagaacaagttcatggaatttttcgatgctacaccgatctcattgaacccgtcgccctggatgaggcctggctggatgtcagcgacaacctgataagggagccttctggtaccagggttgcggaacgaatcaaatcagaaatccttgagcagactgcactcacctgctctgcaggagtgtcctacaataaattcctggcaaagatcgcaagtgaagaaaacaaaccggatggtctcttcgtcatcactcctgaacaggcatcggcttttctgaaagaacttccagtcagaaaaatccccggagtcggaagggtaactgaagaaaaactccgtgatttcggaattgagatcacagaagacttactccaaaaagatacggaatggctcaatcaacactttggcaaatttggaatggtgctttttcagcgggcgaggggaatcgaccaccggcctgttcaacctgaacgggaaaccaaatccgtcagtgttgaaactacctttgaccgcaatcttaccaatcttgaagaactggacctggaactgcaaa

SEQ ID NO: 256588 - DNA, 895 bp, Unknown
  Bacterial polypeptide expressing nucleotide sequence isolated from the Sargasso Sea
cattctaagatatcgcgccatatcaaaactgaaatccacttataccgataaattacctaaaatggtcaattcaaatacaggcagagtgcatacttcatatcaccaagctgttactgcaactggaagattgtcgtcttccgatcccaaccttcaaaacatacctatcagatctgaagaaggtagaagaataagagaggcattcattgcaccggaaggatataaaattttagctgcagactattcacagattgagctaaggatcatggcacatctttcaaaagatcaaggcttaatggatgcttttgcaaaaggtcaagacatccatcaggctacaggggcggaaatatttgccacaaatattgatgaggtaacagctaatcagaggcgttcagcgaaagcgataaactttgggctaatctatgggatgtctgcatttggtctatcgaagcaattacagataacaagagcagaagcgcaaaattacatcgaacaatattttgatcggtatccacaggttaaaaattacatggacgagacaaaactgagcgctaagaaaatgggttatgtagaaacagtatttggtcgaagactctatttggctgaaattgagtcatccaattatcaaaggagacaatatgcagagaggagcgcaatcaatgcgcccatgcaggggaccgcagcagatttgataaaaatggccatgatccatttacatcaaaaaatcagggaggagtcttttgatgcaaaaatcattatgcaggttcacgatgagctcgtgattgaggttaatgagtctcaatcggatgaattatctgagcttacgacaagcatcatgtctaagatctctaagcttgatgtcgacttaaaggtcgatgcagatattggaaataattgg

SEQ ID NO: 256589 - DNA, 679 bp, Unknown
  Bacterial polypeptide expressing nucleotide sequence isolated from the Sargasso Sea
gttgaataaaataatccgaaagattatccacattgacatggacgcgtactacgcttctgtggagcagctggataacccagagcttcggggcaaaccggttgcggttggtggcggaaaaaaaaggggcgttgtcgctgctgcatcctatgaggctagggagtttggtgtgcgatctgctatgccctctgtgatcgccttaaagaggtgtgagaacctgatctttgtccgtccaaggtttgacaggtataaggagatatccttccaaattcgacagatatttgcggattatacagatctgattgagcctttatccttagatgaggccttcctagatgttactgtgaataagaaaaatattgagttagctgctaatattgccaccgagatccgagcgagaattaaagatgaaacaggtttaaccgcatccgcgggagtttctattaacaaatttctcgcgaaagtagcttccgatattaacaagcccaacggccagaagacgatccacccatcgcaggtggattcgtttatcgatcagctgcccgtagggaaattctttggtgttggaaaggtgacagctaagaaaatgaatgagatgggaattttcaatggggcagacctgcgtaagtatcagaaagaggagctggtggaccgttttggaaaaaccgggaagcactactaa

SEQ ID NO: 256590 - DNA, 776 bp, Unknown
  Bacterial polypeptide expressing nucleotide sequence isolated from the Sargasso Sea
ttatcttcaactgagcctaacctgcaaaacataccagtcaggacagaagatggacggcgcattagagaggcatttgtcgctgaagatggcaatattttagtaagcctagattatagccaaattgaattaaggattttagcccatatagcacaaattgatgccctaaagcaggcttttcatgatggcttggatattcatgctatgacagcttcagaaatgtttgatgtgcctctagatgaaatgacatctgatattcgtcgtcaggcaaaagcgataaactttggggtaatctatggaatttccggctttggacttgcaaggaatttgcgcattccccgttctgaggcgcaaggttttatagatcgttactttgagagatttcctggaattaaggaatatatggataagactgtaaaattcagtaaagaaaacaaccgtgtggaaacgctgtttggtagagttatccatacgcctgaaataaacgcaaagggtccaattgctggttttgcaaaaagggcagctataaatgcgcctattcagggcactgccgctgatattattcggcgtgcgatgattagagtgccggacgcaataaaagatttacctgcaaaaatgcttcttcaggtgcacgatgagttgttatttgaagttaaggaagaatattgcgacgatttgattgttcaggtcaagtcaatcatggaatcggcttcacttccttttttgaaaatggatatacccttgtctgttgatgctggccgcggaatgaattgggcaga

SEQ ID NO: 256591 - DNA, 562 bp, Unknown
  Bacterial polypeptide expressing nucleotide sequence isolated from the Sargasso Sea
gttgaataaaataatccgaaagatcatccacattgacatggacgcatactacgcttctgtagagcagctggataacccagagcttcggggcaaaccggttgcggttggtggcggaaaaaaaaggggcgttgtcgctgctgcatcctatgaggctagggagtttggtgtgcgatctgctatgccctctgtgattgcaatcaagaaatgtgagaacctgatctttgtccgtccaagatttgacaggtataaggaaatatccttccaaattcgacagatatttgcggattatacagatctgattgagcctttatccttagatgaggccttcctggatgttactgtgaataagaaaaatattgagttagctgctgatatcgccaccgagatccgagcgagaattaaagatgaaacaggtttaaccgcatccgcgggagtctctattaacaaatttctcgcgaaagtagcttccgatattaacaagcccaacggccagaagacgatccacccatcgcaggtggaatcgtttatcgatcagctacctgtaggaaaattctttggtgtt

SEQ ID NO: 256592 - DNA, 733 bp, Unknown
  Bacterial polypeptide expressing nucleotide sequence isolated from the Sargasso Sea
gatgtcagcgacagtagtttattttcaggcagcgcgacacttatcgctgaagatattcgtcgggttatttttgccgaaacaggcctaacagcgtctgctggtgtagcgccgaataaattcctcgccaaaatcgccagtgatgaaaacaaacctgatggtttatttgtcttaccgcccgaaaaagtcagcgacttcgtaaaattcctgcctttacataaaatccctggtgttggcaaaaaaactgctgagcgactggcaactttaggtttttacaaatgcgttgatatccaaaatgcgcctttgcatacactggttaaacactttggaagttttgctgaaaccttgatagaacgtagttttggccgcgatagccgtgatgtgcagaacgattacccgcgtaaatctgttgctgttgaacacacttatactgaagatctaccggatctgaatgcaggccaacaaagtttatctgaactgttacctaaacttcgacgtcgtattgaacgctgtgaagctagtgctcatattcaaaaaattggtattaaactaaaatttgccgattttcagcaaacgactattgagaaacaacaacccgaattagatatggccagtttaaaacaattattagagcaagcatggcacagaggtcagggtaaaaaagtacggttggtgggtattcatgttggattaaaggcgcaggaagctcaggctcagttgtcactagagctttgat

SEQ ID NO: 256593 - DNA, 844 bp, Unknown
  Bacterial polypeptide expressing nucleotide sequence isolated from the Sargasso Sea
gacatgcctcaattccgaggcaaacctctggcggtgggagggccttcagaaaaacgcggggtgattgccgccgctagttatgaagcacggaaatttggtgtgaggtccgccatgcccaccgcggaagcatttcgacgttgtccggaattgaatctggtttctccgcgttttccgcgttaccgagaaatttcagaaaaagttcatgggatttttcgatgctacaccgatctcattgaacccgtcgccctggatgaggcctggttggatgtcagtgctaacctgataagggaaccctctggaaccagggttgcggaacggattaaatcggaaatccttgagcagactgcactcacctgctctgcaggagtttcctacaacaaattcctggcaaagatcgcaagtgaagaaaataaaccggatggtctcttcgtcatcactcctgaacaagcatcggcttttctgaaagtacttccagtcagaaaaatccccggagtcggaagggtgactgaagaaaaactccgtgatttcggaattgagatcacagaggacttgctcaaaaaagatgcggaatggctcaatcaacactttggcaaatttggaatggttctttttcagcgggcgagaggaatcgaccaccgtcctgttgaacctgaacgggaaaccaaatccgtcagtgttgaaacgacttttgaccgcaatctaaccaatcttgaagaactggacctggaactgcaaaacctgactgaaaaactgcttcagcgtctcgaccgcaacggaattagcggcttcactctgaccctgaaattgaaatttaccgatttgagcaaatcacacgtcagaaagc

SEQ ID NO: 256594 - DNA, 642 bp, Unknown
  Bacterial polypeptide expressing nucleotide sequence isolated from the Sargasso Sea
tatgtcggattcgagaaaaatcatccatatcgacatggatgcgttttatgcatcggtggagcaactcgaccagcctcaattccgaggcaaacctctggcggtgggagggccttcagaaaaacgcggggtgattgccgccgctagttatgaagcacggaaatttggtgtgaggtccgccatgcccaccgtggaagcatttcgacgttgtccggaattgaatctggtttctccgcgttttccgcgttaccgagaaatttcagaacaagttcatggaatttttcgatgctacaccgatctcattgaacccgtcgctctggatgaggcctggttggatgtcagtgctaacttgataagggaaccttccggtaccagggttgcggaacggattaaatcggaaatccttgagcagactgcactcacctgctccgcaggagtgtcctacaataaattcctggcaaagatcgcaagtgaagaaaataaaccggatggtctcttcgtcatcactcctgaacaagcatcggcttttctgaaagtacttccagtcagaaaaatccctggagtcggaagggtgactgaagaaaaactccgtgatttcggaattgagatcacagaggacttgctcaaaaaagatgcggaatggct

SEQ ID NO: 256595 - DNA, 477 bp, Unknown
  Bacterial polypeptide expressing nucleotide sequence isolated from the Sargasso Sea
tatgggaaagatcatccgaaaaatcatccatgttgatatggatgcattttacgcctctgttgagcagatggatgatcctgcattaactggaaaaccagttgcagttggtggaagcagagaccgaggtgttgttgcggctgcatcttatgaggctagaaagtatggagtcagatcagcaatgccctcagttcaagcgaaaaagatgtgtcccggcctattattcgttaggccaaggtttaaccggtataaagagatttcagcacagataagaaaaattttccaagactatactgatttgatagagcctctgtcattggatgaggcatttcttgatgttaccataaacaagaaaggcatagacctggcaagcgaaattgcggcccaaataaggcaaagaatccactcagaaataggtctcactgcatcagcaggtatatccataaataagtttgtagcgaaggtagcttctgacataaa

SEQ ID NO: 256596 - DNA, 809 bp, Unknown
  Bacterial polypeptide expressing nucleotide sequence isolated from the Sargasso Sea
attggtttcagtttatgaaacaattgaacgaccattaataaaacccattgtagaaatggaaaatgcaggtatcaaaatcaacttatcaattttaaattctctttcatcagaatttgaaattcgtcaggcagagttaaaagaaaagatctatgagttaagcgatgataaatttaatctcgcctctccaaaacagttaggagaaatattatttgaaaagatgaatttaccaggtggtaagaaaacaaaaagcggtacttatggaacttcaatttcaatacttgaagagttatcaagcaaaggttttgaaattgctgataaagttattgaatggagaggtctgacaaaattaaagtcaacatatacagatgcattgcaagataacgttaataaaaaaacgggaagagttcatacttctttttccatggcagcagcatcaacaggaagattagcatctacaaaccctaatttgcaaaatattccaataaggactgttgatggtaaaaggattagaagtgcttttatctcagaattaggatttaagcttctctctgcagattatagtcaaattgaactaaggcttgtcgctcacgcttctcaggaaaaaacgatgttgcaagcatttaaggatggaaatgatattcattctgagactgcagcccaagtctttaatttaaatcttaatgaagttagtgaagaaaatcgaagaaaagccaaggcaatcaattttggaataatttatggcatttctccttttggtttatctcgtcaattaaattctactcaggctgaagcgaaatatataattgaag

SEQ ID NO: 256597 - DNA, 750 bp, Unknown
  Bacterial polypeptide expressing nucleotide sequence isolated from the Sargasso Sea
aaaatggaaaaaaaataagaacagcttttattagtggaaaagggaaaaaattagtcagttttgattattctcaaatagagcttagattagctgcagaaatttctagtgataaaaattttattaaagcttttaaaaataatgaagatattcatgcatcaactgcgatggaaatatttaatttaaaagatagtcaaataaatgatgattatagaagaaaagcaaaagcaattaattttggtattctatatggtatcagtccatatggtttagctaaacaacttgatatttccaatacagaagcaaaagattatataaatgagtattttattaaatatccaaaaattaaagaatatatggaccatcaagttgattttgcaaaaacaaatcaatacgttgaaacaatttttaaaagaagaattaatattaagggaattactgataaaaattttgctgtcaggggttttgctgaaagacaagctattaatgctccaatacaaggtagtgcagcagatattattaagttagcaatgatcgatattcataaggaaataaaacttagaaacattgaggcagaaatgcttttgcaagtacatgatgaactaatttttgaagtagaaaataaaaaatatgataatttagttaaaaatgtaaaaacaattatggagtcagttcatttaaaatataaagatttttcagttccactaattgttgattatggtgttggtgataattggggtcaggcacattaga

SEQ ID NO: 256598 - DNA, 838 bp, Unknown
  Bacterial polypeptide expressing nucleotide sequence isolated from the Sargasso Sea
aaaacagaaagaattcatacttcttaccagcaggctgtaacttcaactggaaggctctcatccaccgaacccaatcttcaaaatattccaattaagactgcggaaggcagaagaattagagaggcttttgttccagagaaaggcaacacccttatatcagcagattattctcaaattgaattaagaattatggcgcatttatctaacgataaaaatctgactcatgcattcaacaacaatattgatgttcactcatcaactgccgcagaagtttttggtgtttcaatagatgatgtaagtcaagaccaaagaagaagcgcaaaagcaattaactttggtttaatgtatgggatgtcagcttttggtttaacaaggcagcttggtatctctagagcagaagcacaagaatatctcgacacttattttgctagatatactggtgttaaagattatatggataatataaaagctaaggcaaaagaagataagtttgttgaaacgattatgggtagacgactttatctaaatgaaattaacgcagctaatggtttaagaagacaagcagctgaaagagctgccattaatgctccacttcagggttcagcagcagatattatcaaaaaggctatgctcgacattgatcaacttttattaaacgaaatgcaagaagtaaaaatgattatgcaggttcacgacgaattagtttttgagtgtccagaaggcaatgctgaagatgttatgaacaaaatgaaaagcacaatggaacaaaccgtagaacttaatattccattaattgttgaagctgcgattggtaaaaattggaacgaggcccattaac

SEQ ID NO: 256599 - DNA, 601 bp, Unknown
  Bacterial polypeptide expressing nucleotide sequence isolated from the Sargasso Sea
gcgtaccgtggcgaccgacggtcaccgcctggcggtctgttcaatgcctgtcggtcagccgttgcctagccattcggtgatcgtaccgcgtaaaggtgtgattgaactgatgcgtatgctcgacggcggcgataacccgctgcgcgtgcagattggcagcaacaatattcgtgcgcacgttggtgacttcatctttacttccaagctggttgacggtcgtttcccggattatcgccgcgtattgccgaagaatccggacaaacatttggaagccggttgcgatatcctcaaacaggcgtttgcgcgtgcggcgattctctccaacgagaaattccgtggcgtgcgtctgtatgtcagcgaaaaccagctcaaaatcactgccaacaacccggagcaggaagaagcagaagaaattctggatgtttcctatcctggtactgaactggaaatcggctttaacgttagctacgtgcttgacgttcttaacgcgctgaagtgcgagaacgtacgtattctgctgaccgattccgtatcgagcgtacagattgaagatgcagcgtcacaatctgcagcctatgtcgtcatgcctatgcgcttgtaa

SEQ ID NO: 256600 - DNA, 830 bp, Unknown
  Bacterial polypeptide expressing nucleotide sequence isolated from the Sargasso Sea
catgcgcaagataatacatgtggatatggattgcttttacgcagcagtagaaatgcgggacaacccgtcgctgcgtaatattcctattgccattggtggcagcagcgagcgccgtggggtgatagctacctgcaattacccggcacgtaaatttggtgtgcgctctgccatggcgtcggcctatgccctaaaactgtgccctaatttaaaactggttaaagggcgcatggccgtttatcaggaagagtcacaaaagattcgagccatatttgctgattacaccgacctgattgaacctttgtctttggatgaagcctatctggatgttaccggctcgtcgctgtttcaggggagcgctacccgcattgccgaagaaattcgccagcgtatcgccagcgaactcaacctcacggcatcagccggtgtagcgccctgtaaatttgttgctaaggttgccagcgacgaaaacaaacccaatggcttgtgtgtggtaacgccagatcagctggatgaatttgttaaagccatgtcgcttaaaaagatccccggggtgggccaggtaactgtgcaaaagctcaatcagctgggattgcatacctgcgcagatgtgagagcctacccaatgacagagttgcaaaagcgctttggcaagtttggtcaggttatctgggacagagcccatggcatagatgagcgacccgtgcagaccaaccgaatacgtaagtctgtaggcgttgagcgtacgttaagcgaagatattcagacggtagaggcgtgtgatgaaatatcgataagttgtatactacgctgcagaaaagactcaccaccca

SEQ ID NO: 256601 - DNA, 824 bp, Unknown
  Bacterial polypeptide expressing nucleotide sequence isolated from the Sargasso Sea
cataagttctccaaaacaaattcaagaaatattttatgatgaattaaaacttcctattttaaaaaaaacaccaaaaggacagccttcaactaatgaagatgtaatgtcacaattagccgaagatcacgaattacctaatttagtactctcttacaggaatttattaaaattaaaaaatacatacacagataaacttggtgatcaagtcagtgatatttctaatagattacatacatcatataatcagaccatcacaattactggacgtctttcatcttcatcacctaatttgcaaaatataccaataagaacagatgatggaaaaaaaattagatctgcatttattccgcgagaggggtacaaactcttctcagcagattactcacagattgagctaagaattatggctcacctagctaaagaccccgctatgattgagagtttcttaaccggtgaagatattcactcatcaactgcgaggaaagtttttaatattaaagacgagccatcaagtgatcaacgtagagcagcaaaagcaataaattttggtttaatctatggaatatcagcatacggactagctaagcaacttaagatagataacgttgaggcaaaaggcattattgatacatactttgctaaatacaaaagagtgaaagaatttatggaggagttaaaagaattagcaagcaaacaagaatatgttgagactatgcatggtcgcaaagtatttttgcctaacatcagtcactccaacttccaagttaggagcgcagcagagaggacagctattaatgcacccattcagggtactgctgcggata

SEQ ID NO: 256602 - DNA, 819 bp, Unknown
  Bacterial polypeptide expressing nucleotide sequence isolated from the Sargasso Sea
cttgctaaaaacccagagtggggaactggacaaacgaatgcgcgagctgcagcaggaggcgtgcggcctggcaggagaggaatttaatctcggctcgccgaagcaacttcaggatatcttttttaataagctggagctaccggttcttaagaaaacgcctaagggccagccatctactgcagaacctgtattgcaagaactagcactggattaccccctgcctcgcgtgattctggcgtaccgcagtctttcgaaactaaagtctacctatacggatcagctgccaaagcaggtgcattcttcaactggtcgtgtgcatacgtcatatcgtcaagcagtgactgccacaggcaggttgtccagcactgatcctaacctccagaatattcctataagaaccgaagaaggcaggcgcgtgcgtaaagcgtttgttgcaccagatggctatttgctccttgcggcagactattcgcagatagaactgcggatcatggcgcatttatcaggagatccgggtctggtagatgcttttaaaaagaacctcgatatacaccgagcgactgcggccgaggtgtttggcgttgccgttgaggcagtaaaggattatcaacgtcgtagcgctaaagcaattaattttgggttgatttacggcatgtctgcctttggtttagcacgtcagttaaacattacacggaacgatgcgcaggaatacatcgacttatattttgatcgatacccaggggtaaggaattacatggatcgagttaggaatcttgcgggcgaacaagggtttgtggaaactatattcggacgccggtt

SEQ ID NO: 256603 - DNA, 713 bp, Unknown
  Bacterial polypeptide expressing nucleotide sequence isolated from the Sargasso Sea
aatgtcaaatcatgacaaaaaaaaatttatagcagatcaaagaaagataattcatgttgatatggactcattctacgcttccgtagaaattagagataaaccacatcttaaaaaactacctgttgcagtagcaggtagtagccagacaagaggtgttatcacaacatgtaactacgttgctagaaaatatggaataaaatctgcaatgccttcaataattgctaaacggctatgtccagaccttatctttttgccagttaatatggaaaaatacagaagtgtttctcaagagatacacaatatcttcaagtgttatacaaaaataattgaacctgtatctctcgatgaggcatatcttgatgtatctgattctggttactgtgataacgatccagtaataatggcatatcaaatcagaaaaaaaatatttgaagacttaaaaataacagcatctgcaggaatagcaacaaataaatttttagcaaaactagctagtgaatggaataaacctaacggtcaatttgttatttatgaagaagatgtaaaaaattttatactagacttacctgtaagaaaaataaatggtgttggtgaaaaaacagaaaaaaaattatctaacataggggtaagtagcttttcagatctgcagaatataaagctcgaaaagcttgtagaaatttttggtaaacatgggcaaaatctatatgatttat

SEQ ID NO: 256604 - DNA, 763 bp, Unknown
  Bacterial polypeptide expressing nucleotide sequence isolated from the Sargasso Sea
acctattagaacaaaagagggtaggttaattagaactgcatttgagcccaaaattggttttaaattagtgtcaatggattattcacagattgaattaaggttaatagcgcatattgctgatgaaattacaatgttagaagcttttaataatgaattagacattcatttagatacagctgcaaaagtttttaatattccaactaatgaaattacttcagaattaaggagaaaagcgaaagctattaattttggaattatttatggaatttctccatatggccttgcaaaacagttaaaatgctcagctaatgaagccaaattatttataacatcatattttacgaggtttcctaaaataagagattatatggaggacattaaaaacaaaattaatgaaaatggatttgttgaaaccttatttaacaggcgtatatatataaatggtagtgattcaaaaaatcacaagataagagggtttgcagaaaggcaagctattaatgctcctatccagggaaccgcagcagatataattaaaaatgctatgatacaaattaataaagttttattaaattataaaacagaagcttcaatgcttttacaagttcatgatgaattggtttttgaaattaacgaggacaatgttgatgaaattcaaaaaattattttaccagtaatggaaaatgcaaatttaccaatggttccattaaaagtaaaacttaaagttgacactggttatggagataattgggctgaagctcattaa

SEQ ID NO: 256605 - DNA, 910 bp, Unknown
  Bacterial polypeptide expressing nucleotide sequence isolated from the Sargasso Sea
ggccgctgaaggccatgacctggctaagaccatcatagagttccgccaactctccaaactcaagagtacctacacggatgccttgaccgcggccatcaatccgcagacaggccgcgtgcacacctcctacagccaagcggccacgtcgaccggacggctcgcgtcgacggacccgaacctgcagaatatccccgtgcgcacagtggaaggccgcaagatccgcaaagccttcgtgccggagaagggccacgtgttggtctcagccgactattcccagatcgaactccgaattcttgcccacgtggctggtatcgacgccttgaagcaagcctttcatgacggccaggacatccacgcacttacggcctcccaggtcttcggcgaacccattgagggcatggacccgattacacggcggaaggcaaaagccatcaacttcggtatcatctacggcatctctgccttcggcctggcgcgacagctaggcatacccaacagcgaggcgaaggcctacatcgatgcctacttcgacaaatatccaggcatcaaggcttacatggaatgcaccaagacacaggcccgcgaggaaggcttcgtaactacgctctttggacgcaaatgccacaccaagggcatcaacgaccgcaaccccaacatgcggggcttcgccgaaagggctgccatcaacgcgccgatccagggcggtgccgcggacattattaaacgcgctatgatccaagtgcccggtgcgctcacaggcgccgggcttaaggcccagatgctcctgcaagtgcatgacgaactgatattcgaggcgcctaaagcggaagccaaagacaccatcaatgtggtcagagcggccatggaaagggcagcgcatttggacgtgccgttggtggtggatgtaggt

SEQ ID NO: 256606 - DNA, 744 bp, Unknown
  Bacterial polypeptide expressing nucleotide sequence isolated from the Sargasso Sea
catgcaacgcaaaattatccacatcgatgccgactgcttctatgcagccatcgaaatgagagaccggcctgaactgcgcgggattcccatggcagttggaggtagtgcagagcggcgcggtgtgctgacgacctgtaactacgatgcgcgggcctacggcgtgcggtctgccatgccgacggcgcaggcgatgcggctctgcccccagcttacggtggtacctcctcagatgcataaataccgagaggcttcgaaggtgatgcgcggcatttttgctgaattcacggaggtcatagagcccttatccctcgatgaggcttatcttgatgtcagtgaaatcacagctgagaccctcacggcgacccgaatagccaaagcgatcagagcgcaagtgcgcgaggcactggacatcaccgtgtcggcaggggtttcggtgaacaagttcgttgccaaggtagcttcagactggaagaagcccgacggactaacggttgttccgccggatgaggttgatgtttttgtcgcggccctgtcagtgaccaaaatcccgggagtcggcgctgtcaccgctgacaaaatgcatcgttacggactgcggacctgtgccgatgtgcggggttggagcttacatgatctgcgacgccgcttcggaaaatttggtgtggtgcttcatgagcgtgccagggggcgagacgaacgactggtgcaacccagtcgcgttcgtaagtctgtcagtgtggagcg

SEQ ID NO: 256607 - DNA, 766 bp, Unknown
  Bacterial polypeptide expressing nucleotide sequence isolated from the Sargasso Sea
attcctatccgaagtgataatggtagaatgataagaaaagcctttattcctgaaaaaggaaatgtattaataagctctgactacagtcaaatcgaacttagattaattgctcatattgctgacgagagaaatttgattaatgcctttcttgatgaaattgatatccattcatctacggcttctgaagtttttaatattccattaaatgatatgacacctgatattagaagaaatgcaaaagctatcaactttggtataatttatggtatttcagcctttgggttggcaaagcaactcaatattagccgtactgaagcatctgaattcattaaagcttattttaagaaatacccttcaataagagactatatggatgaaacaaagaagtacgcaaatgaaaatggttatgtcaaaactctcttaggaagaaaatgccttgttgaggaaattaacagcaagaatgcggccacaagatcatttatggaaagagctgcaattaatgcgcctattcaaggatccgctgctgatataatcaagagagcaatgattattttaggtaatcataaaaatttggaaaaattagaaacaaaaatgcttttgcaggtacatgatgaattaatcttcgaaactaaaaaagaaaattgtaaagaatctatgagaattattaagaaggaaatggaaagcgctaacttaccaatccttaatttaaatgtaccattaatagcagatactaattttggcaataattgggatgaagcacactaat

SEQ ID NO: 256608 - DNA, 507 bp, Unknown
  Bacterial polypeptide expressing nucleotide sequence isolated from the Sargasso Sea
catgctgcgcaagatcatccatatcgatgccgattgtttctatgccgcgatcgagatgcgcgatcaccccgagctgcgggggatccccatggcggtggggggtagcgccgaacggcgcggcgtgctgacaacctgcaactacgacgcccgtgcttacggtgtgcgctcggcgatgcccacggcccaagcgatacggctctgcccgcagctgacggtcgtaccgcctcagatgcacaagtaccgcgaggcctccaaagtgatgcgcggcatcttcgctaacttcactgaaattattgagccgttgtccttagatgaggcctacctcgatgtcagcgagatatccgatgaggaactgactgctacccggattgccaacgccattcggcaacaggtccgcgaagagctcgatatcaccgtttcggccggcgtatcggtgaataagttcattgccaaggtcgcctcggattggaagaagcccgatggcctgacggtggtgccacctgatga

SEQ ID NO: 256609 - DNA, 466 bp, Unknown
  Bacterial polypeptide expressing nucleotide sequence isolated from the Sargasso Sea
cccgctgcgcgtgcagattggcagcaacaatattcgtgcgcacgttggtgacttcatctttacttccaagctggttgacggtcgtttcccggattatcgccgcgtattgccgaagaatccggacaaacatctggaagccggttgcgatatcctcaaacaggcgtttgcgcgtgcggcgattctctccaacgagaaattccgtggcgtgcgtctgtatgtcagcgaaaaccagctcaaaatcactgccaacaacccggagcaggaagaagcagaagaaattctggatgtttcctatcctggtactgaactggaaatcggctttaacgttagctacgtactggacgttctgaacgcgctgaagtgcgaaaacgtgcgtattctgctgaccgattccgtctccagtgtacaaattgaagatgcagccagccagagcgcggcttacgttgttatgccaatgagactgtaa

SEQ ID NO: 256610 - DNA, 783 bp, Unknown
  Bacterial polypeptide expressing nucleotide sequence isolated from the Sargasso Sea
tatcttcaactgaaccaaatcttcaaaatattccaattaaaactgctgagggcagaaagatcagagaagcttttatagcggaaaaaggtaatgtattaatctcagcagactattctcaaatagagttaagaataatggctcacttatccggagataaaaatcttactcatgcatttaacaacaacattgatgttcattcagctacggcctcagaaatttttaatgtttcactggaggatgtaacctcagatcatcgaagaaatgcaaaagcaataaattttggattgatttatgggatgtctgcttttggactgacaaggcaattagggatttcaagagatgaagcccaagcttatttagatacttactttaaaagatatacgggcgttaaagattatatggactcgactaaagagctagccaagaaaaatctctttgttgaaactattctcggaagaaaactgcatgttgtggccatcaacgattccaatggtttaagacgtcaagctgcagaaagagccgccattaatgcgccattacaaggttctgcagcagatatcattaaaaaagcaatgattgatgttgatcagtggataggaggtgaaaacccagatattagaatgatcatgcaagttcacgatgaactaatttttgaagtaaaaaaagaatttgcggatgatgcaataaatgagattgtaaatttaatggaaagttcggtcgaattgaaaataccattaatagttgatgcaaatcaggggactaactggaacgaagcccattaat

SEQ ID NO: 256611 - DNA, 760 bp, Unknown
  Bacterial polypeptide expressing nucleotide sequence isolated from the Sargasso Sea
gcctttaagattgctggtgaagaatttaatttagattctccaaagcaacttctagaaatactatatgaaaaattaggattacctgtgctaaaaaaaacacccaaaggtcaaccatctacaaatgaggacacacttcaaagattatctgaagaatacgaattgccaaaaattattctgcaatataggacgctagcaaaattaaagtctacttatacagatagtttaataaatattgaaaatcctaagacaaaaagaattcatacatcatatcaacaagccgtaacttcaactggcaggctgtcatctactgaaccaaatttacaaaatatacctattaaaactgctgaaggcagaagaattagagaggcttttgttcctgagaaaggcaatatattaatatcagcagattactctcaaatagaacttaggataatggctcatttatcaaatgataagaatttaacctatgcatttaataatgatattgacgttcactcatcaacagcggctgaggtttttggagtttcaattgaagatgtttctcaagatcaaagaagaagtgccaaagcaattaatttcggattaatgtatggaatgtcagcttttggattaacaagacaacttggaattccaagaggtgaagcacaagaatatttagatacgtattttgcacgatatacaggtgttcgagattatatggacaacataaaagcaaaggcaaaagaagataagtttgttgaaacgattatgggtagaagac

SEQ ID NO: 256612 - DNA, 989 bp, Unknown
  Bacterial polypeptide expressing nucleotide sequence isolated from the Sargasso Sea
actgtcctagcaggagaagaatttaatccaaattcaataatagaacttcaaaatattctttataaaaaacttcggcttcatgatcagttcaatatcaaaccaaaaaaaatcaaacttggtaatcgtatgtccactgatgaagaaacactggaaaaacttgctgaagatgatttgcctcgagccattctggattaccgtactcttaacaaacttaaaaatacatatatagatcaacttccgggttatgttcattcaaatagtggaaacattcactcaacatttcatcaaactggaactgcaacagggcgcctgtcatcagaaaatccaaatttgcagaatattcctgtccgatccgttgaaggaaggcgtgtccgccgtgcttttattgcatctggaaatgaaaatattctgatttctgctgattatagtcaaattgaacttcgagttgtagcacattattcaaaagatcctacttttatagatgcataccgtcgtaatcttgatattcactctctgacagcctcgaccatttatggtttagaagaaaaagatgtgacacgtgagatgcgagacagagcaaaggaagtcaattttggactgatttatagaatgggtgcagaaaggctttcaatagtgaccaagacccccaaagctgagtcaaaagaatttattgaacgatattttgaaaaatacagtactattcatgctttgcaagagcgatttttggaacaggcgcgcaaggaaggtttttcagagactttatttggaagaagacgttacttacctgatataaatgcaaaaggacttttgaaaagaatggcagagggtgctgctataaacacacctatccagggttctgctgcagaaattataaaacttgcaatgattaatgtagcaaatttgattctagaaaaaaaaatgcattccaagatgatcttaacagtgcatgatgaattggtgtttgatgcactcaaagaagaggaagatga

SEQ ID NO: 256613 - DNA, 691 bp, Unknown
  Bacterial polypeptide expressing nucleotide sequence isolated from the Sargasso Sea
ttatcttcaactgagcctaacttgcaaaacataccagtcaggacagaagatggacggcgcattagagaggcatttgtcgctgaagatggtaatattttagtaagcctagattatagtcaaatagaacttagaattttggcccatatagcacaaattgatgccctaaagcaggcttttcatgatggtttggatattcatgctatgacagcttcagaaatgtttaatgtgcctctagatgaaatgacatctgaaattcgtcgtcaggcaaaagcgataaactttggggtaatctatggaatttctggctttggacttgcaaggaatttgcgcattccccgttctgaggcgcaaggttttatagatcgttactttgagagatttcctggaattaaggaatatatgaataatactgtaaaattcagtaaagaaaacaaccgtgtggaaacgctgtttggaagagttattcatacgcctgaaataaatgccaagggtccaatggctggttttgcaaaaagagcagctattaatgcgcctattcagggcactgccgctgatattattcggcgtgcgatgattagagtgccagacgcaataaaagatttacctgcaaaaatgcttcttcaggtgcatgatgagttattatttgaagtaaaagaggagttttgtgaggatttgattgcgcaggtccagt

SEQ ID NO: 256614 - DNA, 967 bp, Unknown
  Bacterial polypeptide expressing nucleotide sequence isolated from the Sargasso Sea
ctctactgacgagaaggttttgcaagaactatcagaagaatatgagctgcccaaggttttacttgaacacaggactttgagcaagcttaaatctacctacacagataaattacctggccaggtctcttcgaatactggtaaagtacatacgtctttccaccaggccgtcactacgacaggcagattgtcttcttccgaccctaatcttcaaaacataccaattagaacagaagacggtagaagaataagacaggcttttgaagcaacaaaaggtaacaagattatttctgctgattattctcaaattgaattaagagttatggcccatttatctaaagataagggacttttagaagcttttaaccaaggagaggatattcactctaaaacagcaagtgaagtttttgatgttaacctcgacgaggtaaccgccgatttaagaagaaacgcaaaagctataaattttggtcttatatatggcatttctgcttttggtctaggaaaacagctaggcattaatagaaatttagcagctgaatacatgggtatgtacttcgaaaaatacccaggagtaaaggactatatggaaacaactaaagacgcggcgcgtgacgcgggatacattgaaactctttttggaaggagattgtacttaagagatataaatgcaagcaatgccattagaaggcaggcgtctgaaagggtagccatcaatgcacccgtccaagggtcagctgccgatataatgaaaatagccatgattaatgctcaccgatctttaaaagaatctaaactaaaggcacaacttacgcttcaggttcatgacgaattaattgttgatgccccaacaaaggaagctgataaagttgtggaactactaaccagctccatgcaagaggcagcaaatctagatgtaccattggttgttgatataggtattggcaataactggggacaagctcattga

SEQ ID NO: 256615 - DNA, 451 bp, Unknown
  Bacterial polypeptide expressing nucleotide sequence isolated from the Sargasso Sea
gccaccgtgctggagaaactcggcaacgaccacccggtggtgcccctggtgctggagcaccgggtgctcagcaagctcaagagcacgtacatcgacgccttgccgcagctggtggaggcggaaaccgggcgggtccacaccgatttcaaccaggccgtaacggcaacggggcggctgagcagcagcaatcccaacctgcagaacattcccgtgcgcaccgagtacagccgacggatccgcaaggccttccttccgcaggagggctggaccctgctcagcgctgattactcccagatcgagctgcgcatcctcacccacctctcgggagaagaggtgctgcaggaggcctaccgcagcggcgacgacgtgcacgcgctgaccgccaggctgctgctggacaaagacgaagtcagcccggacgagcgtcggctcggcaaaacgatcaacttcg

SEQ ID NO: 256616 - DNA, 871 bp, Unknown
  Bacterial polypeptide expressing nucleotide sequence isolated from the Sargasso Sea
agtacttatactgatgcattagttgaacaaataaatccaaaaactaacagagttcacactaattattcaatggttggtgctagtactggcagattatcatcttcaaatcctaatttacaaaatataccagttaaaacagaagaaggaagattaattagaacagcgtttgagtcaaagccaggttttaaattagtatctatggactattcacaaattgaattaaggttaatagcgcatatagctgatgagataaaaatgttggatgcgtttaataatgatttagacatacattctgatactgcttcaaaagtttttgggattcctataaatgagatgacattagatttaagaaggaaagctaaagctataaactttggaattatatatggtatttctgcttacggtcttgcaaaacaattaaagtgctctgcaattgaagctaaggaatttatagattcatattttaaaagatttccaagaataagagattatatggaggagattaaatctaatttagaaaataatggatacgtagagacattgttcaataggcgcatttatataaatgatagtaatgctaaaaatcaaaggttaagaggctttgctgaaaggcaagcaattaatgcgcctattcaaggttcagctgctgatataataaaactagcaatggtgaaaatacacaaaaatttatttaattataaaaatgatgtttcaatgctaatgcaagttcatgacgagcttgtatttgagataagagaaaatagtattgataaatattcaaaaattattcaacaaattatggaacatgctaatttacccaaagtttcattgaaggttaacttaaaagttgatactggtttggagataatgg

SEQ ID NO: 256617 - DNA, 590 bp, Unknown
  Bacterial polypeptide expressing nucleotide sequence isolated from the Sargasso Sea
aatgtcggattcgagaaaaatcatccatatcgacatggatgcgttttatgcgtcggtggagcaactcgaccagcctcaattccgagggaaacctctggcggtcggagggccttcagaaaaacgcggggtgattgccgccgctagttatgaagcacgggaatttggtgtgaggtccgccatgccgactgcggaagcatttcgacggtgcccggaattgaatctggtttctccgcgttttccgcgttaccgagaaatttcagaacaagttcatggaatttttcgatgctacaccgatctcattgaacccgtcgcactggatgaggcctggttggatgtcagcgccaacctgatcagggagccttccggtaccagggttgcgaaacggatcaaatcggaaatccttgagcagactgcactcacctgttccgcaggagtgtcctacaataaattcctggcaaagattgcaagtgacgaaaacaaaccggatggtctcttcgtcatcactcctgaacaagcatcggcttttctgaaagtacttccagtcagaaaaatccctggagtcggaagggtgactgaagaaaaactccatg

SEQ ID NO: 256618 - DNA, 853 bp, Unknown
  Bacterial polypeptide expressing nucleotide sequence isolated from the Sargasso Sea
ttgaagggggaaaaacaccggcatggattagatgaactgtcagacctttatcttgatcataccacaatcaagtttaaggatgtaacaggcactggaaaatcgaaaattagcttcgacaaagttccaataaatgatgccctggaatatgctgctgaggatgctgatataacagataggttgtttaaggtactgaaaccccgactttaccaagaccgaatggtgagtgtttatgagaacctcgaacgcccacttatccaaattctgaaaaatatggaagagtgtggtgtaaaattggacactcgtcgtctgttaacacttagcgaggatttcagcaaacgattaggtgacctagaaactcagatcttcaaactagctggaaaatcttttaatgttggttccccaaaacaattgggcgaaatattgtttgaggaaatgaaattgccgggtgggaaaaaagggaaatcaggttcatatggaacaggttctgaggttttagaagatttaatattgcaagggcatgagtttccaaacataattttggattggagacaattagcaaagctaaaaagtacctataccgattctctcctaaatcaagttaaccctgcaacaggtcgagtgcacaccaactatgggcaagcaatagcttctactgggcgcctaagttcaaccgaaccaaatctgcaaaatataccaatccggacggatgagggcagaaaaatcagacaagcatttattccttcagagggtaatttagttttgtcagcagattactcacagattgagcttagacttttagcgcatgtagctgacattaaagcactgaaggaagcttttgaggcaaaatattgat

SEQ ID NO: 256619 - DNA, 931 bp, Unknown
  Bacterial polypeptide expressing nucleotide sequence isolated from the Sargasso Sea
gggctttctgatctcctcgaccgttttgccgatgtggactcatcaggaattgacgttcaggacgtacctcagacagcagagcaggccgcatcttcttgccacggtgttgcatcacttattgagatactctctgaggaaattcaagcgggtgggtttggcgctcttttttctgacgtagaactgccgcttgcagaagtactgtccggaatggagagtcggggcgttcgcgttgatacgaaactactttcccgtttgtcagaagactattcgtcacaaataaaaatacttcagaaagaatcgcatgaattggcagggcatgcattctcactttcctcaccattgcaagttcggacggtactgtttgaagagcagggcctgccagtcgtcaaacgaacgaagacgggaccaagtacagatgccgaagtgttagaagaacttgcgcctctccatgaattgccagccaaacttctgcagcaccgcaagtattcaaagctaaaaagtacatatgttgatgcacttccgtttctcattgatccacgaacaaaccgaattcataccacgtttaatcaaactgttacggcaacaggaaggctgagttcaagcgatccaaatcttcaaaacatcccgattcgaactgcagaagggcagcagattcggtctgcttttcggccagcagagaaggggtggcactttcttgcggcagattattcgcaaattgaacttcgcattctagcgcacctttctggtgacactgcgatgcttgcagcatttcgcaacgaagaggatatacatactcgcacagcagcggctgtctttgaggtggaatcagaagaggtgacatctgaaatgcggcggacagcgaaagctgtgaattttgggattctttacggacagtcagcatttgggttggcgaaggcacttggtatttccc

SEQ ID NO: 256620 - DNA, 915 bp, Unknown
  Bacterial polypeptide expressing nucleotide sequence isolated from the Sargasso Sea
cagcggaagtgcctgcagaacgccaaatacgaccggctggtgctgctgcgccatgggctggagctcaatggcgtggccgtcgacaccctgctggccgactatctgcgcgatgcctcagcccgccacaacctcgaggaattggcccagcgccattacggcttccgccccaccagcttcagcgatttggtgggcaaagggcagacctttgccgatgtgcccatcgaagccgcagcccagtactgcggcatggatgtgcacctcacctaccgcttggcgattgatctggtgcaacaactcgagcagctcggcggcgccctgccgcagctgctggctgagctggaactgcctttggagccggtgctggcgcaaatggaagccaccggcatccgcattgatgtgccctacctgcaagagctgggccaatcgatgggcgagaagctgcagcaacttgggcagcaagccattgccgcagccggtgaagagttcaatctggcctcccccaaacagctgggcgaactgctgttcaacaccctggggctggaccgcaaaaaatcacgcaagaccaaaaccggctggagcaccgatgccgcggtgctggaaaaactcgaagacgcccacccggtggtgcccctggtgctggagcaccgcaccttgagcaagctcaaaagcacctatgtcgatgccctgccccagctggtggaaagcgaaaccgggcgggtgcacaccgatttcaaccaagcggtaacggccactgggcggctctcgagcagcaaccccaacctgcagaacatcccggtgcgcacggcctacagccgccagatccgcaaagccttcttgccccagcaggactggaccctgctcagcgccgactacagccagatcgagctgcgcatcctcacccacctctgcggcgaa

SEQ ID NO: 256621 - DNA, 793 bp, Unknown
  Bacterial polypeptide expressing nucleotide sequence isolated from the Sargasso Sea
attgtcttctctaatccaaatttacaaaacataccaattagaactgaagaaggaaggttaattagaacagcttctgagccaaaggaaggcttcaaattagtatcaatggattattctcaaattgaattaaggttgattgcacatattgcagatgaaaataatatgttggacgcgtttaatgataatttagatattcatgcagatacagcttctaaggtgtttgatataccaataaaagaaataacttcagagtttagaagaaaggcaaaggcaattaattttggaattatctatggtatttcagcatatggtcttgcaaagcagttgaaatgttctgcaaatgaggcaaaggattttatcagttcatacttttataggttcccaaaaattagagattatatggaagaaattaaatctaatttagatagtgatggttatgtagaaactttgtttaatagacgtatttatattaatgatagtaattctaaaaaccaaaagctgagaggatttgcagaaaggcaagctattaatgctcctattcaaggtactgctgcagatattattaaattcgctatgattaaaattcataaacagttactgaacaaaaaagaaatttctatgttaatgcaggtccatgatgagttagtatttgaaataagagatgaaaatattgaagaatttacaaaagttatttcacccataatggaaacagccaatctaccaatggtacctttgaaagttaacttaaaagtagatgttggtgttggaaataattgggctgaagctcattgat

SEQ ID NO: 256622 - DNA, 433 bp, Unknown
  Bacterial polypeptide expressing nucleotide sequence isolated from the Sargasso Sea
actgtttttatatacagtattttgggtgtcggaggaatgcaaggtgcgaaaaatcattcatatcgatatggattgctattttgctgcggtggaaatgcgggattttcccgaataccgcggtaagcctttggccgtcggcggcagtcgggtgcagcgtggcgtcatcagcacttgtaattatgaggcgcgcaaatttggtgtgcgttctgccatggcgacgggctacgcattgaaattgtgtcccgatcttatcctcgttcccggtcgtatgcaggtctataaagaggtctcacagcaaattcgcgccattttctcccgatacacagagttaatcgaaccgctttccctcgatgaggcctatttagatgtcagcgattgtaagctgtttaagggctctgccactttaatcgccgaggcaattcgcccgggatat

SEQ ID NO: 256623 - DNA, 804 bp, Unknown
  Bacterial polypeptide expressing nucleotide sequence isolated from the Sargasso Sea
gcagacatttctctgaagctctatgagcatattgaaccattggttcaaaaggaagcaaaattgtcaaaactctattctgagattgagggcccactgatttatacactgggcgatattgagagaaacggtgttttgattgattcagaaaaactgagtcaacaaagcaaagagcttgaggccaagattttgaaactggaaagcaaggttcaaaaaaatgcaggtgaggactttaatctcggctcaccgaagcaacttcaagaaattctctatgaaaagctcggtttgcctgtgattaaaaaaacaccaaaaggccaaccctcaacttcagaagctgtgcttcaggaactttcaatggatttcccaatcgttgacgatattctcagttaccgtgcgatttcaaagctgaaatccacctatactgacaaattgcctaaaatgataaattccaatacaggcagagtgcatacttcatatcatcaagctgtgactgctactgggagattgtcatcctcagatcccaatctacaaaatatccccatcagatcggaagagggtcgaagaataagggaagcattcattgcgcctgagggatataagattttggctgcagattattcacaaatcgaactcaggatcatggctcatctctcgaaagatcaaggcttaatggatgcttttgcaaaaggccaagacatccatcaggcaacagctgcagagatattttccataaatattgatgatgtgacacccaatcaaagacgctctgcaaaagcaataaactttggtctgatctatgggatgtct

SEQ ID NO: 256624 - DNA, 926 bp, Unknown
  Bacterial polypeptide expressing nucleotide sequence isolated from the Sargasso Sea
cccgctgcccgcgctgatcatggagtaccgggggctgagcaagctcaagtccacgtacaccgaccagcttccgcgtgagatcgatcagggcacgggaagaatccacacctcataccgacaggcggtcgccgcgacgggacggctgtcgagtgttgaccccaatctgcagaacatccccatccggaccgacgaaggcagacgggttcgtcgcgcgttcgtggcgccgccagtaacccgcctgctcgcggcggactactcgcagatcgagcttcggatcatggcgcacctgtctcaggacgccggtctgctcgacgcatttgcgcaagggctcgacatccaccgtgcgacggcggccgaagtgtttggtgagtcgatcgagacggtgcaggatgaccagcggcggagtgcgaaggcgatcaactttggcctgatctatgggatgtcggcctttggactggccaatcagctcggaatttcgcgtgcgtccgcgcaggagtacatcgatctctatttcgatcggtatcccggagtgcaggactacatggaacgcacccgcagctttgccgcggatgaaggttacgtggagacgttgtttggtcgcaggctctacctgcccgagatcaaggcgagcaactacatgcggcgccagggcgcggagcgacaggccatcaatgcgccgatgcagggtactgcggcggacatcatcaaaagggcgatggtcactgtggatcgctggctcaccgacagggagccggcgtctcggatgatcatgcaggtacacgatgaactggtgctcgaagtgcctgaaggtgacgtggaccgcgtcggcgcgggtgtctcgcagctcatgtcggacgctgcgagcctcgcggtgccgctggtcgtcaaggtcggggtcggcggtgactgggacgcggcgcactgac

SEQ ID NO: 256625 - DNA, 412 bp, Unknown
  Bacterial polypeptide expressing nucleotide sequence isolated from the Sargasso Sea
atgggaaagatcatccgaaaaatcatccatgttgatatggatgcattttacgcatctgttgagcagatggatgatcctactttaactgggaaaccagttgcggttggtggaagcagggaccgaggtgttgttgcggctgcatcttatgaggctagaaagtatggagtcagatcagcaatgccttcagttcaagcaaaaaagatgtgtccaggcctattattcgtcagaccaaggtttagccggtataaagatatttcagaacagataagaagaattttccaagactatactgatttgatagagcctctgtcattggatgaggcatttcttgatgttaccataaacaagaaaggcatagacctggcaagggaaattgcggcccaaataaggcaaagaatccactcagagatag

SEQ ID NO: 256626 - DNA, 817 bp, Unknown
  Bacterial polypeptide expressing nucleotide sequence isolated from the Sargasso Sea
ctcctacagccaggccgcagcgtcgacgggacggcttgcatcaacagacccaaacttacagaacatcccggtgcgaacggaggaaggccgcaaaattcgcaaggcgttcgtatcggagagagaccatgtgttagtatcagccgactattcccagatcgaactccggatcctagcccacgtggctggcatcgacaccttgaagcaggcctttcacgacggccaggatatccacgcgctcacagcctcccaggtcttcggcaagcccattgagggcatggacccaatgacacggcggaatgcaaaagcaatcaactttggcatcatctacggcatctctgcctttggcctagcgcgacagctaggcattccgaatagcgaagcaaaggcctacatcgacgcctacttcgacaagtatccgggtataaaggcttacatggagcgcaccaaggccaaggctcgcgaagaaggcttcgtaaccacgctttttggacgcaaatgccacaccaagggcatcaacgaccgcaaccccaacatgaggagtttcgcagaacgggctgctatcaatgcgccgatccagggcggtgccgccgacattatcaaacgcgccatgattagggttccgggggctatcacaaccgctgggctcaaggcccggatgctcctgcaggtgcatgacgaactgatcttcgaggtgcccaaggcagaagttactggtaccatcgatgtggtgagggcgaccatggaaggggcggcgcatttagacgtgccgttggtggtcgatgcgggcacaggcatgagctgggacgaagcccactag

SEQ ID NO: 256627 - DNA, 721 bp, Unknown
  Bacterial polypeptide expressing nucleotide sequence isolated from the Sargasso Sea
acaaaaagagtacatacatcatactcaatggcttcggcttctacaggaaggcttgcttcaacaaatccaaatcttcagaatatccctattagaacttctgatggaagaagaattagggaagcttttattgcaagagacggatataaattaatatctgctgattatagtcaaattgaactcaggttgatggcgcatgctgcaaatgaaacagaaatgataaaagcgttcaatgaaaatgttgatattcattctcaaactgcttcaaaggtttttggaattcctattgaggatcttgattctgaaactagaagaagtgctaaagctattaattttgggataatttacgggatttcttcttttggactatcaaaacaactttcatgttctcaaagtgaagctaagaattttatagattcatattttgatcaatttccaaaaattaaaagttatatggatgaaatgatagaaaatgctaaaatgaaaggttatgttgagaccttttttggaagaatgataccaataaaaggcataaattctaaaaactttcaagaaagatcatttgcggagaggcaatctataaacgcgccaattcaagggagtgcagcagatattattaagagagccatgataaaaatacacaatgttttccaagaaaaaaacattgaatcaaaaatgttacttcaggtgcatgatgaattagtttttgaatgtccaaaagaga

SEQ ID NO: 256628 - DNA, 799 bp, Unknown
  Bacterial polypeptide expressing nucleotide sequence isolated from the Sargasso Sea
tttgtcagaacaaggatatgagatagcaagtttaatcttagaatggagagaattaacgaaactaaaatccacttatactgatgctttgcaaaatcaggcaacaaaagataaatcaagagttcacacctcatatggtatagctaatactcttacaggtcgattaagttctaatgatccaaatcttcaaaatattcccatacgtacaaataatggaagaaaaataagaaaagcatttgtttgtgatacaaaaaaaactttaatgagctttgattattcacaaatagaattaagacttgcagctgaaatttctggtgataataattttatagaagcttttaagaacaatgaagacattcatagttctacagcctctcaaatatttggtactagttcaaaaaaacttgattcggaaatgagaagaaaagcaaaagcaataaattttggtattttgtatggaataagcccttacggtttagcaaaacaattaaatgtcacaaacagagaagcaaaaatatatatagaaaattattttaaaaaatatccaaaaatcaaaaagtatatggatgatcaaattgcttttgcaaaaacaaatttttatgtggaaacaattttcggtagaagatgtaatataaaaaatataaatgataaaaattttgcagtgagaggatttgctgagagacaagctattaacgctcctatacaaggtacagctgctgatataattaaattagctatgatagaattaaacaaaatgattattagtaaagaattagaagttaaaatacttcttcaagtgcat

SEQ ID NO: 256629 - DNA, 217 bp, Unknown
  Bacterial polypeptide expressing nucleotide sequence isolated from the Sargasso Sea
tatgtcggattcgagaaaaatcatccatatcgacatggatgcgttttatgcatcggtggagcaactcgacatgcctcaattccgaggcaaacctctggcggtgggagggccttcagaaaaacgcggggtgattgccgccgctagttatgaagcacggaaatttggtgtgaggtccgccatgcccaccgcgggagcatttcgacgttgtccggaattg

SEQ ID NO: 256630 - DNA, 922 bp, Unknown
  Bacterial polypeptide expressing nucleotide sequence isolated from the Sargasso Sea
cctgagcttaaaaatctattgatagatgttgagtttcccctagcctgtgtactttctcgtatggaacaggaaggtgtattgatagacagccaaaggctgcgtcagcaaagccaggatcttgccacccggattgccgagcttgaaagtgaagtacatgaggaagctggcgagccattcaacttaggttctactaaacagcttcaacatgtcttgttcgaaaaaatgtcgctaccgatcataaagaaaacgcctaaaggggcgccgtctacttctgaggacgtactgcaagaacttgcgcttgagtacccgttgccgaagaagatcatggaataccgtggcctaaccaagctaaagaatacctacacggataaacttcctaagatgatcaatcatcgtacgggtcgagtgcatacttcttatcaccaagcagtaaccgccacgggacgactctcttctaccgatcctaacttacagaacatccctatccgaaatgaggaaggtcgccgcgtgcgtaaggcatttgtaccaagagaaggaaataagttcgtcgcagccgactactcgcaaattgaattgcgaataatggctcacctttcgggtgataagggtctgttagatgcctttgcgcatggtaaagatattcataaagcaaccgctgcggaagtttttggtgtgccacttgatgaagtaaccactgaacagcgtcgcagtgcaaaagcgattaactttggcttaatttacggtatgagtgcctttgggttgtcgaagcaacttaatattccacgtaatgaagcacaaaaatatatggatctttacttcgaacgctacccaggcgtgcttgagtatatggactcaacgcgtgagagcgccaggataaaggtatgtagaaaccgtatttggtcgcagactttatttgcctgat

SEQ ID NO: 256631 - DNA, 811 bp, Unknown
  Bacterial polypeptide expressing nucleotide sequence isolated from the Sargasso Sea
cgagatcttcttcgagaagctgcggctcgaccccaacgcgaaacgtactcggaagagcaagcagtatcagacgaacgaacggatccttacccgcctggccaatcgtcacgagattgcagagaaggtgcttcactatcgtgaaagcacgaagctcaagtccacgtatctcgatatgctgcctgggacggtgttcgagaagacgggtcgtgtgcacacgaactacgagcaggcagtgacggccacgggacggatgcagtcgagtaacccgaacttgcagaacattccggtaaggagcgatcagggccgtgagattcggaaagcctttgttccgcgagacgataaccacacgctgctcgcggcggactattcgcagatcgagctgcggatcgtggcggatatcagcggtgatgagacgatgaaaggggccttcgaacgtggtgacgacatccacgagatgacgtcgatgaaggtgttcgatgtggctgccgaagatgtcacggcagagatgagacgacgagcaaagacggtgaacttcgggatcgtctacggcatctcggctttcgggttgtctgatcgattggacattccacgcgctcaggccctcgacttgatcgagtcgtacttcacgcagtatcccgctattcgtgactacatggagcagaccgtcgagttctgtcgcgagaacggctatgtggagacggtgaccggccgacgaaggtatctgcgagacatcaactcgcgcaatgggacacttcgaagtgcggccgaacgcaatgcgattaactcgccgatccagggatcggccgcggat

SEQ ID NO: 256632 - DNA, 873 bp, Unknown
  Bacterial polypeptide expressing nucleotide sequence isolated from the Sargasso Sea
gaatggcgacagttaagcaaacttaaaagtacctatacggatgcattaattggtcagattgatagtcgaaccggacgggtgcatacctcctttgcgcaagcgatagcttcgactgggcgtttgtcttctaatgatcctaacctgcagaacattcccatacgcactgaagatggtcgtaaaattagaacagcctttgttgcggatgataaaaatgtcctgctttcagcagattattctcaaattgagttgcgcttgctcgcacatgtggctgatattggcaccctaaagaaggcctttaaagatggtgttgatattcatgccctgacagctagtgaggtatttggaattcctattagccaactcgatagcccgactcgtaatcgcgctaaagcaataaattttggcattatttatggtatcagcccatttggattggcgcgtcagctggacattgcgcaaggcgatgcaaagtcttttatcgaggcttattttgcacgatatcccggtgttaagggctatatggataatgcaaaagagttcgcgcaaaagactgggtatgttgaaacaatttttggccgtcgagttcacgtgccgggaattaaggataaaaacccggcgcgacgaaattttatggaacgagcggcaattaatgccccgttacagggatcggctgctgatatcattaaacgtgcaatgatcctgatgcccgatgttttgaagtcggcggatctcaaagcacaaatgttgttgcaggtgcacgatgaattaatatttgaggtgccaagaagtgagcttgagaagaccgaaaaactggtcaaaaacgtcatggagtctgcggcaagcctatctgtccccttaatctgtgataccggt

SEQ ID NO: 256633 - DNA, 824 bp, Unknown
  Bacterial polypeptide expressing nucleotide sequence isolated from the Sargasso Sea
ttcaaacctttatcctcgattaataaaagaaaaagctaattttgtttatcaaaacatcgatctgcctcttgtagaggtattatcctcaattgaagcaaatggcatagaggtaaataaaaagtttttaataagtctaagtaatgaatttgaaaatgaaagtaaaaaacttgaaaagaatatttataaactttcaaaagaagagtttaatatcggttcaccaaaacaattaggagagatattatttattaatcttaaaatacctggtggtaaaaaaacaaaatcaggcacatattccacggattcttcaactttaaataatttagcttcaaatggatttgaaattgcacaactcgttcttgattggagggaattaacaaaacttaaatcaacttatacagatgctttatttagattaacagatggtaaaagtagagttcatacatcatttggtttagctaatactttaacaggtcgattaagttctactgatccaaatcttcaaaatattccaattagaaccgaaaatggaaaaaaaataagaacagcttttattagtggaaaagggaataaattagtcagttttgattattctcaaatagaacttagattagctgcagaaatctctagtgataaaaattttattaaagcttttaaaaacaatgaagatattcacgcatcaactgctaaggaaatatttaatataaacgacagtcaaataaacaatgattatagaagaaaagccaaagcaattaattttggtattctatatggaattagtccatatggtttagctaaacaacttgatatttccaatacagaagcaa

SEQ ID NO: 256634 - DNA, 892 bp, Unknown
  Bacterial polypeptide expressing nucleotide sequence isolated from the Sargasso Sea
gtgatcctcgaacatcgcagcctgaccaagttaaagagtacttacaccgacaagctccctctaatggtgaatgcaaaaaccggccgggtacacacaagctaccatcaggccaacgcggcaacggggcgtttatcctcgagcgaaccaaacctacagaatattcctatccgcacagaggaaggtcgtcgaattcgccaagcctttattgcgccgcagggacgtaagattttggctgccgactattcgcagattgaattacggatcatggcgcatttatcccaagatgcaggcttactcaaagccttcgccgaagggaaagacattcacagagccaccgccgccgaagtatttggcaccgactttgacagtgtcacctcggagcaacgtcgccgcgccaaagccgttaactttggccttatctatggcatgtccgcctttggattggcgcgtcagctcgacattccccgtaatgaagcgcaaacctacatcgacacttacttcgcccgctatccaggcgtattaaggtatatggaagaaacacgagccagtgcagcagaacttggctatgtctcaacgctatttggtcgccgtttgtatttacccgaaattcgcgatcgtaatgcaatgcgccgtcaagcagcagaaagggccgcgattaacgccccaatgcaaggcaccgccgcggatattattaaaaaagccatgatcagcattgccgattggataaaaagcgatacccaaggtgaaatcgccatgattatgcaagtccacgacgaattagtgttcgaagtcgatgccgataaagccgaaactctcaagctcaaggtgtgtgagctcatggcacaaagcggccaatctggacgtggaacttctggcggaagccggtattggt

SEQ ID NO: 256635 - DNA, 836 bp, Unknown
  Bacterial polypeptide expressing nucleotide sequence isolated from the Sargasso Sea
cgccggagaagcgtttaacctgtcttccaccaagcaactgcaaaccatcctgtttgaaaagcagggtattaagccgctgaagaaaacgccgggcggcgcaccatcaacgtcggaagaggtgctggaagagttagcgctggattatccgttgccgaaagttatcctggaatatcgtgggttagccaaactgaagtcgacctatacggataagcttccgttgatgattaacaagaagaccgggcgcgtgcacacttcctatcatcaggcagttaccgcaacgggtcgcttgtcttcaacggatccgaacctgcaaaacatcccggtacgtaatgacgaaggtcgtcgtattcgtcaggcgttcattgcgccagaagactacgtgattgtctctgcggactactcacagattgaactgcgtatcatggcgcacctttcacgtgataaaggtctgcttaccgcgtttgccgaagggaaagatattcaccgcgcaacggcggcagaagtctttggtttaccgcttgattctgtgaccagcgagcaacgccgcagcgcgaaagccatcaacttcggtttgatctacgggatgagcgcttttggtctggcgcgccagttgaatattccgcgtaaagaagcacagaagtacatggatctctacttcgaacgctacccaggcgtgttggaatatatggaacgcacccgcgcgcaggcgaaagagcagggttatgtagaaacgctggaaggtcgccgtctctatttaccggatattaaatccagtaatggtgctcgtcgtgcaggtgcagaacgcgcggcaattaacgccccgatgcagggtactg

SEQ ID NO: 256636 - DNA, 718 bp, Unknown
  Bacterial polypeptide expressing nucleotide sequence isolated from the Sargasso Sea
ctgccagagatgattgatgcgcggaccggtcgagtgcacacgtcttaccaccaggcagtcacggcgaccggccgcttgtcttcatccgatcccaaccttcagaacattccgatccgcaccgaggaaggtcggcgtatccggcaggcctttatcgccgcacctggctgcaaaattgtcgcggccgattactcacagatcgaactgcgcatcatggcgcacctctcgcaggacgagggattgctcaaagcgtttgccaatgagctagacgtgcacagtgccaccgctgccgaggttttcggggtcgagattggcgaagtctccggggaccagcggcgcaaagcgaaggcgatcaatttcggtctgatctacggtatgtcggcctttggtttggccaaacagctgggcctgggcaggaacgaggcgcaggagtacatcgatctatactttgcccggtaccccggggtggcagattacatggcgcggacccgcgagttggcacacgacaccgggtatgtggaaacgttaaagggtcgccgcctgtacttgccagagatcaatgctaagaatcgacagcgccagcaagcggctgagcgcacggcgatcaatgcgcctatgcagggtaccgctgcggatatgatcaagatggccatgttggcggttgatgggtggctctacaggctccaccatcgacgcgcggatgatcatgcaggtgcatgat

SEQ ID NO: 256637 - DNA, 853 bp, Unknown
  Bacterial polypeptide expressing nucleotide sequence isolated from the Sargasso Sea
tatgcggctgaggatgctgatataacagatagattgtttaagattctcaaacctcggctgtaccaagaccggatggtggcagtttatgaaaacctcgaacgtccactgattcaaattcttaaaaatatggaagagtgtggtgtaaaattggacacacatcgcctattaatacttagcgaagatttcagtaaacgattaattgagctagaaactcagatcttcaaactagctggaaaatcctttaatgtcggttccccaaagcaattaggagaaatattatttgaggaaatgaaattgccgggtggaaaaaaaggtaaatcaggttcatatggaacaggttctgaagttttagaagacttgatattgcaaggttatgagtttccaaaaataattttagattggagacaattagcaaagctaaaaagcacttatacggattcccttctcaatcaagtcaactataaaacgggtcgagtgcataccaactatggacaagcaatagcttctactggacgcctcagttcaaccgagccaaatttacaaaacataccaatccggacggacgagggaagaaaaattagacaagccttcattccttcagagggaaatttaattttgtcagcagattactcgcagatagagcttaggcttttggcacatgtagccgacataaaggcactcaaagaagcttttgaggcaaatattgatattcactccttgacggcttcacaagtttttgggacccccgttgaggatgttgacgatgatatgcggaggaaagcaaaagctataaattttggtattatctatgggatttctgcatttggtttagccagacaattaaatattccga

SEQ ID NO: 256638 - DNA, 818 bp, Unknown
  Bacterial polypeptide expressing nucleotide sequence isolated from the Sargasso Sea
ttcaaatctttatcctcgtttaataagagaaaaggctaattttgtttatcaaaacatcgatttgcctcttgtagaggtattatcttcaattgaagcaaatggtatcgaggtaaataaaaagtttttaacaaatttaagtaatgaatttgaaaatgaaagtaaaaaacttgaaaagaatatttataaactttcaaaagaagagttcaatattggttcacctaaacaattaggagagatattatttgttaatcttaaagtacctggtggtaaaaaaacaaaatcaggcacatattctactgattcttcaactttaaatactttagcttcagatggatttgaaattgcacaactcgttcttgattggagagaattaacaaaacttaaatcaacttatacagatgctttatttagattaacagatggtaaaagtagagttcatacatcatttggtttggctagtactttaacaggtcgattaagttctacagatccaaatcttcaaaatattccaattagaactgaaaatggaaaaaaaataagaacagcttttgttagtggaaaagggaaaaaattagtcagttttgattactctcaaatagagcttagattagctgcagaaatttctagtgataaaaatttcattaaagcttttaaaaacaatgaagatattcatgcatcaactgctaaggaaatatttaatttaaacgatagtcaaataaacaatgattatagaagaaaagcaaaagcaattaattttggtattctatatggaatcagcccatacggtttagctaaacaacttgatatttccaacacag

SEQ ID NO: 256639 - DNA, 847 bp, Unknown
  Bacterial polypeptide expressing nucleotide sequence isolated from the Sargasso Sea
caagaacttgcgcttgagtacccgttgccgaagaagatcatggaataccgtggcctaaccaagctaaagaatacctacacggataaacttcctaagatgatcaatcatcgtacgggtcgagtgcatacttcttatcaccaagcagtaaccgccacgggacgactctcttccaccgatcctaacttacagaacatccctatccgaaatgaggaaggtcgccgcgtgcgtcaggcatttgtaccaagagaaggaaataagttcgtcgcagccgactactcacaaattgagctgcgcattatggcgcacctttctggcgataaaggtctgttagatgcctttgcgcatggtaaagatattcataaagcaaccgctgcggaagtttttggtgtaccacttgatgaggtaactaccgaacaacgccgcagtgcaaaagcgattaactttggtcttatctacggcatgagtgcatttggattgtcaaaacaacttaatattccgcgcaacgaagcacaaaagtacatggatctttactttgaacgctaccctggcgtgcttgagtatatggactcaacacgtgagagcgcgaaagaaaaaggttatgtagaaaccgtatttggtcgcagactttatttgccagacattaaggctagtaatggagcacgccgaaaaggtgcagagcgcgcagcgataaacgcgcctatgcaaggcacagcggcagacattattaagatggcaatgatcaaagttgatgactggattaggaaaaatgcatctgatgatgtgaccatgatgatgcaggtgcacgatgaattggtttttgagataaaagaagacaaagtggaaacct

SEQ ID NO: 256640 - DNA, 889 bp, Unknown
  Bacterial polypeptide expressing nucleotide sequence isolated from the Sargasso Sea
atataatagaattttgccgagaatatttaacgataaaagattttctgtttataaaagattagaaaacccattaatcaatgtattactagaaatggaaaacactggcgtaacaataaatgctcaaaaactctcagaaatttcaaaaaatttatctgatgaaattcttaaattagaaaataagatttttgattacagtggtaaaactttcaatgttggttctccaaaacaactaggagaaatcttatttgacaaattgaagattgagggtggtaaacgctccaaaaatggatcttggcaaactagtgttgaggttcttgaaaatctttcagatttagggcatgaaattgcacaacttattttaaattggagacatttttctaagttaaagagtacttatactgatgcactagttgaacaaataaatccaaaaactaacagagtccatactaattattcaatggttggtgctagtactggaaggttatcctcttcaaaccctaatttacagaatatacccataaaaacagaagaaggaagattaattagaacagcttttgaatcaaagccaggttttaaattagtatctatggactattcacaaattgaattaaggttaatagcgcatatagctgacgagataaaaatgttggatgcatttaataatgatttagacattcattcagatactgcttccaaagtttttggagttcctgtaaatgagatgacatcagatttaagaaggaaagctaaagctataaactttggaattatatatggtatttctgcttacggtcttgcaaaacaactgaagtgctcagtgaatgaagcaaaagaattcatagattcatatttcaaaagatttccaaaaattagagattatatggaagaa

SEQ ID NO: 256641 - DNA, 781 bp, Unknown
  Bacterial polypeptide expressing nucleotide sequence isolated from the Sargasso Sea
tcgtctacagaacctaacttacaaaatattcctattaaaaccgctgaaggcaggagaataagagaagcttttattccagaaaaaggtaacacacttatttctgctgattattcccaaatagaactaaggataatggcccatttgtcagaagataaaaacctcacaaatgcttttaataataatattgatgttcattcttcaaccgctgcagaggtttttagcatagcaattgaagaggtaaataaagatcaaagaaggagcgccaaagctataaattttggtttaatgtacggcatgtctgcttttggactcacaagacagctgggaattacaagagctgaagcgcaagcatatttagatacttattttgcaagatataccggggtaagagattacatggataatattaaagccaaagcgaaggaagatatgtttgttgagaccattatgggaagacgtctttatcttaatgaaataaatgccgcaaatggattaagaagacaggctgcagagagagcagctattaatgctccactacagggatctgcagcagacataattaaaaaggcaatgctcgatatcgataaacttattttaaatgaaatgcccgatgtaaaaatgataatgcaggttcatgacgaactagtgtttgaatgcccaaaagaaaacgctgacttagtgatggagaaaatgaaagaaactatggagcaaaccgtagaactaaaaatacctttgattgctgaagcagctgttggctcaaactggaatgaggcgcactagt

SEQ ID NO: 256642 - DNA, 604 bp, Unknown
  Bacterial polypeptide expressing nucleotide sequence isolated from the Sargasso Sea
agttcgtacggttgctactgacggtcatcgtttggcgttgaacagtctagaagtgccagaagctaaaacggaaaagcaggtaatcctgccgcgaaagggtgttctggaattacagcgattactacaagaagttgatggtgatgtcgtcctgaccattggtagtaatcatctaggcgcggcaactgatgaatttgcccttacgactaagttgctagacggcaagttccctgactatgagcgcgtaataccgagggatggaaatcgcgttatcctggcggataaggaagaactccgtcaggcactgagtcggacagccattctctcgaatgaaaaatttcgtgctatacgagtttcctttaacaatggaatcattcaactttctgcaaacaatccagagcaggaagaggctgaagaaactatgtctgttgcttatcagggagatgccgtggaaatcggtttcaacgtgagctacctccaggatgtattgggtgttctggatagcgagaaggttcggataacggtgcttgatgctaatagcagtgcactgttggaagagcctgagaatgatgatgccatctatgtggtcatgccgatgaagttatga

SEQ ID NO: 256643 - DNA, 953 bp, Unknown
  Bacterial polypeptide expressing nucleotide sequence isolated from the Sargasso Sea
ttgcaaagttccgctgaataaagcgatggagtactccgccgaagatgcggacatgacatttcgcctgtacaaacagcaaaagaaagaccttccaaaaaaacgcatggccgcagtatacgagacactcgaacgtccgcttatcgaagtattggttgaaatggagcatactggcataaaggtagaccctataattctaaaaaaaatgtctgaggatttttcacaacggctgaaaagtcaggcgggtgatatttataaattggccggtggtgaatttaatatcgcgtcccccaagcaattaggagaaattctttttgataaactgtctctaccaggcggaaaaaaaacaaaaacaggttcttatgcaacaggggcagagattcttgaagatttagcggcaaatggcagtgacatagcagcaaaagttctagattggaggcaaattgccaaacttaagtcaacgtatactgacgcgttaatcgaagaaattaatcctaaaactggtagaatacacacttcatactcaatgacaggggcaagtactggacgcctaagttcaaatgatcctaatcttcaaaacattcccataagaactgacgaaggaaggaaaataagaactgcttttatcgcggagcaagataatgccttagtttccatagattattcacaaattgaactgcgactgttagctgagatagcaaatatcgacagcttgaagcaggctttcagggatggcgttgatatccacgctcaaacggcttcagaagtgtttaatatctctgtcgaaaatatggacccgatgatcagaagaaacgcaaaagcaattaattttggtatcatttatggtatttcgagctttggcttagcacgacaactgcgttgcccccaaaccgaagccaaagcatatattgacgcttatttcgcgaaatatcctggcattcaaacttatatggatc

SEQ ID NO: 256644 - DNA, 913 bp, Unknown
  Bacterial polypeptide expressing nucleotide sequence isolated from the Sargasso Sea
tccgcgacagaatatgccgcagaggatgcggacatacccttaaggctatggaaaattcttaaacccaagcttcataaatcaggtgcaaccaaagtgtatgagactatggaacgttcccttattcctgtactttccgatatggaattaactggtatccttatcgatagagaattcttaaagaaaatgtcgaatattctggcgcaaaaaattctggcctgtgaagaggttatcttttcgctatctcagcaaaagtttaatataggatctcctaaacaattaggggaaattctttttgaaaaattgaacttgagtggggggaaaaaaagcaaaaatggaacctactcaaccaacgctgatgtcttagaaaatttgtctgctgatggaaatgaattggcagaaaacgtacttttatggagacaaatggcgaagctaaaatcaacttatacagacgcgctaccatatcatataagcaaatctactggccgtgtccacaccgcatacaatatgtctggaacttctactggtcgcctttcgtcctcagaaccgaatttacaaaacatacccattcgtactgatgatggtaaaaaaatccgagaagcatttatttcagctccagggaaaaaaattgttagtctagattatagtcaaatcgagcttagaattttagcacatatcgcaaacatcactagtttaaaaaaggctttttctgaaaaattggatattcatgcgatgacagcatctgaaatgttcaacgttcccatgaatgaaatgaccccgagcgtacgtcgcaaagcgaaagccataaattttggggtaatttatggtatatcagctttcggcttagcaagaaacttacgaatttctcgagaagaagccaaaaactttatcgatacgtactttaatcgattccctg

SEQ ID NO: 256645 - DNA, 850 bp, Unknown
  Bacterial polypeptide expressing nucleotide sequence isolated from the Sargasso Sea
gttcgcccaaaaaatggctggtcttgaggctgaaatttatgaactggctggtgagtcttttaatgtgggaagtcccaagcaattgggtgaaattatgtttgataagctgggttacgaaggtggtaaaaaggggaaaaatggagcctatgcgactggagctgacatactcgaagatctggcgatgagctatgatttccccaaaagggtgcttgattggcggcaattaagtaaacttaaatctacttacactgatgcactacaagatcacataaatccaaatactggacgtgttcatacttcatattcgatcgctggagctgttactggtcgattgtcctcaactgagcctaacctgcaaaatataccagtcaggacagaagatggacggcgtattcgagaagcatttgtcgctgaagatcgtaatatttttgtaagcctagattatagtcaaattgaactaagaattttggctcatatagcacaaattgataccctaaagcaggcatttcatgatggtttggacattcatgccatgacagcttcagaaatgtttgatgtacctctagatgaaatgacatctgaaattcgtcgtcaggcaaaagcgataaactttggggtgatctatggaatctctggctttgggcttgcaaggaatttacgtattccacgatctgaggcgcaaggtttcatagatcgttactttgagagatttcctggaataaaggaatatatggataagactgtaaaattcagtaaagaaaacaattatgtggaaacgctgtttggtagaattattcacacccctgaaataaatgcaaagggtccaatggctggttttgcaaaaagagcg

SEQ ID NO: 256646 - DNA, 517 bp, Unknown
  Bacterial polypeptide expressing nucleotide sequence isolated from the Sargasso Sea
atgtcggattcgagaaaaatcatccatatcgacatggacgcgttttatgcgtcggtggagcaactcgaccagcctcaattccgagggaaacctctggcggtgggagggccttcagaaaaacgcggggtgattgccgccgctagttatgaagcacggaaatttggtgtgaggtccgccatgccgactgcggaagcatttcgacggtgcccggacttgaatctggtttctccgcgttttccgcgttaccgagaaatttcagaacatgttcatggaatttttcgatgctacaccgatctcattgaacccgttgccctggatgaggcctggttggatgtcagcgccaacctgatcagggagccttctggtaccagggttgcggaacggatcaaatcggaaatccttgagcagactgcactcacctgctctgcaggagtgtcctacaacaaattcctggcaaagatcgcaagtgaagaaaacaaaccggatggtctcttcgtcatcactcctgaacaggcat

SEQ ID NO: 256647 - DNA, 850 bp, Unknown
  Bacterial polypeptide expressing nucleotide sequence isolated from the Sargasso Sea
gcccagcgccattacggcttccgccccaccagcttcagcgatttggtgagcaaagggcagacctttgccgatgtgcccatcgaagccgcagcccagtactgcggcatggatgtgcacctcacctaccgcctggcgattgatctggtgcaacaactcgagcagctcggcgacgccctgccgcagctgctggctgagctggaactgcctttggagccggtgctggcgcaaatggaagccaccggcatccgcatcgatgtgccctacctgcaagagctgggccaatcgatgggcgaaaagctgcagcaactcgagcagcaagcgatcgccgcggccggcgaagagttcaacctcgcctctcccaaacagctgggcgaactgctgttcaacaccctggggctggaccgcaaaaaatcacgcaagaccaaaaccggctggagcaccgatgccgcggtgctggaaaaactcgaagacgcccacccggtggtgcccctggtgctggagcaccgcaccttgagcaagctcaaaagcacctatgtcgatgccctgccccagctggtggaaagcgaaaccggccgggtgcacaccgatttcaaccaggcggtaacggccactgggcggctctcgagcagcaaccccaacctgcagaacatcccggtgcgcacggcctacagccgccagatccgcaaagccttcttgccccagcaggactggaccctgctcagcgccgactacagccagatcgagctgcgcatcctcacccacctctgcggcgaagaggccttggtggaggcttataacagcggcgatgacgtgcatgcgctcacggcccgcctgctgctgacaaaagcga

SEQ ID NO: 256648 - DNA, 908 bp, Unknown
  Bacterial polypeptide expressing nucleotide sequence isolated from the Sargasso Sea
cgagggaaacctctggcggtgggagggccttcagaaaaacgcggggtgattgccgctgctagttatgaagcacggaaatttggtgtaaggtccgccatgcccactgcagaagcatttcgacgttgcccggaattgaatctggtttctccacgttttccgcgttaccgagaaatttcagaaaaagttcatgggatttttcgatgcttcaccgatctcattgaacccgttgccctggatgaggcctggttggatgtcagtgccaacctgatcagggagcattctggtaccagggttgcgaaacggatcaaatcggaaatccttgagcagactgcactcacctgctctgcaggagtgtcctacaataaattcctggcaaagatcgcaagtgaagaaaacaaaccggatggtctcttcgtcatcactcctgaacaggcatcagcttttctgaaagaacttccagtcagaaaaatacccggagtcggaagggtgactgaagaaaaactccgtgattttggaattgagttcacagaggacttgctcaaaaaagatgcggaatggctcaatcaatactttggtaaatttggaatggtgctttttcagcgggcgagaggaatcgaccaccggcctgttgaacctgaaagggaaaccaaatccgtcagtgttgaaacgacctttgaccgcaatcttaccagtcttgaagaactgtacccagaactgcaaaacttgactgaaaaactgcttcagcgtctcgaccgcaacggaatttgcggttccactctgaccctgaaattaaaatttgccgattttgaacaaatcactcgttcagaaagccgaagcctcccttttgaccgaaattctcttcttgaaaccggaaaaagaaaactgcatcaatgctgctctagggagta

SEQ ID NO: 256649 - DNA, 1422 bp, Unknown
  Bacterial polypeptide expressing nucleotide sequence isolated from the Sargasso Sea
agtcaaaaaatttgaaaaaaaaataattgaaagccccaatgaaatagaaaaaattaattctgaatttgacagagaaagttatcaaataattcaatctttagacgaattaaaacaatggaaactgaaagctgaaaacattgggtatttagcatttgataccgaaacaaattcactagatgcagtagaggctgacatggtaggcttttctttatgtacatctgaaaatgatgcttgttatgtcccattactacatgaagaaaatgataaacaaatcgattttaatcaagcaatagatattttgaaatccatcctagaagataatggaattaaaaagatccttcacaatatgaaattcgatgcactagtagtagataaatataatattaatatcaaaaattatgatgatactatgttgatgtcttactctattgggtcaggtggaataaggcataagcttgatacattaataaaatattactttgaccatgatgctatatcatttaaagatcttattggtagcggtaaagataaaaaaacttttcaagaacttccaattaaagaagcgggaaaatacgcggccgaagatgcagatatgactctaagactatggaaaatatttaaatcttctgtaacccaagacaaacaggttaaaatatatgaaattattgaaaaaccccttgctcaagtcataatgaatatggaaaagcacggtatatcaatagatgtaaacaaattaaatgaattatcagttaattttgaagaaaaattaaaaaaccttgaaaaatcttgctacaaattaattggtgaggagattaatcttggctctccaaagcaggtaggggaaatattatttgataaacttgaattgccagggggtaaaaaaacatcgactggtttatggtcaacaaatgccgagatattagaaaacttagctaatgaaggatatgattttccaaaagctttacttgaatggagagctttatcaaaactcaagacaacctatactgacacattacctacttatttaaatataaaaacaaatagaattcactcttcttttgctatggctacaacttcaacaggaagattagcttcctctgatccaaatcttcaaaatattcctatccgaagtgataatggtagaatgataagaaaagcctttattcctgaaaaaggaaatgtattaataagctctgactacagtcaaatcgaacttagattaattgctcatattgctgacgagagaaatttgattaatgcctttcttgatgaaattgatatccattcatctacggcttctgaagtttttaatattccattgaatgatatgacacctgatattagaagaaatgcaaaagctatcaactttggtataatttatggtatttcagcctttgggctggcaaagcagctcaatattag

SEQ ID NO: 256650 - DNA, 1711 bp, Unknown
  Bacterial polypeptide expressing nucleotide sequence isolated from the Sargasso Sea
agtattgactacatgtctgctcagttagtcggcgtttccttcgcagtctgtgtgggagaggctgcttatttacccttggcccatgattatgtaggcgtgcccgaacaagttgatttcgataaggcaattaaagcgcttagacccgttttggagaacgagtcaatagccaaggtgggacaaaatttaaaatatgatctaagcatcttggcatcctatggattgacgttaaaaggagagttgtatgacacgatgatggagtcatatgtccttaatagcgtagcaactagacataatatggacgccttagctaggcactatctcgacattgcgaccacgagttttgaagacgtggcagggaaaggagctagccaactaactttcaaccaggtgccattggatgtggcaagagactatgctgccgaggatgcggatgtgacttatcgtttgcaccaggcgctttggcctctaatcgagagagagcctaagctgctgcacatttttcgtgatgtggaaatgccgttagtgcgagtgttgtcgaaaatcgagagacaaggcgcattgctggatccgggcttattgaataagcagagtagcgagttaggcagacgaatagaagaattgaaggatgcagcatggtcctcagcggaagaagaattcaacctcgatagtccaaagcaattgcaggagatttttttcgagaaacagggactacctgtattgaaaaaaacacccggcggcaagccctcgacagcggagccagtcctggttgatctggcgagagattatgagcttccggcacttatcctcgagtaccgtggactagcaaaactcaaatccacgtacactgataaactgcccaaagatatcaacgcggactctgggcgcgttcatacctcctatcaccaggctgtcacggcgaccggtaggctgtcttcaagtgatccaaacctgcagaatatacctataaaaactgcgcaaggcagaaaagttcgggctgccttcgtggctcctgaaggcaagaaaattctagctgcagactactcgcaaattgagttgcgaattatgggccacctttctggagatgatggactgttgcaagctttttctgaagggttggacgtccacagctttactgcatccgaggtttttaatgttgagattcaaagcgtgacggcagatcagcgaaggagtgctaaagcgattaactttggattgatatacggaatgtctgcttttgggttagccaaacagctcgatatttcgagggcgttagctcaggattatatcgattcatatttttctaggtatccgaaggtcctcgactatatggagcaaactaaggagcaagcctctaaactaggatatgtggaaactgtatttggaagacgactttatcttccagaaataaacgcaaaacaggtcatgcgcagacaagcagcggaaagaacagcgatcaacgcaccgatgcagggaactgcggctgatattatcaagaaggcaatgcttgaagtggatggctggctggggcgtaccaacgttgattgtcggatgataatgcaggtgcatgatgagttagttttcgaggttgctgaatcagatatcgatgaggttgagagtgaagttgaaaatcttatgtcgcagtcagcctcattagacgtcccgcttaccgtatccgtgggtcggggtgataattgggaggaagcgcactaga

SEQ ID NO: 256651 - DNA, 739 bp, Unknown
  Bacterial polypeptide expressing nucleotide sequence isolated from the Sargasso Sea
tttcagacggaaatcgaattcacccttaagcaaggcgtgctgaagtcgttgattgatgcgacccagttttcgatggcgaaccaagacgttcgttactatctgaatggtttattgctcgaaaccgaaggtaatgtgctgcgcgccattgctaccgacggtcatcgcttagccttaagtcacagaaccatagatgcacaattacctgaaaaacaagtcatcgtgccccgtaaaggcgtgatggaaatggcgcgtttgttggaagccgatgatttagatatcgcgattgccattggcgataacgcgattcgcgcgaccaccagcaccacagtctttaccagcaaattagtcgatggtcgcttccccgattatcgccgcgtgttacctaagggcggagataaaatcgttatcgccagccgtaaccacttcaaacaagctttaacgcgcgcttctattttatcgaatgagaagtttcgtggtgtacgcattcagttagaggcggggttactgaaaatcaccgctaataacccagagcaggaagaagcggaagaaatcatcgatgtggattacaacaatcagccactcgaaattggtttcaacgtcagttacttattggacgtgctcaacaaccttaagtccgatgatgtgcgtatcaccttaatcgatggtaactcaagtgccttgctggaaaaccacttggaagaagattccatgtatgtggttatgccaatgcgcttatagt

SEQ ID NO: 256652 - DNA, 739 bp, Unknown
  Bacterial polypeptide expressing nucleotide sequence isolated from the Sargasso Sea
aatgataagaaaagcctttattcctgaaaaagggaatgtattaataagctctgactacagtcaaatcgaacttagattaattgctcatattgctgacgagagaaatttgattaatgcctttcttgatgaaattgatatccattcatctacggcttctgaagtttttaatattccattgaatgatatgacacctgatattagaagaaatgcaaaagctatcaactttggtataatttatggtatttcagcctttgggctggcaaagcagctcaatattagccgtactgaagcatctgaattcattaaagcttattttaagaaatacccttcaataagagactatatggatgaaacaaagaagtacgcaaatgaaaatggttatgtcaaaactctcttaggaagaaaatgccttgttgaggaaattaacagcaagaatgcggccacaagatcatttatggaaagagctgcaattaatgcgcctattcaaggatccgctgctgatataatcaagagagcaatgattattttaggtaatcataaaaatttggcaaaattagaaacaaaaatgcttttgcaggtacatgatgaattaatcttcgaaactaaaaaagaaaattgtgaagaatctatgagaattattaagaaggaaatggaaagcgctaacttaccaatccttaatttaaatgtaccattaatagcagatactaattttggcaataattgggatgaagcacactaa

SEQ ID NO: 256653 - DNA, 2734 bp, Unknown
  Bacterial polypeptide expressing nucleotide sequence isolated from the Sargasso Sea
catggcccctagcaatccccttattctggtcgacggctcttcatatctttaccgcgccttctttgcctcccagcaggccgatctgcgcacctcgaccggtttgccgagcggcgccgtccgtgtcatggccaacatgatgcgcagcctgcgcaagcagtaccccgactgccacgtggccgtggtgttcgatgccaagggcaagaccttccgcgacgacatctatcccgaatacaaggccaaccgggccagcatgccggacgatctgcgcagccaggttgcccccatccaccagatgatcaaggcgatgggtttccccttcctgatggtggaaggcgttgaagccgacgatgtgatcggcactctggcccgccaggcgaccgagaagcagctgccggtgctgatcagtaccggtgacaaggacatggcgcagctggtttccgaccatgtcaccctgatcgacaccatgaaggacgtgaagaccgatcgggaaggggtgatcgagaagttcggcgtaccgcccgagctcatcatcgactacctggccctgatgggggacaaggtggacaacatccccggcatgaccggcgtcggcgagaagaccgcgctggccctgctgcaggggatcggcagcatcgacgagatcgccgccaacctcgacaaggtggctgcgctcggtttccgcggctccaaggcgttcgccgacaagttccgcgagcaggaagagcaggtgcgcctctcctacgtgctggccaccatcaagaccgacgtggcgcttgaacagagcctggaagagctgcagcttggccccatcgacaaagaggctctgctggcggtctatcgtgagtacgagctgcgcaacctgatcaaagagctggaatccggcgacgctgatgagagcgaagccgaaggtgatgatgaaggtgccgccccggtagccgccatcgagaccgactatcgctgcattttggatgaggccgaattcgacgagtggctggcccgtctgcaggcggcgccgctgtttgccttcgataccgagaccaccagtctcgactatatggaagcacgcgtcgttggcgtctcctttgccatcgagccgggcaaggcggcctacgtgcccttcggtcacgactatctgggggcgccggtgcagctgaccgaagccgtggtgctcggcaagctcaaaccgctgctggaagatccggcccgcctcaaggtgggacagaacctcaagtacgatcgcaacgtgctgctcaatcacggtatcgagctgcagggcatcgcctatgacaccatgctcgaatcctatgtgctcaactccaccgccagccgccacgacatggattccctggcccgcagatatctgaatgccgagaccatctcgttcgaagagatcgccggcaagggggtcaagcagcttaccttcaaccagatcgagctggagcaggcggctccttacgcggcggaagatgccgacatcaccctgcgtctgcatcaggcgctgtggggcaagctctctgtagagccgggcctcgccaaggtgttcagcgagatcgagttgccactgctgccggttctggcgcggatggagcgactcggtaccaccatcgagcccaagctgctgcaccagcagagtcaggagatcgaagtgcgtctggcggagctggagaaacaggctcacgagctggccgggcaggagttcaacctctcctcacccaagcagctgggggagatcctcttcaccaagctggggctgccgatcatcaaaaagactcccaagggagcgccatccactgcggaagaggtactggccgagctggcggagacctatgagctgccgcaactgctgatggagcaccgtgggctggccaagctcaagtccacctacaccgacaagctgccgctgatgatcaagccgcagaccgggcgggtgcacacctcctatcatcaggcggtggcggcgactggccggctctcctccaccgatcccaacctgcagaacatcccggtacgcaacgaacaggggcgtcgcatccggcaggccttcatcccgtgcgccggttacaagctggtggcggcggactactcccagatcgagctgcgcatcatggcgcacctctccggtgacaaggggttgctgaccgccttcgccgagggcaaggacatccacaaggcgaccgccgccgaggtgttcggggtcgcgctcgaggcggtgaccagcgacatgcgccgcagcgccaaggcgatcaacttcggcctcatctatggcatgagtgccttcggtctggccaagcagctggggatcggccgcgccgaagcgcagaagtacatggatctctacttcgagcgctacccgggtgtgttggagtacatggagcgtacccgccagcaggcggatgcccagggttacgtcgaaaccctgtttggccgccgcctctatctgccggatatcaagtcacgcaacgccggtctgcgcaaggcggccgaacgggccgccatcaacgcccccatgcagggtacggccgccgacatcatcaagcgcgccatgatcaacgtggatggctggatccgcggaattgaagaccagtcgatccgcatgctgatgcaggtacatgatgaactggtgttcgagatccgcgaagagaagctggaggagtacatcgccatcatcaaggagaagatgtccgccgcagccgagctgcatgtgccgctggtggtggaagccgggtactggtga

SEQ ID NO: 256654 - DNA, 982 bp, Unknown
  Bacterial polypeptide expressing nucleotide sequence isolated from the Sargasso Sea
aatgtctgaagaatcaaataacaaaatagaacgtaaaatcatccatgttgatatggatgcattttttgcttctgttgagcaatttgataatccagaatggaaaggattagcaattgctgtcggagggggaggcgatagaggtgtagtttctgcagcaagttatgaagccagaaagtttggtgttcgaagcgcaatgagtggaattgttgcaaaaaaactttgtccccaacttatttttgttaagccacgatttgatcgttataaagaaatttcagatcaaattcgtgctatttttattgaatacacacatttggtcgaaccagtttctttagatgaggcatatttagatgtttctgattacccatctgcttcactattagcaaaagagatacgtaataaaattaaagcaaaaacaggtttgactgcttcagcaggcatatcaattaataaatttttggcaaaagtagctagtaacttgaataagcctaacggccaaaaaacccttccaccgaatgaagttttggattttttagatagcttagatgtaaaaaagtttcatggtgtcgggaagaaaaccaaattgaaaatgtatcaacatggaatctacttaggaagtgatctaaaggcaaagtcaaaagactttctgacaacacattttgggaaatctggttcatattattataatgtggttcgaggaatccacaacagtgaagtaaaaacacggcggattccaaaatcccttggcgcggaacgtacgtttaaaaaaaatttaagtagtgaattatatttggaaaataaattaaagaatatctctggcataatagaaaagagactttttaaaaataaactagctggcaaaacaattaccttaaagatcaaatacagtgattttaaacaacaaacaagaagtaaaacaggcactttatatttatcatctaaagagttaatttttgaatatgcaaaggagttactttataatgaa

SEQ ID NO: 256655 - DNA, 1168 bp, Unknown
  Bacterial polypeptide expressing nucleotide sequence isolated from the Sargasso Sea
caacagggcgtgctaattgatagtcaacagttgagtcaacaaagccaagacctggcaactcgcattgcagaattagaaaaagaagttcacgaagaagcaggcgaaacatttaacttaggatcgacaaaacagctgcagcatattctttttgagaagatgtcgttgcctattgttaagaaaacgccgaaaggtgcgccttcaacttctgaggatgtgttacaagaactggcattagaatatccactacctcagaaaattatggagtacagagggttaaccaagctcaaaaatacgtataccgataaacttccgaaaatgattaaccaccgtactggcagagttcacacgtcgtatcatcaagcagtgacagcaacaggtcgcctatcctctaccgatcctaatttacaaaatattcctattcgaaatgaagccggtcgccgcgtcagacaagctttcgtgccaagaaaaggtaacaagatagtcgcagccgattattcacaaatagagcttcgtattatggcgcacctctcgaaagacaaaggcttacttgatgcgtttgcgaatggaaaggatatacataaagcaaccgctgccgaagtattcggcattgcccttgatgacgttactaccgaacagcgtagaagcgctaaagccattaactttggtttgatttatggtatgagcgcattcgggttagccaaacagcttaatattccacgcaacgaagcacagaaatacatggatctgtattttgagcgctaccctggtgtactcgattatatggacagcacccgagagagcgcaaaagaaaaaggttacgttgaaactgtgtttggccgacgtttgtatctaccagatattaaagcaagcaatggagcgcgaagaaaaggggctgagagagcggctatcaatgcaccaatgcaaggtacagctgctgacgtcataaagatggccatgataaaagtggacgattggattgcgaaaaacgccagtgacgacgttacaatgatgatgcaggtgcacgatgaactggtatttgaaataaaagaagacaaaattgatgattatgtcagcaccataaaaactcttatggaaagtgctgcaacgctaaatgtgccgctggatgttgaggtaggtattggcgaaaaactggatgaagctcattaat

SEQ ID NO: 256656 - DNA, 2686 bp, Unknown
  Bacterial polypeptide expressing nucleotide sequence isolated from the Sargasso Sea
atgagtaaagagaaactattactggtcgatggttcctcctatttgtatagagcattccatgcattacccgatttaaggtcctcagatggaaggcctacgggagcaatctatggtgttttgaacatgcttcagaaactcatcaagtctgagagacctgattacctttcggtagtttttgacacaccgatcaaaacctttagacatgacatttttcctgaatacaaagctaacagacaaaaaactcccgaggatttaattgcacagattgaacctctgcatcaggccattattaatcttggattgccacttattgcagttgatggagttgaggccgatgatgtgatcggaacccttgccatggaggctgagaaaaaaaacatcaaaacaatgatcgcaactggcgacaaggatatggcgcagttggtcacagataatatccatctcattgacacaatgaaggacataagaatgggcccaagagaggttttagagaaatttgggattttgccagagcgatttattgattacttaactttggccggcgacacatctgataatattccaggtgtagaaaaggtcggacctaagacagccatcaagtggatcaatgagtacggatctttagaaggcgtgattcaaaacgctgatcaaatcaaaggcaagataggagataatctcaatgcagccttggatcacttggatctattcaagactttggtcaccataaaatgcgatgttcaaacggattctaatgtatctgatttaatcataggggagtcgaatgaggagcttttatttgagcaactcagtgatttaggcttacatggactgatcaagcaatttgatatccaatcacctgaaaagaaaccagatgtcgaaagcaattatcacacaataagaacaaagaatgagctggatgagctgatagaggctatgaaaaaggcttcttatatttcatttgatacagaaacaacaagcttagattatatgaatgcggaactggtcggtgtctcaattgcattgaagccaaatgaagctttttacattccaataaaccacaactacgaaggagtagaaaagcagttggaagagcattttgtgttagaagcattaaagccttttctagagtcggatgaaattccaaagattgggcacaacctgaaatacgacagacacatcctgcagaatctaggcattgatttgaaaggtaagcttctggacacaatgctcttttcttatgtgaataacagcaccatcacacgacacaatttagatgctgtttcgaagagatatttgaatattaatccaacttcttacgaagatgttgctggcaagggcgctaagcaaataccattctcagaagtatcaattgaagtagcatccgagtatgcatctgaagacgctgacatttctctaaagctttatgagcatattgagcccttggtgcaaaaagaaacaaagcttgcaaagctttattctgagattgagggtccactgatatacacattaggcgacattgagagaaacggtgttttgattgattcagaaaaattgaacgaacaaagcaaagagcttgaggctaagattcttaagcttgaaaagaaggttcaaaaaagtgcaggcgaggattttaatttgggctcaccaaaacaactgcaagaaatcctttacgagaagctcggtttaccagtaattaaaaaaactccaaaaggtcaaccttcaaccgctgagtctgtgcttcaggagctttcactggattttccaattgttcaggaaattctaagttatcgtgcgatatcaaaactgaaatccacttataccgataaattacctaaaatggtcaattcaaatacaggcagagtgcatacttcatatcaccaagctgtcactgcaactggaaggttgtcgtcttccgatcccaaccttcaaaacatacctatcagatccgaagaaggccgaagaataagagaagcattcattgcaccggaaggatataagattttggctgcagactattcgcagattgagcttaggatcatggcacatctctcaaaagataaaggcttgatggatgcttttgcaaaaggtcaagacatccatcaggctacagcggcggaaatatttgacgcaaatatagaagacgtgacagccaatcagagacgttcagcaaaggcgataaactttggtttaatctatgggatgtctgcattcggtctttcgaagcaattgcagatcacaagggcagaagcgcaaaattacattgaacaatattttgatcggtatccacaggttaaaaattacatggacgagacaaaactgagcgctaagaaaatgggttatgtagaaactgtatttggccggagactctatttggctgatattgagtcatccaattatcaaaggagacaatatgctgagaggagcgcaatcaatgcgcccatgcaggggagcgcagcagatttgataaaaatagcaatgattcatttacatcaaaaaatcaaggaggagtcgtttgatgcaaaaatcatcatgcaggttcatgatgagcttgtgatcgaggttaaagagaatcaatccgatgaattatctgagcttacgacaagcataatgtcagagatttccaagcttgatgttgacttaaaggtcgatgcagatattggaaataattgggacgaagcccactgat

SEQ ID NO: 256657 - DNA, 1006 bp, Unknown
  Bacterial polypeptide expressing nucleotide sequence isolated from the Sargasso Sea
tgggaatcactccaaagagcttggcgacaagattgctgacttatctgcacaagctttcaaaatagctggagaggaatttaatcttgattccccaaaacaactcttagaaattttatatgaaaagcagggattaccagtattgagaaaaacacctaaaggacaaccatccaccaatgaagagacacttcaaaggctatcagaggaatatgaactgccaaagataattctacaatatagaacattggcaaaacttaaatctacttatacagatagcttaataaatattgagaatcctaaaacacaaaggattcatacctcatatcaacaagccgtaacgtcaacaggaagactttcgtctacagaacctaacttacaaaatattcctattaaaaccgctgaaggaaggagaataagagaagctttcgtcccagaaaaaggtaacacactaatttctgctgattattctcaaatagaactaaggataatggctcatttatcagaagataaaaacctcacaaatgcttttaataataatattgatgttcattcttcaaccgctgcagaggtttttggcgtagcaattgaggaggtaaataaagatcaaagaaggagtgccaaagctataaactttggtttaatgtatggcatgtccgcttttggactcacaagacagctgggaattaccagagctgaagcgcaagcatatttagatacttattttgcaagatataccggggtaagagattacatggataatattaaagccaaagcgaaggaagatatgtttgttgagaccattatgggaagacgtctttatcttaatgaaataaatgccgcaaatggattaagaagacaggctgcagagagagcagctattaatgctccactacagggatctgcagcagacataattaaaaaggcaatgctcgatatcgataaacttattttaaatgaaatgcccgatgtaaaaatgataatgcaggttcatgacgaactagtgtttgaa

SEQ ID NO: 256658 - DNA, 1057 bp, Unknown
  Bacterial polypeptide expressing nucleotide sequence isolated from the Sargasso Sea
gatgcgcaaaatcatacatgtcgatatggactgctttttcgcggcggtggaaatgcgcgacaaccccgccttgcgtgatattcccattgctattggcggcagtcgtgaacgtcggggagtcatcagcacggccaattacccggcgcgcaaatttggtgtgcgtagcgcaatgccgaccggaatggcgttaaaactgtgcccgcatctcacgttattacctggtcgttacgaggcctataaagaagcctcccgccagattcaggctattttctcccgctatacctcgctgatagaaccgctttcgctggatgaagcctatctggatgtgactgacagcactcactgccatggctcagctacgctgatggctcaggagatccgccagacaatttttgccgagctacagttaaccgcctctgccggaattgcgccggtcaaatttctggcaaaaatagcctccgatctcaacaaacccaatgggcaatatgtgattacccctgccgatgttcctgaatttctcagaacattaccgttaggcaaaattcccggcgttggcaaagtctctgctgctaagttggaagcgatggggttgcgaacctgcgaggatgttcaaaaatacgatctggccatgttgctcaaacgttttggtaagtttggtcgcgtgttgtgggaacgcagccagggcattgatgagcgcgacgtcaacaatgacagactgcgcaaatcagtcggcgtcgagcgtactttggcagaagatattcatgagtgggctgaatgtgaggagattattgagcggctatatcccgaactggaacgacgtctggccaaggtaaaaccggatctgttgatcgcccggcagggagtaaaactcaagtttaatgattttcagcaaaccacgcaggagcacgtctggccgcgcttaagtaaagatgacttaattgcgacggcgcgcaaaacctggaatgaacgtcggggagggcggggcgtaaggctggtgggattacacgtcacgctgttggatccacagctggaaaggcaactactgttggggctgtga

SEQ ID NO: 256659 - DNA, 1624 bp, Unknown
  Bacterial polypeptide expressing nucleotide sequence isolated from the Sargasso Sea
tacgatgattgtcccaaacaattggaaatggattatgtgataaaaagccttggctccgcgatagaagataatcaagaaaaagcaataggacaaaatcttaaatttgatattcccatacttgcaagacatggaattaagattacaaaatttctagcagatacaatgcttatgtcatatgtattaaatagcaccgctactagacatggaatggataggctggcagatttttatttaaattacaaaacaacaaaatatactgatgttactggaacagcctcaaagcaaataagttttgctgaagttaagctagatgtagctactgattatgctgctgaagatgctgatattactctaagactttataaggttcttaataagttgttaaaagaaaaaccaacacaacaaaagttgttaaatgatcttgaatatcctcttgtacacgttctttcaagagtcgaacaaaacggagcaaaaattgataagaaaaagctctccaatcattcaaaagaattaagtgaaaaaatttctgatttaacatcacaagcatttaaaatttctggagaagaatttaatttagattcaccaaaacagctactcgagattttatatgaaaaacaaggactacccgttttaaaaaaaacgccgaagggtcagccctcaacaaatgaagatacacttcaaagattatctgaggactacgaacttcctaagattattttgcaatacagaacattggcaaaattaaaatctacttatactgatagtttaattaacatagaaaatccaaaaacaaaaagaattcatacgtcttatcaacaagcagtaacatcaacaggaagactttcgtcaacagaaccaaatttacaaaacattccaatcaaaacagctgaaggaaggagaattagagaagctttcgttcctgaaaatggaaatgttttaatttctgctgactattctcaaattgaattaagaataatggcacacttatctgaagacaaaaatctaacgcattcttttaataataatatagatgttcattcatcaactgctgcagaagtatttggcgtaccaattgatgatgttagtacagatcaaagaagaagtgctaaagctattaattttggattgatgtatggcatgtcagcttttggtctcacgaggcaattaggaataccaagaggcgaagctcaagaatatcttgatacttattttgccagatatacaggggttagggactacatggacaatataaaagctcaagcaaaagaagataaatatgttgaaactatcatgggtcgtcgcctttatctaaacgaaataaatgcagctaatggtcttaggagacaagctgcagagagagcagctattaatgcaccacttcaaggatcagcggctgacatcatcaaaaaagcaatgttagatatagatgaacttttattaaatgaattgcaagatgtacaaatgataatgcaggttcacgatgaattagtttttgagtgtccaaaaaacaaagcagatgcagttatgaaaaagatgaaagacactatggaagatacagtagaactgaaaattcctttaatagctgatgcagcaattggtttgaattggaatgaagctcattaaa

SEQ ID NO: 256660 - DNA, 1084 bp, Unknown
  Bacterial polypeptide expressing nucleotide sequence isolated from the Sargasso Sea
atgtcgattcgcaataaaaaaagtttttcaaaaaataaaagaaaaatcatccatgttgatatggattcgttctatgcatctgtagaaataagagataaacctcaccttagagaactaccagttgctgttgcaggcagcagtgaatctagaggagtaataacaacctgtaattatgttgcgagaaaatttggtattaaatcggcaatggcttcagtagtagccaagaaactatgcccaaatctagtatttttaccagtaaacatggaaaaatataggtctgtatccaaagagatacatgatatttttaaatgctatacacgaatcattgagcctatttcacttgatgaagcatatttagatgtctctgactcagattattgtaacaatgatcctgtgatgatggcacttcagattcgcagaaaaatttttgatgatctaaaaatcactgcgtcggctggtattgcaacaaataaatttttagctaagttagcaagcgaatggaataagcctaatgggcaattagttatttatgatgatgatattcaagattttatatgtaaattaccagtaagaaaaataaatggtgttggagaaaagactgaaaaaaaattattagatattggggtaaaatatttttcagatttacagaaaataaaaatgaatgagctgataaaagtttttggaaaatatggagaaaatttatacgagttatgtagagggagagataatcgtcaagtagaaaataatagaataagtaaaagtcttagtgtggaagatacatattttgatgatattaactcagttaaagaatcagttactgaacttaaaaagatttatgaaaaattattatttagattaaataataaaaaaaaagatactttttcaataaaatcctgttttgtcaaaattaaattcaatgattttaaaacaatttctaatcaaaaatcgagtatgacatacgaatacgatatatttgaaaatcttctcataaaaatgcttagtgaaaataaaaaacctattagactaataggtgctggagttcagttttctaataattcccaactcagactaaatatcttttaaa

SEQ ID NO: 256661 - DNA, 2248 bp, Unknown
  Bacterial polypeptide expressing nucleotide sequence isolated from the Sargasso Sea
catgaaaaatagaatttttgtaatagatggctcttcgtatttatatcgagcctatcacgccatgccaccactcagcacttcttctggacagccaactggtgctgtgaaaggagttacaaacatgcttatgaatctaaagaaggagagtgatgaatctcctattgttgttgtttttgatgccaagggaaaaacttttagaaacgaaatttattcagagtataaagctaatcgtcctccaatgcctgatgagcttagggatcaattgaaaccagtaaaagatatttgtaaggctataggctttcccttaattgaaatagaaggggttgaagctgatgatgtaatagcaactataaccaggatggcaaaagatgcaaaatttaagtgtgttgtgtcctctttagataaagacttaatgcaactagttgaagaccctgatactactttaatgaacactatgaagaatgaaatctttgatgaggcaaaagtttttgaaaagtttggagtacagccaaaccaaattcgggatatgttggctctagtaggagatacatctgacaacataccaggcgtacctaaagtaggtcaaaaaactgcagctaaatggttaattgagtatggtgatttagaagcaatcaaagaaaatgcggatgcaataaaaggggttgttggagaaaatttaagaaatagccttaatgatcttgataggaatgtcgagttagtttctttgaaagaagatgtagatttaggatttagctttgatgacttgcttaaatttaatcctaatgatgaggaacttgataaactttttgcagaacttgaattttcagccgcaaacaaaaacaaacaagaagctccaaaaaaagatgcaaagtatgaaactgttttatctgagattgatctaaaaaaatggatttcaaaaattaataagtccacagcttttgctattgatacagaaacagattccgtacacatagtatccgccaatcttattggaatatctctttctgtagctgaaagcgagggttgttatattccaataggccatagctatgacgattgtcctaaacagctaagtatggattatgtaataaaaacactaggccctgcgattgaagaaaatcaagaaaaggctatagggcagaatctgaaatttgatatacctattttggctagacacgggattgttataacaaaatttttagcagacacaatgttgatgtcttatgttttaaacagtactgcaactcggcacggaatggatagacttgctgatttttatttaaattacaccactacaaaatataccgatgtaacaggaacagcatcaaaacaaatacccttttctgaagttaaacttgatattgcaacagattacgctgctgaagatgcagacattaccttaaggctctttaatgtgttgcaaccaatgcttaaggagaaacctattcaagaaaaacttctacatgatcttgaatatccattagtccatgttctttcaagagttgaacagaacggcgcaaaaattgataaagaaaaattagccagccattcaaaagagttaagcgaaaaaatttctaagctgtcttctgaggcattcaaaatttcaggagaagaatttaatcttgattctccaaaacaacttcttgaaattctgtacgaaaaattaggactacctgttctaaagaaaacaccaaaaggacaaccatcaactaatgaagatactctacaaagacttgcagaagaatacgagatgccaaagattattttgcaatatagaactttagcaaaactaaaatccacctatactgatagtcttattaatatagagaaccctaaaaccgaaagaattcatacctcatatcaacaagcagttacttctacaggcaggctttcatcaacagagccaaacttacaaaatattcccataaaaactgcagaaggaagaaggattagagaggcttttgttccagaaaaaggtaatgttttaatttctgcagattattcacagatagaacttcgtattatggctcacttatccgaggacaataatttaacacatgcttttaagaatgatattgatgttcattcgtctaccgctgctgaagtttttggagtatcaatcgaggatgtaactcaagatcaaaggagaagtgctaaagctataaattttggattaatgtacggaatgtctgcttttggacttacgagacaacttggtataccaaggggtgaggcgcaagaatatctt

SEQ ID NO: 256662 - DNA, 2686 bp, Unknown
  Bacterial polypeptide expressing nucleotide sequence isolated from the Sargasso Sea
gatgagtaaagaaaaattattactggtagatggttcctcctatttgtatagagcattccatgcgctccctgatctgagatcatcagatgggagaccaactggagcgatctatggtgttctgaatatgctccaaaagctgataaaatctgaaaggccagactatctttcagtcgtttttgacacaccggccaaaacttttagacatgatatttttcctgattacaaagcaaatagacaaaaaacccctgaagacttaatcgctcagattgagccactgcatcaactcatcatcaatcttggattaccgctcattgcagttgatggagttgaggccgatgatgtgattggaacccttgcactagaagccgataagaaaggcatcaaaacattgatcgcaactggggataaggatatggcgcaattggtcacagaaaatattcatctcattgatacgatgaaggacctcagaatgggtcctgcagaggtcaaggaaaagtttggtattcagcccgatcgatttattgattatctgacactggcaggcgacacatctgacaacattcctggcgtagagaaggtgggtcccaagacagcgatcaagtggattaatgagtatggatctttagacggtgtgattcaaaacgctgatcaaatcaaaggcaagattggcgagaatctcaatgcagctttagatcggctcgatttattcaagaccttggtcaccataaaatgtgatgtccaaatggattcaaacatctcagatttaaccataggtgaatcaaatgaaggacttttatatgagcaactcagtgatttgggtttgcatggactgatcaagcaatttgaaatcgagccatcagaaaaagaatcagctgctgataaaaactatcaaacgataagaacagagaaagagttggatgaattgatgggtttgatcaatcaggctgactatgtttcatttgatacagaaacaacaagcttagattatatgcttgcagaattggtgggcatttcaattgcattgaaaccaaacgaggctttttatataccaatcaatcacaactatgaaggtgcagaaaaacagctggagcaggattttgtattggaagctttaaaacccttcttggaatcagatgaaattccaaagattggacataatctgaaatatgaccgacacattcttcaaaatgcaggcattgatttgaaaggaacacttttggatacaatgcttttttcttatgtgaataacagcaccatcacacgacataatttagatgctgtttcaaagagatacttgaatataaaccccacttcttatgaagatgttgctggtaaaggggcaaaacaaattcctttctcagaggtatccatagacgtggcatctgattatgcgtctgaagacgcagacatttctctgaagctctatgagcatattgaaccgatggttcagaaggaagcaaaattggcaaaactgtattctgagattgagggcccactgatctatacactgggcgatattgaaagaaacggtgttttgattgattcagaaaaactgagtcaacaaagcaaagagcttgaggccaagattttgaaactggaaagcaaggttcaaaaaaatgcaggtcaggactttaatctcggctcaccgaagcaacttcaagaaattctctatgaaaagcttggcttacctgtgattaaaaaaacaccaaaaggccaaccctcaacttcagaagctgtgcttcaggaactttcaatcgatttcccaatcgttcacgatattctcagttatcgtgcgatttcaaagctgaaatccacctatactgacaaattgcctaaaatgatcaattccaatacaggcagagtgcatacttcataccatcaagctgtgactgctactgggagattgtcatcctcagatcccaatctacaaaatatccctatcagatcggaagagggtcgaagaataagggaagcattcattgcgcctgagggatataagattttggctgcagattattcacaaatcgaactcaggatcatggctcatctctcgaaagatcaaggcttaatggatgcttttgcaaaaggccaagacatccatcaggcaacagctgcagagatattttccataaatattgatgatgtgacacctaatcaaagacgctcagcaaaagcaataaactttggtctaatctatgggatgtctgcatttggactatcgaagcaattgcagatcacaagagcagaagcacaaaactacatagagcagtattttgagagatatccgggcgttaaaaactatatggatgagacaaaatccagtgcaaagcaaaatggctatgtagagaccgtatttggccgaagactttatttggcagatattgaatcatccaattatcagagaagacaatatgctgagcggagtgcaatcaatgcaccaatgcaaggcacagcagctgatttgataaaaatggcgatgactgacttacatagtaaaatcagaaatgaatcccttgatgcaaaaatcatcatgcaggtacatgatgagcttgtcatcgaagtgaatgagaatcaattagacgaattgtctgatcttacagtaaatattatggcagacatctttaagcttgatgtcgatttaaaggttgatgctgatattggaaataattgggatgaggcccactga

SEQ ID NO: 256663 - DNA, 1255 bp, Unknown
  Bacterial polypeptide expressing nucleotide sequence isolated from the Sargasso Sea
tatgccgtcgttatgtagaaaatgttttaatactttcaatgaagaggggcgctgtccaaggtgcagttcacctttggtggtatcacatagtgaattgtttgacctcaatatcgcccacatggattgtgacgcattctatgcaagtgttgaaaagcgagataatccagatttagcagataagcctgtaattattggaggtgggcgacggggtgttgtttctactgcttgctacattgccagaatacgtggtgtaaaatcagcgatgcctatgtttaaggctttggaaaaatgtccagatgcagtagttatccggcctcggatgaaaatatatgctgaaataagtcaacagattagggtaatgatgaatgatattacacccttggtcgaacccttgtctcttgatgaagcttttatggatatgtctggcactcataaattgcatggagccccaccagcagtaatgctcgcaaagttaatggataggatcagtgataacttaggtttgacagggtcaattggactttcacacaataaatttttggcaaagatcgcttcagatcttaataaaccaaatgggtattcaataattggtgaggcagaaaccagttcttttttaaaagacaaatctattcgtttgatatggggcgttggagcttcaacgcaaaagtcactagaaaaatctggtataaggactttccttgatttgctcaggtgggacagaaaagatctagtcagtaaatttggatctatgggcgatcgtttatggtttttagcaagaggtcaagatgcccgggttgtgtcgaatagcgaccgaattaagtctatttctaatgaaacaaccttaaatgaaaacacaagtaatatacgcgtattagaagggcatttatggaggctttgtgaaaaggtttcatcgagggcgaagtcgaagggcctggctggaactatcatgattttaaaattaaaatcatcaaatcataaaataataacaagaagggtgaccttacgagatccaacatatatggcggatgtcctttttcgttcaacttatcctttgatggaaacagcgatagaaaatgggccatttagacttgtcggtgcgggtttgtcgggcctttgtttagcaagccaagcacagcgtgagccagaactcttggacgatggagctctcaaccgaattaaagttgagcgtgttactgatgagattagagaaaaatttggagatgaggcaatgataaaaggcagatcgctcctttaa

SEQ ID NO: 256664 - DNA, 2800 bp, Unknown
  Bacterial polypeptide expressing nucleotide sequence isolated from the Sargasso Sea
tatgaaaaaccaaaaacaacacatatgcttagttgatggatctacttacatttttagagcatatcatgcgcttcctccattaactagaaagtctgatggattcccggttggagcaatatctggtttttgtaatatgcttgataaattagtaagagaagaaaaagaaaaaaaaggtattacacatctccttgtcgtatttgatgcttcgggaaaaacatttagaaatgatatctatccagaatacaaagctaatcgttcagaagctccagaggatttaataccacaatttccagtaattagaaaagcaacctctgctttcaatataccttttgttgagctaattggttatgaagcagatgatttgatagctagttatgcagaagaggcaaaaaaacaaaatatgaaagttacaattgtatcatctgataaagatttaatgcagttagtctctgataatgtctctatgttagacactatgaaaggaaaagtgttcaagaaagaagatgttttagaaaaatttggagtttacccagaaaaagtaattgatgttcaatctctagcaggagactcagtagataacattcctggtattccaggaataggaattaaaacagctgctttattgattaatgagtatgataacttggagggtttgtttaaaaattctgagaagattaagcaaaaaaaaagacgtgaaaatgtaattgaatttgaaaatcaagcttatatcagtaagcaattagttactctcaaaaatgatgttccactaccattacctatagatgaaacttccttaaaagacatagatgctgaaaaactaattagcttcctaaaagagatggaatttaaaacatttactgaaaagaaatctagagaattaaatgtagactctgagaaaataaaagcctcagatcaaattgaaaaatttgaaagaaaaataactgatagctccaataatataaaagaaattaactctgaatttgatatagaaaaatatcaaatagtacagagtctagatgaattaaagcaatggaatctaaaggcagaaaatatggggtatatagcttttgataccgaaacaaactctttagatgccattaaagctgatatggttggattttctctttgcacatcagaaaatgatgcttgttatgtgcccttattgcatgatgaagaagaaaataaacaaataggctttgacgaagcaataaaagcactaaaaccaatattagaagataatggaataaaaaaaattcttcataatatgaaattcgatgctctagttttggataaatataatataaaaattcagaattatgatgataccatgcttatgtcatactctttaggatcaggcggaataagacacaagcttgatactctaatagaatattattttaaccacaaagcaatatcatttaaggagctcgtaggtagtggtaaagataaaaaaaatttccaagaattaagcattatagaagctggaaaatacgctgcggaagatgctgacatgactttaagattgtggaaaaaattaaagtcttcattagttcaagataaacaagtcaaaatatatgaaattattgaaaaacctttagcacatgtcataatgaatatggagaatcatggaatttctatagataaaaaaaaattaaatgaattatcagaaatttttgaaaaaaaattaaatagcttagaaaaagactgctacaaattaattgatgaagaaattaatcttggttcaccaaaacaagtaggcgaaatattatttgataaacttgaattatcaggtggaaagaaaacatcaactggttcatggtcaactaatgcagaagtattagaaaatttagctaacgatggtcatgattttccaaaacttttacttgaatggagagcgctatcaaaactcaaaacaacttattctgacgctttacctacatatttaaatcaaaaaacaaatagaattcactcttctttttcaatggcaaccacatctacaggaagattatcttcatcagatccaaatcttcaaaatattcccattaaaagtgaagatggaagaatgataagaaaagcttttattccagaaaaaggcaatgtactcattagttctgattatagtcagatagaactaagattaattgctcatattgctaatgaaagaaatcttatgaatgcttttcttgaagggatagacattcattcagctacagcttccgaagtatttaatatatcattaaatgatatgacacctgaaattagaagaaatgcaaaagcaattaattttgggataatttatggcatttcggcattcggtttagcaaaacagcttaatataagccgtactgaatcttctgaatttatcaaagcttactttaataagtatccttcaattaaagattatatggatgacacaaagaaatttgctagtgaaaatggttttgtaaaaaccttattgggtagaaaatgtcttgtagaggatataaatagtaagaatgcagcaactagatcattcatggaaagagcagcaattaatgcgcctatacaaggatcggctgccgacataattaaaagagcaatgattattttatctaataataaaaaattaaaagaattagatacaaaaatgcttttacaggttcatgatgagttaatttttgaaacaaaagaagaaaactgtgaagagtctatggaaattataagaaaagagatggaaaatgctcatttaccaatactagaactgaacattcctcttattgctgatacaaattatggaataaactgggatgaagctcactaa

SEQ ID NO: 256665 - DNA, 2614 bp, Unknown
  Bacterial polypeptide expressing nucleotide sequence isolated from the Sargasso Sea
atttttgatgctaaaggcaagacctttcgcgatgacatctataaagagtacaaagcgaaccgtcctccgatgccggatgagctaagaagccaaatcgaaccgttgcacgccatcattaaggcaatgggattacctgttattgttgagtcgggtgtagaagctgatgacgtgattggcacgttagccaaacacgccacagaaaaaggtattgatacccttatcagcaccggcgataaagacatggcgcaactagtaaatgaacatgtcaccttaatcaacaccatgacaaaccaactgatggatgtcgaaggtgtaaatacgaagtttggtattccaccggagcttgtgatcgacttccttgcgcttaagggcgataaagtcgataacatcccaggtgtacctggtgtaggtgataaaagtgctcaagccttgttaaacggcattggcggtattgacgacatatataagaacctggataaaattgcagatctgtcgtttagaggcagtaagtcgatggcggctaaaatgcaggaatacgaagagcaagctcggctttcttataccctagctactatcagcatcgatcttgaccttgactatgatgtcgaagctcttatgccttgccaagccgataacgaacaacttcgcgatctgtttgccgaatacgagttcaaacgctggcatgcagaagtaagcgcgctaatagccggcggagatacctctggtgccaatgcaaacaccaacgaagaaaagagcgatagcgcagaagagagcgaacaaagtgaatcggtagagatagataagtcgaagtatgagacagtgcttgaagaggaacgctttaatgcgtgggtcgcgaagctagaaaaagccgagctaatcgcttttgataccgagacaactagccttaactacatggatgcggagttagttggtgtttcattttgtatagaggaaggtgaagcagcttatgtgcctgttgctcacgattacccagatgcacccgcccagctatcacgagaattcgtattagacgcattaaaacctattttagaatcggacaccgtgatcaaagtaggtcaacacataaaatacgacaaaaacgtattagcgaactatgacattaccttaaacggcattggctttgacaccatgcttgagagctatgtactaaacagtaccgcgcagcgccatgatatggactcacttgccctagcctaccttggtcataaaactattcacttcgaagagattgcgggtaaaggcgcaaagcagctaacgtttaatcaaattagccttgaagaagctgggccttatgccgcagaagatgctgatatcacgcttcgcttacacaacgctatttggacgaagttgaaagaaattcctgagcttaaaaatctattgatagatgttgaggttcccctagcctgtgtactttctcgtatggaacaggaaggtgtattgatagacagccaaaggctgcgtcagcaaagccaggatcttgccacccggattgccgagcttgaaagtgaagtacatgaggaagctggcgagccattcaacttaggttctactaaacagcttcaacatgtcttgttcgaaaaaatgtcgctaccgatcataaagaaaacgcctaaaggggcgccgtctacttctgaggacgtactgcaagaacttgcgcttgagtacccgttgccgaagaagatcatggaataccgtggcctaaccaagctaaagaatacctacacggataaacttcctaagatgatcaatcatcgtacgggtcgagtgcatacttcttatcaccaagcagtaaccgccacgggacgactctcttccaccgatcctaacttacagaacatccctatccgaaatgaggaaggtcgccgcgtacgtcaggcatttgtaccaagagaaggaaataagttcgtcgctgccgactactcgcaaattgaattgcgaataatggctcacctttcgggtgataagggtctattagacgcctttgcacatggcaaagatattcataaagctacagcgtctgaagtgtttggtgttccactagatgaagtaaccactgaacagcgtcgcagtgcaaaagcgattaactttggcttaatttacggtatgagtgcctttgggttgtcgaagcaacttaatattccacgtaatgaagcacagaaatatatggatctttacttcgaacgctacccaggcgtgcttgagtacatggattcaacacgtgagagcgcgaaagaaaaaggttatgtagaaaccgtatttggtcgcagactttatttgcctgatattaaagccagtaatggtgcacgtagaaaaggcgcagagcgcgcagcgataaacgcgcctatgcaaggcacagcggcagacattattaagatggcgatgatcaaagttgatgactggattagaaaaaatgcatctgatgatgtgacaatgatgatgcaggtgcacgatgaattagtttttgaaataaaagaagacaaagtggaaacctatgtctctactattactgctcttatggaaagcgcagctacgctaaatgttccgctggttgttgaggctggtgtgggcgaaaactgggatgaagcgcactagt

SEQ ID NO: 256666 - DNA, 2287 bp, Unknown
  Bacterial polypeptide expressing nucleotide sequence isolated from the Sargasso Sea
atgagtttaaaatctgaaaactctaaaaaaccaattttacttttagtcgatggccactcacttgcttttagaagcttctatgcatttagcaaagggattgatggaggtttaactaccaaagacggatttccaacaagtgtcacttatggatttctaaaaagccttctggataattgtaaaaatattagtcctgagggtgtttgtattacttttgataccgaaaaacctactttcagacatgaattagatccaaattataaggccaatagagatgtagcaccagatgttttttttcaggatattgaacaactagaaatcattttagaagaaagccttaatttaccaatttttaaatctccaggatacgaagcagatgatctcctaggcacaattgcaaatgatgcttcttctaaaggatggtgcgtgaatattctttctggagatagggacttatttcaattagtagatgatcaaaaagatatttatgtactttatatgggtggtggtccatatgcgaaaagtggaaatccaactcttatgaatgaaaatggagtaaaagaaaaattaggtgttgcgccagaaagagtagttgatctcaaagccctaactggtgatagttctgataatattccaggtattaaaggagtagggccaaaaactgcaattaatctactaaaagagaacgatacgcttgatggaatctatcaggctttggacaagattcagcagaacaacgataagaaatataaaggattcatcaaaggttcagttatagaaaagctcagaaacgataaacataatgcttttctttccagggatttagcaaaaataaatactgaggtgcctttaattttaagtaacggttatgaattaaaaaatataaatcaagaactactttcagagtcactgaaaaaattagaactatcaacactacttagacaaattgatattttcaattcaactttcagcaaaggtggttttgacaaaaataatgtagctaaagaggaggagaaggcaccaaaagtcgcaggcaataatgaattagaaaatagtgaaaataaaatccctaaaatcaacgtaactgttgtaaatgatttcgaattacttgataaattaattcaaagattagacaagactaatcaaatagtttctttagatacagagaccaatagtttgaatccaatcgatgcggaacttgttgggatagggttatgtcttggagaagaaaatgatgatttattttatatacctcttggtcatcaaacaaaaaaggagacctccaatcaattatcaattgaagatgttttctcaaagctaagaaattggatagaagatccaaaaaaagaaaaggcactccaaaattctaaatttgataggcaaatattttttaatcatggacttgatcttaaaggcgtaacctttgacaccttgttagcagactaccttcttaataatcaggagaaacatgggttaagtgaaattagttttagattatttggatttaagcctccttcatttaaggagacagttggaaaaaataaagacttttcatttgttgatattgatgaagcaagtatttactgcggttatgatgtttttctaacttttaagattgtcaaaatttttaaagaaagtttttcaaaggaaaaagatgaattaatcaaattgttcgaagaaatcgagctgcctttagagccggtattgtcccaaatggaaatgaatggcataaccatcgacatcccttatttggataaactctcaaaagaattaaaaagtaccttagaagatattgaaagtaaagtttatgagttagcagaggagagtttcaatctatcttcaccaaaacaacttggtgagatcttgtttgaaaaattaaatttggataagaaaaaatcacggaaaacaaaaacaggatggagtacagatgcagtagttctggaaagattagtcgacgaacatgaaataatccaacatttaataaaacatagaactcttagcaaattacttagcacctatattgatgctcttccaaatcttattaacgaaaagacaggaagagttcatacaaactttaatcaagctgctacagcgactgggagactaagtagtagcaatcctaaccttcaaaatatcccggttaggactgaatttagtaggagaatcagaaaagcattcttgcctgaaaaaaattggaaacttttatcagctgattattctcagatcgaattaagaatacttgctcacttagcggatgaagaaatactaataaatgcgtttcataaaaaat

SEQ ID NO: 256667 - DNA, 1190 bp, Unknown
  Bacterial polypeptide expressing nucleotide sequence isolated from the Sargasso Sea
tcgagttctgtcagatatggagcttttgggtattaaagttgatagagacacacttgttaggatgtcaaactcattttctcaaaaaatggctcatttagaggaagaaatttatagccttgcaggagaaacgttcaatgttggtagcccaaaacagttaggggaaatcctatttgataaacttggatatgctggtggggccaaagggaaaacgggcgcctattctacgggtgctgatgttttggcagatcttgctacagaatatgatttgccaaggaaggtaatagactggcgacaattaagtaagttgaagtcaacttatactgacgcattacaagaccacatcaatccttcatctggccgtgttcatacatcatatgttatagctggagctaatactgggcgactagcgtcagctgatcctaacttacaaaatatacccattcgatccgaagaaggacggcgtattcgagaagcttttatcgcagaaactggaaaagttcttgtaagtttagattacagtcaaattgagttgaggatccttgctcacgtagcatctatcgatagtttgaaaaaagcatttcgtgatggattagatattcatgcgatgacggcgtcagaaatgttcaatgtgcctcttgatgaaatgacgtctgagatcagaaggcaggctaaggcaataaattttggagttatttatggtatatctggatttggtttagcccgaaatttaagaatcccacgttcagatgcccaagcctttatagacagatactttgagaggtttccgggcataaaggaatatatggatgaaaccattcggtttgctaaggaaaaaaattatgtggaaacgttgtttggaagaattatccatacgcttcaaataaatgcaaaaggtccaaatgctggctttgctaagcgtgcagctataaatgctccaatccaaggaacagccgctgatattattcgcagggcgatgatacgcatgccaactgcaatttcacatcttaacgcaaaaatgcttttgcaagttcatgatgaacttttgtttgaggtagaccagggtgacgtagaggctttaattactgtagctaaatcaataatggaagaagcatcgtatccagcggttaaattagatattcctattctcgtcgatgcaggccatggcgagaactgggctcaagctcattaaa

SEQ ID NO: 256668 - DNA, 2134 bp, Unknown
  Bacterial polypeptide expressing nucleotide sequence isolated from the Sargasso Sea
ggctggtgatagttctgataatgtaccaggtgcaccaggtattggaattaaaactgcagcgcagcttattaatgaatttcagagtattgagaatcttttggaaaactatgaggaaatcaaacagcaaaagcgtagggaaacaatcagagatagtaggaaaaatattcttataagcaaagaattagttacgttgaaaagggatgtaaacaatattccagctctcgatgatttagtaaaaaaagaaatttctgttgagactttagttccttttttagatgagcttgagttaaagaagttatctgaaaggataagaaaaaaaaatccaaatataaaaattacatccaaaaagctaacaagcaccaaaaaactaaaaaatttaaatgagcaaattgaaaaaccagatgataattttaaaaaatcgatcaaaatttctaattccaaatcttcttacaatttaataaatgatgaaaaaaaacttaaaaagttggttagcgaaatctatgatgtgggtgaatttgtatatgatgttgaaacagactcgctcaatataatcgatgctaatctagtcggcgtttctttttgttttaaccagaaaattgcctactatattccggtgcaacatgttgaccatgatgaaaataaaattcaaagccaaatatctctcaaaagttttctatcaataattgcccctttaatgaaagatgagtccataattaaaataggccacaatattaaatatgataattcaattttaaataaatatggagttgaagtaaggggttttcacgacaccatgttaatgtcttatgttctcgatgcaggcgtcaatcggcataatatggatgaattagccaatattcatttaaacagagaaacaattaaatttaaagatatagttggcagtggtaaatcacagattacttttgacaaagtaaaaattgatgacgcactaaattatgcagctgaagatgcagaaataacttacaaattatatttgtttttaaaaaaaagagttcaacaagaaaaaggcaattatatttataccaacattgaaagagagctaattaatcctatccaatcaatggaaaccaatggaattaaagttgataagaaatatctaaatgatttatcatttaaattctcacaaagaatagagaaacttgaaaaaaaaatatacaaggaaacaggttcaaaatttaatattggctctccaaaacaattatctgaaattttatttgataaattaaaacttaagccacctaaaaaaactaaaactggtgaaaaatctacaggtattgaagttttagaagatcttgcatatgaaggaaataaagttgctgatacaattattcagtggcgacaaatctctaaattaaaaaatacatatactgatgctcttcagaaccatattgtagaaaaaacaggcagaatacacacctcatttgctatggcttcaactaacacaggaagactggcatcatcagatccaaatctacaaaatattccgataagaacagaggaagggaaatcaattagaaaggcctttatacccgatcaaggctatgtgatgtttgctgccgattatagtcaaattgaattaagagttctcgcacatatggctgacgtggcacaactaaaggaagcgtttataaacaatgaagatattcatcaaattaccgcctcagaaattttcaatgtaaaactaaaagaagtagataacgaattaagaagaaaagccaaagcagttaactttggaatcatatatgggatctcagcctatggacttgcaaaacagctttcaatatcaaattatgaagcaggggattttataaaaaaatattttcagaaattttcaggaattaaggaatttatggatcatacgaaggagttttgtagaaataatggttatgttgagacgatttgtggaagaaaatgcttttttccaagaattaaggacaaaaattttgctcttagatcttttcaagaaagagcagcaataaatgcaccaatacagggtactgcagctgatattattaaattagccatgattaaaataaatggtaaaattaaaaattcaaatgattgtaaaatgcttttacaggttcatgatgaattaatttttgaaataaaaaaa

SEQ ID NO: 256669 - DNA, 973 bp, Unknown
  Bacterial polypeptide expressing nucleotide sequence isolated from the Sargasso Sea
ccaaccttcaccaatgaggatactcttcagagactggctgaagaatatgatcttccaaaaattattattgaatacagaggtttagcaaaattaaagtctacttatacagacagtcttattgatattcagcaccctgttacaaaaaggattcatacttcctatcaacaggctgttacatcaaccggaagattatcttcaactgaacccaatcttcaaaatattcccattaagactgcggagggaagaaaaattagagaggcttttatagctgagaaaggtaatgttttgatttccgctgactactcgcaaattgaattaagaatcatggctcatctatctggagataagaatttaactcatgcatttaataacaacatagatgttcattcagctaccgcttcagaaatatttaatatttcccttgaagaggttacaccagagcatcgaagaagcgctaaagccattaactttggattaatctatggcatgtctgcttttggattaaccaggcagcttgggattccacggcatgaagcgcaagcttatcttgatacatactttgagagatacacgggagttagaaagtatatggatactacaaaagaacttgctaagaaaaatctctttgtagaaactattttaggaagaaagctccatgtggctgctattaatgattcgaatggactaagacgtcaagctgctgaaagagccgctattaatgccccattacagggctctgcagcagatattattaaaaaagcaatgattgatgtagaccaatggattggaaaaaacaactcagatataaaaatgattatgcaggttcatgacgaactaatttttgaggtaaagaaaggtttcgctgatgaagcactcaaaaatattataagccttatggaaggctcagttaaattagacatccctttaatagtggatgcaaacgcaggagcaaattggaatgaagctcattaat

SEQ ID NO: 256670 - DNA, 1369 bp, Unknown
  Bacterial polypeptide expressing nucleotide sequence isolated from the Sargasso Sea
ctcgcagattattatcttaactacacaactacaaaatatactgatgtaacagggactgcctctaagcaaattagttttgcagaggtacaaattgatgttgcaacagattatgcagccgaggatgctgatgtaacgctaagactttttaatactttatctgcgttattaaaagagaaaccaattcaagagaaactattaaaagaaattgaatatcctcttgtgcatgtactttcaagagtagagcaaaatggagcaaaaatagacaagataaaacttggaaatcactccaaagagcttggcgacaagattgctgacttatctgcccaagctttcaaaatagctggagaggaatttaatcttgattccccaaaacaactcttagaaattttatatgaaaagcagggattaccagtattgagaaaaacacctaaaggacaaccatctaccaatgaagagacacttcaaaggctatcagaggaatatgaactaccaaagataattctacaatatagaacattggcaaaactaaaatctacttatacagatagcttaataaatattgagaatcctaaaacacaaaggattcacacctcatatcaacaagccgtaacgtcaacaggaagactttcgtctacagaacctaacttacaaaatattcctattaaaaccgctgaaggcaggagaataagagaagcttttgttccagaaaaaggtaacacacttatttctgctgattattcccaaatagaactaaggataatggctcatttatcagaagataaaaacctcacaaatgcttttaataataatattgatgttcattcttcaaccgctgcagaggtttttagcgtagcaattgaagaggtaaataaagatcaaagaaggagcgccaaagctataaattttggtttaatgtacggcatgtctgcttttggactcacaagacagctgggaattacaagagctgaagcgcaagcatatttagatacctattttgcaagatataccggggtaagagattatatggataatattaaagccaaagcgaaggaagatatgtttgttgagaccattatgggaagacgtctttatcttaatgaaataaatgccgcaaatggattaagaagacaggctgcagagagagcagctattaatgctccactacagggatctgcagcagacataattaaaaaggcaatgctcgatatcgataaacttattttaaatgaaatgcccgatgtaaaaatgataatgcaggttcatgacgaactagtgtttgaatgcccaaaagagaacgctgacttagtgatggagaaaatgaaagaaactatggagcaaaccgtagaactaaaaatacctttgattgctg

SEQ ID NO: 256671 - DNA, 1462 bp, Unknown
  Bacterial polypeptide expressing nucleotide sequence isolated from the Sargasso Sea
catgatgatgagttatgttctggatgcatcggctactaggcataatctcgatgctctctcatctttttacttgaattataaaacatcaacttttgaagaagtggcaggaaaaggaacgaaacaagtaacttttgacaaagtgccattagacaaagcaactcattatgcagcagaagatgctgatattactttgaggttatatgaggcattagagccaaaattaaattctataaaaccattaaaaaaattaatggaagaaatagaaatacctttaatagaagtgctctctgacatggagcaaaatggcatgttactcaactcaaagatcttgtcttctcaatctaaagatttggaatctaggatagataaattagaaaaattagcctatgaaatagccggagaggaatttaatcttggttcaaccaaacaactaagagaaatcttttttgagaaattaaattatcgaataatcaaaaaaactcccggtggacaaccttctacagatgaaaaggttttacaagagctatcagaggagtatgaactacctaaagtattacttgaacataggactttaagtaaacttaagtcaacttacacggataaattacctggccagatttcttctaatacgggtaaagtccatacctcatttcatcaagcagttactacaacaggcaggttgtcatcttcagatccaaatcttcaaaacataccgattagaactgaagacggcagaaggatcagacaagcttttgaggccaccgaagggaacaaaattatttctgctgactattcccaaatagaattgagagttatggcccatttatctaaagataaaggtttattagaagctttcaaccaaggtgaagatatccatgcaaaaacagcaagcgaagtttttgatgttgaattgaataaagttaccactgatctaagaagaaatgcaaaagccataaattttggacttatatatggcatttctgcatttggtttagggagacaactaggtattaacagaaatttagcggctgagtatatggctatgtactttgaaaaataccctggagtaaaaacttacatggagacaactaaagatactgctcgtgatacgggttatattgaaaccttgtttggaagaagactgtacttaagagatataaatgcaagcaatgcaattcgaagacaggcttctgaaagagttgctattaatgctcccgttcaaggttcagctgcagatataatgaagatagcaatgatcaatgcttacagagcactaaaaaagtctaaatcaaaagcacaacttactctccaggttcatgatgaactaattgttgacaccccaaaggaagaaactgataaagtcatcagtatactaacaaagtctatgcaagaagctgccaatctagatgttcccttagaggttgatataggaattggtagtaactgggatcaagctcattaa

SEQ ID NO: 256672 - DNA, 1102 bp, Unknown
  Bacterial polypeptide expressing nucleotide sequence isolated from the Sargasso Sea
atgaaattttcaattgatagggacgccctattaaagccgcttcaattggtttgtggtgcggtagaaagacgccataacttgcctattttggcaaatctccttgtagaagttagtgggcactcactcaaaatgacaggtaccgacctcgaagttgagttagtgggccaggcggtcgttcatggtgatattgaagaaggtcgtactacagttcctgctaagaagctgttagacatagttaaatccttacccgaacaaagcgagcttaaggtcgagcagcaagataacaaatggttattgcgctcaggccgtagccgtttctcgctggcaaccctgcccgcagaagaataccccaatgtggaagcctttcaggcggaaatagagttctctcttaagcaaggtgtgttgaagtcactgattgatgcgactcagttttcgatggcgaaccaagacgttcgttactatctgaatggtttattgctcgaaactgaaggtaatgtgctgcgtgccattgctaccgacggtcaccgcttagccttaagccacagaaccatagatgcgcaattgcctgaaaaacaagtgatcgtgccccgtaagggcgtgatggaaatggcgcgtttattggaagccgatgatttagatatcgcaattgccattggcgataatgcgattcgtgcgaccaccagcaccacagtttttaccagtaaattagtcgatggtcgtttccccgattatcgccgtgtgttaccgaaaggcggtgataaaatcgttatcgccagccgtaaccacttcaagcaagctttaaaccgtgcttctattctatcgaacgagaagttccgcggtgtacgcattcagttagaagcgggactactgaaaatcaccgccaataacccagagcaggaagaagcggaagaaatcatcgatgtggattacaacaatcagccactcgaaattggtttcaacgtcagttacttattggatgtgctaaacaaccttaagtccgatgatgtgcgtatcaccttaatcgatggtaactcgagtgctttattggaaaaccacttggaagaagattccatgtatgtggttatgccgatgcgcttatagt

SEQ ID NO: 256673 - DNA, 2674 bp, Unknown
  Bacterial polypeptide expressing nucleotide sequence isolated from the Sargasso Sea
catgaaagatagaatttttgtaatagatggatcctcatacctatatagggccttccatgcgatgcctcctttaagtacctcctcaggtaagccaaccggcgctattaaaggtgttacaaacatgcttattaatttaaaaaaagaaagtgaaggctcaccgataattgttgtatttgatgcaaagggcaatacttttaggaatgatatttataaagaatacaaggcaaaccgaccaccaatgccagacgaacttagagagcaacttgaacccgttaaatcaatatgcagagcaatagggtttccattaatagaaatcagtggagtagaggctgatgatgtgattgcaactatcgcgagtatggcgaaagatgcgaaatataagtgtgttatctcttctttagataaagaccttatgcagctagttgaagatccaaatataaccatgatgaatacaatgaagcatattatctttaatgaagaaaaggtaattgagaaatttggagtgaagccttgtcaggtaagagacatgcttgcccttactggggattcttcagataacattccaggcgttcccaaggttggtcaaaaaactgctgcaaagtggttgaatgagtatggtgatctagaaggaatcaaaaaaaatgcagaatcaataacaggagttgttggcgaaaatctaagaaatagtctgaacgatcttgatagaaatgttgaattagtttcattaaaaaaagatgtagatctaaaacttgattttaaagacctattaaaactaacacctaatgatgaagagttagataaaatttttgcagaattagaatttaaagcaattgaaaacaacaaagaaaaggtaacacctaaaaaagattcaaaatatgaaacaattttaattaaaaaagatttaaccaagttgattaataaaattaataaatcaaaggtatttgctcttgatactgaaaccgattcattaaatacagtttcagcaaatttaattggaatctctatttcagtttctgaaaatgaaggttgttatattccaataggacattcttatgatggatgcccagatcaactttcaatggactatgtaataaaaacactgggcccagtaatagaacagaatcaaaagaagatagtaggccagaatctcaaatatgatatcccaatactttctaggcatgggattaatatcacagtattttgtgctgacacaatgctaatgtcttatgttttaaatagcacggccactagacatggaatggatagactagctgattattatttaaattacactacaacgaaatatacagatgttactggaacagcatcaaaacaaattagtttttctgaagtaaaactagacgttgcaacagactatgcatcagaagatgctgatataacattaaggttgtataacgtacttatatcaatgctcaaagacaaaccaactcaagagaagttacttcatgatattgaatatcctttagttcatgttctttcaagagttgagcaaaacggagcaaaaatagataagaataagttatcaaagcactcaaaagagttaggcaagaaaattgatgaactttcatctcaagcttttaatatagcgggagaagaatttaatttagactcaccaaaacaattacttgaaatactttatgagaaacaaggattgcctgtcttaaaaaagactccaaaaggacaaccttcaactaacgaagatactttgcaacgactttctgaagagtatgagttgccaaagattatcttgcaatacagaacattggcaaaattaaaatctacatatacagatagcctaataaatatagagaatcctaagactgagagaattcatacttcctatcagcaagcagttacctctactggaagattgtcatccacagagcctaatttacaaaatattccaattaaaacagctgaaggaagaagaattagagaggcttttatacctgaaaaaggcaatgttttaatctcagctgattattctcaaatcgaattaagaataatggctcatttatctaaagatgaaaatttaacctatgcatttaataatgatatagatgttcattcatcaacagcagctgaagtttttggtgtttcaatagatgatgtaagtcaagaccaaagaaggagcgccaaagcaattaactttgggttgatgtatggtatgtcagcttttggtctaacaagacaattaggcataccaaggggagaagctcaagaatatttggatacctattttgctaggtatacaggagttagggattatatggacaatatcaaagctcaagcaaaagaagataaatatgtagaaacaattatgggaagaagactttatttgaatgaaattaatgcagcaaatgcaagattaagacaaggtgcagaaagggctgcaattaatgcacctcttcaaggatcagcagcagatattattaaaaaagctatgttagatattgatgatctaattataaatgaaatgtccgatgtaaaaatgattatgcaagttcatgatgaattagtgttcgagtgtccaaaaaataatgctgatatggtcatggaaaaaatgaaagatattatggagaaaacggtagagcttaatattcctttaatagctgaagctgccattggatctaattggaacgaagctcactaa

SEQ ID NO: 256674 - DNA, 2770 bp, Unknown
  Bacterial polypeptide expressing nucleotide sequence isolated from the Sargasso Sea
tatgccgaccatagccaataacccacttgtccttgtggatggatcttcttatttatatcgcgcctattatgcgcctcctcacctgacaaactcaaagggcgaagctactggtgcagtttatggcgtagtgaatatgctccgcagcctattaagccgttatcaacctagtcatatcgctgtggtgttcgacgctaaaggcaaaactttccgcaatgacttatatgaagaatacaaggcgcatcgaccaccgatgccggatgacctgcgctcacaaattgaacccctgcaccgtattatccgtgccttaggcttgcccttaatctctatcctaggtgttgaggcagatgatgttatcggcactatcgctcgccaagcgagccgcgaaaaccgcgccgtactcatcagtacaggcgataaagatatggcgcagctggttgatgacaatatcacgctgatcaacaccatgacagataccattatgggccctgaagaagttgcggctaaatatggtgtaggtccagacagaattatcgatttcttagcgctgatgggcgataaggcggataacattcccggtttacctggtgttggcgaaaaaaccgcattagctatgctcacgggggcgggtagtgtagccaatttgcttgcagagcccgaaaaagtaaccgaattaggctttaggggcgcaaaaaccatggcggcgaaaatcatcgacaatgccgacatgctaaagctgtcctatgagcttgccaccattaaaaccgatgttgaactcgaacaagattggcatgagctcaccgccaaacccgctgacagggacgaactgatcaaatgctacggcgagatggagtttaaacgctggcttgccgaagtcttagataataaggcgccagcgacggtcgcagcaaaagccgaaacaacagagacccaagaagagtcagcgcccagcgtcacgattgaaacccaatacgatacaattctgaccgaagctcagcttgatgagtggattgccaaactcaaacaagcgccattaatggccgtagataccgagaccaccagcctcgactatatggttgcggaacttgttggcatgtccttcgcagtggaagcaggaaaagccgcttatctgcctttagcccacgactatgttggcgcacctcaacaattagataagcagactgcactcgaaaaacttcgccccttactcgaagatgccaagatcaaaaaagtcggtcaaaacctgaaatatgacatcagcgtattagccaatgcaggcataaaactccaaggcgtggtattcgacactatgctcgaatcctatgtgtttaactcgatcgcctcacgccatgatatggatgggttggcgctaaaatatctgggccataaaaatatcgcctttgaagatatcgccggtaaaggtgctaaacagctaaccttcaaccaaatttcgttggaaacagcagctccctatgcggcggaagatgccgatattacgctacgcctacatcaacacttgtggccaagactcgaaaaagaagctgaattagcctcagtttttaccgatattgaactgccgctgatccaaattctgtccgatattgaacgccaaggtgtgtttatcgatagtatgttgcttggtcaacagagtgatgaacttgcccgtaaaatcgatgagttagaaactaaagcttatgatattgctggtgaaaaattcaatttaagttcaccaaagcaactgcaagtgctgttttttgaaaagctgggttatccggttatcaaaaagacgcctaagggtgcaccatccaccgccgaagaagtgctggtcgaattggcattagattttcctttgcctaaggtgatccttgagcatcgcagcctgaccaagttaaagagtacttacaccgataagttacctttaatggtgaacgctaaaaccggccgagtacacacaagctaccatcaggccaatgccgcaacggggcgtttatcctcgagcgaacctaacctacagaatattcctatccgcaccgaggaaggtcgtcgtattcgccaagcctttattgcaccgcagggacgtaagattttagccgccgactattcacagattgaattgcgtatcatggcgcatttatcccaagacgcaggcttactcaaagccttcgccgaaggcaaagacattcacagagccaccgccgccgaagtatttggcaccgactttgacagcgtaacctcggagcagcgtcgccgcgccaaagccgttaactttggcctgatctatggtatgtccgcctttggattagcgcgtcagctcgacatcccccgcaacgaggcacaaacctatatagacacttacttcgcccgctatcctggcgtattaaggtatatggaagaaacacgagccagtgcagcagagctaggctatgtctctacgctatttggtcgccgtttgtatttacccgaaattcgcgaccgtaatgcaatgcgccgccaagcagcagaaagagccgcgattaacgccccaatgcaaggcaccgccgcggatatcattaaaaaagccatgatcagcattgccgattggataaaaactgatacccaaggtgaaatcgccatgatcatgcaagtgcacgacgaattagtgttcgaagtcgatgccgataaagctgaaaaactcaagctcaaggtgtgtgaactcatggccaaagcggccaatctggatgtagaactcctagccgaagccggcattggtgataactgggatcaagcccactag

SEQ ID NO: 256675 - DNA, 921 bp, Unknown
  Bacterial polypeptide expressing nucleotide sequence isolated from the Sargasso Sea
tttggaaatggagacaaatatcaaaattaataaatacctatatagaatctttaattaatgaagttaacaaaaagacattaagaatacacacttcttattctatggcttctacaaacacaggaaggttatcgtcaactgatccaaatttgcaaaatattccaataagaactgatgaagggaaaaaaataagaaacgcatttatatctgaaaaaagatttaaattagtatctctagattattctcaaattgaactaagactattggctcatataggaaaggttgaggatttaaaaaaagcattagaacaaaacatagatgttcataagaagacagcttcacaaatttttaatgtgaaattagaagatgttgatgaagatttaagaagaaaagcaaaaactataaattatggtattatttatggtattagcgcatttggccttgcaaaacaattaaaaattcaaagatctgaagcagatttaattttgaaagagtattttaaaaattataaaggaatactaaattatattgatgaaataactaatttttgtaaaaaaaatggatttgttaaaacattatttggtagaaaatgttatattgatggaattaataataaaaatcccaatttaaggaattttgcaattagagcagctgttaatgcgccaatccaaggttccgctgcagatattataaaaaaagctatgataaatataaataaatttcttgaagaaaaaaaaactaaatcaaaaatgattttacaagttcatgacgaattattatttgaaatgtatgaatcagaaattagttatctttctatggagataaaaaaaataatggaaaatgcagctttaccagaagtaaaattagacataccgttaatagctgatatcggacaaggagtaagttgggcggaggcacattaaa

SEQ ID NO: 256676 - DNA, 1534 bp, Unknown
  Bacterial polypeptide expressing nucleotide sequence isolated from the Sargasso Sea
acttgatcttaaaggcgtaacctttgacaccttgttagcagactatcttctaaataatcaggagaagcatgggttaagtgaaattagttttagattatttggatttaagcctccttcatttaaggaaacagttggaaaaaataaagacttttcatttgttgatattgatgaagctagtatttactgcggttatgatgtatttctaacttttaagattgtcaaaatttttaaagaaagattttcaaaagaaaaaaatgaattaatcaaattgttcgaagaaatcgagctacctttagagccggtattgtcccaaatggagatgaatgggatcataattgatgtctcttatttagaggaactttcaaaagagttgaaaagcacattagaaaatattgaagttaaagtttatgaactggcagaagaaaaatttaatttgtcctcaccaaaacaacttggtgaaattttatttgagaagttatctctagacaaaaggaaatcaagaaaaacaaagactggatggagtacagatgcagtagttcttgaaaaattagtcgacgaacacgaaataatccaacatttaataaaacatagaactcttagcaaattgcttagtacttatattgattcacttccaaatcttattaacgaaaagacaggaagagttcatacaaactttaatcaggcagctactgctactggaagactaagtagtagcaatcctaatcttcaaaatatcccagtcagaactgagtttagtaggaggataaggaaagccttcttgccggaaaaaggctggaaactattatcagctgattattctcaaatagaattaagaatacttgctcacttagcaaatgaagaaatactaattaatgcattccaacaaaatgatgatattcattctttaactgcaagattaatttttgagaaagaagaaatatcatctgacgagaggagagttggtaaaaccataaatttcggaattatttatggaatgggacctagaaaactagctcgttcaacaggagtaagtacggaagaagcaaaagatttcctaataaaatataaaaaaagatactcaaaagtttttacatttttagaacttcaacagcgtctttctctttccaaaggttatgtagaaactatttttggaaggaaaagagaattcaaatttgataaaaatggattaggtagattattagggaaagatccatatgaaattgatttacaaagtgctaggaaagctggaatggaagccctatcattattagccgccgcaaatgcacctattcaaggttcaagtgcagacattattaaagtagccatggttcaacttaataggaaatttatagagatgaacgccccagcaaaaatgcttttacaagtacatgatgaattattatttgaggctgaaccaaattctttagaagaaacaaccaaattaataaaggaaacaatggaaggttgtgtaaaattgagtgtgcctcttttagttgatattggtattggagacaattggatggagacaaaataa

SEQ ID NO: 256677 - DNA, 2633 bp, Unknown
  Bacterial polypeptide expressing nucleotide sequence isolated from the Sargasso Sea
aatgagtgataaaaaaagcttatttctattagatgcatatgcattaatctatagaggctactatgcatttataaaaaatcctagaattaattctaaaggactggatacttcagctattcttggttttacgaattcattatttgaaataatcaggtctcaaaaaccagactatataggtgttgcttttgataaaggtggatcggttaccagatctgaaatgtttgtagaatacaaaagcaatagagataaaactcctgaaccaataataatggcaataccttatataaaaaatatactagaaggaatgaatattccaattcttgaacaagagggatttgaagctgatgatattatcgggacagttgcaaaaaaggcagagaaaaaaaatttcaaagtatttatggttactcctgacaaggatttctctcaattagtatcagaaaatattttcttatgcaaacctgcgcgaatgggaaatggaatggaaatctggggcaccaaagaggttaatgaaaagtttgaagttaattcacctgaacaagttgttgactttcttggaatgatgggagactctgttgataatattcctggattacctggtgtaggtgaaaaaacagcaaaaaaatttttaaaggaatacggatccctagaaaacctattgtcaaattctcacttaattcctgggaaacttggagaaaaaataacaaacaacaaagagctaggaataatctctaaagagctagccaaaataatattagatgttcctatagactataatttaaaggactttaaacttacagagcctgataaggggaaggtgattgaagtgtttaatgaattagagtttagaaggataaaagaaacttttttcaaaatttatggaacagaagttcaaactgacaattcagtaaatcagccaatttcaattcaaacagatctttttaatcagagtcaatatactggggttacagataaaaaaacaaactcaaattcatcaaggagttcatatcagtttattgataatattgaagaattaaaattttttgtagaaaaattaatgaatcaagaggtagtatcatttgatacggaaactgaaactttaaattcattagaaacaaaacttattgggatctctttttcttggaagaaatatactggatattttatttcatttaataatgataagaaaaagaacaatgaatttatagaattattaaaacctttttttgaaagtaataagattgaaaaagttgggcacaacttaaaatttgacataaaagttctgtttaagtacggtattagtgtttgtgctccaatatatgatacaatgatagcccattatatcataaatccagatatgagacataatcttgactctcttgctgaatcatatcttaattattctccaatatcagaagaagacttaattggcaagaagggaaagaatcagaaaagtataagagatatatcaattgaagaaattactaaatactctgttcaagatcctgatctatgcttacagctaaaagaaatttttgataaggaaatcaaggataataatctttcagaaattttttcagaaatagagcttcctattatagaagttttatcgtttatggagaaggaagggataaaaatagatgaaaagtatttaaaaagccttgaggatgactttcaaaatgaattaaatatcctagaaaataaaatatttaaggaatctggagaagatttcaacttgaattctccaaaacaattaggtgagattctttttaataaattaaagcttgttagtaatcctaaaaaaacaaaaacaggtcaattttcgacctctgaagaagtattgtcagcgttatctaaagatcataagattatatcaaatattttagagtggagatctttagataaattacttaacacatatgttaaagctctacctaatgagataaattcaagtacaggaagaattcatacaaaatttaatcaggctgttacctcaactggcagattaagtagtaataacccaaatcttcagaacatacctattaggactgaaaatggtcaaaaaataaggaaagcatttactcctagagataaagagtttatattaatgtgtgctgattactcacaaattgaattaagagtaattgcatcattaagtggagatattaatatgattgatgcctttaataaagatgaggatattcatacgtctaccgcttcaagaatattcaatgttcacaaggataaagtgtctagagaacaaaggagtaatgctaaaactgttaattttggaatcatatatggtgtttctgcatttggattaagtcaacaaacagacttaaacagaaaagagtctaaaatcttaatagataattactatgaaaattatcccactcttaaagaatatatgtcaaaacaaattgattttgccagagaaaatggatatgtcgagacattaatgggtagaagaagatatttaactaatattaattcacaaaatggcatgattagaagtgctgatgagagaaatgcagtaaatgctccaatccaaggaagtgcagctgatattattaaaattgcaatgaagaatatcttcaatattttgagtgaaaaacaatttaaatcccaaatga

SEQ ID NO: 256678 - DNA, 2227 bp, Unknown
  Bacterial polypeptide expressing nucleotide sequence isolated from the Sargasso Sea
ggtatcggaatcaaaactgcagcgcagcttattaatgaatttcagagtatcgagaatcttttggaaaactatgaggaaatcaaacaacaaaagcgcagagaaacaatcagggatagtagaaaaaatatccttataagcaaagaattagtaaccttgaaaagggatgtaaacaatattccagctctcgatgatctagttaaaaaagaaatttctgttaagactttagttccttttttagatgagctggagttaaagaagttatctgaaaggataagaaaaaaaaatccaaatataaaaattacatctaaaaatctgaaaagtaccaaaaaactaaaaaatttaaatgagcaaattgaaaaaccagatgataattttaaaaaatcgatcaaaatttctaattccaaatcttcttacaatttaataagtgatgaaaaaaaacttaaaaagctggttagcgaaatctatgatgtgggtgaatttgtatatgatgttgaaacagactcgctcaatataatcgaggctaatctagttggcgtttctttttgttttaaccagaaagttgcctactatattcctgtgcaacacgttgaccatgatgaaaaaaaaattcaaagccaaatatctctcaaaagttttctatcaataattgcccctttaatgaaagatgagtccataatcaaaataggccataatattaaatatgataattcaattttaaataaatatggagttgaagtaaggggatttcacgacaccatgttaatgtcttatgttctcgatgcaggcgttaatcggcataatatggatgaattagccaatattcatttaaacagagaaacaataaaatttaaagatatagttggcagtggtaaatcacagattactttcgacaaagtaaaaattgatgatgcactaaattatgcagctgaagatgcagaaataacctataaattatatttgtttttaaaaaaaagagttcaacaagagaaaggtaattatatttacactaacattgaaagagaattaattaatccgatccaatcaatggaaaccaatggaattaaagttgataagcaatatctaaatgatttatcatttcaattctcacaaagaatagagaaacttgaaaaaaaaatatacaaggaaacaggttcaaaatttaatattggctctccaaaacaattatctgaaatcttatttgataaattaaaactcaagccacctaaaaaaaccaaaactggtgaaaaatcgacaggtattgaagttttagaagatcttgcatatgaaggaaataaagttgctgatacaattattcagtggcgacaaatctctaaattaaagaatacatatacagacgcacttcaaaaccatattgtagaaaaaacaggaagaatacacacttcatttgctatggcttcgactaatacaggaagacttgcatcatcagatccaaacctacaaaatattccgataagaacagaggaagggaaatcaattagaaaggcctttatacccgatcaaggctatgtgatgtttgctgccgattatagtcaaattgaactaagagttcttgcacacatggctgacgtggcacaactaaaggaagcttttataaataatgaagatattcatcaaattaccgcctcagaaatttttaatgtaaaactaaaagaagtagataatgaattaagaaggaaggccaaagcagttaactttggaatcatatatgggatctcagcctatgggcttgcaaaacagctttcaatatcaaattatgaagcaggggattttataaaacaatattttcaaaaattttcagggatcaaagaatttatggattatacgaaggagttttgtagaaataatggttatgttgagacgatttgtggaagaaaatgcttttttccaagaattaaggacaaaaattttgctcttagatcttttcaagaaagagcagcaataaatgcaccaattcagggtactgcagctgatattattaaattagccatgattaaaataaatggtaaaattaaaaattcaaatgattgtaaaatgcttttacaggttcatgatgaattaatttttgaaataaaaaaaagtaaattagaccactttaaaaaaattattatagaagaaatggaaaatgcattaatgcccaaatttgatttttctgtacctttagtagttgaccataaccatgctctaaattggagtgatgctcattaat

SEQ ID NO: 256679 - DNA, 1096 bp, Unknown
  Bacterial polypeptide expressing nucleotide sequence isolated from the Sargasso Sea
gttggaggaaccttttgtgcgaaaaatcattcatgttgatatggattgctactttgctgcggtggaaatgcgagactttcccgaataccgtggtaaaccgctggccgttggtgggagccgtgagcggcgaggggttatcagcacctgtaattacgaagcgcgccgatttggtgtgcgctccgctatggcaacggcttatgcgcttaaactgtgcccagacttaattcttgtccctggtcgaatgcaggtctataaggatgtatcgcaacaaattcgcgctatcttctctcgatacactgaattgattgaacccctctccctcgatgaagcctacttagatgttagcgattgcaagctgtttaagggctctgcaactctgattgctgaagcgattcgccatgatattttggccgaaacagggcttactgcttcggctggcgttgctcctgttaaattcctcgccaaggtggcctctgacttaaataaacctaatggtttgtatgttatttcgcccgataaggttcctgagtttattaaaactttatccctacgcaagatccccggtgtggggaaagtcaccgcagaaaaactttcctctttggggttaaatacttgtggtgatatacaaacttacccaaaacaagaccttattactcgttttggcaaatttggtgctgtattaattgaaagatcccatgggattgatgagcgtgggttatcagtgagtcgcgagcgtaaatccgtcggcattgaaactacgttggcgcaggatatttacacactcgagcagtgccagcaggtgatgccgggattaatacatgagttatcaactcgcctaagtcgtagtgccaaggatcgacaaatccataagcaggtggtgaagcttaaattcagtgactttaaacagaccacaatcgagcatcgcagtgacgaggtatccatagtgatgttttatgagttactgagccaagcaatggcaaggcaagagggccgtggaattcgattactcgggatttctgttggactcgccgagagtaaagatacgcttcagccaatcatggctcgcgagactaagcagttggatttggtattttaa

SEQ ID NO: 256680 - DNA, 2755 bp, Unknown
  Bacterial polypeptide expressing nucleotide sequence isolated from the Sargasso Sea
atgcctgaagaacgaaatctggaaggtaagaccctgctattggttgacggttcgagctatctgtatcgggcttaccatgcgatgcctgatttgcgtggccctggcggggagccgaccggagcgctctacggaatcatcaacatgctgcgccgtatgcgcaaggaagtcagtgcagagtatagcgcttgcgtgttcgatgcaaagggcaagacgttccgcgacgacctttatgccgactataaggcaaaccgtccatcgatgccgcccgatcttgcattgcaggtcgaaccgatccacggcgcggtgcgtgcgctcggctggccgctgctgatggtcgaaggcgtcgaggccgacgacgtgatcggcacgctcgcgcgcgaagccgagcggcacgggatgaacgtgatcgtgtcgaccggcgacaaggatctcgcgcagctcgtcaccgaccacgtcacgctcgtcaacacgatgaccaacgagacgctcgaccgcgatggcgtgatcgcgaagttcggcgtgccgccggagcgcatcatcgactacctcgcactgatcggcgacaccgtcgacaacgtgccgggcgtcgagaagtgcgggccgaagacggccgtgaaatggctggcgcaatacgacagcctcgacggcgtgatcgaacatgcgggcgacatcaagggcgtggtcggcgacaacctgcgccgcgcgctcgatttcctgccgctcggccgcaagctcgtgaccgtcgacacggcctgcgatctcgcgccgcatctcgagtcgatcgaggcgtcgttgaagaccgacggcgaagcgcgcgacctgctgcgcgacatcttcgcgcgctacggcttcaagacctggctgcgcgaagtcgacagcgcgccggcggaaggcggcggcgccgacgcaccggaaggcgagccggcgccggtggtggcggccgacatcgtgcgcgaatacgacacgatccagacctgggagcaattcgacgcgtggttcgcgaagatcgacgcggccgagctcaccgctttcgacaccgagacgaccgcgctcgacccgatgctcgcacggctcgtcggcctgtcgttctcggtcgagccgggcaaggcggcgtatctgccggttgcgcatcgcggccccgacatgcccgaacagcttccgctcgacgaagtgctcgcgcgcctgaagccgtggctcgaatcggccgatcgcaagaaggtcggccagcacctgaagtacgatgcacaggtgctcgcgaactacgacatcgcgttgaacggcatcgagcacgacacgctgctcgagtcgtacgtggccgaatcgcaccgcacgcacgacatggacagccttgcgctgcgtcatctcggtgtcaagacgatcaagtatgaagacgtggccggcaagggcgcgaagcagatcggcttcgatgaagtcgcgctcacgcaggccgccgaatacgcggccgaagatgcggacatcacactgcagctgcatcacgcgctgtacccgcaagtcgcgcgcgagccgggcctcttgtacgtgtaccgcgagatcgagatgcccgtatcgctcgtgctgcgcaagatggagcgcacgggtgtgctgatcgacgatgcgcgcctgcaggcgcagagcaccgaaatcgcgacgcgcctgatcgagctcgaagcgcaggcatacgaactggcgggcggcgaattcaatctcggctcgccgaagcagatcgggcagatcttcttcgaaaagctgcagttgccggtcgtgaaaaagacgccgagcggcgcgccgtcgaccgacgaagaagtgctgcagaagctggcagaggactacccgctgccgaagctgctgctcgagcatcgcgggctgtcgaagctgaagtcgacctataccgacaagctgccgcgcatggtgaacccttcaacggggcgcgtgcacacgaactacgcgcaggccgtcgcggtcacgggccgcctggcatcgaacgatccgaatcttcagaacattccggtgcgcacggccgaggggcggcggatccgcgaggcgttcatcgcgtcgccgggacaccggatcgtgtcggccgattattcgcagatcgaactgcggatcatggcgcacatctcgggcgacgcgtcgctgctgcgcgcgttctcgcagggcgaggacatccaccgcgcgacggccgccgaggtgttcggcgtgacgccgctggaggtcaattccgatcagcgccgcattgcgaaggtgatcaacttcgggctcatctacgggatgagcgcgttcgggctcgcgtcgaacctcggcatcacgcgcgatgcggcgaagctctatatcgaccgctatttcgcccgctacccgggtgtcgcgcagtacatggaagacacgcgctcggttgcgaaggagaagggttacgtcgaaaccgttttcggccgccggctgtggctgcccgagatcaatggcggcaacggcccgcgccgccaggcggcggagcgcgcggcaatcaatgcgccgatgcagggcacggcggccgacctgatcaagctgtcgatgatcgcggtggacgactggctcacgcgcgacaagcttgcgtcgcggatgatcatgcaggtgcacgatgaactggtgctcgaggtacccgacggcgagctgtcgctggtgcgcgagaaactgccggaaatgatgtgcggcgtagcgaagctgaaggtgccgctggtggccgaagtgggtgccggcgcgaactgggaagaggcacactgac

SEQ ID NO: 256681 - DNA, 1213 bp, Unknown
  Bacterial polypeptide expressing nucleotide sequence isolated from the Sargasso Sea
tcaatttctgtaaaagaaaatgaagggtgttacattcctatagggcactcatataaagattgtcctgagcagctttccctagaccgtattcaaaaaaaactgggacctgctatagaaaaaaatcaaaaaaaagctgttggccagaatttaaagtttgatattccaattttatctcgacatggcataaatctctctgagtttttagcagatacaatgctcatgtcatatgtgctaaatagcaccgccactcgccatggaatggataggctcgcagagtattatcttaactacacaactacaaaatatagtgatgtaacagggactgcctctaagcaaattagttttgcagaggtacaaattgatgttgcaacagattatgcagctgaggatgctgacataacgctaagacttttcaatactttatctgttttattaaaagataaaccaattcaagagaaattattaaaagaaattgaatatcctcttgtgcatgtactttcaagagtcgagcaaaatggagcaaaaatagataaaaataaacttggaaatcattcgaaagaacttggagaaaaaattgcagacctctctgcccaagcttttaagatagctggagaggaatttaatcttgattccccaaaacaactcctagaaattttatataaaaagcagggattaccagtattgagaaaaacaccaaaaggacaaccgtctaccaatgaagagacacttcaaaggctatcagaggaatatgaactgccgaagataattctacaatatagaacattggcaaaactaaaatctacttatactgatagcttaataaatattgagaatcctaaaacacaaaggattcacacctcatatcagcaagctataacgtcaacaggaaggctttcttctacagagcctaacttacaaaatattcctattaaaaccgctgaaggcaggagaataagagaagcttttgttccagaaaaaggcaacacacttatttctgctgattattctcaaatagaactaaggataatggcacatttatcagaagataaaaatcttacaaatgcttttaataataatattgatgttcattcttcaaccgctgcagaggtttttggcgtagcaattgaagaggtaaataaagatcaaagaaggagcgccaaagctataaattttggtttaatgtacggcatgtctgctttggactcacaagaca

SEQ ID NO: 256682 - DNA, 1399 bp, Unknown
  Bacterial polypeptide expressing nucleotide sequence isolated from the Sargasso Sea
accataaaatgtgatgtcgaaatggattcaaacatctcagatttaaccataggtgaatcaaatgaaggacttttgtatgagcaactcagtgatttgggtttgcatggactgatcaagcaatttgaaatcgagccatcagaaaaagaatcagctgctgataaaaactatcaaacgataagaacagagaaagagttggatgaattgatgggtttgatcaatcaggctgactatgtttcatttgatacagaaacaacaagcttagattatatgcttgcagaattggtgggcatttcaattgcattgaaaccaaacgaggctttttatataccaatcaatcacaactatgaaggcgcagaaaaacagctggagcaggattttgtattggaagctttaaaacccttcttggaatcagatgaaattccaaagattggacataatctgaaatatgaccgacacatccttcaaaatgcaggcattgatttgaaaggaacacttttggatacaatgcttttttcttatgtgaataacagcaccatcacacgacataatttagatgccgtttcaaagagatacttgaatataaaccccacttcttatgaagatgttgctggtaaaggggcaaaacaaattcctttctcagaggtatctatagacgtggcatctgattatgcgtctgaagacgcagacatttctctgaagctctatgagcatattgaaccattggttcaaaaggaagcaaaattggcaaaactctattctgagattgagggcccactgatttatacactgggcgatattgaaagaaacggtgttttgattgattcagaaaaactgagtcaacaaagcaaagagcttgaggccaagattttgaaactggaaagcaaggttcaaaaaaatgcaggtgaggactttaatctcggctcaccgaagcaacttcaagaaattctctatgaaaagctcggtttgcctgtgattaaaaaaacaccaaaaggccaaccctcaacttcagaagctgtgcttcaggaactttcaatcgatttcccaatcgttcacgatattctcagttatcgtgcgatttcaaagctgaaatccacctatactgacaaattgcctaaaatgatcaattccaatacaggcagagtgcatacttcatatcatcaagctgtgactgctactgggagactgtcatcctcagatcccaatctacaaaatatccctatcagatcggaagagggtcgaagaataagggaagcattcattgcgcctgagggatataagattttggctgcagattattcacaaatcgaactcaggatcatggctcatctctcgaaagatcaaggcttaatggatgcttttgcaaaaggccaagacatccatcaggcaacagctgcagaga

SEQ ID NO: 256683 - DNA, 1102 bp, Unknown
  Bacterial polypeptide expressing nucleotide sequence isolated from the Sargasso Sea
atgcgaaaaattatccacgtcgacatggattgtttttacgccgcagttgaaatgcgcgacaacccagccttgcgcgatattcccattgcgataggcggcagtgccgaccgtcgaggggttatttctacctgtaactatcccgcccgtaaatttggtgtgcgctcagctatggctacagcgtatgctttaaagttatgcccaaacttgaccctcgtaaaagggcgcatggatgtgtacgctgtcgagtcgcaaaaaatacgtaagatatttgctgattataccgacctcattgagcctttatcattagatgaagcctacctagacgtgactaacagtgaattttgcggtggcagcgccacgttaattgccgaagaaatacgcgagcgcattaaaaatgaacttgggcttacagcttcagcaggtgttgcgccttgtaagtttgtggctaaagtggcgagcgatgaaaataagcccgatggaatttgtgttattactcctgataagctcgatgagtttgtacgcgaaatgccactaaagaaaataccgggcgtaggcaaagtcaccatgcaaaagcttcagcgtatggggcttaatacctgcgacgatgttcgccaatacccttttgagcgcattcaaaaagagctgggtaaatttggcagtgtgctgtgggagcgtgctcacggtattgatgagcgtgaactatcggtatctcgtgagcgaaagtctatcggcgtagagcgcacgctaagcgaagacattcataccttcgagcaatgcatagattttttgccgcatttatttgaaaagcttcaagagcgaatggaaaatcacaagaagcgtactggtaagccggtacgtattcgcacgcagggcgttaagcttaagtttaacgacttccaactaactacggtagagcaccgctgtgccacgcttgatgaagcgtattttcgcacgttaatgcaggaggccttcgaacgagcaacagggcggggtattcgtcttgttggcgttcacataggccttgctgccgaccaatcaacacagcaattgatgttgccttttgaaccggatttagccaataagcttcccagtactttttaag

SEQ ID NO: 256684 - DNA, 1324 bp, Unknown
  Bacterial polypeptide expressing nucleotide sequence isolated from the Sargasso Sea
gcactggaacaagcttcaccttatgctgcagaagatgctgatgtcactttacgcttgcatcaggccttatggcctatgctggaacagcattctggtttacacaaagtctttcgcgatatcgaaatgccgctagttcctattttatccgcaatggaacgtaccggggttaaaattgatggcaacttgctggcacaacaaagtctggatttagccaaacggatcagcgagatagagcaacaagcttatcagatggccgggaaagaatttaacctgtcctcgcctaagcaattacaggaaatcttatttgaacagatgggcttacctgtgttgaaaaaaacgcccacaggcacgccatccacagcagaggaagttctggctgaactggcgcacgattacgagtttccaaaacttataacagaacaccggggcctgagtaagcttaaatcgacctacaccgataaactcccgttatctgttaatccagtcacaggccgggtacatacttcttaccatcaggctgtggctgctacgggccgcttaagctcgactgagcccaacttgcaaaatatccccatccgcagcgaagaaggccgtcgtattcgtcaggcgtttattgctgagcctggcaaaactattctggccatcgactattcgcaaattgaattacgcattatggcgcatttatcacgtgaccctgctctgctcaatgcttttgctcaaggcaaagatattcacagagccacagctgctgaagtctttggtgtagcgctggaccaggtcagtgcagaacaacgccgtcgtgctaaagcggtgaacttcggtctgatttatggcatgtcagcttttggtctggcacgccagttaggtatcagtcggggcgaagctcagcagtatgttgacctttattttgagcgtttccctggcgtgttgggttatatggaacgtacccgtacccaggcgcacgaacaaggttatgttgaaactctatttggccgtcgtttgtatctgccggaaattaatgccaaaaacatggcgcggaaaaaaggcgctgagcgcgccgctatcaatgcgcctatgcaaggcactgcggccgatattattaagatggcgatgatcaaagtagcagcctggcaagacaaacaacctgagggtgttgttgcaatgattatgcaggtacacgatgaactggtgtttgaagtgaaaaccgaagagctggaacgggtcagtagggaactggttgagattatgcaaactgcagcatcacttgatgtacctttgctagcagaagctggttctggcccgaactgggatcaagcccattaaa

SEQ ID NO: 256685 - DNA, 1012 bp, Unknown
  Bacterial polypeptide expressing nucleotide sequence isolated from the Sargasso Sea
tatgaaatttaccgttgaacgtgaacatttattaaaaccgcttcagcaggtcagcggcccgctgggtggacgtcctacactgccgatcctcggaaacctgctgctgcaggttgctgacggcaccctttcgcttaccggtaccgatctcgaaatggagatggtggcgcgcgtggcgctgatccagcctcatgaacctggtgcgaccaccgtaccggcgcgtaaattcttcgatatttgccgtggattaccagaaggggcggaaattgccgttcaactggaaggcgaccgtatgctggtgcgttctggccgcagccgtttctcgctgtctacgctgcctgccgccgacttcccgaatctggacgactggcagagcgaagtcgaattcaccctgccacaggcgacaatgaagcgcctgattgaagccacgcagttttcgatggcgcatcaggacgtgcgttactacttaaacggcatgctgtttgaaaccgaaggggaagagttgcgtaccgtggcgaccgacggtcaccgcctggcggtctgttcaatgcctgtcggtcagccgttgcctagccattcggtgatcgtaccgcgtaaaggtgtgattgaactgatgcgtatgctcgacggcggcgataacccgctgcgcgtgcagattggcagcaacaatattcgtgcgcacgttggtgacttcatctttacttccaagctggttgacggtcgtttcccggattatcgccgcgtattgccgaagaatccggacaaacatctggaagccggttgcgatatcctcaaacaggcgtttgcgcgtgcggcgattctctccaacgagaaattccgtggcgtgcgtctgtatgtcagcgaaaaccagctcaaaatcactgccaacaacccggagcaggaagaagcagaagaaattctggatgtttcctatcctggtactgaactggaaatcggctttaacgttagctacgtactggacgttctgaacgcgctgaagtgcgaaaacgtacgt

SEQ ID NO: 256686 - DNA, 1009 bp, Unknown
  Bacterial polypeptide expressing nucleotide sequence isolated from the Sargasso Sea
gatggaagcagaggggataaaaatagatactagctatctaaaaaaactcgataaagaatttgaaaatgacttagaaaaattaaaaaaagaaatttttaataaatgtggtgaagaatttaatttaaactcacccaaacaacttggtgaaattctatttgataagttaaagttagttagcaagccaaaaaaaactaaaactggtcaatattctacttcagaggaagttctctcaagtttagctaatgatcataggattatagaaaatattcttgaatggagatctcttgataaacttcaaaatacttatgtgaaatctttacctaacgaggtaagtaatttaacgaatagagtacatagtagttttaatcaaactgtaaccacaactggaagactctcaagcaataatcctaatttgcaaaacattccaataagaactgacaacggacagaaaatcagaaaggcttttatacctaggaatgatgattacataattatggcagctgattattcacaaattgaattaagagtaattgcatctataagtaatgaagaaaatatgattgatgcatttgttaataatcaagatattcatacaatgactgcctccaaaatatataatgttgatccagaaaatgtaagtcgtgaacaaaggggaaatgcaaaaacagtaaattttggaattatttatggagtctcagcatttggacttagccaacagactgatttaaatagatcagagtctaaacaaatgatagataactatttcttaaactatcctggtttaaaaaaatatatgtctgatcagattgattttgcaagaaataatggatatgttgaaactataatgggaaggagaagatatctacagaatataaattctcaaaataatatgctcagaagcggtgctgaaagaaatgcgattaatgcacctatacagggtagtgcagctgatattatcaaaattgcgatgataaatattaattctgagtttaaaaaaccagtcctttaa

SEQ ID NO: 256687 - DNA, 1075 bp, Unknown
  Bacterial polypeptide expressing nucleotide sequence isolated from the Sargasso Sea
atgaatataaataacctgccaaataggaagattatccatgttgatatggattgcttttatgcttcagttgaaataagagatcatccggaatatagaaacaaacccgttgctgttgctggaagctcagaaaatcgaggtgttgtaacgacctgtaattatattgctagaaaatatggagtcagatcagcaatgccatcaattacagcaaaaaagctatgccctaaaatagtttttcttccagtgaacatgcaaaaatatagaactacttctgaagaaatccataaaatttataaatgctatacaaaaataattgaacctgtgtctcttgatgaggcttatttagatgttactgaatctaagtattgtgatggtaatccagctctaatggctcaacaaataagaaataaaatttatgaagatctaaagattacagcttcagctggaattgcgtctaataaatttctagctaagattgcaagtgactggaataaacctaatggtcaattcttaattgctgatgatgaaatacaagattttgttttaaagattccagtaagacatattcatggagttggcaaaaaaacagaagaacttttaaaacagagaaaaattaatacctgcgcagaccttcaaagaatatctaaatatgatttaataaatttacttggtaaatatggtgagactcttttttatttatgtcgtggaattgatgatagaattgttgaacccaatagaattagaaaaagcttaagtgttgaggatacttatcggtttgatttaaaaactcatgagtcttgtataaaagaattagagatcttatataaagaattaatcaaaagactgaatggcaattcatataataataagataataaaatcttgttttattaaaataaaatataatgattttaaattgactaactcacaggcaccatgtcaatacttacaattcaaaatatttttagaccttttactcaaaaatttagtcaataataagaaatcaataagactattaggattaggagtgaattttgataattctgtaaatgaccaattaaatcttgatatcacataaa

SEQ ID NO: 256688 - DNA, 1462 bp, Unknown
  Bacterial polypeptide expressing nucleotide sequence isolated from the Sargasso Sea
catgatgatgagctatgttttggatgcttcagcgacgagacataatctagatgctttgtcttcctattatctaaattataaaacctctacttttgaagatgtagctggcaaaggtgtaaagcaaattaccttcgataaggtccctattgaggcagctacaaattatgcggcagaggatgcagatataactctgcgactgtacgaagaattaaatcctagattagaaggcgagacctctctaaataaactcaatgatgaaatagagattcccttgatagaagtattatccgaaatggaacaaaacggcgctatattaaattcaaagattcttaactctcaatctaaagacctagaaggtagaataaagaagttagaagaaaaggcttatcaaatagcaggtgaggaattcaatctcggctccactaaacaactcagagaaatattctttgaaaaattaaagtacagaatcataaagaaaacacccggaggtcaaccatcaacagacgaaaaggtgcttgctgaacttgctgaggaatatgaattgcccaaggttctcttggaacacagaacattaagcaaacttaaatcgacttataccgataagctacctaatcaggtatctctatccaccggtaaagtgcatacatcatttcatcaagctgtaactacaactgggagattatcttcatcagatcctaatttacaaaatattccaataagaacagaagatggaaggcgaatcaggcaggcctttgaaccctcaaaaggtaataagtttatatcagctgactattctcaaatagagcttcgtgtgatggctcacatgtcgaaagatgaaggacttctagaagccttccgagaaggacaggatgttcatagcaagaccgcaagtgaagtattcgatgtcggtatcaaagacgtaacatcagatcttcgcagaaatgctaaagcaattaattttggtttaatctatgggatatctgcttttggtctaggaaaacagctaggtatttctagaaatttagccgccgaatatatggcgatgtactttgaaaaatacccagatgttaagaaatatatggaatcaactaaagaatttgccagtcagaatggttatgtagaaacattgtttggtagaagactttacctaagagatattaatgcaaccaatgcaatgcgaaggcaagcttcagaacgggcagctataaatgcacccgtgcaaggaactgctgcagacataatgaaaatagccatgataaatatgcataaggctataaaaacacaaaaaagtaaggcaaaactaattcttcaagttcatgatgaactaatattagacactccaaaagatgaaatagataagatcgtaagtctagtaacggattctatgatgggagcagcaaatctagatgtcccactagaaatagatattggaattggagataactgggatcaggcgcattga

SEQ ID NO: 256689 - DNA, 1380 bp, Unknown
  Bacterial polypeptide expressing nucleotide sequence isolated from the Sargasso Sea
attccaagtgaaattgaaaacacacaaactaaaattgaaaacaaacctaaatataaacttatcaatacaaaaaaagattttgaaaaaattatacaagaaattgaactaaaaggtatttgtgcaattgatacagaaacaaattctcttaatattgaaagtgcattattagtaggtatttctttgtgttacgaagaacaaacatcatattatatccccattaatcatacaagtattgatggatcaaaaaaaatagaaaatcaattagaagaaaaatatgtaattaatcaaattcataaaattagtaacaatgatgcaattttaaagattggtcaaaacataaaatatgacataagaattttaaacaaatacggagtttattttaaatcaatagctgataccatgctaatatcttattcaatagataatggtatttataagcataacttagatgatttatcttttaatcatttaaatcataatacaattaagtacaaagacgtagttggtactggaaaaaatgaaataacatttgacaaagtgtctattgaaagtgcagttaattatgcagctgaggactctttattaacttataaactttttttaaatctttatcctaggctaattaaagaaagggcaaattttgtttatcaaaatatcgatctacctctagtagaagttttatcaaaaattgaacaaaatggaattgaagttaataaaaattttttgaccaaattaagcaaagattttgaaaaagaaagcaaaaaactagaactaaatatttataaattatcaaatgaggaattcaatataggttcccccaaacaattaggtgaaatattatttattaatcttaaaataccaggtggtaaaaaaacaaaatctgggacctattcaaccgactcctcaactctcaatgctttagcttcagatggttatgaagtcgctaaattagttcttgagtggcgagagttaactaaacttaagtcaacttacacagatgctttatttaggttaacagacagtaaaagtagagttcatacctcctttggcttagcaaataccttaactggaagattaagctcaacagatccaaatcttcaaaatattccaataagaacagaaaatggaaaaaaaattagaacagcatttatcagtaaagaaggcagcaaactattaagttttgattattctcaaatagagttaagattagccgcagaaatttctggagataaaaattttattaaagcctttaaaaataatgaagatattcacgcttcaactgcaagggaaatatttaatttgaaagataaccaaataaatcaagatttcagaagaaaggctaaagctattaattttggaatattatatggaatcagtcct

SEQ ID NO: 256690 - DNA, 817 bp, Unknown
  Bacterial polypeptide expressing nucleotide sequence isolated from the Sargasso Sea
ggccacaatttcaacaggaagattagcttcctctgatccaaatcttcaaaatattcctatccgaagtgatgatggtagaatgataagaaaagcctttattcctgaaaaagggaatgtattaataagctctgactacagtcaaattgaacttaggttaattgctcatattgctgacgagaaaaatttgattaatgcctttcttgatgaaattgatattcattcatctacggcctctgaagtttttaatattccactaaatgatatgacacctgatattagaagaaatgcaaaagctattaactttggtataatttatggtatttcagcctttgggttggcaaagcaacttaatattagccgcactgaagcatctgaatttattaaagcttattttaagaaatatccttcaataagagcttatatggatgaaacaaagaagttcgcaaatgaaaatggttttgtaaaaactctcttaggaagaaaatgccttgttgaggaaattaatagcaagaatgcagccacaagatcatttatggaaagagctgccattaatgcgcctattcagggatctgctgcagatataatcaagagagcaatgattattttaggtaatcataaagaattggcaaaattagaaacgaaaatgcttttacaggtacatgatgaattaatcttcgaaactaaaaaagaaaattgtgaagaatctatgagaattattaaaaaggaaatggaaagcgctaacttacctattcttaatttaaatgtaccattaatagcagatactaattttggcaataattgggatgaagcacattaa

SEQ ID NO: 256691 - DNA, 2090 bp, Unknown
  Bacterial polypeptide expressing nucleotide sequence isolated from the Sargasso Sea
ttcttcagataaagacttaatgcagcttgttagcaaaaaagtaactatgcttgatccaataaaaaataaaaaaatagaaatgaaggatgtagaggaaaaatttggagtgaaaccagataaggttatttttattcaagctctaacaggtgataaagtagataatattccaggtgctcctggtattggtcccaaaactgcgtctcaattaataaatgatttcaccgatattgatggtttactcaataatcttgacaaaattaaacaggaaaaaagaagaaatatattaagagacgctgaaagtgatattcgaatgagtctaaagttagtaactctaaaaaatgatgtcaaaatttctgagaatattaacaaaataagaacttacaatgaattaaaaaaagaaggtaaccatatttttaaatttcttaaggatcaaggctttagatcaacatctgaaagactaaaatctaattcttttatatctagtgataatcatgaagttattcaaaaagaaacagaaccaaagtaccatttaattaattcaaagaaaaattttgaaaagattttaaacgaaattgaaaaacaaggtatttgtgctattgatactgaaactaactcactcaatatagaaaaagctaaattagttggtatatcaatatgttatagtaaaaatacctcttattatattcctattaatcataccacttcagatggctcaaaaaaaattgataatcagttagaggaaaattatgtaattaatcatattaataaaatttgtaaaaatgaatcaatcttaaaaattggccaaaacattaaatatgatattagaattttaaataaatatggagtaaagtttaattctattgcagacacaatgttaatctcctactcaatcgataatgggatttataagcacaatttagacgatctctcatttaatcacttaaatcatacaacaataaaatataaagaagttgttggtacaggaaaaaatgaaattacttttgataaagtaactatagataatgcaattaattatgctgctgaagattctttattaacattcaggctttttcaaaatctttatcctcgtttaataaaagaaaaggcaaattttgtttataaaaacattgatttgcctcttgtagaggttttatcttcaattgaagcaaatggcatagaggtaaataaaaagtttctaacaagtctaagtgatgaatttgaaaacgaaagtaaaaaacttgaaaaaaatatttataaactttcaaatgaagagttcaatattggctcacctaaacaattaggagagatattatttattaatcttaaaatacctggtggtaaaaaaacaaaatcaggcacatattccactgactcttcaactttaaataatttagcctcagatggatttgaaattgcacaactcgttcttgactggagggaattaacaaagcttaaatcaacttatacagatgctttatttagactaactgatggtaaaagtagggttcatacatcatttggtttagctaatactttaacaggtcgattaagttctacagatccaaaccttcaaaatatcccaattagaactgaaaatggaaaaaaaataagaacagcttttgttagtggaaaagggaaaaaattagttagttttgattattctcaaatagagcttagattagctgcagaaatttctagtgataaaaattttattagagcatttaaaaataatgaagatattcacgcatcaactgctaaagaaatatttaatttaaacgatagtcaaataaataatgattatagaagaaaagcaaaagcaattaactttggtattctatatggaattagcccatacggtttagctaaacaacttaatatttctaatacagaagcaaaagattatattaatgagtattttattaaatatccaaaaattaaaaaatatatggatcatcaaattgattttgcaaaaacaaatcaatatgttgaaacaatttttaaaagaaaaattaatattaagggaattactgataaaaattttgctgttagaggttttgcagaaagacaagctattaatgcaccaattcaag

SEQ ID NO: 256692 - DNA, 1495 bp, Unknown
  Bacterial polypeptide expressing nucleotide sequence isolated from the Sargasso Sea
agactaccttcttataaccaggagaagcatgggttaagtgaaattagttttagattatttggatttaagcccccttcatttaaagaaacagttgggaaaaataaagacttttcatttgttgatattaatgaagcaagtatttactgcggttatgatgtatttcttacttttaagattgtcaaaatctttaaagaaagattttcaacagaaaaaaatgaattaatcaaattgttcgaagaaatcgagctgcccttagagccggtattgtctcaaatggaaatgaatggaataaccattgacatcccttatttagataaactctcaaaagaactaaaaagtaccttagaagatattgaaagcaaagtttatgaattagcagaagagacttttaatctatcttcaccaaaacaacttggtgagatcttgtttgaaaaattaaatttggacaaaaaaaaatcacggaaaacaaaaacaggatggagcacagacgcagtagttcttgaaagattagtagacgaacatgaaataatccaacatttaataaaacacagaactcttagcaaattacttagcacctatattgatgctcttccaaatcttataaacgaaaagacaggaagagttcatacaaactttaatcaagctgctacagcgacaggaagactaagtagtagtaatcctaatcttcaaaatatcccggttaggactgaatttagtaggagaatcagaaaagcattcttgcctgaaaaaaattggaaacttttatcagctgattattctcagatcgaattaagaatacttgctcacttagcggatgaagaaatactaattaatgcgtttcataaaaatgatgacattcattctttgactgcaagattaattttcgagaaagaagaaatatcatcagaagaaaggagagttgggaaaacaataaatttcggagttatctatggtatgggtataaaaaagtttgctcgttcaacaggagtaagtactccagaggctaaagaattcctaataaaatacaaagaaagatattcaaaaattttcaaatttcttgaacttcaagaaaggttagccttatcaaatggttatgtaaaaacaatttttggtcgaaaaagagaatttaagtttgataaaaatggacttggaagattaatagggaaagatccttacgaaattgacctgcaatctgcaagaagagctggcatggaagcacagtcattaagagccgcagcaaatgccccaattcagggttcaagtgcagacatcattaaaattgcaatggttcaactaaataagaaattcatagaaatgaatgttcccgcaaaaatgcttttacaagtacatgatgaattattgtttgaagttgaaccagattctttggaaattacgacgaaattagtaaagaagactatggaagattgtgtaaaattaaatgtgcctcttttagttgatattggtattggagacaattggatggagacaaaataaa

SEQ ID NO: 256693 - DNA, 1105 bp, Unknown
  Bacterial polypeptide expressing nucleotide sequence isolated from the Sargasso Sea
atgcagctcgaaattagccgtgaggccctgttacgtcctctgcaactggtgtccggtgccctcggtggccggccgaccctgccaatcctcggcaacgtgctgctggatgtgagcaacggtctgctgtcactgaccgggaccgacctcgaagtggagatgatcggtcaggtctatctcaacagcgacagtcaggatggcagaaccacggtgccggcgcgcaagctgctggacatctgccgcggtctgccggagggggcggacattcgcctcaataccgaaggcgagcgcctgatcatccgttccggccgctcccgcttcaacctgtcgaccctgccggccaccgaatacccgaacatcgaggattgggaatccgtgctcgagttcgacatcggccagctggagctgaaaaagctcatcgatgccacccagttctccatggccagccaggacgtgcgttactacctgaacggcatgctgttcgagagcgagggccacggcctgcgtactgtggcgaccgacggtcaccggctggcgacctgccgccgcgaggtggtaacggaatcgctgcccgatcatcaggtcatcctgccgcgcaagggcgtgctggaactggtgcgcctgctggaagcggaagacaagccggtgcggctgcagatcggccgcagcaacctgcgtgccgccctcgatggcttcatcttcacctccaagctggtggacggccgcttcccggactggcgccgcgtcattccgcgcaacagcgacaaggccctgatcgccggtcgtgaggatctgcgccaggcctttgcccgtgccgccattctctccaacgagaaattccgtggggtgcgtctcaatctgcaggaaaacctgctgcgcatcaccgccaacaacccggaacaggaagaagccgaagagctgcttgacgtacaatacgaagccggtgagatggagattggtttcaacgtctcttatgtgctggacgtgctgaatacgttaaaatgtgaccaaatccggatcagcctgagcgattccatcagcagcgccattattgaggattttgacagtcaggatgctcagtacgtggtaatgccgatgcggatctagt

SEQ ID NO: 256694 - DNA, 868 bp, Unknown
  Bacterial polypeptide expressing nucleotide sequence isolated from the Sargasso Sea
cgagaactgcctgctctggtgaatcccgatacgggacgggtgcatacctcctatcaccaggcagcggtggcgaccggacgcctctcctccagtgacccgaacctgcagaacatccccatccgcacggcagagggcaggcgcatccgcgaagcctttgttcccgcgccagggagccagctcgttgcggcggattattcccagatcgaactgcggatcatggcccacctgtctgctgatgaaggcctactgggcgcttttgaaaaaggagaggatgtacaccgagcgacagctgcggaagtttttggcacgccggtcgaggaggtttcgggtgaccagcggcgcagcgccaaggccatcaattttggactgatttacggcatgtctgcctttggtctcgcgcgtcagttgggcattgagcgtggtcaggcgcaggaatatattgatctttatttcgagcgatatccgggtgtccgtgcgtttatggacgagatcagggcccaggtgcgggaacagcgttttgtggaaacggttttcggccgccgtcttttcctggccgatatcagctccagcaaccacgcgcgcaggcaggcggcagagcgtgctgcgatcaatgcaccgatgcagggaacagcagcggatctcatcaaacttgcgatgctggccgtggaccagtggctcgttgacgatcagtgcggcgcccgcatcatcatgcaggtgcacgatgagttggttctggaagtgcccgagtcagaggcggatcgcgtctcgcaagcggtgacccagatgatgtcctcggtggcacagcttgctgtgccgctgaaagtggatgttggcagcggcgtcaactgggcgcaggcgcacagctgac

SEQ ID NO: 256695 - DNA, 2764 bp, Unknown
  Bacterial polypeptide expressing nucleotide sequence isolated from the Sargasso Sea
atgagttcaaaaaaaaaaacagatcatttttatttagtggatggatctggatatatttttcgcgcttattatgctctcccacctctttcaagaaaaagtgacggtcttccaactggagcggttagtggtttctgttccatgctttttaaattattagaggatgctagatcagacgactccaaaaataaaccaacacattttgcagtaatattcgactctgcaagaaaaaattttagaaatgaaatttatagcgaatataaagctaatcgtgctgaagcaccagatgatttagctcctcaatttgaatatataagaaaatcagttgaagcttttaatctaccgtctatagaacttcttaattacgaggcagatgatttaatagctacctatgcaaaaaaaattattgagtctggagcaaaagttacagtaatttcttctgataaagacctaatgcaactagtctccactaagataagattattcgatccaatgaaaagtagagttattggagaaaaagaagttattgaaaaatttggggttaaacctaatcaagtgatagatgttcaatctttggctggagactcctctgacaatattccaggtgtacctggaataggagtcaaaactgcagcagaactaatcaataaatacaaaaacttagacacccttcttaaaaaagcttctgaaattaaacaaaacaaaagaagagaaacacttattgctaataaagataaagcgttattgagtaaacaactagtaactctaaaagatgatgtcccaatcaaaaataacccaagtgagtttttaatcaaaaaaatcaataaagataaactttataacttcctaagagagatggaatttaatagattattaagccaagctattagtttttatggtgaacctggagaaaaaaattttagtcaggacaaagtatcaaaaccatcaaaaataaatacaaaacaatatcaaaaaattacaaaagaaaatgacttaaataaattaattattgatttgaataaaaaaagtattatttcagttgatactgaaacttcttctctagatcctcaggtcgcagagttaattggtatttctttaagttatgccaaaaatatttctttttacattccggttggccataaaaatattaaaagtttaaataaagattttgttataaaaaaactcaagccaattttggaagatccaagtataaaaaaagttggtcaaaatattaaatatgatttcattatattaaaaaaatatggagtagaattaaactctgtcgaagatacaatgttactctcttacactttggatgcaggaaataatcgtcataatatggatactttgtcggaattacatcttaaccataaaacaatttcttacaaagatttggttggctctggaaaaaaacaattaaaattttcagaagtagatatagataaagccacagagtatgcagcagaggatgctgatgtgactttaagattatatgaaattttgtcagaaagagtttcagacgaaaagcttagtcaaatttatgaagcttttgaaaaaccaatgattaagatattatctaaactagagacttatgggataaaagtagatgataactacctaaaagaactatcaaaaaaatttgaaaaaagattagaaaaaatagaaaaagaaatttttaaaatttcaggaaaagaatttaatattgggtcgcccaaacaacttggtgaaataatttacaacgaattaaaaatagcaaaattgaaaaaaactaaaaaaggtagtttagccactagcgctaaaatattagaggatctcgcgttaactggtcaaaaatttcctaatttaatattagagtggagacaagtatctaaacttaaaagtacctatactgatgcgcttcaagatcatattaataaagataccaaaagagttcatacatcattccttttagcagcgactaacactggtagattggcctcaagcgatccaaacttacaaaatataccaattaaaacttcagacggaaaagaaattagaaaagcttttatagcagaaaaaaataatgttctaatttctgctgattacaatcaaatagagatgaggatacttgctgatatggctgatgttaaagagctaaaaaaagcattcaaacaaaatcaggatattcacaaacttactgctagccaagtttttggtgtgccgattaacaaaatttctgaagatcaaagaaggaaagcaaaggcaataaactttggtatcatatacggtataactcaatatggtttagctaagcaaatatcagtttcaaatgaagaggcccaagaatttattaattcttattttaaaaaatttcctgaaataaaggattatatgaactctacaattaaaagctgtagaaaacttggttatgtttcaaatatttttggaagaagaattcatttgagaggtataaatgataaaaactttagtgtgcgaagttttcaagaaagagcagcaattaacgctcctatccaaggatctgccgctgatataattagattagcaatgattaaaatcgacaatattttagaggaaaaaaaaatagcaaaaatgttacttcaaatacacgatgagttaatatttgaatgtttaaaaaaagatgaaaataatgttaaaaaattaattcaaaatgctatggtttcagtatcaagctctgaataccataaattctcaatacccttagaggtaggagtaaactcagggaataattggggagaggctcattaac

SEQ ID NO: 256696 - DNA, 2770 bp, Unknown
  Bacterial polypeptide expressing nucleotide sequence isolated from the Sargasso Sea
atgccgaccatagccaataacccacttgtccttgtggatggatcttcttatttatatcgcgcctattatgcgcctcctcacctgacaaactcaaagggcgaagctactggtgctgtttatggcgtagtgaatatgctacgcagcttattaagccgttatcaacctagccatattgctgtggtgttcgacgctaagggcaaaaccttccgcaatgacttatatgaagaatacaaagcacatcgcccacctatgccggatgacctgcgttcacaaattgaaccactacaccgtattatccgcgccttaggcttgcccttaatctccattccgggtgttgaggcggacgatgttatcggcactatcgctcgccaagcgagccgcgaaaaccgcgccgtactgatcagcactggcgataaagatatggcgcagctggttgatgaaaatattacgctgatcaataccatgacagataccatcatgggcccagaagaggttgcggctaaatatggtgttggcccagacagaattatcgatttcttggcactgatgggtgataaggcagataacattcccggtttacccggtgtaggcgaaaaaaccgcattagccatgctcacaggggcgggcagtgtcgccaatttgcttgcagagcccgaaaaagtcaccgaattaggctttcggggcgcaaaaaccatggcggcgaagatcatcgataatgccgacatgctaaagctgtcctatgagcttgccaccattaaaaccgatgttgagctcgaacaggattggcacgaactcgaagccaaacctgcagacagggatgagctgatcaaatgctatggtgaaatggaatttaaacgctggcttgccgaagtcttagacaataaggcgccaacgacgatcgcggcaaaagtcgaaacgaccgaaacccaagaagaatcaacgcccagcgtcacgattaaaacccaatacgataccattctgaccgaagctcaactcgatgagtggattgccaaactcaaacaagcgccattaatggccgtggataccgaaaccaccagcctagactatatggttgcggaattggttggtctgtcctttgccgttgaagctggaaaagcagcctatctgcccttagcccacgattatgttggcgcgcctgcgcaattagacaagcagactacgctcgaaaaactgcgcccgctactcgaagatgccaagatcaaaaaagttggtcaaaacctgaaatatgacatcagcgtattggccaatgccggcataaaactccaaggcgtggtattcgacactatgctcgaatcctatgtatttaactcagtcgcctcacgccatgatatggatgggctggcgcttaaatacctaggccataaaaatatcgcctttgaagatatcgcgggtaaaggcgctaaacagctgaccttcaatcaaattccgttggaaacagcagcgccctatgcggcggaagatgccgatattaccctgcgtcttcatcaacatttgtggccaagactcgaaaaagaaactgaattagcctcggtctttaccgatattgaactgccgctgatccaaatactgtccgatattgagcgccaaggcgtgtttatcgatagtatgttgctcggccaacagagtgatgaactggcccgtaaaatcgatgagttagaaacaaaagcttatgatattgctggtgaaaaattcaatttaagctcaccaaagcaactgcaagtgctgttttttgaaaagctgggttatccggtcatcaaaaagacccctaagggcgcaccctctaccgcggaagaagtactggttgagttggcgctggatttccctctgcctaaagtgatccttgagcatagaagcctgaccaagctaaagagtacttacaccgacaagctccctctaatggtgaatgcaaaaaccggccgggtacacacaagctaccatcaggccaacgcggcaacggggcgtttatcctcgagcgaaccaaacctacagaatattcctatccgcacagaggaaggtcgtcgaattcgccaagcctttattgcgccgcagggacgtaagattttggctgccgactattcgcagattgaattacggatcatggcgcatttatcccaagatgcaggcttactcaaagccttcgccgaagggaaagacattcacagagccaccgccgccgaagtatttggcaccgactttgacagtgtcacctcggagcaacgtcgccgcgccaaagccgttaactttggccttatctatggcatgtccgcctttggattggcgcgtcagctcgacattccccgtaatgaagcgcaaacctacatcgacacttacttcgcccgctatccaggcgtattaaggtatatggaagaaacacgagccagtgcagcagaacttggctatgtctcaacgctatttggtcgccgtttgtatttacccgaaattcgcgatcgtaatgcaatgcgccgtcaagcagcagaaagggccgcgattaacgccccaatgcaaggcaccgccgcggatattattaaaaaagccatgatcagcattgccgattggataaaaagcgatacccaaggtgaaatcgccatgattatgcaagtccacgacgaattagtgttcgaagtcgatgccgataaagccgaaactctcaagctcaaggtgtgtgagctcatggccaaagcggccaatctggacgtggaacttctggcggaagccggtattggtgataactgggatcaagcccactagc

SEQ ID NO: 256697 - DNA, 2163 bp, Unknown
  Bacterial polypeptide expressing nucleotide sequence isolated from the Sargasso Sea
agggtattggttcaatagaaaagttgtaccagcagttggatcagatagcagcactgaacttccgtggcagcaaaaccatagcagccaaaatggaagaatttaaagatcagctgaagttgtcttatcagctagccaccatcaaaacagatgtcgaattatcgttacaacccgatagcttagatatcaaaacaccggatcagactaaactggctgaactgtttgccgcctgtgaattcagacgctggttaagcgaagtattagcaggtaaagatactgcaacagcagtagcgactgcagctgccaaacagacagaagagcaagcaagtgaaacgccagccaatggcattgataccagcagctacccatgtattttaaccgaagctgattttctgcagctgttaaagcgtctgccagaagttgaactggtagcttttgataccgaaaccaccagcctggattatatgcaagccgatgtggtgggtatttctctggcattagcagccggggatgcttgttatattccgttggcgcatgactatgttggtgcacctgaacagctgaatcgtgactgggtgttagctcagttgaaggactggctggaagatgaaagcaaagccaaagtaggccagaacctgaagtacgatcaaagcgtactagcgcgccatggcataacgctgcgcggaattcgctttgacactatgcttgagtcttacattgtaaatagtgtggcctcccgccacgatatggactccttgtcactgaagtaccttggccataaaaccataagctttgaagacatcgctggtaaaggcgccaaacaaatcacctttaaccaaattgctctggaacaagcttcaccttatgcagcggaagatgcggatgtgactttgcggttacaccaaaccttatggccgatgctggaacaacattcaggcttgcagaaagtattccgtgatatcgaaatgccactggtgcctattttgtccaaaatggaacgtaccggggtaaaaattgatggcaacttgctggcgcaacaaagtctggatttagccaaacgtataggcgagattgagcaggaagcctatcagatggcgggtaaagaatttaacttgtcatctccgaagcaactacaggaaatcttatttgaacagatgggtttacctgtactgaaaaaaacacctacaggcacaccatccaccgcagaagaagtactagctgagctcgcgcttgattatgagtttccgaaacttattacggaacaccggggtttaagtaagctcaaatccacctataccgacaaactgccgttgtcagttaatccggaaacaggccgggtacatacctcttatcatcaggctgttgcagccacaggccgcttaagttccaccgagcctaacctgcaaaatattccgatccgtagtgaagaaggtcgccgtattcgtcaggcttttattgctgaagcgggtaaaaccattttggccatcgactattcacaaattgagctgcgtattatggcgcacttatcacgtgacccagctctgctgaatgcctttgcgcaaggcaaagatattcacagagccacagccgctgaagtttttggtgtagcgctggatcaggtcagttcagaacaacgccgccgcgctaaagcggtcaacttcggtcttatttatggtatgtcggcttttggtttggcgcgccagttaggcattagtaggggggaagcacagcagtatgttgatctgtacttcgaacgtttccctggcgtattggattatatggagcgcacccgcactcaggcgcacgaacaaggttatgtggaaactctgtttggccgtcgtttgtatctgcctgaaattaatgccaaaaacatggcgcgaaaaaaaggtgcagaacgagcggccatcaatgcgcctatgcagggcactgcagccgacattatcaaaatggccatgattaaagtatcagcctggcaggacaaacaacctgctggtatcgttgcaatgattatgcaggtacacgatgaactggtgtttgaagtgaaaactgaagaactggaacgggtaagttctgaactggttgaaatcatgcaatctgccgcatcactggatgtgccattacttgcagaagctggttttggtccaaactgggatcaggcgcattaaa

SEQ ID NO: 256698 - DNA, 1123 bp, Unknown
  Bacterial polypeptide expressing nucleotide sequence isolated from the Sargasso Sea
ctgtttttatatacagtattttgggtgtcggaggaatgcaaggtgcgaaaaatcattcatatcgatatggattgctattttgctgcggtggaaatgcgggattttcccgaataccgcggtaagcctttggccgtcggcggcagtcgggtgcagcgtggcgtcatcagcacttgtaattatgaggcgcgcaaatttggtgtgcgttctgccatggcgacgggctacgcattgaaattgtgtcccgatcttatcctcgttcccggtcgtatgcaggtctataaagaggtctcacagcaaattcgcgccattttctcccgatacacagagttaatcgaaccgctttccctcgatgaggcctatttagatgtcagcgattgtaagctgtttaagggctctgccactttaatcgccgaggcaattcgccgggatattttggccgaaactgggctgacggcatcggctggcgtggcgccgattaaatttctcgccaaggttgcctctgatttaaataagcccaatgggcaatgtgttattccacccgatgaagtccccgagttcgttaaaagcttatccctgcggaaaattcccggagtgggtaaggtgactgctgagaaactgtcttcgctaggcttaaatacctgcgccgatgtgcaggcttatcctaagcaagagttgattgcacgttttggtaagtttggcacagtgttagtcgagcgggcccatggcatcgatgatcgtgggatttcggtaagccgcgagcgcaaatcggtaggcgttgagaccactctcgctcaggatatttacacactggagcagtgccagcaggtgatgccgggattaatccaagagttgtccagccgtttagggagaagcgctaaggggaggcaaatccataagcaggtggttaaacttaaatttaatgattttaaacagaccacaatcgagcatcgtagtgacgaggtctccgtggtgatgttttatgagctactgagccaagcaatggcgaggcaagagggacgtggaattcggttactcggggtttcagttggccttgccgagagtaaagacacgctttcgccgctcatggtacgcgaaacgaagcagttggattttgtgttttagt

SEQ ID NO: 256699 - DNA, 1054 bp, Unknown
  Bacterial polypeptide expressing nucleotide sequence isolated from the Sargasso Sea
atgcgcaagatcattcacatcgacatggactgcttctatgccgcggtagagatgcgggacaacccggccctgcgcgaggtgccgctggccatcggcggctcggctgacaggcgcggcgtcatctcgacctgcaactatgtggcgcgccgcttcggggtgcgctccgccatgccgagcggtctggctcgcaagctctgcccgccgctggtgctcatccccggccggatggcggtctacaaggaggtttcccgccagctgcgggccatcttcctgcgctacaccgagcaggtggagccgctctccctcgatgaagcctatctcgacgtgacgatgagcccctgctgtggcggcagtgccaccctgatggcccgcgagatccgcgccgcgatcaaagccgagctggggctgaccgcctcggccggggtggcgccgaacaagtttctggccaagctggcttccgagcagcgcaagccggacggcctgtttgtgatccgcccgcaggaggtggatgagttcgtgcgccagctgccgcttggcaagttgcccggcatcggtcgcaagacagcggatcggctggagtctctcggcctttactcctgcgaagatgcccgccagctcggcaacgaggagctgcttgcccgtttcggcaagctcggggagatgctggccgggcggatctggggccatgacgagcagccggtgcaggcccagcgggtgcgcaagaccataggggtggagacgacgctcgccagcgatgtgctggatgaggccgcctgctggcaggtgctcagccagcttatccccgagctggagcagcggttctcggtcagccatggcagggagcagctgatggggcaggggatcaagctcaagttcgccgattttcagcagaccaccgtctaccggcgcggcggttaccagccggagcggtttcacgatctgctgcacgaaggcttgctgcgggcgcagggcaaacccattcggctactgggattggtggtcggcctgcccgcagccggcgaagtgaaccaacttgccctggatttagcgtgat

SEQ ID NO: 256700 - DNA, 2469 bp, Unknown
  Bacterial polypeptide expressing nucleotide sequence isolated from the Sargasso Sea
aatgtcaaagatcaactcaaattctaccttatttttaatcgacggttcaacttttatatttagagcatattttgcaatgtataaagcgtcccagagtagaggtagcgggtttacaagatctgatggtacacccacgggtgctgttatggcgttttgtaatatgatgtggaaaattataacaaatgggatagatggaatacacccgtcccatattgcggtcatttttgatactaaagagaaaacattcagaagtgatatttatccatcatacaaagctaatagagatgctcctcctgaagacttaatccctcaatttcctcttatccaacgagctgttgaggcattcaatataaagtgtatatcacaaattggatatgaggctgatgaccttattgcaacctactctaaaattgcatccgaaagagatgccgagactatcataatatctggtgataaggatcttatgcaactgatcaataaaaatgtgagaatgtatgatcccatgcccggaaaagaacgatttattgataccaatggcgtgcaagataagtttggagtaaccccagataaagttgttgatgttcaagctttagctggagactcaacagataacatacccggcgtacctggtatcgggatcaaaattgcatctgaactaatcaatgaataccactcacttgagaatttattatccaacgccgagaacataaagcaaaataaaaggagggaaaatcttataaatcatgctgaagatgcacgtatctcttatcgactagcattgctagagtcatcttcaccaatcgagattgatattgatgatttatttaatgaacatcttgattatgataaaatcatttcattctcaaccgaaatggaactctctaacctttcaaatcgcataaataattggttctcaaaagagggaccagaaaatataatctcaaataatactactttgataaatacaacgccacaatcaagtcatcacgtctcaacaaaaactgaaaaacaaggcagagagtcaaatattgaaatacattcaaataatttactagaagaactagcaaatgaaatcgcatcttcagaagctttttgtattgattttgaaataaatgatagtgaaatcagagaaatttctatttcaactggtatgcaaaaatattttctcagtaatgacaaaaacagagaaggtagaccatctattcaagatttgattaaaaaaattaatccgtttatggctgatgagactataaaaaaaatcttttttgatctgaaaaatattttaccaatccttcatagctataaaattaacatcaagtcatttgatgatgtgtctttgatgtcatatgtgattaataatggtaaattaaaaaatgacctaaacactcttactattgcctacaaagaacaaattaaaactcaaattagtattggaagtaatgaggaaagccgtgatcagaaaataaatataccatgttcagatagggcttctataattttcgatttatgggagtacctaagattctacctgctagattccgacttaatacaaatgtatgaattagttgaaaaacctctaataagcgtgctttatgagattgagaaaaatggtatcaaagctgatcgaagaatattatctgaactgtcagaggaatttggtcagaaaattaagaaaattgagcaaaatatttataacttagctgggagtgaatttaatattgcaagtccaaaacaacttggcgagatacttttcgagaatcttggtctcagcggggggaaaaaaacaaaaagcggcacatgggcaacagggatcgatatcctagaagatctctcggctatcggacacactattgctgatgtaataattgaatggcgccaacttaataaattaaaaacaacttatactgatagccttccaaattttattgatccatcatcaggacgtgtgcatactaagttctctcaagcacttacttctacaggccgcctatcatcatctaatcctaatttgcaaaatataccaatcagaacaagcgaaggtaagctcatcagatcagcatttatagccgaaaaagggcaaacattcttgtctgcggattatagtcaaatagaattacgtgtattatcgcatgtagcaaatattcaacagcttcaaaatgcttttttaaacgatcttgatatacatcaaatgacagcctcaacaatatttgctacccccttaaatgaggttacagaaaaaatgaggtacagcgctaaggctataaattttggaataatatatggaatatcggcttttggactttcaaagcagcttaaaatacaaagaaaagatgcgcagcaatttataagtgattatttcatcaggtttccggggattagagaatatatggactccacaattgaattcgctagaacaaacgaacatgtcaaaacaatctttgggagaaggtgttatttcccggatataaa

SEQ ID NO: 256701 - DNA, 1080 bp, Unknown
  Bacterial polypeptide expressing nucleotide sequence isolated from the Sargasso Sea
gtgagatcttgtttgaaaaattaaatttggataagaaaaaatcacggaaaacaaaaacaggatggagcacagatgcagtagttctggaaagattagtcgacgaacatgaaataatccaacatttaataaaacatagaactcttagcaaattacttagcacctatattgatgctcttccaaatcttattaacgaaaagacaggaagagttcatacaaactttaatcaagctgctacagcgactgggagactaagtagtagcaatcctaatcttcaaaatatcccggttaggactgaatttagtaggagaatcagaaaagcattcttgcctgaaaaaaattggaaacttttatcagctgattattctcagatcgaattaagaatactcgctcacttagcggatgaagaaatactaataaatgcatttcataaaaatgatgacattcattctttgactgcaagattaatttttgagaaagaagaaatttcttctgatgagaggagagttgggaaaacaataaatttcggagttatctatggtatgggaattaaaaagtttgcacgttctacaggagtaagtactccagaagcaaaagaattcctaataaaatacaaagaaagatattcaaaaattttcaaatttcttgaacttcaagaaaggcttgccttatcaaaaggttatgtaaaaacaatttttggtagaaagagagaatttaagtttgataaaaatggacttggaagactaataggaaaagatccttacgaaattgacttgcaatccgcaagaagagctggcatggaagcacagtcactaagagccgcagccaatgccccaattcagggttcaagtgcagatattattaaaattgcaatggttcaactaaataaaaaattcatagaaatgaatgttccagcaaaaatgcttttacaagtacatgatgaattattgtttgaagttgaaccagattctttggaaattacgacgaaattagtaaagaagactatggaagattgtgtaaaattaaatgtgcctcttttagttgatgttggaattggagacaattggatggagacaaaataaa

SEQ ID NO: 256702 - DNA, 967 bp, Unknown
  Bacterial polypeptide expressing nucleotide sequence isolated from the Sargasso Sea
aacttcagaagaagtattagtagaattagcactagactatccgctgcctaaaattattcttgagcatcgcagcctagccaaattaaagagcacctacacagataaattaccgctcatggtcaatgccaccacaggccgtgttcacaccagttatcatcaagccaatgccgcaactgggcgcttgtcgtcaagcgagcctaacttacaaaatatcccaattagaaccgaagaaggtcgccgtattcgccaggcctttattgccccagcagggcgtaagattttagcggccgactattcgcaaatcgaattgcgcatcatggctcatctctctcaagacaaaggcttgctaacagcgtttgctgaagggaaagacattcatagagccactgcagcagaagtatttggcgttcactttgaagaagtcaccaccgaacagcgccgccgtgctaaagcggttaactttggcttgatatacggcatgtctgcatttggcctagctaagcagttggacatcccgcgtaacgaggcacaaacttacatcgacacctattttgctcgctacccgggtgtgttgaaatacatggaagaaacccgtgcagccgccgctgaacaaggttatgtatcaaccctatttggccgtcgtttatacttaccagaaattaacgatcgcaatgcaatgcgccgtcaaggcgctgagcgcgccgcgattaacgccccaatgcaaggcactgctgctgatatcattaaaaaagccatgattgccattcaccagtggattaatcaagacacacaaggtgaaatcaccctcattatgcaagtacacgatgagctggtatttgaagttgatgaagcacaggccgatgcactaaaaaccaaagtgtgcgacctaatggcacaagcagcaacacttgatgtgccactgctggctgaagcgggtatcggtaataactgggacgaagcccactaa

SEQ ID NO: 256703 - DNA, 1244 bp, Unknown
  Bacterial polypeptide expressing nucleotide sequence isolated from the Sargasso Sea
attacaccgatcaaaggtgactaaagtttatgaaactctagaacggcctttagtctcagtcctagctcaagttgagcgaaatggaattaaagtggaccgagaaacattaagtcgaatgtcaaatgcatttgctcagaaaatggctggccttgaagctgaaatttatgaactggctggtgagtctttcaacgtgggaagtcccaagcaattgggtgaaattatgtttgataagctaggttatgggggcggaaaaaaaggaaaaaatggagcatatgcgactggagctgacatacttgaagacctggcaacgaattatgatttccctaaaagagtgctagattggcggcaattaagcaaacttaaatctacttatactgacgcactacaggatcacataaatccaaatactggacgtgttcatacttcatattcaattgcgggagctgttaccggtcggttatcttcaactgagcctaacctgcaaaacataccagtcaggacagaagatggacggcgcattagagaggcatttgtcgctgaagatggcaatattttagtaagcctagattatagccaaattgaattaaggattttagcccatatagcacaaattgatgccctaaagcaggcttttcatgatggcttggatattcatgctatgacagcttcagaaatgtttgatgtgcctctagatgaaatgacatctgatattcgtcgtcaggcaaaagcgataaactttggggtaatctatggaatttctggctttggacttgcaaggaatttgcgcattccccgttctgaggcgcaaggttttatagatcgttactttgagagatttcctggaataaaggaatatatggataagactgtagaattcagtaaagaaaataattacgttgaaacgctctttggcagagtaattcacactcccgagataaacgcaaagggtccaatggctggttttgcaaaaagagcagctattaatgcgcctattcagggcactgccgctgatattattcggcgtgcgatgattagagtgccagacgcaataaaagatttgccggcaaaaatgcttcttcaggtgcatgatgagttattatttgaagtaaaagaggagttttgtgaggatttaattgagcaggtccagtccattatggaaacggcttcactcccctttttgaaaatggatatacctttgtctgtcgatgccggtcgcggaatgaattgggcagaggcgcattaga

SEQ ID NO: 256704 - DNA, 1989 bp, Unknown
  Bacterial polypeptide expressing nucleotide sequence isolated from the Sargasso Sea
acgaagcagatgatgtacttggatcattatcaaaattatttaatgaagttaaaaaagaagtattaatagtcactggagacagagatatttttcaactaatttcaaaaaaaaccaaaatactttatacaaaaaaaggaatatcagaaacagatactatggatgaaaaatcatttaaagaaaaatatgaaattacaccttcacagtacattgagtatttagctttaaaaggtgatccctctgataatattcctggattgccaggtgtaggtgaaaaaacagcaattacactcttaaaaaaatataaaaatttagacaatattcttcaaaatcttgatgagcttacaccaaaattaaaaaatacatttaaaacaaataaggatattttatttataagtaaaaagttagccactatcaaaactgatttagaactagatttacctgatttgaagttgagtgattctgcatatttctctgatgatgttttagaaaatgcacaggaaaaagtaaaaaatcttgaattaaacaaatacaccttaaaaaataaaaatgaaattgataaagataaagaaaatacagaagataaagatattcacgaatatgaatctatagagggtgaaatttttatcataagttttgataatgaaacctatttttttaatagcaataaatttggaaaatatactgggaatttattaaagataaataattatgttctaatcacatcgcaaaggacgatttcactaactgaagatgagctagattttgataaatttgatgcatatgattgcatgttgtttttaaaagatccaagcattaagccagacaatcttttgaacatagctaaacatatagatagatcatctggcctttctaaaaagtcagatattatagattttcttaaattcttccaacagaaaacttcatttattaataatgaaatctcagaatttaagaaagacaaaaaacttattttgctatataaggatttagactttccaatgcttaaaattttgagctcaatgaacaagaaaggcgttaaagtctcattaaaaaaaatagataaactttctgatgaaataaatgttgatttaaatatttataaaaaaaatattaaatctataacaaaaaaagattttaatttgaattcacctaaacagttatctgaaatcctttatgaagatatgaaatatccaattattaaaaagactccaaaaggggctccttcaacagatgcttctgttttagaagaattatcaaaatcacatgagttgcctaagttaattttaaaatatagggagtatgaaaaattaagatctacatatatagaggggctaaaaactgtcattgtaaataatagagttcatacctcttataatttattcggtacaacaactggtcgtttatcatcagaaaaacctaatctacaaaatattcctaataaaacagaaatgggccagaaaatacgtgaattttttgttgcggattcaaaacacacttttgtaatagctgattattctcaaatagaattaagagttcttgcacatttaagcgatgataaaaatatgataaatatgcttaaaaatagagacgcagatattcactcagaaacagcagccaaaatatttaatacaaatattgattccgtaactaaagatatgagaagaaaagctaaagaagtaaattttggattaatttatggaatggaatcatttggattatcaaaaagcttggatatttcaaaaaaagaggctgacgaattgataaaagcttattttggtcagtttccaaaaattaaaggttttctagaaaagatagtagttgatgcgacaaaaaatacatatacagaaactctttatggtcgtaaaagatttatcagagaattatcatcttcaaacttttcagtaaaagctatgggaaagaagattgcaatgaatgcgcctatacagggaactgcatctgacataatgaaaatagccatgataaaataat

SEQ ID NO: 256705 - DNA, 2072 bp, Unknown
  Bacterial polypeptide expressing nucleotide sequence isolated from the Sargasso Sea
aatgaacaatcaaatttatgatgtatctggtgtccaagaaaagtttggagttcatccaaatcaaataattgattatttagctatcgtcggtgattcctccgataacattccaggcgttcctaaagtgggtcctaaaacagcggttaagtggcttaaagaattcaaaaatcttaaaggcataatcaaaaatgcggattctttgactggtgttgtaggccaaaatttcagagactctattccagatttagatagaaatattgagcttgtgaccctaaaaagggatgtagatatcggagtgtctttagaaagtttgttaaaagcaaaagaggatcaagaagagttaaataaattatttacatctctcgagtttaaaacttggattaagtcatcgtccgactcaagtgatgaaaaacccaaaaatactaatacaaaaaaagagtatcaatcagtattaaaagagaaggagttaatagcatgggctaagaaaattgaaaaatgtaaagcctttgccattgatactgaaacttcttccctggacacaatgactgcagatctaataggtatttcattggcatgcgatgagggagaaggctgctacatacccattaatcattcatatgaggggatgccaagtcaactatccattgatttaattcaaaaaacattgggcagcgtcatttcaaaaaatcaaaaaaaactagttgggcaaaacctaaaatttgatttgccaatgcttaacagatatggaattaatattactgatttcctaggagatacaatgttaatgtcatatgttttaaacagcactggaactaggcatggtcttgatagaatggcccagcattatttaaattatgaacccatgaaatatgaagaggttgtaggctcagcctcaaagcaaataaactttgctcaagttgaaatctctatagctacattttatgcagcagaagatgctgatattaccctgaggctgtttaatcacttaaataaaatgcttgcagatcaaccaaagctgctgaaccttctaaaagatattgaatatccaatgctgaattctctaattagagtcgaaagaaatggtgcaaaaattgacgcaaaaatgctatcagaatattcagatgtgctatcaattaaaattgaagaattatcaaaaacagcatatgaggtagctggcgaagagtttaatatggattcaccaaagcaactagttgagattctttataataaacttgatttgccagtacttaagaaaactcctaaaggtcagccttctacaaatgaagataccttgcaaagattggctgaagagtttgaacttccgaaaactattattgaatatcgtggtttagccaaattaaaatctacatatacagatagcctcactaaaattcagcatccaatcaccaaaagaattcatacttcttatcaacaggcagttacctcaactggaagattgtcttcgacagaaccaaatcttcaaaatatcccaattaaaactccagaaggaagaaaaataagagaagcttttattgctgaaaaaggaaatgtattaatctcagcagattactctcaaattgagttaagaataatggctcatttatctggagataaaaatttgactcgtgcatttaagaataacattgatgtccattccgccacggcctcagaaatatttaatgttccattagagaatgtaactcccgatcatcgcagaagcgcaaaagcgataaattttggattaatttatgggatgtccgcttttgggctaacaaggcagttagggattcctagaaatgaggcacaagcctatctggatacttattttgaaaggtatactggagttaaagattatatggaatcaaccaaagagctagctaaaaaaaatctctttgttgaaactattcttggtagaaaactgcatgttgctactataaacgatcccaatggtttaagacgtaaagctgctgagcgagctgctattaatgcacctttacagggttcagctgccgatataattaaaaaagcaatgattgacgttgatcaatggataggtgtgaataatccagata

SEQ ID NO: 256706 - DNA, 1336 bp, Unknown
  Bacterial polypeptide expressing nucleotide sequence isolated from the Sargasso Sea
aaaaggtgttaagcagcttacttttaataaagtaaacctagatatcgcaagcgattacgctgccgaggatgcagacattaccctgcaaatgtacgatacgattgctgagcacttaaagaaacaaaaaatgctgcaaaaagtcctgatagatattgaactgcctctcattccagttttatcggatatggagcaaaaaggtacagttatcgattccgatattttgaatcttcagtctaaaaatttaggtcaacgcatcaacgggcttgaggagcaagccttctcgatggctggcaaagaattcaatttatcctcccctaaacagcttcaagagattctctttgacgagatgaacataccggtggtcgaaaagacccctggcggtcagccctcaacagcggaatccgttttgcaagaactcgctaaacaatatgaacttcctcaagtcatactcgagcacagaacactttccaaactcaaatcaacttacaccgatagattgcctgaacagatttcagagaaaactggcagggtgcattcaacttttcatcaagcggttaccactacaggaagactatcctcttcagatcctaatttacaaaatattcccattaaaactgaggaaggcaggatgattcgagaggcttttgtggctccgaaaggatttgatttaatctctattgattactcacaaattgaacttcgcattatggcgcacctttccaaggacgaaggtttaatcacggctttcgaaaacggcgaagatattcactcggctactgctaaggaagtgtttggttcagccgatgatcaggctaggcgaagtgcaaaagccataaattttggactaatttatggaatgtcagcattcgggctaggcaaggctctgggtgtaacacgaccggaggcagctgattacattgcttcttattttggtaagtaccctggggtaaaaatatacatggatgagatgaaagccaaggctaaagaacagggttttgtggagacagcttttggcagaaggctttatttgcctggaattcattctggcagaacgcgcatggcagcagagcgagcagccatcaatgcaccgatgcaggggactgctgcagacattatgaaattagccatgattaacatgcatgactatataaaaggtacaggtaaagatattcatcttattttacaggtacatgatgaagttatcgttgaatgcccagaaaaagatactaagacaacgttaaaagctttagagcaaatcatgacagacgtcactaaattatccgttccgttagtagttgaaagcggcgttgcaaacaactggggcaaagctcactaa

SEQ ID NO: 256707 - DNA, 1927 bp, Unknown
  Bacterial polypeptide expressing nucleotide sequence isolated from the Sargasso Sea
taaacaactaaatatagattctgataaaattaaagcatccgatcaagttgaaaaatttgaaaaaaaaataatcgacagtcccaaagaaatagaagaaattaattctaaatttgaaagagaaaattatcaagtaattcaatctttagacgagttagcacaatggaagctcaaagctgaaaatattggatatgtagcttttgataccgaaacaaactcactagatgcagtacaggctgatatggtaggtttttctttatgcacatctgagaatgatgcttgttatgtcccattattacatgaggaaaatgataaacaaatcgattttgatcaagctataagtattttgaaatctatcttagaagacaatggaattaaaaagattcttcacaatatgaaattcgatgcactagtaatagataaatataatattaatatcaaaaattatgatgatactatgctgatgtcttactcaatagggtcaggcggaataagacataaacttgatacacttataaaatattattttgatcacgatgctatatcatttaaagatcttactggtagcggtaaagataagaaaacatttcaagagcttacaattaaagaagctggaaaatacgcagctgaagatgccgacatgacgctaaggttatggaaaatatttaaatcttctatggtccaagacaaacaggttaaaatatatgaaattattgaaaaacctttgactcaagtcatactgaatatggaaaagcatggaatagcaatcgatgtaaataaattaaatgaattatctagtaattttgaagaaaaattaaataaccttgaaaaatcttgctacaaattaattggtgaagaaattaatcttggttccccaaagcaggttggagaaatattatttgataaacttgcattacctggaggcaaaaaaacatcgactggttcatggtcaacaaatgccgaagtattagaaaatttagctaatgaaggatatgattttccaaaaattttacttgaatggagagctttatcaaaactcaagaccacctatactgacgcattacctgcttatttaaatatcaaaacaaatagaattcactcttctttttctatggccacaacttcaacaggaagattagcttcctctgatccaaatcttcaaaatattcctatccggagtgatgatggtagaatgataagaaaagcctttattcctgaaaaagggaatgtactgataagctctgactacagtcaaattgaacttaggttaattgctcatattgctgacgagaaaaatttaattaatgcctttcttgatgaaattgatattcattcatctactgcctctgaagtttttaatgttccattaaatgaaatgacacctgatatcagaagaaatgcaaaagccattaactttggtataatttatggtatttcagcctatgggttggcaaaacaacttaatattagccgtactgaagcatctgaatttattaaagcttattttaataaatatccttcaataagagactatatggatgaaacgaagaagttcgcaaatgaaaatggttttgtaaagactctcataggaagaaaatgtcttgttgaggacattaatagtaaaaatgcggccacacgatcatttatggaaagagctgcaattaatgcgcctattcaaggatctgctgctgatataatcaaaagggcaatgattattttaggtaataataaaaaattagaaaaattagaaacaaaaatgcttttacaggtacatgatgaattaattttcgaaactaaaaaagaaaattgtgaggaatctataagaattattaaaaaggaaatggaaagcgctaacttacccatccttaatttaaatgtaccattaatagcagatactaattttggtaataattgggatgaagcacattaa

SEQ ID NO: 256708 - DNA, 2590 bp, Unknown
  Bacterial polypeptide expressing nucleotide sequence isolated from the Sargasso Sea
atctaaatcttttagaaatgaaatttttgaagattataaagcaaatagatctgaggctccagaagatttaattcctcagttctcactaattagggatgctacagtagcttttaatattccttatatagaattaaagggttatgaagcagatgacataatagctacatattctagtcaggcttctaaagctggatgggaagtagatattatttcttcagataaagaccttatgcaattagtgaatgataacgtaaaaatgattgacccaatgaagatggttaatataggaagggaagaagtatttaaaaagtttggggtttatccggagaaagtaatagatgttcaagcattagcaggagatagcacagataatattccaggtgttccaggaataggagttaaaacagctgcagaattaatcaacgaatatggcgatttagattctttacttaatagagctggagaaattaagcagccaaaaagaagagaaaatttaattaattttgcagatttagcaagaataagtatgaagctagttaaattagatgatgatatcaaagatatagaaaattttaataactttcaaagaaaagatatagatattaataaattaaaaacatttttaatagagcaaggctttaatagtttaattggaagattacctaatgaagatggatttattaatactaaaagttcttatgtagctttaccagataactctgaatcagaaaatgaaaagcctgctgtaaaaaataattataaacttattactgatgagaatacattaaaaagttggattaaaaatatagaggctacaggtatagtttctatagatactgaaacaacttctttagatgcaacatccgctaaattagtggggatatctttagcgattgaagctggaaaagctgtctatataccaataaaccatcaatctaaagaagggccaatcgtagcaaaaaaaataaatcaattggatgaaaagttagttttatctctgctaaagcctataatggaagatcctagtattattaaaatagggcaaaatattaagtatgatatgacaatattatttaatgcaggaaatataaatatttatccctatcacgacactatgttaatgtcatttgccttagatgcgggtaaacgttctggacatggtatggattcactatctaaaactcatttaaatattacccctattagttattctgaaattacaggaaaaggtaaagaccaaattacttttgattatgtggatttagatactgctttagattatgcagcacaagatgcagatattactttacgtttatataatttcttaaaagacagattagttaaagaaaaaatgacatcactttatgagacgattgaaagaccgttgcctcatgtaatagcaaacatggaaaggaatggggttggaattgattcagggtatttaaaaaatttaagtgatatatttataagtaaaatggagcctattcaaataaatatttttaagttggctggtgaagaatttaatatttcttcacctaaacagttgggcgaaattttatataataaattaggtttaaaaggcggcaagaaaggaaagtctggtctttattctacttctgctgcagttttagaaaaattaggccaagatggtaatgagatttgtaaattaatattaaattggagagctcttcaaaaacttaagagcacatattctgatgccttagtagatcaaatcaattctgctactggaagagttcatactcattttcagatgacaggagctatgacaggaaggttttcttcaagtaatcctaatttgcaaaatatccctattaaaagtgaagatgggagggcaatacgaagagcatttatatctcaaaaaggaatgaaaatcgttgcctgtgattattcacagatagaacttagattattagctgaagtggcaaatatagaacctcttattgaggcatttaaaaataatatagatattcatactcttacagcttctcaagtatttatggtaaataccgataatgttactagtgagatgcggagaaatgcaaaaacaattaattttggaataatatatggccaaagtgcatttggtttagctaagcagctcaatattagtagaactgaagcgaaggaatatattgaactttattttaaacaatacccaggcataaaaagttatatggaaaatacacaggaatttgctagaaaaaatggttatgttgaaactatttatggaagacgatgttatattcctagcattaatgataaaaatccaatgataagggctggagctgagagacaagctataaatgctcctctacaaggagcagctgcagacataattaagagatcaatgaaaaattttcctgaaattttaattaaagaaaaaattgatgctaaattaattcttcaggttcatgatgaattaatatttgaatgtgcatcgattgatctggatcgcttaattcctatagtcaaatcaaaaatgattaatgctcctaaacctggttttaagatgaaagttcctttagaagtagaaataggtataggaaataattgggatgaagcacattaa

SEQ ID NO: 256709 - DNA, 2659 bp, Unknown
  Bacterial polypeptide expressing nucleotide sequence isolated from the Sargasso Sea
atgatatttagaccagacgtaattttaattgatggatcatcatatatatatagagcatttcatgctctaccacctttgagtacatcaaaaggcaagccaacaggagctacacgaggcgttgcttcaatgttgcgtaaacttatttctacatacccaggcgtaccgatggttatggtttttgatgcaaaaggcccgaccttcagaagtgattattatcaagcttataaagcaaatagaccctctatgcctaatgagctaagagttcagattgatgatattaaaaatctttcaagattatttcacttttctatacaagaagttgcaggagttgaagcagatgatgtaatagcaacacttgcagataaattaggcaaaaaacaaaaagtattaatatcttctccagacaaggatcttactcagctggtaaaagagaatgttatacaacacaactccgtatcaaatgaattttttgatgagaaatatgtagaagaaaagtttggagttcctccaaacagaattgctgagttattggcattagttggagataaatctgacaacattcctggcataacaaaagttggcaataaaacagcatctaagtggcttaatcagtatggtgatattgataatttagtcgctaaagcagatgaggtgacaggagttgtaggggagaacttaagaaatgaaaaaaatatcttacaaagaaacctctttttagttgcacttaaaaaagacctagatttagatttaaagttagattcactgaacatacctcaagcaacaaatgatgaattaaaagatttctataaagacctggaattcaactcattcatagaagataaaattgtagaaaaagtctcaaaaaactacagctctattaaaaatttaaagcaactaaaagaaatagaaaaagagctagatgactcaaaatgctttgcttttgatacagaaacaacatctttattagctcatgaagcagaattggtagggttttcttttgctttaaaagaaaatacaggcgtttatgtgccaatcagacataatgaacaaacagatttagatgctgatgaaacaaccaaatggttaaaagcagttttagagaggaaccaacaaaaaatcgtaggccagaatttaaaatatgatttatctgtacttgaaaagtacgatattgagataaacaaattttgtgcagacacgatgctaatgtcttatgccattaatagcactgctacgcgacataatcttgatgctctagcagaacattatttaaatgttcaaaccataaagtattccgatgttatgggcaaaggggcgaataaatataaaaacttcaatgaagtacccataaaagaagctacaaactatgctgctgaagatgccgatataacttttcaactatatgagaagtttaaagagctaataaataaagaaacagaaaatttactacaagatattgagtatcctttagttagtgtcctattaaaaatggaaaataaaggtgcattaattgatacaaagcatctccaaaaactttcaaatgaatttgggtcaaagctcattggtctcacaaaaaaaattcatgatatgtcaggtagcgtctttaatattgattctccaaaacaacttagtgaggttctttttgaaaaaatgaaaatagactctaagggcttaaaaaagacctctaccggatattactcaacttcagagtcagtcctacaaaaactatctgctgaaaatgagattgttaggaatattctggagtatagaacattagctaaacttaagaatacctatactgataaaatttctgatatatgtgatgcaaattctagagttcacacgtcttatcatcaagcagtgacgtctacaggcagattatcctcatcagacccaaatttacaaaatattccaataaggacgaatgaaggaataacaataagagaggcctttgttgccccgaaagacaagaagctcttagcgatggattattcccaaattgagcttaggttaatggcccattactctaaagatccaattatgcttaactcttttagaaatgatgaggacatacataaaagaacagcagcagaaatctttggggttgaaattgatgatgttgatggccaaatgaggagaagagctaaaacaattaattttggtcttttatatggaatgagcgcttttggattatctaatcaacttgaagtttcaagagctgaggccgatattttcttaaataactattttgaacgatattctgcagttaaaagttttatgtcaaagatagtagaagaagcaaaaaaagataaatttgtaaaaactttgtataacaggaaaatacatgtaccaaacatagaggctggaaactatatgatgagacaaggatcagaaagagctgctatcaatggacctttacaaggcagtgctgccgatattattaaaattgcaatgattaagattcaagatttaattaataatagtaaatcagatataaaaatgatcttacaggttcatgatgagctaatttttgaagtgcctactgattttacagatgaagacattaagccaattatttcaattatggaagaaaccactaaaattagtgtgccattaaaagttgagtatggttttggagctaattggagagaagcacactaat

SEQ ID NO: 256710 - DNA, 2686 bp, Unknown
  Bacterial polypeptide expressing nucleotide sequence isolated from the Sargasso Sea
aatgagtgaagaaaaagaccccataatcttagttgatggctcatcatatctatatcgggcctatcatgccttacctccactaacgaatagcaaaaatcaaccaacaggagctattaaaggcgttataagtatgatcaaaaagattcttattgatcatccagaaagccctttagcagtagtttttgatgccaaaggtaaaacttttaggcacgacatgtattctgaatataaagccaacaggcctccaatgcctgaagatttggttcaacaaattgaaccaattcatcaaataatttctttaatgggtataaaattaataatgattcctggtgtggaggctgatgatgtaattggaacattggctgagcaggcaagacaaaagaaattgaatgcggtcatttcaaccggtgacaaagatatgactcagctcgtttgtgaaaacgtaagtgttgtaaacaccatgtcgggagagctacttgatgaaagcggagttttaaaaaaatttggagtaggccctgaattaataacagattatctggcattaataggtgataaatctgataacgtacctggagtagacaaagtcggccctaagacagcagtaaagtggctcaatgaatatagtgatatacagggagtaaaggagaactctgaatctataggaggaaaggttggtgaaaacttaaggtcttccatcgaaatgcttgatctggcccatgagttagtaaaaataaagacagatgttgaacttgagttgggtatagaagatttagcaagatcagaaccagatacagagaaactcactgaaatatatgaagaattagaatttaatgcttggctacaggaagctcctgagaagaaaacaaccactacaaaggtcaattcatcttacatttgtatttcttcacaggatttattagagaaagtcatcaaaaatgcatcaaaagcaaagactattgctatagacaccgaaacaacaggtttagattatatggatactgatttagtaggtatctcattaagctataaactcggagaggcatattacattcctattaatcatcaggatgacacagttaatcaactcaagctaaatgtagttttagatgctttgaaacctgttcttgaaagctcaaaaaacaaaataattggacaaaacataaagttcgataggaatgtgctagcaaaatatggaatcaatatttcatctattaaaaatgacactatgatgatgagttacgtacttgatgcttctgcaacaagacataacttggatgctctatcctcttattatttaaactacaaaacttcgacttttgaagatgttgcaggaaagggagtcaaacagattacttttgatcaagtacctattgaagaagccacaaactatgctgctgaggatgccgacattaccttaaggctttatgaagaattaaatccaaagctagaaagtgtagcgtctctaaaaaaactaaatgatgaaatagagataccattgatagaagttctatcagaaatggaacaaaacggcgctatattgaattccaaaattctgagctctcagtcaaaagatctagagaaccgtattaagaaattagaaaaaaaggcttatgaaattgcaggagaagaatttaatttaggctctactaaacagttgagagaaatattttttgacaaattaaattatagaattattaaaaagactccaggaggtcaaccttccactgatgagaaagttcttgtcgagcttgcagaggaatatgaattgcctggagtattacttgagcacaggacattaagcaaactcaagtcaacttatacagataaattaccaggacagatttctgaaactacaggaaaagtacatacctcttttcatcaggctgtaacaactactggaagattatcttcttcagatcccaaccttcaaaatattccaataagaacagaagatgggagaagaatcagacaggcttttgagccttcaaaaggacataggtttatttcagcagattactctcaaatagaactacgtattatggctcatatttcaaaggatgttggactgttgcaggcattccaagagggggaagatgttcatagcaagacagccagtgaagtatttgatgttgctatagaggaggtaacagcagatcttagaagaaatgccaaagcaatcaattttggacttatttacggaatttcagcttttggtcttggtaagcagcttggtatctctagaaatctagctgcagaatatatggctatgtactttgaaaagtatccaggagttaaaaaatacatggagtctactaaagactttgctagtcagaatggatacgttgaaactttatttggaagaagactatatttaagagatatcaatgctagtaatgcgataagaagacaagcttctgagagagctgcaataaatgcaccagtgcaaggaactgctgcagatataatgaaaattgctatgattaaaacgcatcaggcaattaaggcagaaaatgttaaagccaaactcattcttcaagtccatgatgagctgatcctagacacgcctaaaaaggagatagatagtgttatcaacttgttaactgattctatgatgggtgcggcaagtttggatgttcctttagaaattgatgtaggagttggagataattgggatcaagcacactaa

SEQ ID NO: 256711 - DNA, 2220 bp, Unknown
  Bacterial polypeptide expressing nucleotide sequence isolated from the Sargasso Sea
catttaatatccctcaggtctcggaagttggttacgaagctgatgacgtacttgggtctttagcaaaaaaatataatgataaaggtcaagaagtaatgatcgttacaggagatagagacactttccagttaatatcaaaaaatacaaaaatactttatacaaaaagaggaatatcggaaatagacatagtagatgaaaagttttttcttaataaatatggatttaaaacagatcaatatattgaatacttagcactaaaaggagatccatcagataacatacctggattagctggggtcggagaaaaaactgcaacatcattattgaaaaaatataaaacaatagagggaatctataaaaatttaaatgatttaacaccaaaaataaaaaattcatttcaagaaaataaagaaatgttaaaaacgagcaaagatttggcaactattagaacagacttaaaaatagaaataccgaaagtacaattaaaagacacagcatattattccgatgaagttttagaagcttctcaagataaagttaagaaactcgaattaaataaatatattaaatcatcaaactctcaagaaaaagaaaataaagaaaatgatgaaaatgacgttttaataattactgaaaatttgacaggcccacagttgatgattaatttcgaagatcaattatattttataaattcaaataactacggaaaatacataggtaaattatcaaatttagattactttatatctttgaatacacaaaaacttataaacaataatgaggaaggaattaataatttaaaatttgatgcatatgattgtgttcttttcttgagagatccaagcattaggcctgataatttattaagtatctcaaaacatctggataggacagcaggcttaactaataaatctgaaatatttgattatcttatatttttccaaaaacattttttatttatatctaaagaagtacaaacatttaaaaatgaaaaaaaactttataaaatttatgaagatttagatttccctcttttatcaatattagattcaatgagtaaaaaaggagtaaaggtatctaaaactaaaatagagacattatctaaagaaattaataatgagttagatttacttgataaagaaataaaaaagataaccaataaggatttcaatttaaactcacctaaacaattatctgaaatcttatatgttgatatggaatatccaataattaaaaagacccctaaaggagcaccttcaacagatgcttcagttttagaagaattatctaaatcttacgaacttccaaaatttattcttaaatatagagagtacgaaaaacttagatcaacttatatagaaggattaaaaaatgaaattgttaaaaatagaattcatacttcttacaacctttttggaacaacgacaggaaggctttcatctgaaaaaccaaatttacaaaatattcctaataaaacaccgataggtcaaaaaattagagagttttttatagctgacactaatcactcatttattattgctgattactcacaaatagaattgagagtacttgctcacttaagcaaagataaaaatatgatcagcatgttaaaaaatagagatgcagatatacactctgaaactgctgctcgaatttttaatatggatatagattccgtttcaaaagatatgaggagaaaagctaaagaagtaaattttggtttaatttacggaatggagtcttttggtttatctaaaagtttagatataccaaaaaaagaggctactgaattaattgattcatattttaatcaatttccaaaaattaaaggctatttagattctattgtaaaaaatgcagaaagctctacttttactgaaacattatatggaagaaaaagattcattagagagttagcttcttctaatttccaattaaaagctatgggaaaaagaattgcaatgaatgcccctattcaaggtacagcctcagatatcatgaaaatttctatgattaaattagaagataaaattaaaaaactaaactctactgacataattttacaaattcatgatgagataattattcaaacccctgatgacattgcaagtaaaactgctaaattagtacaaaaagaaatggaaaatgccactgttttagacgttcctttatatgttgatataaaacaaaataaaaatttagctaattttaataattagt

SEQ ID NO: 256712 - DNA, 2322 bp, Unknown
  Bacterial polypeptide expressing nucleotide sequence isolated from the Sargasso Sea
aatgagtaaagagaaactattactggtcgatggttcctcctatctgtatagagcattccatgcattgcctgatttgaggtcgtcagatggaagacctactggtgcaatctatggtgttctgaacatgcttcagaaactcattaaatctgagaggcctgattacctttcggtagtttttgacacaccagtcaaaacctttaggcatgatatttttcccgaatacaaagcaaacagacaaaaaacccccgaggatttaattgcacagattgaacctctgcatcaggccattatcaatcttggattaccactcattgcagttgatggagttgaggccgatgatgtgatcggaacccttgccatggaggctgagaaaaaaaacatcaaaacattgatcgcaactggcgacaaggatatggcgcagttagtcacagataatatccatctcattgacacaatgaaggacataagaatgggtccaagagaggttttggagaaatttgggattttgccagagcgatttattgattacttaactttggccggcgacacatctgataatattccaggtgtagaaaaggtcggccctaagacagccatcaagtggatcaatgagtacggatctttagaaggcgtgattcaaaacgctgatcaaatcaaaggcaagataggagataatctcaatgcagccttggatcagttggatttattcaagactttggtcaccataaaatgcgatgttcaaacggattctaatttctctgatttaatcataggagagtcgaatgaggatcttttacatgagcaactcagtgatttaggcttgcatggactgatcaagcaatttgatatccaatcacctgaaaagaaaccagatgtcgaaagcaattatcacacaataagaacaaagaatgagctggatgagctgatagaggtcatgaaaaaggctccttatatttcatttgatacagaaacgacaagcttagattatatgaacgcggaattggtcggtgtctcaattgcattgaagccaaatgaagctttttatattccaataaaccacaactacgaaggagtagaaaagcaattggaagagcattttgtgttagaagcattaaagccttttctagagtcggatgaaattccaaagattggacacaacctgaaatacgacagacatatcctgcaaaatctaggcattgatttgaaaggcaagcttttggacacaatgctcttttcttatgtgaataatagcaccatcacacgacacaatttggatgccgtttcgaagagatacttgaatattaatccaacttcttacgaagatgttgccggcaagggcgctaagcaaataccattctcagaagtatcaatagaagtagcatccgaatatgcgtccgaagacgctgacatttctctaaagctttatgagcatattgagcccctggtgcaaaaagaaacaaagcttgcaaagctttattctgagattgagggtccactcatatatacactgggagacattgagagaaacggcgttttaattgattcagagaaattgaacgaacaaagcaaagagcttgaggctaagattctaaaacttgagcagaaagtccaaaaaagtgcaggcgaggattttaatttgggttcaccaaaacaactgcaagaaatcctttacgagaaactcggtttgccagtaattaaaaaaacgccaaaaggtcaaccttcaaccgctgagtctgtgcttcaggaactttcaatggatttcccaattgttcaggacattctaagttaccgtgcgatatcaaaactgaaatccacttatacagataaattacctaaaatggtcaattcaaatacaggcagagtgcatacttcatatcatcaagctgtgactgcaactggaagattgtcgtcttccgatccaaatcttcaaaatatccctatcagatctgaagaaggccgaagaataagagaagcattcattgcgccagatggatataaaattttggctgcagactattcgcagattgagctcaggatcatggctcatctctcaagagatcaaggcttgatggatgcttttgcaaaaggtcaagacatccatcaggctacagcggcggaaatattttccacaaatattgatgaggtgacagctaatcagaggcgttcagcgaaagcaataaactttggactaatatatgggatgtctgcatttggtctatcgaagcaattgcagattacaagagcagaggcacaaaattacattgaacaatattttgatcgctatccgcaggttaaacattacatggatgagacaaaacagag

SEQ ID NO: 256713 - DNA, 1570 bp, Unknown
  Bacterial polypeptide expressing nucleotide sequence isolated from the Sargasso Sea
tttgagagaaattttcaatattaaatctaatactgttgtttgtcagaatataaagtatgaaatgaatgttcttagaaaatataatattactttttcatgcaaatatcatgacacgatgattatgtcttatatttttaattctaatggcaaacatgatctatcaacactctcatctaagtatcttaatcatgagtcaatatcttatgaagatgttgttggtaaagggtctaaacaaattcttttcaatgaattattgttagaggaggcaataacttatgcttgcgaagattctgacatcactttgcaactctatgactatcttctagataaactatcatcagctaatgatcagtacgagttatacaaaaatatcgaattacctcttgtgagtgtaatagcagatatcgagtacacaggggtaaaggttaatagcgaaaatctaaataaacaaagtaaggatttacgtaaacgtatacagctgatagagaaaaaagtttatgatgaagcaggtcaagaattcaacataggatcgccgaagcaaattcaagaaatattttatgacgttttaaaactaccagtgcttaaaaaaacaccaaaaggagctccttctactaatgaagatgttatgaatgacctttctgaaattcatgatttaccaaaacttatacttgagtatagaaatttatctaagctcaaaaatacatacactgataaattaggcgaacaggttagcgagatatcaaatagattgcatacttcctataatcaaactgttactattaccggacgattatcctcatctaatcctaatttacagaatattcctgtgcgaaatcaggacggtaggaatattagaaaagcttttatacctgaaaagggatataaaatcctctctgctgattactcgcaaatagaattaagaataatgagtcatttgtctcaagacgaaaccctaaaacaaaattttatggatggagaggatatccacatggctacggctagagaggtgtttaaatctaaatcacaaccaaccaaagaagacagaagagcagcaaaagctattaattttggtttgatatacggtatctcctcatatggtcttgcaaaacaacttcgaattgacaattcttcagcaaaggagtacatcgatagatacttcaaaaaatatgaaggagtgagagattttatggaagatacaaaaaagcaagctaaaaaaaatggctttgtagaaactatgaaaggtagaaaaatatatttaccaaatatatcacattctaactttcaggtaagaagtgctgctgaaagaactgctatcaatgctccaattcaaggtactgcagcagatattttgaaaatagcaatgttagatatttctaaatggatgcaaaatcatcaagataaagtaaagttacttatgcaagttcatgatgaactagtttttgaaatagatattgatttcattgataaagcatctaagaagattaaagccctcatgtcaaattgtgtctccatcgacgtgccattagatgtcgatcttggagttggtaacaattgggataaagctcactaa

SEQ ID NO: 256714 - DNA, 2328 bp, Unknown
  Bacterial polypeptide expressing nucleotide sequence isolated from the Sargasso Sea
gcgataaagatatggcccagcttgtgaatgagcatgtgacactcattaatacgatgaccgacagtatttcagatcctgacacagttgttgaaaagtttggtgtgggcccagatcttataattgattacctagcactgatgggcgataaggttgataacattcctggcgtagaaggctgtggccctaaaacagctgtaaaatggttacaaaaatatggatctctgcaaggtgtaatggataacgcaggcgaaattaaaggtaaaattggtgaaaaattagcaaatgcattagatcatttacctttaagctatgagttggcgaccattaagtgtgacgttgaggttgagtcagatcttgatacgtttaaattgcaggagccaaataaagacgagctaattgctttatatggtgaatgcgaatttcgtcgttggttagctgagctactagataacccaagtgatgcacaaactcacttagcagttccatcgcaagaaacagaattaccaaaagttgaagaggctcattacgagactattttaacagaggcgcagtttgatacgttaatagagcaacttaatggcgctgatctttttgcttttgatacagaaacaactagcctcgattatatgcaagcgcaattagtaggcatgagttttagcgttaaagcaggagaagctgcatatttacctgttgcgcacgattaccccgatgcaccagatcaactaagccttgaatttgtgatgcaaaagcttgggccaattttagctgacgctaataaagcaaaagtagggcagaatcttaaatacgacaaaagcgtattagccaatgccggctatgaactcaatggtattaaatttgacactatgcttgagtcatatgtatttaacagcgtaggtacgcgtcacgatatggattcgttggcattaaagtatttaggtcataaaaatattagctttgaagatattgcaggcaagggtaaaaagcagctgacgtttaatcaaattgaactcgacaaagcagcgccttatgcagcagaagacgcggacataacacttcgcttacacgaagtactgtggcctaaaattgaggcagatgaaaagcttaaatcggtatttgaagagattgaaatgcctttggtaagcgtcatttcagatattgagcgcacaggggttgcaattgatagcaacatgcttggcgcgcatagccaacgtttaggtgagcgcttaattgaacttgaaaaagaggcgtttgaaattgcaggtgaacccttcaacctgagctcaccaaaacagttacaagtattattgtttgaaaagctagagctgccaataattaaaaaaacacctaaaggtgcaccttcaaccgcagaagaggtacttcaagagcttgctcatgattacccgttacctaaggttattattgaacaccgtggtttatcaaaacttaaatcaacatataccgataaactaccgcttatggttaatgaaaaaacacagcgtgtacacacgtcatatcatcaagctgtaacagcgacagggcgtttaagttctaccgatcctaacctgcaaaatattcctattcgctcagaagagggtcgtcgtattcgagaagccttcattgctgccgatggttataaaatagtggcagccgattacagccaaattgaattacgcataatggcgcatctttcacaagataaaggtttgcttaatgcttttgcaaacggtttagatgttcatagtgcgaccgcggccgaggtgtttggtgttgatttagatgacgtaacaacagacatgcgccgtaaagcaaaagccgtaaactttggtcttatttatggtatgtcggcttttggcttagcacgccagttagatgtaccacgccatgaagctcaacattatattgataaatattttgaacgttttccaggcgtattagagtacatggaaacaacacgcgaaaaagcagcagaaaatggatatgttgaaacaatatttggacgcagattgcatttacctgaaataaatgcccgtaacggagcccgtcgtaaaggcgcggagcgtgctgctataaatgcgcctatgcaaggcactgctgctgatataattaaaaaggctatgttaagtgttaatcagtgggtgtacgaacaagctccaaataccgtgaagctgcttatgcaagtgcacgatgaattagtatttgagattaaaactgattgtgcggaggcttacacaaaacaaatttgcgagttaatgtcacaagctgcttcactcgatgtacctttaatagtagaggctgacgaaggtgaaaactgggaacaagcccactaaa

SEQ ID NO: 256715 - DNA, 958 bp, Unknown
  Bacterial polypeptide expressing nucleotide sequence isolated from the Sargasso Sea
ggtgctggagcaccgcgtgctgagcaagctcaagagcacctatatcgatgccctaccgcaattggtggaagcggaaacagggcgtgtgcacaccgacttcaaccaggccgtcaccgccacagggcgattgagcagcagcaacccgaacctgcagaacatcccggttcgcaccgaatacagccgccgcatccgcaaggcctttctgccccaggacggctggacgctgctcagtgctgactactcccagatcgaactgcgcatcctcacccacctctctggcgaagaggtgctgcaggaggcttaccgcagcggtgatgacgtgcacgcactgacagctcgactgctgttgaacaaagacgaggtgagcgccgatgaacgtcggctgggcaaaacgatcaacttcggcgtgatctatggcatgggcgctcaacgatttgcaagggaaaccggcgtgagccaagccgaagcgaaagacttcctggccaaatacaagcagcgctaccccaaagtgtttgccttcctggagctgcaggaacgcctcgccttgagccgcggttacgtggaaaccatcctcggccggcggcgtccgttccatttcgaccgcaacggtcttgggcggctgctcggcaaagatccactggagatcgatctggatgtggcccgccgcggcggtaaggaggcacagcaactgcgagctgctgccaatgctccgattcagggctccagtgcggacatcatcaaggtggccatggtgcaactacaggcggctctcacaagccaggggctcccagctcgactgctgctgcaggtccacgatgaactggtgctggaagtgaagcccgaagctcttgagacaacccgagacacggtggtgcgcacgatggagaacgctgtgaagctgacagtgcctttggtggcagagaccggtgtcggtgccagctggatggaggccaaatag

SEQ ID NO: 256716 - DNA, 1037 bp, Unknown
  Bacterial polypeptide expressing nucleotide sequence isolated from the Sargasso Sea
ggtattatttgataaacttaaacttatacccccaaaaaaaacaagaacaggagaaaaatctacaggaatagatgttctcgaagatcttgcctacggtggcaataaagttgctgaaaccattattgaatggagacagctatcaaagttaaagaatacttatacagaggccttgcaagctcatattattaaatctacaggaagaatacatacttcatatgcgatggcttctactagcactggtagacttgcgtcttcagatccaaacttacaaaatattccaatcagaacagaagaaggtagatcaattcgtaaagcatttattcctgataaagaccaaacaattttcgctgcagactacagccaaatagaattaagagtattggctcatatggctgacgtatctcaactaaaagatgctttcaataataatgaggacatacatcaactaaccgcgtcagagatctttaatgtgaagcacaaagatgtcacaaaagatttacgtagaaaagcgaaagctgttaattttggaataatttatggtatttctgcatttggactggcaaaacagttatcaatatcaaactatgaagcaagcgactttattaaagaatattttaaaaagtttactggaataaaagaatacatggaaaatacaaaagagctttgtagaaaaaatggttatgttgaaacactgtgtgggcgaaagtgtttttttccacgaataaaagataaaaattttgcattaaggtcatttcaagaaagagcggctataaacgccccaattcaggggactgcagcagatataataaagttagctatgataaagattaatgataaaataaagtctactaatgaatgtaagatgcttctccaagttcatgatgaactcatttttgaaatcaaaaatgacaaactaaagaaatatagaaaaataattgtatccgaaatggaaaatgcattaaaaccaaagttcgatctctctgtacctctttcggttgatagtaataatgcagataactggagcgatgcgcattaat

SEQ ID NO: 256717 - DNA, 1414 bp, Unknown
  Bacterial polypeptide expressing nucleotide sequence isolated from the Sargasso Sea
gcaggccaaggacggcaggcccgccagctttgccgaggtggctctggagccagcggcccagtactgcgccatggacgtgcacctcacccggcgcctggccctcgatttgatggatcagctgcgcggcatgggagcagcaacaacgcagttgctgctgcaggtggagcagccgctggagccggtgctggcccggatggaggccaccggcattcgcatcgatgtgccgtatctcaagaccctctcgacggagatgggcaccaacctcaagcgactggaacaggaggccaaggccgcagcagcagtggacttcaacctggcctctcccaaacagctcggcgaactgctattcgacaccctcggactggatcgaaagaaatcgcgcaagaccaaaaccggctggagtaccgatgccaccgtgctggaacggctcgaggatgcccacccggtagtgcctctggtgctggagcaccgcaccttgagcaagctcaagagcacctacgtcgatgccctgccccagttggtggaggcggagaccggccgggtgcataccgacttcaaccaggcggtgaccgccactggccggttatcaagcagcaaccccaacctgcagaacatcccgatccgcaccgccttcagtcgccagatccgcaaggcctttctgccccaacctgggtggacgctgctcagcgccgattacagccagatcgaactgcgcatcctcacgcacctttccggcgaggagaccctggtggaggcctacaaccagggggatgacgtccatgccctcaccgccaggctgctgctggacaaacaggaggtaagcgccgatgaacgccgtctcggcaaaaccatcaacttcggggtgatttacgggatgggggcccaacggtttgcccgggcgaccggcgtgtcccaggcggaagccaaggaattcctcagccgctacaagaagcgttatcccaaggtgttcctgtttttggaatggcaggagcgtctcgccctcagccaggggtatgtggagaccttgatgggacggcggcgccccttccatttcgatccccagggcctgggacggctcaagggcaaggacccggctgcgatcgatctggatgtggcccgccgcggcggcatggaagcccagcaattgcgggcggctgccaatgcacccatccagggatccagtgccgacatcatcaaaaaggcgatggtggatctgcaacaacgcctcgattgcgagcaactcccagctcaactgcttttgcaagtgcacgatgagctggtgctcgaatgcgatcctgcatcacaagcagcggtgaccacagcggtgcgcgaaacgatggagacggccgtgagcctgaaggtccccctggtggtggacgtgggctgcggtcccaactggatggaggccaagtga

SEQ ID NO: 256718 - DNA, 2095 bp, Unknown
  Bacterial polypeptide expressing nucleotide sequence isolated from the Sargasso Sea
tctagatcattagtaactttaaaaaaagatgtaccagttaagtcaaatattgatgagttcaaaataaactctattttagaccttaacaaattaattccttttttaaaattgcacggatttaaaagcttgttaaataaatatgaaaatgttgtgaaagaagaaatcaaagaagaatcaaaagtttcaaaattagatgttattaaaaatgatcaggaatttaaatccatttcaaaaaattattatttaattgaaaatttattggacttaaaactttttttagacaaatgttatgataaatctactattgctgtagattgtgaaacggactctttaaatgctaaaaatgctaacttagttggtctatcattgtcatttaaagaaggtgaggcttgttacatacctttaaggcatggaataaatttggaaaataatcagtcagggtttatttttgatgatgtaaaatcatttaaacaaattccatttaatgatgcaatctccttaattaaaccacttctagaagatagttcaattttaaaaattggccataacattaaatacgattcattagtaatgaaacaagaacataatggtaatattaatttaaaccctgttggtgatacaatgtgtatttcatatgtggtagatccagggagagtggatagtcacaaattagatgctttagcattgcgcgaattaaaccatgataccatcaaatatgatgatatttgtggaaaaggaaaaaataaaatttcatttaatcaactgtctcccttagatgctctaaattacgcggctgaagatgctgatataactttatcaatttacaatagagttttaccaagaataattaatgataaaaagttttcagtttataaaagactagaaaatccattgataaatgtattgttagaaatggaaaatacaggaattatcattaattctaaaaaactcaatgaaatttctaaaaatttatcaagtcagattgataaattggaagagcaaatattcaaattgagtgaaactaatttcaatgtaggttctcctaaacagttaggagaaattttatttgataagatgaaaattgaaggtggcaaacgttcaaaaaatggctcctggcaaacaagtgttgaaatattagaaaagatttctgatatgggatacgaaattggagaagttattttgagttggagacatttttctaaacttaaaagcacttacacggatgcattagttgaacaaataaactctaaaactaagagagttcacactaactattctatggttggagcaagtacaggaagactttcttcttccaatccaaatttacaaaatataccaattagaactgaagaaggaaggttaattagaacagcttttgagccaaaggagggctttaaattagtttcaatggattactctcaaattgaattaaggttgattgctcatattgcagatgaaagtaagatgttggatgcgtttaatgataatatagatatacatgccgatactgcctctaaggtctttggtataccaataaaagaaatgacttcagagtttagaagaaaggcaaaggcaattaattttggaattatctatggtatttcagcatatggtcttgcaaagcagttaaaatgttctgcaaatgaagcaaaggattttattagttcatacttctacagattcccaagaattagagattatatggaacaaattaaatctaatttagatagtgatggctatgtagagactttatttaatagacgtgtttacattaatgacagtaattccaaaaaccaaaagctgagagggtttgcagaaaggcaagctattaatgctcctattcaaggtactgcagcggacattattaaattggcgatgattaaaattcataaacagttactaaataaaaaagaaatttctatgctaatgcaagtccatgatgagttagtatttgaaattagagaaaaaaatattgaagaatttacaaatgctatattacccataatggaaactgctaacttaccaatggtacctttgaaagttaacttaaaagtagatgtaggtgttggaaataattgggctgaagctcattgat

SEQ ID NO: 256719 - DNA, 1162 bp, Unknown
  Bacterial polypeptide expressing nucleotide sequence isolated from the Sargasso Sea
aacggcgttttaattgattcagagaaattgaacgaacaaagcaaagagcttgaggctaagattctaaaacttgagcagaaagtccaaaaaagtgcaggcgaggattttaatttgggttcaccaaaacaactgcaagaaatcctttacgagaaacttggtttgccaataattaaaaaaacgccaaaaggtcaaccttcaaccgctgagtctgtgcttcaggaactttcaatggatttcccaattgttcaggacattctaagttaccgtgcgatatcaaaactgaaatccacttataccgataaattacctaaaatggtcaattcaaatacaggcagagtgcatacttcatatcatcaagctgtgactgcaactggaagattatcgtcttccgatccaaatcttcaaaatatccctatcagatctgaagaaggccgaagaataagagaagcattcattgcgccagatggatataaaattttggctgcagactattcgcagattgagctcaggatcatggctcatctctcaagagatcaaggcttgatggatgcttttgcaaaaggtcaagacatccatcaggccacagcggcggaaatattttccacaaatattgatgaggtgacagctaatcagaggcgttcagcgaaagcaataaactttggactaatatatgggatgtctgcatttggtctatcgaagcaattgcagattacaagagcagaggcacaaaattacattgaacaatattttgatcgctatccgcaggttaaacattacatggatgagacaaaacagagcgctaagaaaatgggttatgtagaaacagtatttggtcggagactctatctggctgacattgaatcatccaattatcaaaggaggcaatatgcagaaaggagcgcaatcaatgcacccatgcaggggaccgcggcagatttgataaaaatggccatgattcttttacatcaaaaaatcagggaggagtcgtttgaggcaaaaattatcatgcaggttcatgatgagcttgtgattgaggtcaatgagaatcaatcggatgaattatctgagattacgacaagcgtcatgtctgagatttccaagcttgatgttgacttaaaggtcgatgcagatattggaaataattgggacgaagcccactgat

SEQ ID NO: 256720 - DNA, 1075 bp, Unknown
  Bacterial polypeptide expressing nucleotide sequence isolated from the Sargasso Sea
catgcgcaagatcattcactgcgactgcgactgcttctacgcgtcggtcgagatgcgcgacgacccgtcgctgcgcaaccggccgcttgcggtcggcggccggcccgaccagcgcggcgtgatcgcgacctgcaactacgaggcgcggcgctacggcgtgcattcggcgatgtcgtcggcgctggcgatgcgcaagtgcccggacctgctgatcctgccatccgcgatggacaagtaccgcgcggcgtcgcggcagatcatggcgatctatcgcgactacacgcccgacgtcgagccgctgtcgctcgacgaggcgtacctcgacgtcagcgggtcggagcggtgccaggggagtgccacgctgatagcccgggagatccgccagcgcgtgttcgacacggtcggtgtgacggtgtcggccggcgtcgcgccgaacaagttcatcgcgaagatcgcgtccgactggaacaagcccgacgggctgttcgtcgtgcggccgcacgagatcgacgcgttcgtcgcggcgctgccggtgcgcaagctgcacggtgtcggcaaggtgacggccacgcggctcgaccggctcggcatccagacctgcgcgcagttgcgcgactggccgctgatcgacctgcaccgcgaattcggcgcgttcgggcggcggttgtacgaactgtcgcgcgggatcgacgagcggcgcgtgcaggccgaccaggaacgcaagtcggtcagcgtcgagacgacctacgtgaccgacctgacgacactcgagcagtgcgcggaggaaatccgccgcctcgtcgtgcaactcgacgcgcggatcgaacgggcgggcgccgcgcgctcgatccgcaagctgtacgtgaagatccgcttcgccgatttccagcgcacgacggtcgagtgcgtggccgatgcaacgaatgcggatacggccgtcgcgctgctcgcgaaagggctgcaacggcgtgcgcaggcggtgcggctgctcggcgtcggcgtgcgcatcgacgaagataccgccgagcgccacgggcagttctcgctgttcgacgacgaatcgcccgcctcatga

SEQ ID NO: 256721 - DNA, 2416 bp, Unknown
  Bacterial polypeptide expressing nucleotide sequence isolated from the Sargasso Sea
aaggatgctgaagagagtaattttaaagtttatatggttactcctgataaggactttgctcaactagtttcagataatatttttttatgtaaacctgctagaatgggtaatagtatggaaatctggggagttgatgaagttaaagataaatttgaggttgaatcgcctgatcaagtaattgattatctcggaatgatgggagactcagttgataatattccgggacttcctggtgttggtgataaaactgcaaaaaagtttattaaacaatatggaagtttagaaaatttgcttcagaatgctcatgaagtgacaggtaagcttggtgaaaagataattgaaaataaagaattaggtgtattgtcaaagaaattagcaaaaattatcttggatgtaccaatcgattataatctagatgaatttaaattgtcaaatccagataaagagatagtcttaaaagtttttgacgagttagaatttaggagaataaaagagactttttttaaaatgtttggaactaattctagcaaattagaagtaaaaggtgctgaagttgtccagggagatttgtttagtgaaacctataatatagaatctaataaagacagtctaaatgatttaaagttaatgtatcaaagaatagagtcatttgaagagttaaaactattagtagagaaaatgatgaagcaggaaattgtagcatttgatactgaaacagaaggtttaaatgcattagaaacagatattgttggaatctcattttcttggcaaaagggaataggttattatttacctgtaaaaaataataagtcagtccatgaaaattcatttgaaattttaagacctttttttgaatctactgaaattattaaagttggacacaatataaaatttgacatccaagtattacacaagtataatattagagtttcatctccaatatatgacacaatggttgcgcattacctaattaatccagatatgagacataatctggataccctatctgaatcttaccttaactattctccaatatcaattgaatctttaataggaaagaaaggaaaaaatcaaatatcaatgagggatgtttcaattgataaaattacaaattatgcgagtgaagatgcagatataactcttcagcttaaaggtatttttgacaaagaaattgaagtcaataatttaaataagattttttatgatattgagattccaatgattagtgtattaagcgagatggaaacagaaggtataaaaatagataccagctatctagaaaaactggataaagaatttgaagaggatttaggaaaattaaaaaaagaaatattcaaaaaatctggtgaagaatttaatttaaattcacccaaacaactaggtgaaattttatttgataagttaaaactagttagcaagccaaaaaaaactaaaactggccaatattctacttcagaagaagttctttcaagtttagctaatgatcataagattatagaagatattcttgaatggagatctcttgataaacttcaaaatacttatgtaaaatcattacctaacgaggtaagtagcataactaatagagtccatagtagttttaatcaaactgtaactacaacaggtagactctctagcaataaccctaatttgcaaaacattccaataagaactgctaacggacagaaaatcagaagagctttcatacctagaaatagtgattatatattgatggcagccgattattctcaaattgagttaagagtaattgcatctataagtaatgaagagaatatgattgatgcttttgtaagtaatcaagatattcatacaatgactgcctctaaaatttacaatgttgacccagaaaatgtaacacgtgaacaaaggggaaatgcaaaaacagttaattttggaattatatacggagtttcagcatttggacttagccaacagactgatttaaacagatctgaatctaaagctatgatagataactatttcttaaactatcctggtttaaaaaaatatatgtctgatcaaattgattttgcaagaaataatggatatgttgaaactataatgggtaggagaagatatctacagaatatcaattcccaaaataatatgctaagaagcggtgctgagagaaatgcaataaatgctcctattcagggtagtgctgctgatattatcaaaattgctatgataaatattaattctgagctaaaaaaacagtctttaaaatcaaaaatgcttctccaagttcatgatgagcttgtatttgatgtacataaatctgaaaaagatcagattaaagatatcgttaaaaccactatggaatctgctgttaagctaaaagtacctctaagaattgatctagaatttggtaaaaactggttagaagcacattaat

SEQ ID NO: 256722 - DNA, 1885 bp, Unknown
  Bacterial polypeptide expressing nucleotide sequence isolated from the Sargasso Sea
cattgttactggagatagagacacttttcagttattttcaaaaaatacgaagatactttatacaaaaagaggaatatctgaaatagacgttgtagatgaaaagttttttactaataaatatggatttaaaacagaacaatacattgaatacttggcactaaaaggagatccatcagataatattcctggtttacctggagtcggagaaaaaactgcaacatcattattaaaaaaatataaaacaatagaaggaatttataaaaatttagatgatttaacaccaaaaataaaaaattcatttgaagaaaataaagaaatgttaaaaacaagtaaagacttggcaaccattagaacagacttaaaaataaaattaccgaaagtaaaattaaaagatacagcatatttttcagatgaagttttagaagcttctcaagataaagtaaagaaacttgaattaaataaatatatttcatcatcaaatcctcatgaagaacaaaataatgaaaatgaacataatgacgatttattaataactgatcaattagaaggtctacagttgatgattaattatgaagaacaattgtattatataaattcagataactatggaaaatactcaggtaaattatcaaatttagattactttatatctttgaacacacaaaagcttataaacaaaaatgaggaaggggtaagtaatttaaaatttgatgcatatgattgcatacttttcttgaaagatccaagcattaggcctgataatttattaagtatctctaagtatctagataggacttcaggtataacaaataaatcagaggtcttagattatcttttattttttcaaaaacattttttatatatatctaaagaagtacaaacatttaaaaatgaaaaaaaactttttagaatttatgaaaatttggattttcctcttttatcaatattagattctatgaataaaaaaggagtaaaggtatctaaaaataaaatagagacattatctaaagaaattaattatgagttagatttacttgataaagaaataaaaaatattaccaaaaaagatttcaatttaaattcaccgaaacaattatctgaaatcttatatgttgatatgaagtatccaataattaaaaagactccaaaaggagctccttcaacagatgcttcagttttagaagaattatctaaatctcatgaacttccaaaatttattcttaaatacagagagtatgaaaagcttagatcaacttatatagaaggattaaaaaatgaaattgtaaaaaatagagttcatacatcttataacctatttggaacaacgacaggtaggctttcatctgaaaaaccaaacttacaaaatattcctaataaaacacaaataggtcaaaaaattagagagttttttatagccgattctaatcactcattcataattgccgattactcacaaatagaattaagagtacttgctcacttaagtaaggataaaaatatgatcggtatgttaaaaaatagagatgctgatatacactctgaaactgctgctcgaatatttaatatagatattgattccgtttcaaaagatatgaggagaaaagctaaagaagtaaattttggtttaatttacggaatggagtcttttggtttatctaaaagtttagatataccaaaaaaagaggccgctgaattaattgattcatattttaatcaatttccaaaaattaaaggctatttagattctattgtaaaaaatgcagaaaactctacttttactgaaacactatacgggaggaaaagattcattagagagttagcttcttctaattttcaattaaaagctatgggaaaaagaattgcaatgaatgcccctattcaaggg

SEQ ID NO: 256723 - DNA, 904 bp, Unknown
  Bacterial polypeptide expressing nucleotide sequence isolated from the Sargasso Sea
gcagtacagaacattagcaaaattaaaatcaacttataccgatagccttattaatatagaaaatccaaagacagaaagaatacacacttcatatcagcaagcggtaacttcaaccggaaggctctcatctacagagcctaatcttcaaaatattccaataaagactgccgagggcagaagaattagagaagcttttatcccagaaaaaggaaatgttcttatatcagctgattattcccaaattgaattaagaatcatggctcacttatctcaagataagaatttaactcatgcctttaacaatgacattgatgttcattcttcaaccgctgctgaagttttcggagtatcaattgataatgtaactcaagatcaaagaagaagtgcaaaagctattaatttcggattaatgtatggcatgtcagcatttggccttacaagacaactaggcatatcaagaggtgaagcccaagaatatttagatacttattttgcaagatacacaggcgttagagattatatggataatatcaaaacccaagcaaaagaagataaatatgtagaaacaattatgggaaggcgactttaccttaatgaaattaatgctgctaatggtttaagacgtcaggctgctgaaagagccgctatcaatgccccgctgcaaggatcagcagcagacattatcaaaaaggccatgcttgatattgatgagcttatattaaatgagatgccagaagtacgaatgataatgcaggttcatgatgaattagttttcgagtgtccaaaagacaatgctgataaaacaatggacaagatgaaagatactatggagcaaactgtagaattaaatattcctttaattgccgaagcagcaataggatccaattggaatgaagctcactaa

SEQ ID NO: 256724 - DNA, 1308 bp, Unknown
  Bacterial polypeptide expressing nucleotide sequence isolated from the Sargasso Sea
ctgctgaagatgctcttattactcttaaactttacaatattttaaaaccaagactgattaaagaaaaaatttcttatatctatgaaaaaattgataaacctctaattaatgttttatctttaatggaagcaagaggaattaaagtagattccaaatatcttcaaaaactgagtaaagagtttttaaatgagtctaaaaaaattgaaaaattaatttttaaaattactggaaaagaatttaatataggttctcccaaacagttaggtgaaattttatttttagagatgaaaattaaagggggtaagaaaactaaaacaggaacctattcaacagactctggaattcttgaagatttatcatcccaaggtcatgaaatagcaaagcttgttttggaatggcgagaagtatcaaaattgcgatcaacatatactgattctttgcaagaacaaatagatacaaatacaaaacgggtacacacttcttatgcaacagcaactactcttactggaagattgagctctaatgatcccaatttacaaaatattcctataagaaccaataaaggtaaacaaatacgccatgcatttatagcagaagaaaaaaaccaattaattagctttgattattctcaaattgaactaagattagcggcagaaatatcaaaagatgaaaattttataaaatcttttattaataatgaagatattcattcatcaacagcaaaagaaatttttaatttaagtgatgctaaaccctcatctgaacataggaggaaagcaaaagcaattaattttggaatattatatggcataagtccgtatggcctagctaagcaactaaaaattactaattctgaagctaagttatatattgaaaattattttcgaaaatatcctaaaattaaagaatatatgaattatcaaattcaatttgccaaatcttctaattttgtttctacaatttttggtagacgttgtaacattaagggaattaatgataaaaatttcaatgtacgtggatttgcagaaagacaggcgattaacgccccaattcaaggaagtgcagctgatattatcaaattagctatgattgaaattcataataatattatctcaaatcaaataaatgccaaaatgctattacaagttcatgatgaattaatatttgaagtaaataaaaatgaaattaatgaagttactaaaaaaattaaaataattatggagtcatcacatttgaaatatgatgattttaaagttcctctaattgtggactatggtattggaaatacatggggagaatcccactaag

SEQ ID NO: 256725 - DNA, 1201 bp, Unknown
  Bacterial polypeptide expressing nucleotide sequence isolated from the Sargasso Sea
gaaaaaccccttattcctatacttcatcaaatggaagagtctggagttcttattgacgatattatgctgcaagatcagagtgatgagatttcatctacccttcaagagcttgaaacaaaagcttacgaatctgctgaaaaacagttcaatcttagctcaccaaaacaactgcaagaaattttatttgataatttaaaacttccagtaattaaaaaaacaccaaaaggtcagccgtccacatctgaagatgtattacaggaactagctgaggaattcgaactcccgaagattattctggagcatagaacattaagtaaattgaagagcacctataccgaaaaacttccaaaaagaatttcagaatctacagggagagtgcatacatcctatcatcaagcgaatacagccacgggacgactctcctcaaattctccaaatttacaaaatattccaatcagaacatctcaaggaagaagaattagaaaagcttttatagctcccgatggatatagaattcttgcagctgactattctcagatagaattaagaataatggctcatctctctcaagatcaatccttactggaagccttctcatctggtgaagatatccacacgagaacggctgccgaagttctgaatattgcggttaatgcagtaagcagcgaacaaagacgatgggcaaaagccattaactttggattaatgtatgggatgtcagcttttggcttaggaaagcaaattgggataacccggaatgcagctcaagaatatattgatatgtatttttctaaatacccaaatgtacactcatttatggaagaaagcagaaagaatgcaagagagaagggttatattgagacgctgtttggaagaaggctttatcttcctgatattaacaataagaacgcaataagaagaaaatatgcagaaaggagtgctattaatgctccaatgcaaggaagtgctgccgatatcattaagcttgctatgataaatgtacatcactggctaataaatgatgatgttccagcaaaaattgtcatgcaagttcatgatgagcttatattagaagtaaatgaaaataactcacaagaaataaaagaaagtattgtcaaattaatggaatcagttactaagattgatgtgcccttaattgtcgatgctgcaataggatcaaattgggaagaagctcattgag

SEQ ID NO: 256726 - DNA, 1513 bp, Unknown
  Bacterial polypeptide expressing nucleotide sequence isolated from the Sargasso Sea
gttggtatttctttatcattcaatgaagataaaggattttacataccaattaatcataaagatattgagagtgggaaaagattaaaagaacaattagaagaaaaaaaagttttagagcaaattagacttatatgttctgactcttcaattttaaaaattggtcagaatttaaaatatgatattcgtctattaaaaaaatataatattacttttaattccatcgatgatactatgcttttatcctatgctcttgataatggattaacaagacatggcatggatgatttatcttacagacatctaaatcacgcaacaataaaatataaagatttggttggtactggaaaaaaacaaattacatttgattatgtttctatagatcaagcaactaaatatgctgctgaagatgcccttattactcttaagctttacaatattttaaagccaagactgattaaagaaaaaatttcctatatctatgaaaaaattgacaaacctctaattgatgttttatctttaatggaagaaaaaggaattaaagtagactcaaaatatcttgaaaaactgagtaaagaatttttaaatgagtctaataaaattgaaaaattaatttttaaaattacaggtaaacaatttaatataggttctccaaaacaattaggtgaaattttatttttagaaatgaatattaaaggaggtaagaaaactaaaacaggaacttattcaacagactctggaatccttgaagatttatcatctcaaggtcatgaaatagcaaaacttgttttggagtggcgagaagtatcaaaattacgttcaacatataccgattctttacaagaacaaatagatacggatacaaaacgagtacacacttcttatgctaccgctactactcttacagggagattaagttctaatgatcctaatctgcaaaatattcctataagaaccaataaaggcaaacaaatccgccatgcatttatagcagaagaaaaaaaacagttaattagttttgattattctcaaatcgaactaagattagcagcagaaatatcaggagatgaaaattttataacttcttttattaataatgaagatattcattcatcaacagcaaaagaaatttttaatttaaaagatactaagccttcatctgaacatagaagaaaagcaaaagcaattaattttggtatattatatggcataagtccatatggcctagctaaacaactaaaaattaataattctgaagctaaattatatattgaaaattattttcaaaaatatcctaaaatcaaagaatatatgaattatcaaattcagtttgcaaaatcttctaattttgtttctacgatttttggtagacgttgtaatattaaaggaattaatgataaaaattttaatgtgcgtggatttgctgaaagacaagccattaatgctccaattcaaggaagtgcagctgatattataaaattagctatgattgaaattcataaaaatatctctcaaa

SEQ ID NO: 256727 - DNA, 1651 bp, Unknown
  Bacterial polypeptide expressing nucleotide sequence isolated from the Sargasso Sea
gtctatatacccatcgggcatttagaaggtgatgctaaaaaaaaccagctcccactggatatggtcctccgtgaaattaagccacttctggaatcaaaagaccgagtcaaagtcggacaaaacctcaaatacgacgttaatgttctttctaattatggaatcaatgttgcccccccgtatatagacacgatgctccagtcttatgttttaaacagtaccgctactagacacaacatggatgatatggctcggcattatcttggaagagaaactatccattttgaagatgtagctggcaagggcgctaaacaaatactgttttctgaggtctctattgaagctgctagcgaatacgctgcggaggatgctgacgtcactttgcagttacaccaagagttatctggttccatggcgaaagcgccttcactagagaaagtgttggatgagatcgaaatacctctggtctctgttttagcgaaagttgaaagaaatggtgctttggtagatgccaatatgttgcttgctcaaagcgaggagttaggagaacggcttggcgggatccgtgattcggtttggtctattgctggtgaggaattcaacctagatagcacgaaacaattacaagaaatcttatatgaaaaacaggggcttccagtgcttaaaaagactcccggcgggaagccgagcactgctgaacctgttttagttgatctagcgcgtgactatgatttgcctgcagccattcttgaatatcgaagtctctctaaactcaaaaccacttatgctgataagttgcccctacagataaacgagaaaagcggacgcatacacacgtcttatcaccaagcggttactgcgacaggtaggttatcttctaccaatccgaatttacagaacattccaatcaaatcggaggaaggtaggcgcattaggcaagcatttgtgccaaaagctgggagcaaaatcatcgcagcagactactctcagatcgaactgcgaataatggctcacctatcgaaggacgagcagttgtgtcgtgcgttccatgagggtattgacgttcatcgagcaactgcggctgaggtgtttggctcaccacccgaggcagtgagcgacgaagagcgccgcagtgcaaaagcaatcaattttgggcttatatacgggatgtctgcttttggcttagctcgtcagttaggagtaagccgagcagttgctcaaaattatattgatgtctactttgatagatatccaggggtagccgaatacatggcctacagtagatcaggtgcgaaagaaaagggtttcgtagagactgtgtttggccggcgcctctatgtccctgaaatagaggcaaagcatgctcaacgcaggcaagcggcagagagaacagcaatcaatgcgcctatgcagggtacagcagcggatgtaatcaaaatcgcgatgtgtaatgttcagaaatggttagatgattgcgacattaatgccaagatgataatgcaagtgcatgatgagctggtctttgaagtagaaacatcgcacgttgatgcggtctcttcgagggtcaaagagctaatggaaactgctgttgagctggatgtgcttttggaagtggaggtaggcgttggtgagaactgggatcaggcccattagc

SEQ ID NO: 256728 - DNA, 1981 bp, Unknown
  Bacterial polypeptide expressing nucleotide sequence isolated from the Sargasso Sea
aatcagttattagattttttagcaaaaatggaattcagaactctgacgaagcgcatctcacaaaaatttgatgtagaaatgccaacatcccatattttggattctgataataaaatcagttacccagaacaaattgcatttgataataaaaaatatgaacacattaagaattcggagcagctccaaacctggattaataaaatttatgaaattggatatgtggctgtagacacagaaacgacttcgttaaatgatatgctggctgagttggctggtatctctttagcaatagaggttggttctgcctgctatattccccttgggcataaagagggacaaaatgatgaccttttcgaaaacgctcaactggttgaagggcagctagatttagagtttgttttggaatgcctaaggccgattttagaggatgatagtatcctaaaaattgggcaaaatattaaatatgatgcaaaggttttaagccgatatggagtaatgataactgcttttgatgacacaatgcttttgtcgtatgccttgcatggaggtttgcacaatcatgggatggatgctttatcagagcggtatttagaccactcaccaattgctataaaaacgcttattggttcgggaaaatcggcaataacctttgatcaagtcaagatagaagatgcggttgcttatgcagctgaggatgctgatataacccttaggctttggaaaatttttaagcaaaaattacaccgatctaaggttactaaagtttatgaaactctagaacggcctttagtctcagtcctagctcaagttgagcgaaatggaattaaagtggaccgagagacgttaagccgaatgtcaaatgcgtttgcccagaaaatggctggccttgagactgaaatttatgaaatggccggtgagtcttttaatgtgggaagcccaaagcaattgggtgaaattatgtttgataagctaggttatgagggcggaaaaaaggggaaaaatggagcctatgcgactggagctgacatactcgaagacttggcgacgaactatgatttccctaaaagggtgctagattggcggcaattaagcaaacttaaatctacttatactgacgcactacaagatcacataaatccaaacactggccgtgttcatacctcatattctattgctggagctgttacgggtcgattatcttcaactgagccaaacctacaaaacataccagtcaggacagaagatggacggcgcattcgagaagcatttgtcgctgaagatggcaatattttggtaagcctagattatagtcaaattgagctaagaattttggctcatatagcacaaattgatgccctaaagcaggcatttcatgatggcttggacattcatgctatgacagcttcagaaatgtttgatgtacctctagatgaaatgacatctgaaattcgtcgtcaggcaaaagccataaactttggggtaatctatggaatttctggctttggacttgcaaggaatttacgcattccgcgttctgaggcccaaggttttatagatcgttactttgagagatttcctggaataaaggaatatatggataaaactgtaaaattcagtaaagaaaacaactatgtggaaacgctgtttggtagagttattcacacgcctgaaataaattcaaagggtccaatggctggttttgcaaaaagagcagctattaatgcgcctattcagggcactgccgccgatattattcggcgtgcgatgattagagtgccagacgcaacaaaagatttaccagcaaaaatgcttcttcaggtgcacgatgagttgttatttgaagttaaagaagagtattgtgaggaattgattgctcaggtccagtccgttatggaaggggcttcacttccttttttgaaaatggatatacccttgtcagtcgatgctggccgcggaattaattgggcagaggcgcattaga

SEQ ID NO: 256729 - DNA, 2469 bp, Unknown
  Bacterial polypeptide expressing nucleotide sequence isolated from the Sargasso Sea
attctgaatacaaagcaaataggcctcctatgccggaagatttagtccaacaaattgaaccaattcatcgcatcatttccttgatgggcataaagcttattatgattcctggggtagaggctgatgatgtcattggaacacttgccgaacaagcaagacaaaaaaaattgaatactgtgatttctactggtgacaaagatatgacccaactggtctgtgacaatgtaagcgttgtaaacacaatgtcaggagagttgcttgatgaaaatggcgtaatgaataaatttggagttggaccggagctcataactgactacttagcactcataggagataagtctgataatgttcctggagttgacaaggttggaccaaaaacagcggttaagtggcttaatgaatataagaatattgaaggtataaaaaagaatgctgaatctataggcggtaaggttggagagaacctcagatcttctatagagacccttgatctggctcacgagttggtaaaaataaaaacagatgttcctttagaaataggtatagaggatctagcagtttcagaatccgattcagagcaactttccgaagtttataaagagttagaatttaattcttggctacaagaagtccctgaaaaaaaaatagttaaaccagaagtcaattcttcatatgtttgtatctcaactgagaaatctttaaaagaattaataaaaaaagcttcgaaagctaaaactattgctcttgatacagaaacaactggactggactatatggatacggagttagttggtatctctttaagttaccaagcaggtgaagcttactatattccactaaagcatgatgatgattcagtagatcaactagatttggatattgttcttaaagagcttaggcctcttcttgaaggttcttcaaataaaattataggtcaaaatataaagttcgacaggaacgttttagcaaagtatggagttgatattgcttcgataaaaaatgacaccatgatgatgagttatgttttggatgcttcagcaaccagacataatctagatgctttgtcttcgtattatctaaactacaaaacctctacttttgaagatgtagctggtaaaggtgtaaagcaaattaccttcgataaggtccctattgaggcagctacaaattatgcggcagaggatgcagatataactctgcgactttatgaagaattaaatcctagattagaaggtgaagactctctaaataaactcaatgatgaaatagaaattccgttgatagaagtattatccgaaatggaacaaaacggcgctatattaaattcaaagattcttaactctcaatctaaggatctagaaagtagaataaagaagttagaagaaaaggcttaccaactagcaggtgaggaattcaatctcggctccactaaacaacttagggaaatattctttgaaaaattaaagtacagaatcataaagaaaacaccgggaggtcaaccatcaacagatgaaaaggtacttgctgaacttgcagaggagtatgaattgcccaaagttctcttggagcacagaacattaagcaaacttaaatcaacttatactgataagctacctaatcaggtatctctatctactggtaaagtgcacacatcatttcatcaagcagtaactacaactgggagactatcttcttcggatcctaatttacagaatattccaataagaacagaagatgggagacgaattaggcaggcctttgaaccttctaaaggaaataagtttatatcagctgactattctcaaatagagcttcgtgtaatggctcacatgtcgaaagatgcaggacttctagaagccttccgagaaggagaggatgttcatagtaagactgcaagtgaagtattcgatgtcagtatcaaagacgtaacgtcagatcttcgcagaaatgctaaagcaattaattttggtttaatctatgggatatctgcttttggtcttggaaaacagctgggtatttctagaaatttagccgctgaatatatggccatgtactttgaaaaatatccagatgttaagaaatatatggaatccaccaaagaatttgccagtcagaatggttatgtagaaacattgtttggtagaagactgtatctaagagatattaatgcaaccaatgcaatgagacggcaagcttcagaacgagcagcgataaatgcacccgtacaaggaactgctgcagacataatgaaaatagctatgataaatatgcacaaagctataaaaatggaaaaaagtgaggcaaaactaattcttcaagttcatgatgagctaatattagacactccaaaagatgaaatagataagatcgtaagtctaataacggattctatgatgggagcagcaaatctggatgtcccgctagaaatagatattggaattggagataactgggatcaggcgcattgat

SEQ ID NO: 256730 - DNA, 886 bp, Unknown
  Bacterial polypeptide expressing nucleotide sequence isolated from the Sargasso Sea
aaactaaaatctacttatactgatagtcttattaatatagagaatcctaaaaccgaaagaattcatacctcatatcaacaagctgttacttctacaggcagactctcatcaacagaaccaaatttacaaaatatacctatcaagactgctgaaggaagaaggattagagaggcatttgttccggaaaagggaaatgttttaatttctgcagattactcacagatagagcttcgaatcatggctcatttatctgaggacagtaatttaacacattcttttaacaataatattgatgttcattcgtcaacagctgctgaagtttttggagtatcgattgagaatgtaactcaagatcaaagaagaagtgcaaaagctattaattttggattaatgtatggaatgtctgcttttgggcttacaaggcagcttggcataccaaggggtgaggcgcaagaatatcttgatacttattttgcaagatatacaggggtaagagattatatgaataacattaaagctcaagctaaagaagataaatttgttgaaacgataatgggcagaagactttatctaaatgaaataaatgcagcaaatggtcttagaagacaagctgccgaaagagctgctattaatgcaccacttcaaggttcggcagctgatattatcaaaaaagctatgctcgatattgatgaacttcttttaaacgaaatgccagacgtaaaaatgattatgcaggttcatgatgaattagtatttgagtgtccaaaagataatgcagatactgtaatgcaaaagatgaaagatactatggaacaaaccgtagatttaaatattcctttaattgctgaggcagcaattggctctaattggaatgaagctcattaaa

SEQ ID NO: 256731 - DNA, 584 bp, Unknown
  Bacterial polypeptide expressing nucleotide sequence isolated from the Sargasso Sea
aatgtttaaagtatttaaaaaagaaattgaattaaacggaaaaaaaataagcttagaaacaggaaaaattgcaagacaggcagatggagcaataattgcaaaatgtggagaaacagtagttttagctactgtagttggagcaaaaaaaataaatccagatgttgattattttccactatcagtaaattaccaagagaagtattatgctgcaggcaaaattccaggaggttattttaaaagagaagcaagaccgacagaaagcgaaactttaatatcaagattaattgatagaccaataagaccattatttccagatgaattcaaaaatgaagtacaattacttccaactgtaatatcttatgacaaagaaaatgaagcagatatactatcaattatcgcatcatcagcagctttagctatatcaggaatgccatttatgggacctgttggagcatctagagttggttttgttgaaggaaaatatattttaaacccttcaaaaaaagaattagaaaattcaaagttagatcttgttgtagcaggtacaaaagatgcagttttaatggttgagtctgaaacaagcg

SEQ ID NO: 256732 - DNA, 774 bp, Unknown
  Bacterial polypeptide expressing nucleotide sequence isolated from the Sargasso Sea
actgtaatgtcttcagataaaaaacaaaatcctgatatagcctccatgataggaacatcagcagcactaactatatctggagtgccattcgatggaccaatgggagctgcaagagtaggctttattgatggtgaatatgttttaaatctttctttcgaggaattaaatgattcatatttagatatggtagtggctggaactgatgaagcagttctaatggtcgaatcagaagcaaaggaacttaatgaggatctgatgttgggtgcagttctatttggacaccaagaaatgaaagctgtaattatcgcatgtaatgaacttaaagaaaaaactagtaaggaagcatggaacatcgaatcggtaaaagaagaaaacaattattatgatgaactccaatcgaatcataaagatgaaatagagagtgcctttaaaatttctaataaggctgagagaaatgaggcattaaaagaaattagagacaaaattaaagagaactacgaagaacttgatgaacttgatatgggcaagttaatgaacgaatttaaaaagcttgaaaaaaatatcgtaagaggaaatatcttgaataatcagccaagaatagatggaagagatcaagatacagtgagacctatttttgttgaaacaaatattttgcctggtgcgcatggttcagctttatttactcgaggtgaaactcaggcaattgtagcggcaacactaggttcttctagagatgctcagagaatagaatctattgaaggagaagatagcgat

SEQ ID NO: 256733 - DNA, 460 bp, Unknown
  Bacterial polypeptide expressing nucleotide sequence isolated from the Sargasso Sea
atgaacgaggtaatctcaagagaaataaagtggggcgatcaagtattatcaattgaaactggtaaggtcgcaaagcaagcaacagcttcaaccattgttagatatggtgaaacagtcgtaatggcaaatgttactgccgctaaacaggcaaagccagatatagatttttttccacttacagtaaattatcaagaaaaattttatgcagcaggaaaaattcctggtggcttttttaagcgagagggaagaccaacagaatttgagactttaacttcaaggctaattgatagaccaataagacctctttttcctgaaggcttcaaaaatgaaactcaagttattcttacagttctatctcatgatggtgaaaccaatccagatattattgcaatgattgctgcttctagtgctctcactttgtcaggaattccttttatgggaccaatcgcaggatgtagag

SEQ ID NO: 256734 - DNA, 931 bp, Unknown
  Bacterial polypeptide expressing nucleotide sequence isolated from the Sargasso Sea
aactctaggttcaaaaagagatgaaatgatcattgatagcatggatgaggattttaagaagtcctattatatgcattacaattttcctccatactgtgtgggtgaagtcggcagaattggttttacaagcaggcgggaaatcggtcatggaaatttggctcaaagggcaataaaaccagtgttgccagactatgatgattttccatatacaatgagaattgtatcagaaataatggagtcaaatggatcatcctcgatggcatccgtctgtggtggtagcctagctcttatgagtgctggtgcaccacttaaagctcctgtagctggaattgctatgggtctaattactgatggtgagcgccacgcaatattaagtgatattctaggtatggaagaccatcttggtgatatggattttaaaattgctggtacaaatgatggaatcacagctattcaactagaccttaagattgaaggtctgtcgtttgaaattatggagaaggcactgcaacaagcaaaagaaggcaggatgcatattcttggcaaaatgaatgaagtgatgccaaaacctaatgatatctctccttatgcaccaagaataatgtctgtttcaattaatccagaaaaaattggagccctcattgggcctggaggcaagaacattaaaaagatcattgaagatacagaatgtgaagttaatgttgatgatgatggacttgttacaattgctggtatgaatacagaaaagtgtaatgaagcacttgaattggtgaaagctattacatttgaacctgaagttggaatggaattcgatggaaaggtcactaggcttatgtcgtttggtgcgtttgtagagttcgctccaggtagagaaggtatggtgcatatttctgaattagaatggcatagagtagagaaagtcgaagatgtc

SEQ ID NO: 256735 - DNA, 930 bp, Unknown
  Bacterial polypeptide expressing nucleotide sequence isolated from the Sargasso Sea
gcattagctatttctggcttgccatttcaaggtcctataggtgcaagtagagttggatataaagatggaaaatatttattaaacccatctattgaagaattaaaagaatcagaattagatttagttgtagcaggaacaaaagatgcagttttaatggtagagtctgaaacttcaggattatctgagaaagtgatgttagatgctgtaaaatttggacatgaaaactttgtaccaataattgaagcaatagaaaaattagcaaaaaaagctggaaagccaaaatgggaagtcgaagagattgatcattctcaggttaaaaataaaatatctgaaaaatttgaaaaagatttaagaagcgcatttaaagaaattgataagaaaaaaaggtctacagcaatttctgaaatagagactaaatgtaaagaaatgtttgctgaggatgaaaatgttaccgaaaatcaagctatggctcaacttaagtctttagaaaaagatattgttagaactgcaatcttaaaagataagaaaagaatagatggtagaggtttagcagatgttagacaaattaaatgtgaggtgggtgtattaccaagaacacatggttctgcacttttcactaggggagaaacgcaagcacttgttgttactacactaggcatgacagatgatgagcagagattggaaagtcttgagggaatgcaaagatcgaattttatgttgcattataattttccacctttttcagtaggtgaatgtggaagaattggaactggaagacgagaaattggtcatggtaaattagcttggagagctattaattcctctttaccttcaaaagagaactttccttatacattgcgagtagtttcagaaataactgagtctaatggatcttcatcgatggctacagtttgtggaacttcgctttca

SEQ ID NO: 256736 - DNA, 337 bp, Unknown
  Bacterial polypeptide expressing nucleotide sequence isolated from the Sargasso Sea
atgtttaaaatacataaagaagaaatagaattagacggcaaaaagataactttagaaacaggaaagatagctcggcaagcagatggagctataattgcaacacacggtgaaactgttgtaattgcaactgtagtaggtgcaaaaaaagttgatcctgaaacagattactttccattatcagtgaactatcaagaaaagtattatgctgcggggaaaatacctggaggatattttaaaagagaagcgagaccaaccgaatcggaaactctcacatcaagattaattgatagaccaatacgacctttatttccagacggttttagaaatgaagttcagg

SEQ ID NO: 256737 - DNA, 991 bp, Unknown
  Bacterial polypeptide expressing nucleotide sequence isolated from the Sargasso Sea
tttaccttttcaaggacctatagcagcgtcaagagtaggttatataaataataattatgtgttaaatccatcaaaagaaaaactaaaagaatccaaattagatttagttgttgctggcaccaaagacgctgtgctaatggttgaatcggaagcttcagtattaacagaaaaacagatgttagatgcagttaaatttggacacgaaaaatttgttccaataataaaagcaatagaatctttagctaaaaaaagttcaaaagaagcatggaaaatagaggagaaagactatagtgaattaaagaaaaaaatttcaaaggagttaacaaaagatttagaaaaagctttttctgaaaaggataaaaagaaaaggtcagaattagttaatttagccacagaaaaatgcaaatctttatttgaaggagacgatacctattctgagttagaaatatccttacaattaaaaaatttagaaaaggatatagtgagaacaaagatacttaaaagcaaacaaagaatcgatggtaggggcttgtcagacgtaagacctattaaatgtgaagttggagtactgccaagaacacatggatcagctttatttactagaggtgaaacacaggcattagttacaacaactctaggaacaacagaggatgaacagcgtattgaaagcttagaaggtcaaaaaagagtaagatttatgttgcattataattttccaccattttcagttggagaagtaggaagaataggaacaggtagaagagaggtaggtcatggaaagttagcatggagagctttaaattcatcattacctgaaaaagaaaaatttccttacactctaagactagtttcagagataacagaatccaacggttcttcatcaatggcaactgtttgtggagcatctttagctctcatggatgccgctgtaccgattatcgagccagttgctggaatagcaatgggtttaataaaagataaaaaagagtat

SEQ ID NO: 256738 - DNA, 466 bp, Unknown
  Bacterial polypeptide expressing nucleotide sequence isolated from the Sargasso Sea
aatgtttaaagtttttaaaaaagagatagattttgggggaaagaaaattacccttgaaacaggaaaagttgctagacaagcagatggagcaattattgcaacttgcggtgagactgtagttttggcaacagccgttggcgcgaaaaaagttaacccagaagtggattactttccattatcagttaattatcaagaaaaatattatgctgcaggtaaaattcctggaggatattttaaaagggaagcgagacctacagagagtgaaactctaatatctagattaattgacagaccaataagacctttatttccagatgaatttaaaaatgaagtacaagtattaccaacagtaatttcatatgataaagaaaacgaagctgatattttatcaattattgcatcttcagctgctttatctatttcaggaatgccttttttgggacccagttggagcatcaagagttgg

SEQ ID NO: 256739 - DNA, 956 bp, Unknown
  Bacterial polypeptide expressing nucleotide sequence isolated from the Sargasso Sea
ccaactaaagaaaatctatctaattctagtttagagcttgtagtagctggaacaaaagagggtgttcttatgatagagtcagaagctcatgagctctcagaacaacaaatgttagatgcagttgttttaggtcaagatagttacaaaccagttattgaagcaattatttcacttgctaaaaaagctgcaaaagagccctggaaaataaaagaaaaagatgaagaattaacaaatcttccaaatataattaatgaagaatatggtaataagtttattgaagcctacaaaattacagaaaaacagaacaggtctgaaaaattaagtttaattagatcagaaattagtgagaaattttcttcagaaactatttcatcggttttattatctgatgcaataaaaaatgttgaaaaagatattgttagaggtgagttaatcaatactggaaatagaattgatggtcgagatactaaaactgtaagaccaattgtttgtgaaacaggaatattagaacgaactcatggttcagctctctttacaagaggtgagactcaagcaatagttgtttcaactcttggtacaggtcaagatgagcaaagaattgatgcaattgatggagaatatactgaaaacttcatgcttcattataattttcctccatattcagttggagaagtaggaagagtaggatcaacaagtagaagggaaattggtcatggtaaattagcttggagagctattcatccaatgctaccctcaaaagaaaagtttccttatacatacagagtagtttcagaaattactgaatctaatggctcaagttcaatggctacagtttgtggaacatcaatgtcattgatggatgccggtgtaccacttgaaagacccgtagcaggaattgcaatgggattaattaaagaaaatgataagtatgtaattttatcagatattcttaggtg

SEQ ID NO: 256740 - DNA, 590 bp, Unknown
  Bacterial polypeptide expressing nucleotide sequence isolated from the Sargasso Sea
aatgttcaaaatacataaggaagaattagaagttaatggtaaaaaattaactttagagactggtaagattgcacggcaagcagatggagctataattgcttcactaggagaaacagttgttattgcgactgcagttggagctaaaaaggttgcagagggtcaagactattttccattatcagtaaactatcaagaaaaatactatgcagctggtaaaattcctggaggatattttaagagagaagcaagacccactgaggcagaaacattaatttctagactaattgataggcctataagacccttattcccatctggttttatgaatgaggttcaagtactccctacagttttatcatacgatagtaaaaatcaaccagatatcttatcaattatagcatcttctgcagctttagccatatcaggtttgccttttatgggacccattgctgcaagtagagttggatacaaagatggaaaatatttattaaacccatcagttgaagaacttaaagagtccgatttagacttagtggttgcagggactaaagaagcagttttgatggtggagtcagaaacgtcgggactat

SEQ ID NO: 256741 - DNA, 502 bp, Unknown
  Bacterial polypeptide expressing nucleotide sequence isolated from the Sargasso Sea
aatgtttaaagtatataagaaggaaattgaagtagcaggaaagaaaataagtttagaaacaggcaaagtagcaagacaggcagacggagcaatcatagcaacatgtggtgagacggttgttttagcaacagtggtaggagcaaaaaaagtaaatccagatgtggactactttccattatctgtaaattatcaagaaaaatattatgcagctggaaaaattccaggtggatattttaaaagagaagcaagaccaacagaaagtgaaacactaatctcaagattaattgatagaccgatcagaccattgtttccagatgaatttaaaaatgaagttcagttattacccacagtaatttcatatgacaaagaaaatgaaccagatattttatcgattgtagcttcatctgctgctttagctatttcaggaatgccatttatgggccctgtaggagcatctagagtaggctttgttgatggtaattatgttttaaacccatctaaa

SEQ ID NO: 256742 - DNA, 784 bp, Unknown
  Bacterial polypeptide expressing nucleotide sequence isolated from the Sargasso Sea
tacagagtcgaatggctcttcctctatggctactgtctgtggtacttcactagcattaatggatgcaggtgttcccattaaagaaccagtagcgggtattgcaatgggtttaattaaagaaggtaaagattttagcgtattatccgatattttaggtgatgaagatcatcttggagatatggatttcaaggttgccggaactaaagatgggattacttcacttcaaatggatataaagataacaggtattacatttgaaatcatggaacaggctttaagtcaagctaaagagggaagagttcacattttaggagaaatgaataaagcgttgtctaaatctagggaagatgttggaaaatatactccaaaaatggaaaagattacggtggataaaaaagatattgcagctgttataggaaaaggaggcgcatcaatcagagaaattgttgaaaaatcaggagctaaagttgacgtaaatgatgaaggtgtagttacagtttcagcaccagacgaagagtcaagaaattctgccatgcaaatgattaaagatattactgcaaaaccagaactagataagatttattccggtaaagtaatgaaaatcatggaatttggagcattcgtgaattttttaggtaaacaagatggactagttcatatttcagaattggcaaacaaaagagttgctaaagttaccgatgtagttaaagaaggcgatgaagtgaaagtaaaagtaattggtttcgatagaggtaaagttaagctttctattaaacaagtttaa

SEQ ID NO: 256743 - DNA, 559 bp, Unknown
  Bacterial polypeptide expressing nucleotide sequence isolated from the Sargasso Sea
aatgtttaaagaatataaaaaagaaattgacctaaatggtaaaaaagtaagtttagaaactgggaaaattgcaagacaagctgacggagcaataattgctaaatgtggagaaacagttgttttagctacagttgttggagcaaaaaaagttaacccggacatggattactttccattatcagtaaactatcaagaaaaatattatgcagcaggaaaaattcctggtggttattttaaaagggaagcaagaccaacagagagcgaaacattaatatcaaggttaattgatagaccaataagaccactgtttccagatgaatttaaaaacgaagtacaactgcttccaacagtaatatcttatgataaagaaaatgaagcggatatattatcaattattgcatcatcagctgctttggctatttcaggaatgccatttatgggtcctatcggagcatccagagttggttttattgacggaaaatatgtccttaatccatcaaaaaaagaattagaaaattcaaaattagatcttgttgtagcaggaactaaagacgcagtt

SEQ ID NO: 256744 - DNA, 112 bp, Unknown
  Bacterial polypeptide expressing nucleotide sequence isolated from the Sargasso Sea
aaaagagaggcaaggcccactgaggcagaaactttaatttcaagattaatagatagaccgataagacctttgtttccatctggttttatgaatgaggtgcaagtgttaccca

SEQ ID NO: 256745 - DNA, 655 bp, Unknown
  Bacterial polypeptide expressing nucleotide sequence isolated from the Sargasso Sea
gccggcactgataaagggaattacagcgttacaaatggatatgaaaattacaggtttaccagtatctattatttctgatgcaattaaaaaagctcgacctgcaagattacatatcttagaaaagatgcaagcggcaatagataaacctcaagaatcactctctccgcacgctccaagacttttaagctttagaattgatcctgagcttataggaaccgtaattggtcctggtggaagaactatcaaaggaattactgagagaaccaatacaaaaatagatatagaagatggaggaattgtaactattgcatctcatgacggagctgcagctgaagaagcccaaaagataattgagggattaacacgcaaggttcatgaaggtgaaatcttctctggtgttgtaaccagaataatacctataggtgctttcgtagaaatacttcctgggaaagaaggtatggttcacatttctcaattgtctgaagcgagagttgagagagtcgaagatgtagtgaggcaaggtgatgaagtaaccgttcgagttagagagatcgatagcagaggaagaattaatcttactttgagaggtgtaggacaaaataatggaatgtcttatcccgaaccaactccaactccagtagcaccgctgaattaa

SEQ ID NO: 256746 - DNA, 894 bp, Unknown
  Bacterial polypeptide expressing nucleotide sequence isolated from the Sargasso Sea
ggttttatagataataaaaatgttcttaacccaacaaaaaaagaattagaaaattctaaattggatttagttgtagctggaacaaaagatgcagttttgatggtagagtccgaagcttcaggtttaactgaaaaacaaatgttagaagctgtaaaatttggacacgaaagttttgcaaacgtaattaaaggtatagaaaaattagcgaaaaaagcttcaaaagaaaaatggaaaatcgaagagaaagactttagtgaagtctctaaaaaaattaaaaaagagcttactaaagatttagagaaggcatttactgaaaaagataaaaagaaaagatctgatttgataagttcggcaggagaaacatgtaaatctttatttaaggatgatgagacactcttggaacatgaggtgatgactcagcttaaaaatttagaaaaagacattgttagaacaagaattttaaaaagtaaaaaaagaattgatggcagaggtctttcggatgtgagaccaataaaatgtcaagtaggtatacttccaagggttcatggttcagcattatttaccagaggtgaaacacaagcaatagtgacaactactttaggaacctcagacgatgaacaaagaatagaaagtttggaaggattaaaaagggaaagatttatgttgcactataattttcccccattttctgtaggtgaaaccggcagaatcggaactggcagaagagaagtgggacatggcaaattagcttggagagcattaaactcctcattgccgaaaaaagaaaattttccatatactttgcgaattgtatctgaaattacggagtcaaatggatcatcatcgatggcgacggtatgtggatcttctcttgcattaatggacgcagcagtt

SEQ ID NO: 256747 - DNA, 790 bp, Unknown
  Bacterial polypeptide expressing nucleotide sequence isolated from the Sargasso Sea
tcgaataaaaggaaaaaaaataagtttagaaactggtaaaattgcaagacaagcagatggagcaataattgcaaagtgtggagaaacagttgttttagcaacagttgttggtgcaaaaaaaatcaatcctgatgtggattattttccattatcagtaaattatcaagaaaagtattatgcggcaggaaaaattcctggaggctattttaaaagagaagcaaggccaactgaaagtgaaacattaatatcaagattaattgataggccaataagaccattgtttccagatgaattcaaaaatgaagtacaattacttccaacagtaatttcttatgataaagaaaatgaggcagatatattatcaattattgcttcatcagctgctttagctatttcaggcatgccttttaaaggtcctgttggagcttctagagttggttttgttgacggaaaatatgttctaaacccatcaaaaaaagaattagaaaattctaaattagatcttgttgtagctggtacaaaagatgcagtattaatggtcgaatctgaaacaagtggtttaacagaagaagaaatgttaaatgcagttaagtttggccatgaaaattttgttcctgtaattaacatgattgaagaacttgcggccgaatgcaaaaaacctgattgggttgtagagaaaaaagatctttcagaagttaagaaaaaaattgaagatgaatttacaaatgaactaaaaaaagctttttcaattaaagataagcaagaaagatcaaatttaatatctgaaata

SEQ ID NO: 256748 - DNA, 332 bp, Unknown
  Bacterial polypeptide expressing nucleotide sequence isolated from the Sargasso Sea
aatgtttaaagaatttaaaaaagaaattgagttaaatggtaaaaaaataaagttagagacaggtaaaattgctcgacaagcagatggagctgttattgcaacgtgtggggaaacagttgtattagcaactgtagtaggagcaaaaaaagtcaatcccgaggttgattacttcccactgtctgtaaattatcaggaaaaatattatgctgctggtaaaattcctggtggatattttaaaagagaagcgagaccaacagagagtgaaacgttaatttcaagattaattgatagaccgataagacctttgtttccagatgaatttaaaaatgaag

SEQ ID NO: 256749 - DNA, 418 bp, Unknown
  Bacterial polypeptide expressing nucleotide sequence isolated from the Sargasso Sea
aatgtttaaagaatttaaagaagaaatagattttggtggaaaaaaagtaattttagaaacagggaaaattgcacgacaagctgatggggctgtaattgctacatgtggtgaaacggtggttattgcaacagttgttggtgcaaaaaaagttaatcctgaaactgactactttcccttgtcagtaaattatcaagagaaatattacgcggccggaaaaattccaggtggatactttaaaagggaggcaagaccgactgaagctgaaactttaatatctagattaatagacagacctatcagacctttgtttcctgaaaattttaaaaatgaggtacagattttacccactgtgctttcatatgacaatgaaaatgaagcagatatactttcgataatagcctgctcagctgccctatct

SEQ ID NO: 256750 - DNA, 317 bp, Unknown
  Bacterial polypeptide expressing nucleotide sequence isolated from the Sargasso Sea
aatgtttaaagttgtaaaaaaagaaatagatgtaagtggaaagaaaataagtttagaaacaggtaaaatagcaagacaagcagatggtgcaataatggctcagtgtggtgaaacagtagttttagcaacagtagttggtgcaaagaaagtaaatccagacattgactattttcctttgtctgtaaattaccaagaaaagtattatgcggctggtaaaattccaggtggatattttaaaagagaagccagaccaactgaaagtgagactttaatatcaaggctaatagatagacctattagacccttgtttcctgatg

SEQ ID NO: 256751 - DNA, 712 bp, Unknown
  Bacterial polypeptide expressing nucleotide sequence isolated from the Sargasso Sea
gttgcacctgaaaggttacgaaatacattgagcataaaagataagcaagagcggtatgagagtttggacaaattacatgatgaaataattatagagatacttggagatgatcctgaaagtgatactgttaaagagtttagtcaaattttttcagatataaaaaaaggagaaatgcgctcgcgtttgatcaatgaaaatattcgtattgacggacgtaaacctgaagacattagacctataacttgtgaaacaaaagttttaccaaggactcatggttctgctttgttcactcgaggagagacacaagcacttgctactacaacgttaggagctcgtgaagatgaaaaaatgattgatagccttgatggtatttcgtttaaaagatttatgctgcactacaacttccccagtttctgtgttggagaaacaagcccccctagaggaccaggcagaagagaaataggtcacggtacacttgctgaaaggggattgagtactttaatacctggaaaaacagaatttccatatacaatcagactagtttcagaaattctagaatcaaacggatcatcttcaatggcaactgtttgcgcaggatcattggcattaatggatgctggagtacctctcaaagcagctactgcaggaattgcaatggggctgatcagcgacggtaaaaaccatgtgattctttcacgacattcttggtgat

SEQ ID NO: 256752 - DNA, 589 bp, Unknown
  Bacterial polypeptide expressing nucleotide sequence isolated from the Sargasso Sea
aatgtttaaagtatataagaaggaaattgaagtagcgggaaagaagataagtttagaaacaggtaaagtagcaagacaggcagacggtgcaataatcgcaacatgtggagagacagtcgtactagcaacagtagtaggagcaaaaaaagtaaatcctgatatggattacttcccattatctgtaaattaccaagaaaaatattatgcagctggaaaaattccaggtggatattttaaaagagaagcaagaccaactgaaagcgaaacattaatctctagattaattgatagaccaatcagacctttgtttcctgatgaatttaaaaatgaagtacaattattaccaacagtaatttcatacgataaagaaaatgaaccagatattttatcaatcactgcatcttcagcagcattagctatatcaggaatgccatttatgggacctgtaggagcttctagagttggttttattgatggtaaatatgttttaaatccatctaaggcagagttagaaaaatcaagtttagatttagttgtagcaggcacaaaagatgctgtgcttatggttgagtctgaaagcagtggttaa

SEQ ID NO: 256753 - DNA, 684 bp, Unknown
  Bacterial polypeptide expressing nucleotide sequence isolated from the Sargasso Sea
ccatctaaagaaagttttccttatacttttagaattttatctgagattactgaatctaatggttcatcttctatggcaacagtatgtggaacatcattagcattaatggacgcgggtgttccaataaaagaaccagttgcaggaattgcaatgggtttaattaaagaaggagatgattttagcgtattatctgacatcttaggagatgaagatcatttaggtgatatggactttaaagtagcaggaactaaagatggaattacatcacttcaaatggatataaaaattacaggcattacatttgaaattatggagaaagctttaaatcaagcaaaagatggaagaattcatatcttaggagaaatgaataaagcattagacaaatccagagcagatgttggcaaacataccccaaaaatggaaaaaattacagttgataaaaaagatatcgcagcagtaattggaaaaggtggcgcaacaattagagaaattgttgaaaaatcaggagccaaggttgatgttaatgacgatggtgtggtaaccgtggctgcaccagatgaagaatctagaaatattgctatgcaattcattaaagacataaccgctaaagctgaattaaataaaatttataatggaaaagtaatgaaaattatggaatttggagcatttgtaaatttcttggga

SEQ ID NO: 256754 - DNA, 811 bp, Unknown
  Bacterial polypeptide expressing nucleotide sequence isolated from the Sargasso Sea
agctcttgtagtttcaactttaggaactggacaagacgagcaaagaatagatgcgattgacggcgaatatacagagaattttatgttgcactataattttccaccttactctgttggagaagttggaagaataggttctaccagtagaagagaaataggacatggaaaattagcctggagagctattcacccaatgttaccttctaaagaaaagtttccttacacttatagagttgtatctgaaattactgaatctaatggctctagttctatggcaactgtttgtggtacctcaatgtctttaatggatgcaggagtgcctttagaaagaccagtagcaggtatcgcgatgggcttaattaaagaggatgataaatatgtaatattatcagacatacttggtgatgaagatcatctaggcgatatggattttaaagttgcaggaacttctgaaggaataacttcattacaaatggatattaaaataactagtatcacagctgaaattatggaagaagctttagcgcaagctaaagatggacgattccacatacttgttgaaatggccaaagcaattgataaacctaaacaatcaatttcccaatacgcgccaacaataactaatctgcaaataaataaagataaaataagagaagttattggtaaaggaggagctgttataagagaaatctctgaaacaactggcgccaaaattgaaattaatgatgaaggtttagtgagtattgcagcagtagatcaaaaatctggaaatgatgcattagaatggatcaaaggtatgtcgaagagccag

SEQ ID NO: 256755 - DNA, 625 bp, Unknown
  Bacterial polypeptide expressing nucleotide sequence isolated from the Sargasso Sea
atgtttaaaataagcaaagaagaaatagatgttaatggtaaaaagataatactcgaaacgggcaaagttgcaagacaagcagatggagctataatagcaacgtgtggtgagacagttgtaatagcaacagctgtcggagcaaaaaaattgaatgagggtcaagactattttccattatcagtaaattatcaagaaaaatattatgctgcaggcaaaatacctggaggttattttaaaagagaggctagacctactgaagcagaaacattaatttcaagattaatcgacagacctataagaccattatttcctaacagttttatgaatgaagtgcaattattgccaacagtgttatcttatgatggagaaaaccaaccagatattctttctataatcgcttcatcagctgcattatcaatttctggattaccttttcaaggcccaatagctgctagtagagtcggttataaggatggaaaatatcttttaaatccatcaccaaatgaattaaaagactcagagcttgatttggtggttgcagggactaaggaagcagttttaatggttgagtctgaaacttcaggattatcagagaaagttatgcttgatgctgttaaatttgggc

SEQ ID NO: 256756 - DNA, 430 bp, Unknown
  Bacterial polypeptide expressing nucleotide sequence isolated from the Sargasso Sea
aatgtttaaagtagtaagaaaagaaatagaagtaagtggaaaaaaaataagtttagaaacagggaaaattgcaaggcaggcagatggagcgatcatagctcaatgtggtgaaacagtagttttggctacagtagtaggtgcaaaaaaagttaatccagacatggattattttcctttatctgtaaattatcaagaaaaatactatgcagctgggaagataccaggtggatattttaaaagagaagcaagaccaactgaaagtgaaacattaatttctagattaatagacagacctattagacctctgtttcctgatgaatttaaaaatgaagtacaattattgccaactgtaatatcatacgataaagagaacgagcctgatattttatctatcattgcgtcttcagctgctttagcaatatctggaatg

SEQ ID NO: 256757 - DNA, 760 bp, Unknown
  Bacterial polypeptide expressing nucleotide sequence isolated from the Sargasso Sea
gagaagtttatgttacattataattttccaccttattcggttggagaggttggtagaacaggatttaccagcagaagggaagtgggtcatggtaaacttgcatggcgtgcaattaaagcagtacttcctgactctgaggaattcgattacactataagattagtttctgaaattactgagtctaacgggtcgtcttctatggcaaccgtctgcggatcttctttagcattaatggatgcaggtgttccaattaagaatgctgtatctggaattgctatggggcttataaaagagggtgatgattttgcagtactttcagatatattgggtgatgaagatcatttaggagacatggattttaaagtagctggcacaaaagacggcattacctcattacagatggatataaaaattacaggaataacaactgaaattatggaaaaagctttaaaccaagcacacgctggtagaatgcatatattgtctgaaatgaataagaccattgatgctcctagaaccgagctaggaccttatactcctagaagcgaaatgattaagattcaaagagataatattggtgctgtaattggtaaaggaggagcggtaattaaggacataattgccgagtctggagctaaagttgatataagtgacaacggtactgttaaaatctctggaaccaacaaggaaatgatccaatcggcaatcgatatgattaatggcattattcaggagccagaagttggagatatatttgaag

SEQ ID NO: 256758 - DNA, 702 bp, Unknown
  Bacterial polypeptide expressing nucleotide sequence isolated from the Sargasso Sea
attgcatcttctgcagctttagcaatttcaggattaccatttcaggggccagtagcagcatctagagtcggctatataaataatgaatatgttttaaatccatctaaagaacaattaaaagaatcaaaattagatcttgtggttgctggaacaaaagatgctgtattgatggtcgaatccgaagcatctggattaactgagggacaaatgttagatgctgtaaaatttggacatgaaaaatttgctccagtaattaaagcaatagaaaatcttaaaaagaaatgtgcaaaagaagagtggataatagaaaaaaaagattatagcaaattaaaagataaaatttctaaagagctaacaaaagatttagaaaaagctttttctgaaaaagacaagaaaaaaagatctgaattagttaatttagcaacagaaaaatgtaaatctttattcgagggagacgagacttattctgaacttgaaataatgttacaattaaaaaatttagaaaaagatattgtaaggacaaaaatactcaaaactaaaaaaagaatagatggcagaggtttatcagatgttagaaccattaaatgtgaggttggtgttttaccaagaacacatggatctgctctatttactagaggggaaacgcaggctttagtaactaccacacttggaatgaccgacgatgaacaaagaatcgaaagt

SEQ ID NO: 256759 - DNA, 636 bp, Unknown
  Bacterial polypeptide expressing nucleotide sequence isolated from the Sargasso Sea
aatgtttaaagtatttaaaaaagaaattgaattaaacggaaaaaaaataagtttagagacaggtaaaattgcaaggcaagccgatggagcaataattgcaaaatgtggtgaaacagttgttttagcaactgttgtaggtgcaaaaaaaataaatccagatgtagattactttccattatcagtaaattaccaggaaaagtattatgcagcaggaaaaattcctggtggttattttaaaagagaagcgaggccaacagaaagtgagactttgatctctagattaattgataggccaataagaccattatttccagacgaatttaaaaatgaagtacaattacttccaacagtaatttcttatgataaagaaaatgaagctgacatactatcaatcatagcttcttctgcagctttagcaatttcagggatgccatttaaaggtcctgtgggagcatctagagtgggctatattgatggaaaatatgttttaaatccatcaaaaaaagaattagaaaattctaaattggaccttgttgtagctggtacaaaagatgcagttttaatggttgaatctgaaacaagtggtttaacagaagaagagatgttaaatgcagttaaatttggacatgaaaattt

SEQ ID NO: 256760 - DNA, 773 bp, Unknown
  Bacterial polypeptide expressing nucleotide sequence isolated from the Sargasso Sea
aactattcatgatgcttgttacgataaatgttattcaatagcaaaaaaaggcacttcaaaggctgaacgaagtttggctttttctaatttaaaagaagaagttaaagcattattcacggaagaagaaatagaagaaaatgtaaaattaattgaaaaatattttagcaaatctcaaaaagaggctataagagaacttactctaagtgaaggtgttagacttgacggaagaaaaactgacgaaattagagaaatatggagcgaagttgactacttaccttcaacacacggttcagcaatattttccagaggagagactcaagctctagcaaccgttactttaggaacatcacgagagtcaaacaaaattgatatgccttcttatgagggagaagagactttttacctacactacaactttcctcccttttgtactggagaagctagacctcttaggggaacctcaagaagagaagttgggcatggaaatttagcccaaagaggactaaaaggaatgattcctgaaaattgcccttatacagtccgagtcgttagcgaagttcttgagtctaatggttcttcctcaatggcaactgtatgttcaggaactctggctttaatggatgctggtatacaaatcaaaagacctgtttcaggaattgcaatgggacttatttcagatggtgaacgttatgctgttctaagtgacattcttggtgatgaagaccatctaggagatatggattttaaagtaacaggaaccactgaaggtatta

SEQ ID NO: 256761 - DNA, 700 bp, Unknown
  Bacterial polypeptide expressing nucleotide sequence isolated from the Sargasso Sea
ctggacaccggccgtatcgcccgtcaggcgacgggctcggtgatggtcacaatgggtagtaccagcgtgctgtgtactgtagttgcagagcagaaagcgaaggcgggtcaggcgtttttcccgctgtcggtgcattacgtcgagaaaacctactctgtcggtaagatccctggcggctttttcaagcgggagggtcgtcctagtgaaaaggagacgctcacctctcgactcatcgaccgtcccattcgaccgttgtttgaagacggcttcatgaatgaagtgcaggtggtatgtacagtgatgtcggcggacaaagatacagaccccgatattcccgcaatgattggtacttcagcagcgctggcgctatccggatgccctttcaacggccccatcggtggggcacgggttgggttcactgaatccagcggctacctcttgaatccgagttacacagcgcttgcggatagtcagttggacatggttgtcgccggcaccaaagacgcggtactgatggtcgaatcagaagccaaagagttgacggaagaccagatgctgggtgcggtgttgtatgcgcatcaggaaatgcaaaccgtgatcaacgcaatcaacgaactggtctgcgaagcgggtaaacctcgctgggactggcaggcaccggcagccgatgtggaattggtagccgctgtcgaggcggcag

SEQ ID NO: 256762 - DNA, 865 bp, Unknown
  Bacterial polypeptide expressing nucleotide sequence isolated from the Sargasso Sea
ttggttgtagcaggtacaagccaaggtgtattgatggtagagtcagaagcaaatcaattatctgaagaacagatgttagaagctgttttagttgggcaggaaacatataaggaggtaattaatgcaataattgctttagcaaaaaaagctgcaaaaaacccttgggaaattgctgaaaaagaccaagatataaaagaattaccatctattattgaaaaatcttacaaaaaaaattttgaagatgcatataaaattcaagaaaaacaaaaaagatcggaagagttatctaacttaagaattcaaattgaagaagaatttgtttcagaaaaattatcttctgtaattgttgctgatgcaattaaatcagttgaaaaagatattgttagaggagaattattaaaatctggaaaaagaattgatggtcgtgatactaaaactgttagaccaattgagtgtgaagttggcgtcttagatagaacacatggctcagcattgtttacaagaggtgaaacacaagctttagttgttacaacattaggtactggtttagatgaacaacgtatagatgcaatagaaggagagtataaagaaaattttatgcttcattataattttcctccttattctgtaggagaagttggaagagctggctcaacaagtagaagagaaattggacacgggaaattagcctggagagccattcacccaatgttaccttctgctgaaaaatttccttatacttatagagttgtatcagaaattaccgaatcaaatggctcaagttctatggcaactgtatgcggaacttcactttctatgatggacgctggagtacccttagaaaaaccaattgcaggaattgcta

SEQ ID NO: 256763 - DNA, 313 bp, Unknown
  Bacterial polypeptide expressing nucleotide sequence isolated from the Sargasso Sea
atgtataaagaatttaaagaagaaatagattttggtggaaaaaaacttactttagcaactgggaaaatagcccgccaggcagacggagctataattgctacctggggagaaacagttgttattgctacagttgttggtgctaaaaaagttaatcctgaaacagactattttcctttatcagtaaattaccaagaaaaatattatgctgctggaaaaataccgggtggttattttaagagagaggcaagacctacagagtcagaaacactaatatccagattaattgacagacccataagacccttatttccag

SEQ ID NO: 256764 - DNA, 862 bp, Unknown
  Bacterial polypeptide expressing nucleotide sequence isolated from the Sargasso Sea
tgtgacaaccctgaacagagactagatcttgtaatagctgggaccaaagatgccgtaatgatggtggagtcggaagcatatgagctatcagaaaaggaaatgctaggggcagttgaatatggacataaaatgatgcagcctgtaattgatctgatagtatctatggcagaagaaggtgcaaatgaaccctttgaatttaccgccagtgacacaagtgctttattgagtgccataaagaaggctggagaaaaagatctgagaaaagcattttctttaactgataaacaaaaaaggcaggccgcaatcaatgaagcggttgaaaaaattaaagcctcactgtctgaggatcaattggaagatgaaaaccttgaatcttgcattaaggccgttgagtccgacatagttcgtggcgatatactatctaagggtagccggattgatggtagagatcttaatactgtacgtccaatagtttgtgaaacgagtcttttaccaagaactcatggatcagctttattcactagaggagaaacacagggattggttgtcacgacattaggcactggagatgatgagcaaataattgatgctcttcatggaactggacgctctaattttatgttacactataattttccgccatattctgtaggagaatgtggtagaaatgcaggtcctggtagaagagaaataggacatggaaaattagcctggcgcgctctacaggctgttctgccggctgctactgattttccgtacactatacgggtggtatcagaaataacagagtcaaatggttcatcttctatggcttcagtatgtggaggttctctctctatgatggacgctggggtccctctca

SEQ ID NO: 256765 - DNA, 900 bp, Unknown
  Bacterial polypeptide expressing nucleotide sequence isolated from the Sargasso Sea
gcacagcaactatcagaagaacagatgttagaggctgttgtacttgggcaagaaacttataaagaagttatagacgcaattataaatcttgctaagaaagctgctaaagatccttgggatattccagagaaggaagaagaaattaaaaatttaccgattgaaattgagaaaaaatataaagcaaaatttattgatgcctacaaaattcaagaaaaacaaaaaagatctgaaacattaaatgaattaagatctgagattagcgaaaattatgaatccgaaacattatcctcagtaattgtaggtgacgcaacaaaatcaatagaaaaagatattgttagaggagaattattaaaaagtggtaaaagaatagatggacgtgacacaaaaacagttagaccaataaattgcgaagttggaattcttgagcgtacacatggctcagctttatttactagaggtgaaacacaagcacttgtagttactactttaggaactgggcaagatgaacagagaatagatgcaattgaaggcgaatataaagaaaattttatgctccactataattttccaccatattcagtcggggaagtagggcgagtaggatcaactagtagaagagagattggacacggtaaacttgcttggagagctattcatccaattttaccatcaagtgaaaaatttccttatacatatagagttgtttcagaaattactgaatcaaatggttctagttcaatggcaactgtttgtggtacatcactttcactaatggatgctggtgttcctttggagaaaccaattgctggaatcgctatgggtttaattaaagaagattcaaattatatagttttatcagatattttaggggatgaagatcatcttggagatatggattta

SEQ ID NO: 256766 - DNA, 435 bp, Unknown
  Bacterial polypeptide expressing nucleotide sequence isolated from the Sargasso Sea
aatgttcaaaatacataaggaagaattaaaggttaatgatcaaaaattaactttagaaacaggtagaatagctcgtcaagcagacggtgctattatcgcgacactaggagaaacggtagtgatagcaacagcagtaggagctaagaaagttgcagaaggtcaagacttttttcctttatcagtaaattatcaagaaaaatattatgctgcaggtaaaatacctggtggatattttaaaagagaggcaagacctactgaagctgaaactttaatttctagattgatagatagaccaattagacctttgtttccatctggtttcatgaatgaagtacaaatactaccgactgttttatcttacgatagcaaaaatcaaccagatattttatcaattattgcttcttctgcggctttagctatatcaggtttaccttt

SEQ ID NO: 256767 - DNA, 848 bp, Unknown
  Bacterial polypeptide expressing nucleotide sequence isolated from the Sargasso Sea
atccgtaaattatcaggaaaaatattatgctgctggtaaaattccaggtggatatttcaagcgagaagcaagaccgactgaagcagaaactttaatttcaagattaatagacagacctattagacctttgttcccttctagttttcttaatgaagttcagttgctaccaacagttttatcttacgatggagaaaatcagcctgacgtattatcgattatcgcatcttctgctgcattagctatatcaggtttaccttttcaaggaccaatcgcggcaagtagagttggatataaagatggaaaatatttattaaatccatctttagaagaattaaaagaatccgagttagatctagtcgtagctggaacaaaaaatgcagttttaatggttgagtctgagacttcaggattatctgaaaaagtaatgttagatgctgtaaaatttggtcatgaaaaatttgttccaataattgaggcgatagaaaagttagcaaaaaaagctggaaaacctaaatgggaagttgaagaaattgatcactcgagtgttaagaagaagattgctgaaaaatttgaagtaggcttaagaagtgcatttaaagagatagataaaaagaaaagatcaacagctatttctgaaatcgaaactcagtgtaaagaaatgtttgctgaagatgaatcgttaacggaaaatcaagtaatggctcagctgaaatccctagaaaaagatattgtaagaactgcaattttaaaagataaaaaaagaattgatggaagaggcttagcagatgttagacaaataaatgtggagttggtgtatttaccaagaaccatggatctgctttatcact

SEQ ID NO: 256768 - DNA, 781 bp, Unknown
  Bacterial polypeptide expressing nucleotide sequence isolated from the Sargasso Sea
agaaaactttatgcttcattataattttcctccatattcagttggtgaagttggtagagtgggttcaacaagtcgaagagaaattggccatggtaaattagcgtggagagcaattcatcctatgttaccttcagcagaaaaatttccttatacttatagagttgtttcggaaattacagaatctaatggctctagttcaatggcaactgtttgtggcacctccctctcattaatggatgcaggagttcctattgaaaaacctatagcaggaattgcaatggggttaattaaagaagacaaaaagtatataattttatccgatattttaggagatgaagaccatcttggagatatggatttcaaagtagcaggaacagaagacggtatcacatctttacaaatggatattaaaattaccagcattacatcagaaattatgaaagaggctttagctcaagccaaagaaggaagattacatatactagatgaaatgtctaaatctataaaaacttttagatctaagatttctgattatgcgcctactataaaaacttttcaagtacaaaaagacaaaattagagatgtcattggaaaaggaggagctgttataagagaaataacagaaaaaactggtgcaaaaattgaaattaatgatgagggaacagttagtatagcctcaattgataacgaatcaggacaagctgcaatagattggattaatagcatagttgaagagcctgaaataggtaaaatttattcaggtaaggttgtaaaacttatg

SEQ ID NO: 256769 - DNA, 770 bp, Unknown
  Bacterial polypeptide expressing nucleotide sequence isolated from the Sargasso Sea
ctcaatggccacagtctgtggaacttcacttgcattaatggatgcaggtgtgccaattaaagaaccagttgcaggtattgcaatgggattaataaaagaaggtgatgattttagcgtcttatctgacatattaggcgatgaggatcatttaggagatatggactttaaagttgctggaactaaagatggaataacttcacttcagatggatataaaaataactggtattacatttgaaattatggaacaggctttgagccaagctaaagatggaagagttcatattttaacagaaatgaataaagcgctttcatcttcaagatctgatgttggaaaacatactccaaaaatggaaaaaattacagttgataaaaaagatattgctgctgtgattggaaaaggcggagcaactatcagagagatagttgaaaaatctggcgctaaagttgatgttaatgatgagggagttgtaacagttgctgctcctgatgaacagtctagaaatagcgcaatgcaaatgataaaagacattactgctaaagctgaattaaataaaatttactcaggtaaggttatgaagattatggaatttggagcatttgtaaactttttaggaaaacaagatggacttgtgcatatttcagaactagcagataaaagagtagctaaagttgctgatgtcgttaaagagggcgacgaggtaaaagttaaagttattggttttgatagaggtaaagttaaactttctatgaaacaagctgctgaataaa

SEQ ID NO: 256770 - DNA, 445 bp, Unknown
  Bacterial polypeptide expressing nucleotide sequence isolated from the Sargasso Sea
aatgtttaaagtatacaagaaggaaattgaagtagcaggaaaaaaaataagtttagaaacaggtaaagtagcaagacaggcagatggtgcaataattgcaacatgtggagagacagtcatactagcaacagtagttggagcaaaaaaagtcaatccagatatggattactttccattatctgttaattaccaagaaaagtattatgcagcagggaaaattccgggtggatattttaaaagagaagcaagaccaactgagagtgaaacattaatttcaagattaattgatagacctatcagaccattatttccagatgaatttaaaaatgaagttcagttattaccaactgtaatttcttatgataaagaaaatgaagctgatattttatctatcacagcttcctcagcagcattagctatatcaggaatgccattcatgggacct

SEQ ID NO: 256771 - DNA, 650 bp, Unknown
  Bacterial polypeptide expressing nucleotide sequence isolated from the Sargasso Sea
tactgaaaaagggattactgcattacaaatggatatgaaaattaaaggattgccagtctctgtaatttctgatgcaataaaaaaagctcgcccggcaagactacatatcttagaaaagatgcaagaggctattgacaaacctcaagaatcattatcacctcatgcgcctagacttttgagcttcagaattgatccagaacttattggtactgtaataggaccgggcggaagaactattaaaggtattactgaaagaaccaacacaaagatagatatagaagatggaggaattgtaactattgcttcacatgacggggctgctgctgaagaagcacaaaagataatagaaggtcttactagaaaagttcatgaaggcgagattttctcaggagtagtaactcgtatcattccaataggagctttcgtagaaatacttcctgggaaagaaggaatggttcacatatcacaactatctgaagcgagagtagaaagagtagaggatgtagtaaggcaaggagatgaagtaacagtaagagttcgtgaaatagacagtagaggtaggataaatttaacattgagaggagtagctcagaatagtggcatgtcgtatcctgaacctaccccaactccggtggcacctctcaattaag

SEQ ID NO: 256772 - DNA, 886 bp, Unknown
  Bacterial polypeptide expressing nucleotide sequence isolated from the Sargasso Sea
gtaaaccctacaatacaagaattaaaaaactctaaattagatttggtagtagcaggaactaaaaatggtgttttaatggtagagtctgaagctcaacaattaagcgaagaaaaaatgcttgaagctgtagtgcttggtcaagattcttatctccctgtaattgatgctattatttcattagctaaacaagcagcaaaagatccttgggacatacctgaaaaagataatgaaattagtaatcttccaaaattaattggagatgaatatggttctaagtttagcgaggcttataaattaactgaaaaacaactaagagttgaaaaattaaatgtattaagatccgagattgaagaaaaacacttaagtgaaattcttacttcagtaatcgtatctgatgcaattaaatccgttgaaaaagatatagttagaggagatctactaaaaactggcaatagaatagatggcagagatactaaaactgttaggcctattgtttgtgaaacaggaattttagagcgtacacatggatcagctttatttaccagaggtgagacacaagctttagttgtaacaactcttggtactggaatggatgagcaaaggatcgatgctattgaaggtgaatataaagaaaactttatgttacattataattttccaccttactctgtgggagaagttggcagagcaggctctacaagcagaagagaaattgggcatggaaaacttgcatggagagctatacaccctatgcttccatctaatgataagtttccttatacttatagagtggtatccgaaataactgaatctaatggatctagttcaatggcaacagtatgtgggacatctatgtctttgatggatgcaggtgttcctattgaaa

SEQ ID NO: 256773 - DNA, 937 bp, Unknown
  Bacterial polypeptide expressing nucleotide sequence isolated from the Sargasso Sea
cctgatgaatttaaaaatgaagtacaattacttccaacagtaatttcttatgataaagagaatgaagctgacatactatcaatcatagcttcatcagcagctttagcaatttcaggtatgccatttaaaggccctgtgggagcatctagagttggatttattgatggaaaatatgttctaaatccatcaaaaaaagaattagaaaattctaaattggatctcgttgtagctggtacaaaagatgcagttttaatggttgaatctgaaacaagtggtttaacagaagaagaaatgttaaatgcagttaaatttggacatgaaaattttgttcctataattaaaatgattgaagaacttgcagcagaatgtaaaaaaccagactgggttgtagaaaaaaaggatctttccgaagttaagaaaaaaattgaagatgaatttacagaagagttaaaaaaagctttttcaataaaagataaacaagaaagatcaaatttaatctctgaaataacagataaagccaaaattttttttgaagataatgaaagttttacagatttagatgttaactcagaactaaaaaatttagaaaagagaatagtcagaacagatattttaaaaaataaaaatagaattgatggacgaggactctcagatgtaaggccaattatgtgtgaagttggaattttaccaagaactcatggttctgcattatttaccagaggtgaaacacaagctattgtaacaactactctaggaacttcagatgatgaacaaagaatagaaagtttagaaggtcttcaaagggaaaggtttatgctccactataactttcctcctttctcggttggagaaacaggaagaattggaactggaagaagagagattggacatggaaaacttgcttggagagcaaataattcatctttaccttcaaaag

SEQ ID NO: 256774 - DNA, 423 bp, Unknown
  Bacterial polypeptide expressing nucleotide sequence isolated from the Sargasso Sea
aatgtttaaattatacaagaaggaaattgaagtagcgggaaagaagataagtttagaaacaggtaaattagcaagacaggcagacggtgcaataattgcaacatgtggagagacagttgtattagcaacagtagtgggagcaaaaaaagtaaatcctgatatggattattttccattatctgtaaattaccaagaaaaatattatgcagctggaaaaattccaggtggatattttaaaagagaagcaaggccaactgagagtgaaacattaatctccagattaattgatagaccaatcagacctttgtttcctgatgaatttaaaaacgaagttcagttgttaccaactgtaatttcttatgacaaagaaaatgagccagatattttatcaatcactgcttcatcagcagcattagctatatc

SEQ ID NO: 256775 - DNA, 726 bp, Unknown
  Bacterial polypeptide expressing nucleotide sequence isolated from the Sargasso Sea
aatgttcaaggttcataaagaagaaatcaaaataagtggaaaaaaaataactctagaaacaggaaaaattgctagacaagcagatggagcgattatagcaacttgcggagaaacagttgtaatagctactgccgtgggagctaaaagtttaaaggacgggcaagattattttcctttatcagtaaattaccaagaaaagtattacgctgcaggaaaaatacctggaggatattttaaaagagaagcacgacctactgaagcagagactttaatctctagattaattgacagacccattagaccattatttccctcaagctttatgaatgaggtgcaattattacctacagtgttatcttatgatggagaaaatcaaccagatattttatctattattgcatcttcagcagctttagctatatcaggacttccttttcaaggtccaatcgctgcgagtagagttgggtacaaagaaggaaaatatttattaaatccatcaccagcagaattagaagaatctgatttggatttagttgtggcaggaacaaaagatgcggttttaatggtagagtcagaaacatcaggactaactgaaaaagtaatgcttgatgcggttaagtttggacatgaaaattttataccgataattaaagcaattgaaagtttagctaaaaaagcaggtaaaactaaatggatagttgaagagatagatcactcggaagttaa

SEQ ID NO: 256776 - DNA, 595 bp, Unknown
  Bacterial polypeptide expressing nucleotide sequence isolated from the Sargasso Sea
aatgttcaaaatacagaaggaagaattagaagttaatggtaaaaaattaactttagaaacaggcaaagtagcaagacaagcggatggagctatcttagccacattaggagagacagtagtaatagctacagcagtgggtgcaaaaaaagttgctgaaggtcaggattatttcccgctatcagtaaattaccaagaaaaatattatgcagcgggtaaaatacctggtggatattttaaaagagaagccagacctacagaggctgaaacattaatttctagattgatagacagacctataagaccactgtttccagctggttttatgaatgaagttcaagtgcttcccacagttttgtcttacgatagtgaaaaccaacctgacattttatcaatcattgcatcttctgcagctcttgcaatatcaggattaccatttttaggaccgatagcagctagtagagttggatataaagatggaaaatatttaataaatccatcggtagaggagatgaaagagtccgagctagatctagttgttgctggaactaaagaagcagttttgatggtagaatcagaaacgtcaggatttatctga

SEQ ID NO: 256777 - DNA, 954 bp, Unknown
  Bacterial polypeptide expressing nucleotide sequence isolated from the Sargasso Sea
cttcccggaaggttttttaaatgaggttcaagttttacctacagtactttcttatgatggagataatcaacctgacattttatctataattgcctcttcagcagctttagcaatctcaggaataccatttcaaggccctatagctgctagcagggtaggttttaataaaggtaaatatttgcttaatccatcaatcaaggatttagaagaatctcaattagatctagttgtagctggaacaaatgatgcagttttaatggtagagtcagaaacctctggtttaacagaaaaagaaatgttgggtgccgttaaatttggccatgaaaaatttaaccctataatcaaggctattgaaaaacttaaaaataaagttggaaaacctcaatggaaaattgaatcaaaagatcactccaaaataaaagataaaatagccaaggctttagagaaagatttaagaaaagcttttaaagaaatcgataaaaagaaaagatctctcgcaatctcagaagcagaaactaaatgtaaagaaatgtttgttgatgacgagagtgttactgaaaatcaagctagatctcaattgaaatctattgaaaaagatattgttagaacagccattatgaaagataagaaaagaattgatggtagaggtctctccgatgtaagacaaattaagtgtgaagtaggtattttaccaagaactcacggctctgccctttttactagaggagaaacacaagctttagtagtcaccactttaggaatgtcagacgacgaacaaagattagaaagcttagaaggaatgaaaaggtctagttttatgttgcattataattttccaccattttctgttggtgaatgtggcagaataggcactggaagaagagaaattggtcatgggaaattagcttggagagctataaactcatcattgccaaaaaaagaaaattttcctta

SEQ ID NO: 256778 - DNA, 862 bp, Unknown
  Bacterial polypeptide expressing nucleotide sequence isolated from the Sargasso Sea
gataggtttaatagatgataaatttatcgtaaacccaacaattgacgaaattaaaaattcaaaattagatttggttgttgctggtactaaaaatggtgttttaatggttgaatctgaagcacatcaattgagtgaagaaaaaatgcttgaggcagttattttaggtcaagaatcttatttacctgtaatagacgctattatttcgttagctaaaaaagctgccaaagaaccatgggatattcctcaaaaagacagtgaaatagctaaacttcctaaattaatttctgatgagtatggtgataaattcgatgatgcctatctagtaacagaaaaacaaaaacgtgtagaaagacttagtgaacttagagcaaaaatagaagaacaatatttaagtgatagtcttacttctgtaataatatctgatgctactaagtctgttgaaaaagatatagttagaggtggtttacttaaaactggcaacagaattgatggtcgagatacaaaaacagtaagacctattgtgtgtgaaacaggtattttaaatagaacccatggatcagctttatttactagaggtgaaacacaagctttagttgtaacaactcttggtacaggaatggatgagcaaagaattgatgcaattgaaggtgagtataaagaaaatttcatgctacattataattttcccccttattctgtcggtgaagtaggaagagctggttcaacaagtagaagagaaataggtcatggtaaacttgcatggagagcaatacatccaatgttaccatccaatgaccagttcccatatacttatagagtagtatctgaaataacagagtctaatgggtcaagctcaatggct

SEQ ID NO: 256779 - DNA, 824 bp, Unknown
  Bacterial polypeptide expressing nucleotide sequence isolated from the Sargasso Sea
ataaataataagcccgtcataaacccgaatgtatcagaaatggaaaactctgaccttgacttgatagttgctggaacaacagatgctattcttatggttgaatctgaagcaaaggaactttctgaagaggtcatgcttgattgtgtaatgaaggggcatgacgaaattaaaaaaattattgatggaatcaacgatctagttaaagaagctggcaaagaaaaatggattcttgatgaaattacaaaagatgaaactttaaaaaataaagtcatagagattgctggcggtgatattgaaagcgcttactcaattgttgaaaagtcagaaagatctactcgtctcgcagaaattaagcaaaatacaattgatcagattatcgaatcagatggagagatctctaaagatgatgttgcatctgaaatcaaaaaaattgagaaagaaactgttcgatcaaaaatacttaatggtgaaccaagaattgacggacgagatactaagacagttagggatatcaatgttgatatcaatattcttgagaggactcatggatctgctttatttactcgtggtgaaactcaatctattgttgtcacaactttgggatcagagcgatcatcacaaatcattgatgccttagaaggtgagtataaagataaattcatgttgcactataattttcctccttactctgtgggcgaagtaggttttatgggatccccaaagagaagagagattggacacggtaaacttgctcgtagagcattagaagcagttttacctaacatggctgaatatccatacaccattaggattgtttcggaaat

SEQ ID NO: 256780 - DNA, 864 bp, Unknown
  Bacterial polypeptide expressing nucleotide sequence isolated from the Sargasso Sea
cttggaaagagcgacctaaatatttttatggctgcatctaaagacgccatacttatggttgaaggggaagcaaataatattagtgaatctgtaatgctggatgcactctggtacggtcatgaacaaatccagcctattatttccatgcaggaagaattgatgcagagtgttggaaagaaaaaacgtaatgtagaagcgcctgaaacagatattgaactaaaaaataaaatcgaggcagttgcacctgaacggttacgcaaggccttgagcataaaagataagcaggagcgctatgagagtttggatacattacatgatgaaatgagtattgaaattcttggagatgggcctgaaagcgattcagttaaagagttcaggcaaattttttcagatatcaaaaaagaagaaatgcgttcacggttgattaaggaaaatattcgtctcgacggacgtaaacctgaagaaatcaggcctataacatgtgaaacaaaagttttaccaagaacccatggttctgcgctcttcactcgaggtgaaacacaagcgcttgcagttacaacattaggtgcacgtgaagatgaaaaaatgattgatagcctggatggtatttcatttaaaagattcatgctacactacaatttccccagtttcagtgttggtgaaacaagtgtcccacgaggaccaggccgaagggaaatcggtcacggaacacttgctgaaagaggattaagtacactaatacctggaaaatcagaatttccatacacaatcagactagtttcagaaatactggaatcaaacggatcatcttcaatggcaactgtttgcgctggatcattggcattgatggatgccggagtgcca

SEQ ID NO: 256781 - DNA, 613 bp, Unknown
  Bacterial polypeptide expressing nucleotide sequence isolated from the Sargasso Sea
gatatggactttaaagttgctggatctgaaaaaggaataacagcattgcaaatggatataaaaattgatggcattaacgaaaaaataatggatcaagcgcttaccagcgcaaaagatgcaagaatgcatatacttgaaaagatgaatgaagtcctttctaagccaaaggaattagcttcagacgctccatcaatgcaaaaatttatggtcaataaagataagattaaagaaattattggaaagggcggtgcggttattaagtctatccaagaagagtcaggagccgtagtggatataaatgactctggtgaagtatcagtttttggtgataatcaggctaagatgcaggtagcgcttgatattattgataaaattattgaagagcctgaagtagataaagtttatgaaggaacagttgtgaagatagtagactttggagcattcgttaatatcttacccggaaaggatgggttgcttcatatttcagagatttcagaagagagaacggaggacgtttcagcagttttagaggaaggacaaaaagttacagttaagcttatcggttttgataggggaaaaatgaaactttcaattaaagctcttagtaaataaa

SEQ ID NO: 256782 - DNA, 517 bp, Unknown
  Bacterial polypeptide expressing nucleotide sequence isolated from the Sargasso Sea
atgtttaaaataattaaaaaagaaattgaattaaatggaaagaaaataagtttagagacgggtaaaattgcaagacaagctgatggtgcaataattgcaaaatgtggagaaacagttgttttagcaactgttgttggtgcaaaaaaagtaaatccagatatggattactttccattgtcagtaaactatcaagaaaaatattatgcagcaggaaaaattcctggtggttattttaaaagagaagcaagaccaactgaaagtgaaacactaatttcaaggttaattgatagacctataagacccttgtttccagatgagtttaaaaatgaagtacaattacttccaacagtaatatcttacgataaagaaaacgaagcagatatattatcaatcattgcttcatcagctgctttagctatttcagggatgccatttatgggtcctatcgcagcgtctagagttggttttattgatggaaaatatgttcttaatccatcaaaaaaagaattagaaaatc

SEQ ID NO: 256783 - DNA, 602 bp, Unknown
  Bacterial polypeptide expressing nucleotide sequence isolated from the Sargasso Sea
tttggctactgtttgtggaacatcacttgcattaatggatgcaggagtaccaataaaagaaccagttgcaggtatagcaatgggtcttatcaaagaaggtgatgactttagtgtgttatcagatattttgggtgatgaggatcatttaggtgatatggactttaaagttgctggtactaaagatggaattacttcactacaaatggatatcaaaattattggtattacttttgaaattatggagcaagcgttgaaccaagctaaagaaggaagagttcatattttaggtgaaatgaataaggcattatctgcatcaagatctgatgttggaaaacatactccaaaaatggaaaaaattagtgtcgataagaaagacattgctgctgttataggaaaaggtggtgcaacgattagagagattgttgaaaaatcaggtgctaaagtcgacgtaaatgatgaaggagtcgtaacagtcgctgctccagatgaagagtctagaagcattgcaatgcaaatgattaaagatatcactgcaaaagcagaaatgaataaaatttattctggaaaagttatgaaaataatggagtttggtgcttttgtta

SEQ ID NO: 256784 - DNA, 969 bp, Unknown
  Bacterial polypeptide expressing nucleotide sequence isolated from the Sargasso Sea
gtcagatatattatcaatcattgcttcatcggcggctttagcgatttctggtttgccttttcaaggacctatagcagcctctagagtgggttatgttaatgaaaaatatattttaaatccttctaaagaagtattaaaagattccaagttagacttagtggttgcaggcacaaaagatgctgtattaatggtagagtcagaagcatcaggtttatctgaaaaacagatgttagatgctgtaaaatttggacacgaaaaatttattcccataataaaagcaatagaatccctagcaaaaaaatgttcaaaagaagcatggttagttgagaaaaaagattattctgatttgaaatctaaaatttcaaaggagttaacgaaagatcttgaaaaagctttttctgaaaaagataaaaaaaagagatctgaattagttaatttagctactgaaaaatgtaaatctttatttgaaggtgatgaaacttattcagagctggagatttctttacaactaaaaaatttagaaaaagatatagtaaggggaaaaatacttaaaacaaaaaaaagaatagatggaagaggacttgctgacgtaagaccaattaaatgtgaggttagcgtattgcccagaactcatggatcagccttatttactaggggcgaaacacaggcattggttacaacaacattaggaatgtctgatgatgaacaaagaattgaaagtttagagggacaaaaacgaattagttttatgttgcactacaattttccacccttttctgttggtgaagtaggaagaataggaacgggacgaagagaagtcgggcacggaaaattggcatggagagctttaaattcatcattacctgagaaggataagtttccttatacaataggagtggtgtcagaaattactgaatctaatggttcatcatcaatgggcactgtttgtggtgcatctttagcacttat

SEQ ID NO: 256785 - DNA, 382 bp, Unknown
  Bacterial polypeptide expressing nucleotide sequence isolated from the Sargasso Sea
aatgtttaaagtttttaaaaaagaaataaaaataggtgggaaaaaaattacattagagactggtaaaattgctagacaggctgatggagcaataattgcacaatgtggagaaactgtagttatggctacagtcgttggtgcaaaaaaagtaaatcctgaggtagactattttcctctatcagtaaattaccaagaaaaatattatgccgctggtagaattccaggtggatattttaagagagaagcaagacctactgaaagcgaaactttaatttcaagattgattgatagacctatcagacctttatttcctgacgaatttagaaatgaagttcaattattgccaacagtaatttcctatgacaaagaaaatgaggctgat

SEQ ID NO: 256786 - DNA, 748 bp, Unknown
  Bacterial polypeptide expressing nucleotide sequence isolated from the Sargasso Sea
acttctctagcattaatggatgctggggttccaataaaggaaccagttgcagggattgcaatgggtttaattaaagagggcgatgattttagtgtactatctgacattttaggagatgaagatcacttaggtgatatggattttaaagttgctggaactaaagatggaattacatctcttcaaatggatataaaaattacaggtattacatttgaaattatggaacaagctttaaaccaagctaaagatggaagagttcacattttaggagaaatgaataaagcattagataaatcaagagcagaagttggtaaacacactccaaaaatggaaaaaattacagttgataaaaaagatattgctgctgttattggtaaaggtggagcaacaattagagaaattgttgagcattcaggggctaaagttgatgtaaatgatgagggcgttgtaacagttgcagctccagatgaagaatctagaaataaagctatgcaaatgattaaagatataactgctaaagctgaattaaataagatttataatggaaaagttatgaaaattatggaatttggtgcatttgttaactttttaggaaaacaagatggccttgttcatatttcagaacttgctgagaaaagagtggctaaagtaaccgatgttgtaaaagaaggcgatgaagtaaaagttaaagttattggatttgatagaggtaaagttaaattatctattaaaaaagctgctatttaat

SEQ ID NO: 256787 - DNA, 849 bp, Unknown
  Bacterial polypeptide expressing nucleotide sequence isolated from the Sargasso Sea
ttagacttagttgttgcaggaacaaaagatgctgtgttgatggttgaatctgaggcttcagttttgacggaaaagcaaatgttagacgcagtcaaatttggtcatgaaaatttttctccagtaataaaagcaatagaaaatcttaaaaaaaaatgcggcaaagaagaatggaaaatagaagaaaaagattatagtaagttaagcaaaaaaatttccaaagaattaacaaaagatttagaaaaagcattttcggaaaaggataagaaaaaaagatcagaattggttaatttagcaactgaaaaatgtaaatctttgttcgaagaagacgaaacgtattctgaacttgaaatattattacaattaaaaaatctagaaaaagatattgtaagaacaaaaatacttaaaactaaaaaaagaatagatggtagaggcttgtctgatgtaagacctattaaatgtgaagtaggagttttgccaagaacacatggatccgcattatttactagaggagaaacccaagcattagtcacaacaaccttgggaacaacagaagacgagcaaagaatagaaagtttggaaggacaaaaaagagtaagatttatgttacattacaatttcccccctttttcagttggagaaacaggaagaataggtacaggcagaagagaagtaggtcatgggaaattagcatggagagctttaaactcatccttacctaataaagaaaaatttccttatactttaagagtagtttctgaaataacagaatctaatggttcttcatcaatggctaccgtttgtggtgcttctttagcacttatggatgctgctgtcccgaatagcagaacc

SEQ ID NO: 256788 - DNA, 980 bp, Unknown
  Bacterial polypeptide expressing nucleotide sequence isolated from the Sargasso Sea
gatattggtaagaacaaaaatacttaaaacaaagaaaagaattgatggtagaggtctatcagatattagaccaattaagtgtgaagttggcgtcctaccaagaacacatggatctgcattatttactagaggagaaactcaagcattagttactacaacattgggaacaacggaagatgagcaaagaatcgaaagtttggaaggtcaaaaaagagtaagatttatgctacattataactttcctccgttttctgttggagaaacaggaagagtaggaacaggtagaagagaagtggggcatggaaaactagcatggagggcattaaattcatcgctaccagaaaaagaaaagtttccttacactttaagagttgtttctgaaataacagagtctaatggctcttcatctatggctacagtttgcggagcatccctagcacttatggatgctgctgtaccaatagcccaacctgtcgctggaatagcaatgggtttaataaaggaaaaaaaggaattttcagttttatctgatattttgggtgacgaggatcacttaggagatatggattttaaggtagcaggtactaaagatgggattacatcgttgcaaatggatataaaaattacaggaataacttttgaaattatggagcaagcacttaatcaggctaaagatggaagagcacatattttagctgaaatgaataaagctattaaatcttcgagaaaagaagtatctaaatacacacctaaaattgaaacgataaaagttgataaaaaagatatagctgcagttattggcaaaggtggagctacaataagagagattgtagaattatcaggggccaaggtggatgttaaagataccggggaagtaactattgcggcgccagatgaagaatcaagaaaaaaagcaatggatatggtaaaaaatataattgctaaaactgaagtagggaaaatatataaagggaaaagtt

SEQ ID NO: 256789 - DNA, 855 bp, Unknown
  Bacterial polypeptide expressing nucleotide sequence isolated from the Sargasso Sea
aatgaagcagatattttgtcaataattgcttcgtcagcagctctatcgatatctggactacctttcaaaggtccggtaggtgcatcacgagtaggatttattgatggaaaatgcgttcttaatccaacaaagaaagaattagaaaattcaaaattagatttagttgtagcaggaactaaagatgcagttttaatggttgagtcagaagcatcaggacttactgaaaaagaaatgttggatgcagtcaaatttggtcatgaaggatttgttacagtaattaaaggtatagaaaaattatctaaaaagtgttcaaaagaaaagtggaaaattgaagaaaaagattttagcaaagtatcaaaaaaaatcgaaaaagagcttaccaaggatttagaaaaagctttttcagaaaaagataaaaaaactagatcagatctaattagtcaagctggagagaaatgtaaaagtttgtttgaaggagacgaagatcttttagaacatgagataatgttgcaacttaaaaaacttgaaaaagatattgttagaacaagaattttaaaaaacaaaaaaagaatcgacggtagaggtttatctgatgtaagacccattaaatgtgaagttggagttttaccaaggacacacggatcagcattatttacaagaggagaaactcaagctttagttactacaactttgggtactaccgacgacgaacaaagaattgaaagtttagagggtttaaagagacaaagatttatgcttcattacaattttcctcctttctcagttggtgaaactggaagaattggaacaggaagaaaagaagtcggacatggaaaattagcttggagagcttta

SEQ ID NO: 256790 - DNA, 908 bp, Unknown
  Bacterial polypeptide expressing nucleotide sequence isolated from the Sargasso Sea
tttagtcatgatctaataaatccatctgatgtagctgcaatgaatggagcttcagcagcattagctatatcagatataccatttcacaatcctctaggtggagtaagagttggaagaatagagggagaattaataattaatcctagtgtaaaagatcttgaaaagtgtgatttgaatatatttatggccgcttcaaaagaggcaattctaatggttgaaggcgaagcagatggagtcagcgaaaaagatatacttgatgcactttggtttgggcaagatgccataacaccaatcattgaaatgcaagaggaattgatgaaaagcgtaggaaagaaaaaaagaaaagttgaaaaaaaagaagtagatcaaaatattaaacaaaaattagaaaaaattgctcccgaaagattgaagaaaacgctaagtattcaagaaaaggttgaacgttatgaaaaattagatttacttttaggtgagttaaaacttgaagtccttggtgatagccctgacacagaagatgaaattcaagttgccaaagtgttcgaagaaataaaaaagtttgaaatgagatctagtttaataaaaaataaaattagaatcgatggaaggaaaccgaatgagatccgaccaatagcttgtgaaacaaaagttttacctcgaactcatggatcagcattgttcactcgcggggagactcaagctttagctgtaactactctcggtgcacgcgaagatgaaaaaatgatagatggattggatggagttacatttaaaagatttatgttacactataactttccaagttttagtgtaggagaggctagagctcctagaggaccaggtcgcagagagattggacatggtactcttgcagaaagaggattgattcctgttattccctcgtcgtt

SEQ ID NO: 256791 - DNA, 439 bp, Unknown
  Bacterial polypeptide expressing nucleotide sequence isolated from the Sargasso Sea
aatgtttaaagtatataagaaggaaattgaagtagcaggaaagaagataagtttagaaacaggcaaagtagcaagacaggcagacggcgcaataatcgcaaaatgtggagagacagtcgttttagcaacagtagtgggtgcaaaaaaagtaaatcctgatgtggattactttccattatctgtaaattaccaggaaaaatactatgcagctggaaaaatcccaggtgggtattttaaaagagaagcaagaccaactgaaagtgaaacattaatatctagattaattgatagaccaatcagaccgttgtttcctgataaatttaaaaatgaggttcaattgttaccaacagtaatttcttatgataaagaaaatgaggcagatattttatctattactgcttcatcggctgcattagctatatcaggaatgccatttatg

SEQ ID NO: 256792 - DNA, 853 bp, Unknown
  Bacterial polypeptide expressing nucleotide sequence isolated from the Sargasso Sea
taaaaatgaaatacaaattttctgcacagttttatcttcagataaaaatatcaatcctgatatcgcttctttaattggggcctcagcgtctctatcaatttcaggagttccattccagggtcctcttggggctgcaagagttggtttcattgacagcaattatgttttgaacccttcacctgaagagcttgaaaaatctatgctagatatggttgtggcaggaactgaagatgctgtgttgatggtcgaatctgaagcaaatgagttaagtgaagatctcatgttagggtcggtgctttatggtcatcaagagatgcaaaaagttattaaagcttgttcagacctaagggctaaagtaaatcctactccatgggattattctgaagatgagttaacggctgaatataaaatcaagatcgccgatactttcacagacgaaattgcaagcgcgtttaagattgctgataaatctgatagaggagaggcaataaacactgtcagagagaagattaatgaagcccacgaggatctagatgaaatggaaagaggtaaattaatgaatgcttttaaattggttgagaaagacgtagtaagaaaaagtattttatccaatgagcctagaattgatggaagagacttagatactgtaagaccaatctatgttgaaacagatgttctgccaagtgttcatggctcttctttgtttactcgtggcgaaactcaagcattggttgcagcaacacttggttctactagagacgctcaaagaattgaagggttaaatggagagcaatcaaatacttttatgcttcattataattttcctgcatacagtgtaggtgagattggcatg

SEQ ID NO: 256793 - DNA, 840 bp, Unknown
  Bacterial polypeptide expressing nucleotide sequence isolated from the Sargasso Sea
aaaaatgtaaatcgcttttcgaaggcgatgaaacttattcagagttagaggttatgttacaactaaaacatctagaaaaagatatagttagaggaagaatacttaaaactaaaaaaagaattgacggaagaggattatcagatgtaagacctatcaagtgcgaagtgggagtgttacccagaacacatggttccgctttatttaccagaggtgaaactcaagcattagtcacaacaactctaggaacaacagaagatgaacagcgaattgaaagtttagaaggtcaaaaaagagttagatttatgctgcattataattttccaccgttctctgtcggagaaacaggtagaataggaacaggtagaagagaagtaggtcacggaaaattagcttggagggctttaaattcatctttacctgagaaagaaaaatttccttacactttgagagtcgtttcagaaatcacagagtctaatggttcgtcatcaatggcaacagtgtgtggagcatctttagcacttatggatgcagctgttccaatagctcagccagttgctggaattgctatgggcttaataaaagaaaaagatgaattttcagttttatcagatattttaggtgatgaagatcacctgggagacatggatttcaaagttgctggaacgaaagatggaattacttcattacaaatggatattaaaattaccggaataacttttgaaattatggaacaagcattaaaccaagctaaagatggcagaacacatatcttggctgaaatgaataaggcaattaaatcttcaagaaaagaagtatctaaatatacccccaaaaattgaa

SEQ ID NO: 256794 - DNA, 830 bp, Unknown
  Bacterial polypeptide expressing nucleotide sequence isolated from the Sargasso Sea
tgtagcaggtactaaagatgcagtgcttatggttgagtctgaaacatcagggctatctgaggaagtaatgttagcagcagttaaatttggtcacgagggatttgttccagtaatcgaaatgattgaggaacttgcaaaagaatgtagaaaacctgagtggactgttgagaagaaagatttatctgaagttaaacaaaaacttgaggaaacttttacagaagatttaacaaaagcttttgcaactagggacaaacaagatagatcaaatcagatttcagaaattactgagaaagctaaaaagctttttgaagaaaatgaaaattattctgatcttgatgttaactcacagcttaaaaatctagagaagaaaattgttagaactgatattcttaaaaataaaaacagaattgatggtagaggattatctgatgtaagacctatcgaatgtgaagttggtgttttaccaagaactcacggttctgctttgtttactagaggagaaacacaagcaattgttgtaaccactttaggtacatctgatgatgaacaaaggattgaaagtttagatggtcttcaaagagaacgatttatgcttcactataattttcctcctttttcagtcggtgaaactggaagaattggaactggtagacgtgaaattggtcacggtaaacttgcttggagagcaatcaattcttcattaccttcaaaagaggcatttccatatacttttagaatagtatcagagattactgagtctaatggctcttcttcaatggctactgtttgtggagcatctttagcattaatggatgcaggtgttccgataa

SEQ ID NO: 256795 - DNA, 421 bp, Unknown
  Bacterial polypeptide expressing nucleotide sequence isolated from the Sargasso Sea
aatgtttaaaatattcaaagaagaattagaattaggtgaaaaaaagctaaccctagaaacaggaaaaatagcacgccaagcggatggtgctataattgcaactttaggtgaaacagttgtcatttctactgtagttggaaaaaaacaagttaatccagatactgattattttccactccaagttaattatcaagaaaaatattatgcagcagggaaaataccaggagggtattttaaaagagaagctaggcctactgagtccgaaacattaatttcaagattaattgacagacctattagaccattatttccagaaggtttcagaaacgaagttcaaattttaccaacggtgctatcttatgataatgaaaatgaagcagatatattatcaataatcgcatcttcagcagctttagcgatt

SEQ ID NO: 256796 - DNA, 740 bp, Unknown
  Bacterial polypeptide expressing nucleotide sequence isolated from the Sargasso Sea
gagctatcattgcccattaggtgagacagtcgtgattgcaacagcagtaggagcaaaaaaagttgctgagggtcaagactattttcccttatcagtaaactatcaggaaaaatactatgcagcaggtaaaatacctgggggatattttaaaagagaagctagacctactgaggctgaaacattgatttctagactaatagatagacctattagaccactattcccatctggttttatgaatgaagttcaagtgctacctacagttttatcttacgatagtgaaaatcaaccagacattttatcaatcattgcttcttctgcagctttagctatatcaggtttgccgttcttgggaccaatagctgcaagtagagttggatataaagatgggaaatatttattaaacccatcagtagaggagttgaaagagtctgagctagatcttgttgttgctggaactaaagatgctgttttaatggtagaatcagaaacgtcaggactatctgaaaaagtcatgttagatgcagttaaatttgggcacgaaaactttgtaccagtaattgaagcaatcgaaaagctggctaaaaaagttggaaaacaaaaatgggaagttgaagaagtggaccactccgaaattaagaagaagataactgaaaaatttgaaagtggtttaagaggtgcttttaaagaaatagataagaaaaaaagatcgacagctatttctgaaatagaaactcaat

SEQ ID NO: 256797 - DNA, 790 bp, Unknown
  Bacterial polypeptide expressing nucleotide sequence isolated from the Sargasso Sea
gctgctttagctatttcaggaatgccttttctaggaccagttggagcgtcaagagttggttttatagatggaaaatatgttttaaatccatctaagaaagacttagaaaattcgaaactagacttggtcgtagcaggtacaaaagatgctgtgttaatggtagaatcagaggcaaatggtttgacagagcaacaaatgttggatgcagtaaaatttggtcatgaggggttcgttcctgtcataaaaatgatcgaagacttagctaaggaatgtaaaaaacctgaatgggcaactgaaaaaaaagatttatcatctgtaaagaaaaaattagaggaagaattcagcgaagatttaaaaaaagctttctcgataaaagataaacaagaaagatcaaatctaatttctgaagtaacagagaaagcaaaaaaactttatgaagaagatgaaaagtttacagagctagacgttatgcatgaacttaaagatattgaaaaaggaattgtaagaactgatattttaaaaaacaagaacagaatcgatggaagaggacttgctgatgtaagaccaataatgtgcgaggttggaatacttccaagagttcatggatcagcactgttcaccagaggagaaacgcaagcaattgtaactgctactctaggtacttcagatgatgaacaaagaattgaaagtttagatggccttcaaagagaaagatttatgcttcattacaattttccaccattttctgttggcgagactggcagaataggaactggtagaagagaatagg

SEQ ID NO: 256798 - DNA, 740 bp, Unknown
  Bacterial polypeptide expressing nucleotide sequence isolated from the Sargasso Sea
attagcattaatggatgcaggtgttccaattaaagaaccagttgctggtattgctatgggattaattaaagaaggtgatgattttagtgtattgtcagatattcttggtgatgaagatcacctaggtgatatggattttaaagttgctggcaccaaagatggcattacgtcacttcaaatggatattaaaattactggaattacatttgaaataatggagaaagctttaaaacaagctaaagatggaagaatacatattttaggtgaaatgaataaagctttaggtaaatcaagagatagcgttggcaaacacaccccaaaaatggaaaaaataactgtagataaaaaagatatagctactgttattggaaaaggtggggccacaataagagaaatagttgaaaaatcaggtgcaaaagttgatgttaatgatgaaggagtggtaacagttgctgcaccagatgatgagtctagaaatatagctttacaaattattaaagatttaacagctaaagctgaaatgaataaaatctataatgggaaagtaataaaaattatggaatttggagcttttgtaaactttcttggtaagcaagatggtttagttcatatatcagaacttgccaataaaagagttgctaaggttaccgatattgtaaaagaaggcgatgaagttaaggttaaagttataggatttgatagaggaaaagtgaagctgtctattaaagcagctgtttaat

SEQ ID NO: 256799 - DNA, 801 bp, Unknown
  Bacterial polypeptide expressing nucleotide sequence isolated from the Sargasso Sea
ttatcagtaaattaccaagaaaaatattattctgcaggaaaaataccaggaggttactttaaaagagaagcaagaccaacagaaagtgaaacacttatctcaaggttgattgatagacctataagacccttgtttcctgatgaatttagaaatgaagtacaattacttcctacagttatttcttatgataaagaaaatgaatctgatattttatcaataattgcatcttcagctgcacttgctatttcaggaatgccatttatgggtcctgtaggtgcttctagagttggttttattgatgggaaatatgttttaaacccttcaaaaaaagaattagaaaagtcaaaattagacctagttgttgctggaactaaagaagcagttttaatggttgaatctcaagctaatggtttaagtgaagaagaaatgttaaaagctgtaaaatttggtcatgaaaattttattccagtcattaaaatgattgaagatcttgcaaaagattgtaaaaaacccgattggatagtagagaaaaaagatctgtcagcagtaaagaaaagaatagataaagaatttagtgctgaacttaaaaaagccttttcaataaaggataaacaagaaagatctaatcttatatctgatataactgaaagggcaaaaaagctttacgaagaagatgaaaatatttctgagctagatgttaactatgagttaaaaaatttagaaaaaaaaattgtaagaacagatattctcaaaaataaaaaaagaatagatggtagaggcttagcagatgttagacctata

SEQ ID NO: 256800 - DNA, 850 bp, Unknown
  Bacterial polypeptide expressing nucleotide sequence isolated from the Sargasso Sea
cattcttcattaccatcaaaagaagcgtttccctatacttttagagtagtttcagagattacagaatctaatggttcatcttcaatggctactgtttgtggtacatcattagcattaatggatgcgggggtgccgatcaaagaaccagttgcaggtatagcaatgggtttaatcaaagagggtgatgattttagtgtcttatcagatattttaggtgatgaagatcatttaggtgatatggactttaaagttgccggaactaaagatggaattacttctcttcaaatggatatcaaaattacaggaattacatttgagataatggagcaggcattaagccaagctaaagatggaagagttcatatcttaggagagatgaataaagcattatcagcctcaagagctgatgttggaaaacacactccaaaaatggaaaaaattaatgttgataaaaaagacattgctgctgtgattggaaaaggtggagcaaccataagagagatagttgaaaaatcaggcgctaaagttgacgtaaatgatgagggtgtagtaacagttgctgccccagatgaagattctagaaacgttgctatgcaaatgatcaaagatatcactgccaaagctgagttaaataaaatttattctggaaaagttatgaagattatggagtttggtgcatttgttaatttcctaggaaaacaagacggacttgttcatatatcagaacttgcagataaaagagttgctaaagtaactgatgttgtcaaagaaggcgatgaagtaaaagttaaagtaattggttttgatagaggaaaggtgaaactatctattaaacaagctttggtttaat

SEQ ID NO: 256801 - DNA, 754 bp, Unknown
  Bacterial polypeptide expressing nucleotide sequence isolated from the Sargasso Sea
acgggtcgtcgtgaattaggtcatggtcaattagcacagcgtgcacttgaaccagtgattcctggtcgtgaagatttcccttatgtgattcgtttggtatctgaaatattggagtccaatgggtcgtcatccatggcatcggtttgttctggtagcttatcgttaatgtcgagtggtgttccaatcaagggacaggtatctggtattgcgatggggcttttgatggatgatgctggtcaatataccattttatcggatattcaaggcttagaagatcactatggtgatatggactttaaagttgcgggaacatctaaagggattactgcacttcagttggatatcaaaattgaaggattatcaaaagaaattttagtggacgcattaactcaagctaaagccggtcgttttcatattttagataaaatgaacgaagttattgatgcgccgcgtgcatctgttacggatcgtgctcctaaagttgagaccattatgatcaaaccagataaagttggcttgttgattggcccaggtggtaagcaaattaaaaagattgaagaagatacaaaagcggttgtgtatgttgttgatggtgataagggggaggttagtatctctggtaaaaactctgacattattaatgcggcaagaaaaatcatccaagatttggttaaagaagttgagaagggtgaagtgtacgatggtaaggttgttaagatcatgaatttcggtgcatttgttgaattattacctg

SEQ ID NO: 256802 - DNA, 487 bp, Unknown
  Bacterial polypeptide expressing nucleotide sequence isolated from the Sargasso Sea
aatgtttaaagtatataagaaggaaattgaagtagcgggaaagaagataagtttagaaacaggtaaagtagcaagacaggcagacggtgcaataatcgcaacatgtggagagacagtcgtactagcaacagtagtaggagcaaaaaaagtaaatcctgatatggattactttccattatctgtaaattaccaggaaaagtattatgcagctggaaaaattccaggtggatattttaaaagagaagcaagaccaactgaaagtgaaacattaatctctagattgattgacagaccaatcagacctttgtttcctgatgagtttaaaaatgaagtacagttattaccaacagtaatttcatacgataaagaaaatgaaccagatattttatcaatcactgcatcttcagcagctttagctatatcaggaatgccatttatgggtcctgtaggagcatcaagggttggctttgtagatggaaaatatgtt

SEQ ID NO: 256803 - DNA, 907 bp, Unknown
  Bacterial polypeptide expressing nucleotide sequence isolated from the Sargasso Sea
gaagaaatgaaaagttcttctttagaactagttgttgctggaactagccaaggcgtactaatggttgaatctgaagccaatcaattatcagaagaacaaatgttagaagcagttttgcttgggcaagaaacttataaagcagtaattgatgcaattatttctctagcaaaaaaagctgcaaaaaatccttgggatgttattgaaaaggatccagaaataaaagaattaccttctaaaattgaaaaagaatataatgataagttttctgatgcttacaaaatacaggaaaaacaaaaaagatcagaaactttatctacattaagaaatctaatagaagaacaatatgtttctgaaactttatcagctgtaatagttgctgatgcaataaaatctattgaaaaagaaattgttagaggagaattattaaagtcaggaaaaagaattgatggacgtgatacaaaaacagttagacctatcgaatgtgaagttggtgtattagaaagaacgcatggatctgctctatttacaagaggagaaacacaagcattagttgtaactactttaggaactggattagatgagcagcgtattgatgcaatagaaggagaatataaagaaaattttatgcttcattataattttcctccatattctgttggagaagttggtagagctggctcaacaagtcgaagagaaataggacatggtaaattagcatggagagcaattcatccaatgttgccttcttctgataaattcccatacacatatagagtggtatccgaaataacagaatcaaatggatcaagttctatggctactgtatgtggaacatctttatctatgatggatgctggtgtacctttggaaaaaccaattgccggaatagctatgggtttaataaaag

SEQ ID NO: 256804 - DNA, 847 bp, Unknown
  Bacterial polypeptide expressing nucleotide sequence isolated from the Sargasso Sea
ctcctcactcccatcaaaggagagttttccgtacacatttagaattgtatcagaaatcacagagtctaatggttcatcctcaatggcaactgtttgtggaacttcacttgctcttatggatgcaggtgttccaattaaagagccagttgctggaatagcaatgggtttaataaaagaaggtgatgatttctctgtactatcagatattttaggtgacgaagaccatcttggagatatggattttaaagttgcgggtactaaagatggtattacctctttgcaaatggatattaagataactggaattacatttgaaattatggagcaagctttaaatcaagcaaaagatggaagaattcatatcttaggtgaaatgaataaagcattagacaaatctagagataatgttggaaaacatactcctaagatggaaaagattacggttgataaaaaagatatagctgctgtgattggaaaaggtggagcaacaattagagaaattgttgaaaaatctagtgctaaagttgatgtaaatgatgaaggagtagtaacggttgctgctccagatgaagtgtcaagaaacattgctatgcaaatgatcaaagacataacagctaaagctgaattaaataaaatttataacggaaaagttatgaaaattatggaatttggtgcttttgttaatttccttggaaagcaagatggacttgtgcatatttctgagcttgcagataaaagagttgctaaagtaacggatgttgtaaaagaaggtgatgaagtaaaagtaaaagttattggatttgatagaggtaaagttaaattatctattaagcaagctgctatatag

SEQ ID NO: 256805 - DNA, 565 bp, Unknown
  Bacterial polypeptide expressing nucleotide sequence isolated from the Sargasso Sea
aatgttcaaattagtaaaaaaagaaatagaattaagtggaaaaaaaattagtttagaaacaggaaagattgcaaggcaggcagatggagcgattatagctcaatgtggagagacagttgttttagcaacagttgttggcgcaaagaaagtaaatcccgacatggattattttcctttatcagtgaattatcaagaaaaatattatgcagctggtaaaatcccaggtggatactttaaaagagaagcgaggccaacagaaagtgaaacactaatttcaagattaattgacagacctatcagaccattatttcctgatgaatttaaaaatgaagtgcaactattaccaacagttatatcttatgataaagagaatgaagcagatattttatcaattattgcatcttcagcggctttagcaatttcaggaatgccttttatgggtcccgttggagcttctagagttggctttattgatggaaaatatgtcctcaatccatcaaagacacaattagagaaatctaaattagacttagtcgtagcaggaactaaggatgctgttctaatg

SEQ ID NO: 256806 - DNA, 874 bp, Unknown
  Bacterial polypeptide expressing nucleotide sequence isolated from the Sargasso Sea
gtccggcgcgatatcctggatacgggtatgcgcatcgatggccgcgacaccaagacggtgcgtcagatcgccgtcgaagtgggcgtcctgccccgggcccatggctctgcactgtttacccgcggagagactcaggccctggtcgtcacgactctgggcaccggccaagatgaacagatcattgacggtctggctgaggattatcgtcagcacttcatgctgcactacaacttcccgccgtactccgttggcgaagccgggcggttcgggttcacaggacggcgcgaagttggtcatggcaagctcgcttggcgggccgtacatccgttgatgccggaaaaggttgacttcccctacacggtgcgagtggtctcggaaatcacggagtcgaacggctcatcctccatggcgacggtctgcggggcctcactgtctatgatggacgcgggcgtgccgctctcaagcccggttgccgggatcgccatgggcctaattaaggaagacgacggctttgccgttttgtccgatatcctcggagacgaggaccatctgggcgacatggactttaaggtggccggtaccgaaaagggcatcacgtccctgcagatggacataaagatcacttcgattacaaaggagatcatggaggtggcgcttgaccaggcccgtgacggccggctccacatccttgacgaaatggccaagggcctgaccgcagcgcgcgaaggcgtgtcccagcacgcgccccggatcgagacgatctccatcaacaaggacaagatccgcgatgttattggccctggcggcaagatgatccgcgaaatctgtgagacaacgggcaccaaggttgacattgacgacgatggcacagtga

SEQ ID NO: 256807 - DNA, 673 bp, Unknown
  Bacterial polypeptide expressing nucleotide sequence isolated from the Sargasso Sea
gatgtttaatatcacacgtaaggaaattaactggggcggtcgcccgcttgttttggaaacgggtaagatcgcccgtcaggcggatggtgcagttttggtgacatatggtggcacacaggtgttgtgcacggccgtttcgaacaaagcagtacggcccggtcaggacttctttcctctgaccgttaattatcaagagaagacattcgctgccggcaagattcctggcggatttttcaaacgcgaaggccggccttccgagaaggaaaccttgacctcgcgattgatcgaccggccgatccggccgctgtttcctgacggattccggaatgaaactcaagttatctgcaccgtcgtagcgcacgatctggagaacgatccggatgtcgtctcgctggtcggtgcctcggcggcactaaccatttccggtgtaccgtttatggggcccatcggcggctgccgggttggttgcattgatggtgaatttgtactcaacccaaaacaagacgagcttgagaattcgacgctcgatctcattgttgccggaacgcgcgaaggcgtgctgatggtcgagtccgaagcccaggaattggacgaagacacgatgttgcgtgcggtcacctttggccacgagcagagccaagcggtaatcggtgcgattatcgagttggccgaa

SEQ ID NO: 256808 - DNA, 712 bp, Unknown
  Bacterial polypeptide expressing nucleotide sequence isolated from the Sargasso Sea
attgcaggtacgggtgaagcagtcttgatggtagagtctgaagctaatcaactatctgaggatataatgttaggagcagtaaaatttggtcacgagtcaatacaagaggtaataaaaacaattattaatttagcagaagaatgtgcaaatgatccttgggaatttgaatactccataaatgatacactttttaaagagatcaaagacagttgtgagagtgatattaaaaacagctattcaattgttgataagatggaaagacatcaatctataaatcagataaaaaacagcttagaggaaaaatataaagataacgaagattgtaacctaatagaagtgatgggttattttaaaaaaatcgagaaagatgtggtcagatcacagatattaaataataaaactagaattgatggtcgtaatctcgatgaagttagagatattagttcggaagtttcatggttaccgagaactcacggttccgcacttttcacaagaggtgaaacgcaggcaattgtagtcgctacccttggctttggggaagacgaacaaagaatagaagcccttcaagggtcttataaagagaattttatgcttcattataattttccaccatactctgttggagaagttggtagaatgggctctgctggaagaagagaaattggacattggcaagcttgcatggcgtgctctaaaatctgtgttacctaat

SEQ ID NO: 256809 - DNA, 855 bp, Unknown
  Bacterial polypeptide expressing nucleotide sequence isolated from the Sargasso Sea
gatggctgcatctgccgcaatgtctatagctgacgttcctttcaggggacctatggcagcagcaagggttgggttcataaatgatgaatatgttctaaacccatcatttgaggagcttaaaaactctgatttagatatggtagttgcaggatcagaaagtgcagttttaatggttgaatctgatgctaatgaattgagtgaggatttaatgattggtgctattttatatggtcatcaagagatgaaaccagtgatcaaggccattcatgacttttcaaatgaggtgctaccggaaagaactgagtttaacaatccgtcagaagaggacgacaaaaaaatatttgcagatgttaaagaaaaaacagctaaaggccttgaagatgctttcaccacaattgataaaaaagaaagaggagaaaaaattaatactgtaaaacttgatttacttgaagggcttgacgaagagttgcatgccagctatttaaaacaatttaaagaagttgaaaaagagatagttagagagaacatcttaggtcaccaaagaaggatcgatggaagaagtctcactgaggtaagaaatattgaaatcgaaactaactttttaccatctgtgcatggttcagcactttttactaggggcgaaacacaagctattgttacagcaacccttggttcaggaagagacgttcaaacagtagatgctcttgcgggagaagtaaaagacaattttatgcttcattataattttccaagctacagcgttggagaattaggatttccaatgggcccaaaaagaagagaaattggacatggagccctagcaaagcgttcactacaatttgctgttcctagtct

SEQ ID NO: 256810 - DNA, 877 bp, Unknown
  Bacterial polypeptide expressing nucleotide sequence isolated from the Sargasso Sea
gcgcacgatttagaaaacgatccagatattgtctcactcgttggtgcgtctgcggccctcactatttctggcgtgccattcatgggacctatcggcggctgccgtgtaggttgtattgacggtgaatttgttcttaatccaaaacaggatgaactcgaggcttccactctggacctcatcgtcgctggaacgcgcgaaggtgttttgatggttgagtccgaggctgaagagctcgacgaagacactatgctgcaagcggtcactttcgggcatcaacagtcacaagctattatcaacgcgataatcgaactggctgagtcgtgtgcgaaggagccatgggatctgccggaagcaccggagcaatacgacgctgtcgctgctcgggtaaaagagcttgcaacacagccggtgaatgaagcttatcaaatcacagtcaagcaggaccgtgtggaagctcttagtgctgcacgtgatactgtaatgctagcccttgaagaagaagaaattgatacggaaatcggtgcggctgtttttaagaaggttgagaaggatattgtccgaggtagtattatcaagacggggcaaaggatcgacggtcgggacacgaagactgttcgcgatatatcctgcgaagtaggtattttgccgcgagcacacggttccgccttgtttacccgcggcgaaacgcaagcgctcgtggtgaccacgttgggtactgggcaagatgaacaaatcattgatgcgcttgaaggcgagtatcgagaaagctttctattgcattataactttccgccctattcggttggcgaggcatcattcttgcgttctcccggccgccgtgaaattggtcatggaaagcttgcgtggcgtgctgttc

SEQ ID NO: 256811 - DNA, 520 bp, Unknown
  Bacterial polypeptide expressing nucleotide sequence isolated from the Sargasso Sea
atgtttaaagtatacaaaaaagaaattgaagtagctggcaaaaagataagtttagaaacaggaaaaattgcaagacaagcagatggtgcaatcatcgcacaatgtggtgaaacagttgttatggcaactgtggtaggagcaaaaaagataaatccagatgttgattattttcctttatcagtaaattaccaagaaaaatattatgcagcggggaaaattccaggaggatattttaagagggaagcaagaccaacggaaagcgaaacattaatttcaaggttaattgatagacctataagaccactgtttcctgaggaatttaaaaatgaagtacaattacttccaacagtcatatcttatgacaaagaaaatgaagcagatattttatcaataattgcatcatctgcagcattagcaatatcaggaatgccttttatgggtcctgttggagcttctagagttggttttatcgaaggaaaatatgtgctcaatccaacaaaaaaagaactagaaaattcta

SEQ ID NO: 256812 - DNA, 88 bp, Unknown
  Bacterial polypeptide expressing nucleotide sequence isolated from the Sargasso Sea
ttgaaacacttacttcacagattaattgataggcctattagaccattatttcctgaaaggttcaaaaacgaaactcaagttattctaa

SEQ ID NO: 256813 - DNA, 877 bp, Unknown
  Bacterial polypeptide expressing nucleotide sequence isolated from the Sargasso Sea
gaagcaaaggagttatctgaagatcaaatgttgggagcaattttgtttgctcaacaagaaatgaaaccaagtttggatttaatcgaggagttggtttctcaagttgaagtcaatccaattgagtacaccatagaagaagatgatgaagaacttatggaaatggtttctaactcagtaagttcaaaaattgaggaagcttatcaaattccagagaaggctcttcggcaagaagcagtttcggatgctagacaatttttaacaaaccaatttgaagaagaagatgaggaaaaaattgaaaaagcaaaagattattttaagtctttagaatcatctattgttaggtctcgtctattagatggacaaccaagaatagatggaagagacttagataccgtaagaccaattaatattgaaacaggatttttaaagcaagcacacgggtctgcattgtttacgagaggagaaactcaatcaattggagtcgctacaattgattcgctaaaactttctcagttgcttgatacgcttcaaggtgattctaaagatccctttatgctgcattacaattttcctccttattcagttggtgaagctggaatgattggcagtcctaaacgaagagagattggacatggtaaattagctagaagagccttggaggctgttttacccaatcctgaagaatttgaatatgcaataagagtggtttcagaaattacagaatctaatggttcaagttcaatggccacagtttgttcttcaagtttagcaatgatggatgcgggaattcctcttaaaaaagctgttgcaggagtagcaatgggtttagtgaaaagtgagaatgattactgtgtcataactgatattctggagagaa

SEQ ID NO: 256814 - DNA, 332 bp, Unknown
  Bacterial polypeptide expressing nucleotide sequence isolated from the Sargasso Sea
aatgtttaaagttataaagaaagaaatagaagtagcagggaaaaagattagtttagaaacaggtaaaatagcaagacaagcagacggagcgattattgcaaaatgtggagaaacagttgtattagcgactgcagttggagctaaaaaagttaatccggatatggattactttccattgtcagtaaattatcaagaaaaatattatgctgcaggtaaaatcccaggtggatattttaaaagagaagcaagaccaacggatagcgaaacattaatctcaagattaattgacagacctatcagaccacttttcccagacgaatttaaaaacgaag

SEQ ID NO: 256815 - DNA, 837 bp, Unknown
  Bacterial polypeptide expressing nucleotide sequence isolated from the Sargasso Sea
tatgttggatatggttgttgctggaacaaaagatgctattttaatggttgaatctgaagcagaagaactttctgaagatcaaatgcttggagctgtcttatttgctcatcaagaaatgcaaaaaactattgctttaattgaggaacttgcatccaaaacttctatccctcaaattgaatactccttaagggaagataattctgaattaaaagaaaaaattataaatatcgtaaaagatgacttagtagatgcttattctattccagaaaagtctaaaagacaggaatcagtttctcttgctcgagataagatgaaagagagcttaaatgatgaagacttggaagacgaaaatgttgtttctggatacttcaaatcagtagaatcagaaatagtaagatcaagacttcttaatggagattcaagaatagatggaagagatctggatacagtcagaccaatagacatagaagttggctttctaaataaatctcatggatcttgtctatttaccaggggagagactcaatcaataggtgtagcaacacttggtgggtctagggatgctcaattaattgatgccttagaagggacaacaaatgatccatttatgctgcattataactttcctcctttttcggttggcgaggcaggttttataggagctccgaaaagaagagaaattggtcatggaaaattagcccgtagagctctggaggcagttttaccgtcccaagaagaatttccttacacaataagagttgtatctgaaatcactgagtctaatggctctagctccatggcaacagtttgttcttcaagtttatcaatgatggatgc

SEQ ID NO: 256816 - DNA, 460 bp, Unknown
  Bacterial polypeptide expressing nucleotide sequence isolated from the Sargasso Sea
aatttagaaaaaagaatagttagaacagatatcttaaaaaataaaaatagaattgatggaagaggactttcagatgtaaggccaatcatgtgtgaagttggaattttgccaagaactcatggttctgcgttgtttacaaggggtgaaacacaagcaattgtgacaactactcttggaacttcagatgatgaacagagaattgaaagtttggagggtcttcaaagagaaagatttatgcttcattataattttcctccattttcagtcggagaaactggcagaattggaacaggaagaagagaaattgggcatggaaaacttgcatggagagcgattaattcttctttaccttcaaaagaaagttttccttatacatttaggattgtatctgaaataactgagtctaatggctcgtcatcaatggcaacagtttgtggtacctcattagcattaatggatg

SEQ ID NO: 256817 - DNA, 550 bp, Unknown
  Bacterial polypeptide expressing nucleotide sequence isolated from the Sargasso Sea
atgtttaaagtacacaagaaagaaataatagtagcaggaaaaaaaataagtttagaaacaggtaaagtagcaagacaggcagatggagcgatcatagcttcatgtggagagacagttattttagcaacagttgttggggcaaagaaagtaaatccagatatggattattttcctctttctgtaaactatcaagagaaatattatgcagggggaaaaatccctggtggatattttaaaagagaagcaagaccaactgagagtgaaacattaatttcaagattaattgatagaccaatcagacctttgtttcctgatgaatttaaaaatgaagtacaattattaccaacagtaatttcatatgataaagaaaaccaaccagatattttagcgataattgcttcatctgcggcattagctatatcaggaatgccgtttatgggacctgtaggagcgtctagagtaggttttattgatggaaaatatatccttaacccatcaaaaacagaattagaaaattccagcttagatttagtagtagcaggtacaaaag

SEQ ID NO: 256818 - DNA, 721 bp, Unknown
  Bacterial polypeptide expressing nucleotide sequence isolated from the Sargasso Sea
atgtttgaaattactagaaaatccttgcaatggggaggaagagaactaacgatagaaacaggtaaaattgcaaggcaggctgatggtgcggtgatagtgacttatggagaaacacaagtcttagctacagcagtcggagttaaggaaaatgatggaactaatgacttttttccacttacagttcactatattgaaaaattttattcagctggtaaaataccaggaggatatttaaaaagagaaggaaggcctagtgataaagaaacacttacttctagattaatagatagaccaattagacctctttttcctgaaggctttaaaaatgaggttcaggttatatgtcaagtgatcaattatgataatgagaataatgctgacattcctgcaataattgctgcctctgcagcgcttaccatatcgggaattccatttttaggcccgatagcttctacgagggtagctagaattaaagataagttggttttaaatcctacaaatgaggaaatgttagaaagcgaattagacttagtagtagctggcacaaaaaaaggtgtattgatggttgagtccgaagcaaatgaattaagtgaagatattatgctagaagctgtagagtttggaaaaaaatcttacatagaagttttaaatttaattatagacttagcaaaggaaacagcaaaagatccttgggtgcttaataaaatagacctagctgaag

SEQ ID NO: 256819 - DNA, 787 bp, Unknown
  Bacterial polypeptide expressing nucleotide sequence isolated from the Sargasso Sea
gttatcatggttgaatcagaagccaaagaactctcagaagatcaaatgttgggggggattttattcgctcaccaagaaatgcaagtagccattgaagctataaaagagatggtatctgatattggtaaacctgaatttcaatatgaaccaaaagtcttaagcccagaagttgttgagttagtgaaaaataattatagtgatcaaatttctgctgcttatgctttgcaaatcaaacaagaaagggtccaggctctatcagaaataagagaaaagattcttgaagagaacgtgtcagaagatgaagggtcattttcacaaaatgatctacttgatgcatttaagaaagtaggcaaaaacattgtcagaacgaggctcatcgaaggtgccccgaggattgatggaagagatttagatactgttagacctttgtttattgaaactggtgtcttaaagaatactcatggttctgcattatttacccgaggcgaaactcaagcaattgttacctccactctcggttctcctagacaagctcaactaatagatgctttagaaggtgagtataaagaccaatttatgcttcattacaactttccaccttattcggtaggagaagcaggatttatgtccggtccaaaaagaagagagatagggcatggcaaacttgcaaggagagctttagaggctgttttaccgtcacctgatgactttccttacacaataagagtagtatctgaaataacagagtctaatggctccagctcaatggcgagtgtttgtggctcaa

SEQ ID NO: 256820 - DNA, 394 bp, Unknown
  Bacterial polypeptide expressing nucleotide sequence isolated from the Sargasso Sea
gagaccaactgaaagcgaaacattaatctctagattaattgatagaccaatcagacccttgtttcctgatgaatttaaaaacgaggtgcagttattaccaactgtaatttcgtatgacaaagaaaatgaaccagatattttatcaatcaacgcttcatcagcagcattagctatatcaggaatgccatttatgggacctgtgggagcctcaagagttggttttgttgatggtaattatatcttaaatccaactaaagcagagttagaaaactctaaattagatttagttgtagcaggtacaaaagatgctgtgctaatggttgaatcaaaagctagtggtttatcagaagaagaaatgttaaatgcagttaagtttgggcatgagggttttgtt

SEQ ID NO: 256821 - DNA, 892 bp, Unknown
  Bacterial polypeptide expressing nucleotide sequence isolated from the Sargasso Sea
ggcagttactgaacttattaaatctcaagaagatttactgaaagatttaggattaaaacaggttaagccatctgaacctgaagaagataaaaccttgccctcttatttagagaaaaattgtacgaaacctatagagctagttttaaagaaatttaatctatcaaaagatgagagagatcttgaactcgaaaaaataaaagttgacactcaagacaaaattgaagcattaaaagaagacaaccaattaaaagttcttctttcagagaatgataagttaatgagttcagacttcaaaaaactaacaaaaaaactaatgagggcacaaatcattaacgatgggaaaagagttgatggccgcgaattagatgaagtcagaaaaataacagcatcagctggaatccttccaaaaagagttcatggctctgcgttattccaaagaggtttaacccaagttttatctacaacaactttggggacaccgagtgatgctcaagaaatggatgaccttaacccaagcaccgaaaaaacttacctccatcactataattttcctccctactcagttggagaaacaagaccaatgagaactcctggaagaagagaaattggtcatggagccttagcagaaagagcaattattccagttctacctgggaaagaaacattcccttatgtattaagggtagttagcgaagttttaagttctaacggctctacttcaatgggttcagtctgtggcagcacactttcattattagatgctggagttcctctcaaagcaccagtaagtggaacagcgatgggtttaattaaagaaggcaaagaagtcagaatacttacagatattcaaggtattgaagatttcctaggtgatatggatttcaaagttgct

SEQ ID NO: 256822 - DNA, 756 bp, Unknown
  Bacterial polypeptide expressing nucleotide sequence isolated from the Sargasso Sea
agattctttagaaggagattctaaaagaagttttatgttgctttataatttccctccttattctgttggagaggcaggtagattaatgacaggaagaagagaaacaggccatggtatgctagcttggagagctattcacccaatgttacctgatcatgaagactttccttatactataagagttttgtcagaaattacagaatctaatggatcctcttcaatggcgactgtttgtgggacttcattagctttaatggatgcaggtgttcctataaaaaagccagttgctggtatagctatgggtttaattaaagagggagatgattttgctgttttatctgatattttaggagatgaagaccatttaggtgatatggactttaaagtggctggtactgataatggtataacttcattacaaatggatattaaaatcacttcaataacaaaagaaattatgactttggctttagagcaagctcgtgaaggtagattacatatattatctgaaatggctaaggaaataaaaacagccagaacagaagtgaatgaatttgctcctagagtggaaaaaattcaaatttccgtagataagattcgagaagttattggatcaggaggaaaggtaataaaagaaatatcagctaattctgatacaaaaatagatatagatgataatggtttaatttcaatatttggacaaggtaaagagtccattgaaagagctagagaggaaataaatagtatagtagctga

SEQ ID NO: 256823 - DNA, 916 bp, Unknown
  Bacterial polypeptide expressing nucleotide sequence isolated from the Sargasso Sea
gttggatgcagtcaatttggtcacgagggatttgtctctgtaattaaaggtatagaaaaattatctaaaaagtgttcaaaagaaaagtggaaaattgaagaaaaagattttagcaaagtatcaaaaaaaattgaaaaagagcttaccaaggatttagaaaaagctttttcagaaaaagataaaaaaactagatcagatttaattagtcaagctggagagaaatgtaaaagtttgttcgaagcagatgaagatcttttagaacatgaaataatgttacaactgaaaaaacttgaaaaaaatattgttagaacaagaattttaaaaaataaaaaaagaatcgatggtagaggattgtctgatgtaagacctattaaatgtgaagttggagttttaccgaggacacatggatcagcattatttacaagaggcgaaactcaagctttagtgactacaactttaggtaccacagatgacgaacaaagaattgaaagtttagaaggtttaaagagacaaagatttatgctccattacaattttcctcctttctcagttggtgaaacaggaagaattggaacaggaagaagggaagttggacatggaaaattagcatggagagccttaaattcctctcttcctaaaaaagaaaactttccatacacacttcgaattgtttcagaaattaccgagtctaatggatcatcctcaatggctacagtttgtggatcttcacttgcattaatggatgcagcagttcctatagccgaaccagttgctggaatagcaatgggtttaataaaagaaaaagatgacttttcaattctttcagacattttaggcgacgaagatcatcttggtgatatggattttaaagttgcaggtacaaaagatgggatcacatcattgcagatggatataa

SEQ ID NO: 256824 - DNA, 733 bp, Unknown
  Bacterial polypeptide expressing nucleotide sequence isolated from the Sargasso Sea
caaggaggcttgggattgggaacctccggaaaaaaatacgtcacttgagtctattgtgtctgataaatttgcctcgagtgtggttgaggcttatcagatttcggaaaagatggagcggtacgaaacggtttcagaattgaaacagaaagcaatcggagagttagtgagtgaagagaatggaatttcggaagaagaggtgagtgaaatattcagtgccttggaaaagagtactgtccgaaatcgaatccttgatggcgcccctcgtatagatgggcgtgatactaaaaccgttcgtaaaattgaagtagaaactggagttttagaaaaggctcatggatcggctcttttcactcgcggcgagacacaagcccttgtggttactactttgggggcggttcgtgactctcaactcatcgaaaatcttagtggatcgattaaagaccctttcatgttgcattacaatttccctccatactctgtcggtgaagcaggatttatgagtggaccgaaacgaagagaaattgggcatgggcgactagcgagacgcggcgttgcagcggttatgcccgcggaagaggagttcccctatgctattcgagttgtgtctgagattacagaatccaatggatcaagttcaatggcaagtgtatgcggcagtagtctctctatgatggatgctggagtgccaatttctgcaccagttgcaggtattgcgatgggcttgatcaaggag

SEQ ID NO: 256825 - DNA, 913 bp, Unknown
  Bacterial polypeptide expressing nucleotide sequence isolated from the Sargasso Sea
aggccatcagagcacgaaatattaactagcagattaactgacaggcctttaagacctctcttccctaagtcttttaaatatgaaacccaagttattgtaactgcgatgtcaagtgatggtgaaaatatggcagatgtgcttgcaggtgttggtgcgtcggcagctctaatggtatcagatatccctttttctgggcctattgcgactgttagagtgggtagagtagacaataattttattgtaaatccaacacgagagcaaatgacttcatctgacatggaaataattgtttctggaaatgattcaacaattgttatggttgaaggagaagcaaaattaataactgaagatgaattcttagatgctttaaagtttgctcatggccccataaaagaattaatagccctacaaaacaaattagtttctgaacttgatattgttaaaagagaagcaccccctgaaaaagataatagtgaaatagaaaaagcggttgaaaaattagtttctaaaaaaattgataaagcaattaaaatttcagataagattgaaagacaaaacgctatatcaacgattcatgacgaagcgcaggattcactaatagaaagttttcccgaaagtgaaaaaattatcaaatcaacttttgattcaatactcaaaactgcctttcgcgaacaaatactatcgtcaaaagttagatcagatggtaggtcgaccactgatattagacctataaccattgatactggtatctttgcccgaacccatggttcagcattatttacgagaggcgaaacacaggctattgttgttttgactatgggtacacccagcgatgagcaaattattgatacaatggatgaggattataagaaaaaatttatgcttcattataactttccaccttattggtagg

SEQ ID NO: 256826 - DNA, 548 bp, Unknown
  Bacterial polypeptide expressing nucleotide sequence isolated from the Sargasso Sea
aatgtttaaagtatataagaaggaaattgaagtagcaggaaagaagatcagtttagaaacaggtaaagtagcaagacaggcagacggtgcaataatcgcaacatgtggagagacagtcgtactagcaacagtagtaggagcaaaaaaagtaaatcctgatatggattattttccgttatctgtaaattaccaagaaaaatattatgcagctggaaaaattccaggtggatattttaaaagagaagcaagaccaactgaaagcgaaacattaatctctagattaattgatagaccaataagacctttgtttcctgatgaatttaaaaatgaagtacagttattaccaacagtaatttcatacgataaagaaaatgaaccagatattttatcaattactgcatcatcagctgcattagctatatcaggcatgccatttatgggacctgtaggagcgtctagagtgggttttgttgatgaaaagtatattcttaacccatcaaaagctgaattagaaaactcaagtttagatttagttgtagcaggtacaa

SEQ ID NO: 256827 - DNA, 391 bp, Unknown
  Bacterial polypeptide expressing nucleotide sequence isolated from the Sargasso Sea
atgtttaaaattgcaaaagaagaaatccaaattaatggtaaaaaaataatattagaaactggtaaaatcgctagacaagctgatggggcaataattgctacatgtggagagacagttgtaatagcaacagtcgtaggagccaaaaatataaaagatggtcaagattattttcccctatcagtaaactatcaggaaaagtattacgcagcaggaaaaatacctggtggatattttaaaagagaagctaggcctactgaatcagaaacattaatttcaagattgattgatagacctattagaccattgtttccgtcaaattttatgaatgaggtacaaattttaccaactgttctatcatatgatagtgaaaatcaacctgatattttgtcaa

SEQ ID NO: 256828 - DNA, 811 bp, Unknown
  Bacterial polypeptide expressing nucleotide sequence isolated from the Sargasso Sea
acctggaggttactttaaaagggaagctagaccaactgaagccgaaactttaatttctagattaattgatagaccaataagacctttatttccgtctggatttatgaatgaggttcaagtgttgcctacagttttgtcttatgacagtgaaaatcagcctgatattttatcaataatcgcttcatcagctgctttagcaatatcaggcttaccattcttgggaccaatagcggctagcagagttggttacaaagatggaaaatatttactaaatccctcagtagaggaattaaaagagtctgaattagatctagtagtcgctggaacaaaagatgctgtattgatggttgagtcagagacatcggggctatctgaaaaaattatgcttgatgcagtaaaatttggccatgaaaaatttgttcctataattaatgcaattgaaaaattggcaaaaaaagctgggaagccaaaatgggaagttgaggaaattgatcactctaatgttaaaaagaaaattgccgaaaaatttgaacaaaatttgagaagtgcatttaaagaaatcgataaaaaaaaaagatctaccgccatttctgaaatagaaacccagtgtaaagaaatgttttcagaggatgagactgttacggagaatcaagcaatgtcacaattaaaatctttagaaaaagatatagtaagaacagctattttaaaggagaagaaaagaatagatggaaggggtttagctgatgtgagacagattaaatgtgaagttggagttttaccaagaacgcacgggtcagcactttcaccagag

SEQ ID NO: 256829 - DNA, 615 bp, Unknown
  Bacterial polypeptide expressing nucleotide sequence isolated from the Sargasso Sea
aatgtttaaagtacacaagaaggaaatagaagtagcaggaaagaaaataagtttagaaacaggtaaagtagcacgacaagcagacggagcaatcatcgcaacatgtggagaaacagttattctagcaacagtcgtaggagcaaagaaagtaaatccagatatggattattttcctttatcggtcaactaccaagaaaaatattatgcaggtggaaaaatccctggtggatattttaaaagagaggcaagaccgactgaaagcgaaacattaatctcaagattaattgatagacctatcagacctttgtttcctgatgaatttaaaaatgaagtacagttgttaccaacagtaatttcatatgataaagaaaaccaaccagatattctagcaatcactgcttcttcagcagcgttagcaatttcaggtatgccttttatgggtcctgtaggagcttctagagtgggttatattgacggtaagtatattcttaacccttcaaaagaagagttggaaaagtcaagtttagatttagttgtagcaggcactaaagatgcagtccttatggttgagtctgaaacatcaggtttatctgaagaagcaatgttagcagcagt

SEQ ID NO: 256830 - DNA, 516 bp, Unknown
  Bacterial polypeptide expressing nucleotide sequence isolated from the Sargasso Sea
attccagaaaagtctttgaggcaagaagcagtttctgatgctagacaatttttaactaatcaatttgaagaagaagaagaggaaaaaattgacaaagcaaaagattattttaaatctttagaatcttctatcgtcaggtcgcgcctattggaaggacaaccaagaatagatggaagagatttagataccgtgaggccaattaatattgaaacaggtattttaaagcaagcgcatggatccgcattgttcacaagaggtgagactcaatcaattggagtcgcgacaattgattcactaaaactttctcagttacttgatacgcttcaaggtgactccaaagatgcctttatgttgcattacaattttcctccttattcagttggtgaagccggtatgattggtagtcctaaacgaagagagattgggcatggtaaattagccagaagagctttggaagctgtgttacctgatcctgaggaatttgaatatgcaataagagtggtttcagaaattaca

SEQ ID NO: 256831 - DNA, 510 bp, Unknown
  Bacterial polypeptide expressing nucleotide sequence isolated from the Sargasso Sea
aatgtttaaaatttttaaaaaggaagttgaagttagcggaaagaaaattagtttagaaactggaaaaatcgcaaggcaggcagatggagcaataattgctacatgtggtgaaacggtagttctagcaactgtcgtaggtgcaaaaaaagtgaatcctgatgtagattattttccattatcggtaaattatcaagaaaagtactacgctgcaggaaaaattcctggtggatattttaaaagagaggctagacctacagaaagcgaaactcttatttcaagattgattgatagaccgattagacctttgtttccagatgaatttagaaatgaagttcaattattacctacagtaatttcttatgataaagaaaatgaagcagatattttatcaattattgcatcttcagctgcattagcaatatctggaatgccatttatggggccagtaggcgcatctagagtaggctttataggtggaaagtatgttttaaatcctactaaaaaagaatt

SEQ ID NO: 256832 - DNA, 900 bp, Unknown
  Bacterial polypeptide expressing nucleotide sequence isolated from the Sargasso Sea
gcgccttatcgaccgacccatccgcccgctcttcgtgaagggcttcaagaacgagacccaagttatcgcccaggtcttgtcccacgatcaggagaacgaaaccgatgtgccggctttaatcgccgcgtccgctgcgttgaccatctccggcctgccgttcatggggcctgttggcgcttgccgggttggctacaaagatggtgagtaccttctcaatcccaccctcgaggaaatggcccaaagcgagctcgagctgatgctggcagggacctcggaaggcgttttgatggttgaatcggaagcctcggagctctctgaagaggttatgctgggcgccgttaccttcggccacgaggctttccagccggtgatccaggccatcatcgaattggccgaagcctgtgccaaggacccgatcgatctgccggctccgccggatggaaaggatgcgttggctgcgagggtttgcgaactgggcgaaggtccactgcgtgaggcttacaaggaaacaatcaagcaggttcgtcaggagaaaatctcggtggcgaaggccaacatcgtcgctgccctggatgctgatgcgggcacagatcaggatttggctggcgccgtcctgggtgatatcttgaagagcttggaatcagacattgtccggcgtgatatcctggacacgggcatacgcatcgacggccgcgacaccaagacggtgcggcagattgccgtcgaagttggggtgttgccccgagcccatggatcggccctgttcacccgcggcgaaacccaggccctggtggtcacgactctggggacgggccaagacgagcaaatcatcgacggtctggccgaggattatcgtcagcatttcatgctgcactacaacttcccgccctactccgttgg

SEQ ID NO: 256833 - DNA, 682 bp, Unknown
  Bacterial polypeptide expressing nucleotide sequence isolated from the Sargasso Sea
gatggttgagtcagaaacatctgggttatccgaaaaagttatgctggatgcggttaaatttggacatgaaaaatttgtaccaattattgaagcaattgaaaaattagcaaaaaaagctggaaaacctaagtgggaagtcgaggaagttgatctttctgaaattaaaaagaaaattacaaaaaaatttgaaagttctttaaaaagcgcatttaaagaaatagacaagaaaaaaagatcaacagctatttctgaaatagaaagtcaatgtaaagaaatgtttgtagaagatgaaactgttactgaaaatcaagtaatgaatcaacttaaatctttagaaaaagatattgtaaggactgcaattttaaaagaaaagaaaagaattgatggaagaggcttatcagacgtaagacagattaaatgtgaagttggtgtattacctagaactcatggatctgctcttttcacaagaggggaaacccaagctcttgttgttacaacgcttggaatgacagatgatgaacaacgattagaaagtttagaaggaatgcaaagatcaaactttatgttgcactataattttcctccattctcagttggagaatgtggtagaataggtactggcagaagagaaattggtcatggaaaacttgcgtggagagcaattaactcatctttaccatca

SEQ ID NO: 256834 - DNA, 937 bp, Unknown
  Bacterial polypeptide expressing nucleotide sequence isolated from the Sargasso Sea
cgaccacttcgcccttgttttccagaaggtgggggccgtgaaacacaagtcattgcgtttctattgtcggctgatccggaaaacgattccgatgttcttgcacttactggagcctcagcagctctttcaatttcatcaataccattttcaaacccgatcgccgctgttcgagttggtttcgtagaagacaaaatcgtaattaatccgactttctcagagcgaaaactaagtgcccttgatttgattatcgcgggtagctctgacgccatcatgatggttgaagccggtgctaaggaagtaactgaagacacaatgctgaaggctcttgaagaagggcatgccgcaatacgtgagattgtttcggaaatagagaaaatggcctcagcaatcggcaaacagaagactgaagtcgttgggaaatctattgacccagctattaaaagcgacctcgaatcacaagtactaaccccattgactgaagccatgcgagtgaaagacaaaattgacagttacgcacaggtcgatagcgtttatgccagtctcgtagagtcaatttccgaagatgacgcagaaaaacaatcagctgttagtcatgtattcaaggaacttaaggaaaagattcttcgtgacgaggtcctagaacgtggacaacgacttgatggacgacgctttgatgaagtgcgggatatttggtctgaagtaagtgtacttccccgtgtgcacggctctgcggtatttactcgaggagaaacccaagcattagtcacagcgacgctgggaacggccgatgaccaacagaaaattgaaagtgtcgacggtgaaagttataaacgtttcatgctccactacaacttcccacccttttcagttggtgaagtgaaatttttacggggtcctgggcgacgggagatcggccacggcaatctcgccgaaagaa

SEQ ID NO: 256835 - DNA, 722 bp, Unknown
  Bacterial polypeptide expressing nucleotide sequence isolated from the Sargasso Sea
aatgattactttagcaactgaaaaatgtaagtcgttgtttgaaagtgacgaaacttattctgagctagaaattatgctgcaactaaaaaatttagaaaaggatatcgttagaggaagaatacttaaaactaaaaaaagaattgatgggagaggtttatctgatgttagagcaataaaatgtgaagttggagtattacccagaactcatggatctgctctatttaccagaggtgaaactcaagcattggttacaaccactttgggaacaacagaagatgaacaacgcattgaaagtttagaaggtcaaaaaagagttaggtttatgttacattataattttccacccttctctgtaggagaaacaggtagaataggaacaggtagaagagaagtaggtcacggaaaattagcttggagagcccttaactcatctttgcctgataaagaaaaatttccatatactttaagagttgtttcagaaatcacagagtctaacggctcttcatctatggccacagtatgtggtgcatctttagcacttatggatgcggctgttccaatagcccacccagttgctggaattgccatgggtttaataaaagaaaaagacgaattttcagttttatcagatattttgggagatgaagaccacctaggagatatggactttaaagttgctgggacaaaagatggaattacttcattacaaatggatattaaaa

SEQ ID NO: 256836 - DNA, 893 bp, Unknown
  Bacterial polypeptide expressing nucleotide sequence isolated from the Sargasso Sea
cagcaatctgttagagatctaaaagaagaagtagtaaaagaggttgccggtgaagacgacgctgacctctccgaagatattgccgagatctttggtaaggctgaaaaaaactttgtgcgtcgcagaattctaagtggggagcctagaattgatgggagagatttggtcacagtcaggcccatcgatgtggaggttggcgttttaccgaaggcgcacggatcagctttattcactagaggagaaacgcaggctatcgcagcagcgactttaggcacgttgcgagatgcggcgatcatagatgcgttagagggcagttataaagacccctttatgctccattacaattttccgccctatagtgtgggtgaaactggaatgatgggtggtgtaaaaagaagagaaacgggacacggtcggcttgcgcgtcgcggagtcgcggctgtcatgccagatggggaaagttttccctacacaataagggttgtatcagaaattaccgaatcaaatggctcaagttcgatggcaagtgtttgcggaacatctttggctctgatggacgcaggagtgccactgaaagctcctgtggctggggttgcaatgggattggttttagagggttccgaatttgccgtgttgaccgatatcttgggagacgaagatcatctgggagatatggatttcaaggttgcgggtacgtctcaaggcgtaacggctttacagatggatataaagattgaagggatcaatgaagaaattatggagagcgcgttagaacaagctcgagatgctagacaacatattctcaacgagatgaataaggttattagtgagtctcgagctgaattgtcagacaatgctcctgccatgacgaccataaaagttcaccctgataa

SEQ ID NO: 256837 - DNA, 775 bp, Unknown
  Bacterial polypeptide expressing nucleotide sequence isolated from the Sargasso Sea
cctgatgattttaaaaatgaagttcagtgttacccaactgtattttcttatgataagaaaaatgaagcagatattctctcaattatggcatcatctgcagccttagccatatcaggaatgccatttatgggtccagttggagcttctagagttggatatatgatgggcaagtatgttttgaatccgtcaaaaactgatcttgaaaaatcaaaattagatttagttgttgcaggtacaaaagatgctgtgcttatggttgagtctgaagcgagcgggttaacagaagtagagatgttaaatgcagttaaatttggtcacgaaggatttgttccggtgattaaaatgatagaggaactggctaaagaatgtagaaaacctgaatggactgttgaaaaaaaagatttatctgaagtaaagaaaaaacttgaggaaacttttacagaagatcttaaaaaagcgtttgctacaagagataaacaagatagatcaaatcaaatttcagaaattactgataaagctaaaaaactttatgaggaagatgaaaattatactgatcttgatgtaaattctgaacttaaaaatcttgaaaaaacaattgtcagaacagatattttaaaaaataaaaatagaattgatggtagaagtttatctgatgttaggccaatttcatgtgaagttggtgttttgccaagaacacatggatctgctttatttaccagaggggaaacacaagcaattgtaacagccactttaggcacatctgatgagaacaaag

SEQ ID NO: 256838 - DNA, 661 bp, Unknown
  Bacterial polypeptide expressing nucleotide sequence isolated from the Sargasso Sea
ttgacggtaactactgtatcaaccctacaaaggagcgaattagaagaatctcatttagatatggttattgcaggaagtgatgcagctgtaattatggttgaatcagaagccaaagaactttcagaagatcaaatgttgggggggattttattcgctcaccaagaaatgcaagtagctattgaagctataaaagagatggtatctgatattggtaaacctgaatttcaatatgaaccgaaagtcttaagctcagaagttgttgagttagtaaaaaataattatagtgaacagatatctgctgcttatgctttgcaaatcaaacaagaaagggtccaggctctatcagaaataagagaaaagattcttgatgagaatgtgtcagaagatgaagagtcattttcacaaaatgatctacttgatgcattcaagaaagtaggtaaaaacattgttagaaccagactcatcgaaggtgccccgagaatcgatggaagagatttagatactgttagacctttatttattgaaactggtgtcttaaagaatactcatggttccgcattatttacccgaggtgaaactcaagcgattgttacatccactctcggttctcccagacaagctcaactaatagatgctttagaaggtgagttcaaagaccaat

SEQ ID NO: 256839 - DNA, 550 bp, Unknown
  Bacterial polypeptide expressing nucleotide sequence isolated from the Sargasso Sea
aatgtttaaagtatacaagaaggaaattgaagtagcaggaaagaagataagtgtagaaacaggtaaagtagcaagacaggcagacggtgcaataatcgcaaaatgtggagagacagtcgtattagcaacagtagtgggggcaaaaaaagttaatcctgatatggattactttccattatctgtaaattaccaagaaaaatattatgcagcagggaaaattcctggtggatattttaaaagagaagcaagaccaactgaaagcgaaacattgatctctagattaattgatagaccaatcagaccattgtttcctgatgaatttaaaaatgaagttcagttattaccaactgtaatttcatatgataaagaaaatgaaccagatattttatcaatcactgcttcatcagcggcattagctatatcaggaatgccatttatgggtcccgtaggagcttcaagggttggttttatagatggaaaatatgtgttaaatccatctaaagcagaattagaaaaatcaaaattagatttagtcgtagcaggtacaaaa

SEQ ID NO: 256840 - DNA, 754 bp, Unknown
  Bacterial polypeptide expressing nucleotide sequence isolated from the Sargasso Sea
aatgtttaaaattcataaagaagaaattaaaattaatgggaaaaaaataactttagaaactggaagaattgcaagacaggccgatggagctatcatcgcaacttgcggagagacagttgtgattgcaactgtggtcggagctaaaaaattgaaagatggacaagattattttccattatctgtaaattatcaagaaaaatattatgcagctggtaaaattcctggaggctattttaaaagagaagcaagacctactgaagctgaaactctaatttcaagacttattgacagaccaattagacctctttttccttcaagctttttaaatgaagtacaattacttccaactgttttatcttatgatggtgaaaatcaaccagatattttatcaataattgcttcatctgctgctttggcgatatcaggtcttccttttcaaggtcctattgcggcaagtagagttggatataaagatggaaaatttttgttaaatccatccattgtagaattaaaagactcagaattagatttagttgtagctggaacaaaagatgcagtcttaatggttgagtccgaaacctctggtctatcagaaaaagtaatgttagacgctgtaaaatttggtcatgaaagctttgtgccggtaatcgattcgatcgaaaaactagctaaaaaagctggcaaacctaaatgggaaatagaggaagttgatcattcagatgttaaaaagaaaatcgcagataaattgaaagta

SEQ ID NO: 256841 - DNA, 505 bp, Unknown
  Bacterial polypeptide expressing nucleotide sequence isolated from the Sargasso Sea
aatgtttaaagagtttaaaaaagaaattgaattaaatggtaaaaaaataaagttagaaacaggtaaaatagcccgacaagccgatggagcggttattgcaacatgtggtgaaacggttgtgctagcgactgtagttggtgcaaaaaaaataaatcctgacgttgattacttcccattatcagtaaattatcaagagaaatattatgctgctggtaaaattcctggtggctattttaaaagagaagcaagaccaacagaaagcgaaacgttaacttcaagattaattgatagaccgatcagacctttgtttccagatgaatttaaaaatgaagttcaattgcttccaacagtaatatcttatgacaaagaaaacgaagctgatattttatctataattgcttcatctgcagctttagcaatatctggaatgccatttcttggtccagttggagcttcaagagttggttttatcgatggaaaatatgttttaaatccatcaaaaata

SEQ ID NO: 256842 - DNA, 457 bp, Unknown
  Bacterial polypeptide expressing nucleotide sequence isolated from the Sargasso Sea
aatgtttaaaattacaaaacaagaaatagaaattgcaggaaaaaaaataactcttgagacaggtaagattgcaagacaggcagatggcgccgtaatagcaacttgtggagaaacagttgtaatctcaacagttgtaggagcaaaaaaagttgatccagaaacagactattttcctctttcagtaaattatcaggaaaaatattatgctgctggtaaaattcctggaggttattttaaaagagaggccagaccaaccgagtcagaaacattaatttctagattgattgatagacctattcgtccattattccctgatgactttaggaacgaagttcaggttttgcctacagtcctttcctatgataatgaaaatgaagctgacatattgtctataatagcttcttcggctgcactaatgatttcaggacttccatttaaaggtccaatagcagcttct

SEQ ID NO: 256843 - DNA, 691 bp, Unknown
  Bacterial polypeptide expressing nucleotide sequence isolated from the Sargasso Sea
tgtaagagcaataaaatgtgaggttggaattttaccacgcgctcatggttcagctttgtttactagaggagaaacacaggctctagtaacaactacgctaggaacaacagacgatgaacaaagaattgagagtttggagggattaagaagagaaagatttatgttgcattataattttccaccgttctctgtaggagaaacaggtagaattggaacaggcagaagggaagttggtcatggaaaattagcttggagagctttaaattcttcgcttcctaaaaaagaaaattttccttacacattgagaattgtatctgaaattactgagtccaacgggtcttcttcaatggcaacagtttgtggatcatctttagcattaatggatgcagctgtgccaatagctgagcctgtagcaggaattgcaatgggactaattaaagaaaaagataaattttctattttgtcagatatattaggtgacgaagatcatctaggtgatatggattttaaagttgcaggaactaaagatggaattacttctctgcaaatggatataaaaatcactggaataactttagaaataatggaacaagctcttgctcaagctaaagaaggcagagttcatattctaaatgagatgaataagactattaaatcctcaagaaaagaagttggaaaacacacaccaaaa

SEQ ID NO: 256844 - DNA, 869 bp, Unknown
  Bacterial polypeptide expressing nucleotide sequence isolated from the Sargasso Sea
aaagataagtttggtcttaaaccctacaaaagaggaaatgatagaaagcgaattagacttagtagtggctggtacaaaaaaaggtgtattaatggttgagtccgaagcaaatgaattaagtgaaaatattatgcttgaggcagttgagtttggtaaaaaatcttacatggaagtattaaatttaatcatagacttagcaaaagaagcagcaaaagatccttgggtgcttaataaagtagacctcgataaagaaatcaaattgatagaagataacattaaaaaggatttagagagcgcttatcagattaaagaaaaaactgatagatcaaatgctcttaaaaatattaaaaccaaagttgatgagttggcggtagaaaaagaattagatattaatcgtttaaatcaagcatattataaatttcagaaaaattttgttagatcaaaattactgaatactaaaaatagaatagatggtagaggagttgcagatgtaaggcaaataaattgtgaaactggtttattatcgaggtcgcatggatcagctttatttactagaggagaaactcaagcacttgtatctttaacattaggtacttcagatgatgaacaaatggttgactctttagatgggatgtcaaaagaaagatttatgctgcattataactttccacctttttcggtaggagaagcaggtagaatgggtggtgtaggaagaagagagataggacatggaaaactagcttggagggcaataaatccattacttccaggtacagaagaattcccatacacgcttcgcatagtttctgaaattactgagtctaatggttcttcttctatggctacagtatgtggcagttctttagctc

SEQ ID NO: 256845 - DNA, 817 bp, Unknown
  Bacterial polypeptide expressing nucleotide sequence isolated from the Sargasso Sea
gaaactgggagaataggtactggtcgtagagaaattggacatggaaaattagcttggagagcaataaaatcttctttgccttcaaaagaaaaatttccttatacctttaggattgtttcagagattacagaatctaatggttcttcatcaatggcaactgtatgtggaacttcattatctttaatggatgcaggtgttccaatgaaaacaccggtagctggtattgctatgggtttaataaaagaaggagatgattttagtgttctttcagatattttaggtgacgaggaccatctaggagatatggactttaaagtagctggaacaaaagatggtattacctcattacaaatggatattaaaataacaggcattacatttgaaataatggagcaagctttaaaacaagcaaaagatggtcgtattcatattcttggtgaaatgaataaagcattagataaatcaagagaagatgttggaaagcacacaccgaaaatggaaaaaataactgtagataaaaaagatattgcaactgtaattggaaaaggtggtgcaacaataagagaaattgttgaaaaatcaggagccaaagttgatgttaacgatgaaggtgtagtaacagttgctgctccagatgaagagtctagaaataaggcaatgcaaatgattaaagatcttaccgcaaaagctgaactaaataaggtttatagtggaaaagttatgaaaattatggagtttggtgcatttgttaatttcttaggaaaacaagatggtcttgttcatatatctgagcttgctaacaaaagagttgctaaag

SEQ ID NO: 256846 - DNA, 423 bp, Unknown
  Bacterial polypeptide expressing nucleotide sequence isolated from the Sargasso Sea
gatgttcaaagtgtttaaaaaagaaattgattttggggaaaaaaaaattacccttgaaacaggaaaagttgctcgtcaagcagatggagcaattatagctacttgtggcgaaactgtagttttagcaacagccgtaggtgcaaaaaaagttaaccctgatgtggattattttccattatcggtaaactaccaagaaaaatattacgctgcaggtaaaatacctggaggatactttaaaagggaagcaagacctacagagagcgaaactctaatctcacgattgattgatagacctataagacctttgtttccagatgaatttaaaaatgaagtacaagtgttacccacagtaatttcatatgataaagaaaacgaagctgatattttatcaatcattgcctcttcagctgcattagctatttc

SEQ ID NO: 256847 - DNA, 484 bp, Unknown
  Bacterial polypeptide expressing nucleotide sequence isolated from the Sargasso Sea
gaagactggaaatagaatagatgggcgtgataccaaaacagttagaccaattaaatgtgaagttggtgttcttgaaagaacacatggttgtgctttatttactagaggagaaacccaagcattagtagttactactttaggaacaggtcaggatgaacaacgtattgatgcaatagaaggagaatataaagaaaactttatgcttcattataattttcctccttactcagttggcgaagtaggaagagcaggttcaactagtcgtcgagaaattggacatggtaaattagcttggagagcaattcaccctatgctgccttcagcagaaaaatttccttatacttatagagtagtgtctgaaattactgaatcaaatggttcaagttcaatggcaacagtttgtggaacttctttatctctgatggatgctggtgttcctcttgaaaaatctattcctggaattgccatgggattaatcaaagaa

SEQ ID NO: 256848 - DNA, 418 bp, Unknown
  Bacterial polypeptide expressing nucleotide sequence isolated from the Sargasso Sea
aatgtttaaagtatataagaaggaaattgaagtagcaggaaagaagataagtttagaaacaggtaaggtagcaagacaagcagacggcgcaataatcgcaacatgtggagagactgtcgtactagcaacagtagtaggagcaaaaaaagtaaatcctgatatggattactttccattgtctgtaaattaccaagaaaaatattatgcagctggaaaaattccaggaggatattttaaaagagaagcaagacctactgagagcgagacattaatctctagattaattgacagaccaattagacctttgtttcccaacgaatttaaaaatgaagtacaattattaccaacagtaatttcatacgacaaagaaaatgaggcagatattttgtcaatcactgcatcttcagccgcattggct

SEQ ID NO: 256849 - DNA, 457 bp, Unknown
  Bacterial polypeptide expressing nucleotide sequence isolated from the Sargasso Sea
attgagaaaaattattaaaaagttccagtacggggcacatgaggtctcattggagaccggtcgtattgcacgccaggctggcggagcggtacttgttactatgggccaaactacagttttggtgactgcagttggtaaacaagatgatgctgatgcgcagcgtggctttttcccactgactgtaaactacgttgaaaagacttatgctgcgggtaaaatccctggtggatactttaagcgtgaagggcgtccaactgaaaaagagacactgacatctagattaatcgatcgtccaattcgcccactattccctaaaggcttcaagtgtgaagtgcaaattattgctaccgtgatgtcgttagacccagaagttcaaccagatgtgccagcacttattggtgctgcagcggctgttgctttatccggcatgccttttggtggcccattagctgctgct

SEQ ID NO: 256850 - DNA, 806 bp, Unknown
  Bacterial polypeptide expressing nucleotide sequence isolated from the Sargasso Sea
aattgtttcagagataacggaatctaatggatcttcttcaatggcaacagtctgcggtacttcattagcattaatggatgcaggtgttccaataaaagaaccagttgcaggtattgcaatgggattaattaaagaaggtgatgactttagtgtattatcagatattttaggggatgaagatcacctaggagatatggactttaaagttgctgggacaaaagatggtatcacatctcttcaaatggatatcaaaattacaggtattacattcgaaattatggagcaagctttaaaccaagctaagggtggaagaattcacatattaggtgaaatgaataaagctttaagtaaatctagagatggtgttggtaaacacactcccaagatggaaaaaataactgtagataaaaaagatattgcgacagtaattggaaaaggtggagcaactatcagagaaatagttgaaaaatctggtgctaaggttgatgttaatgatgaaggcactgttacggtggctgctccagatgaagaatctagaaatattgccctacaatttattaaagacttaactgctaaagctgaattaaataaaatttataacggaaaagttatgaaaattatggaattcggagcatttgttaattttttaggaaaacaagatggcttagttcatatatctgagcttgcagataaaagagttgctaaagtaaccgatgttgttaaagaaggtgacgaagttaaagtaaaagtaattggtttcgatagaggtaaagtaaaattatccatcaaacaagctgtcgtataaa

SEQ ID NO: 256851 - DNA, 922 bp, Unknown
  Bacterial polypeptide expressing nucleotide sequence isolated from the Sargasso Sea
tgttctcaatccgtcggtagacgatatggataacttaaaagaaaacaatgagcaaaggcttgatcttgtggttgctggaacaaaagatgctgtaatgatggtagaatctgaagcttatgagttgtcagagaaagaaatgttgggtgctgtaaagttcggacatgagcaaatgacatcagttattgacatgatcattgatctagcaaaagaggctgccaacgcacccttttcttttgaatataaagtcaatgaccaattatttaataagatatccaaagcagggagcaaagatcttaagaaagcttttgaaatatctgataaaaaagaacgccaatcctctgtggctttagcggtagataaaataaaaaactccctgtcggacgaagaaaatgaaggtaacgaagttaatgacctaattaaaaagttagaatctgaggttgttagaaacaacgttctagataatggtactcgaatagatggtagggatttaacaactgttagatcgatagcgacagagacccgtttattgcctcgggcacatggatcctctttgtttactagaggtgaaactcaaggacttgtagttacaacactaggatccggggactccgagcagataattgatgccttacataaagaaggtaggcttaattttatgcttcactataacttcccaccttactcagttggggaatgtggtagaatagccggtcctggccgccgagagattggtcatggaaaacttgcctggagagcgttgcaagctgtactaccttcgtctgatgaattcccatataccgtaagagttgtttcagaaatcactgaatctaatggatcttcttcaatggcaaccgtttgtggatcatctttatcaatgatggatgcaggtgtgccacttaaagctcccgttgctggtgtcgct

SEQ ID NO: 256852 - DNA, 794 bp, Unknown
  Bacterial polypeptide expressing nucleotide sequence isolated from the Sargasso Sea
aacaaaggaagcagttttaatggtagaatcagaaacatcaggattaacagagaaagttatgttagaggcagtaaaattcggtcacaaaaatttcataccaataattgaggcaatagaaaaattagttaaaaaagctggtaaaccaaagtgggaaattgaagaaacagatctttctgatgtgaaaaagaaaattgctactaatttcgaaaaagatctgagaaaagcatttcaagagatagataaaaagaaaagatcgacatctatttcagaaatagatgccaaatgcaaagaaatgtttgcagaggatgaaaatgttaccgaaaatcaagctatggcacagttaaagctacttgaaaaagatatagttagaacagctattcttaaagataaaaaaagaattgatggtagaggtttagcagatgtaagacaaattaaatgtgaggtaggtgtactgcctagggcgcatggctcagctttatttacaagaggtgaaacacaagctttagtagttacaacacttggtatgtctgatgacgaacaaagacttgaaagtctggatggaatgcaaagatcaaattttatgttacattataattttccacctttttctgtaggtgaatgtggaagaattggaactggtagaagagaaataggtcatggtaaattagcttggagagctattaattcatctttgccaaaaaaggaaaattttccttatactttaagagtagtttcagaaattactgagtcaaacggatcatcttcaatggcaacagtttgtggaacttctttat

SEQ ID NO: 256853 - DNA, 344 bp, Unknown
  Bacterial polypeptide expressing nucleotide sequence isolated from the Sargasso Sea
aatgtttaaagtatacaagaaggaaattgaagtagcaggaaagaagataagtttagaaacaggtaaggtagcaagacaagcagacggtgcaataatcgcaacatgtggagagactgtcgttttggcaacagtagtaggggcaaagaaagttaatcctgatatggattactttccattatctgtaaattaccaagaaaaatattatgccgctggaaaaatcccaggtggatattttaaaagagaagcaagaccaactgagagcgaaacattaatctcaagattaattgatagaccaatcagacctttgtttcccgatgaatttaaaaacgaagtacagttattac

SEQ ID NO: 256854 - DNA, 775 bp, Unknown
  Bacterial polypeptide expressing nucleotide sequence isolated from the Sargasso Sea
ggattataaaaaatcctattacatgcattacaattttccaccgtactgcgttggagaggtcggtagaattgggtttacaggaagaagagaaatcgggcatggaaacctggcacaacgagctctcaaacctgttttacctgattatgatgatttcccatatactattcggattgtttcagaaataatggaatcaaatggttcttcctccatggcttctgtttgcggaggatccctttcgctaatgagtgctggtgctcctttaaaatctgctgtagctggaatagctatggggttaattacagatggtcaacgccacgccgtattaagtgatattttaggtatggaagatcatttaggcgatatggattttaagatagctggtactgaagatggaatcactgctattcaattagatttaaaaattgatggattgtcctttgatttgatggaagaagctttgtcccaagcaaaggatggtcgaaagcatattctaggtgaaatgaataaagtattgaaagaagcaaatgaaatctcacaatacgcacctagaattctttcattaactatcaatcctgaaaagatcggagcgcttattggtcctggtggtaaaaatattaagaaaatcattgaggatactgaatgtgaggtaaatgttgatgatgatggattagtttcaatcgctggtgaaaacacacaaaagtgcaatgaagctgttgaaatggttaaagctttaacctttgagccagaagttggaatggagtttgattccacagta

SEQ ID NO: 256855 - DNA, 970 bp, Unknown
  Bacterial polypeptide expressing nucleotide sequence isolated from the Sargasso Sea
gacttgattgttgcaggaaacaaagattcttatgtcatggtagaatccagtgccaaagagctaccagaaacaaaaataaaagaagccattgcgtatggacaagatcagctacaaactatcattacagaaattgaaaaactgaaaacaggcagcaaaatagcaaatcaagcaaccaccgcagatccaaaaaaagaagcatcgctaaagcaaaccattgaggaaatcaagcaagcaaacgttgatgcattcaaaacagcattgaccattccaggtaaagttgagcgcaacatcgcattgaaagaactcagaaatagcatcattcaaaataagatctcaacacttaacgacacagagactagtgaagacgaaatcaccaaagaaattgatttggccatataccatgtcaaaaaagaaatcatcagacatagagccatagatgaaaacaaacgaatcgatggaagaaaaaccaatgacatcagaccaatcactgtcataccaggttttttagatgatgttcatggctcagcattattcatacgtggggaaacacaagcattggggataacaacactatctgcacaagaaagcagcgcacaattgcttgatgacattacctcacaaacaaaacagtacgacaaattcatgctgcattacaatatgcctggatacagtgtcggtgaatgcagtcaaccactgggtccaaaaagaagagaaataggtcatggcgaattggcaaaaaaagcactcatggcagttttaccgagtgaaaaagatgatttctcatacattattcgagttgtttcagaaatattatcatgcaatggatcaagttccatggcaaccatttgtgcaagcagtctatcactgatggatgcaggtgttcccatcaaatcctcagtagcaggtattgcaatgggtctaattaaagaagacaatcaatttacaatattaagcgatatcctggagacga

SEQ ID NO: 256856 - DNA, 815 bp, Unknown
  Bacterial polypeptide expressing nucleotide sequence isolated from the Sargasso Sea
tacatttaggattgtatcagaaataaccgagtctaatggttcatcttcaatggcaacagtttgtggaacttcattagcattaatggatgctggtgttccaataaaagaacctgttgcaggtattgcaatggggttaataaaagaaggtaacgattttagtgtactatctgatattcttggagatgaggatcatttaggtgatatggattttaaggttgcaggaactaaagatggaattacatctcttcaaatggatattaagattactggaattacttttgaaataatggaacaagctttaaaacaagctaaagatggaagaatacatattttaggagaaatgaataaagctttagataaatcaagagaaggtgttggcaaacatactccgaagatggaaaaaataactgtagataaaaaagatattgcaacagttattggtaaaggtggagctactataagagaaatagttgaaaaatctggcgcaaaagttgatgtaaatgatgaaggaatagttactgtcgctgcaccagatgaggaatctagaaatattgctttacaatatattaaagatcttactgctaaagctgaattaaataaaatttataacggaaaagttatgaaaattatggaatttggagcatttgttaactttctcggaaaacaagatggtttagttcatatttctgaacttgcagataaaagagttgctaaggtaactgatgttgtcaaagaaggtgatgcagtaaaagttaaagttattggttttgatagaggtaaagtaaaactatctatcaaacaagctgttgtataaa

SEQ ID NO: 256857 - DNA, 328 bp, Unknown
  Bacterial polypeptide expressing nucleotide sequence isolated from the Sargasso Sea
aatgtttaaaattataaaaaaagaaattgaaatttcaggaaaaaaaataagtttagaaacaggtaaaattgctagacaagcagatggtgcgattatagctcaatgtggagaaacagtagtgttagccacagtcgttggtgcaaaaaaagttaatccagatatggactattttccattatcggtaaattatcaagaaaaatattatgcagctggcaagattccgggtggctacttcaaaagagaggcaagaccaaccgagaacgaaacattaatatcaagattgatagacagacctatcagaccactgtttccagatgaatttaaaaat

SEQ ID NO: 256858 - DNA, 786 bp, Unknown
  Bacterial polypeptide expressing nucleotide sequence isolated from the Sargasso Sea
gatgtttaaaatatttaaagaagaaatatattttggtggaaaaaaaataaccttggaaaccggaaagattgctcgacaagcggacggtgcaattattgccactatgggagaaacagtagttatagctactgttgttggagcaaaaaaagttaatccagagacagattattttccattatctgtaaactaccaagaaaagtactatgcagcaggtaaaataccaggaggatattttaaaagagaagcaagaccaacagagtccgaaactttgatttcaagattaattgatagaccaattagaccgttattcgctgaaagttttagaaatgaagttcaagttttaccgactgtactatcttatgataatgaaaatgaagcagatattttatcaataattgcatcatctgcggcactgtcaatttcaggattaccatttaaaggacccgttggtgcatcaagagtcggcttcattgatggtaaatgcgttctaaatccaacaaaaaaagaattagaaaattcaaaacttgatttagttgtagcaggaacaaaagatgcggttttaatggttgagtcagaagcttctgggctgacagaaaaggaaatgttagatgcagtcaaatttggccacgaaggttttatttcagttataaaaggtatagaaaaattatccaaaaagtcttcaaaagaaaagtggaagattgaggaaaaagactttagcaaagtatacaaaaaaattgaaaaagagcttacaaaagatttagaaaaagcgttttcagaaaaagataa

SEQ ID NO: 256859 - DNA, 706 bp, Unknown
  Bacterial polypeptide expressing nucleotide sequence isolated from the Sargasso Sea
atgttcaaaataaataaggaagaattagaagttaatggtaaaaaattaactttagagacaggtaaagtagcaagacaagcagatggagctatcattgccactcttggggaaacagtagtaatagcaacagctgtaggagctaaaaaagttgccgagggtcaggactattttcccttgtcagtaaattatcaagaaaaatattatgcagcaggtaaaatacctggaggatattttaaaagagaggcaagaccaaccgaggcagaaacattaatctctagattaatagatagaccgataagacctttatttccatctgggtttatgaatgaggttcaagttttacctacagtcctgtcatacgatagtgagaaccaaccagatattttatcgatcatagcttcttcagcagctctagcaatatcaggactaccatttttaggacccattgcagccagtagagtaggctacaaagatggaaagtatttattaaatccctcagttgaggaattaaaagactccgaattagatcttgtagttgctggaactaaagatgctgttctgatggttgaatctgagacatcaggcttatctgaaaaagttatgttggatgctgtaaaatttggtcacgaaaaatttgtgccaataatagaagcgatagagaaattagcaaaaaaagcttgtaaacctaaatggaagtcgaagaagt

SEQ ID NO: 256860 - DNA, 937 bp, Unknown
  Bacterial polypeptide expressing nucleotide sequence isolated from the Sargasso Sea
gatttccaggcggtttttcaaaaagagaagcaagacctagtaatgaggagatttttaccaatgagaattgttgacagagttctaagacctctatttccgaaggattattataatgaaactcaggttatgatacaactaatgtctcacgatgaaaatgtaatgccagatgcgttagttggtttagctgcttctgctgcactatcattgtctgatattccatttgatggtcctatttctgaagttagagtggcaagaattgatggaaagtttataataaatccatcaaaggcacagcttgaagaatctgatatagatatgatggttggtgccagtgaagattcagttgttatggttgagggtgaatttaatgagatttctgaagaggaaatgacagaggcaataagatatgctcatgatgaaattaaagctcaaatcaaggctcaaaaagagcttattgagcttgttggagtcagttctgaaaaaagagaatatgattctgctgaagaagacagtgaactagaaaatcaaattattgaaaaaacttatcaaaaatgttatgacatagcaaaaaaaggtctttcaaaaaatgaaagaagtgaacttttttcaaatgtaaagcaagaattagtcgaatcatatgacgaggaaacgtttgaagaaaagaaagatcttattctaaattactttagtaaatcacaaaaaaaggcagttagggatttagttcttaatgaaggtgtaaggcttgatggaagaaaacctgataacattagagacatttggactgaaatcaattatttaccctctactcatggatctgcagtctttacaagaggtgaaacgcaagcccttgcttcagttactcttggaacaagtagagaagctaacataattgatatgccaactgatcaatctgaagagaccttttatttacattata

SEQ ID NO: 256861 - DNA, 727 bp, Unknown
  Bacterial polypeptide expressing nucleotide sequence isolated from the Sargasso Sea
ggctacagtttgcggaacttccttatctttaatggacgcaggtgtgcctataaaagagcctgttgctggtatagcgatgggattaataaaagaaggagataaattttctgtattatcagatattttaggcgacgaagatcatttaggagatatggactttaaagttgctggaactaaagatggcattacatctcttcaaatggatatcaaaattacaggtatcacatttgaaattatggaaaaagctttagatcaagctaaagctggtagagaacatattttaggtgaaatgaataaagctttaaagtcatctagaaaagaattttcaaaacatactcctaaaatggagactataaaagttgacaagaaagatattgcaactgttataggtaaaggaggtgcaacaataagagaaatcgttgaaacttctggtgcaaaagtagatgttaaagacactggagaagtaacagtagcagctcccgatgaagaatctagaaaaaaagcattagaatttattaagaatttaatagcaaaaccggaaatgggaaagatatataaaggtaaagttgttaaaattatggaatttggtgcttttgtaaatttcttgggtaaacaagacggtttagtgcatatttctgaactagcttcaaaacgagtggctaaagttggagatgtggttaaggaaggtgatgaagtttcagtcaaagtggttggttttgacagagga

SEQ ID NO: 256862 - DNA, 970 bp, Unknown
  Bacterial polypeptide expressing nucleotide sequence isolated from the Sargasso Sea
cacgaaagttttgctaatgtgataaaaggtattgaaaagttggccaaaaaagcctcaaaagaaaagtggaaaatcgaagaaaaagatttcagtgaagtctcaaaaaaattaaaaaaagagctttctaaagacttagaaaaagcatttacagaaaaagataaaaagaaaagatctgatttaataagcgcagcgggagaaacatgtaaatcgttatttaaagatgacgagactcttttagaacatgaagtcatgactcagcttaaaaatttagaaaaagaaatagttagatcaagaattttaaaaagcaaaaaaagaattgatggcagaggtctttcggatgtaagaccgataaaatgtcaagtaggtatactgccaagagttcatggctctgcattattcactagaggtgaaacacaagcaatagtgacaactactttagggacctcagatgatgagcaaagaatagaaagcttggaaggattaaaaagacaaagattcatgttgcactacaattttcctccattttctgttggagaaactggtaggattggaactggtagaagagaagtgggacatggtaaattagcttggagagcgttaaattcttctttgcctaaaaaggaaaattttccatatactttgagaattgtatcagaaattactgagtcaaatggatcatcatcgatggcaacagtatgtggatcttctcttgcattaatggatgcagcagttcctatagctgaaccagtcgcaggaattgcgatggggctaattaaagagaaagatgatttttctattttatcggacatattgggagacgaagatcatttgggagatatggattttaaagtagctggaactaaagatggcataacgtctcttcaaatggatattaaaattacaggtatcacttttgaaattatgaaaaagctcttgctcaagctaaagatggacgtattcacattctaaa

SEQ ID NO: 256863 - DNA, 889 bp, Unknown
  Bacterial polypeptide expressing nucleotide sequence isolated from the Sargasso Sea
attagtggttgcgacactcggaacaggaagcgatgaacaaattattgatgcacttgaaggagaaagcaaatctagatttatgttgcattataattttccacctttttcagttggtgaggtaggaagaacaggcagccctggtagaagagagattggtcatgggaaactggcatggagatcattaaatccagtactacctgaccatgatgattttccttatacaattagattagtctctgagataacagaatccaacggatcctcttcaatggctactgtatgtggttcatcattagcaatgatggatgctggtgtagttttgcctaatcctgttgctggaattgcaatggggttaatcaaagagggaaaagaatttgcggttctgtctgatattcttggagatgaagaccatcttggcgatatggattttaaagtttcgggtacacaaaaaggtattactagtcttcaaatggacattaaaattacctcaattacaaaagaaataatggaaattgctcttaatcaggctaaggatggcagaattcatattctaaaagaaatgtcaaaagctataaacatacctagaaaaaatttagctgaaacagcaccaaagatttttagaacgacagtagctttagaaaaaataagagatgttattggttctggtggtaaagttataagagaaatttgtgaggtctcaggggctaaggtagatattgatgatgatggatcaattacaatttctgctgttgacagcacttcaatagataaagcaaaaaagatgatcgaagatattgttgctgagccagaaaaaggtgtggtttacaaaggaaaagttgtcaagacggttgattttggtgcatttgtcaattttttgggagcaaaagat

SEQ ID NO: 256864 - DNA, 755 bp, Unknown
  Bacterial polypeptide expressing nucleotide sequence isolated from the Sargasso Sea
aatgtttaaaatacataaagaagaaattgaaattaatggaaaaaaaataactttagaaacaggaaaaattgctcgacaagctgacggagcaattatcgcaacgtgtggtgagacagtagttatagcaactgttgtaggtgctaaaaatttaaaagatggacaagattattttccattatctgtaaattaccaagagaaatattatgcggcaggaaaaatacctggaggatattttaaaagagaggcaagaccaacagaagccgaaacattaatatctagattaatcgatagaccaattagaccattatttccatcaagctttatgaacgaggtacaattgttgcctacagttttatcttatgatggagaaaatcagccagatattttatctataattgcttcatcagcagctttagctatatcaggacttcctttcgaaggcccaatcgctgcgagtagagttggttataaagacggaaaatatttattaaacccatcaccaacagaattacaagactctgaattagatctagttgtagctggaaccaaagatgcggttttaatggtagaatcagaaacttcaggattgacagagaaggtaatgttggatgcagtaaagtttggacatgaaaattttattccagttattaaagtaattgaaagtttagctaaaaaagtaggaaaacctaaatggaaagttgaagagatagatcattcagatcttaaaaagaaaattgttaagacttttgaagcag

SEQ ID NO: 256865 - DNA, 915 bp, Unknown
  Bacterial polypeptide expressing nucleotide sequence isolated from the Sargasso Sea
atgaacaaaatggaatcatccgatttagacttaatggttactggaaaaaaagataaaatttgtatgattgaaggtggatctaattttgttcctgaaaaaacaattttagaagcattagatgtagcaatggatggaattaacgacattgttgatcttcaattggagttttcagaacattttgacaattcttatgaaattattgatacaaaagttataacagaagatattgaaaagtctttagatgatgcttacttatcaaaaatggaaaagatatttgatttagataccaaacaagcaagagatgatgaatttaatgcaattgaaaaagaagcattagaaccatatcttgaagatgaggttatgtatcctgaagttaaaaatcatattaaaaatatgttcaagaatacagttagaaaaactgttttagataaaaaaataagagttgatggaagaggattagaggatatcagagatataagtgttgtagaatctatacttccaagagtgcatgggtctgcattgtttaccagaggtgaaactcaatcaatcgctgctttaactttaggatccagtagagatgaacaaattattgattcaatggctagcgattataaaaaatcattcttgctgcattataactttcctccatattgtgtaggagaagttggaagaattggttttactaatagacgtgaaattggtcatggtcatttagctgaaagatcacttaaaccaatattaccatctaacgaagagtttccgtatacagtccgtattgtttctgaaattaccgaatcaaacggctcttcatctatggcatctgtttgtggtggttcattagcaatgatgaatgctggtgtgcctataaaagagcatgtagctggaattgctatggggttaattatggaagatgat

SEQ ID NO: 256866 - DNA, 718 bp, Unknown
  Bacterial polypeptide expressing nucleotide sequence isolated from the Sargasso Sea
aatgttcaaaatacataaagaagaaatagaagttaatggtaaaaaattaactttagagacaggaaaggtagctcgtcaagcagatggagcaattattgcatcattaggtgaaacagtagtaatagcaaccgctgtaggggcaaaaaaattaaatgatggtcaagattattttccattatcagttaattaccaagaaaaatattatgcagctggaaaaattccaggtggatattttaaaagagaagcaagacctactgaagctgagactttaatttcaagattaattgatagacctataagacctttatttccctcaagctttttgaatgaagttcaactgcttccaacagtattatcatacgatggtgaaaatcaaccagatattttgtcaattatagcttcatcagcggcattagctatttctggcttgccatttcaaggtcctataggtgcaagtagagttggatataaagatggaaaatatttattaaacccatctattgaagaattaaaagaatctgaattagatttagttgtagcaggaacaaaagatgcagttttaatggtagagtctgaaacttcaggattatctgagaaagtgatgttagatgctgtaaaattcggacatgaaaaatttgtaccaataattgaaagcatagaaaatttagcaaaagagctggaaagccaaaatggggagtcgaagagattgatcattctc

SEQ ID NO: 256867 - DNA, 706 bp, Unknown
  Bacterial polypeptide expressing nucleotide sequence isolated from the Sargasso Sea
tgtaggagcaaaaaaagtaaatccagaaatggattatttccctctatcagttaattaccaagaaaaatactacgcaggcggaaagatcccaggtggatactttaaaagggaagcaagaccaactgaaagtgaaacattaatttcaagattaattgatagaccaattagacctttgtttcctgatgaatttaaaaatgaagtacagttgttaccgacggtaatttcttacgataaagaaaaccaaccagatattctagcaatcactgcttcatcagcagcgttagctatttcaggaatgccatttatgggccctgtaggagcttcaagagtgggctatattgatggaaagtatattcttaacccatcaaaagaagagttagaaaaatcaagtttagatttagttgtagctggcactaaagatgctgtgcttatggttgagtctgaaacatcaggtttgtctgaagaagtaatgttagcagcagttaaatttggtcatgagggatttgttccagtaatcgaaatgattgaggaacttgcaaaagattgcagaaagcccgagtggattgtcgagaaaaaagatttatctgaagtcaaacaaaaacttgaagaaacttttacagaagatcttaaaaaagcttttgcaacaagagataaacaagatagatcaaatcaaatttcagaaattactgacaaagctaaaaagctc

SEQ ID NO: 256868 - DNA, 369 bp, Unknown
  Bacterial polypeptide expressing nucleotide sequence isolated from the Sargasso Sea
aatgtttaaaatagtaaaaaaagaaatagaaatagctggaaaaaaaataagtttagaaacaggcaaaattgcaagacaagctgatggagcgataatagcaacttgtggagaaacagttgttttagcaactgttgttggagcaaaaaaaataaatccagatatggattattttccgttatcagttaattatcaagaaaagtattatgcagctggaaaaatacctggtggatattttaaaagagaagccagaccaactgaaagtgaaacattaatttcaagattaatagatagacctataagaccattatttccagatgagtttaaaaatgaagtacaattattaccaacagtaatatcttatgataaaga

SEQ ID NO: 256869 - DNA, 553 bp, Unknown
  Bacterial polypeptide expressing nucleotide sequence isolated from the Sargasso Sea
ggaaaaattcctggtggatattttaaaagagaagcaagaccaactgagagtgaaacattaatctcaaggttaattgatagaccgatcagaccattgtttcctgatgaatttaaaaatgaagttcagttactgccaactgtaatttcttacgataaagaaaacgaagcagacattctgtcaattattgcttcgtctgcagctttagctatatcaggaatgccatttatgggccctgtaggggcttctagagttggatatattgatggtaaatatgttttaaatccctcaaaagctgaacttgaaaaatcaaaattagatttagtggttgctggaacaaaagatgctgtgcttatggttgagtctgagacaagcggattaactgaggaagaaatgttaaatgcagttaaatttggtcatgaaggttttgttccggtgatacaaatgatagaggaattggctaaagaatgcagaaaacctgaatggaatgttgaaaagaaagacctatctgaagttaaaaagaaacttgaagaaacttttacagaagattcttaaa

SEQ ID NO: 256870 - DNA, 514 bp, Unknown
  Bacterial polypeptide expressing nucleotide sequence isolated from the Sargasso Sea
atgtttaaaatacacaaggaagaattagaagttaacggtaaaaagttaactctggaaacaggaaaaattgcaagacaagcagatggcgcgataatggctactttgggtgaaaaaaaaaaaatagctacagcagttggagccaaaaaggttgcagaaggacaagactattttccactatcagttaattatcaagaaaaatattatgcagcaggtaaaataccagggggatactttaaaagagaagcaagacccaccgaggctgaaacattaatttctagattaatagatagaccaattagacctttgtttccatctggttttatgaatgaagttcaagtactcccaactgtcttatcttacgatagtgagaatcaaccagacattttatcaatgatcgcctcttctgcagctttagctatatccggtttaccatttttaggaccgatagcagcaagtagagtaggatttaaagatggaaagtacttattaaatccttcagtggagacaactcaag

SEQ ID NO: 256871 - DNA, 646 bp, Unknown
  Bacterial polypeptide expressing nucleotide sequence isolated from the Sargasso Sea
aatgtttaaaatacataaagaagaattagaagttaatggtaaaaaattaactttagaaacaggaaaagttgcgcgtcaagcagatggagctataattgctacacttggagaaacagtagtaatagcaacagcagttggggcgaaaaaattaaatgatggtcaagattattttccattatcagttaattaccaagaaaaatattatgcagctggaaaaattccaggtggatattttaaaagagaagcaagacctactgaagctgagactttaatttcaagattaattgacagacctataagacctttatttccttcaagctttttgaatgaagttcaattgcttccaacagtattatcatacgatggggaaaaccaaccagatattttgtctattattgcatcatcagcggcattagcgatttctggtttgccatttcaaggtcctataggtgcaagtagagttggatataaagatggaaaatatttattaaacccatctattgaagaattaaaagaatcagaattggatttagttgtagcaggaacaaaagatgcagttttaatggtagagtctgaaacttctggattatctgagaaagtgatgttagatgctgtaaaatttggacatgaaaaatttgtaccaata

SEQ ID NO: 256872 - DNA, 472 bp, Unknown
  Bacterial polypeptide expressing nucleotide sequence isolated from the Sargasso Sea
gatgttcaaacaatataaagaagaaatagattttggtggaaaaaaaatcactttggaaacaggtaagattgctagacaagcagatggtgcaattattgctactatgggggaaacagtagttattgctactgttgtaggagcaaaaaaagttaatcctgagacagattattttccattatctgtaaattatcaggaaaaatattatgcggctggtaaaataccaggaggttattttaaaagggaggcaaggcctacagaagctgaaactttaatttcaagattaattgatagaccaataagaccattgtttccagaaagttttagaaatgaagttcaacttttaccaactgttctatcttatgataatgaaaatgaagcagatattttatcaataattgcctcatcagcagctctatcaatatctggattaccatttaaaggtccagtaggagcatcaagagtaggatttatc

SEQ ID NO: 256873 - DNA, 364 bp, Unknown
  Bacterial polypeptide expressing nucleotide sequence isolated from the Sargasso Sea
aatgttcaaaatacataaagaagaattagaagttaatggcaaaaaattaactttagagactggaaaagttgctcgtcaagcggatggagcaattattgcatcattgggcgaaacagtagtgattgctacagcagtaggcgcaaaaaaattaaatgatggacaggattacttcccgttatctgtaaactaccaagaaaaatattatgctgctggtaaaattcctggaggatattttaaaagagaggctagaccgactgaagcagaaactttgatttcaagattaatagataggcctattagacctttgttcccttctagtttttttaatgaagttcaattacttccaaccagttttatcttaccg

SEQ ID NO: 256874 - DNA, 847 bp, Unknown
  Bacterial polypeptide expressing nucleotide sequence isolated from the Sargasso Sea
tcttcattaccaacgaaagaggcatttccatatacttttagagtagtttcagagattacagagtctaatgggtcttcttcaatggctactgtttgtggaacatctttagcattaatggatgcaggagtaccaattaaagagccagttgcaggtattgcaatgggattgattaaagaaggtgatgattttagcgtcctttcagacatcctaggtgatgaagatcatcttggtgacatggactttaaagttgctggaactaaagatggaattacttctcttcagatggatattaaaattacaggtattacatttgaaattatggagcaagcattaagccaagctaaagatggaagagttcatattttaggagaaatgaataaagcattatcagcttcaagatctgatgttggaaaacatactccaaagatggaacaagttaatgtagataaaaaagatatcgctgctgtaattggaaaaggtggtgcaaccatcagagagattgttgaaaaatcaggtgcaaaagtagatgtaaatgatgaaggtgtagttacagttgctgccccagatgaagaatctagaaacattgcaatgcaaatgattaaagacattactgccaaagctgaattaaacaaaatttattcaggtaaagtaatgaagattatggagtttggtgcatttgttaattttttaggaaaacaagatggacttgttcatatctcagaacttgccgataaaagagtagctaaagtaactgatgttgtaaaagaaggcgacgaagtaaaagttaaagtgattggtttcgataggggtaaaattaaactttctatgaaacaagctactgaataat

SEQ ID NO: 256875 - DNA, 850 bp, Unknown
  Bacterial polypeptide expressing nucleotide sequence isolated from the Sargasso Sea
gaagtagcaggaaaaaatataagtttagaaacaggaaaaatagcaagacaagcagatggtgcaattattgcacaatgtggtgaaacagttgtattagcgacagctgttggagcaaaaaaagtaaatccagatgtagattactttcctttatcagtaaattatcaagaaaaatattatgcagcaggaaaaattcctggtggatactttaaaagagaagcaaggccaacagagagtgaaacattaatctcaagattaattgacagaccgatcagacctttgtttccagatgaattcaaaaatgaagtacaagtgcttccaactgtaatttcttatgacaaagaaaatgaagcagatattttatcaattattgcttcatcagcagctctagcaatctcaggcatgccatttttaggacctgttggggcatctagagttggttttatagatggaaaatatgttttaaatccatcgaaagttgaactcaaaaattcaaaattagatctagttgtagcaggaactaaggatgcagttttaatggttgagtgtgaggcaaacggtttaacagaggaagaaatgttaaatgctgtaaaatttggtcacgagggctttgtgccagttattcaaatgatagaggatttagccaaagaatgtagaaaagaggaatgggttgttgagaagaaagatcttactgaaattaagaaaaaactagaagatgaatttacagcagatcttacaaaggcattttcaattagggataagcaagaaagatcaaatatgatttcagaaataactgataaggcaaaaaaactgtatgaagaaaatgaaaattatacagacttagatgtaaact

SEQ ID NO: 256876 - DNA, 421 bp, Unknown
  Bacterial polypeptide expressing nucleotide sequence isolated from the Sargasso Sea
atgtttaaaattcacaaagaagaaatagattttggtggaaaaaagttaatcctagaaactggtaaaatagcaagacaagccgatggtgcaataatagctaaacttggtgaaacagttgttatagctacagccgttggtgcaaaaaaacttaatgaaggtcaagattattttcctttatcagtaaattatcaagaaaaatattatgctgctggaaaaatacctggaggatattttaaaagagaggccagaccgactgaggccgagacattaatatctagattgatagatagacctataagacctttgtttccatctagttttatgaatgaagtacaattgttaccaacagttttatcttacgatggggaaaatcagccagacattctttctattattgcttcttctgcagccttatcaatat

SEQ ID NO: 256877 - DNA, 421 bp, Unknown
  Bacterial polypeptide expressing nucleotide sequence isolated from the Sargasso Sea
aatgtttaacgaatttagaaaagaaattgattttggtgggcgtccgctaattctagaaacgggtaagattgcccgacaggctgatggcgcggttatggtaagttatggagagacgaaagtgctgtgcaccgcggttggctcccgctctccgaaacccggcgtggattttttcccactaacggtaaactaccaagaaaagacatttgctgctggcaaaatccctggtggctttttcaagcgtgaagggcgtcctactgagaaagagactttaacatcccggttgattgaccgtccaattcggccgcttttcgccagcggctacaagaatgagacgcaagtaatttgcacggtgctcgcacatgatttggagaacgaccctgacattgtagcactaatcggggcttccgcagcgctcactatt

SEQ ID NO: 256878 - DNA, 553 bp, Unknown
  Bacterial polypeptide expressing nucleotide sequence isolated from the Sargasso Sea
aatgtttaaaatatataaagaagaaatagaaatagaaggaaaaaaaatagttttagaaactggaaaaatagcaagacaagcagatggagctataattgctacttgtggagaaacggttgttattgctaccgtggtgggggcaaaaaaggtaaatgaagaaatagattattttcctttatcagtaaattaccaagaaaaatattatgctgcaggcaaaatacctggaggttattttaaaagagaagcaagacctacagaatctgaaacattaatttcaagattaattgatagacctataagacctttatttccagaaggttttagaaatgaggttcaagttttaccaacagtactttcttacgataatgaaaatgaagcagatatcttatcaattattgcgtcatctgcagctttagcgatttcagggctgccattccaagaacctgtagcggcatccagggtaggatatataaatgataaatatgttttaaatccatcaaaagaacaattaaaagaatcaaaattagatcttgtggttgcaggaacaaaagat

SEQ ID NO: 256879 - DNA, 736 bp, Unknown
  Bacterial polypeptide expressing nucleotide sequence isolated from the Sargasso Sea
gctgctagggttggttttgttgatgattcatacgttcttaacccgtcaatagaagatatggataatattagagaaaatcaaaaacaaagattagatcttgtagtagcgggtactcaagatgcagtcatgatggtagagtctgaagcttacgaactaagtgaaaaagagatgttaggagccgtcaaatttggccatgaacaaatgcaaaaagttatagagcttataataggcttagcagaaaagacagcaaaagagccctataattttgttccattaaacaatgacgaattaataaataaaattaaatcactaggagaaaaagatataataaaagcattttctattcctgataaacaagagagacaaaatgcattatccgaagtgaaacaaaatgttttaaacaatctttcagatgaagaattagaaaatgaagaattagatagttgttttaaaaaaattgagtcaaacgtagtaaggtctaatatcctaaaaaaaggtaagagaattgacggaagaaaacttgataaagtaagaaatattgaaactgaaacacgctttcttccaaggacgcatggatcttcattgtttacaagaggtgaaactcaagcaatagtcgttactactcttggaacaggtgatgatgaacaaataattgacgctcttcatggtgagggtagatccaaatttctacttcactataattttccacccttactctgttggagaaacaggtaga

SEQ ID NO: 256880 - DNA, 775 bp, Unknown
  Bacterial polypeptide expressing nucleotide sequence isolated from the Sargasso Sea
aatgtttaaaattcagaaagaagagatcaaagtaaatggaaaaaaaataactttagaaactggaagaattgcaagacaagcagacggagccattatcgcaacatgcggtgaaacagtagtaatagcaaccgctgtaggcgctaaaaatttaaaagatggacaggattatttcccactatctgtaaattaccaagagaaatactatgcagcaggaaaaatacctggaggatactttaaaagagaggcaagaccaactgaagcagaaacattaatatctagattaatcgatagaccaatcagaccattatttccatcaagctttatgaatgaagtgcagttattgcctacagttttatcttatgatggagaaaatcagccagatgttttgtctatcattgcttcatcagctgctttagctatatcgggacttccttttcaaggaccaatagcagcgagtagagttggatataaagatggaaaatatctattaaatccatcgccagcagaattacaggactctgaactggatttagttgtagccggaacaaaagatgcggttttaatggtagaatcagagacgtcaggattaacagaaaaggtaatgttggatgcagtaaagtttggacatgaaaattttattccagttattaaagcaattgaaagtttagctaaaaaaacaggaaaacctaaatgggaaattgaagagatagatcattcggatgttaaaaagaaaattgttagcacttttgaaacagatttaagaaaagcgttttaa

SEQ ID NO: 256881 - DNA, 898 bp, Unknown
  Bacterial polypeptide expressing nucleotide sequence isolated from the Sargasso Sea
gctcttgttggtttagctgcctcagcagcaatatcattatctgatattccatttgatggtccaatatctgaggttagagttgcaagaattgagggagaatttgtgataaatccatctaggagtcaattagaagaatccgatattgatattatggttggagctactgaggactctgttgttatggttgagggagaatttgatgaaatctctgaggaagaaatgactgatgcaataagatatgctcatgatgaaatcaaaagacaaattgttgcacaaaaaaaacttataaaacaagctggtattagttcagaaaagagagaatacgatgaagcagaagaagatcaagattttgaaactgaaatcttagataaaatttatcaaaaatcttatgatattgctaaaaagggactttcaaaaaatgaaagaagtgaatcttttagttcattaaaagaagaattgatagattcatatgatgatgagactattgaagaaaagaaagacttgattgtgaaatactttaacaaagcacagaaaaaagctattagagatctagttctaaatgaaggtactaggctagatggaagaaaaacagaagatataagagatatttggacagaagttggatatctaccttctactcatggatctgcagtttttacaagaggtgagactcagtctcttgcatctctaacattaggaacaagtagagaagtaaacgtaattgatatgcctacaaatcagtcagaagaaagcttctatttacattataactttccccctttttcaacaggagaagctagacctcttagaggaacatctagaagagaaattggccatggaatgttggcaaaacgtgcccttaaaaaggtaatgccagatgatgtccgtacacagttag

SEQ ID NO: 256882 - DNA, 430 bp, Unknown
  Bacterial polypeptide expressing nucleotide sequence isolated from the Sargasso Sea
atgttcaaagttaataaaaaagaaatagaattaaacggaaaaaaaattagtttagaaacaggaaagattgcaagacaagcagatggcgcaataatagctcgttgtggagagactgttgtgatggcaacagtagttggagctaaaaaggtaaatcctgaagtagattattttccattatcagtaaattatcaagaaaaatactattctgcaggaaaaatacctggaggttattttaaaagggaggcaagaccaacagagagcgaaacacttatctcaaggttgatcgatagacccataagacctttgtttcctgatgaatttagaaatgaagtacaactactccctacagttatttcttatgataaagaaaatgagtctgacattttatcaataattgcatcttcagctgcacttgcaatttcaggaatgc

SEQ ID NO: 256883 - DNA, 727 bp, Unknown
  Bacterial polypeptide expressing nucleotide sequence isolated from the Sargasso Sea
agaaactggcagaattggaactgtagaagagagatagtctatggtaaattagcatggagagcaattcattcttcattaccttcaatagaatcttttccatatacttttagggtagtttcggagattacggagtctaatggctcttcttctatggctacagtttgtggaacatcacttgcattaatggatgctggagtacctataaaggagccagttgcaggtatcgcaatggggttaattaaagaaggaaatgagtttattgttttatctgacattttgggtgatgaagatcatttaggagatatggactttaaagttgcaggtaccaaagatggaattacttcacttcaaatggatattaaaattactggtatcacttttgaaattatggagcaggcattaaatcaagcaaaagaaggaagaattcatattttaggagaaatgaataaagctttaggcaaatcaagagctgaagttggaaaacatacaccaaaaatggaaaaagttaatgttgacaaaaaagatatagcagctgttattggtaagggtggagcaacaattagagagatagttgaaaaatcaggtgctaaagttgatgtgaacgatgaaggagtagtgacagtagctgctccagacgaagaggcaagaaatattgctatgcaaatgattaaggacatcacagcaaaggccgaaatgaataaaatttattctggtaaagttatgaaga

SEQ ID NO: 256884 - DNA, 851 bp, Unknown
  Bacterial polypeptide expressing nucleotide sequence isolated from the Sargasso Sea
ggttcatggttcagcagttttcactccgtgggggaaacccaatcattaactacacttactttaggtggaaaaatggacgagcaaatgattgatggtgctacaagacaaggaacagagccttttatgcttcattataactttcctccattttcaactggagaagcacggatgaagtttagtgtaagtagaagagaaatagggcatgggaacttagctttaagagcacttaaacctgttttaccagaagataattcctatacaataagacttgtttctgagatattagaatctaacggttcttcttcaatggcaacggtttgtgcaggaaccttagcacttatggatggtggagttcaaattaaggcgccagtttctggaattgcgatggggcttgttgctgaagatggaaaatttgcagtattgtcggatattcttggtgacgaagatcaccttggagacatggactttaaagtaacgggtactgctgctggaatcacagcatgtcaaatggatattaaagtagatggtttgccatatgaagttctaattcaagcgcttaatcaagctaaagaagggagacttcatattttaaataaaattgtagaaacaatcgctgaacctaatcaagaattcaaacctcaaacaccaagaattgaggcatttaatgttcctaacgatacaataggagcaattataggacctggaggtaaaattatccaacagttacaaaaagatacgaatacgagtattactattgaagaacttgaaactggagagggtagagtacaagtaatgtccaataatggagatgatatggctgcagcaattacagctgttcgtttaatagcttt

SEQ ID NO: 256885 - DNA, 352 bp, Unknown
  Bacterial polypeptide expressing nucleotide sequence isolated from the Sargasso Sea
atgtttaaagtatacaagaaggaaattgaagtagcaggaaagaaaattagtttagaaacaggtaaagtagcaagacaggcagatggagcaattattgcaacatgtggagaaacagttgttttagcaacagtagtaggagcaaaaaaagtaaatccagatatggattactttccactttctgtaaattaccaagaaaaatattatgcagctggaaaaattccaggaggatattttaaaagagaggcgagaccaactgagagcgaaacattaatctcaagattgattgatagaccgatcagacctctatttcctgatgaattcaaaaatgaagtacagttattaccaactgtaa

SEQ ID NO: 256886 - DNA, 430 bp, Unknown
  Bacterial polypeptide expressing nucleotide sequence isolated from the Sargasso Sea
gcattaaaagaggatataatgtcaaaagaggtctctgatgaagacgacaactcagaggaactatctgctgttttcaatgatctaaaaaaagacattgttagagaaagaattctaagcggtgaaaaaagaattgacggtagagatagtaagactgtaaggcctatacatgttcaaacaggtgtcctgccgaggactcatggttctgccttattcacaagaggtgaaactcaagctttagtagtcgctacattgggcacaaataaagacgctcaaataattgattctttaaatggcagggttgatgattcatttatttttcattacaacttcccaccatattctgtgggtgaaattggaatgattggctcacctaaaagaagagagataggccacggaaaacttgctaggagaggtgtacaagcagtgatgc

SEQ ID NO: 256887 - DNA, 490 bp, Unknown
  Bacterial polypeptide expressing nucleotide sequence isolated from the Sargasso Sea
gatgtttaaagtatataagaaggaaattgaagtagcaggaaaaaagataagtttagagacaggtaaagtagcaagacaagcagacggtgcaataattgcaacatgcggagaaacagtcgttttagcaacagtagtcggagcaaaaaaagtaaatcctgatatggattactttccgttatctgtaaattaccaagaaaaatattatgcagctggaaaaattccaggtgggtattttaaaagagaagcaagaccaacagaaagtgaaacattaatctcaagattaattgatagaccaatcaggccattgtttcctgatgaatttaaaaacgaagtacaactattaccaacagtaatttcctatgataaagagaatgaagcagatattttatctattatagcttcatcggcagcattagctatatccggtatgccatttatggggcccgttggagcctctcgagtgggattattgatggaaaatatgtgttaa

SEQ ID NO: 256888 - DNA, 747 bp, Unknown
  Bacterial polypeptide expressing nucleotide sequence isolated from the Sargasso Sea
tttgttgttaatcctacaaaaagtcaattagctaatacaaaactagagttagtattagcaggaacaaaagagggtgttttaatgattgagtctgaggcacatgagctttcagaaaaacagatgttagatgctgttgttcttgggcaagatagttataaagcagtaattgatgcaattatagctttagcaaaaaaagcagcaaaagaaccttgggaattaaaagaaaaagaggatgaaattaaaaatcttccaacaaatattagtggtgagtttggtaatgactttatagaagcatataaaataatagaaaaacaaaaaagatcggatcaattatcttctattagaaattcaatctctgaaaaatatacatctgaaacactttcagcagtaataatagctgatgctattaaaaatgttgagaaagatattgttagaggtgagctaattaatactggtaaaagaattgatggaagagatacaaaaactgttcgaccaattgtttgtgaaacaggaattttagaacgtacacatggatcagcattatttaccagaggagagacccaagcaattgttgtatcaactttaggtactggtcaagatgagcaaagaattgatgctattgatggagaatatactgaaaattttatgcttcactataattttccaccatactcagttggagaagttggtagagttggctcaactagtagaagagaaattggtcatggaaaactagcttggagagca

SEQ ID NO: 256889 - DNA, 362 bp, Unknown
  Bacterial polypeptide expressing nucleotide sequence isolated from the Sargasso Sea
aatgtttaaacaatttaaagaagaaatagatttcggtggaaaaaagataactctagaaacaggcaaggttgctagacaagcagatggcgcagttattgctactatgggggaaacagtagttattgctactgttgtaggagcaaaaaaagttaatcctgagacagattattttccactatctgtaaattatcaggaaaaatattatgctgctggtaaaataccgggaggttattttaaaagggaagcaaggcctacagaggctgaaactttaatttcaagattaattgatagaccaataagaccattgtttccagaaagttttagaaatgaagttcaacttttaccaactgttctatcttatg

SEQ ID NO: 256890 - DNA, 559 bp, Unknown
  Bacterial polypeptide expressing nucleotide sequence isolated from the Sargasso Sea
atgttcaaagtagtaaaaaaagaaatagaaatagcaggaaaaaaaataagtttagaaacaggcaaaatcgcaagacaagccgatggagcgataatagcaacttgtggagaaacagttgttttagcaactgttgttggagcaaaaaaaataaatccagatatagattattttccattatcagttaattatcaagaaaagtattatgcagctggaaaaatacctggtggatattttaaaagagaagctagaccaactgaaagcgaaacattaatttcaaggttaatagatagacctataagaccgttatttccagatgagtttaaaaatgaagtacaattattaccaacagtaatatcttacgataaagaaaatgaagctgatatattgtcaattattgcttcatccgcagctttagctatatcaggcatgccatttatgggacctgttggtgcttctagagttggttttatagatggcaattatgtccttaatccatcaaaaaaagaattagaaaattcaaaattggatctcgttgttgcaggcacaaaagatgcagttt

SEQ ID NO: 256891 - DNA, 349 bp, Unknown
  Bacterial polypeptide expressing nucleotide sequence isolated from the Sargasso Sea
aatgtttaaaattcataaagaagaaatagaaattaatggaaaaaaaataactttagaaaccggaaaaatcgctcgtcaagctgatggtgcaattattgctacatgtggagagacagttgtaattgctacagcagttggagcaaaaaaattaaatgagggacaagattattttccactatctgtaaattaccaagaaaaatattatgcagcaggaaaaattcctggaggttattttaaaagagaggcacgacctactgaagctgagacattaatttctagattgatagacagacctattagaccattatttccttcaagttttatgaatgaagttcagctattaccaact

SEQ ID NO: 256892 - DNA, 409 bp, Unknown
  Bacterial polypeptide expressing nucleotide sequence isolated from the Sargasso Sea
aatgtttaaagtatataagaagcaaattgaagtagcaggaaagaagataactttagaaacaggtaaagtagcaagacaggcagatggtgcaataatcgcgacatgtggagagacagtcgtactagcaacagtagtaggagcaaaaaaagtaaatcctgatatggattactttccattatctgtaaattaccaagaaaaatattatgcagctggaaaaattccaggtggatattttaaaagagaggcaaggccaactgaaagtgaaacgttaatttcaagattaattgatagacctattagaccattattcccagatgaatttaaaaatgaggttcagttgttaccaactgtaatttcttatgaaaaagaaaatgaagctgatattttatctattacagcgtcttcagca

SEQ ID NO: 256893 - DNA, 757 bp, Unknown
  Bacterial polypeptide expressing nucleotide sequence isolated from the Sargasso Sea
agttcaaatatttagtaccgtcatgtcttctgacaagacgcaaaatccagatatcgctgcaatgataggagcatctgctgcattaactatttcaggagtgccttttgatggcccaatgggggcagctagagttggatttattgatggagaatatgttttaaatccatcatttgaagaattggataattcttatttagatatggttgtagctggaacggatgaagctgttcttatggtagagtctgaagcaaaagaattaaatgaagaccttatgctaggtgcagttctttttggtcaccaagaaatgaaagctgttatcaacgcgtgcaatgaattaaaaaataaggctgggaaagaagagtggactattgaagaagatgaaaatattactaactattattctgacgttgaaagcaaatataaagatgaaattacagaagcttttacaatatctaataagtcagatcgcaatgaagctctagctactattaaatctaaaatagttgaagattattcagatctagatgaatttgaacttggcagagttttaagttcctttaaagaattagaaaaaaatattgttagaggcaatatattaaataatatgcctagaatagatgggagagatttggatacagtaagacctatttttgttgaaacagatgttcttccaagtgcacatggatcggcattatttacaagaggagagactcaagctgttgttgttgcaactcttggctcttctagagatgcacaa

SEQ ID NO: 256894 - DNA, 853 bp, Unknown
  Bacterial polypeptide expressing nucleotide sequence isolated from the Sargasso Sea
attaactcatcacttccatcaaaagaaagttttccctatacatttaggattgtatcagaaatcactgagtctaacggttcatcttctatggcaactgtttgtggaacatcacttgctcttatggatgcaggcgttcctattaaagagccagttgcaggtattgctatgggtttaataaaagaaggtgaggatttctctgtactatcagacattcttggtgatgaagatcaccttggagatatggattttaaagttgcaggtactaaagatgggataacatcattacaaatggatattaagattacaggaattacatttgaaataatggaacaggctttaaatcaagcaaaagacggaagaattcatattttgggtgaaatgaataaagctttagacaaatcaagagataatgttggaaaacatactccaaaaatggaaaaaattactgttgataaaaaagatatagctgcagttattggaaaaggtggtgcaacaattagagaaattgtcgaaaaatcaggcgccaaagtagatgttaatgatgaaggtgttgttacagttgctgctcctgatgaagagtcaagaaattttgctatgcaaatgattaaagacatcacagctaaagctgaattaaataaaatttataatggaaaagttatgaaaattatggaatttggtgcgtttgttaatttcttaggaaaacaagatggtttagtccacatttctgagcttgcagataaaagagttgccaaagtaacagatgttgtcaaagaaggtgacgaagttaaagtaaaagttattggatttgatagaggaaaagttaaattatctataaagcaggccgctatttaga

SEQ ID NO: 256895 - DNA, 438 bp, Unknown
  Bacterial polypeptide expressing nucleotide sequence isolated from the Sargasso Sea
aatgtttaaagtatataagaaggaaattgaagtagcaggaaagaagataagtttagaaacaggtaaagtagcaaggcaagcagacggagcaattatcgcttcatgtggtgaaacagttattttagcaacagtggtaggagcaaagaaagtaaatccagatatggactatttcccattgtcagtaaattaccaagaaaaatattacgctggtggaaaaattccaggtggttattttaaaagagaaacaagaccaactgaaagtgaaacattgatctctagattgattgacagaccaatcagaccgttatttcctgatgaatttaaaaatgaagtacagttattaccaaccgtaatttcatatgataaagataaccaaccagatattctagcaatcaccgcatcatcggcagccttagctatatcaggaatgccgttcaa

SEQ ID NO: 256896 - DNA, 659 bp, Unknown
  Bacterial polypeptide expressing nucleotide sequence isolated from the Sargasso Sea
acaagaaggaaatagaagtagcaggaaagaaaaaagtttagaaacaggtaaagtagcgagacaagcagacggagcaatcatcgcaacatgtggtgaaacagttattctagcaacagtcgttggagcaaagaaagtaaatccagatatggattattttcctttatcagttaattaccaagaaaaatattatgcaggtggaaaaatccccggtggatattttaaaagagaagcaagaccaactgaaagtgaaacattaatctctagattaattgatagaccaatcagaccattatttcctgatgaatttaaaaatgaagtacagttgttaccaacagtaatctcatatgataaagaaaaccaaccagatattctagcaatcactgcttcatcagcagcgttagctatttcaggaatgccatttatgggtcccgtaggagcttctagagtgggctatatcgatggtaagtatattcttaacccatcaaaagaagagttagaaaattcaagtttagatctagttgtagcaggtactaaagatgcagtgcttatggttgagtctgaaacatcagggctatctgaagaggtaatgttagcagcagtcaaatttggtcacgaaggattttgttccagtatcgaaatgattgagggacttgcaaaag

SEQ ID NO: 256897 - DNA, 877 bp, Unknown
  Bacterial polypeptide expressing nucleotide sequence isolated from the Sargasso Sea
atggaaaaccttgcgtggagagctattaattcttcattaccttcaaaagaaagttttccgtatacatttagaattgtatcagaaataacagagtctaatggttcatcttctatggctacagtatgtggagcttcattagcccttatggacgctggggtacctattaaggaaccagttgcaggtatagcaatgggattaattaaagaaggagatgattttagtgttttatcagatattttaggtgacgaagatcacttaggtgatatggactttaaagttgccgggactaaagatggaataacatcacttcaaatggacattaaaattactggtattacttttgaaataatggagcaagctttaaatcaggcaaaagatggaagagttcatattcttggagagatgaataaagcattaggtaagtcaagggatgacgttggtaaacatactccaaaaatggaaaaaatcacggtagacaaaaaagatattgcaacagtgataggaaaaggtggagctactataagagaaatagtagaaaaatcaggtgcaaaagtagatgtcaatgatgtaggtgaagttacagttgcagcacctgatgaagactcaagaaataaagctatgcagatgatcaaagatcttactgcaaaagcagaattaaataaaatttataatggcaaagtaatgaaaattatggagtttggagcatttgtaaacttcttaggaaaacaagatggactcgtccatatttcagaacttgctgataaaagagtagccaaagtaactgacgtagttaaagaaggtgatgaggtaaaagtgaaagttattggttttgatagaggaaaagttaaactatctattaaacaagctgctttataga

SEQ ID NO: 256898 - DNA, 825 bp, Unknown
  Bacterial polypeptide expressing nucleotide sequence isolated from the Sargasso Sea
aaagtatttaaaaaagaaattgaattaaatgggaaaaaaataagtttagagactggtaaaatagctcgccaagcagatggagcaataattgcaaaatgtggagaaacagttgttttagcaactgttgttggagcaaaaaaaataaatccagatatggattactttcctttatcagtaaattatcaagaaaagtattatgctgcgggaaaaattcctggtggttattttaaaagagaagcaaggccaactgaaagcgaaacattaatttcaagattaattgatagaccaataagaccattgtttccaaatgaatttaaaaatgaagtacaactgcttccaacagtaatatcttatgataaagaaaatgaagcagatgtattatcaatcatagcatcatcagcagctttagctatttcaggcatgccttttatgggaccagttggagcatcaagagttggttttattgacggtaaatatgttcttaatccatcaaaaaaggaattagaagattcaaaattagatcttgttgttgcaggtacaaaagatgcagttttaatggttgaatctgaaacaagcggtttaactgaagaagaaatgttaaatgcagtaaaatttggtcatgaaaattttattccagtaattaaaatgattgaagagttagcagctgaatgtaaaaaacctgattggattttggagaaaaaagacctttctgaagttaagaaaaaaattgaagaagaatttactgatgaactaaaaaaagctttttcaataagagataaacaagaaagatcaaatttaatatctgatataacagatagagcaaaa

SEQ ID NO: 256899 - DNA, 452 bp, Unknown
  Bacterial polypeptide expressing nucleotide sequence isolated from the Sargasso Sea
aatgtttaaagtatataagaaggaaattgaagtagcaggaaagaagataagtttagagacaggtaaagtagcaagacaggcagacggtgcaataatcgcaacatgtggagagacagtcgtactagcaacagtagtcggggcaaaaaaagtaaatcctgatatggattactttccattatctgtaaattaccaagaaaaatattatgcagctggaaaaattccaggtgggtattttaaaagagaagcaagaccaactgaaagtgaaacattaatctctagattaattgatagaccaatcagacctttgtttcctgatgaatttaaaaatgaagtacagttattaccaacagtaatttcatacgataaagaaaatgagccagatatattatcaatcactgcatcttcagcagctttagctatatcaggaatgccattcatgggacctgtaggag

SEQ ID NO: 256900 - DNA, 938 bp, Unknown
  Bacterial polypeptide expressing nucleotide sequence isolated from the Sargasso Sea
aatgttacaacttaaaaatttagaaaaaggcattgtaagatcaagaattctaaaaagtaaaaaacgaattgatggtaggggtttgtcagatgtgagaccaataaagtgtgaagttggagtattaccaagagttcacggttctgctttatttactagaggtgaaactcaggctttagtaacagcaactttaggaacatcggatgacgaacaaagagttgaaagcttagagggattaaaaagagtaagatttatgcttcactataactttcccccattctctgtaggggaaacaggaagaattggtacaggaagaagagaagtaggacacggaaaattagcttggagagctttaaattcttctctacctaaaaaagaaaattttccttacactttaagaattgtatctgaaataacagagtcgaatggatcttcatcaatggctacagtttgtggatcatcgttagcattaatggatgcagctgttcctattgccgaaccagttgcgggaatagctatgggattaattaaggagaaaaataatttttctatattatcagatattttaggagacgaagatcatttgggtgatatggattttaaagttgcaggaactaagaatggaattacatctttacaaatggacataaaaattacaggaattacttttgagataatggaaaaagctcttgatcaggcaaaagaaggaagagttcatattttaaatgaaatgaataagacaattaaatcatcaagaaaagaagttggaaaacatactccaaaaatggaaactataaaagttgacaaaaaagatatagcaactgttataggcaaaggtggagctactataagagaaattgtagaaaagtctggcgcaaaagtggatgtgaaggatacaggcgaggttacagtagcagcagcgaacgaagaaactagaaaga

SEQ ID NO: 256901 - DNA, 844 bp, Unknown
  Bacterial polypeptide expressing nucleotide sequence isolated from the Sargasso Sea
gaaaactttaagaacgaagttcaaatattttctactgttatgtcctcagataaaaaacagaatcctgatatcgctgcgatgataggcgcatccgcagcccttactatatcaggggttccatttgatgggccaatgggtgctgcaagagtaggatttattgatggtgagtacattctaaatccttcatttgaagaattaaatgactcatatcttgatatggttgtagctggaactgacgatgcagttcttatggttgaatcagaggctaaagagttaaacgaagatctcatgcttggagctgttctttttggtcatcaggaaatgaaagccgttattagagcttgcaatgaattaaaagaactggttggtaacgaggtttgggttatcaaagaagacgaggatgattctgatcattattcaaacatagaaactaaatataaagatcagattacagatgcttttaaaatttcaaataagtctgatagaaatgaagccctcggtgaaataaaaaatcagattgttgaagagcattcagatttagatgaatttgaacttggaaaagttttaagctcatttaaagatcttgagaagaacattgttagaggaaatattttaaataatatgcctagaattgatgggagagatctagatactgtaagacctatatttgtagaaacaggtgttcttcctagtgcccatggatcttctttatttactaggggtgaaacacaagctattgttgttgctactcttggttcttctagagatgctcaaaggattgaggcaatagagggcgagggatctgacaattttatgcttcattataattttcctgcatatagcg

SEQ ID NO: 256902 - DNA, 787 bp, Unknown
  Bacterial polypeptide expressing nucleotide sequence isolated from the Sargasso Sea
gagtctgaagctaatggtttaacagaagaggaaatgttaaatgctgttaaatttggccatgaaagctttgtgcctataattcaaatgatagaagatttagcaaaagaatgtaaaaaacctaattgggtagtagaaaaaaaggatctttcagaagttaagaaaaaactcgaggaaaaatttacagatgatttaaaaaaagcttttgcaacaagagacaagcaagatagatcaaatcaaatttcagaaataacagacaaagctaaaaaattgtttgaggagaatgaaaattatactgaacttgatgttaactatgagcttaaaaatcttgagaaaacaatagttagaacaaacattcttaaaaacaaaaaccgtattgatggcagaggactagcagatgtaagaccaataatgtgtgaagtaggtattttaccaagaactcatggatcagctttatttactagaggagaaactcaagcaatagttacaacaactttaggaacttcagacgatgaacaaagaatagaaagtttagatggacttcaaaaagaaagatttatgctacattataattttcctccattttcagtcggagaagttggaagagttgggactgggagaagagaaattggtcatggcaaacttgcctggagagcaattaattcttcattaccatcaaaagaaagtttcccttacacatttagaattgtatcagaaattacagagtctaatggttcatcctcaatggcaacagtctgtggaacttcattagcattgatggatgctggtg

SEQ ID NO: 256903 - DNA, 903 bp, Unknown
  Bacterial polypeptide expressing nucleotide sequence isolated from the Sargasso Sea
atgggagagcaatcaaatacttttatgctgcattacaattttccagcatacagcgttggtgagattggtatgccgcttggaccaaagcgaagagaaattggccatggaaatttagcaaaaagagctattaaggctgttcttccagatgctgaaaaatttggttataccataagagttgtttctgaaattactgaatcaaacggatccagttctatggcctcagtttgcggaacctctctttcattaatggatgcaggtgtacctatctcaaacccagttgcaggaattgcgatgggtctaatcaaggaagaaaacgattttgctgttttaacagatattcttggtgacgaggatcaccttggcgacatggactttaaagttgctggaagcaaagaaggtgtgactgcattacaaatggatataaaagttcaaggcataacagccgaaatcatggagtctgctttagaaaaagcaaaaaatgcaaggatgcatattttagagaaaatgaatgatgtaatttctgctccaaaagaattatcagataatactccagcgatgaaaaagatcacagttcaccaagataagataaaagaaattatcggtaaaggtggagctgtaatcaagggcatgcaagctgagacaggcgcatctgtagatgtaaatgatgatggagtggtaactatatttggtgaaacgcaatcaatcatgaaagctgctcttgaaatcatcgaaggcataatcgaagatccagaactagacaaagtttacgaaggaaaggttgtaaagattgttgattttggtgcctttgtaaatattttacctggtaaagatgggttgcttcatgtttctgagatttcctctgagagggttgagaatgtttctgatgtccttactgaaggtgac

SEQ ID NO: 256904 - DNA, 361 bp, Unknown
  Bacterial polypeptide expressing nucleotide sequence isolated from the Sargasso Sea
aatgtttaaagtatacaagaaggaaattgaagtagcaggaaagaagataagtttagaaacaggtaaagtagcaagacaggcagacggtgcaataatcgcaacatgtggagagacagtcgtactagcaacagtagtgggagcaaaaaaagtaaatcccgatatggattactttccattatctgtaaattaccaagaaaaatattatgcagctggaaaaattccaggtggatattttaaaagagaagcaagaccaactgagagtgaaacattaatctctagattaattgatagaccaataaggcctttgtttcctgatgaatttaaaaatgaagtacagttactaccaacagtaattttcata

SEQ ID NO: 256905 - DNA, 434 bp, Unknown
  Bacterial polypeptide expressing nucleotide sequence isolated from the Sargasso Sea
aatgtttaaagtagtaaaaaaagaaatagaaataagtggaaaaaaaataagtttagagacaggaaaaatagcaagacaagcagatggagcaattattgctcaatgtggagaaacagttgtcttagcaacagttgttggtgccaaaaaagtaaatccagatatggattattttcctctatccgtaaattatcaagaaaaatattatgcagctggtaaaattcctggtggatattttaaaagggaagcaaggccaactgaaagcgaaactctaatttcaagactaattgatagacctatcagaccattgtttcctgatgagtttaaaaatgaagtgcaactcttaccaacggtaatatcctacgatagagagaatgaagcagatattttatcaattattgcatcttcagctgctctagcaatctcaggaatgcctt

SEQ ID NO: 256906 - DNA, 928 bp, Unknown
  Bacterial polypeptide expressing nucleotide sequence isolated from the Sargasso Sea
aaccgtaatatcatacgataaagaaaacgaagcagatattttatccattattgcgtcatctgcagctttagcaatatctggaatgccatttcttggaccagttggagcatcaagagttggttttattgatggaaaatatgttttaaatccatcaaaagtagaactagaaaattctaaactagatcttgttgttgcgggaactaaagacgcagttttaatggtcgaatccgaggcaaacgggctatcagaagaagaaatgttaaatgctgttaaatttggtcatgaaaattttgttccagtaattaaaatgatagaggaacttgctaaagaatgtagaaagccagattgggttgttgagaaaaaagatttatccgaagttaagaaaaaattagaaaaggagtttactggtgatctgaaaaaagctttttctacaagagataaacagcatagatcaaatcaaatatctgaaattacagaaaaagcaaaaaaacttttcgaagaggatgaaaattatactgagctagatgtaaactacgagcttaaaaatttagaaaaaagaatagtaagaacagatattcttaaaaataaaaatagaattgatggtagaggtttagcagatgttagaccaataatgtgcgaagtcggcatattacctagagttcatggatctgctctttttacaagaggagaaactcaagcaatagtaactactacattaggtacttcagacgatgaacagagaatcgagagtttagatggtcttcaaagagagagatttatgcttcattacaatttcccaccattttcagttggtgaaactggaagattggaacaggtagaagagaaattggtcatggtaaacttgcttggagagcaatcaattcatctttgccatcaaaagaaagttttccttatacatttagaatag

SEQ ID NO: 256907 - DNA, 454 bp, Unknown
  Bacterial polypeptide expressing nucleotide sequence isolated from the Sargasso Sea
atgttcaaagtatttaaaaaagaaattgaagtagctggaaagaaaataagtttagaaacaggaaaaattgcaagacaggcagatggggctataattgctacatgtggcgaaacagttgtaatggcaactgttgttggagcaaaaaaaattaatccagaggtagattattttcctttatcagtgaattaccaagaaaaatattatgctgctggaaaaattccaggcggatattttaaaagggaagcaagaccaacagagagtgaaacacttatctcaagacttattgatagacctataagacctttatttccagatgaatttagaaatgaagttcagttgttaccaactgtaatttcatacgacaaagaaaatgaagcagatattttatcaattattgcttcttcagctgctttagctatatcaggaatgccatttatgggccccagtaggagca

SEQ ID NO: 256908 - DNA, 364 bp, Unknown
  Bacterial polypeptide expressing nucleotide sequence isolated from the Sargasso Sea
aatgtttgaaatatttaaaaaagaaatcgaagtaggaaaaagaaaaataactttagaaactggaaaaatagcaaggcaagctgatggtgcagttattgctaaatgtggtgaaaccgttgttatggcaacagttgtaggggcaaagaaagttaacccagatatagactactttccattgtcggtaaactatcaagaaaaatattatgctgctggaaaaattcctggaggatattttaaaagagaagctagacctaccgaaagtgaaacattaatctcaagattaattgatagaccaattagaccattgtttcctgacgacttcaaaaatgaagttcaattacttccgaccagtaatatcttatga

SEQ ID NO: 256909 - DNA, 391 bp, Unknown
  Bacterial polypeptide expressing nucleotide sequence isolated from the Sargasso Sea
atgtttaaaattataaaaaaagaaatagaaattgctggaaaaaaaataactttagaaacaggaaaaattgcaagacaggcagatggagcaataattgcaacatgtggagaaactgtagtattagcaactgcagttggtgcaaaaaaagttaatcccgatgttgactacttcccattatctgtaaattatcaagaaaaatactatgcagcaggcaaaatacctggtggttattttaaaagagaagcaagaccaactgatagtgaaacattaatatcaagattaatagatcgaccaataagacctttgttcccggatgagttcaaaaatgaagtgcaggttcttccaacagtaatttcttatgacaaagagaatgaagcagatatattatcta

SEQ ID NO: 256910 - DNA, 1000 bp, Unknown
  Bacterial polypeptide expressing nucleotide sequence isolated from the Sargasso Sea
acaactcttggaacttcagacgatgaacagcgaatagaaacattagatggtttagtgagagaaagatttatgttacattataactttcctccattttcagttggagaaactggaagaataggaactggccgtagagaaatagggcatggaaaacttgcttggagagcaataaaatcttctttaccatctcaagataaatttccttatacttttagaatcgtttcagagattacagagtccaatggttcttcgtctatggctactgtatgtggaacttcactatctttaatggatgcaggcgttccaatgaaaacacctgtagctggaatagcgatgggtcttattaaagagggagatgagtttagtgtcctttcagatattttaggcgatgaagatcatttaggtgatatggattttaaagtagctggaacaaaagatggtattacttcattacagatggatattaaaataactggaattacctttgaaataatggaacaggctttgaaacaagctaaagatgggagaattcacattttaggtgaaatgaataaagctttagataaatcaagagcaggagttggaaaacatactcctaaaatggaaaaagtaactgtcgataaaaaagacatagcaacagtcattggaaaaggtggggcaactataagagaaatagttgaaaagtcaggtgctaaagttgatgtgaacgatgaaggcgtcgtaactgttgccgctccagatgaagagtctagaaacaaagcgcttcaaatgattaaagatcttaccgcaaaagctgagatgaataaaatttacaatggaaaagtcataaaaattatggaatttggagcttttgtaaactttttaggaaaacaagatggtcttgttcatatatcggagcttgctaataaaagagttgctaaagttacggatgttgtcaaagaaggagatgaagttaaagttaaagtaattggttttgatagaggaaaagtaaaattatcta

SEQ ID NO: 256911 - DNA, 865 bp, Unknown
  Bacterial polypeptide expressing nucleotide sequence isolated from the Sargasso Sea
tatgagtgttgttaaaaaagaatttcaatttggtaataataaggtaatcattgaaacaggtagaattgctagacaagcaagcggtgcagttatggtctacatgggcgatactgccgtactcgtcagttgtgttgcaaaaagagttgcaaaagagggacaagatttttttccattgacagtcgattatcaagaaaaaacatacgctgcaggtaaaataccaggtggttttttcaaacgagaaggcaggccttcagaaaaagaaactttaacatcaagattaattgatagaccaataaggccactttttccaaaagaatttaaaaatgaaatccaaattattgcaagtgtaatgtcgctagatccatctgtagatcctgatataccagcaattattggggcatcagcatctctctgtttgactggcgcgccatttgatgggccgattggagcagctcgcgttggatacaaagataatgaatatgttttaaatccatcttttgatgaacttgccaaatcagaattagatttagttgttgctggtacaagctcttccgttctcatggtcgaatcagaagcaaaacagctatcagagaatgtaatgcttggcgctgttatgtttggtcatcagcaattacaaatagttattgataatatcaaagctctgactgaagaagccggtgttaaatcctgggattgggttgcgccagataaagatgaatctcttgaaaatgaaataaagaaaaatgctactgatttgttacgtgaagcctatacgattaatgacaaacttgaacgcaaagagagaataagtgaaattaaaaatgaaataattgagacaattattaatgaggaagatcctagatgg

SEQ ID NO: 256912 - DNA, 766 bp, Unknown
  Bacterial polypeptide expressing nucleotide sequence isolated from the Sargasso Sea
tatggcaactgtgtgtggctcatcattagcgctcatggatgcgggtgtaccaattaaagaaccagtagctggtatagcaatgggattaattaaagaaggagatgattttagcgttctatcagatatattaggtgacgaagatcatttaggtgatatggattttaaagttgccggcacaaaagagggaattacttctttgcaaatggatataaaaataacaggaattacatttgaaattatggagcaagctttaaaacaagctaaagatggtagagtacatatccttgatgaaatgaataaagcattatccaaatcaagagatgatgtaggaaaacatacacctaaaatggaaaaaataactgttgaaaagaaagatattgctacggtaataggtaaaggtggtgcaacaatcagagagattgttgaaaaatcaggagctaaagttgatgttaatgatgaaggtgaagtaacagttgctgcaccagatgaagactcaagaaataaagcaatgcaaatgattaaagatttaacagcgaaagctgaacttaacaaaatttataacggtaaagttatgaaaattatggagttcggtgcatttgttaacttcttgggtaaacaagatggacttgttcatatatcagaactagctgacaaaagggttgcaaaagttacagacgttgtaaaagaaggagatgaagtaaaagtaaaagttataggttttgacagaggtaaagttaaattgtctattaaacaagcagctgtttaa

SEQ ID NO: 256913 - DNA, 1105 bp, Unknown
  Bacterial polypeptide expressing nucleotide sequence isolated from the Sargasso Sea
accctgaggtgcaaacccgatgtaatatctatgattgcagcttcagcagcactgtctatttcagatataccctttaatggaccaattgcaggggtaagggttggatatatcaataataagcctgtcataaacccgaaggtatcagaaatggaaaactctgaacttgacttgatggttgcaggaacaacagatgctattcttatggttgaatctgaagcaaaggaactttctgaagaggtcatgcttgattgtgtaatgaaagggcatgatgagataaaaaaagttattgatggcatcaacgatctagttaaggaagctggaaaagaaaaatggattcttgatgaaattgataaagatgaaactttaaaaaataaagtcatagagattgctggcggtgatattgaaagcgcttactcaattgttgagaagtcagaaagatccactcgtctcgcagaaattaagcaaaatacaattgatcagattatcgaatcggacgaagagatctctaaagacgatgttgcatctgaaatcaagaaaattgagaaagaaactgtacgatcaaaaatacttaatggggaaccaagaattgacggaagagatactaagacagttagagatatcaatgttgatatcaatattcttgaaaggactcatggatctgctttatttactcgtggtgaaactcaatctattgttgtcacaactttgggttcagagcgatcatcacaaatcatagatgccttagaaggtgagtataaagataaattcatgttgcactataattttcctccttactctgtgggcgaagtaggttttatgggatctccaaaaagaagagagattggacacggtaaacttgctcgtagagcattagaagcagttttacctaacatgtctgaatatccatatactattaggattgtttcggaaataactgaatcaaatggttctagttcaatggctactgtatgtggttctagcctttctttgatgcatgctggtgttcctatcaaatctcatgttgcgggtattgcgatggggttagtaatggaaggcgataaatataaagtcctgaccgatattcttggtgatgaagatcatcttg

SEQ ID NO: 256914 - DNA, 1147 bp, Unknown
  Bacterial polypeptide expressing nucleotide sequence isolated from the Sargasso Sea
atggaaagttataaaaaaataataaaattaggtgatcaagagatcacattagaaaccggtaaagttgcaagacaagcaacaggtgctgtattagcgacttgcggaaatacccaagttttagccactgtagtagtaggaaaggctccaggagagcatcaagatttttttcctttaacagttaattatcaagaaaaaacttatgctactggtaagattcctggtggtttctttaaaagagaaggcaggccttcagaaaaggaaactttgacttcaagactaatagacagacccttgagacctttatttaatgatgattttctgtatgaagtgcaagttatttgtacagttgtatcctcagataaagacgtagatcctgatattctatcttttatagcagcgtcggcagctattggtatatcaggattaccttttaatggtccattaggagctgtaagggtcggttttatagaaggacaatattgtttgaatcctaatagaagtgacatggataactcgttattggatatggttatagcaggaagtgattctgcagtaataatggttgaatctgaagctaaggaactctctgaagaccagatgcttggtggcattctctttgctcatcaggaaatgcaagtgataatagatgctatcaaagagatgtctttagaagtaggcaaaccagcatttgagtatgagccaaaaaccttagatgtagatttagtaaattctgttaaagattcatattcagatttgatatctaatgcttatcagattcaagataaacaagaaagggttcaaactctcaatcaactaaaagaaaaattagttgaagatttagttagtgaagaagagaattcaccaaaaagcacagacttactagatgctttcaaaaaaatagaaaaaacaatagtccgatcaaatttaattaaaggtgaaccaagaatagatggtagagatttagatacagttagaccgctttttattgaaacaggcgtcttaaaaaatactcatggatctgctttatttaccagaggagagactcaagctctcgttacttctaccctaggttcccctaggcaggcgcagttgattgatgcacttgagggtgaatttaaagatcaatttatgcttcattataattttc

SEQ ID NO: 256915 - DNA, 1021 bp, Unknown
  Bacterial polypeptide expressing nucleotide sequence isolated from the Sargasso Sea
atgttcaaaataaataaagaagaattagaagttaatggtaaaaaattaactttagaaacaggtaaaatagcaagacaagcagatggagctatcattgctactcttggagagacagttgtaatagcaacagcagtaggagctaaaaaagttgcagaaggtcaagattattttcccttgtcagtaaattatcaagaaaaatattatgcagctggaaaaataccaggaggatattttaaaagagaagcaagaccaactgaagcagaaacgttaatttctagattaatagatagaccaataagacctttatttccatctggttttatgaatgaagttcaagttcttcctacagtcttgtcatatgatagtgaaaatcaaccagatatattatcaattatagcttcttcagcagctttagccatttctggattaccatttttaggtcctatagcggctagtagagttggctacaaagatggaaagtatctattaaatccatctgtggaagaattaaaagactctgaattagatcttgtagttgctggaactaaagatgcagttcttatggttgagtctgaaacatcgggattatccgaaaaagttatgctagatgctgtaaaatttggccatgaaaaatttgtaccgataattgaagcaatagaaaaattggcaaaaaaatctagcaaacctaaatgggaagttgaagaagttgatcactctgagattaaaaagaaaatctctgaaaaatttgaaggtggattaagaagcgcatttaaagaaatagataagaaaaagagatcttcagctatttctgaaatagagacacaatgtaaagaaatgtttggggaagatgaaaccgttacagaaaatcaagtaatgtctcaactgaaatcattagagaaagatattgttagaaccgcaattttaaaagaaaagaaaagaatagatggcagaggtctagcagacgtaagacagataaaatgtgaggttggtgttttaccaagaactcatggatctgctcttt

SEQ ID NO: 256916 - DNA, 1434 bp, Unknown
  Bacterial polypeptide expressing nucleotide sequence isolated from the Sargasso Sea
tatgataaataaagaaatagaaattaatggtaagactttaaaaataagtactggtcaagtagcaaaacaatctgcaggatccgtaatggtctcatatggagaaacaacgctaattgtagcagtaaatgctgcgaaagaaatgcgtgaagatattgattttttcccgcttcaggttgaatatcgtgaaagacattatgccggaggaaaaattccaggagggttttttaagcgtgaggctagaccttccgaaagagaaatacttacttctcgattaacagataggccaataaggcccttatttccaaaatctttcaaatatgaaactcaagtaattattacagttttaactactgacggagaaaatccagcagatgtacttgctggtgttggagcttctgctgcattaatggtatcaaatattccttggaatggacctatagccacagtcaggttggctaaagttgataaggatttcattgtgaatccaacgaaagagcaaatggaagaatcatcaatggaattagtggtgtcaggtaataaagatactatagtaatggttgaaggtgaagcagacttaattccagaggatgtttttgtagatgctttaaagtttgctcacaatgatattaagaagattataggtttgcaagaggagcttgcaaaggaagtaagcccagcaaaaagagatatacctgaagaaaaaactaatgaggatttgaattcagctattgagaatgctattggagataaaattaatgatattatccagattgctgataaaactgaaagagaatcagcaacttcccaattgcatcaagatacttttgaagctttggaagagaaattccctgaagctgagaaagaagttaacaatcttattagtgataaatttaaaaaagcatttcgtgatagagttttagatactggtgtgaggagtgatggtcgtagtacaaccgatataagagagattactattaatccatcgtttttacctaggactcatggttccgttttatttacaagaggtgaaactcaagctctagttgtaaatacattgggaagtaaaagggatgagcagataattgatagcatggatgaggattataaaaagaattattatcttcattataactttcctccatattgcgtaggagaggtaggtcgagtcggatttactagcagacgcgaggtagggcatggcaacctagcagaacgtgctttaaaaccagttatgccggactatgatgattttccttatacgatacgtatcgtatctgaaattatggaatctaatggatcatcatctatggcaagtgtctgtggtggttctttagctctgatggattctggatgtcccttaaaagagcatgttgcaggaatagcaatggggttaatacttgatggtgatcgtcatgcagtttttagtgatattct

SEQ ID NO: 256917 - DNA, 1483 bp, Unknown
  Bacterial polypeptide expressing nucleotide sequence isolated from the Sargasso Sea
gagatttctgaggaggagatgacagaagctataagatatgctcatgaagagattaaagctcaaattaaggctcaaaaagagcttgttaagcttgttggagtaagttctgaaaaaagagaatatgattccactgaggaggacacagaactagaaaatcaaattattgaaaaaacttatcaaaaatgttatgatatagcaaaaaaaggtctttcaaaaaacgaaagaagtgaacttttttcaaatgttaaacaagaattagtcgaatcttatgatgaagaaacgtttgaagaaaagaaagatcttattctaaattactttagtaaatcacaaaaaaaggcggtaagagatcttgttcttaatgaaggtataaggcttgatggaagaaaacctgatagtatcagaaatatttggactgaaatcaattatttaccttctactcatggatctgctgtctttacgagaggtgaaactcaagcacttgcttcagttactttaggaacaagtcgagaggctaatgtaatagatatgcctacagatcaatctgaagaaaccttttatttacattataatttccctcctttttcaactggagaagcaagaccattgagaggaacttcaagaagagaagttggtcatggaaatctagctcaaagggctctaaaaaaagtgatgccatctgattgtccatatacagttagaattgtatctgaaattttagaatctaatggatcgtcctctatggcttcagtctgtgcgggatctcttgcattgatggatgctggaattaatattaaaagtaatgtttcaggtatcgcaatgggtttaataactgagggagataagtatgctgtattatctgatattttaggtgatgaagatcatcttggagatatggactttaaagtaacaggtactaaagatggaatcactgcatgtcaaatggatatcaagattaaaggattaaaatacgagattttaattgaagcacttggtcaagctaaaaatggaagattggatatattgaataaattagatgaaaccataaataatccaaacgattctgttaaagctcatgcacctaaaatggttaatcttgaaatcagtaaggactttattggactagtaatagggccaggaggtaaaaatattcaagaactccaaaaggatactgaaactacaattgtaataaatgagaaagatgaaattggtgttattgaaattttaggggttgatcaagaaaagattaattatgctatcgacagaattaaaaatctagtttttgagcctgtaatcgatgaagtatataatgtcaaagtaattaagattcttgatttcggggcagtagttgaatttgttccaggaaaagaagctcttttacatgtatctgaaattgcatgggagagagtcaataatgtaactgattatttaaacgttggtgatcaaatcgaaataaaataccttggaattgatcctagaacaaaaa

SEQ ID NO: 256918 - DNA, 1252 bp, Unknown
  Bacterial polypeptide expressing nucleotide sequence isolated from the Sargasso Sea
tatgtttgatgtgaaaaatatagaaattgaatgggcaggaagaaaacttaaattagaaacaggaaaaatagcaagacaagctgactcaacagttatagctacttatggtggtacgactgttatgtgtaatgtagttgctgcaaaagaagcaaatcctgatatggattttttcccattaacagtaaattatcaagaaaaatattattccgtaggaaaaatacctggtggtttctttaaaagagaggctagaccaactgaaaaagaaacattagtttctcgattaattgataggccagttagacctctatttcataaagattttaaaaatgagactcaagttacttgtacagtattatcacatgatcaagaaaatgactcagatgttgtagcaatggtagcagcaagtgctgcattaactttatctggtttgccatttttaggtccactcggagcaattaagattggttttatagacgatgagtttgttgttaatccgagtaacagtcaattatcaaattctaaactagaattagtactagcagggactaaggaaggcgtactaatgattgagtctgaagctcacgagctttcagaaaaacaaatgctagatgcagtagttcttggtcaagaaaattataaaacagtgattgaagcaataatttccttagctaaaaaagctgcaaaagaaccttgggctcttaaagaaaaagatgaagagattaaaagtctaccatctaagatcaacgaagacttcggtaaagagtttatagatgcgtataaaataactgaaaaacaaaaaagatcagaaaagttatcctcactaagaaacgaaatttctgaaaaatttgtaagtgaaacactctcaccagtattagtttcagatgcaataaaaaatgtagaaaaagatatagttagaggtgaattaattaatactggtaatagaattgatggaagagatacaaaaacagtccgtccaattgtttgtgaaacaggagttttagaaagaactcacgggtctgcattatttacaagaggagaaacacaagctcttgtagtttcaactttaggaaccggacaagacgagcaaagaatagatgcgattgacggcgaatatacagagaattttatgttgcactataactttccaccttactctgttggagaagttggaagaataggttctactagtagaagagaaataggacatggaaaattagcctggagagctattcacccaaatgttaccttctaa

SEQ ID NO: 256919 - DNA, 1561 bp, Unknown
  Bacterial polypeptide expressing nucleotide sequence isolated from the Sargasso Sea
caggattcagttgttatggttgaaggtgaatttgacgagatttctgaagaagaaatgaccgatgcaattaaatttgctcatgaagaaattaagaggcaaattgatgctcaaaataagctagttaaacaagctggaattagttctgaaaaaagagaatacgatggtgcagaagaagatcaagaattagaatctgaaatttcagaaaaagtatataaaaaatcatatgatatagcaaaaaaaggattatcaaaaaatgaaaggagtgaactatttggctcacttaaagatgagcttatcgactcctatgacgaagatacattggaagaaaaaaaggatttaataattaagtattttaataaggcacaaaagaaagctgttagagatttggtgttaaatgaaggtattaggcttgatgggagaaaaacagagagcatcagagatatatggactgaggttgggtatcttccctctacacacggatctgcggtgttcactcgaggtgaaactcaatcactagcatcagtaacattgggaacaagcagagaagttaatgtcattgatatgccaacagaccaatctgaagaaacattttatttacattataatttcccgcctttttcaactggagaagctagacctctgagaggaacctcaagaagagaggtgggtcacggaaatcttgctcaaagagcactaaaaaaagtgatgccagaggattgtccttatactgtaaggatagtttctgaaatattagaatcaaatggttcatcatcaatggcatctgtatgtgctggttcaattgcattaatggatgccggtattaaaattaaaagtaatgtatctggtatagcaatgggtctcatttccgaaggagacaaatatgctgttttatctgatattcttggagatgaggatcatcttggagatatggattttaaagtcacaggaaccaaagagggaatcactgcatgtcaaatggacataaagattaagggtcttaaatacgagattttaattgaagctctaaaccaggcaaaaaaaggaagattagaaattcttgaaaaacttgatgattcaataaataaaccaaatgaaactgtcaaacctcatgctccaaaaatgataacaatggaaatagcaaaagactttattggattagttattggcccgggaggtaaaaacattcaagagcttcaaaaagaatcagaaacaaccatcgtcataaacgaaaaagatgaagttggtgttatagaaattctaggtgttgatcaagaaaagattgactatgcaattggaaaaattagaaatttaatttttgagcccgtcatcgatgaggtatacaaagtaaatgtagttaagatacttgattttggagcggtagttgaatttgttccaggtaaagaagctttattgcatgtgtcggaaatagcatgggaaagagttgatagagtaacagattatattaatttaggagatcagattgaggtcaaatatctaggaattgataaaagaaccaggaaacaaaaaatttctagaaaagttttactagaaaaaaaataat

SEQ ID NO: 256920 - DNA, 1051 bp, Unknown
  Bacterial polypeptide expressing nucleotide sequence isolated from the Sargasso Sea
ctatcttatgataatgaaaatgaatcagatattttatcaataattgcttcttcagcagctctgtcgatatctggattaccttttaaaggtcctgtaggtgcatcacgagtaggatttattgatggaaaatgtgttcttaatccaacaaagaaagagttagaaaattcaaaattagatttagttgtagcaggaactaaagatgcagttttaatggttgagtcagaagcatcagggcttactgaaaaagaaatgttggacgcagtcaaatttggtcatgagggatttgtttcagtaattaaaggtatagaaaaattatctaaaaagtgttcaaaagataagtggaaaattgaagaaaaagattttagtaaagtatcaaaaaaaatcgaaaaagagcttaccaaggatttagaaaaagctttttcagaaaaagataaaaaaactagatcagatttaattagtcaagctggagagaaatgtaaaagcttgttcgaaggagacgaagatcttttagaacatgaaataatgttgcaacttaaaaagcttgaaaaaaatattgttagaacgagaattttaaaaaacaaaaaaagaatcgatggtagaggtttatctgatgtaagacctattaaatgtgaagttggagttttaccaaggacacatggatcagcattatttacaagaggagaaactcaagctttagtgactacaacattaggtactacagacgatgaacaaagaattgaaagtttggaaggtttaaagagacaaagatttatgctccattacaattttcctcctttctcagttggtgaaactgggagaattggaacaggtagaagggaagttggacatggaaaattagcatggagagccttaaattcctctcttcctaaaaaagaaaactttccatatacgcttagaattgtttcagaaattacagagtcaaatggatcctcttcaatggcaactgtttgtggatcttcacttgcattaatggatgcggcagttcctatagctgaaccagttgctggaatagcaatgggcttaataaaga

SEQ ID NO: 256921 - DNA, 1161 bp, Unknown
  Bacterial polypeptide expressing nucleotide sequence isolated from the Sargasso Sea
aatgacaaatattgaaaaagaaattggcggtaaaattttatcgcttcaaacaggaaaagtagcaagacaatcagctggttcagtcgttttaacatatggcgagacagtacttcttatagctgttaatgcagctaaggaagctagggaggatatagatttttttcctctgcaggtagaatatagagaaaagcattacgccagtggaaagatccctggaggattttttaaaagagaagcgagaccaactgaaggagaggtgctaacgagccgtctgacagatagaccgataagaccactgttcccaaaagcttttaaaaatgaaactcaggtgatgattactgtgctccaaagtgatggcgagaatatagctgatacatgggcaggtgtgggagcctctgcagctttgatggtatccaatattccatggcatggaccaattgccacagtgcgtgttgggaagatagaaaatgaatttgtatttaaccctactcgattgcagcttgaagactgtagtcttgagcttgtggtttctggtaataaagaaaatatcgtaatggtagagggagaggcagatgaggtaagcgaagcagtggtggtagatgccttaaaatttgcacatggtaatattattgatattatcagtctgcaagaagaactggctaatagtgtcgatgtaactaagctagaagaaccagttatagagatcgatcaggatttagttgatgctattgataataagattggaaaccaaattcacgatatcgttaagattgttgataaacaggatcgtgatactaaaaaaacagctctaactaatgatgttttatcttctttagaggaaagccatccagaaaaggaaaaagaaataaatggtatcattggtgatcggttcaaagagaccatgcgagagatgattttatcagaaagcgtacgaagtgatggtcgtggaactaaggatattagggaaattacaattgacccagcaattcttaatagagttcatggctcagctttatttaccagaggtgaaacacaggcattggtagtaacaacgctcggttcaaaaagcgatgaaatgattattgacagtatggatgaagattataaaaagaactattatctgcattataattttccaccatattgcgtaggtgaagtagg

SEQ ID NO: 256922 - DNA, 481 bp, Unknown
  Bacterial polypeptide expressing nucleotide sequence isolated from the Sargasso Sea
aatgtttaaaatttttaaaaaagaagttgaagttaacggaaaaaaaattagtttagaaacaggaaaaattgcaaggcaggcagatggagcaataattgctacatgtggtgaaacggttgttctagcaactgtcgtaggggcaaaaaaagtaaatcctgatgtagattattttccattatcggtaaattatcaggaaaaatactacgcagcaggaaaaattcctggtggatattttaaaagagaggctagaccaacagaaagtgaaactcttatttcaagactgattgatagacccattagacccttgtttccagatgaatttagaaatgaagttcaattattacctacagtaatttcttatgataaagaaaatgaagctgatattttatcaattattgcatcttcagccgcactagcaatatcaggtatgccatttatggggccggtcggtgcatcaagagtaggttttataggtgggtaa

SEQ ID NO: 256923 - DNA, 841 bp, Unknown
  Bacterial polypeptide expressing nucleotide sequence isolated from the Sargasso Sea
tgcccattgaaagaaaattttccttatcctttaagagtagtttcagaaataactgagtcgaatggatcatcttcaatggcaactgtatgcggtacctcgttatctctgatggacgcaggtgtgccaatcaaagaaccagttgctggtatagcaatgggtttgattaaagaaggagaaaaattttcagttttatcagacattctgggagatgaagatcacctaggagacatggatttcaaagttgctggcactaaagaaggaattacatcattacaaatggatattaaaataacaggaattacctttgaaattatggagcaagccttaaaccaagctaaagctggtagagagcatattttaagtgaaatgaataaagcgataaagacatcaagaaaagagttttccaaacacactccaaagatggaaacaattaaggttgataaaaaagatatagcaacagtaatcgggaaaggtggcgcaaccatccgagaaatagtagaaaaatctggagccaaggtagatgttaaagatactggagaggttactgtggcggcaccagatgaaaaatcaagaaatacagctatcgatattattaagtctctaatagcaaaaccagaagtagggaaaatttacaaaggtaaagttgtaaaaattatggagtttggcgcttttgttaattttcttggtaaacaggatggcctagttcatatctctgaactagcaggcaaaagagtagccaaggtatctgatgttgttaaagaaggggatgaagtatctgtaaaagttcttggttttgatagaggtaaagttaaactttcaattaaacaggccgtagcttaat

SEQ ID NO: 256924 - DNA, 770 bp, Unknown
  Bacterial polypeptide expressing nucleotide sequence isolated from the Sargasso Sea
cttcatggctacagtttgtggaacttctctagcattaatggatgctggtgttccaatcaaggaaccagttgctggaattgcaatgggtttaattaaagaaggtgacgactttagtgtattatctgacattttaggagacgaggatcacttaggtgatatggattttaaagttgctggaacaaaagatggaataacatctcttcaaatggatatcaaaattacaggtattacgtttgaaattatggaacaagctttaaaacaggccaaagatggaagaattcatatcttaggtgaaatgaataaagcactggacaaatcaagagcagatgttggtaaacacactccgaaaatggaaaaaattacagttgataaaaaagatatcgcagctgttatcggtaaaggcggggcaacaattagagaaattgttgaacattcaggggccaaagttgatgttaatgatgaaggagttgtaacagttgctgctcctgatgatgagtctaggaataaagcaatgcaaatgattaaagatattacagctaaggctgaattaaataagatttataatggaaaagttatgaaaattatggaatttggagcatttgttaactttttaggaaaacaagatggtcttgttcatatatcagaacttgctgataaaagagttgcaaaagtaactgatgttgtcaaagaaggcgatcaagtgaaagttaaagtaattggatttgatagaggaaaggttaaactttctattaaacaggctgctgtgtgat

SEQ ID NO: 256925 - DNA, 337 bp, Unknown
  Bacterial polypeptide expressing nucleotide sequence isolated from the Sargasso Sea
atgtttaagcaattcaaagaagaaatagattttagtggtaaaaaacttactctagaaactggaaagatagctcgtcaagctgatggtgcaataattgccacttggggagaaacagtagtaatcgcaacggttgttggtgctaaaaaagtaaatccagaaacagattattttccactatctgtaaactatcaagaaaaatattatgctgctggaaaaattccgggaggttattttaaaagagaagcaagacctactgaggccgaaaccttaatatcaagattgatagacagaccaatcagacctttgtttcctgaaggttttagaaatgaagttcaag

SEQ ID NO: 256926 - DNA, 1381 bp, Unknown
  Bacterial polypeptide expressing nucleotide sequence isolated from the Sargasso Sea
gctgaaaaatcaaattattgaaaaaacttatcaaaaatgttatgatatagcaaaaaaaggtctttctaaaaatgaaagaagtgaacttttttcaacaataaagcaagaattagtcgaatcgtttgacgaagaatcatttgaagaaaaaaaagatctaattctaaattactataataaatcacaaaaaaaggcagttagggatttagttcttaatgaaggtataaggcttgatggaagaaaacctgataacattagaaatatctggactgaaatcgattacctaccatctactcatggatctgcagtctttactagaggtgaaacgcaagctctgacttcggttacacttggaacaagcagggaagctaacgtaattgatatgccaactgatcaatctgaagaaaccttttatttacattataattttccaccattttcaactggagaggcaagaccattgagaggaacttcaagaagagaagttggtcatggaaatcttgctcaaagggctcttaaaaaagttatgccatctgattgtccttatacagttagaattgtatctgaaattttagaatctaatggatcgtcctctatggcttcagtctgtgcgggatctcttgcattgatggatgctggaattaatattaaaagtaatgtttcagggatagcaatgggtttaattaccgatggtgataaatatgctgtattatctgatattttaggtgatgaagatcatcttggggatatggattttaaagtaacaggtactaaagatggaatcactgcatgtcaaatggatattaaaattaaaggattaaaatacgagattttaattgaagcacttggtcaatctaaaaatggaagattagatatattgaataaattagatgaaacaataaataatccaaaagattcagttaaagctcatgctccaaaaatggttaatcttgaaattgccaaagactttattggactggtaatagggccaggaggtaaaaatattcaagaacttcaaaaggatactgaaactacaattgtaataaatgagaaagatgaaattggtgttattgaaattttaggggttgatcaagaaaagattaactatgctattgacagaattaaaaatctagtttttgagcctgtaatcgatgaagtttataatgtcaaagtaatcaagattcttgattttggggcagtagttgaatttgtgcctggcaaagaggctcttctacatgtatctgaaattgcatgggagagagttaataatgttacggattatttaaatattggcgataaaattgaaattaaatatctgggaattgaccctagaacaaaaaaatctaaaatttcaagaaaagttttacttgaaaaaaaatcttaa

SEQ ID NO: 256927 - DNA, 319 bp, Unknown
  Bacterial polypeptide expressing nucleotide sequence isolated from the Sargasso Sea
atgtttaaagtttataagaaggaaattgaagtagcaggtaagaaaataagtttagaaacgggtaaagtagcaagacaagcagatggagcaattgtagcaacatgtggagagacagttgttttagcaacagcagtgggagcaaaaaaagtaaatccagatatggattattttccattatctgtaaattaccaagaaaagtattatgcagcgggaaaaattccaggcgggtattttaaaagagaggcaaggccaactgaaagtgaaacgttaatttcaagattaattgacagacctattagaccattattcccagaatgaa

SEQ ID NO: 256928 - DNA, 746 bp, Unknown
  Bacterial polypeptide expressing nucleotide sequence isolated from the Sargasso Sea
catgagtgtagtaaaaaaagaatttcaatttggcaatcaaaaagtcacccttgagacaggtagaattgcaaggcaagcagatggagcagtaatggtctacatgggagacactgttgttttagttagttgtgttgcaaaaaaagaagctaaagaggatcagaatttttttcctttaacagttgattatcaagaaaaaacgtattctgctggtaaaataccaggaggtttttttaagcgtgaagggagaccatcagaaaaagaaaccttaacttcgcggctaattgacagacctatacgtccactttttccaaaagaatttaagaatgaagttcaaattatagcttcagtaatgtcgcttgatcctgctgtagatcctgacatagctgcgataattggggcatcagcatcattatctttaaccggcgcaccttttaatgggccaataggagctgctagagttgggtataaaaatggagagtatatattgaatccatcttttcaagatttggaagaatctgatttagatttagttgttgcaggcactaaatcatctgttttgatggttgaatctgaagcaaaacagttatctgaggatattatgctaggtgctgttatgtatgggcatcaagaattacaagtagtaatagatagtattgagagctttgttaaagatgcaaatgtaaaatcatggaattggtcagcaccagaaaaagatagttctctagaaaaagaaatacagaaacaat

SEQ ID NO: 256929 - DNA, 1106 bp, Unknown
  Bacterial polypeptide expressing nucleotide sequence isolated from the Sargasso Sea
tatgaataaatatgtgaaaaaagagatccaatttggatcaaaaactctcgttatagaaaccgggaagattgctagacaagctacttcagtagtggctaccatgggtggaactgtagttctatgttcaatcgttacaaaaaaagcagctgaaaaaagggatttttttcctttgagtgttcattatcttgaaaagacttatgctgcaggaaaaatacctggaggctatttcaaaagagaagctagaccaactgaatatgaaactctaacttctagattgattgatagacctttaagacctttatttccagatttttatagtgatgaagtgcaagtcaattgtttacttctgtcattagataagtcgaatccttccgatatagtagcaatgcttgcagcttctgcggcaatgtctattgctgatgttccattcaatgggccaattggtggagcaagagttggattaattaatgatgaatatgttctaaaccctgcaatagatgagatggatgattcagatcttgatatggttgtagcaggttctgaaaaagcagtattaatggttgaatcagatgcaaatgagttatctgaggacttaatgataggaggtatactttttgctcatcaagaaatgcaaagcgtcattaaaggaataaaagacttttccaatgaagtacttcctgagagaactaaatatgagaatgaaaatcttgagtctgaaaaaaaagttttcgatgaaattaaaaataaatttggagatgaaattaaagatgcatttagcacaacagacaaaaaagctagaggtgagaaaatatcttcagtcagagagaaattactagatggtgttgatgaggaaaatagcgcagagcacttaaaacaatttaaagaagtagaaaaagatatagtgagaaataatgtccttctagataaagcgagaatcgatggaagggccatgaatgaagttagagatatcaatattgaattaaattttttaccttctgtgcatggttcagctttatttacaaggggtgaaacacaagccatagttacaactactttaggagctactaaagaagtacaaatagtggatgctctagttggggaatata

SEQ ID NO: 256930 - DNA, 382 bp, Unknown
  Bacterial polypeptide expressing nucleotide sequence isolated from the Sargasso Sea
atgaaaaaatctatttcaagagaaatgaattggggaaaccaagtattaaaaatagaaactggaaaggtagcaaaacaagcaacagcttcaactatagttagttacggagatacagttgttatggcaaatgtcgtagcagctaaaaccgctaagcccgatgttgatttttttccacttaccgttagttaccaagaaaaattttatgctgcaggaaaaattccaggaggcttttttaaacgtgaaggaagacctactgaatttgaaaccctcacttcaagactaattgataggcccataaggccattatttcctgagggtttcaagaacgaaactcaagttattttaactgtattatctcaccgatacagagacaaatcctgac

SEQ ID NO: 256931 - DNA, 337 bp, Unknown
  Bacterial polypeptide expressing nucleotide sequence isolated from the Sargasso Sea
aatgtttaaagtacacaagaaggaaatagaagtagcaggaaagaaaataagtttagaaacaggtaaagtagcaagacaagcagacggagcaatcatcgcaacatgtggtgaaacagttattctagcaacagtcgttggagcaaagaaagtaaatccagatatggattatttccctttatcagtcaactaccaagaaaaatattatgcaggtggaaaaatccctggtggatattttaaaagagaagcaagaccaactgaaagtgaaacattaatctctagattaattgatagaccaatcagacctttgtttcctgatgaattaaaaatgaagtacagt

SEQ ID NO: 256932 - DNA, 1429 bp, Unknown
  Bacterial polypeptide expressing nucleotide sequence isolated from the Sargasso Sea
tatgtccgtaacaaatgttacatgtaaaattggcgaaaaagaaattaaatttgaaactggtaaattagctttacaagctcccggtgctgttgtagtaacttctggagaaacaaatgtattagttacaactgttgcaaatgaaactgtaagagagggaatagattttttcccactaacagtagacgtagaagagagaatgtattcagcggggaaaattcctggtggtttttttaggagagaaggaagacaaactgaaaaagctatcttagcttgcagattaattgacaggccccttagaccttcttttaatgatggttttagatgcgaaacacaaattattgcaacagtattgagtgttgataatgaaaatgaatatgatgtactttcattaaatgctgcatcacttggtttacaacttgctggcgtaccactagattcaccagttggagcagtaagaatgtcattgataaatgacaactgggttgtgcaagcaacaaactcagaaatggaagaatcagtattcgatatggttattgctggtaatttaaatgaaaataatgacgtagatatagtaatggtagaagcgggagcaacagaaactgcttttgataaaatagattctggaagtactacaccaacagaagatattgttgctgatggtattgataaatcaaaagaatatatatctgaattaattaaagcacaagctgaattagtatcacaaaatgaagtaccagaaatagattggcctttgattgaggactatacaccagaattattgtcagaattggaagaatcatataaatctgatatcgaaactattacttccataactgataggaaagagagaagtactaagcaagcagaattagaagaatctgcagttgaaaaatatttaaacgaagaagaagataactcaaaagcaatcaagttagcttttaaatctattgttaaaaatgttgtaagggatagagttatctctggtggtgcaagattagatggcagaacaccaactgatattagaaatatttctgctgaaattgatttattaccaacagttcatggttcatctttgtttttaagaggagaaacgcaagttttaaatgtaacaactttaggtatgggacgtttagaacaaatgttagatacgatagatactgtcacttctaaaagatatatgcatcattataactttccaccatattcaacaggtgaagcatatatgatgagaggtccaaagaggagagagattggacatggtgctttagcagaaaaagcattagtccctgtaatacctactaaggtagattttccgtatactatcagagtagtaagtgaagctatatcctctaatggatcaacatcccaagcttctgtatgcgcctcaagcttatctttgatggctgcaggagtacctataagagaacat

SEQ ID NO: 256933 - DNA, 325 bp, Unknown
  Bacterial polypeptide expressing nucleotide sequence isolated from the Sargasso Sea
atgtttaaagttgtaaagaaagaaatagaagtagcagggaaaaagattagtttagaaacaggtaaaatagcaagacaagcagatggcgccatcgtagcacaatgtggagaaacagttgtattagcaactgctgtcggagctaaaaaagttaatccagatatggattactttcctttatcagttaattatcaagaaaaatattacgcagcaggtaaaattccaggtggatattttaagagagaggcaagaccaacagatagcgaaacattaatttcaagattgattgatagacctatcagaccattatttcccagaggaatttaaa

SEQ ID NO: 256934 - DNA, 1168 bp, Unknown
  Bacterial polypeptide expressing nucleotide sequence isolated from the Sargasso Sea
aaagaaacattagtttctcgattaattgataggccagttcgacctttatttcataaagattttaaaaatgagacccaagttacttgtactgtattatcacatgatcaagaaaatgactcagatattgtagcaatggtagcagcaagtgctgcattaactttatctggtttgccatttttaggcccactgggagcaattaagattggttttatagatgatgagtttgttgttaacccgagtaagagtcaattatcaaattctaaactagaattagtattggcagggactaaggaaggcgtactaatgatcgagtctgaagctcacgagctttcagaaaaacaaatgctagatgcagtagttcttggtcaagaaaattataaaacagtgattgaagcaataatttccttagctaaaaaagcggcaaaagaaccttgggaacttaaagaaaaagatgaagaaattaaaaatctaccaactaagatcaacgaagactttggtaaagattttatagatgcttataaaataactgaaaaacaaaaaagatcagaaaaattatcttcgttacgaaatgaaatttctgaaaaatttgtaagtgaaacactctcaccagtattggtttcagatgcaataaaaaatgtagaaaaagatatagttagaggagaattaattaatactggtaatagaattgatggaagagatacaaaaacagtccgtccaattgtgtgtgaaactggagttttagaaagaactcacgggtctgcattatttacaagaggagaaacacaagctcttgtagtttcaactttgggaactggacaagacgagcaaagaatagatgcaattgatggtgaatatacagagaattttatgcttcattacaattttccaccttattctgttggagaagttggaagaataggttctaccagtagaagagaaataggacatggaaaattagcctggagagctattcacccaatgttaccttcaaaagaaaagtttccatacacttatagagttgtatctgaaattacagaatctaatggatctagctctatggcaactgtttgtggtacctcaatgtctttaatggatgcaggagtgcctttagaaagaccagtagcaggtatcgcgatgggcttaattaaagataatgataaatatgtga

SEQ ID NO: 256935 - DNA, 1342 bp, Unknown
  Bacterial polypeptide expressing nucleotide sequence isolated from the Sargasso Sea
aaaaattgagaaagaacttaccaaagatttagagaaagcattttcagagaaagataaaaagaagagatctacactaattagtttggcaggagataagtgtaaggctttatttgatagtgacgaaaatcttttagagcatgaaattatgttacaacttaaaaatttagaaaaaaatattgttagaggtaaaattttaaaaagtaaaaaaagaattgatggaagaggtttatcagatgtaagaccgataaaatgtgaagttggaattttaccgagagttcatggttcagctttgtttactagaggagaaacccaagctttagtaacgacaactttaggaacttcagatgacgaacaaagaattgaaagtctcgaaggtttaaaaagatcaagatttatgttgcattataattttccaccattctctgtaggggaaacaggcagaattggtacaggcagaagagaagttggacatggaaaattagcttggagggctttaaattcatcactccctaaaaaagaaaattttccttacacacttagaattgtatccgagattaccgaatccaatggatcttcctcaatggcaacagtatgtggatcctctttagcattaatggatgcggctgttcctattgcagaacctgttgcaggaatagcgatgggactaatcaaagaaaaagataaattttctattttatcagatattttaggagacgaagaccatttgggtgatatggattttaaagttgcaggaactaaagatggaattacctcgctgcagatggatataaaaattacaggaattacttttgagataatggaacaggctctcgctcaggcaaaagaaggaagaattcatattttaaatgaaatgaataaaacacttaaatcctctagaaaagaagttggaaaacacactccaaaaatggaaacaataaaagtggacaaaaaagatatagctactgtaatcggtaagggcggcgctaccataagagaaattgtagaaaagtctggagcaaaggtagatgttaaggatacgggcgaagttacagttgctgcagcaaacgaggaaacaagaaaaatagcagttcaaatgattaatgatcttgttgcaaaacctgagatgggtaaaacatataagggcaaagtagttaagattatggagtttggtgcttttgtaaattttttaggtaagcaagatggacttgtccatatatctcaattagcttcaaaaagagttcaaaaagttaccgatgttgttaaagaaggagatgaggtttcagttaaggtaattggatttgatagaggaaaagtcaagctttctataaaagaagctgtttaa

SEQ ID NO: 256936 - DNA, 766 bp, Unknown
  Bacterial polypeptide expressing nucleotide sequence isolated from the Sargasso Sea
aatgtttaaaatttttaaaaaagtagttgaaattggtggaaaaaaattaagcttagaaactggaaaaattgcgagacaagctgatggagctataatagcaacttgtggtgaaacagtggtattagcaactgtggttggagcaaaaaaagtaaatcctgatatagactattttcctttgtcagttaattatcaagaaaaatattatgctgcaggaaaaattcccggtggatattttaaaagagaagcaagacccacagaaagcgaaacacttatttcaagattaattgatagacctatcagacctttgtttccagacgaatttagaaatgaagttcaattactgcctacggttatttcttatgataaagaaaatgaagctgatattttatctattattgcatcttcagctgcattagcaatatcgggaatgccatttatggaaccagtaggagcatcaagagtaggctttataggtggaaaatatgttttaaatcctacgaaaaaagaattagaaaattcaaaacttgatttagttgtagcaggaacaaaagatgctgttttgatggttgagtctgaagcaaaaggtttaaccgaacagcaaatgttggatgcagtaaaattcggtcatgaaggatttgttccagttgtaaaaatgatcgaggagcttgcaaaagagtgtaagaaacctgattgggtaatcgaaaagaaagatttatcagctgtcaaggaaaaattagaaaaggaatttactaaagacctaaaaaaa

SEQ ID NO: 256937 - DNA, 767 bp, Unknown
  Bacterial polypeptide expressing nucleotide sequence isolated from the Sargasso Sea
tggtagaggcttatcagatgtgagaccaatttcttgtgaagttggtgttttaccgagagctcatggttctgcattgtttactagaggagaaacacaagcaattgttgttgcaactttaggaacatctgatgatgaacaaagaattgagagcttagatggattgcaaagagaacgatttatgcttcactataactttccacctttttcagttggagaaactggaagaattggaacaggtagaagagaaattggtcatggtaaattagcttggagagcaattaactcttcattacctacaaaagaagcatttccttacacttttagagtagtttcagagattactgagtctaatggctcttcttcaatggctactgtttgtggaacttctttagcattaatggatgctggagtaccgattaaagagccagttgcaggtattgcaatgggtttgattaaagaaggtgatgattttagtgtcttatcagacattttaggtgatgaagatcacttaggtgatatggactttaaagttgccggaactaaagatggaattacttctcttcaaatggatattaaaattacaggtattacatttgaaattatggagcaggcattaagccaagctaaagatggaagagttcatatcttaggagaaatgaataaagcattatcagcttcaagatctgatgttggaaagcacactccaaaaatggaacaagtaaatgtagataaaaaggacattgctgctgttattggaaaaggtggtg

SEQ ID NO: 256938 - DNA, 838 bp, Unknown
  Bacterial polypeptide expressing nucleotide sequence isolated from the Sargasso Sea
aacattaatttctagattaatcgatagaccaatcagacctttgtttccagatgaatttaaaaatgaagtacagttgttaccaactgtaatctcttatgataaagaaaacgaggcagatattttatcaattacagcttcttctgcagcattagctatatctggaatgccattcatgggtcctgtaggagcttctagagttggttttattaatggtaaatacgttttaaatccttctaaaactgaattagaaaactcaagtttagatttggtagtagcaggtactaaagatgctgttcttatggttgagtcagaagcaaatggcttgaccgaggaagaaatgcttaacgcggttaaatttggtcatgaaggttttgttccagttatcgaaatgatagaagaaattgcaaaagagtgcagaaaacctgaatggacttttgaaaaaaaagatctatctgaagttaagaaaaaacttgaagaaacttttacagaagatcttaaaaaagcttttggaactagagacaagcaagatagatcaaatcaaatttcagaaattactgataaagctaaaaagctttatgaagaaaatgaaaattatactgatctagatgttaacactgagctcaaaaatttagaaaagaatattgttagaacagatattttaaaaaataagaatagaattgatggtcgaggcttatctgatgtaagaccaatctcatgtgaagttggttttttaccacgaacacatggttctgcattatttactagaggagaaacacaagcaatagtgacagctactttaggtacatccgatgacgaacagagaatagaaagtttggat

SEQ ID NO: 256939 - DNA, 959 bp, Unknown
  Bacterial polypeptide expressing nucleotide sequence isolated from the Sargasso Sea
aatccttcaaaaaaagagttagaaaattctaaattagatctagttgtagcaggcactaaggacgcagttttaatggttgagtcagaggcaaatggattaacagaggaagaaatgttgaaagcagtaaagtttggtcatgaaaactttgttccaataattaatatgatagaagaacttgctagtgaatgtaaaaaacctgattgggtagttgaaaaaaaagatctttcagaagtaaagaaaaaaattgaaaacgaatttacagatgaattaaaaaaagctttttccatcaaagataaaaagacaaggtcaaacctaatttcagaaatcacagataaagcaaaaaaattatttgaagaagatgaaaattttacagatctagatgtaaactctgaacttaaaaatttagaaaaaagaatcgtaaggactgatattctaaaaaataaaaaacggattgatggaagaggactttcggatgtaagacaaataatgtgtgaagtaggcgtacttcctagaacacatggatctgctttatttacaaggggtgaaacccaagcgattgtcactacaacacttggaacatcagatgatgagcaaagaatagagagtcttgagggattacaaagagaaagatttatgcttcattataattttccacctttctcagttggtgaaactggcaggattgggacaggaagaagagagattggacacggaaagctcgcgtggagagctattaaatcatctttaccatcaaaagagagctttccttatacatttagaatagtttcagagattactgagtctaacgggtcttcatcaatggcaactgtttgtggaacttctttagccttaatggacgcaggtgttccaataaaagaaccagttgctggaattgctatgggattaataaaggagggtgacgactttagtgtgctatctgacatattaggtgatgaaga

SEQ ID NO: 256940 - DNA, 859 bp, Unknown
  Bacterial polypeptide expressing nucleotide sequence isolated from the Sargasso Sea
aatgtatcctgaagttaaaaatcatattaaaaacatgttcaaaaacacagttagaaaaactgttttagataaaaaagttagagttgatggaagaggattggaagatattagagatatcagtgttgtagaatctatccttccaagagtacatggatctgcattgtttactcgtggggaaactcagtctattgctgctttaaccctagggtctagtagagatgagcaaattattgattcaatggctagtgattacaaaaaatcattcttattgcattataactttcctccatattgtgtaggagaagttggaagaattggttttactaatagacgtgaaattggtcatggtcatttagctgaaagatcgctaaaacctatattgccatcttcagatgaatttccatatacagttcgtattgtatctgaaattaccgaatcaaacggttcttcctcgatggcatctgtttgtggcggttcattagcaatgatgaatgctggtgttcctataaaagaacatgtggcaggtattgctatgggtttaatcatggaagatgatgataattacgcagttttaagtgacatcttaggtactgaagactttcttggagacatggatttcaaggtagctggtacaaaagatggaattagtgcaattcaacttgatttaaaagttcctggtctttccatggatgttttatcaaatgcacttgaacaagcaaataaaggtagattgcatattttaggtgaaatgaataaagcaattgataaaccaaatgcactgtctccatatgcaccccaaattgaatctttcaaaatggacaaagataaaattggagcattgataggcccccggaggtaa

SEQ ID NO: 256941 - DNA, 973 bp, Unknown
  Bacterial polypeptide expressing nucleotide sequence isolated from the Sargasso Sea
gagactcaggcattagtagtacagcatttagggactgagaaagatgcacaaatgatagattcgcttgatggcagaattgatgatacatttatttttcattacaatttcccaccatattctgttggagaaattggaagaactggttcgcccaaacgtcgtgaaattggtcatggtaagttagctagaagaggaatacaatctgttgtcccaactgttgatgaatttccatatacaattagagttgtttctgaaatactcgaatcaaatggctctagttcgatggcatcagtttgtggatcgagtctatctatgatggatgccggcgttcctattaaaagacctgttgcgggtatagctatggggcttgttaaagaaggagataagcatgtcgtgctaactgatatactaggtgatgaagatcatctaggagatatggattttaaagttgctggaacatcagtaggaattaatgcactacaaatggatattaaagtagatggtataacatcagagattatgtctaaagctctagcacaagcacgtgatgcgagattacatatattatcggagatgggaaaagtcatctcagaagccaggaaagaaccgtcgccgtttgcacctcgttatacacatgtaaaaattgatcagtctaagattgctgcagtcataggcaaaggaggagcaacaattaaatctattattgagaaaactggagcgcaaattgatatagatgataacggtcttatcaaaattgcatcaaacgatcaatccattggtgataaggcaaaagagatgatagaagaaatcaccgtgggcccacaagtagataagatttatgaaggtaaagttgttaaaattatggattttggtgcatttgtaagtattacacctagtcaagatggtttagtgcatatctctcagataagcgaagagagagtaaacaatgtaagtgatgtattgactgagggcgatg

SEQ ID NO: 256942 - DNA, 790 bp, Unknown
  Bacterial polypeptide expressing nucleotide sequence isolated from the Sargasso Sea
tgcagaaaacctgagtggactgttgagaaaaaagatttatctgaagttaaacaaaaacttgaggaaacctttactgaagatttaacaaaagcttttgcaacaagagataagcaagatagatcaaatcaaatttcagaaatcacagataaagctaaaaagctttttgaagaaaatgaaaattattctgatcttgatgttaactcagagcttaaaaacttagagaagaaaattgtaagaactgacattcttaaaaacaaaaacagaattgacggtagaggattatctgatgtgagacctattgaatgtgaagttggtgttttgccaagaactcacggttctgctttgtttactagaggagaaacacaagcgattgtcgttgctactttaggtacatctgatgatgagcaaagaattgaaagtttagacggtcttcaaagagaacgatttatgcttcactataatttccctcctttttcagtgggtgaaactggaagaattggaactggaagacgtgaaattggtcatggtaaattagcgtggagagcaattaactcttcactaccttcaaaagaggcgtttccatacacttttagaatagtatcggagattacagaatcaaatggttcatcttcaatggctactgtttgtggaacatctcttgcattaatggatgctggtgttccaattaaagagccagttgcaggtattgcaatgggattaattaaagaaggtgatgattttagtgtcttatcagacattttaggtgatgaggatcatttaggagatatgg

SEQ ID NO: 256943 - DNA, 926 bp, Unknown
  Bacterial polypeptide expressing nucleotide sequence isolated from the Sargasso Sea
gacaaagacgcagttcttatggttgagtctgaaacaaaaggattatcagaaaaagtaatgttagaagctgttaaatttggacacgagaattttattccagtaattaaagcaatagaaagtttagctaaaaaggcaggcaaacctaaatgggaagtcaaagatgaagatcactcagatataaaatcaaaaattagtaaagtcttagagtcagacttaagaaaagcatttaaagaaacagataaaaagaaaagatcaacagcaatatcggaagcagaaaaaaaatgtaaagaaatgtttgctgaagatgaaaacattagtgaaaatcaagctatggctcagctaaaatctctggaaaaagatatagtcagaacagcaattattaaagataaaaaaagaattgatggaagaggattagctgatgtgaggcaaattaaatgtgaagttggcgttttacctcgtacacatggttctgctctatttactagaggtgaaacccaagccttagtagtcacgactttaggaatgtctgatgatgaacaaagactagagagccttgatggtatgcaaagatcaagttttatgcttcattataattttcctcctttctcagttggcgaatgtggaagaataggaactggaagaagagaaataggccatggaaagttagcatggagggcaatttactcttcactgccaaaaaaagaaaattttccttatacattaagagttgtttcagaaataaccgagtccaatggttcatcatcaatggcaactgtttgcggcacttccctttccttgatggatgccggagtacctattaaggaaccagttgctggaatagctatgggcttaattaaagaaagtgaagatttttcagttctttcagacattctaggtgatgaggatcatctaggcgatatggattt

SEQ ID NO: 256944 - DNA, 985 bp, Unknown
  Bacterial polypeptide expressing nucleotide sequence isolated from the Sargasso Sea
atgtttaaaatatataagaaggaagttgaagtagcaggaaaaaagataagtttagaaactggaaaagtggcaagacaggcagatggagcaataatcgcaacacaaggtgaaacagttgttttagcaacagtagtaggagcaaagaaaataaatcctgaagtggattattttccactttctgtaaattaccaagaaaaatattatgcagctggaaaaattccaggtggttattttaaaagagaagcaagaccaactgaaagtgaaacattaatttcaagattaattgatagacctatcagaccattatttccagatgaatttaaaaatgaagtgcagttattaccaactgtaatttcgtatgataaagaaaacgaagcagatattctgtcaatcattgcctcctcagctgcgctagcaatatctggaatgccattcaagggtcctgttggggcatctagagttggttatattgatggtaaatatgttttaaatccatctaaagttgaattggaaaaatctaaattagatttagttgtagcaggaacaaaagatgcggtgcttatggtcgaatctgaagctaaaggattaactgaagaggaaatgctgaatgcagttaaatttggtcatgaaggatttgttccagtaattgaaatgatagaagaacttgcaaaagaatgcaaaaaacctgaatggaaagttgaaaaaaaagatttatcagaagttaagaaaaaattagaagtaacatttactaaagatttaaaaaaagcttttgctacaagagataagcaagatagatcaaatcaaatttcagaaattactgataaagcaaaaaaactttatgaggaagatgaaaattatactgatctagacgtgaattctgaacttaaaaatttagaaaaatcaattgtgaggacagatattcttaaaaacaaaaatagaattgatggtagaggcctatcagatgtgagacctattttgtgtgagg

SEQ ID NO: 256945 - DNA, 914 bp, Unknown
  Bacterial polypeptide expressing nucleotide sequence isolated from the Sargasso Sea
agttgaagaagtagattactctgaaatcaaaaaaaaaattaaagaaaaatttgaaagtggattaagaggcgcttttaaagaaacagacaagaaaaaaagatctacagccatttcagaaatagagaaccaatgtaaagaaatgttcgttgaagatgaaaccattacagagaaccaagttatgaaccagttaaaatctttagaaaaagatatagtgagaactgcaattctaaaagaaaaaaagagaattgacggaagaggtttgtcagatgtaagacaaataaagtgtgaggtaggtgttttaccgagaacccacgggtctgctctttttactagaggagaaacgcaggctcttgtagtcacaactcttggaatgactgatgatgaacaaaggttagaaagccttgaaggtatgcaaaggtcaaattttatgttgcactataattttccaccgttttccgtaggggaatgtggaaggattggtactggaagaagagaaattggacatgggaagctagcttggagagcaataaactcatctttaccaaaaaaagaaaattttccatacacacttagagtggtttcagaaataacagagtcaaacggatcctcctctatggcgacagtttgcggtacttcattatcattaatggatgctggtgttccaataaaagaaccagttgccggaattgcaatgggattaatcaaagagggagaagatttttctgtactctcagatattttgggagatgaagatcatttaggcgatatggattttaaagttgcaggaacaaaaaacggtattacgtcacttcaaatggatataaaaattacaggtattacgtttgaaatcatggaaaaagctttagatcaagctaaaggtggaagagaacgtattttagatgaaatgaataaag

SEQ ID NO: 256946 - DNA, 625 bp, Unknown
  Bacterial polypeptide expressing nucleotide sequence isolated from the Sargasso Sea
aatgttcaaagaatttaaaaaagaaataaagttaaatggaaaaaaaatcaagttggaaacaggaaaaattgcacgacaagctgatggagcagttgtcgcaacttgtggtgaaacagttgtattggcaacagttgttggagcaaaaaaagtaaatccggaagttgactactttccattatctgtaaattatcaggaaaaatattatgcagcaggaaaaattccaggtggttattttaagagagaagcaagaccaaccgaaagtgagacattaatttctagactaatagatagacccataagacctttattcccagatgaatttaaaaacgaagtacagctactaccaaccgttatttcttatgataaagaaaatgaagcagacatattatcaattatagcttcttcagcagctctagcgatttctggaatgccatttcttggacctgttggcgcttcaagagttggatttatagatggtaaatacgtcttaaatccatcgaaagtagatttagaaaaatcaaagttagatcttgtagttgcaggaacaaaggatgctgtgctgatggttgagtctgaggcaaaaggattatctgaagaagaaatgttaaatgcggttaaattcggt

SEQ ID NO: 256947 - DNA, 832 bp, Unknown
  Bacterial polypeptide expressing nucleotide sequence isolated from the Sargasso Sea
gatggggcttattcttgaaggcgatgattatgtaatactttcagatattcttggtgatgaagatgctctgggcgatatggactttaaagttgctggaactaaaaacggtataactgcattacaaatggacattaaaattgaaggcataaatcgtgatattgttgctaaggctattaatcaagcgaataagggtaggttgcatattcttaatgaaatggcaaaaactcttgataaatcacgcgatgaaataaatagtaatgctccaacaattaaaactatcaagatcagtaaaaataaaattggtgaattaattggacctggtggtaagaatattaaggcgatttgtgaaaagacaggagctaaaattgatattgctgaagatggcacagttaatatagcagcaactgatggtgatatgcttaaagaagcgttagcaatggtagagcttacatcatttgagcctgagctaaatcaaatatatgaaggcaaagtagtaaaattgcttgattttggtgcttttgttaattttagggggcgtgatggtttggttcatatcagcgagattgcaagcgagcgtgttgaaaacatcaatgatgttctaaaaattgatgatttagtaaaagtaaaattcattggtattgacaataagggccgtgtaaaacttagtattaagcaagttttaataggcgatagtgatgaatctgctagtgcttcgaaagctaaaattgctgctgatgacaagcctaaacagagcaagaaaaaaaaagagtctcaacaacagtctaaagactcatctaaaagtaaagtagagcgtaaaaaatacgtactatag

SEQ ID NO: 256948 - DNA, 817 bp, Unknown
  Bacterial polypeptide expressing nucleotide sequence isolated from the Sargasso Sea
aatgaactggggcgaccagaaactaaaaatagaaacaggaaaagtagcaaaacaggcaacggcatcaacaattgttagctatggtgatacagttgttatggcaaatgtcgtagcagctaaagagccaaaaccagatttagatttttttccacttacagtaagttatcaggaaaaattttatgctgctggtaaaattccaggtggtttttttaaaagagagggaagaccaacagagtttgaaactcttacctcaagattaattgatcgtccaatcaggcctctctttccagaaggctttaaaaatgaaactcaagttatattaactgtactttcgcatgatggagaaaccaaccctgacattgttgccatgatagcggcctcaagtgcattaacattgtcaggagttccttttatgggtccaattggtggatgtagagtgggttatgatggatcaaattatacacttaatccaaaaataaacgatgatggagatcttgatcttgtcgttgcgggtactagcgacgctgtactaatggttgaatctgaagcgaagcagctttcagaggaaataatgttaggagcagtaaagtttggtcatgagtcaatgcaagaagttataaaaatcataatcaatcttgctgaggaatgcgcaaatgatccttgggagttcagtcatacaattaatgagtcattgttagatgaaattaaaaaaacttgtgaagataaaattgcgaagagttactcaattgttgataagatggaaagacaaagttcgctttctgaaattaagtcaagtttagaggatcaatataaagaa

SEQ ID NO: 256949 - DNA, 757 bp, Unknown
  Bacterial polypeptide expressing nucleotide sequence isolated from the Sargasso Sea
atgtctcaattaaaatctttggaaaaagatatagtaagaacggcaattttaaaagataaaaaaagaatagatggaagaagtttggctgacgtaagacaaatcaaatgtgaagttggagttttacctagaacacatggatcagccctttttaccagaggagaaactcaagctcttgtagtaacaactcttgggatgacagatgatgaacaaagacttgaaagtttagatggaatgcaaagatcaaatttcatgttgcattataacttccctcctttttctgttggggaatgcggaagaataggaactggcagaagggaaataggtcatggtaaacttgcatggagagcaataaactcatccttgcctaataaagaaaattttccatacacattaagagtcgtatctgaaataacagagtcaaacggttcttcttcaatggcaacagtttgcggaacttcattatctttaatggacgcaggtgtgccaataaaagagccagtagctggtattgcaatgggattaataaaagagggtaatgaattttcagtactatctgatattttaggtgacgaagatcatttaggtgatatggattttaaggtagctggtacaaaaaatggaattacatcacttcaaatggatatcaaaataacaggtattacattcgagattatggaaaaagctttagatcaagcaaaaagtggaagagagcatattttaggtgagatgaataaagccatcaagacttcgagaaaag

SEQ ID NO: 256950 - DNA, 908 bp, Unknown
  Bacterial polypeptide expressing nucleotide sequence isolated from the Sargasso Sea
gaagaagctcgtcaagctgacggagcaataattgctacttggggagaaacagtggtaattgcaacggttgttggtgctaaaaaagtaaatccagaaacagattattttccactatctgtaaactatcaagaaaaatattatgctgctggaaaaattccgggtggttattttaaaagagaagcaagacctactgaggctgaaaccttaatatcaagattgatagatagaccaatcagacctttgtttcctgaaggttttagaaatgaagttcaagtcttgcccacagtactttcatatgacaatgaaaatgaggctgacatattatcaataatcgcctcttccgctgccttatcgatttcaggattaccctttaaagggccggttggagcatcaagagttggatttatagatggcaagtgtattttaaatccaaccaaaaaagagctggagaattcaaaattagatttagttgttgctggaactaaagatgctgttttaatggttgagtcagaagcttccggtttaacagaaaaagaaatgttagatgcagttaaatttggtcatgaaggttttgcctcggtaattaaaggaatagaaaaattagcaaaaaaatgttcaaaagaggaatggacatttgaaaaaaaggattacagcaaagtttctaaaaaaataaacaaagaacttactaaagatttagaaaaagctttctcagaaaaaaataaaaagaaaagatctgaattaattagtttagctggagaaaaatgcaaagacttattcaaagatgatgaagaccttctagaacacgaagtaatgttacagcttaaaaatctagaaaaagatattgttagaaccagaattttaaaaagtaaaaagagaattgacggaagaagtttggcagatgtaaggcc

SEQ ID NO: 256951 - DNA, 954 bp, Unknown
  Bacterial polypeptide expressing nucleotide sequence isolated from the Sargasso Sea
aaagttaccccagaagtagattactttccgttatctgtaaattatcaagaaaaatattatgcggctgggaaaattccaggtggatatttcaaaagagaggcaaggcctacagaaagtgaaactttaatttcaagattaatagacaggccaataagaccacttttcccaaatgaatttaaaaatgaagtacaattacttccaactgtaatttcctatgataaagaaaatgaagcagatatattatcaattattgcttcatcggcagcattatctatatcaggaatgccttttatgggaccagttggagcttcaagagtaggatttgttgatggtaaatatgttcttaatccatcaaaaaaagaactagaaaaatcaaagttagatttagtagttgcaggaacaaaagatgcagttcttatggttgaatctgaggcgaaaggattaactgaagaggaaatgcttaatgcagttaagtttggtcatgaaaattttataccaataataaaaatgatcgaagaattagccaaagaatgtaaaaaacctgattgggttattgagaaaaaagatctttcagaggtaaagaaaaaattatcagatgaatttacagatgatctgaagaaagcattttctactagagacaaacaagaaagatcaaatatgatttctgagattacagataaggcaaaaaaactttatgaggaaaatgaaaccattacggatttagatgtaaattctgagctaaaaaatttagaaaagatcatagttagaacagatattttaaaaaataaaaatagaattgatggtagaggactatcagatgtaaggcctataatgtgtgaggttgggattttgccaagagtgcatggttctgcattatttacgcgaggagaaacacaggcaattgtcacaactactttaggaacctcagacgatgagcaaaggatcgagagttag

SEQ ID NO: 256952 - DNA, 1006 bp, Unknown
  Bacterial polypeptide expressing nucleotide sequence isolated from the Sargasso Sea
aggcatagatttttttcctcttactgtaaattatcaagaaaaaagttatgctgctggaaagataccaggaggttttttcaggcgagaaggaaggccgggagaaaaagaaaccttaacatcaaggttgattgatagaccaattagacctctctttcattcaaaattcaaaaatgaaactcaagttatttgtacagtattatctcatgatttagaaaataatcctgatataccatctttagttggagcatctgcagcacttacaatttctggtatgccctttcttggaccattaggagctgcaagggttggttatattgataaaaaatatgtactaaacccttctgcagatgaaatgattaattctgatttagatttggtagttgcaggtactaaggacgcagttttaatggttgaatctgaagcaaaagaattatcagaggaagtaatgcttggcgctgtaatgtttggtcatgaaaaaatgcaagattctattaaagcgattatagatttagctgagcattcagcaaaagaaccctgggatattccagagacggatgaaaatttatcactttacaaagatattcaaaatcttattaattctgatcttgaacaagcctataaagaaacttctaaacaacaacgatcagaaaaactctcagaaattaaaagcagagctcaagaagagtatctaaatgatgaatcaattagtgctgaggttattggtgatatagttaagtctttagaaaaagatatcgtaagaactaaagtcttaaaaacaggtaagagaatagatggtagaggtttaagtgatgttaggccaattatatctgaaacagatattatacctagagtgcatggttctgctgtatttacaaggggagaaactcaatcactttcagtcacaactttaggaacctcccaagatgaacaaatttttgatgctcttgaaggcgaatatagagagagatttatgcttcattataatttcctccttatcaacagggaa

SEQ ID NO: 256953 - DNA, 981 bp, Unknown
  Bacterial polypeptide expressing nucleotide sequence isolated from the Sargasso Sea
tatgcagcaggaaaaattcctgggtggttattttaaaagagaagcaagaccaactgaaagtgaaacattaatatcaagattaattgataggccaataagaccattgtttccagatgaatttaaaaatgaagtacaattgcttccaaccgtaatatcctacgataaagaaaatgaagcggacatattatcaattatagcctcttcggctgccctagcaatatcaggtatgccatttatgggaccagttggagcttctagagttggttatgttgatggcaaatatgtgcttaatccttcaaaaaaagaattagaaaattccaaactagatcttgtcgtagctggtacaaaagatgcagttttaatggttgaatctgaagcaaatggcttaaccgaagaagaaatgctaaatgcagtaaaatttggtcatgataattttattccaataattaatatgatcgaagaacttgctaaagaatgtaggaagccagactgggttattgaaaaaaaagatctttcggaagttaagaaaaaattagagaatgaatttactgacgaattaaaaaaggcattttcgattaaagacaaacaagaaagatcaaatcttatttctgaaataacagataaagcaaaaaaattatttgaagagaatgaaaattttacagatttagatgttaactctgagctaaaaaacttagaaaaagctatagttagaacagatatcttaaaaaataaaaatagaattgatggacgagggctttcagatgtaagaccaattatgtgtgaagttggaattttgccaagaacacatggttctgctttgtttacaagaggtgaaacacaagcaatcgttacaacaacactaggaacttcagacgatgaacagagaattgaaagtttagaaggtcttcaaagagaaagatttatgcttcattataattttcctccattctcagttggagaaactggaagaattggtactgg

SEQ ID NO: 256954 - DNA, 931 bp, Unknown
  Bacterial polypeptide expressing nucleotide sequence isolated from the Sargasso Sea
ttcaattttaaagacaaatacccggattgatgggagagacttaaacactgtacgtgatattgatgtgagagttgatcttcttgataatgtacatggctgtgcgttatttactcgaggagagacccaagctttagtaactactacattaggcacaagtagtgatgagcaaatgttggatactctggatggtgataaaaaagaaaagtttttgctacattataatttccctccattttccgttaatgaggtaggaagaataggttctactggaaggagagaagttggtcatggtaagttagcgtggagggcaatcaatccaatattaaaaaaagtaaatgattttccatacacacttagagttgtttcagaaataacagaatcaaatggatcatcatcgatggcaactgtttgtggtgcatctttatccttaatggatgcaggtgttccgttggaaaagtctgttgcaggtgtggcaatgggtcttataaaagaaaaagataattttgttgttttaactgatattcttggcgatgaagatcatttaggtgacatggattttaaagttgcaggaacagactctggaattacagctttacaaatggatataaaggttaatggtatcaccgaggaaattatgaaagaagctttagaaaaagcctataatgccagaaaacatattttgttggaaatgcaaaaggttgttaaaaaacctagaaagggaactaagccaaatgctccaacagttttaaatattcaaataaacaaatctaaaataagagaagttataggttctgggggtaaagttattaaggatatttgcgaaaaatcaaatgctaaagttgaaattgatgataatggttttatatcgatatttgcatcaaaggctgatgatggtgaaattgccagacaaatgataaatgatattgtagca

SEQ ID NO: 256955 - DNA, 896 bp, Unknown
  Bacterial polypeptide expressing nucleotide sequence isolated from the Sargasso Sea
tggtagaagagagataggtcatggtaaattagcatggagagcaattcattcttcattaccttcaatagaatcttttccatatacttttagggtagtttcggagattacggagtctaatggctcttcttcaatggctacagtttgtggaacatcacttgcattaatggatgctggagtacctataaaagagccagttgcaggtatcgcaatggggttaattaaagaaggaaatgattttagtgttttatctgacattttgggtgatgaagatcatttaggagatatggactttaaagttgcaggtaccaaagatggaattacttcacttcaaatggatattaaaattactggtatcacttttgaaattatggagcaggcattaaatcaagcaaaagaaggaagaattcatattttaggagaaatgaataaagctttaggaaagtcaagagctgaagttggaaaacatacgccaaaaatggaaaaagttaatgttgacaaaaaagatatagcagctgttattggtaagggtggagcaacaattagagagatagttgaaaaatcaggtgctaaagttgatgtgaacgatgaaggtgtagtgacagtagctgctccagacgaagaggcaagaaatattgctatgcaaatgattaaggacatcacagcaaaggccgaaatgaataaaatttattctggtaaagttatgaagattatggagtttggcgcatttgttaattttttaggaaaacaagatggacttgttcatatctctgagttagcagataaaagagttgctaaagttactgacattgtcaaagaaggtgatgaagtaaaagttaaagtgattggttttgatagaggcaaggttaaactttcgatgaaacaagcctctgaataaa

SEQ ID NO: 256956 - DNA, 795 bp, Unknown
  Bacterial polypeptide expressing nucleotide sequence isolated from the Sargasso Sea
caaagagagcgatttatgcttcactataactttccacctttctcagtcggtgaaactggaagaattggaactggtagacgagaaattggtcatggaaaattagcttggagagcaatgaattcttcattaccctcaaaagagtcgtttccatacacttttagaatagtttcagaaattacagaatccaatggttcttcttcaatggctactgtttgtggaacttctttggcattaatggatgctggtgtaccaattaaagaaccagtagcaggtattgcaatgggtttaattaaagagggtgataattttagcgtcctatcagacattttaggtgatgaagatcatttaggggacatggattttaaagttgctggaaccaaagatggaattacttcacttcaaatggacattaaaattacaggtattacatttgaaattatggagcaggcattaaatcaagctaaagatggaagagttcatatcttgggagaaatgaataaagctttatcagcttcaagagacgatgttggaaaacatactccaaaaatggaacgagtaacggttgataaaaaagatattgctgctgttattggaaaaggtggggcaacaattagagagattgttgaaaaatcaggtgctaaagttgatgtgaatgatgaaggtgtagtaacagttgctgctccagatgaggaggctcgaaacattgctatgcaaatgattaaagatatcactgcaaaagctgaactcaataaaatttactcaggcaaagtcatgaagattatggaatttggtgca

SEQ ID NO: 256957 - DNA, 630 bp, Unknown
  Bacterial polypeptide expressing nucleotide sequence isolated from the Sargasso Sea
ggtgcaaaaaaagtaaatcctgaaacagattattttccgttatctgttaattaccaagagaaatattatgcagcaggtaaaataccaggaggttattttaaaagagaagcaaggcctacagagtctgaaaccttaatttcaagattaattgacagaccaataagaccattatttccagaaagttttagaaatgaagttcaagttctaccaactgtcctatcatatgacaatgaaaatgaagcagatattttatctattattgcatcatccgcagctttatcaatttctggtttaccgtttaaaggtccagtaggagcatcgagagtaggatttattgatggcaaatgtattcttaatccaacaaagaaagaattagaaagttcaaaattagatttagttgtagcagggaccaaagacgctgttttaatggtagagtcagaagcatctggtttaacagaaaaagaaatgttagatgcagtaaaatttggtcacgaaggatttgtttcagtaataaaaggtatagaaaaattatctaaaaagtcttcaaaagaaaagtggaaaattgaggaaaaagattttaataaagtatcaaaaaaaattgaaaaggaacttacgaaggattttagaaaa

SEQ ID NO: 256958 - DNA, 832 bp, Unknown
  Bacterial polypeptide expressing nucleotide sequence isolated from the Sargasso Sea
gtagagcttaaaaattcaaaattagacctagtagtggcaggaactaaagatgcagttcttatggtagagtctgaagcaaatggtttgaccgaagaggaaatgcttaatgcagtgaaatttggtcatgaaggatttgttcctgtgataaaaatgatagaggatttagcaaaagaatgtaaaaaatctgaatggattattgaaaaaaaagatgtttctgaagtaaaaaagaaattagaaactgagtttacatcagatcttaagaaagctttctcgacaatagataaacaagaaagatcaaacatgatctcagagattacagataaagctaaaaaactttatgaggagaatcaggaaattacagatttagatgttaattctgaattaaaaaaattagaaaaaacaattgtaagaactgatattcttaagaacaaaaaacgtatagatggaagaggactgtcagatgtaaggccaattatgtgtgaagttggaattctacctagagttcatggctcggcattatttacaagaggagaaacacaagcaattgtaacaactactcttggaacttcagatgatgaacaaaaaattgaaagtttagacggtttacagaaagaaagattcatgcttcattataattttccacctttttcagtaggggaaactgggagaattggaactggtagaagagaaataggacatggaaagcttgcatggagagcaataaactcatctttgccaccaaaagaaacatttccttatacatttagaatagtttcagaaattactgaatcaaatggttcttcatcaatggcaacagttttggaacatcact

SEQ ID NO: 256959 - DNA, 926 bp, Unknown
  Bacterial polypeptide expressing nucleotide sequence isolated from the Sargasso Sea
gttaaaaaatcttgaaaaatctattgtaagaacagacattctaaaaaacaaaaatagaattgatggtagaggcttatcagatgtaaggcctatcgaatgtgaagttggtgttttaccaaggacacatggttctgcattatttactagaggtgaaactcaagcaattgttgtagcaactttaggaacatctgatgatgagcaaagaattgaaagtttagatggattacaaagagagcgatttatgcttcactataattttcctcctttttcggttggagaaactggaagaattggaacaggtagaagagaaattggtcatggtaaattagcttggagagcaattaactcttcactaccaaccaaagaggcatttccatatacttttagagtagtttcagagattacagagtctaatggttcttcttcaatggctactgtttgtggaacttccttagccttaatggatgctggagtaccaataaagcagccagttgctggtattgcaatgggattaattaaagaaggtgatgatttcagcgttctttcagacatcctaggtgatgaagatcatcttggcgacatggactttaaagttgctggaactaaagatggaattacttctctccaaatggatattaaaatcacaggtattacatttgaaattatggagcaggcattaagccaagccaaagaaggaagggttcatatcttgggagaaatgaataaagcattatcagcttcaagatctgatgtcggaaaacatactccaaaaatggaacaagttaatgtagataaaaaagacattgctgctgtgattggaaaaggtggtgcaacaatcagagagatagtagaaaaatcaggagcgaaagtagatgtaaatgatgaaggtatagtaacagttgctgcgccagatggaagaatctaga

SEQ ID NO: 256960 - DNA, 766 bp, Unknown
  Bacterial polypeptide expressing nucleotide sequence isolated from the Sargasso Sea
gatgtaagaccaattatgtgtgaagttggaatattacctagagttcatggttcagctttgtttacaagaggtgaaacacaagccattgtgacaacaacacttggaacttcagatgatgaacaaagaatagagagtttagatggtcttcaaaaagagagatttatgttgcactataattttcctccattctcagttggtgaaacaggaagaattggaacaggcagaagagagataggtcatggtaaattagcatggagagcaattaactcatcgctcccatcaaaggaaagttttccatatacatttaggattgtatcagaaatcacagagtctaacggttcatcttcaatggcaactgtttgtggaacttcacttgcacttatggatgcaggtgttcctattaaagagccagttgctggaattgcaatgggtttaattaaagaaggtgatgatttttctgtactatcagatattcttggtgatgaagaccaccttggggatatggattttaaagttgcaggtacaaaagacgggatcacatctttacaaatggatattaaaattacaggaattacatttgaaataatggagcaagctttaaatcaggcaaaagatggaagaattcatattttgggtgaaatgaataaagctttagacaaatctagagacaatgttggaaaacatactccaaaaatggaaaagattactgttgataaaaaagatattgcggcagtcattggaaaaggtggagcaacaattagagaga

SEQ ID NO: 256961 - DNA, 756 bp, Unknown
  Bacterial polypeptide expressing nucleotide sequence isolated from the Sargasso Sea
gaactggaagacgagaaattgggcatggtaaactagcatggagagcgattaactcttcacttccttcaaaagaggcgtttccatacacttttagaatagtatcagagattacagagtctaatggttcttcttctatggccactgtttgtggaacatctcttgcgttaatggatgctggtgttccgattaaagaaccagttgcaggtattgcaatgggtttgattaaagaaggcgatgattttagtgtgttatctgacatcctgggagacgaagatcatttaggtgatatggactttaaagttgctggaactaaagatggaattacatctcttcaaatggatattaaaattacaggcattacatttgaaattatggaacaggctttaaaccaagctaaagatggaagaattcatatcctaggagaaatgaataaagcactagataaatctagatcggaagttggaaaacacactccaaaaatggaacaaattacagttgataaaaaagatatagcagcagttattggtaaaggtggtgcaacaattagagagattgtagaaaaatcaggagctaaagtagatgttaatgatgaaggtatagttactgttgctgcaccagatgaaaagtcccgaaatattgctttgcaatttattaaagacataactgctaaagctgaattaaataaaatatataatggaaaagttatgaaaattatggaatttggtgcatttgttaattttttaggtaaacaatgat

SEQ ID NO: 256962 - DNA, 913 bp, Unknown
  Bacterial polypeptide expressing nucleotide sequence isolated from the Sargasso Sea
aaaagtaaatccagatgtagattacttccttttatcagtaaattatcaagaaaaatattatgcagccggtaaaattcccggtggatattttaaaagagaagcaagaccaacggaaagtgaaacattaatctcaagattaattgatagacctataagacctttgtttccagatgaatttaaaaatgaagttcaagtacttcctactgtcatttcatacgataaagaaaatgaggcagatattctatctatcattgcttcttcagctgctttagcaatatcaggaatgccatttatgggacctgtaggtgcttctagagttgcctttattgaaggaaaatacgttcttaatccttcgaaggaagaaatgaaaaattcaaaattggatttagttgtggcaggaacaaaagatgctgttctaatggtagaatccgaagctaacggtttaactgaagaagaaatgttaaatgctgttaaatttggtcacgaaggttttgtgcccgtaattcaaataatagaagatttagctaaagagtgtaaaaaacctgattgggtagtagagaaaaaggatctttcagaagttaagaaaaaacttgaggaagaatttacaggtgatttaaaaaaagcttttgcaacaagagataaacaagatagatcaaatcaaatttcagaaatcacagacaaagctaaaaagctttttgaagaagatgaaaattattcagatttagatgttaattctcaacttaaaaaccttgaaaaatctattgttagaactgatattttaaaaaataaaaatcgtatagatggaagaggcctttcagatgttagaccaatcgagtgtgaagttggaatattacctagaactcatggttctgcactatttactagaggtgaaactcaagcgatagtaactacc

SEQ ID NO: 256963 - DNA, 828 bp, Unknown
  Bacterial polypeptide expressing nucleotide sequence isolated from the Sargasso Sea
cagaagaaataatgcttaatgctgttagctatggacacgaagagtcaaaaaaggttatagatttaataataaatcttgcagaagaatgtgcaaatgacccatgggaattcgagtatcatgaaaatgagacactgttagaatctattaattcaaattttaaagatgatattaaaaatgcctattctattgttgataagatggataggcagtccgctttatctgaaattaaagataagttattagaacaatattctgaagatgagaacactagttctattgaagctctttcttactttaagaaagttgaaaaagatattgtaagatctcaaatacttagtgataaaaagagaattgatggaaggaatttagatgaggttaggaatattacatctgaagtttcttggcttccaagaactcacggttctgccctatttactcgtggcgagactcaagcaatagtagtaactactcttgggtttggagttgatgagcaacggattgaggcattacaaggctcttacaaagaaaactttatgcttcattataattttcctccttactcagttggagaagttggaagaattggagcaacgggaagaagagaaattggtcatggcaaacttgcctggagagctttaaaagctgttttaccaagcaaagaagactttgattatactattagattagtttcagatatcacagagtcaaacgggtcatcgtctatggcaactgtttgtggctcttcacttgcactgatggatgctggggttccaataaagaattctgtttctggtattgcaatgggtttaattaaagaagggggatagt

SEQ ID NO: 256964 - DNA, 862 bp, Unknown
  Bacterial polypeptide expressing nucleotide sequence isolated from the Sargasso Sea
gcaaaagaaccaatatcaattgatgaagagattccggaagaaaaagattatcttaaagtagttaaagggtttaaaaaggaaattgaaaaagcttataaaatcgaagaaaaagcatcaagatataatgagttagataacatcaaagaaaaaataaaaaaagattacggtgatgaaataaatctaaacttatttactgatgtttttaaaaaagtagaagccgatgttgtaagaacttctattctaaaaacaaaaaaaagaattgacggaagagataacaatactgttagaaacattgttgcagaagttggcacacttccaagaacacatggatcagctttatttactagaggagaaactcaagcactagttgtaacaacacttggttcttcacaggattctcaaatagttgatggactagatggagattataaagaaaaatttatgttacattataattttcctcctttttctgttggtgaggttggacgaactggttctccaggtagaagagaaattggtcatggtaaacttgcgtggagagctatcaatcctttattaccttcaacagaagagtttccatatacaatgagaatagtttctgacattactgagtcaaatggatcctcctctatggctacagtttgtggtacttcattggcattaatggatgctggtgttccactaaaaaaacctgtagctggaatagctatgggtttaattaaggaagataaagactttgttgtactttcagatattttaggagatgaagaccatttaggtgatatggactttaaggttgctggcacagatgaaggtatcacaagtttacaaatggatattaaaatcacatctataactagca

SEQ ID NO: 256965 - DNA, 607 bp, Unknown
  Bacterial polypeptide expressing nucleotide sequence isolated from the Sargasso Sea
ttgagcatacaattagaatcgcaatcaatttcatttgattatgggggccatgaagtaacccttgaaacaggcaaagtagccagacaagcaacagctgcagtaattacttcggttggaaagacaagagttctgaccacagtagttgcaaataaaaaagcagatccattaaaagattttttcccactcgcagttttttatcaagaaaaattttatgctgctggaaagattccaggaggttatttcaaaagagaggctagacccactgaagcagagacacttacatcaagattaatagataggcccatcagaccattatttccagataattttaaaaatgaagtgcaaattatgtgcacagtactatcaattgatcctgattataccgcagacattgctgctatgatcggtgcatcagccgcactgacaatttcaggaataccatttcaaggtcctcttggtgctgctcgtgttggctttatcgatggtaattatgtcttgaatccatcaagagaagaactaaatgattctttccttgatatggttgtcggtggtacgagggatgcagtgcttatggttgaatccgaagcaaaagagctgaatgaagatt

SEQ ID NO: 256966 - DNA, 854 bp, Unknown
  Bacterial polypeptide expressing nucleotide sequence isolated from the Sargasso Sea
tcaagagaaatattatgcagctggaaagataccaggtggctattttaaaagagaggcaagacctactgaaagcgaaacattaatttcaagattaattgatagacctattagaccattgtttcccgatgaatttaaaaacgaagtacaactattaccaacagtaatttcttacgataaagagaatgaaccagatattttatctatcattgcatcttcagcagctttagcaatctcaggaatgccttttatgggtcctgtgggggcatccagagttggctttattgaaggaaaatatgtcctcaatccatctaagtctgaattagagaagtctaaactagatttagtagtagctggaactaaggatgcagttttaatggtagaatcagaggcaaactgtttaactgaggaagagatgttgaatgctgtgaaatttggccataaaggtttcctcccagttatagaaatgatagaggatcttgcaaaagaatgtagaaaaccagaatggacagttgagaaaaaagatctttctgagataaaaaagaaattagaagaggaatttactgaagatttaaaaaaagcattctctacgactgataaacaagacagatcaaatcaaatttctgaaattactgataaagcaaaaaaactttatgaggagaatgaggattacacagatttagatgtaaattcccaacttaaaaacttagaaaagtcaattgtaagaaccgatattcttaaaaataaaaatcgtattgatggaagaggacttgcagatgtaagaccaatcatgtgtgaagttggaattttacctagagttcatgggtcagctttgtttacaagaggtgaaacaccag

SEQ ID NO: 256967 - DNA, 709 bp, Unknown
  Bacterial polypeptide expressing nucleotide sequence isolated from the Sargasso Sea
gtaaaagagggcgagaattcagtaattttgtccgacattcttggagacgaagaccatttaggtgatatggatttcaaagtttgtggaacatctgagggaattactgctcttcaaatggatataaaaattaaagggataagtaaagaattatttacatcagcaatgacccaagccagagagggtaggttgcatattttgtcagagatggcaaaaacaattgaggtaaaaaaggatgaaatttctccttatgcaccgcgaattacgacaattcaaatagatccagcaaaaattaaagatatcattggatcaggtggtaaaaatataagaaagctaactgaagataatgatgtaaaaattgatgtagatgatactggtaggttaaatgttatatccttaaatgaagaaaattgtaaaaatgctttgcgtgatatagcttacattataagggaaatagaagtcgataaattttatgttggaacagtaaaaagaattttagattttggagccattgttggtctaagtccaacattagatggtttaattcatatttctgaattagctaaagaaagagttaaacaagtttctgatatattaaatgaaggagacgaagtccttgtaaagtgtatttcaaaagaaagagatggaaagataagattaagtagaaaagcagctttagacgaagacattgacaactacagagaaatttaaa

SEQ ID NO: 256968 - DNA, 798 bp, Unknown
  Bacterial polypeptide expressing nucleotide sequence isolated from the Sargasso Sea
caagagcaagctgtagagaagttcttagatgaagaagatgacaatactaaagcaattaaattagcttttaagtcgatcgttaaaaacacagttagagatagagttttaagtggtggtgctagattagacggaagaaccccaactgatattaggaatatatctgcagagataaacttacttccaactgttcatggttcttcattatttttaagaggagagacacaggttttgaatgttacaactttaggtatgtcaaggcttgaacaaatgctagatactattgatacagtaacatcaaaaagatatatgcatcattataatttccctccatattcaactggagaagcttatccaatgagaggtccaaagaggagagagattggacacggtgcattagccgagaaagcattagtacctgttgttccaccaaaagttgactttccgtacaccattagagttgtaagtgaagcaatttcatccaatggatctacttctcaagcttctgtatgtgcatctagtttgtcattaatggctgcaggcgttcccattagagaacatgttgctggtatcgcaatgggactaatttctaaagatgatacttatgttactctcacagatatcttgggggctgaggatgctcttggcgatatggattttaaagttgctggaacaagaaatgtcattactgctttacaactagatatgaaaatagaaggtctccctgcagatgtattaagaaaagcattgaatcaagcaatggacgcaagacatcacatactagatattatggaagacact

SEQ ID NO: 256969 - DNA, 897 bp, Unknown
  Bacterial polypeptide expressing nucleotide sequence isolated from the Sargasso Sea
tttaaagtatacaagaaggaaattgaagtagcaggaaagaagataagtttagaaacaggtaaaatagcaagacaggcagacggtgcaataatcgcaacatgcggagagacagtcgtactggcaacagtagtgggagcaaaaaaagtaaatcctgatatggattactttccattatctgtaaattaccaagaaaaatattatgcagctggaaaaattccaggtggatattttaaaagagaagcaagaccaactgagagcgaaacattaatctctagattaattgatagaccaatcagacctttatttcccgatgaatttaaaaatgaagttcagttattaccaacagtaatttcatacgataaagaaaatgaatcagacattttatcaattactgcatcatcagcagcattagctatatcaggaatgccatttatgggtcctgtaggagcttcaagagttggttttattaatggtaaatatgttttaaatccctctaaaaaagaattagagaactcaagtctagatttagtcgtggcaggtacaaaagatgctgtgcttatggttgagtctgaagctaagggtttaacagaagaagaaatgttaaatgcagttaaatttggtcacgaaggctttgttccagtgattgaaatgattgaggaacttgcaaaggaatgtagaaaacctgaatggactgttgaaaagaaagatctatcagacgttaagaaaaaacttgaagaaacttttacagaagatcttaaaaaagcttttgcaacaagagataaacaagatagatcaaatcaaatttcagagattaccgataaagctaaaaagctttatgaggaagatgaaaactacacagatcttgatgttaatagtcagttaaaaaatcttgaaaaa

SEQ ID NO: 256970 - DNA, 791 bp, Unknown
  Bacterial polypeptide expressing nucleotide sequence isolated from the Sargasso Sea
gatggatgccggcgtcccgctcaaggcccccgtcagtggagccgcgatggggctgatcaaagagggagacgagatccgcatcctgacggacattcagggcatcgaggattttctcggtgatatggatttcaaagtggccggcacggagaagggaatcacggccctgcagatggacatgaagatcacaggcctggcggtcaacacggtcgctgaagctgtgaaacaagcccgtccggcgcgtcttcacattctcgaaaaaatgctcgaggccatcgacacgccacgggatgtcctctcgccccatgcaccgcgactgctgagcttccgaatcgaccctgagctgatcggtaccgtgatcggcccgggtggacgcacgatcaaaggaatcacagagcgcaccaacaccaagatcgacattgaggacagcggcatcgtcaccatcgcgtcccacgacggtgcagcagctgaagaagctcagcgcatcattgaggggctcacccgaaaggtgaatgaaggagagctgttcagtggatcgatcacccgcatcattccaattggcgcttttgtggaaatcctccccggcaaggaggggatgattcacatctctcagttgtctgaagctcgggtggagaaagtggaggacgtggtcaaggttggcgacgaggtcaccgtgcgagtgcgggaaatcgacaaccgcggacgcatcaacctcaccctccgtggcgttcctcaggggggcgagggagccgaaccagaaccggtcccgactcctgtcgccccactcaactgag

SEQ ID NO: 256971 - DNA, 889 bp, Unknown
  Bacterial polypeptide expressing nucleotide sequence isolated from the Sargasso Sea
aactgcaattcttaaagataaaaaaagaattgatggcagaggactagccgatgttagaaaaattgagtgtgaagtaggggttttacctcgtacacatgggtcggctttatttacaagaggtgagacccaggcattagtggttacaactttaggtatgtcagatgatgagcaaagacttgagagtcttgatggtatgcagagatctagctttatgttgcattataattttccacctttttctgttggcgaatgcggaagaattggaaccggaagacgagaaataggccatggcaaactagcttggagagctataaactcgtcactaccttcaaaagaaaactttccttatacattaagagttgtttcggagataacagagtctaacggatcctcatcaatggcaactgtttgtggaacttcattgtcacttatggatgctggagtgcccatcaaagagccagttgcagggatagcaatgggtttaataaaggagggtgagaaattttcggttttatcagatattttaggagatgaagatcatctaggcgatatggactttaaagttgccggaacaaaagatggtattacatccctacaaatggatattaagataaccggaattacatttgagatcatggaacaagccttaaatcaggcaaaggcaggtagagagcatattttaggtgaaatgaataaagccataaaaacatcaagaaaagaattttcaaaacacactccaaaaattgaaacaattaaagtcgataaaaaagatatagcgacagtaattggtaaaggtggagcaacaattagagaaatcgttgaaacatcaggagcaaaagttgacgtaaaagatactggagaagtaaccgttgcagcaccagacgaaaaa

SEQ ID NO: 256972 - DNA, 566 bp, Unknown
  Bacterial polypeptide expressing nucleotide sequence isolated from the Sargasso Sea
tttgtctgatgtaaggccaatctcatgtgaggttggtgttttgccaagaacacatggctctgctttgtttaccagaggcgaaacgcaagcaatagtaactgccacattaggtacatctgatgatgagcaaagaattgaaagcttagatggattacaaagagaaaggtttatgcttcattataattttccacctttttccgttggtgagacaggaagaataggaactggtagaagagagataggtcatggtaaattagcatggagagctattcactcttcattaccctcaaaagagtcatttccttatacttttagagtagtatcagaaattacagaatccaatggttcttcatcaatggctactgtttgtggaacatcacttgcattaatggatgcgggagtaccaataaaagaacctgttgcaggtatagcaatgggtttaattaaagagggtgatgattttagtgtgttatctgatattttgggtgatgaagatcatttaggcgatatggactttaaagttgctggaactaaagatggaattacttcactacaaatggatatca

SEQ ID NO: 256973 - DNA, 694 bp, Unknown
  Bacterial polypeptide expressing nucleotide sequence isolated from the Sargasso Sea
gaaacgcaggctctggtgaccgcgactctcgggacttccggggacacgcagcgcattgatggccttttgggcgacgtgaagaagcgcttcatgctgcactacaacttccctccgttcagcgtgggcgaggtgaagttcatgcgtggaccgagtcgtcgtgacaccggtcacggtgcgcttgccgagcgtgctctgacgccggttctgccgacggaagacgagttcccgtatgtggcgcgaatcgtctcggagatcctcgagtccaacggctcctcttcgatggcgaccgtctgtggtggctctctggcgttgaatgatgccggcatgccgaccaaggcgcctgtggcgggcatcgccatggggctcatcaaggaaggcgatgatatcgctgtcctgagcgacatcctaggcgacgaagaccacctcggcgatatggacttcaaggtggcgggaaccgctgagggcatcacggcccttcagatggatatcaagattgccggcgtgactcaggatgtcatgcagaaggcgatcgagcaggctcgggatggtcgactccacattcttggcgagatggccaaggagctggattcggcacgcaaggagatgtctccgtttgcaccgcgaatcgaggctctcaagatcccgaccgacaagatccgggacattatcggccccggaggcaagggattcgcgg

SEQ ID NO: 256974 - DNA, 910 bp, Unknown
  Bacterial polypeptide expressing nucleotide sequence isolated from the Sargasso Sea
atgttcaaagtagtaaaaaaagaaatagagataagtgggaaaaaaattagtttagagacaggaaaaatagcaagacaagcagatggagctattatagctcaatgtggtgagactgttgttttagcaacagtggttggtgcaaaaaaagttaatccagacatggattactttcctttgtcagtaaattatcaagaaaagtattatgcagctggtaaaattccaggtggttattttaaaagagaggcaaggcctacagaaaatgaaactttaatatcaagattaattgatagacctatcagacctttgtttcctgatgaatttaaaaatgaagttcagctgttaccgactgtaatatcttatgataaagagaacgagcctgatattttatcaataattgcctcttcagctgcattagctatatcaggtatgccttttatgggtcctgtaggagcttctagagttggctttattgaaggaaagtacgtccttaacccatctaaaaaagaattagaaaattcaaagttagatttagtggttgcaggaactaaagatgcagtattaatggttgagtcagaagcaaatggtttaacagaggaagaaatgttaaatgctgtaaaattcggacatgagggtttcgttcctgtcatagaaatgattgaagatcttgcgaaagaatgtagaaaacctgaatggactgtcgagaagaaagatctttcagagataaaaaagaaattagaggaagaatttaccgaagatttgaaaaaagcattttctaccagagataaacaagatagatcaaatcaaatttcagaaataaccgaaaaagcaaaaaagctttatgaggaaaatgaggattatacagatctagatgtgaattctcaacttaagagtttagaaaaatctattgtaa

SEQ ID NO: 256975 - DNA, 768 bp, Unknown
  Bacterial polypeptide expressing nucleotide sequence isolated from the Sargasso Sea
atttactaaagaattagaaaaagctttttcaataaaggataagaaagaaagatcagatctaatttctgaaataacagaaaaagcaaaaaaattatatgaagaagatgaaaatatatcagagctggatgttaactatgaactcaaaaatttagagaagagaattgtacgaactaatatactaaagaacaaaaatcgtattgatggtagaggcttatctgatgttaggccaataaagtgtgaagttggtattttgcctagaactcatggatctgctctattcacaaggggagaaacacaggcaattgtaacgacaactcttggaacttcagacgatgaacaaagaattgaaagtttagatggcctagttagagaaagatttatgttacactataattttcctccgttttcagtaggagaaactggaagaataggaacgggaagaagagaaattggacatggaaaattagcttggagagcaattaaatcgtctttaccttcaaaagaaagttttccttatactttcagaattgtttcagaaattactgaatctaatggctcttcttctatggcaacagtttgtggaacttcgctatctttgatggatgcaggagtaccaatgaaaactcccgtagcaggtatagcaatgggattaataaaagaaggagatgattttagtgttctttcagatattttaggtgacgaagatcatttaggagatatggattttaaagttgctggaactaaagatggtatcacttctttacagat

SEQ ID NO: 256976 - DNA, 758 bp, Unknown
  Bacterial polypeptide expressing nucleotide sequence isolated from the Sargasso Sea
atgtacagaattattattaaaaaaatatgagaataatgcagattatacaaatgtagaggtaatggatcaactaaaagctttagaaaaagatattgttagaactaatattttaaaaaataaaattcgaatagacggtagaaaattagatgaagttagaaacattgaatgtgaagtaggaatcttgcccaggtcccatggttctgctttatttacaaggggtgagacacaagcaattgtcgcgactacgctatcaacagcagaggatgagcaaaaaattgaaagtttagatggcatgatgagatcgagatttatgcttcactataattttccacctttttcagttggggaagtaggtagaattggaacaggaagaagagaaattggtcacggtaaattagcatggagagcaattaattcatcattaccaacaaaagaagagtttccttatacaattagaatagtttctgaaataactgaatctaatggttcttcatccatggcgactgtttgtggatcttcaatgtcattgatgcacgctggagtcccgataaaaaaaccaatagcaggaatcgcaatgggcttaattaaagaaggtaaagattattcagtattaagtgatatcttaggcgatgaagatcatttaggtgatatggattttaaagtagctggcaccgatgaaggtattacatcactacaaatggatattaaaataacaggtataacatttgaaattatggaaaaggcattaagtcaagcga

SEQ ID NO: 256977 - DNA, 850 bp, Unknown
  Bacterial polypeptide expressing nucleotide sequence isolated from the Sargasso Sea
tatcaagcgattgaaaatttagaaaaaaaagcaagtaaaccaaaatgggaaatagaggaattggaccattcaaaaataaagaaagaaatcactaaaaaatttgaagaggatttacgaaaagcgtttagagaaactgataaaaaaaagaggtcaacagcgatttcagaaatagataataagtgcaaagagctattcaaagaaaatgaagatgttacagaaaatcaagtaatgtcccaactaaaatctcttgaaaaagatattgttagaacagcaatattgaaagataaaaaaagaattgatggtagaggtttagcagatgtaagaaatattaaatgtgaagttggagttttgcctagaacacatggctctgcattatttacaagaggggaaacgcaagccttagtggtaacaactttaggaatgtcagaagatgagcagaggctcgaaagcttagacggtatgcaaagatcaagcttcatgcttcactataattttcctcctttttcagtaggggaatgtgggagaattggtacaggtaggagagaaataggtcacgggaagttagcttggagagcgattaactcctcacttccacttaaagaaaattttccttacacattaagagttgtttcggaaataacagagtctaacggttcttcctcaatggcaactgtatgtggaacctctttatcactgatggatgcaggtgtaccaattaaagagccagttgctggtatagctatggggttaattaaagaaggtaataagttttcagttctttcagatattttaggggacgaggatcatcttggagatatggattttaaagttgccggaactaaagatggaa

SEQ ID NO: 256978 - DNA, 774 bp, Unknown
  Bacterial polypeptide expressing nucleotide sequence isolated from the Sargasso Sea
caaaaagatttatcaaaagttcaaaagaaacttaagagtgaatttgaaaaagatcttaaaaaagctttttcaataaaagataaacaagaaagatcaaatttaattgctgaaattactgaaaaagcaaaaaaactttatgaagaagatgaaaattttacagagttagatgtaatgtatgaacttaaaaatttagaaaaaggaattgtaagaactgatattttaaagaataaaaatcgtatagatggaaggggacttgcagatgtaagaccaatagtgtgtgaagttggaattttgccaagaacacacggatcagcattatttactagaggtgaaacgcaagcgattgtaacaactactttaggcacgtcagatgacgaacaaagaattgagagcttagatggtcttcaaagagaaagatttatgctgcactataactttccacctttttcagtaggagaaacaggaagaattggaacaggcagaagagaaattggccatggaaaattagcatggagagcgattaattcatccttgccctctaaagaaagttttccttatacttttagaattgtatcagacattacagagtctaatgggtcatcatctatggcaactgtttgtgggtcatctttagcattaatggatgcaggtgtgccaattaaagagccagttgcaggtatagcaatgggtcttattaaagagggcaaagattttagtgttctttcagatattttaggtgatgaggatcatttaggtgatatggattttaaagtt

SEQ ID NO: 256979 - DNA, 733 bp, Unknown
  Bacterial polypeptide expressing nucleotide sequence isolated from the Sargasso Sea
aaggatttcttcccacttgcagttttttaccaagagaaattttatgcagcaggaaaaattcctggtgggtattttaagagggaagcgaggccaaccgagaaagaaacattgacctcaaggctgatcgatagaccaattagaccattatttcctgatgagtttaaaaatgatgtccagattatgtctacggtgatatcttctgatgaagaattttcctctgacattgcagctatgattggagcgtcagcagcattatctttatctggtgttccttttcaaggacccattggtgctgcaagagttggttttattgacggaagctatactttaaatccatcaaaaaaaataatggatcagtcttttctagatatggtagttgctgggacatctgaagcggttcttatggttgaatcagaggcaagcgaacttaatgaagatcttatgcttggtgctgtattattcggtcacaaatctatgcaaatagttattgataaaataaaagagtttaaagaactagtgggtgttgaaagctggttagttgagaaggatgaagaaacaccgaaatattttgctgaacttcaatcagatttttcatctaagatcgaagaagcgttcacaattgcaaagaaatctaaaagatcagaagctatcaatgcaattagacttgaaattcttgaaaaatataaagatcttgatgagctagcagttggaaaagtaatgagcgctttttaaa

SEQ ID NO: 256980 - DNA, 925 bp, Unknown
  Bacterial polypeptide expressing nucleotide sequence isolated from the Sargasso Sea
tactcttggaacttcagatgatgaacagagaattgaaagtttagaaggtcttcaaagagaaagatttatgcttcactataattttcctccattttctgtaggtgaaactggaagaattggaacaggaagaagagagatagggcatggaaaacttgcttggagagcaattaactcatcattacctccaaaagaaagtttcccctacacattcagaattgtttctgaaataacagagtccaatggatcatcatcaatggcaacagtttgcggaacttcattagcattaatggatgcaggtgttcctataaaagaaccagtagctggtattgctatgggattaataaaagaaggtgatgactatagtgtattgtcagacattcttggagatgaagatcatttaggtgatatggatttcaaagttgctggaactaaagatggaattacttcacttcaaatggatattaaaattacaggtattacatttgaaataatggaacaagctttaaaacaagcaaaagatggaagaattcatattttaggcgaaatgaataaagctttaaataaatctagagatggcgttggtaaacatacacctaagatggaaaaaataactgtagataaaaaagatattgccactgttattggaaaaggtggtgcaacaattagagaaatagttgaaaaatctggtgctaaggtagatgttaatgatgaaggagtagtaacagttgctgcaccagatgaagaatctagaaatattgcattacaatttatcaaagatcttactgcaaaagctgaattaaataaaatttataatggaaaagttattaaaattatggagtttggcgcttttgttaattttttgggaaaacaagatggacttgttcatatatcagagcttgctgataaaagagttgctaaagtaact

SEQ ID NO: 256981 - DNA, 811 bp, Unknown
  Bacterial polypeptide expressing nucleotide sequence isolated from the Sargasso Sea
catcaaagaaaaagcagaagaaattaaaaatctaccatctgaaattgaaaaaaattacaaattaaaatttattgatgcatataaaattcaagaaaaacaaaaaagatctgaattattaaatgaattaagaactgaaataagtgaaaattatgaaactgagctattaacttcagttattgtcagtgatgcaacaaaatcaattgaaaaagatatagttagaagtgaattattaaagactgggagtagaatagatggacgtgatacaaaaactgttagaccaattaaatgtgaagttggcgttcttgaaagaacacatggttctgcattatttaccagaggagaaactcaagccttagtagtaactactttaggaacaggtcaggatgaacaacgtattgatgcaattgagggagaatataaagaaaattttatgcttcattataattttcctccatattcagtaggtgaagtaggaagggcaggctctaccagtcgtcgtgaaattggacatggtaaattagcttggagagcaatccatccaatgttaccttcagcagaaaaatttccatatacttatagggtggtatcagaaattaccgaatcaaatggatcaagttcaatggcaacagtttgtggaacctctttgtccctaatggatgctggagttcctcttgaaaaaccaattgctggtattgctatgggattaataaaggaagataaaaattatttagttttatctgatattttaggagatgaagatcatctaggagatatggattttaaagtcgcaggaactaaagatggaattact

SEQ ID NO: 256982 - DNA, 785 bp, Unknown
  Bacterial polypeptide expressing nucleotide sequence isolated from the Sargasso Sea
aaaatactatgctgcaggaaaaattcctggaggttattttaaaagagaagcaagaccaaccgaggcagagactttaatatccagattaattgatagaccgataagacctttatttcctgaaaattttagaaatgaagttcaagttttacctacggttatttcatatgataatgaaaatgaagctgatgtattatcaatcatagcttcttcagctgcactatcaatttctggattaccttttaaaggaccgataggcgcatcaagagttggttttattggaggaaactgtgttttaaatccaacaaaaaaagaattagaaaactccaaattagatttagttgtagctggaactaaggatgctgttttaatggtagagtcagaggcctctggcttgacggaaaaagatatgttagatgctgtaaaatttggtcacgaaggatttgcttcagtaattcaaggcattgaaaagttagcaaaaaaatgtgccaaagatacttggaaaattgaaaaaaaggacctaagcaaagtttctaaaaaaatagaaaaagagcttaccaaagatttagaaaaagcattttcagaaaaagataaaaagaaaagatcagaattaattaatttggctggtgaaaaatgtaaatcattcttcgaagatgatgaagaattattagaacatgaagtaatgtcacagttgaaaaatctagaaaaaaatattgtaagaactagaattttaaaaagtaaaaaaagaatagacggaagaggtttgtcagatgtaaggccaataaaat

SEQ ID NO: 256983 - DNA, 910 bp, Unknown
  Bacterial polypeptide expressing nucleotide sequence isolated from the Sargasso Sea
atgtttaaagtagtaaaaaaagaaatagaaataagtggaaaaaaaataagtttagagacaggaaaaatagcaagacaagcagatggagcaattattgctcaatgtggagaaacagttgtcttagcaacagttgttggtgccaaaaaagtaaatccagatatggattattttcctctatccgtaaattatcaagaaaaatattatgcagctggtaaaattcctggtggatattttaagagggaagcaaggccaactgaaagcgaaactctaatttcaagactaattgatagacctatcagaccattgtttcctgatgagtttaaaaatgaagtgcaactcttaccaacagtaatatcctacgatagagagaatgaagcagatattttatctattattgcatcttcagctgctctagcaatctcaggaatgccttttatgggtccagtgggagcttcaagagttggctttattgaaggaaagtacgttctcaatccatcgaagactgaattagagaaatcaaaattagatttagttgtagcaggaactaaagatgctgttttaatggttgagtccgaagcaaatggtttaactgaagaagaaatgttgaatgctgtaaaatttggtcacgaaggtttcgttccaataatagaaatgatagaagatcttgcaaaagaatgtagaaagcccgagtggacagttgagaagaaagatttatctgaagtaaaaaagaaattagaagaggaatttactgaagatttgaaaaaagctttctctacaagagataagcaagataggtcaaatcaaatttccgaaattactgaaaaagctaaaaagttatatgaggaaaatgaagattactcagatttagatgtaaattctcaacttaaaaattggaaaaatctattgtgag

SEQ ID NO: 256984 - DNA, 933 bp, Unknown
  Bacterial polypeptide expressing nucleotide sequence isolated from the Sargasso Sea
gttgctggtacaaaagatgctgtgcttatggttgagtctgaggcgagcggattaattgaggaagaaatgttaaatgcagttaaatttggtcatgaaggttttgttccggtgattcaaatgatagaggaattggctaaagaatgcagaaaacctgaatggactgttgaaaagaaagatctatctgaagttaaaaagaaacttgaagaaacttttacagaagatctaaaaaaagcatttgccactagagacaaacaagatagatcaaatcaaatttcagaaattacagataaagctaaaaaactttatgaggaagatgaaaactatactgatcttgatgtgaactctgaactaaaaaatcttgaaaagacaattgtcagaacagatattttaaaaaatagaaatagaatagatggtagaggactatctgatgtaagacctatttcttgtgaagttggtattttacctagaacgcatggatctgctttatttacaagaggagaaacacaggcaatagttacagctactttaggtacatctgatgatgaacaaagaattgagagcttagacggattacaaagagaaaggtttatgcttcattataattttccccctttttcagtaggagaaacaggaagaattggaactggtagaagagaaataggacatggtaaattagcttggagagctattcattcttcattaccaccaaaagaggcatttccttatacttttagagtagtttcagagattacagagtctaatggttcgtcctcaatggcaactgtttgtggaacttcacttgcattaatggatgcaggagtaccaattaaagaaccagttgcaggtattgcaatgggtttaattaaagagggtgatgattttagtgtcctatcagacattttaggtgatgaagatcatttaggagacatggac

SEQ ID NO: 256985 - DNA, 825 bp, Unknown
  Bacterial polypeptide expressing nucleotide sequence isolated from the Sargasso Sea
caaaagaatttacatctgatttaacaaaagcttttaaaattaaagacaaacaagaaagatcaaatcttatttctgaaataactgaaaaagcaaaaaaaatatttgacgaaaacgaaaattatacagaacttgatgttaattatgaacttaaaaatttagaaaaaagaatagttagaactgatattttaaaaaataaaaaccgtattgatggaagaggacttgcagatgtaagaccaattatgtgtgaagtaggaatattgccaagagtccatggctctgcgctatttacaagaggagaaactcaagcaattgtaacaactaccttaggaacttcagacgatgaacagagaattgaaagtttagaaggtctacagagagaaagatttatgctacattacaattttccaccattttcggtcggtgaggtaggaagaattggaacgggcagaagagaaatcgggcatggaaaacttgcatggagagcaataaattcatctttgccatcaaaagaaagttttccctacacatttagaatagtatcagaaattacagaatctaatggttcatcatcaatggcaacagtttgtggaacttctttagcattaatggatgctggtgttccaattaaagaaccagttgctggtattgcaatgggtttaatcaaagaaggtgatgattttagtgtactatcagatattttaggagatgaagaccatctaggcgatatggactttaaagttgctggaacaaaagatggcattacatcccttcaaatggatattaaaattaaaggaattacatttgaaataatggaacaagcttaaa

SEQ ID NO: 256986 - DNA, 859 bp, Unknown
  Bacterial polypeptide expressing nucleotide sequence isolated from the Sargasso Sea
gaaaattatcgatggcattaatgatctggttaagaaagcaggcaaagaaaaatggattcttgatgaaattgagaaagatgaaacattaaaaaataaagtcaaagagattgctggtgctgatattgaaagcgcatactcgattgttgaaaagtctgaaagatctaatcgtcttgcagatatcaagaaaaacacaattgaacgaattactgagtcagatgaagaaatctctaaagatgatattgcatctgaaatcaaaaaaatcgaaaaagagactgttcgatcaaaaatactcaatggcgaaccaagaattgatggacgagatactaaaacggtcagggatatcaatgttgatatcaatgttcttgagagaacacatggatctgctttatttactcgaggtgaaacacagtctattgtagtaacaacattgggttcagaaagatcctctcaaatcattgatgcacttgaaggtgaatacaaagataagttcatgcttcactacaatttcccaccatactctgttggcgaagttggattcatgggttcaccgaaaagaagagagatcggtcacggcaaattagccagaagggcattagaagctgtgctaccaaatatggatgaatacccatatacgatcagaattgtctctgaaataactgaatccaatggctcaagctctatggccacagtttgcggttcaagcctctcattgatgcatgccggtgttccaatcaaatcacatgttgcaggcattgcaatgggattggttatggaaggtgataaatataaagtcttgactgatattcttggcgatgaagatcaccttggtgatatggactttaaagttgcaggaactgac

SEQ ID NO: 256987 - DNA, 975 bp, Unknown
  Bacterial polypeptide expressing nucleotide sequence isolated from the Sargasso Sea
tatggaagttattgtatcaggtacagatgactcaattgtaatggtcgaaggtgaatctgattttatttctgaagaagatttcttgtctgctatccagtatgctcatgaggtgattaaagatattataggcttgcagcaagagcttgcaaaagaatgtggcaagcagaaaagattagttgcagaaaaggctgtcaatgaagagcttaatgctgatatagacagtttgatagatggaaagatatcgggctttaacaaaccaaaggataagcattctaggtatgaagatatacgtttatttagaaatgatattgttgagcaattatcagaaaaatatcctgatgatggcggtaaaattaaatcttatatagatgaaaaaattagcgatgacttaaggtctaagactctagagggagtgagagctgatggtagaaaactagatgaagttaggtcgatagatattatgacatctgttttacctcgtgcacatggttctgcagttttcacaagaggtgagactcaagccttagctgctctaactttgggaaataaaaaagatgagcagatgatagataatattgaaggtttatcatataaaagacatatgttgcattataattttcctccatttagtgtaggagaagccaggatgagatttagcttgtctcgaagagaagttgggcatggcaatctagctgaaagatcggttagtaaaattcttcctgattttgaagattttccatatactattagattagtatctgaagtgctagaatccaacggctcttcttcaatggccactgtttgctcgtcagttttagctatgatggatggaggggttcctattaaagagcctgttgcaggagttgcaatggggcttataatggaaagtaaagataaatatgcaatcctgacagatatattaggcacagaagatcatttaggagacatggactttaaagttgcaggtacaaaaga

SEQ ID NO: 256988 - DNA, 853 bp, Unknown
  Bacterial polypeptide expressing nucleotide sequence isolated from the Sargasso Sea
ggcgatattatcaaaaataaaagccgtattgatggaagaaatttagatgaagtaagacaaatcacatgtgaattagatatccttcctcgagcccatggttcaagtctctttactcgtggagaaactcaagcattagttgttaccacattaggaacgggcgatgatgagcagatgattgactcacttgatcctatgcataaacaacattttatgttgcattataattttcctccttactctgttggagaagtaggaagagtaggagcaactggcagaagagaaattggtcatggaaaactagcatggcgtgcagttcatccaatgttaccaaaaaaagaggatttcccatacacattaagattagtatctgagataactgaatccaatggttctagttctatggctacagtatgtggctcatcccttgctttgatggcagcaggtgtgccaattaaaaaacatatcggtggtatagcgatgggtctaatcaaagagggcgaggactttgtagtgcttagcgatatcttaggtgatgaagatcacttaggtgatatggacttcaaagttgctggcactatggatggtattacttctcttcaaatggatattaagattaccagtattactaaagagattatggaaattgctttaaatcaagcatctggtggaagaaaacatattattggtgtcatgtcagatgccttaccagaagctcgtacaaaattttctaagcatgcccctcaagtaatctctatcactattgataaagctaaaataaaagatgttattggctcaggcggtaaagtaattaaaaacatagtcgaagtttctggagctaaactagaagtcaatg

SEQ ID NO: 256989 - DNA, 589 bp, Unknown
  Bacterial polypeptide expressing nucleotide sequence isolated from the Sargasso Sea
atgttcaaggtagtaaaaaaagaaatagaagtaagtggaaaaaaattaagtttagagacaggaaaaatagctagacaagctgatggagctatcatagcacaatgtggagaaactgtagttctagcgactgtagttggagcaaaaaaagtcagtccagatatggattattttcctttgtcagtaaattatcaggaaaaatactatgcagcaggtaaaattccaggtggctatttcaaaagagaggcaaggccaactgaaagtgaaacactaatctcaagattaatagatagaccaatcagacctttatttcctgatgaatttaaaaacgaagtacagttattaccaactgttatatcttatgataaggagaacgaacctgatatattatctatcatagcctcatcagcagctttagctatatctggaatgcctttcatgggacctgtaggcgcctctagagttggctttattaaaggaaagtatgtacttaacccatcaaaaaaagaattagaggagtcaaaattagatttagtagtagcaggaactaaagacgctgttttaatggttgaatcagaagcaaatggttaac

SEQ ID NO: 256990 - DNA, 846 bp, Unknown
  Bacterial polypeptide expressing nucleotide sequence isolated from the Sargasso Sea
cagttcgtccattgtatgtgaaactggagtcttagaaagaactcacggctctgctttgtttacaagaggagaaacacaagctcttgtagtttcaactttgggaactggacaagatgaacaaagaattgatgctattgatggtgaatatactgaaaactttatgttgcactacaattttccaccttactctgttggagaagttggaagaattggctcaactagcagaagagaaattggacatggtaaactagcttggagagctattcatcccatgttaccctcaaaagaaaaatttccttatacatatagagtagtatctgaaattacagaatctaatggctctagctctatggcaactgtttgtggtacatctatgtctttaatggacgcaggagtgcccttagaaagaccagtagcaggtatagcgatgggtttaattaaagagaaagataaatatgtaatattatcagatatattaggtgatgaagatcacttaggtgatatggacttcaaagtagctggaacctctgaaggaataacttctttgcaaatggatattaaaataaccagtattacagctgaaattatggaggaagcattagcgcaagctaaagatggacgattccacatactaggtgaaatggctaaagcaattgataaacccaatcaatcaatttcacaatacgcgccaacaataactaatcttcaaataaataaagataaaattagagaggttattggtaagggaggagcagttattagagaaatatctgaaacaactggagctaaaattgaaattaatgatgaaggtttagtgagtattgcagccgtagatcaaaaatctgg

SEQ ID NO: 256991 - DNA, 882 bp, Unknown
  Bacterial polypeptide expressing nucleotide sequence isolated from the Sargasso Sea
tttaaaaaataaaaatcgtatagatggtagaggcttagctgatgtgagacctattgtgtgtgaagttggtattttaccaaggacacatggatctgcactctttacaagaggtgaaactcaagcaattgtaacagcaacactaggtacttcagatgatgagcaaagaatagagagtttggatggcttacaaagagaaaggtttatgcttcattataattttccacctttttcagttggtgaaacaggaaggataggaactggaagaagagaaattggacacggtaaacttgcgtggagagctattaattcatcactacctacaaaagagagttttccgtatacctttaggatagtatcagaaattactgagtctaatggctcgtcctcaatggcaacagtatgtggaacttcacttgcattaatggacgcaggtgtgccaatgaaagaaccagtagcgggtattgcaatgggattgattaaagaaggtgatgaattcagtgtattgtcagatatacttggagatgaagaccatttaggagacatggattttaaagttgctggaactaaggatggaataacatcactacaaatggacatcaaaattactggtattacatttgaaataatggaacaagctttaaagcaagcaaaagatggaagaattcatattttaggtgagatgaataaagctctttcaaaatctagggacaatgttggaaaacatacacctaaaatggaaaaaatcactgttgataaaaaagatatagctacagttattggaaaaggtggagctacaataagagagatagtcgaaaaatcaggagcaaaagttgatgtcaacgatgtaggagaaagtacagttgcagcgccagatgaggactc

SEQ ID NO: 256992 - DNA, 739 bp, Unknown
  Bacterial polypeptide expressing nucleotide sequence isolated from the Sargasso Sea
tatgctgccggtaaaattcctggggggatattttaaaagagaagcgagacctactgaaagtgaaacacttacctcaagactaattgatagacctataagacctttatttcctgatcagtttagaaatgaagtacaattacttccaactgtaatctcttatgacaaagaaaatgaagcagacattttatctataattgcttcttctgcagctttagcaatatctggaatgccatttatgggaccaatagctgcatcaagagtaggttttattaatggaaaatatgttcttaatccgtcaaagaaagatctagaaaaatctaaattagatttagtggtagctggaactaaggatgcagtactaatggtagagtccgaagcaaaaggtttaactgaagaagaaatgctaaatgctgtaaaatttgggcatgaaaatttcattccagtgattaagatgattgaggaattagcaaaagaatgcaaaaagcctgcttgggaaatagagaaaaaagatctatcagaagtgaaaaataaattagtaaaagaatttactgaaagacttaaaaaagctttttcaattaaagataaacaagaaagatcaaatcttattgcaaatattaccgaagaagcaaaaaaactttatgaagaagatgaaaatatttctgaactagatgttaattatgagcttaaaaatttagaaaaaacaatagttagaactgacattctaaaaaataaaaaatag

SEQ ID NO: 256993 - DNA, 856 bp, Unknown
  Bacterial polypeptide expressing nucleotide sequence isolated from the Sargasso Sea
aagagttggttttattgatggtaaatatgttctcaatccttccaaagaacagctaaaaaattctaaattagatctagttgtagcaggaactaaagatgcagttttaatggtagagtctgaagcaaatgggttaaccgagcaagaaatgttaaatgctgtaaaatttggacatgagagctttgttccagttataaaaatgatagaggaacttgctgaacaatgtaaaaaaccagattggactctagaaaagaaggatctttccgaaattaaaaatacattggataaagaatttacctctgatcttaaaaaagcatttgctacaagagataaacaagatagatcaaatcagatatctaaaataactgaaaaagcgattaaactgtatgaagaaaacgaaaaatatacagatttagatgttaattatgagctcaaaaacttagaaaaaagaattgtaagaacagatattttaaaaaataaaaaccgtatagatggtagaggtctagctgatgtgagacctattatgtgtgaagttggtattttaccaaggacacatgggtctgcactctttacaagaggtgaaactcaagcaattgtaacagcaacattaggtacctcagatgatgagcaaagaatagagagcttagatggcttacaaagagaaaggtttatgcttcattataattttccacctttttcagttggcgaaacaggaagaataggaactggaagaagagagattggacatggtaaacttgcgtggagagctattaattcatcactaccttcaaaagagagttttccatatacctttaggatagtatcagaaattactgagtctaatggttcgtcctctatg

SEQ ID NO: 256994 - DNA, 916 bp, Unknown
  Bacterial polypeptide expressing nucleotide sequence isolated from the Sargasso Sea
ttagatctagttgtagcaggtactaaagatgcagtgcttatggttgagtctgaaacatcaggtttatctgaagaagtaatgttagcagcagttaaatttggtcacgaaggatttgttccagtaatcgaaatgattgaggaacttgcaaaagaatgtagaaaacctgagtggactgttgagaagaaagatttatctgaagttaaacaaaaacttgaggaaacttttacagaagatttaaaaaaagcttttgcaaccagggacaaacaagatagatcaaatcagatttcagaaatcactgataaagctaaaaagctatttgaagaaaatgaaaattattctgatcttgatgttaactcacagcttaaaaatctagagaagaaaattgttagaactgatattcttaaaaataaaaacagaattgatggtcgaggattatctgatgtaagacctatcgaatgtgaagttggtgttttaccaagaactcacggttctgctttgtttactagaggagaaacacaagcaattgttgtaaccactttaggtacatctgatgatgaacaaaggattgaaagtctagatggtcttcaaagagaacgatttatgcttcactataattttcctcctttttcagtcggtgaaactggaagaattggaactggtagacgtgaaattggtcacggtaaacttgcttggagagccatcaattcttcattaccttcaaaagaggcttttccatatacttttagaatagtatcagagattacagaatctaatggttcttcttcaatggctactgtttgtggagcatctttagcattaatggatgcaggtgttccgataaaagaaccagttgcaggtattgcaatgggtttaattaaagaaggagatgattttagtgtcttatcagaatatttta

SEQ ID NO: 256995 - DNA, 901 bp, Unknown
  Bacterial polypeptide expressing nucleotide sequence isolated from the Sargasso Sea
tcagccggacatcgtggcaattttgggtacttcagcagctttagctatctctggcattccgttcagcggcccattaggcgctgcacgtgtaggttacattgatggtcaatacgtattaaacccatcagaaactgagttaaaaaccagtaagttagacttagttgttgccggtaccgccaatgcggtactgatggttgaatcagaagctggtgtcttgtcagaagaagtgatgttgggtgctgtggtttatggccacgaccagatgcaaacagccattaacgccattgctgaattcgctgctgaaggtggcaagccagcctgggaatgggttgctccggcgaagaacgaaccactgatcgcaaaaatcgaagctttatctactgcagctttaggtgaagcttaccgtatcactgaaaaagcaaaacgttacgagcgtatcggtgccatcaaagcagaagtatttgcccaaattaaagctgaacttgccgaaggcgaaagctttaacgaaactgaagccgctgaaattttccataacctggaatcaaaaattgttcgtagccgtatcatcaaaggcgaaccacgtattgacggtcgtgacaacgaaatgatccgcgctctgtctgtgatgactggtctgctgccacgtacccacggttctgctttattcacccgcggtgaaactcaggcgctggtgacttgtactttaggcactgcccgtgatgcacaaactgtcgacgacctgctgtcagacaaaactgaccacttcctgttccattacaacttcccaccgttctcagttggcgaaacaggtatggttggctcaccaaaacgccgcgaaattggccacggccgtttagcaaaaccgtggtgttgccgcggtgatgccagatttttgaagctt

SEQ ID NO: 256996 - DNA, 964 bp, Unknown
  Bacterial polypeptide expressing nucleotide sequence isolated from the Sargasso Sea
gctttaccatctcgggtgttcatttgatggaccaatgggagcagctcgagttggatttataaatggtgaatatgttttaaatcctagctttgaagaattagaagattcatatttagacatggtagttgctggcactgatgaagctgttcttatggttgaatcagaagctaaagaattaaatgaagatttaatgcttggggctgttttatttggacatcaagaaatgaaatcagttattaaagcttgtaatgaattgaaagaaaaagctggtaatgaaatttgggatattgtagttccagaaaatcaaaataattattatcaagagttggatacaaactataaatcacaaattagtgaagcttttaaaatttccataaaatcagatcgaaatgatgctttaagagaaataagaaacctaatccaagaacaatacgaagatctagatgaaatggaaatgggtaaattgatgagtgatttcaaaaaattagaaaaagatattgttagaggaaacatcctaaataatcagccacgaattgatgggagagatcttgatactgtaagaccaatttttgttgaaactgatgtattaccaggtgctcatggatcggctctttttacaagaggtgagactcaagcaatagttgtagctactctcggatcttcaagagacgctcaaagaattgaatcaattgagggagagggtactgataatttcatgctgcattataattttcctgcttatagtgttggggaaataggaatgccaatggggccaaagagacgagaaattggtcatggtaacttagctaaaagagctataaaatcagttctgccagatgttgatgagtttggatatacgatgagagtagtttctgaaattactgaaatctatggatccagctcgatggcatcagtttgcggcactttcttatcacttatggatgccgggggtcctctttcaagt

SEQ ID NO: 256997 - DNA, 859 bp, Unknown
  Bacterial polypeptide expressing nucleotide sequence isolated from the Sargasso Sea
agcagtattaccagatgttgatgaatttggttataccatgagagttgtatcagaaataaccgaatcaaacggttcaagttcaatggcatcagtttgtggaacctcattatcattaatggatgctggtgttccgttgtcaagcccagttgcaggtatcgctatgggacttataaaggaaggagatgattttgcagttttgacagatattttaggagatgaagatcatcttggtgacatggattttaaagttgctggaactgaaacaggaatcactgcacttcagatggatattaaaatatctggaatagacgaatcaatcatggaatctgcactcattaaagcaaaatcggccaggaatcatattcttgggattatgaatgatgtactttcttctccaaaagaattatctgagaatgctccatcaatgaaatcatttatggttgataaagataaaataaaagaaattattggaaaaggtggagcagttataaaatcaatgcaagaaaagactggtgctactgttgatattaatgatgatggagtggtatcggtatttggtcaaaaccaaaaatcaatgaaagaatgcttagctataattgaaggaatacttgaagaacctgagctagataaagtgtataagggaaaggtagttaagattgttgaatttggagcatttgtaaatattttacctagcaaagacgggttgctgcatatttcagaaatctcagaggaaagaacagaaaatgtaaatgatgtactagaagaaggtcaagaaattgaagtaaagctaataggatttgatagaggaaagatgaaattatcaatgaaagctttagcaaataaagctgatttagtataa

SEQ ID NO: 256998 - DNA, 615 bp, Unknown
  Bacterial polypeptide expressing nucleotide sequence isolated from the Sargasso Sea
caaagaattgaaagtttagatggattacaaagagaaagatttatgcttcattataattttcctcctttctcagtcggagaaactggaagaattggaacgggaagaagagaaattggtcatggtaaattagcatggagagcaattcactcgtcattaccttcaaaagagtcttttccctatacctttagggtagtttcagagattactgaatcaaatggttcctcatcaatggctacagtttgtggaacttcgcttgctctaatggatgctggtgtgccaattaaagaaccagtagcaggcattgcaatgggtttaattaaggaaggtgatgattttagtgtcttatcagatattttaggtgacgaagatcacctaggagacatggactttaaagttgctggaactaaagatggtattacttcacttcaaatggatatcaaaattactgggattacatttgaaattatggaacaggccttaggtcaagccaaagatggaagagttcatatccttggcgaaatgaataaagcattatcagcttcaagatctgatgttggaaaacatactccaaaaatggaacaaataaatgttgataaaaaagacattgctgctgtg

SEQ ID NO: 256999 - DNA, 844 bp, Unknown
  Bacterial polypeptide expressing nucleotide sequence isolated from the Sargasso Sea
tatggattactttcctttatcagtcaattatcaagaaaaatattacgctggtggaaaaatccccggtggatattttaaaagggaagcaagacccactgagagtgaaacattaatttcaaggttaattgatagaccaattagacctttatttcctgatgcatttaaaaatgaagtgcaattgttaccaacagtaatttcgtatgactcagaaaatcaaccagatattttagcgattactgcctcatcagcagccttagctatctcaggtatgccatttatgggtcctgttggagcctctagagttggctacattgagggaaagtatgtccttaacccttctaaaaaagaattagaaaattctaaattagatcttgttgtagcaggaactaaagatgcagttttaatggtcgagtccgaagcaaatggtcttacagaggaagaaatgttaaatgcagtgaaatttggacatgaaggatttgttccagtgatagaaatgatagaggaactagcaaaagaatgtagaaaacctgaatggacagttgagaaaaaagatctttccgagataaaaaagaaattagaagatgaatttactgaagatttgaaaaaagctttctctacaagagataagcaagatagatcaaatcaaatttctgaaattactgaaaaagctaaaaaattatatgaggaaaatgaggcttacactgatttagatgtaaactctcaacttaagaatttagaaaaatctattgtaagaactgatattcttaaaaataaaaatcgtattgatggaagaggcctagcagatgtaagacctattatgtgtgaagttggaattttacctaga

SEQ ID NO: 257000 - DNA, 805 bp, Unknown
  Bacterial polypeptide expressing nucleotide sequence isolated from the Sargasso Sea
ggagcattagctgaaagagcaatattacccgtgctgcctgggaaagaaacatttccttatgttttaagggtagtaagtgaagttttaagttcaaacggatcaacttcaatgggttcagtatgtggaagtacgctttcattattagatgcaggagttcctttaaaagcacctgtaagtggtactgctatgggcttaatcaaagaaggtaaagaagttcgaattcttacagatattcaaggaattgaagactttcttggagacatggattttaaggttgctggcactgataaaggaattactgccttacaaatggatatgaaaattacgggtttaccagtctctattatttctgatgcaattaaaaaagctcgacctgcaagattacatatcttagaaaagatgcaagcggcaatagataaacctcaagaatccctatctccccacgctccaagacttttaagctttagaattgatcctgaacttataggaaccgtaattggccctggtggaagaactatcaaaggaattactgagagaactaatacaaaaatagatatagaagatggaggaatcgtaactattgcatctcatgacggagctgcagctgaagaagctcaaaagataattgaaggattaacacgcaaggttcatgaaggtgaaatcttctctggtgttgtaaccagaataatacctataggtgctttcgtcgaaatactgccagggaaagaaggtatggttcatatttctcaattatcagaagcaagggttgagagagttgaagatgtagtaaggcaaggagatgaag

SEQ ID NO: 257001 - DNA, 793 bp, Unknown
  Bacterial polypeptide expressing nucleotide sequence isolated from the Sargasso Sea
taaactagatttagtagtagcaggaactaaggatgctgttttaatggttgagtctgaagcaaaaggtttaacagaggaagaaatgttgaatgctgtaaaattcggccatgaaggtttcgtcccagttatagaaatgattgaggatcttgcaaaagaatgtagaaaaccagaatgggcagttgagaaaaaagatctttctgagataagaaagaaattagaagaggaatttactgaagatttaaaaaaagcattctctacgactgataaacaagacagatcaaatcaaatttctgaaattactgataaagcaaaaaaactttatgaggagaatgaggattacacagatttagatgtaaattcccaacttaaaaatttagaaaagtctattgtaagaactgatattcttaaaaataaaaatcgtattgatggaagagggcttgcagatgtaagaccaatcatgtgtgaagttggaattttacctagagttcatggttcagctttgttcacaagaggtgaaacacaagccattgtaacaactacacttggaacttcagatgatgagcaaagaatagagagtttagatggtcttcaaaaagagagatttatgttgcactataactttcctccattctcagttggcgagacaggaaggatcggaacaggcagaagagagataggtcatggaaagttagcatggagagcaattaactcatcacttccatcaaaggaaaattttccctatacttttaggattgtatcagaaatcactgagtctaacgggtcatcttccatg

SEQ ID NO: 257002 - DNA, 940 bp, Unknown
  Bacterial polypeptide expressing nucleotide sequence isolated from the Sargasso Sea
aaaaaagaatatattaaggtagttgataaatataaatctgattttgaaaaagcatataaaataaaaatcaaaactgatagatcaggggctttagaaagcattaaaagtaaaattgaagaacaatttgatgatgatgttaacaaaaatcttttagcgtctgttattaaaaataaagaagctgatattgtaagatcatctatactcaaaacaaaaaacagaatagatggacgtgataataagactgtcagaaatatttttgcagaagtgggcacacttccaaaagctcatggctctgctttgtttacaagaggtgaaacacaggcactagtggtaactacgctaggatcttctcaagatacgcaaatgatagacggtttagatggagattcaaaacagagtttcatgctgcattataatttccctccatattctgtaggagaagcaggaagagttggaaccccaggaagaagagaaataggccatgggaaattagcttggagagcaataaaccctttgttaccatcgttagaagaatttccttatacgataagaatggtctccgaaataacagaatctaatggttcttcttctatggctacagtatgtggaacatctttggctttaatggatgctggagttcctttaaaaaaacctattgctgggattgcaatggggctaattaaagaaaaagataaatttgtagttttatcagatattttgggtgatgaagatcacttaggtgacatggattttaaagtagctggaacaaatgatggtattacaagcttgcaaatggacattaaaattacttctataacaagcaaaatcatgaaggaagcacttgatcaagccttagaaggaagaaaatatattttgtctgaaatgaaaaaagctatttcaaagcctagaatttctcttgctgaaaacgcacctaaaataa

SEQ ID NO: 257003 - DNA, 898 bp, Unknown
  Bacterial polypeptide expressing nucleotide sequence isolated from the Sargasso Sea
aaattagaaagtgaaattacagaagagcttaaaaaagcattttcaataaaagataaacaggaaagatcaaatttaatttcagagataactgataaagcaaaaaagttatatgaagaagacgaaaattatacagatcttgatgtaaattctgaacttaaaaatttagaaaaaagaattgtaagaacagatattctaaaaaataaaaatagaattgatggtagaggtcttgcagatgttagaccaattatttgtgaggtcggaattcttccaagagtacatggctctgctttatttactcgaggagaaactcaagcaatagttacaactacacttggcacatcagatgatgagcaaaaaatagaaagtcttgaaggattacaaaaagaaagattcatgcttcattataattttccacccttctctgttggggagactggaagaataggcaccggaagaagagaaattggtcatgggaaattagcttggagagcaataaactcttctttaccctctaaggagagttttccttatacatttagaatcgtatcagagataactgagtcaaatggttcttcatctatggcaactgtttgtggttcatctttagctttgatggatgcaggcgtaccaattaaagaaccagttgctggtattgcaatgggattaattaaagaaggagatgactttagcgttctttcagacattctcggagatgaagatcacctaggtgatatggactttaaagttgctggaactaaagacggaataacatctcttcaaatggatattaaaattacaggaataacatttgaaattatggagcaagccttaaaacaagcaaaagatggaagaattcatatcttaggcgaaatgaacaaagcttttccaaatcaagaga

SEQ ID NO: 257004 - DNA, 764 bp, Unknown
  Bacterial polypeptide expressing nucleotide sequence isolated from the Sargasso Sea
aggactttcagatgtaagaccaattatgtgtgaagttggaattttgccaagaacacatggttctgcattgtttacaaggggtgaaactcaagcgatagttacaactacgcttggaacttcagatgatgaacaaaggattgaaagtctggaaggacttcaaagagaaagatttatgcttcattataattttccgccattttcagttggggaaactggaagaattggtactggaagaagagaaattggacatggaaaacttgcatggagagctataaattcgtcattaccatcaaaagaaagttttccttatacatttagaatagtatcagaaattactgaatctaatggctcatcatcaatggcaacagtctgtggaacttcattagcattaatggatgctggtgttccaatcaaagaaccggtcgcaggtatcgccatgggtctaattaaagaaggtgatgatttcagtgtattgtcagatattctaggagatgaagatcacttaggtgatatggattttaaagttgcaggaactaaagatggaataacgtcacttcaaatggatattaaaattactggaattacatttgaaataatggaacaagctttaaaacaggctaaagatggaagaattcatatcttaggcgaaatgaataaagctttagctaaatcaagagaaggtgtaggcaaacatactccaaagatggaaaaaataactgtagataaaaaagatatcgcaaccgttattggaaaaggtggagcaa

SEQ ID NO: 257005 - DNA, 679 bp, Unknown
  Bacterial polypeptide expressing nucleotide sequence isolated from the Sargasso Sea
tgttgttggagcaaagaaagtaaatccagatatggattattttccattgtcagtaaattaccaagaaaaatattacgcggctggaaagataccaggtggatattttaaaagagaggctagacctacagaaagtgaaactctaatttcaagattaatcgacaggcctatcagaccattgtttccagacgaatttaaaaacgaagtacaactattaccaacagtaatatcttatgataaagagaatgaagcggatattttatctatcattgcatcatcagcagctttggcaatctcaggtatgccttttatgggccctgtgggagcttctagagttggctttattgaaggaaaatatgttctcaatccatcaaagactgaattagagaaatctaaattagatttagttgtagcaggaactaaagatgctgttttaatggtggaatcagaggcgaatggtttaacagaagaagaaatgttgaatgctgttaaatttggacacgaaggtttcttaccaataatagaaatgattgaagatcttgcgaatgaatgtagaaaaccagaatggacagttgagaaaaaagatctttctgagattaaaaaaaaattggaggaagaatttactgatgatttgaaaaaagctttttctacgagagataagcaagatagatcaaaccaaatt

SEQ ID NO: 257006 - DNA, 850 bp, Unknown
  Bacterial polypeptide expressing nucleotide sequence isolated from the Sargasso Sea
tgacagaccaatcagacctttgtttcctgatgaatttaaaaatgaagtacagttattaccaactgtaatttcatacgacaaagaaaacgaaccagatattttatcaatcactgcttcatcagcagcattggctatttcagggatgccatttatgggccctgttggagcttcgagagttggatttattgatggaaaatatgttttaaacccatctaaagcagaattagaaaaatcgaaattagatttagttgtagcaggtacaaaagatgctgtgcttatggttgagtcagaagcaagtggtttaactgaagaagaaatgttaaacgcagttaaatttggtcatgaaggttttgttccagtgattgaaatgattgaggaactagcaaaagaatgtagaaaacctgaatggacagttgagaaaaaagatttatctgaaatcaagaaaaaacttgaggaaacttttacgaaagatcttgagaaagcttttgcaacaagagataaacaagatagatcaaatcaaatatctgaaatcactgataaagctaaaagactttatgaggaagacgaaaactacacagatcttgatgttaacagtcagttaaaaaatctagaaaaatcaattgttagaactgatattctaaaaaataaaaatagaattgatggtcgaggattatcggatgtaagaccaatttcttgcgaagttggtgttttacctagagctcatggttctgcattatttactagaggtgagacacaagcaatagtagttgcaactttaggaacatctgatgatgaacaaagaattgaaagtttggatggtctccaaagagagcgatttatgcttcactat

SEQ ID NO: 257007 - DNA, 691 bp, Unknown
  Bacterial polypeptide expressing nucleotide sequence isolated from the Sargasso Sea
tatgggtctggttaaggaagaagatggttttgccgttattacagatattttgggtgatgaagatcatctcggagacatggactttaaagtggcaggaactgcagaaggcattaccgcccttcaaatggatataaagattgatggcattactgaagaaatttttgatgttgctcttgaaaaagctcaaaaggccaggactaatattttaaatagtatgaatgaagttctttctgcatcaagagaagaattatcagataaagcccctcaagcagttgttatacagataaatactaagaagattagagatgtaattggtaagggtggagagactataagaggtttaaccgaagagactggagctatcattgaagttgaagatagcggtaaagttaccatttatggagacactccagaatctagagaaagtgctttaaaaaggatagaagaaataaccgctgagcctgaagttaacaagatttacacaggaactgtagccaacattatggactttggagcttttgtaacgattatgccaggaagggatggtttggttcatgtatctgaaatttctgaagaacgagttgaaaatgtatcggattattttgtagaaggtgaagaggttaaggtgaaagtattggaagttgataggcaaggtaagatacgtttgaccatgaaaggattggaagactaa

SEQ ID NO: 257008 - DNA, 786 bp, Unknown
  Bacterial polypeptide expressing nucleotide sequence isolated from the Sargasso Sea
agtaaatccagatgtagactactttcctttgtcagtaaattatcaagaaaaatattacgcggcaggaaaaattcctggtggttattttaaaagagaagcaagaccttcagagagcgaaacattaatatcaagattgattgatagacctataaggccattgtttccagacgagtttaaaaatgaggtacaagtgcttccaacggtaatttcgtatgataaagagaacgaggcggatattttgtcaataattgcttcatctgcagccttagccatttcaggtatgccttttttaggtcctgtcggtgcatcaagagtaggttttgtagatggaaattacatattaaatccatctaaaacagatcttaaaaattctaaattagatttagtagttgccggaactaaagacgcagttttaatggtagagtcagaagcaagtggtttaactgaagaagaaatgttaaatgcggtgaaatttggtcatgaaggatttgttcctgtgatcaaaatgatagaagacttagcaaaagaatgtagaaaacctgattggattgtagagaaaaaagatctttctgaagtaaagaataaattagaatctgagtttacagtgggattaaaaaaagctttttcgacaagagataaacaagaaagatcaaatatgatttcagaaataactgataaagctaaaaaactttatgaggaaaatgaagaaataactgatctagatgttaattcagaattaaaaaatttagaaaaagcaatcgtaagaaccgatattcttaaaataaa

SEQ ID NO: 257009 - DNA, 888 bp, Unknown
  Bacterial polypeptide expressing nucleotide sequence isolated from the Sargasso Sea
catctttaggagaaacagtagttttggcaaccgctgtaggagcaaaaaaaattaacccagatgttgattattttcctctgtcagtaaactaccaggaaaaatattattctgctggtaaaattcctgggggatattttaaaagggaggctagacctactgatagcgaaacgctaatctcaagattaatagatagaccaattagaccattatttccagatgagtttaaaaacgaagtacaactattacctacagtaatatcttacgataaagaaaatgagccagatatcttgtctataatagcttcatctgcagctttggcgatatcagggatgccatttatgggtccagttggggcttctagagttggttttattaacggaaattatgttttaaatccatctaaagttgagcttgaaaaatcaaaattagatttagttgttgccgggacaaaagaagctgttcttatggtagaatcagaagcaagtggtttaacagaagaggaaatgctcaatgcagtaaaatttggtcataaaggtttccttccagttattcaaatgatagaggacattgcaaaagagtgtagaaaacctgagtggacaatagaaaaaaaagatctttctgaggttaaaaaaaagttggagagtacatttactgaggatcttaaaaaagcatttgcgacagaagataaacagcagagatcaaatcaaatatctgagattactgataaagctaaaaagctttatgaagaggatgaaaattatactgatctagatataaatagtgagttaaaaaatttagaaaaatcaattgtaagaactgatattttagagaaaaaaaatagaattgatggtcgaggtttatcagatattagaccggatttcttgtgaa

SEQ ID NO: 257010 - DNA, 859 bp, Unknown
  Bacterial polypeptide expressing nucleotide sequence isolated from the Sargasso Sea
atcagatctaatttcagaaacaacagaaaaagctaaaaagctttatgaagaagatgaaaatatatcagaacttgatgttaactatgcgcttaaaaatttagaaaagagtatagttagaactaatatattaaaaaataagagtcgtatagatggtagaggtttagctgatgtaagaccgataaattgtgaagttggtatcttgccaagaactcatggatcagcattatttacgagaggagaaacacaagcaattgtgacaacaactcttggaacttcagatgatgaacaaagaattgaaactttagacggattaatcagagaaagatttatgctacattataattttccacctttttcagttggagaaactggtagaataggaactggcagaagagaaattgggcatggaaaattagcctggagagcaattaaatcatctttaccttctaaagaaagttttccttatacatttagaattgtttctgaaataactgagtcaaatggttcttcgtcaatggctactgtttgcggaacttcactatctttgatggatgcaggagttccaatgaaaactccagttgctggtatagcaatgggcttaataaaagaaggaaatgattttagtgttctttcagatattttgggagatgaagatcatttaggagacatggactttaaagttgcaggtacaaaagatgggatcacttcattgcaaatggatattaaaattacaggaataacctttgaaatcatggaacaagctttaaaacaagctaaagacgggcgtatccatattttaggagaaatgaataaagcgctaaataaatcaagagatggagttggtaaacatactcctaaa

SEQ ID NO: 257011 - DNA, 904 bp, Unknown
  Bacterial polypeptide expressing nucleotide sequence isolated from the Sargasso Sea
ttcaagggtcctgtaggagcttcaagagtgggttttgttgatggtaaatatattctcaatccatctaaagcagaattagaaaattcaagcttagatttagttgtagctggtactaaagatgctgtgcttatggttgagtcagaggcaaatggtctaactgaagaagaaatgttgaatgcggttaaatttggtcacgatggattcgttccagtaatcaaaatgatagaggaatttgctaaagaatgtagaaaaccagaatgggttgttgaaaaaaaagacttatcagaaattaaaaaaaaactagaagtaactttcactgacgatttaaaaaaagctttttctacaagagataagcaagatagatcaaatcaaatttctgaaataacagataaagccaagaaactttatgaggaagatgaaaattatactgatctagatgtaaacagccagttgaaaagtcttgaaaaagccattgtgagaacagatattcttaaaaacaaaaatagaatcgatggacgtggcttatcagaggtaaggcctatttcatgtgaagttggtgttttaccaagaacccatggttctgcattgttcacgagaggtgaaacacaagcgatagtgactgctactctaggaacatctgacgatgagcaaagaatagaaagcttagatggtcttcagagagaacgatttatgctacattataattttcctcctttttctgttggtgaaactggaagaattggaactggtagaagagaaataggtcatggaaaattggcctggagagctatccactcttcattacctccaaaagaatcttttccatacacttttagaatagtatctgaaattacggaatctaatggttcttcctcttatggcccactgtctgtggaacatcttt

SEQ ID NO: 257012 - DNA, 757 bp, Unknown
  Bacterial polypeptide expressing nucleotide sequence isolated from the Sargasso Sea
agtggtacagctatggggttaattaaagagggaaaagaagttagaatacttactgatatacaaggtattgaagattttctgggggatatggatttcaaagtagctggtacagataaagggataacagccttacaaatggatatgaaaattacaggtcttccagtatctgtaatatctgatgcgataaaaaaagcacgtccagctaggttgcatattttagaaaagatgaaagaggcaattgaaaaccctcaagaatctttatctcctcatgctccaagacttctaagctttaggattgacccagaactcataggaacagtaattggacctggaggaaggaccattaaaggtattactgagagaaccaatacaaaaatagatatagaggatggaggaattgtaacaattgcttctcatgatggcgcagctgcagaagaggctcaaaagataatcgagggattaactcgaaaagtacatgaaggtgaaatcttctcaggagtcgtaacaagaataataccaataggggcattcgttgaaatattaccaggcaaagaggggatggttcatatttctcaattatctgaagctagggttgagagagtggaggatgtagtgaggcagggagatgaagtaacggtaagagttagagaaattgatagtagaggaagaattaatcttactttgagaggtgttggacaaaataatgggatgtcttatccccaaccaactccaactccagtagcacctcttaattaaa

SEQ ID NO: 257013 - DNA, 682 bp, Unknown
  Bacterial polypeptide expressing nucleotide sequence isolated from the Sargasso Sea
aatgtttaaagtatataagaaagaaattgaagtagcaggaaaaaaaataagtttagaaacgggtaaaattgcaagacaggcagatggagcaattattgcacaatgtggtgagacggttgttatggcaactgtagtaggggctaaaaaagtaaatccagatgttgattactttcctttgtcagtaaattatcaagaaaaatattatgctgcaggtaaaattcctggtggatattttaaaagagaagcgagaccaacagaaagtgaaactcttatttcaaggttaatcgatagacctataagaccattgtttccggatgaatttaaaaatgaagtacaattacttccaacagttatatcttatgataaagaaaacgaagcagatattttatcaattattgcttcatcagctgcattagctatctcgggaatgccttttatgggtcctgttggagcttctagggttggctttattgaaggaaaatacgtccttaatccttctaagaaagaattagaaaattcaaaattagatttagttgttgctggaacgaaagacgcagtcttaatggttgagtccgaagctaatggattaacagaagaagaaatgttagatgcggttaaatttggtcatgagggtttttctccaataattaaaatgatagaagaacttgcgttggaatgtaaa

SEQ ID NO: 257014 - DNA, 814 bp, Unknown
  Bacterial polypeptide expressing nucleotide sequence isolated from the Sargasso Sea
aaagttaatcgtaagaactgatattttaaagaataaaaatagaattgatggaagaggtttgtcagatgtaagacctatatcttgcgaagtaggcgtcttaccaagaactcacggttctgctttgtttaccagaggagaaacacaagcaattgttgttactactttaggtacatctgatgatgaacaaagaattgaaagtttagatggtcttcaaagagaaagatttatgcttcattacaatttccctcctttttcagttggtgaaactggaagaattggaactggaagacgtgaaattggtcatggtaaactagcatggagagcaattaactcttcattaccttcaaaagaggcttttccatacacttttagaatagtatcagagattacagagtccaacgggtcttcttcaatggctactgtttgtggagcatctttagcattaatggatgctggtgttccgattaaagaaccagttgcaggtattgcaatgggattaataaaagaaggtgatgattttagtgttttatcagatattttaggcgatgaagatcacttaggggatatggactttaaagttgctggaactaaagatggaattacttcacttcaaatggatatcaaaattactggtattacttttgaaatcatggagcaggctttaaatcaggctaaagatggaagaattcatattttaggtgaaatgaataaagctttatcagcttcaagatccgatgtcggaaaacacactccaaaaatggagcaagttaatgttgataaaaaagatatagctgctgtaattggaaaaggtgga

SEQ ID NO: 257015 - DNA, 766 bp, Unknown
  Bacterial polypeptide expressing nucleotide sequence isolated from the Sargasso Sea
aaaatctatagttagaactgatattttaaaaaataaaaatcgtattgatggtagagggttagcagatgtaaggccaattgagtgtgaggttggcatattacctagagtacatggttcagctttatttactagaggagaaactcaagcgatagtaactactacacttggaacttctgatgatgaacaaagaattgagagtctagaaggattgcaaagagaaagatttatgcttcattacaattttcctccattttcagtaggtgaaactggtagaattggaactggaagaagagaaattggacatggaaaacttgcttggagagcaattaattcatcattaccttcaaaagaaagttttccttacacttttagaattgtatctgaaataacagagtctaatggctcatcttcaatggcaactgtttgtggaacttctttagcattgatggatgctggtgttccaattaaagaaccagttgctggtattgcaatgggcttaattaaagaaggtgatgactttagcgttttatcagacattcttggtgacgaagatcacctaggggatatggactttaaagttgctggaactaaggatggaattacatctcttcaaatggacattaaaattacgggtataacatttgaaattatggaacaggctttaaaccaagctaaagatggaagaattcacattttaggcgaaatgaataaagcgctagataaatctagggcggaagttggtaaacacactccaaaaatggaaaaa

SEQ ID NO: 257016 - DNA, 904 bp, Unknown
  Bacterial polypeptide expressing nucleotide sequence isolated from the Sargasso Sea
aaagatttaggaataaagcagattaagccatccaaacctgaagatgataaaacactaccttcctatatagaaaagaattgtacaaaagccattgagctggtcttaaagaaatttaaccattccaaagaggagagggatctagaactcgaaaatataaaaattgagactcaaagtaaaattgaatctttgaaagatgacaaccaagtaaaaattcttgtctcagagaatgataagttattaagttccgactttaaaaaacttacgaagaaattaatgaggtcgcaaattattaatgatgggaaaagagttgatggccgtgaattagatgaagttagaaagatttctgcatctgcaggaattcttccaaaaagagttcatggttcagctttatttcaaagaggtttaactcaagttttatctactaccacacttgggacaccaagtgatgcacaagaaatggacgaccttaatccaagcacagaaaaaacttatttgcatcactataatttcccaccatattctgttggagaaactagaccaatgagaaccccaggcagaagagaaataggtcatggagctttagcagaaagagcgattatcccagtactcccaggtaaggagactttcccttatgtactgagagtagttagtgaggtattgagttcaaatggttcaacttcaatgggatctgtttgtggcagtactctttcattactagacgcaggcgtgcctttaaaagctccagtaagtggaacagcgatgggtttaattaaggaagggaaagaagtacgcattcttacagatattcaaggtatcgaggattttcttggggatatggacttcaaagtagctgggactgaaaaaggaataactgctttacaaatggatatgaaaattacaggct

SEQ ID NO: 257017 - DNA, 892 bp, Unknown
  Bacterial polypeptide expressing nucleotide sequence isolated from the Sargasso Sea
aagagaaaggtttatgctccattataactttccgccattttcagttggagaaacaggaagaattggaactggtagaagagagataggacatggtaaattagcatggagagctattcattcttccttaccgtcaaaagagtcatttccatatacttttagagtagtttctgaaattacagagtctaatggttcatcttcaatggctactgtttgtggaacatcacttgcattaatggatgcaggagtgccaattaaggaaccagtagcgggtatagcaatgggtttaattaaagaaggtaacgattttagtgtcctttcagatattttaggtgacgaagatcatttaggtgatatggattttaaagttgctggaactaaggatggaattacttcccttcaaatggatattaaaattacaggtattacatttgaaattatggagcaagctttaagccaagcaaaagatggaagagtacatattttaggagaaatgaataaagcattgtcagcttcaagatctgatgtaggaaaacatactccgaaaatggaaaaaattaatgttgataaaaaagatattgcagctgtgattggaaaaggtggtgcaacaattagagaaattgtagaaaaatcaggtgctaaagttgatgttaatgatgaaggggttgtaacagttgctgctcctgatgaagaatccagaaatactgctatgcagatgattaaagatattactgctaaagctgagttgaataaaatttattcaggtaaagttatgaaaataatggaatttggtgcattcgtaaacttcttgggaaaacaggatggacttgttcatatctcagaattagcagataaaagagtagctaaggttactgatgttgttaaggaaggcgat

SEQ ID NO: 257018 - DNA, 833 bp, Unknown
  Bacterial polypeptide expressing nucleotide sequence isolated from the Sargasso Sea
aaagataaaaaaagaatagacggaagaggtctagctgacgtaagacaaattgaatgtgaagtaggtattttgccaaggacacatgggtctgcactatttacacgaggtgaaacacaagcacttgttgtgactacccttggtatgtctgacgatgaacaaagattggaaagtttagaaggtatgcaacgatctaatttcatgttgcattataattttcctcccttctctgttggagaatgcggaaggataggaacaggtagaagagaaattggccacggaaaattagcgtggagagcaataaactcctcactaccaaaaaaagaaaactttccctatactttaagagttgtatctgaaattactgagtctaatggatcatcatcaatggctacagtttgtggaacatctttatctttaatggatgcaggtgtccccattaaagaaccagtagctggaatagctatgggattaataaaagagggagaagacttttcagtactgtctgatattttaggcgacgaagatcacttaggagatatggactttaaagttgcaggtacaaaaaatgggattacatcattgcaaatggatataaaaattacaggaattacatttgaaattatggaagaagctttaaaccaagctaaagctggaagagagcatattctcggcgagatgaataaagctatcaaaacttcaagaaaagaattttcaaaacacacaccaaaaatggaaactattaaagttgataaaaaggatatagccactgttattggcaaagggggagctacgataagagaaatagttgaaacctctggagcaaaagtagatgt

SEQ ID NO: 257019 - DNA, 800 bp, Unknown
  Bacterial polypeptide expressing nucleotide sequence isolated from the Sargasso Sea
gaatgccatttttgggtcctgtaggtgcgtctagagttggctttattaaaggagaatacgttcttaaccctaacaaagcacaacttaaagattctaagttagatcttgttgtggctggaacaaaagatgcagttttgatggttgagtccgaagcaagtggtttaactgaagaggaaatgttaaatgccgttaagtttgggcacgaaggttttgttcctgtaatcgagatgattgaggatttagcgaaagaatgtaaaaaatctgattgggtagttgagaaaaaagatctttcagaagtaaaaaataaattggaaagcgaatttactgaggaacttaaaaaagcattttcaataaaggataaacaagaaagatcgaatttaatttcagtaataactgacaaagcaaaaaagctttatgaagaagatgaaaattataccgatcttgacgtaaattctgagcttaaaaatttagaaaaaaggattgtaagaacagatattctaaaaaataaaaatagaattgatggcagaggtcttgcagatgttaggccaattatgtgtgaagttggtatacttcctagagtacacggatcagccttgttcacaagaggagaaacacaagcgatagttacaactacacttggaacatctgatgatgaacaaaaaatagaaagtttggagggtctacaaaaagagagatttatgcttcattataattttccacctttttcagtaggagaaactggtagaataggtactggtagaagagaaattggacatggaaaattagctggagagcaataa

SEQ ID NO: 257020 - DNA, 919 bp, Unknown
  Bacterial polypeptide expressing nucleotide sequence isolated from the Sargasso Sea
gaaaaagatatagttagaggagatcttctaaaaactggcaataggatagatggtagagatacgaaaactgttagacctattgtttgtgaaacaggaattttagagcgcacccatggatcagctttatttactagaggagagacgcaagctttagttgtaaccacattaggcactggaatggatgagcaaaggattgatgctattgagggggagtacaaacaaaactttatgttacattataattttcctccatattctgttggagaagttggcagagtaggatccacaagcagaagagaaattggtcacggaaaacttgcatggagagcaattcacccaatgctaccttctagtgataaatttccttatacttatagagtagtatctgagataactgaatccaatggatctagctcaatggcaacagtatgtggaacctcaatgtctttgatggacgcaggtgttcctattgataagcctattgctggaatagctatgggactaattaaagaagatgataaatacgttgtgttatcagatattcttggagacgaagatcatctaggtgatatggattttaaagttgctggcactaaagatggaataacatctttacagatggatattaaaattactagcattacttcagaaataatgaaagaagctctaacccaggctaaagatggcagaattcatattttaggagaaatggcaaaagcaattgaaaagccaaaagaaaagatttctgattatgcacctacaattaccacattccatgttcataaagataaaataagagaagttattggtaagggtggcgctgtaattagagagatcagtgaaactactggtgctaaaattgaaatagatgatgaaggattagttagtgtagccgctgtcgatggcaaagtcaggaaat

SEQ ID NO: 257021 - DNA, 796 bp, Unknown
  Bacterial polypeptide expressing nucleotide sequence isolated from the Sargasso Sea
gggaagaagataagtttagaaacaggaaaagtagcaagacaggcagacggagcaatcatcgcaacatgtggtgagacagttgttttagcaacagtcgtaggagcaaaaaaagtaaatccagacatggattactttccactatctgtgaattatcaagaaaagtattatgcagcaggaaaaattccgggtggatattttaaaagagaagcaagaccaactgagagtgaaacattaatctcaaggctaattgatagaccgatcagaccattgtttcctgatgaatttaaaaatgaagttcagttattgccaactgtaatttcttacgataaagaaaacgaagcagacattctgtcgattatcgcatcgtctgcagctttagctatatcaggaatgccatttatgggtcctgtgggagcttctagggttggatatattgatggtaaatatgttttaaatccctcaaaagctgaacttgaaaaatcaaaattagatttagtggtcgctggcacaaaagatgctgtgcttatggtagagtctgaggcgagcggattaactgaagaagaaatgttaaatgcagttaaatttggtcatgaaggttttgttccggtaattcaaatgatagaggaattggctaaagaatgcagaaaacctgaatggactgttgaaaagaaagacttatctgaagttaaaaagaaacttgaagaaacttttacagaagatcttaaaaaagcatttgctactagagacaaacaagacagatcaaatcaaatttcagaaattaccgataaagctaaaa

SEQ ID NO: 257022 - DNA, 817 bp, Unknown
  Bacterial polypeptide expressing nucleotide sequence isolated from the Sargasso Sea
aaatctcgaaaagtctattgtaagaactgacattcttaaaaacaaaaatagaattgatggaagaggcttatctgatgtaagaccaatttcttgtgaagtcggtgttttgccaagaactcacggctcagcattgtttactagaggagaaacacaagcaattgtagttgctactttaggtacttcagatgatgaacaaagactagaaagtttagacggtcagcatagagaaagatttatgcttcactacaactttcctcctttttcagttggtgaaactggaagaattggaactggaagacgtgagattggtcatggtaaattagcttggagagcaattaactcctcacttccttcaaaagaagcatttccatatacttttagaatagtatcagagattacagaatctaatggttcctcttctatggctacagtttgtggtacatctttagctttaatggacgcaggggtgccaatcaaagaaccagtagcaggtattgccatgggtttaattaaagaaggagatgattttagtgtcctatcagatattttgggtgatgaagatcacttaggagatatggattttaaagttgctggaactaaagacggaattacttcacttcaaatggatattaaaattactggtattacttttgaaattatggaacaggcattaagccaagctaaagatggtagaattcatatattaggtgaaatgaacaaagcattagacaaatcaagagcagatgtaggaaaacacactccaaaaatggaacagatcactgtagacaaaaaagatattgctactgttataggaaaa

SEQ ID NO: 257023 - DNA, 917 bp, Unknown
  Bacterial polypeptide expressing nucleotide sequence isolated from the Sargasso Sea
cctaagtgggaagtcgtagaaattgaccacactaaagttaaaaataaaatttctgataaatttgaaaaagatttaagaagtgcctttaaagagatagataaaaaaaaaagatctacagctattgccgaaatagaaacccaatgcaaagagttgttcgctgaagatgaaaatgttactgaaaatcatgtaatggctcaattaaaatctcttgaaaaagacattgttaggacagcaattttaaaagataaaaaaagaattgacggaagaggtttagccgatgttaggcaaataaaatgtgaggtaggtgtacttcctagaactcacggttcagctctttttacaagaggagaaacacaagctttagtagtgacgactcttggaatgtcagatgatgaacaaagattagaaagcctagatggaatgcaaagatcaaattttatgctgcattataattttccgcctttctcggtaggtgaatgtggaagaataggaactggtagaagagagatagggcatggcaaactagcttggagagctattaattcatctctacctttaaaagaaaacttcccttacacattgagggtagtttctgaaataacagagtcgaatggctcttcatctatggcaactgtttgtggaacctctctttcattaatggatgctggagtgccaataaaggaacctgtggctgggatagcaatgggattgattaaagagggaaaagatttctcagttctttcagatattttaggtgatgaagatcacctaggagatatggattttaaggttgctggaacaaaagatggtattacatctcttcaaatggatattaaaattacaggaataacatttgagattatggaaaaggcactagatcaagctaaagatggcagagagcacattctttctgagat

SEQ ID NO: 257024 - DNA, 904 bp, Unknown
  Bacterial polypeptide expressing nucleotide sequence isolated from the Sargasso Sea
ttagctatatcaggaatgccattcatgggacctgtaggagcctcaagggttggatttattgatggaaaatatgttttaaacccatctaaagcagagttagaaaaatcaaaattagatttagttgtagcaggtacaaaagatgctgtgcttatggttgagtcagaagcaagcggtttaactgaagaagaaatgttaaatgcagttaaatttggtcatgaaggctttgttccagtgattgaaatgattgaggagcttgcaaaagaatgtagaaaacctgaatggacagttgagaaaaaagatttaactgaagttaagaaaaaactcgaggaaacttttactgaagatcttaaaaaagcttttgctacaagagataaacaagatagatcaaatcaaatttctgaaattactgataaagctaaaaaactttatgaggaagatgaaaattatacagatcttgatgttaacagtcagctaaaaagcctagaaaaatcaattgttagaactgatattctaaaaaataaaaatagaattgatggtcgaggattgtcagatgtaagacctatcgaatgtgaagtaggtcttttaccaagagcacatggttctgctttgttcactagaggtgaaactcaagcaattgttgttgcaactctaggaacttcagatgatgaacaaagaattgaaagtttagatgggcttcagagagaacgatttatgcttcactataattttcctcctttttcagttggagaaactggaagaattggaactggtagaagagaaattggacatggtaaattagcttggagagctattaactcttcattaccatcgaaagaggcatttccgtatacttttagagtagtttcagaaataacagagtctaatggttcttcttctatggcta

SEQ ID NO: 257025 - DNA, 886 bp, Unknown
  Bacterial polypeptide expressing nucleotide sequence isolated from the Sargasso Sea
attaaagaaaaagatgaagaattaaaaaaattaccaaacaacattaatgagaaatatggaaagcaatttattgaagcatataagataaatgaaaaacagaatagatctgaaaaattaagtactattaggtcagaaattaatgagaaatttatttcagatactatttcatcagttttgttatccgatgcaataaagaatgttgaaaaagacattgtaaggggtgagctaataaatactggaaatcgaattgatggaagagacactaaaactgttagaccaattgtatgtgaaacaggtattcttgaaagaacgcacggttctgcactatttaccagaggagaaacacaagcaattgttgtatcaactcttggcacaggtatggatgaacaaagaatagatgctattgatggagaatacactgagaattttatgctccattataattttcctccatattcagttggggaagtaggaagagtagggtcaacaagtagaagagaaatcggacatggaaaattagcatggagagctattcatccaatgttaccttctaaagataagtttccttacacttatagggttgtatcagaaattacagagtcaaatggttctagttctatggcaacagtttgtggtacctctatgtctttgatggatgcgggagtaccattagaaagacctgtagcaggtattgctatgggtttgattaaagaaaatgacaaatatgtaattttgtcagatattctaggtgatgaagaccatttaggagatatggattttaaagtagctggtacttctgagggaattacatcccttcaaatggatattaaaataacaagtataactgctgacattatgaaagaggctttagctcaagctaaagaag

SEQ ID NO: 257026 - DNA, 793 bp, Unknown
  Bacterial polypeptide expressing nucleotide sequence isolated from the Sargasso Sea
tatgatttcagaaattacagataaggctaaaaaactttatgaggaaaatgaggaaataacagatctagatgttaattctgaattaaaaaatttagaaaaaactattgtaaggactgatattcttaaaaacaaaaatcgtatcgatggaagaggtttgtcagacgtaagaccaataatgtgtgaagttggaattttaccaagggttcatggctctgcgttgtttaccagaggagaaacccaagcaattgtaacaacgactcttggaacttcagatgacgagcaaaaaattgaaagtttagatggtttacaaaaagaaagatttatgcttcattataactttccacctttttcagtgggagaaactggaagaattggaactggtagaagagaaataggacatggaaaacttgcatggagagcaataaactcatctttgccaccaaaagaaacatttccttatacatttagaatagtttcagaaattacagagtcaaatggttcatcatcaatggcaacagtttgtggcacatcgctagcattaatggatgcaggtgttccaatcaaagaaccagttgcaggtattgcaatgggtttgattaaagaaggtgatgattttagtgttttgtcggacatccttggagatgaagatcatttaggagatatggacttcaaagttgctggaactaaagatggaataacatctcttcaaatggatataaaaataacaggtattacatttgaaattatggaacaggcattaaatcaagctaaggatggaagaatcatattttag

SEQ ID NO: 257027 - DNA, 871 bp, Unknown
  Bacterial polypeptide expressing nucleotide sequence isolated from the Sargasso Sea
gtgaatcttgcaaaaagagctataaaaggtgtacttcccgacttcgatgcttttgggtacacagttagaatagtttctgagattacagaatctaatggttcaagttcaatggccactgtatgcggaacttctctttccttaatggatgctggagtgcctctaacagctcctgttgctggaatagcaatggggttgattaaggatggcgatgaatttgcagttttaaccgatatcttaggagatgaagatcatttgggagatatggattttaaagttgctggatctgaaaaaggaataacagcactgcagatggacataaaaattgatggcattaatgaaaaaataatggatgaagctcttacaagcgcaaaagaggcgagaatgcatatccttgagaaaatgaatgaagtcctttcaaagccaaaggaattagcctcagatgctccgtcaatgcaaaaatttatggtcaacaaagacaagataaaagaaattattggaaagggtggttcagttattaagtctatccaagaagagtctggagctgtagtggatataaatgatactggcgaaatatcagtattcggtgacaaccaggcaaagatgcaggcagcacttgatattatcgataagattattgaagagcctgaattagacaaagtttacgaaggaacagttgtgaagatagttgacttcggagcatttgtaaatattttacctggtaaggatggactgcttcatatttcagaaatttcggaagagagaactgaagatgtttcagctgttcttgaagaaggacagaaagtttcagttaagcttattgggtttgatagggggaaaatgaaactatcaattaaggcccttagtaaataaa

SEQ ID NO: 257028 - DNA, 880 bp, Unknown
  Bacterial polypeptide expressing nucleotide sequence isolated from the Sargasso Sea
atgttagaagcagttgtatttggtcaagagtcatataaaccagtgatagatgctattatatctttagcaaagcaagcagcaaaagatccttggttacttccagaaaaggatgaagaaataagtaagctgcctgagaatattggtagagattataaagaagaattcaagaaagcttataatattcaagaaaaacaaaatagatctgaaaaacttaattttttacgttctgaaatcgaagagaaattcgtttcggaaaatttatcttcagttgttgttgcagatgcggttaaatctattgagaaagatatagttagaggagaactattaaatacaggaaatcgaatagatggaagagatacaaaaactgttagaccaattatttgtgaaacgggtattctcgaaagaactcatggatctgctttatttactaggggagaaactcaagcattagtaattacaaccttaggaacaggttcagatgaacagcgtatcgatgcaattgaaggcgaatataaagaaaattttatgttacattataattttcctcaatattctgttggtgaagttggtagagctgggtcaactagtagaagagaaataggtcatggaaaacttgcttggagagcgattcatcctatgttgccatcacccgaacaatttccatacacatatagagttgtttcagaaatcactgaatcaaatggatctagttctatggcaactgtctgtggtacttctatgtcattaatggatgctggagttcctctggaaaaaccaatagcaggaatagcaatgggattgattaaagatgcagataagtatgttgtactttctgatatattaggtgatgaagatcatttaggagatatggatttcaaag

SEQ ID NO: 257029 - DNA, 724 bp, Unknown
  Bacterial polypeptide expressing nucleotide sequence isolated from the Sargasso Sea
atgtttaaagtatttaaaaaagagatcgaactaaatggaaaaaaattaagtttagaaactggaaaaatagcaagacaagcagatggagcaataattgcaaaatgtggtgaaacaatagttatggccactgtagttggtgcaaaaaaaataaatcctgaaattgactattttccactatcagtaaactatcaagaaaaatattatgctgcaggtaaaattcctggtggttactttaaaagagaagcaagaccgacagaaagtgaaacacttatttcaagattgattgatagacctatcagaccgctttttccagatgaatttaaaaatgaagtacaattacttccaacagtaatttcttatgataaagaaaatgaagcagatatattatcaattattgcatcatcagctgctttagctatatcaggaatgccatttatgggacctgttggagcttcaagagtaggatttattgatggcaaatatgtacttaatccttcaaaaaaagaattagaaaattcaaagttagatttagtagttgcgggaactaaggacgcagtactaatggttgagtcagaagccaaaggtttaacagaggaagaaatgttaaaagcagttaaatttggtcatgaaagttttgttccagtaattagtatgattgaagaacttgcaaaagaatgtaaaaaacctgactgggtagtgaaaaaaaagatttatccgaagtaaa

SEQ ID NO: 257030 - DNA, 898 bp, Unknown
  Bacterial polypeptide expressing nucleotide sequence isolated from the Sargasso Sea
aaagttaatccagatgttgattattttcctcttcaagtaaattatcaagaaaaatactatgcagcaggaaaaatacctggaggatattttaaaagagaagctagacctactgaaaatgagactttggtttcaagattaatagataggccaataagacctctttttccagatgaatttaaaaatgaagtacaattacttccaactgttatatcttatgacaaagaaaatgaaccagatattttatctataattgcctcttcagcagctttagcaatttcaggaatgcctttcatgggtcctattggagcttctagagttggctttattgaaggtaaatatattctcaacccatcaaaaaaagaattagaaaattcaaaattagatttagttgttgctggaactaaagatgcagttttaatggttgagtcagaagcaaaaggattatccgaagaagaaatgttaagtgcagttaaatttggacacgaaggttttgttccagtaatcaaaatgatagaggaacttgcaaaagaatgtaaaaaacctgattggatagtagaaaaaaaagatcttgcagaagttaagaaaaaattagaagaggaatttacaaccgatttaaaaaaagcttttgcaactagagataaacaagatagatcaaatcaaatttcagaaattactgacaaagctaaaaaactttatgaagaaaatgaaatttattcagatttagatgttaattctcaacttaaaataattgaaaaatctatagttagaactgacatattaaaaaataaaaatcgtattgatggtagagggttagcagatataagaccaatagaatgtgaagttggaatattacctagagttcatggttcagcattattacaagaggcgagactcaagc

SEQ ID NO: 257031 - DNA, 808 bp, Unknown
  Bacterial polypeptide expressing nucleotide sequence isolated from the Sargasso Sea
aattcttatttagatatggtcgtagctggaactgatgaagctgttcttatggtagagtctgaagcaaaagaattaaatgaagaccttatgctaggtgcagtcctttttggtcaccaagaaatgaaagctgttatcaacgcgtgcaatgaattaaaaaataaggctggaaaagaagagtggattatcgaagaagatgaaaatgttactaactattattctgatgttgaaagcaaatataaagatgaaataactgaagcttttacaatatctaataagtcagatcgcaatgaagctttagctactattaaagctaaaatagttgaagattattcagatctagatgaatttgagcttggtagagttttaagttcctttaaagaattagaaaaaaatattgtaagaggcaatatattaaataatatgcctagaatagacggaagagatttggatacagtaagacctatttttgttgaaacagacgttcttccaagtgcacatggatcagcattatttacaagaggagaaactcaggctgttgttgttgcaactcttggctcttctagagatgcacaaagaattgaagcaatcgaaggcgagggctcagataattttatgcttcattataattttccagcatatagtgttggtgagattggtatgccaatgggtccaaaaaggcgtgaaatcggacatggaaatttagcaaaaagagcaattaaacctgtattaccagatatcgatgaatttggttataccatgagagttgtttcagaaatcacagagtctaatggttcaagctcaatggctt

SEQ ID NO: 257032 - DNA, 877 bp, Unknown
  Bacterial polypeptide expressing nucleotide sequence isolated from the Sargasso Sea
ggaacaatgcgtgatgctgctatgatagatgccctggaaggaacttataaggatagcttcatgctccactataatttcccaccatatagtgtaggtgaagctgggtttatgtccggtccaaagagaagagaaatagggcatggacgtctcgcaagacgaggcgtacaagctatgctccctgatgttgaagaattcccatatacccttcgagtagtctctgagataactgaatctaatggttcgagttccatggcaagcgtgtgcggaacctcactggctttgatggatgcaggtgttcctatgaaagcgccagtggcaggtgtggcaatgggcctagtcaaagaaggaaataaatacgcggtcttgactgatatcttaggtgatgaagaccaccttggagatatggattttaaagttgcaggttcggaaagtgggattacagctttgcagatggatataaagatagatggcattactgaggaaataatggaggctgctcttgagcaggctaaggaaggtagactccatatattgtctgagatgaatcaagtaattgataaatctagagaaagtgtctcggataacgcccctagcatggtcgttataaaagtgcatccagacaagattagagacatcatagggaaaggtggggcaactattcgatcaattgttgaggaaacaggagccgatatagatattgaggatgacggcagcgttcggatctacgcagaagatggggaatcgaaggatgcagctttggctaagatagaagaaatcactgccgaagcggaagttggtaagatatataagggccaagtcgcacgtattgttgatttcggtgcctttataaatattcttcccgggaaagatgggcttt

SEQ ID NO: 257033 - DNA, 973 bp, Unknown
  Bacterial polypeptide expressing nucleotide sequence isolated from the Sargasso Sea
tcaactatagataaacaacaaagatcaaacatgatctcagaaattacagataaagcaaaaaaactctatgaggagaatgaggaaatatctgatctggacgttaattctgaattaaaaaacttagaaaaaacaattgtgagaactgatattcttaagaataaaaaacgtatcgatggaagaagcctatcggatgtaaggccaataatgtgcgaagttggtattctaccaagggttcatggatcagcattattcacaagaggagaaacgcaagcaattgtaacgactactcttggaacttcagatgatgagcaaaaaattgaaagtttagatggcttgcaaaaagaaagatttatgcttcactataattttccgccattctccgttggtgaaactggaagaattggaactggtagaagagaaataggacatggaaaacttgcatggagagcaataaattcgtctttacctccaaaagaaacctttccatatacatttagaatagtttcagaaataacagagtctaacggttcatcctcaatggcaactgtttgtggaacatctttagcattaatggatgctggtgttccaattaaagaaccagttgcaggtattgcaatgggattaattaaggaaggtgaaaattttagtgttttatctgatattttaggtgacgaagatcatttaggtgatatggattttaaagttgctggtaccaaagatggaataacttcgcttcaaatggatattaaaataactggtattacatttgaaataatggaacaagctttaaaacaagcaaaagatggaagaattcatattttaggagaaatgaacaaagctcttgctaaatctcgtgatgatgttggaaaacatactccaaaaatggaaaaaatatcagtagataaaaaagacatcgctactgtgattggaaagaggtggagcaacaataagagagattgtagaagtctctgag

SEQ ID NO: 257034 - DNA, 896 bp, Unknown
  Bacterial polypeptide expressing nucleotide sequence isolated from the Sargasso Sea
aacagttcgtccaattgtatgtgaaactggagtcttagaaagaactcacggctctgctttgtttacaagaggagaaacacaagctcttgtagtttcaactttgggaactggacaagatgaacaaagaattgatgctattgatggtgaatatactgaaaactttatgttgcactacaattttccaccttactctgttggagaagttggaagaattggctcaactagcagaagagaaattggacatggtaaactagcttggagagctattcatcccatgttaccctcaaaagaaaaatttccttatacatatagagtagtatctgaaattacagaatctaatggctctagctctatggcaactgtttgtggtacatctatgtctttaatggacgcaggagtgcccttagaaagaccagtagcaggtatagcgatgggtttaattaaagagaaagataaatatgtaatattatcagatatattaggtgatgaagatcacttaggtgatatggacttcaaagtagctggaacctctgaaggaataacttctttgcaaatggatattaaaataaccagtattacagctgaaattatggaggaagcattagcgcaagctaaagatggacgattccacatactaggtgaaatggctaaagcaattgataaacccaatcaatcaatttcacaatacgcgccaacaataactaatcttcaaataaataaagataaaattagagaggttattggtaagggaggagcagttattagagaaatatctgaaacaactggagctaaaattgaaattaatgatgaaggtttagtgagtattgcagccgtagatcaaaaatctggaaatgatgcattggaatggatcaagggtatagtcgaagagccagaga

SEQ ID NO: 257035 - DNA, 922 bp, Unknown
  Bacterial polypeptide expressing nucleotide sequence isolated from the Sargasso Sea
tgttgctcaggtcatgtcttatgatcctgaagtgcaaacggatgtccctgctattataggtacggcagccgcattggcgttgtcaggcatgcccttcaatggtcccttagctgccgctagagtcggttttaaggatgggcattatttactgaacccgagtctcagtgagatagaaaattctgacctcaatttagttgttgccggaacctctgaagccgttctcatggttgaatcagaagctagtgaactgtctgaacaagtgatgctgggtgctgttttgttcggacatgatcaaatgcaggtggctatcaatgtaattaatgaaatgaaagaagaagccaatgttcaggcctggaattggcaaccaccggttgagaatacagcgctaatgactgcacttaaagaaaaatcgcaaagtcagttacaagccgcgtatgctatttctgataagcaggaacgctatgatgcgctgaatcttgctcggagtcaggctattgaatcgttgtgtgacggtgaggaacactctcctgaagagcgcgaagtcggtaatttacttcatgatttagaggctcaaattgtgcgctcacaaattctcggtgggcatccacgtattgatggtcgagatacagaaaccgtgcgtcctatttcaatcgatgttgggcttttgccgcgcgttcatggatcggttgtgttcacacgtggtgagacacaggccattgttactgctactctgggtacggagcgagatgctaaaatcattgatgatctcgatggtgatagaaaagatccgtttatgctgcattataatttccctcctttctgtgttggcgagacggggatgatgagtggcccaaagcgtcgtgaaattggccatggctggttggctcgaagagccgtgaccgctatactgcccgatatgagt

SEQ ID NO: 257036 - DNA, 930 bp, Unknown
  Bacterial polypeptide expressing nucleotide sequence isolated from the Sargasso Sea
aaagtagcaagacaggcagacggtgcaataatcgcaacatgtggagagacagtcgtactagcaacagtagtgggagcaaagaaagtaaatcctgatatggattactttccattatctgtaaattaccaggaaaaatattatgcagctggaaaaattccaggtggatattttaaaagagaagcaagaccaactgagagcgaaacattaatctctagattaattgacagacctatcagacctttgtttccagatgaatttaaaaatgaagtacagttattaccaacagtaatttcatacgataaagaaaatgagccagatattttatcaatcactgcatcttcagctgcattagctatctcaggaatgccatttatgggacctgtaggagcatcaagggttggatttattgatggaaaatatgttttaaacccatctaaagcagagttagaaaaatcgaaattagatttagttgtagcaggtacaaaagatgctgtgctcatggttgagtctgaagcaagtggtttaacagaagaagaaatgttaaatgcagtaaaatttggacatgaaggatttgttccagtaatcgagatgatagaggaacttgtaaaagaatgcagaaaacctgaatggacagttgagaaaaaagatttatctgaagtgaagaaaaaacttgagaaaacctttacggaagatcttaagaaagcttttgcaacaagagataaacaagatagatcaaatcagatttcagagattactgataaagctaaaaagctttatgaggaagatgaaaactacacagatcttgatgttaacagtcagttaaaaaatcttgaaaaatcaattgttagaacagacattctaaaaaataaaaatagaattgatggcagaggtttatcagatgtaagacctattgaatgtgaagtaggtgtt

SEQ ID NO: 257037 - DNA, 928 bp, Unknown
  Bacterial polypeptide expressing nucleotide sequence isolated from the Sargasso Sea
tataaaacagtgattgaagcaataatttccttagctaaaaaagcggcaaaagaaccttgggaacttaaagaaaaagatgaagaaattaaaaatctaccatctaagatcaacgaagactttggtaaagattttatcgatgcttataaaataactgaaaaacaaaaaagatcagaaaaattatcttcgttacgaaatgaaatttctgaaaaatttgtaagtgaaacactctcaccagtattggtttcagatgcaataaaaaatctagaaaaagatatagttagaggagaattaattaatactggtaatagaattgatggaagagatacaaaaacagtccgtccaattgtgtgtgaaactggagttttagaaagaactcacggttctgcattatttacaagaggagaaactcaagctcttgtagtttcaactttgggaactggacaagacgagcaaagaatagatgcaattgatggagaatatacagagaattttatgcttcattacaattttccaccttactctgttggagaagttggaagaataggttctaccagcagaagagaaataggacatggaaaattagcctggagagctattcacccaatgttaccttctaaagaaaagtttccttacacttatagagttgtatctgaaattacagaatctaatggctctagttctatggcaactgtttgtggtacctcaatgtctttaatggatgcaggagtgcctttagaaagaccagtagcaggtatcgcgatgggcttaattaaagagaatgataaatatgtgatattatcagacatacttggtgatgaagatcatcttggtgatatggattttaaagttgcaggaacttctgaaggaataacttcattacaaatggatattaaaataactagtatcacagctgaaattatggaagaag

SEQ ID NO: 257038 - DNA, 706 bp, Unknown
  Bacterial polypeptide expressing nucleotide sequence isolated from the Sargasso Sea
acagatattcaaggaattgaagactttcttggggacatggacttcaaagttgctggcaccgataaagggataactgctttacaaatggatatgaaaattacaggcttaccagtctctatcatttccgaagcaattaaaaaagctcgacccgcaagaatacatatcttagaaaagatgcaagaggccatagacaagcctcaagaatctttatctcctcacgctccaagactcttaagctttaggattgatcctgaacttataggaactgttattgggcctggaggtagaactataaaaggaattactgaaagaacaaacacaaaaatagatatagaagatggaggaattgtaactattgcttctcacgacggggctgctgcagaagaagctcaaaagataatagaaggattaacacgcaaagttcacgagggtgagatcttctctggtgttgtaactagaataattcctattggagcttttgtagaaatactacctgggaaagaaggtatggtacacatttctcaattatctgaagcaagggttgagagagtggaagatgtagttagacaaggtgatgaagtaactgtgagagtaagagagattgatagcagaggaagaattaatcttactttgagaggagtaggacaaaataatgggatgtcttatccccaaccaaccccaactccagttgctccgcttaattaag

SEQ ID NO: 257039 - DNA, 841 bp, Unknown
  Bacterial polypeptide expressing nucleotide sequence isolated from the Sargasso Sea
ggtgttttgccaagaacgcacggttcagctttatttacaagaggagaaacacaagccttggtaattacaacgctaggtatgtctgatgatgaacaaagacttgaaagtttagatggtatgcaacgatcgagttttatgttgcactataattttccgcctttttcagttggtgagtgcggtagaataggaactggtagaagagaaataggtcatggcaaattggcttggagagctattaactcatcattgcctttaaaagaaaatttcccttatactttaagggtcgtatctgagataacagaatctaacggatcttcctctatggcaacagtgtgtggaacatcattatcacttatggatgctggagtgccaatcaaagaaccggttgctggtatagctatgggtttaattaaagaaggagaaaagttttcggttttatctgatattttaggagatgaggatcatttaggtgatatggattttaaagtagccggaactaaggatggcataacatctttacaaatggatataaagataacaggaattacttttgaaataatggaacaagctttaaaacaagctaaagctggtcgagaacacattttaggtgaaatgaacaaagcaataaaaatatctagaaaagaattttcgaaacacacaccaaagatggaaacaattaaagttgataaaaaagacatagcaacagtaattggaaaaggtggtgcaacaattagagagatagtagaaaaatctggagctaaagttgacgtcaaggacactggagaggtaactgttgccgctcctgatgaaaaatcaagaaactctgctattgagattatta

SEQ ID NO: 257040 - DNA, 926 bp, Unknown
  Bacterial polypeptide expressing nucleotide sequence isolated from the Sargasso Sea
gccagacgaagacagcaccgttcctgcctatctcgagaagcagtgcaccaaggcgatcagcgctgtcctcagcaaatttgatcagagcaaggacgagcgggacacagccctggaaaccgtgaagggcgaggtgtccgagaccatcgcaggtcttaaggacgaccatgccgttcgccaagccctggccagcagcccgaaactgctcggcaacagcttcaaggcgctgaccaagaagttgatgcgtcagcagattctcaaagacggcaagcgtgtggatggacgcggtctcgacgaggtgcgtcagatcagcgccatggccggcgtcctgccgcgccgggtgcatggttctggtctgttccagcgcggactcacccaggtgctctccaccgcaacactgggcacccccagcgatgcccaggagatggacgacctccatcccaacaccgagaagctgtacctgcaccactacaacttccctccctactccgtcggtgaaacgcggccgatgcgctcccccggtcgtcgtgagatcggccatggcgccctggccgaacgcgccattcttccggtgcttcccgaaaaggacaccttcccctacgtggtgcgtgtggtgagcgaagtgctcagctccaatggctccacctcgatgggttccgtctgcggcagcaccctgtcgctgatggacgctggtgtgcctctgaaggcgccggtgagtggcgcagccatgggtctgatcaaagagggcgatgaggtgcggatcctcaccgacatccaaggcatcgaggacttcctcggcgacatggacttcaaggtggccggcagcgagaagggcatcaccgccctgcagatggacatgaagatcaccggtctttcagtgaagaccgtggccgaagccgtcaaccaagcacgtccggcacggctccaca

SEQ ID NO: 257041 - DNA, 811 bp, Unknown
  Bacterial polypeptide expressing nucleotide sequence isolated from the Sargasso Sea
gttgtatgaagaagatgaaaattatacagatcttgatgtaaattctgaacttaaaaatttagaaaaaaggattgtaagaacagatattctaaaaaataaaaatagaattgatggcagaggtcttgcggatgtaagaccaatcatgtgtgaagttggaattcttccaagagtacacggctctgctttgtttactcgaggagaaactcaagcaatagttacaactacactgggcacatctgatgatgagcagaaaatagaaagtctcgacggattacaaaaagaaagatttatgcttcattataattttccgcctttctctgttggagaaactggaagaataggtactggaagaagagaaataggccatgggaaattagcttggagagcaataaactcatctttgccttcaaaggaaagttttccatatacattcagaattgtatcagagataaccgagtcaaatggctcttcatctatggcaactgtttgtggttcttctttagcattaatggatgcaggcgtaccaattaaagagcctgttgctggtattgcaatgggattaattaaagaaggagaagaatttagcgttctttcagatattttaggagatgaagatcacctaggtgatatggactttaaagttgctggaactaaagacggaataacatctcttcaaatggatattaaaattacaggaataacatttgaaattatggagcaagctctaaaacaggcaaaagatggaagaattcatatcttaggcgaaatgaacaaagctttatccaaatcaagagaagatgttggaaaacat

SEQ ID NO: 257042 - DNA, 751 bp, Unknown
  Bacterial polypeptide expressing nucleotide sequence isolated from the Sargasso Sea
aatctagagaagaaaattgttagaactgatattcttaaaaataaaaacagaattgatggtagaggattatctgatgtaagacctatcgaatgtgaagttggtgttttaccaagaactcacggttctgctttgtttacgagaggagaaacacaagcaattgttgtaaccactttaggtacatctgatgatgaacaaaggattgaaagtttagatggtcttcaaagagaacgatttatgcttcactataattttccccctttttcagtcggtgaaactggaagaattggaactggtagacgtgaaattggtcacggtaaacttgcttggagagcaatcaattcttcattaccttcaaaagaggcatttccatatacttttagaatagtatcagagattactgaatctaatggttcttcttcaatggctactgtttgtggagcatctttagcattaatggatgcaggtgttccgataaaagaaccagttgcaggtattgcaatgggattaattaaagagggagatgattttagtgttttatcagatattttaggtgatgaagatcacttaggagacatggactttaaagttgctggaactaaagatggaattacttcacttcaaatggatatcaaaattactggtatcacttttgaaatcatggagcaggctttaaagcaggctaaagatggaagaattcatatcttaggtgaaatgaacaaagccttaggcgaatctagatctgatgttggaa

SEQ ID NO: 257043 - DNA, 862 bp, Unknown
  Bacterial polypeptide expressing nucleotide sequence isolated from the Sargasso Sea
gagtctgaagcgaatggtttatcagaagaagaaatgttgaatgcagttaaatttggacatgaaggattcgttccagtgatagaaatgatagaggaacttgcaaaagaatgcagaaagcctgagtggattgttgagaaaaaagatttatctgaagtgaaacaaaaacttgaggaaacttttacagaggacttaaagaaagcttttgccacaagagataagcaagatagatcaaatcaaatttcagagattactgaaaaagctaaaaaactttatgaagaaaatgaaaattattctgatctagatgttaatgtagagcttaaaaatcttgaaaaatctatagttagaacagacattcttaaaaataaaaatagaattgatggtagaggtttatcagatgtaagacccatctcatgtgaagttggtattttaccaagaactcatggctctgcattgtttacaagaggagagacgcaagcaattgttgttactacattaggtacatctgatgatgaacaaagattagaaagtttagatggacaacaaagagaaagatttatgcttcattataattttcctccattctcagttggtgaaactggaagaattggaactggaagacgtgaaattggacatgggaaacttgcttggagagcaattaattcctcattaccatcaaaggaaagttttccttatacttttagaatagtatctgaaattaccgagtccaatggttcatcttcaatggcaactgtttgcggaacttctttagcattaatggatgctggcgttccaattaaagagccagttgctggtattgcaatgggtttaataaaagagggaaatgattttagtgtatttccga

SEQ ID NO: 257044 - DNA, 807 bp, Unknown
  Bacterial polypeptide expressing nucleotide sequence isolated from the Sargasso Sea
acagttgttttagctacagttgttggggcaaagaaagtaaatccagatatggattattttccattgtcagtcaattaccaagagaaatattatgcagctggtaaaattccaggaggatattttaaaagggaagcaagaccaactgaaagtgaaactttagtttcaagattaattgatagacctatcagaccattgtttccagatgaatttaaaaacgaagtacaactattaccaacagtaatatcttatgataaagagaatgaagcagatattttatctattattgcatcttcagctgccttagcaatctcaggaatgccttttatgggtcccgtgggtgcttctagagttggctttattgaaggaaaatacgtcctcaatccatcaaagaccgaattagagaaatctaaactagatttagtagtagcaggaactaaagatgccgttttaatggttgagtctgaggcgaatggtttaacagaggaagaaatgttgaatgctgttaaatttggacatgaaggttttgttccaataatagaaatgattgaagatcttgctaatgaatgtaaaaaaccagaatggacagttgagaaaaaagatctttctgagattaaaaagaaattggaggaagaatttactgaagatttgaaaaaagctttttctacaagagataagcaagatagatcaaatcaaatttctgaaattactgaaaaagctaaaaagatttatgaagaaaatgaggcttacactgatttagatattaactctcaacttaaaaatttggaaaaatccatcgtaagaaatgac

SEQ ID NO: 257045 - DNA, 886 bp, Unknown
  Bacterial polypeptide expressing nucleotide sequence isolated from the Sargasso Sea
atgttgaatgctgtaaaatttggtcacgaaggtttcgttccaataatagaaatgatagaagatcttgcaaaagaatgtagaaaaccagaatggacagttgagaaaaaagatctttctgaaattaaaaaaaaattggaggaagaatttactgaagatttgaaaaaagctttttctacaagagataagcaagatagatcaaatcaaatttctgaaattactgaaaaagctaaaaagctttatgaagaaaatgaaacttacactgatttagatgtaaactctcaacttaaaaatttagaaaaatccattgtaagaactgatattcttaaaaacaaaaatcgtattgatggaagaggtctagctgatgtaagaccaattatgtgtgaagtcggaattttacctagagttcatggttcagctttgtttacaagaggtgaaacacaagccattgtaacaactacacttggaacttcagatgatgagcaaagaattgaaagtttagatggattacaaaaggaaagatttatgttgcattataactttcctccattctctgttggtgaaactggtagaattggaacaggtagaagagagataggtcatggtaagttagcatggagagcaattaactcctcacttccatcaaaagaaagttttccctatacatttaggattgtatcagaaataactgagtccaacggttcatcttcaatggcaactgtttgtggaacttcacttgctcttatggatgcaggtgtaccaataaaagagccagttgctggaattgcaatgggtttaattaaagagggtgatgatttctctgtgttatcagatattcttggtgatgaagaccacctcggagatatggattttaaagttgcaggtacaa

SEQ ID NO: 257046 - DNA, 771 bp, Unknown
  Bacterial polypeptide expressing nucleotide sequence isolated from the Sargasso Sea
aatcaaatctcagagataactgataaagcaaagaaactttatgaagaagatgaaaattacacagatcttgatgtaaacagtcaattaaaaaatctcgaaaagtctattgtaagaactgacattcttaaaaacaaaaataggattgatggaagaggattatctgatgttagatctatttcttgtgaagttggtgttttgccaagaactcacggctcagcattgttcactagaggagaaacacaagcaattgtagttgccactttaggtacttcagatgatgaacagagactagaaagtttagatggtcagcatagagaaagatttatgcttcactacaatttcccccctttttcagttggtgaaactggaagaattggaactggaagacgtgagattggtcatggcaaattagcttggagagcaattaactcttcacttccttcaaaagaagcatttccatatacttttagaatagtatcagaaattacagaatctaatggttcctcctctatggctactgtttgtggtacatctttagcattaatggacgcaggggtgccaatcaaagaaccggtagcaggtattgccatgggtttaattaaagaaggagatgattttagtgtcctatcagatattttgggcgatgaagatcacttaggagatatggattttaaagttgctggaactaaagatggaattacctcacttcaaatggatattaaaattaccggtattacttttgaaattatggaacaggcattaagccaagct

SEQ ID NO: 257047 - DNA, 856 bp, Unknown
  Bacterial polypeptide expressing nucleotide sequence isolated from the Sargasso Sea
aaaacaaagtagatctgaaaaactaacttctattagatctgatatagcagataaatttacttcagatacactttcatctgttttaatatctgatgcaataaaaaatgttgaaaaagatatagtaagaagcgaactattgagtactggaaacagaattgacggtagagataccaaaacagtaagaccaatagtatgtgaaacaggaatattagaacgtacccatggttctgctttgtttacaaggggtgaaacgcaagcattagtggtatcaacattaggtacaggtcaggatgaacaaagaattgatgctatagatggagaatatactgaaaattttatgttacactataattttcctccatattctgttggtgaggttgggagaatgggctcaactggtagaagagaaataggtcatggtaaactagcttggagagctatacacccaatgttaccatctaaagaaaaatttccttatacttatagagttgtatctgagattacagagtcaaatggttcaagttcaatggcaacagtatgtggcacatcaatgtctttaatggatgcaggtgtaccaatagaaagacctgtcgcaggtatagctatgggccttattaaagaacaagataagtatgtgattctatctgatattttgggtgatgaggatcatttaggagatatggattttaaagtcgctggaacatcagaaggtattacttctcttcaaatggacattaaaatcacaagtattactgcagaaattatgaaagaagctttggctcaagctaaagaaggacgttttcatattttagatgaaatggcaaaagcaattaataaaccaaataaatcaatctca

SEQ ID NO: 257048 - DNA, 793 bp, Unknown
  Bacterial polypeptide expressing nucleotide sequence isolated from the Sargasso Sea
atagagagtttagatggtcttcaaaaggaaagatttatgttgcactataactttcctccattctcagttggggaaacaggaaggattggaacaggtagaagagaaataggtcatggtaaattagcatggagagcaattaactcttcactcccatcaaaggaaagttttccatatacatttaggattgtatctgaaatcactgagtctaacggttcatcttcaatggcaactgtttgtggaacttcacttgctcttatggatgcaggtgttccgattaaagaacctgttgctggaattgcaatgggtttaataaaagaaggtgaggatttctctgtactatcagatattcttggtgatgaagaccaccttggagatatggattttaaagttgcagggactaaagatgggatcacatcattacaaatggatattaagattacaggaattacatttgaaataatggagcaggcattaaatcaagcaaaagatggtagaattcatattttgggtgaaatgaataaagcattagacaaatctagagacgaagttggaaaacatactccaaaaatggaaaagatttctgttgataaaaaagatatcgcggcagttattggaaaaggtggagcaacaattagagagattgttgaaaaatctggcgctaaagttgatgtaaatgacgagggtgtagttacagtcgctgctccagacgaagagtcaagaaatattgctatgcaaatgattaaagacatcacagctaaagctgaattaaataaaatttataatggaaaagtta

SEQ ID NO: 257049 - DNA, 888 bp, Unknown
  Bacterial polypeptide expressing nucleotide sequence isolated from the Sargasso Sea
tttcccactgactgtaagttatcaagaaaaattttatgctgccggaaaaatcccaggaggtttttttaagcgagaaggaagacctacggaatttgaaactttaacatcacgtctaattgataggcccataaggcccttatttcctgagggttttaaaaacgaaactcaagttatactaactgtattatcacacgacactgaaacaaatcccgatatagttgcaatgatagctgcttctagtgctttaactttgtctggcatacccttcatgggaccaattggtggatgcagagttggttatgatggagaaaattatattttaaatccaaaaattaatgaagaaactcaattagatcttgttgtatctggaactcaagatgcagtcttaatggtagagtctgaagctaaagagctatccgaggaaatcatgttaggcgcagttaaatttggtcacgagtcaatgcaggaggtcataaaaatgatcattaaccttgctgaggagtgcgctaaggacccatgggaatttgaatacagtgttaatgatgagttgatgaaagagttgaaaaatgaatatgaagatcaaataagaaaaagttattcaattgttgataagatagaaagacaaaactctctaaacgagatcaaatctactttagaagaaaaatatactgaaaatgagaatcaaaatataaatgatgtaatgtcatactttaaaaaaattgaaaaagatgtagtcaggtctcaaattttgagagataaatctagaattgatggacgtaaacttgacgaagtaagaaatattacatcagaagtttcatggctgccaagaacacatggatcatctttatttactagaggtgaaaacacagcaatagttgttgcaactct

SEQ ID NO: 257050 - DNA, 739 bp, Unknown
  Bacterial polypeptide expressing nucleotide sequence isolated from the Sargasso Sea
aatgttcgctgaagatgaaaatgtttctgaaaatcaagtaatgggtcagcttaaatctttagaaaaggatattgtaaggaccgcaattttgaaagaaaagaaaagaattgatggaagaggtcttgcagacgtgagacagattaagtgtgaagttggtgttttaccaagaactcatggctctgcccttttcactagaggtgaaacgcaagcccttgtagtaactacacttggaatgtcagatgatgagcaaaggctagaaagtctagaaggtatgcaaaaatcaaactttatgttgcactataacttccctccattttctgttggagaatgtggaagaatcggaactggtagaagagaaattggtcacggaaaactcgcttggagggcaataaactcatcattgcccgcaaaagaaaattttccatacacacttagagtggtttcagaaataacagaatctaacggatcttcatcaatggcaacagtttgtggtacctccttatctttgatggatgctggagttccaattaaagagccagttgccggaattgctatgggattaattaaagaaggtgaagatttttcagtcctctctgacattttgggagatgaagatcacctaggagatatggattttaaagtcgctggtacaaaagatggtattacttcacttccaatggatattaagattacaggtattacatttgaaattatggaaaaagcattagggcaaagctaa

SEQ ID NO: 257051 - DNA, 724 bp, Unknown
  Bacterial polypeptide expressing nucleotide sequence isolated from the Sargasso Sea
aaagttgctaaacaagcaacagcttcaacaattgtaagatgtggagatacagtcgttatgtgtaatgttacagcggctaagcaggcaaagcccgacattgattttttcccacttacagtaaattatcaagaaaaatactatgcagcaggaaaaatacctggaggcttttttaaaagagaagcaagaccaacagaggcggaaacattagtttcaagattaattgatagacccattcgaccattatttcctgaaggtttcaagaatgaaacccaagttatattaactgtactatcacatgatactgaaactaatgcagatatagttgcaatggtagcagcttccagtgcattaaccatatcaggtatacctttcatgggtccaatctcaggatgtagagttggctataaagatagtgaatatttgcttaacccaaaaatgaacgaggaatcagatttagatctagttgttgcaggaactaattcagctgtcctaatggttgaatctgaggctaatcaactttcagaagaagtcatgcttggtgctgtgacttttggtcatgaagcaatgaaaccagtaattgatatgataattgatcttgcagaagagtgtgcaaaagaaccttgggaatttgagtacatagaaaatactcaaataaaggaaattgttaaatcagagtgttctgacgatatcgcaaacgcttatgctttaactgataaaatggaaa

SEQ ID NO: 257052 - DNA, 362 bp, Unknown
  Bacterial polypeptide expressing nucleotide sequence isolated from the Sargasso Sea
tttaatttcaagattaattgatagaccaataagaccattatttccagaaagttttaaaaatgaagttcaacttttaccaactgttctatcttatgataatgaaaatgaagcagatattttatcaataattgcctcatcagcagctctatcaatatctggattaccatttaaaggtccagtaggtgcatcaagagtaggatttattgatggtaaatgtgttcttaatccaacaaagaaagaattagaaaattctaaattagatttagttgttgcaggaactaaagatgctgttctaatggttgagtcagaagcatcagggcttaccgaaaaagaaatgttagacgcggttaaatttggtcatg

SEQ ID NO: 257053 - DNA, 743 bp, Unknown
  Bacterial polypeptide expressing nucleotide sequence isolated from the Sargasso Sea
gagatagggcatggcaaactcgcaaggagagctttagaggcggttttaccatcacctgatgactttccttacacaataagagtggtatctgaaataacagagtctaatggctccagctcaatggcgagtgtttgtggttcaagtcttgcactcatggatgcaggtatccctcttaaggccgcggtggctggtatagctatgggattggttaaagaagaagaaggattcgcagttattactgatatcttaggtgatgaagatcatcttggtgatatggactttaaagttgcaggaacttcagaaggaataaccgcccttcaaatggatatcaaaatagacggaattactgaagaaatattcgaagttgctttagagaaagcacataccgcgaggaatcatatactctccagtatgaatgaagtaatttcctcttctagggaacagctatctgaaaaagcacctcaagctgttgttgtgcagattaatactaaaaagatacgtgatgttataggtaaaggtggcgaaacaattagaggacttactgaagaaactggcgcaattattgaggtagaagacagcggtaaagtaactatttatggagatactccagaatcccgagagtctgctcaaaaaagaattgaggaaattactgctgaaccagaggtgaataagatctacacaggtactgtagcaaatatcaaggatttcggtgcttttgtgacaattatgcccggaagagatgg

SEQ ID NO: 257054 - DNA, 831 bp, Unknown
  Bacterial polypeptide expressing nucleotide sequence isolated from the Sargasso Sea
tctgcattatttactagaggtgagacgcaagcaattgtcgttgcaactttaggaacatctgatgatgaacaaagaattgaaagtttagatggacttcagagagaacgatttatgcttcactataattttcctcctttttcagttggagaaactggaagaattggaactggtagaagagaaattggacatggtaaattagcttggagagcaatcaactcttcattaccaacaaaagaagcatttccctatacttttagagtagtttcagagattacagagtctaatggttcttcttcaatggctactgtttgtggaacttctttagcattaatggatgcgggagtaccaataaaagagccagttgctggtattgcaatgggattaattaaagaaggtgatgatttcagcgtcctttcagacatcctaggtgatgaagatcatcttggtgatatggactttaaagttgctgggactaaagatggaattacttctcttcaaatggatatcaaaattacaggtattacatttgaaatcatggagcaggcattgagccaagctaaagatggaagagttcatatcttaggtgaaatgaataaagcattgtcagcttcaagatctgatgttggaaaacacactccaaaaatggaacaagttaatgttgataaaaaagacattgctgctgtcattggaaaaggtggtgcaacaattagagagatagttgaaaaatcaggtgcgaaagtagatgtaaatgacgaaggtgtggtaacagttgctgctccagatgaagagtctagaaacattgcaatgcagatgattaaagacataactgca

SEQ ID NO: 257055 - DNA, 772 bp, Unknown
  Bacterial polypeptide expressing nucleotide sequence isolated from the Sargasso Sea
tcggttggtgaaactggacgaattggtactggaagaagagaaattggacatggaaagcttgcgtggagagcaataaattcatctttaccgtcaaaagaaagtttcccttatacatttagaatagtatcagaaattacagagtctaatggttcatcgtcaatggcaacagtttgtggaacttcactagcattaatggacgctggtgttccaataaaagaacctgttgcaggtattgctatgggtttaattaaagagggtgatgattttagtgtactgtcagatattctaggagatgaggatcacctaggtgatatggattttaaagttgcaggaactaaagatggaattacatctcttcaaatggatattaagattacaggaattacatttgaaataatggaacaagctttaaaacaagctaaagacggaagaattcatatattgggagaaatgaataaagctttagataaatcaagagatggtgttggtaaacacactccaaagatggaaaaaattactgtagataaaaaagatattgctactgtaattggaaaaggtggtgcaacaataagagagatagttgaaaaatcaggtgcgaaagttgatgtaaacgacgaaggagttgtaacagtcgctgcaccagatgaagagtctcgaaatatcgctttacagtttattaaagatcttactgccaaagctgaattgaataaaatttataatggtaaagttatgaagattatggaatttggagcatttgttaactttctcggaa

SEQ ID NO: 257056 - DNA, 850 bp, Unknown
  Bacterial polypeptide expressing nucleotide sequence isolated from the Sargasso Sea
catgttgcattacaattttccaccattttcagttggagaatgtggaagaataggaaccggcagaagagaaattggacatggaaaattagcatggagagctattagttcttcattaccaaagaaagaaaattttccttatacattaagagttgtttccgaaataactgagtcaaacggatcatcttccatggctacggtatgtggaacgtcattatctcttatggatgcaggagttccaatcaaagaaccggttgccggaattgcaatgggcttgattaaagaaggcaaagatttttcagttctttcagacattttaggagatgaagatcatttaggtgatatggattttaaagtagcgggcactaaaaatggaataacatcacttcaaatggatattaagattacaggcatcacatttgaaattatggaaaaagctttagagcaagcaaaagcaggcagagagcatattttgggagaaatgaacaaagctttaaaatcttcaagaaaagaattctcaaaacacacaccaaaaatggaagtgatccaagttgataaaaaagatatagcaaccgttataggcaaaggtggagcaactataagagagattgtagaaacatctggagccaaagtagacgttaaagatacaggagaagtaactgttgctgctccagacgaagagtctagaaaaaaagccttagaatttatcaaaagtttagttgccaaaccagaggtgggaaaaatttataaaggtaaagtagtcaagataatggagtttggtgctttcgtaaactttttaggaaaacaagatggtttagttcatatatcagagctagcaggaaaaagagtagcc

SEQ ID NO: 257057 - DNA, 857 bp, Unknown
  Bacterial polypeptide expressing nucleotide sequence isolated from the Sargasso Sea
agatggaagaggtttggctgatgtaagacagattaaatgtgaagttggagttttacctagaactcacggatcagcactttttactagaggggaaacccaagctcttgtagttacaactcttggaatggctgacgatgaacaaagactagaaagcttagagggtatgcaaaggtcaaatttcatgttgcactataatttccctccgttttctgtgggtgagtgtggaagaataggtacgggcagaagagaaataggacatggtaaactcgcttggcgtgcgataaattcttgtttgccaaaaaaagagaattttccttatacattaagagtagtttcagaaataacagaatcaaatggttcctcttcaatggctacggtttgtggaacatctttatcattaatggatgcgggagttccgattaaagagcctgtagctgggatagcgatgggattaataaaagaaggagaggatttttcagtgctttcagatattttaggagatgaagatcatttaggagatatggattttaaagtagctggaactaaaaatggtattacatcgcttcaaatggatattaaaattactggaattacttttgagattatggaaaaagctttagaacaagcaaaaagcggaagagagcatatcttaggtgagatgaacaaagctattcaaacttcaagaaaagagttttcaaagcacactccaaaaatagaaacaatcaaagtagacaaaaaagacattgccactgtaattggcaaaggtggagcgactattagagaaatcgttgaaacatcgggagctaaagtcgatgttaaagatactggtgaagtaacagtagctgcacccagatgaa

SEQ ID NO: 257058 - DNA, 829 bp, Unknown
  Bacterial polypeptide expressing nucleotide sequence isolated from the Sargasso Sea
tgtagctactttaggtacatcagatgatgaacaaaaaattgaaagtttagatggacttaaaagagaaagatttatgcttcactataattttcctcctttttcagttggtgaaacaggaagaattggaacaggtagacgagagattggccatggaaagttagcatggagagcaattaattcttcattacctacaaaagaagcatttccatatacttttagagtagtttcagagatcacagagtccaatgggtcttcttcaatggcaactgtttgtggaacttcacttgctttaatggatgctggtgtgcctattaaagaaccagttgcaggtattgcaatgggtttaattaaagaaggcgatgattttagtgtattgtctgatatattaggtgacgaagaccatttaggagatatggattttaaagttgctggaaccaaagatggaatcacatcacttcaaatggatattaaaattactggtattacatttgaaatcatggagcaggcattaagccaagctaaagatggaagaattcatatcttaggggaaatgaataaagcattatctacttcaagatctgatgttggaaaacacactccaaaaatggagcaagttaatgttgataaaaaagatatagctgctgtaattggaaaaggtggagctaccattagagagattgttgaaaaatcaggtgcaaaagtagatgttaatgatgaaggggtcgtaactgttgcagctccggatgaagagtctagaagtgttgcatttgcaatgatcaaagatatcactgccaaagctgaattaaataaatttattcaagcaaagtaa

SEQ ID NO: 257059 - DNA, 481 bp, Unknown
  Bacterial polypeptide expressing nucleotide sequence isolated from the Sargasso Sea
agaaatcggccatggagcattagctgaaagagcaataataccagtgctgcctgggaaagaaacatttccttatgttttaagggtagtaagtgaagttttaagttctaacggatcaacttcaatgggttcagtatgtggaagcacgctttcattattagatgcaggagttcctctaaaagcaccagtgagtggtactgctatgggcttaatcaaagaagggaaagaagttcgaattcttacagatattcaaggaattgaagactttctcggagacatggattttaaggttgcaggtacggataaaggaattactgcgttacaaatggatatgaaaattacgggtttaccagtctctattatttctgatgcaattaaaaaagctcgacctgcaagattacatatcttagaaaagatgcaagcggcaatagataaacctcaagaatccctgtctccgcacgctccaaaacttttaagctttaga

SEQ ID NO: 257060 - DNA, 847 bp, Unknown
  Bacterial polypeptide expressing nucleotide sequence isolated from the Sargasso Sea
aatttcagaaatcactgataaagctaaaaagctttatgaagaagatgaaaatattacagaacttgatgtaaatgctgagcttaaaaatcttgaaaaatctattgttagaactgatattcttaaaaataaaaacagaattgatggaagaggtttatccgatgtaagacctatctcatgtgaagttggtgttttaccaagagtacatggttcagctttgtttactagaggagaaactcaagcaattgtgactgctactttaggtacatctgatgatgaacaaagaattgagagcttagatggattacagagacaaaggtttatgcttcactacaactttcctcctttctcagttggagaaaccggaaggataggaactggtagaagagaaataggtcatggaaaattagcatggagagcaattcactcttcattaccatcaaaagaggcatttccttacacctttagagtagtatccgagattacagagtctaatggttcatcctcaatggctacagtttgtggaacttcacttgcattaatggacgcaggggtgccgattaaagaaccagtcgcaggtattgcaatgggattaattaaagagggtgatgattttagtgtcctgtcagatattttaggtgatgaagatcatttaggagatatggactttaaagttgcaggaactaaagatggaattacttcacttcaaatggatattaaaattactgggattacatttgaaattatggagcaagcattaagtcaagccaaagatggaagagttcatattataggagaaatgaataaagcattatcagcctcaagatctgaagttgaaaacatactccaa

SEQ ID NO: 257061 - DNA, 808 bp, Unknown
  Bacterial polypeptide expressing nucleotide sequence isolated from the Sargasso Sea
gtgcgagtagtttctgagattacggaatccaatggctctagctcaatggcaactgtatgtggaacttctctttccttgatggatgctggagtgcctctaacagctcctgttgctggaattgcgatgggcttaatcaaagatggcgatgagtttgcagttttaacagatatcttaggagacgaagatcatttgggagatatggattttaaagttgctggatctgaaaaaggaataacagcattacagatggacataaaaattgatggcattaatgaaaaaataatggatgaagctcttacaagcgcaaaagaagcaagaatgcatattcttgaaaagatgaatgaagttctttctaagccaaaagatctagcctcagatgctccatccatgcaaaaatttatggtcaataaagacaagatcaaagaaataattggaaagggtggttcagtcattaagtctatccaagaagagtctggagctgtagtggatataaatgatactggtgaaatatcagtgtttggtgataaccaggcaaagatgcaggcagcacttgatattattgacaaaattattgaagagcctgaagtagataaagtatacgaaggaacagttgtgaagatagtcgactttggagcattcgtaaatattttacctggtaaagatggattgcttcatatttcagagatctctgaagagagaactgaggatgtttcagctgttctagaagaaggacagaaagttacagttaagcttatcggttttgataggggaaaaatgaaactttcaattaaagctcttagtaaataaa

SEQ ID NO: 257062 - DNA, 820 bp, Unknown
  Bacterial polypeptide expressing nucleotide sequence isolated from the Sargasso Sea
acaggaagaagagaaattggtcatggaaaacttgcttggagagcgattaattcatctttgccttcaaaagaaagtttcccttacacatttaggattgtatcagaaataactgagtctaatggctcatcatcaatggcaacagtttgtggaacttcattagcattaatggatgcaggtgttccaataaaagaaccggttgcaggtattgccatgggattaattaaagaaggtgacgattttagtgtattatcagacattcttggagatgaagatcatttgggcgatatggactttaaagttgctggtacaaaagatggaattacatctcttcaaatggacattaagataacaggaattacttttgaaataatggaacaagctttaaaacaagcgaaggacggtagaattcatatcttaggtgaaatgaataaagctctaaataaatcaagagatggtgttggtaaacacactccaaagatggaaaaaataactgtagataaaaaagatattgctacggttattggaaaaggaggtgcaacaataagagaaatagttgaaaaatcaggcgctaaagtagatgttaatgatgaaggaattgtaacagttgcagcgccagatgaagaatctagaaatattgcacttcaatttatcaaagatcttactgctaaagctgaattaaataaaatttataacggaaaagttatgaaaattatggattttggagcatttgttaactttcttggaaaacaagatggtctagttcatatttctgaacttgcagataaaagagttgctaaagtaactgatgtagtcaaagaag

SEQ ID NO: 257063 - DNA, 746 bp, Unknown
  Bacterial polypeptide expressing nucleotide sequence isolated from the Sargasso Sea
aatggattacttcccattatctgtaaattaccaagaaaagtattatgcagctggaaaaattccaggtggatattttaaaagagaagcaagaccaaccgaaagtgaaacattaatctctagattaattgacaggccaatcagacctttgtttccagatgaatttaaaaatgaagttcaattgttacccactgtaatttcatatgataaagaaaatgaaccagatattttatcaatcactgcttcatctgcagcattagctatatctggaatgccatttatgggtcctgttggcgcttctagagtgggatttatcgatggaaaatatgttttaaatccatctaaatcagaattagaaaaatcaaaactagatttagttgttgcaggtacaaaagatgcagtacttatggttgaatctgaagctaatggtttaacagaagaagaaatgttaagtgcagttaaatttggtcatgaaggctttgttccagttattgaaatgatagaggaacttgcaaaagaatgtagtaaacctgagtggactgttgaaaaaaaagatctatctgaagtcaagaaaaaacttgaagaaacttttacagaagatcttaaaaaagcttttgcaacaagagacaaacaagacagatcaaatcaaatttctgaaataactgataaagctaagaagttatatgaagaagatgaaaattatactgatcttgatgtaaatagtcagttaaagagtctagaaaaatcaa

SEQ ID NO: 257064 - DNA, 866 bp, Unknown
  Bacterial polypeptide expressing nucleotide sequence isolated from the Sargasso Sea
gttgaaaaaaaagatttattctgaaattaaacaaaaacttgaagaaacttttacagaggatttaaagaaagcttttgctacaagagataaacaagatagatcaaatcaaatttcagagatcacagataaagctaaaaaactttacgaagaaaatgaaaattattctgatctagacatcaatacagaacttaaaaatcttgaaaaatctatagttagaacagacattcttaaaaataaaagtagaattgatggtagaggtttatcagatgtaagacctatttcgtgtgaagttggcattttaccaagagcccatggttctgcattgtttactagaggagaaactcaagcaattgttgttactactttgggtacttctgacgatgaacaaagattagaaagtttagatggacaacaaagagaaagatttatgctacattataattttccacctttctcagttggagaaactggaagaattggaactggaagacgtgaaattggacatggtaaacttgcatggagagcgattaattcttcacttccttcaaaagaaagttttccttacacttttagaatagtatctgagataaccgagtctaatggttcttcttcaatggcaactgtttgtggcacttctttagcattaatggatgctggtgttccaattaaagaaccagttgcaggtattgcaatgggtttaattaaagaaggtgatgactttagtgtattatctgacattctaggtgacgaagatcatctaggtgatatggattttaaagttgctggaactaaaaatggaattacatctcttcaaatggatatcaaaattacaggtattacttttgaaattatggaacaagctttaa

SEQ ID NO: 257065 - DNA, 921 bp, Unknown
  Bacterial polypeptide expressing nucleotide sequence isolated from the Sargasso Sea
gagcgggttaacagagaaagaaatgttaaatgcagtaaaattcggtcatgaaggatttgttccagtgattaaaatgatagaggaactggctaaagaatgtagaaaacctgagtggactgttgaaaagaaagatttatctgaggtaaagaaaaaactcgaggaaacttttaccacagatcttaaaaaagcattcacgacaagagacaaacaagacagatcaaatcaaatttcagaaattactgataaagcaaaaaaactttatgaagaagatgaaaactatacagatcttgatgtaaattctgaactaaaaaatcttgaaaaaacaatagtcagaacagatattttaaaaaataaaaatagaattgatggtaggggtttgtctgatgtaaggccaatctcatgtgaggttggtgttttgccaagaacacatggctctgctttgtttaccagaggcgaaacgcaagcaatcgtaactgccacattaggtacatctgatgatgagcaaagaattgaaagcttagatggtttgcaaagagaaaggtttatgcttcattataatttcccacctttttctgttggtgagacaggcagaataggaactggtagaagagagataggtcatggtaaattagcatggagagcaattcactcttcattaccttcgaaagagtcatttccttatacttttagagtagtatcagaaataacagagtctaacggttcatcatcaatggctactgtttgtggaacttcacttgcactaatggatgcaggagtgccgataaaagaacctgttgcaggtattgcaatgggcctaatcaaagagggtgatgattttagcgtgctatcggatattttgggcgatgaagatcatttaggcgacatggacttcaaagtagctggaactaaagatggaattac

SEQ ID NO: 257066 - DNA, 886 bp, Unknown
  Bacterial polypeptide expressing nucleotide sequence isolated from the Sargasso Sea
caagcaatagttacaactactctaggaacttctgatgatgaacaaaggattgaaagtttagatggacttcaaagagaaagatttatgcttcattacaatttccctccgttttctgttggagagacaggcagaattggtactggtagaagagaaatagggcatggaaaattagcttggagagccatcaaatcttcattaccttctaaagaaagcttcccttatacttttagaatagtttctgaaattactgagtcgaatggatcatcctcaatggcaacagtttgtggctcatcacttgctttaatggatgcaggagttccaattaaagagcctgtagcaggtatagcaatgggtttaattaaagagggtgatgatttcagtgtactctcggatatacttggagacgaagaccatcttggagatatggattttaaagtagctggaaccaaagatggtattacatctcttcagatggatatcaagataactggaattactttcgaaattatggaacaagcattgaagcaagcaaaagatggaagagttcacattttaggtgagatgaataaagctttagctaagtcaagaagtggcgttggtaaacacacgccaaaaatggaaaaaataacagttgataaaaaagatatagcaactgtcatcggtaagggtggagccacaataagagaaattgttgaaaaatcaggagctaaagtagatgtgaatgatgaaggggtagtaactgtagcagcaccagatgaagattctagaaacaaagctatgcaaatgattaaagatttaacagctaaagccgaacttaataaaatttataacggtaaagttatgaaaattatggagtttggagcatttgtaaatttcttaggcaaac

SEQ ID NO: 257067 - DNA, 838 bp, Unknown
  Bacterial polypeptide expressing nucleotide sequence isolated from the Sargasso Sea
agtaggatacattgataaaaaatttgttcttaatccatctaaatctaaacttgaaaattctgatttagatttagttgttgcaggtacaaaagatggagttttaatggttgagtcagaagtaaaagaattgcccgaaaaaataatgttagatgctgttatgtttgcacataaagaatttcaagatgtaattaaatttattgaaacttttgcaaaaggaaaaaaagtatctgaaatagaatataaaaacgagaatggagataaaaattcaaaagatctatttagtaaaattgaaaaaaaatataaaaatgattttattaatgcatataaagaaaaagataaagcaattagatcagatgctttgttaggaattagaaaaaatattactgaagaatttattgtagaagataatgatgagataacagaaaatttggtttcgtctgcaacaaaaaaagtagaaaaagaattagtaagatcaagtattttaaaatctgggaaaagaattgatggaagagatactaaaactgtcagaccgattaaagccgaggtcggagttctttccagagttcacggaagcgctctttttacaagaggagaaacccaagcactggtagtgactacattaggtacaagtttagacgaacaaattatagatgacttagaaggtgagtttaaagaaagttttatgctacattataattttccaccttattcagttggagaagctaatatgcttagaccacctggcagacgtgaaattggtcatggtaaattagcatggagagcaattaaaccacttatgccaattaaagataaatttccatatacaatcagagtagtt

SEQ ID NO: 257068 - DNA, 988 bp, Unknown
  Bacterial polypeptide expressing nucleotide sequence isolated from the Sargasso Sea
gaaagaaaagataaaatttgtatgattgagggtggatctaaattttgtttcgggaaaaaacaatttttagaagcattagatgtagcaatggatggaattaacgacattgttgatcttcaaatggagttttcagaacattttgataactcttatgaagttattgatacaaaagttataactgaagatgttgaaaagtctttagatgatgcttacttatcaaaaatggaaaaaatatttgatttggataccaaacaagcaagagacgatgaatttaatgcaattgaaaaagaagcattagaaccatatcttgaagatgaggaaatgtatcctgaagttaaaaatcatattaaaaacatgttcaaaaacacagttagaaaaactgttttagataaaaaagttagagttgatggaagaggattggaagatattagagatatcagtgttgtagaatctatccttccaagagtacatggatctgcattgtttactcgtggggaaactcagtctattgctgctttaaccctagggtctagtagagatgagcaaattattgattcaatggctagtgattacaaaaaatcattcttattgcattataactttcctccatattgtgtaggagaagttggaagaattggttttactaatagacgtgaaattggtcatggttatttagctgaaagatcgctaaaacctatattgccatcttcagatgaatttccatatacagttcgtattgtatctgaaattaccgaatcaaacggttcttcctcgatggcatctgtttgtggcggttcattagcaatgatgaatgctggtgttcctataaaagaacatgtggcaggtattgctatgggtttaatcatggaagatgatgataattacgcagttttaagtgacatcttaggtactgaagactttcttggagacatggatttcaaggtagctggtacaaaagatggaattagtgcaattcaacttgattaaa

SEQ ID NO: 257069 - DNA, 805 bp, Unknown
  Bacterial polypeptide expressing nucleotide sequence isolated from the Sargasso Sea
aatgtttaaagtatacaagaaggaaattgaagtagcaggaaagaaaataagtttagaaacaggtaaagtagcaagacaggcagacggtgcaataatagcaacatgtggagagacagtcgttttagcaacagtagtgggagcaaaaaaggtaaatcctgatatggattactttccattatctgtaaattaccaagaaaaatattatgcagctggaaaaattccaggtggatatttcaaaagagaggcaagaccaactgaaagtgaaacattaatctctagattaattgatagaccaatcagacctttatttcctgatgaatttaaaaatgaagttcagttattaccaacagtaatttcatacgataaagaaaatgaaccagatatattatcaataactgcatcatcagcagcattagctatatcaggaatgccatttatgggccctgtaggagcctcaagagttggttatattgatggtaaatatgttctaaatccatctaaagcagatttagaaaaatcaaaattagacttagttgtagcaggtacaaaagatgctgtgcttatggttgagtctgaagcaagtggtttaacagaggaagaaatgttaagtgcagtaaaatttggtcatgaaggatttgttccaataattgagatgatcgaggaacttgcaaaagaatgtagaaaacctgagtggactgttgaaaagaaagatctatcagaagtaagaaaaaacttgaagaaacttttacagatgatcttaaaaaagcattttgcacaagagataaacaagatagatcaaatcaaa

SEQ ID NO: 257070 - DNA, 892 bp, Unknown
  Bacterial polypeptide expressing nucleotide sequence isolated from the Sargasso Sea
gtaaattatcaagaaaaatattatgctgcaggaaaaatacctggcggttattttaaaagagaggcaagaccaacagaagcggaaacattaatatcaagattaatagatagacctataagaccattgtttcctgatgaatttaaaaacgaggttcaattattaccaactgttatttcttatgataaagaaaacgaagcagacattctatcaattattgcttcatcagctgctttatctatttccggtatgccgttcaagggacctgttggagcatctagagttggttttataaatggaaaatatgttttgaatccaaccaaatctgaaattgaacaatctaaattagacttagttgtagctggtactagagatgcagtgttaatggtagagtctgaagctagcggtttatcagaggaagaaatgttaaatgcagttaagtttggacatcaaggtttcattcctgttattgatatgattgaagaattagcgaaagaatgcaaaaaaacagattggattatcgaaaaaaaagatctctcagaggttaaaaaaaaacttgaagaggaatttacagcaaccctgaaaaaggcttttgcaacaaaagataaacaagacagatctaaccaaatatctgaaattactgaaaaagctaaaaaactatttgaggataacgataattatactgatttagatgttaatagtgaacttaaaggtttagaaaaaacaatagttagaacagatattcttaagaataaaaatagaattgatggtaggggtttagatcaagtaagaccaatcatgtgtgaggtcggaatttttgccagaacccacggatctgcattattttacaggggtgaaacgcaagcaatagtcacgactaccttaggaacatctg

SEQ ID NO: 257071 - DNA, 673 bp, Unknown
  Bacterial polypeptide expressing nucleotide sequence isolated from the Sargasso Sea
atgacaaaagttatttcaagagaaatgaattggggagaccaagtattaaaaatagaaacaggaaaggttgctaagcaggcaacagcatcaaccatagtaagttatggagatacagttgttatggctaatgtcgtagccgctaaaactgcgaagcccgacattgatttctttccattaactgtaagttaccaagaaaaattttatgctgcaggtaaaattccagggggcttttttaaacgtgaaggtagacctactgaatttgaaacccttacttcaagactaattgatagacctataagaccattatttcctgagggattcaaaaacgaaactcaagttattttaactgtattatcacacgatacagaaacaaaccctgacatagttgcaatgatagccgcttccagtgctttgacattatccggaataccattcatgggaccaattggtggatgcagagttggatatgacggaaaagattacatattaaatccaaaaattaatgaagaaactcaattagaccttgtagtatctggaactcaagatgcagtcctgatggtagagtcagaagctaaagaacttgctgaggaaattatgttgggtgcagttaaattaaaacacgagtcgatgcaagaagtcataaaaatcattatcaatctgcagaggagtgtgc

SEQ ID NO: 257072 - DNA, 727 bp, Unknown
  Bacterial polypeptide expressing nucleotide sequence isolated from the Sargasso Sea
acaactttgggttcagagcgatcatcacaaatcattgatgccttagaaggtgagtataaagacaaattcatgttgcactataattttcctccttactctgtgggtgaagtgggttttatgggatctccaaagagaagagagattggacacggtaaacttgctcgtagagcattagaagcagttttacctaacatggctgaatatccatacactataaggattgtttcggagataactgaatcaaatggttctagttcaatggctactgtatgtggttctagcctttctttgatgcatgccggtgttcctatcaaatctcatgttgcaggtattgcaatggggctagttatggaaggcgataaatataaagttctgaccgatattcttggtgacgaagatcatcttggcgatatggattttaaagtagctggaactgataacggaatcactgcacttcaaatggacattaaaattgccggcattactgaagaaattatgaaagacgctctcagtcaagcaaaggatgcaaaggatcatattcttaaaataatgaatgaagcgatatcatctccctctgaggaatattctccttatgctccatccatcattagcataaccgttcctaaagataaaattagagacgtcataggtaaaggcggggcaacaattaggtcaattacagaggtaaatggtgctcaggttgatattaatgatgacggcattgtaa

SEQ ID NO: 257073 - DNA, 898 bp, Unknown
  Bacterial polypeptide expressing nucleotide sequence isolated from the Sargasso Sea
actgtagttggtgcaaaaaaagtaaaccctgaagtagactattttcctttatcagtaaattatcaagagaaatattatgccgctggaaaaattcctggtggatattttaaaagagaagcaagacccaccgaaagtgaaactttaatttcaagattaattgatagacctattagacctttatttccagacgaatttagaaatgaagtccaattattaccaactgtgatttcttatgacaaagaaaatgaaccagatatactttcaataatagcatcgtctgcagcactggcaatatcgggtatgccatttatgggaccaatcgcggcatccagagtaggttttattgaaggaaaatatgttctcaatccttcaaaaaaagaattagaaaattcaagtttagatcttgtagttgcaggaacaaaagatgcagttttaatggttgagtctgaagcaaatggtttgactgaagaggaaatgcttaaagcagtaaaatttggtcatgaaaaatttattccaataattaatacaattgaagaacttgctaaggaatgtaaaaaaactgagtggattttagaaaaaaaagacctttctgaagttaagaagaaaattgaacaagaattcaaaaatgaactaacaaaagctttttcaataaaagataaacaacaaagatcaaatcttatttctgaagttacagataaggcaaaaaaattatttgaagaaaacgaaagctatactgatttagatgttaattatgaactcaaaaatttagaaaaaagaattgttagaaccgatattttaaaaaataaaaaacgtatagatggtagagggctttcagatgtaagacagataatgtgtgaagtggaatttgccaaggactcatggctcagcattattactc

SEQ ID NO: 257074 - DNA, 935 bp, Unknown
  Bacterial polypeptide expressing nucleotide sequence isolated from the Sargasso Sea
aacagagttcatggatcagcgttattccaaagaggtttaactcaagtcctctccactgccacattgggcactccaagcgatgctcaggaaatggacgatttaaaccctaatactgataaaacctacatacatcattacaacttcccaccttactcagtgggagagactcgaccaatgcggactcctggaagaagagaagttggtcatggagctttagcagaaagggcgttaataccagtactaccagcaaaagatactttcccatatgttttaagagttgttagcgaagtcttgagttcaaacggctctacctctatggcttcagtatgtggaagtactcttgcacttatggatgcaggtgtcccattaaaagcccctgtaggaggagcagccatgggtttaattaaagaaggaaaagaagttcggatcttgactgatattcaaggcattgaagactttcttggagacatggatttcaaagttgcagggacagaaaaaggaattacagccttgcaaatggatatgaaaataactggacttccaattgagacaattggggaagctattaatcaagcacttcctgctaggacacacatattaggaaaaatgctagatgcaattgagacaccaaaagacaacttatctcctcatgccccaagactgttaagctttagaatcgatccagagctaataggaactgtcattggccctggaggaagaacaataaaggggatcacagagagaactaacacaaaaatcgatatagaagatggagggattgtcactattgcatcgcatgacggagcagctgcagaagaagcgcagaggattattgaaggtttaacgagaaaagtacatgagggagaaattttccctggctctatcacaagaatcattccaattggcgcctttgttgaaatccttcctgggaaaga

SEQ ID NO: 257075 - DNA, 910 bp, Unknown
  Bacterial polypeptide expressing nucleotide sequence isolated from the Sargasso Sea
ggatattttaaaagagaagcaagaccaactgaaagtgaaacattaatctctaggttaattgatagaccaatcagacctttgtttcctgatgaatttaaaaatgaagtacagttattaccaacagtaatttcatacgataaagaaaatgaaccagatattttatcaattaccgcatcttcagcagcattagcaatatcaggaatgccattcatgggacctgttggtgcttctagagttggttttattgatggtaaatatgttttaaacccatctaaaacagacttagagaactcaagtctagatttagttgtagcaggcacaaaagatgctgtgctaatggttgagtctgaagcaaatggtttaacagaggaagaaatgttaaatgcagttaaatttggtcatgagggatttgttccagtaattgaaatgatcgaggaacttgcaaaagaatgtaggaaacccgagtggactgttgaaaagaaagatctatctgaggttaagaaaaaacttgaggaaacatttacagaagatcttaaaaaagcttttgctacaatagataaacaagatagatcaaatcaaatttctgaaataactgataaagctaaaaaactttatgaggaagatgaaaattattctgatttagatgtcaactcacagcttaaaaatttagaaaaatcaattgtaagaacagacattttaaaaaataaaaatagaattgatggtcgaggtttatcagatgtaagaccaatttcgtgtgaggtgggtgttttaccaagagcacatggttctgcattgtttactagaggagaaacgcaagcaattgttgttgccactttaggaacatcagatgatgaacaaagaattgagagcttagatggattgcaaagagaacgatttatgcttcactata

SEQ ID NO: 257076 - DNA, 905 bp, Unknown
  Bacterial polypeptide expressing nucleotide sequence isolated from the Sargasso Sea
gaaacccaaggactggttgttacaacgcttgggtctggagattctgagcaaatcatagatgctctacacaaagagggtagactaaatttcatgcttcactataacttcccgccatactctgtaggagaatgcggcagaatgatggggccaggccgccgagaaattgggcatggaaaactagcttggagggctttacaagcagtattaccctcgtctgaagaatttccatatacagtgagagttgtttccgagataacggaatccaatggatcgtcttcaatggcaacagtttgtggatcatctttatcaatgatggatgcaggggtgcctcttaaagcgcctgtggctggtgttgctatgggattaatactggaagggaaaaagtttgctgttctgacagacattttaggagatgaagaccatcttggggatatggactttaaagtggctggaacaaaagctgggataacgtctttgcaaatggatataaaggttgcaggcattactccccaaattatggaaaaagcactagatcaagcaaaggaagcaagactacatatactaggcgaaatggctaaatctctatcagctccatcggagttttctcaatatgcacctaaaatagagtcgataactgttccgagcgataaaattcgcgaggttataggaagtggagggaaagtgataaaagaaattgtcgaagtttcaggcgcaaaagttgatattaacgatgatggattagtaagaatagcatctcaaaacaaggagagcttagatatagctagaaaaatgattaaagaaatcgttgaagaccctattgtcggacaagtttacgaaggtaaggttgttaagttgatggattttggagcttttgtaaacttctatggaaaacgagacggccttgt

SEQ ID NO: 257077 - DNA, 934 bp, Unknown
  Bacterial polypeptide expressing nucleotide sequence isolated from the Sargasso Sea
gtgggatattttaaaaggggaagctagacctactgaaagtgaaacacttatctcaagattaattgacagacctatcaggccattgtttcctgatgagtttaaaaatgaggtgcagctcttacctacggtaatatcctatgataaagagaatgaggcagatattttatctataattgcatcctcagcggctttagcaatctcaggaatgccttttatgggtccggttggagcatctagagtcggttttataaagggaaaatacgtacttaatccttcaaaaaaagaattagaagactctaaactagatttagtagtagctggaactaaagatgctgttttaatggttgagtctgaagcaaatggtttaacagaggaagaaatgttgaatgctgttaaatttggacatgaaggtttccttccaataattgacatgatcgaaaatcttgcgaaagaatgtagaaagccagagtggacagttgagaaaaaagatctttctgagataaagaagaaattagaagaagaatttactgaagatttgaaaaaagccttctctacaagagataagcaagatagatcaaatcaaatttctgaaattactgaaaaagctaaaaaattatatgaggaaaatgaagcttacactgatttagatgtaaattctcaacttaaaaatttggaaaaatctatcgtgagaactgatattcttaaaaataaaaatcgtattgatggaagaggtctagcagatgtaagaccaatcatgtgtgaagtaggtatattgccaagagtacatggatcagcattatttaccagaggcgaaacacaagcgattgtaacaacaactttaggtacatcagatgatgaacaaagaattgagagtttagatggtcatcagaaagagagatttatgttgcattataacttccctcctttttcagtt

SEQ ID NO: 257078 - DNA, 898 bp, Unknown
  Bacterial polypeptide expressing nucleotide sequence isolated from the Sargasso Sea
gaagctaaagaactttcagaagatcaaatgttgggggggattttattcgctcaccaagagatgcaagtagctatcgaagctataaaagagatggtatctgatattggtaaacctgaatttcaatatgaaccaaaagtcttaaacccagaagttgttgagttagtaaaaaataattatagcgatcaaatttctgctgcttatgctttgcaaatcaaacaagaaagggtccaggctttatcagaaataagagaaaagattcttgaagagaatgcgtcagaagatgaagagtcattttcacaaaatgatctacttgatgctttcaagaaagtaggcaaaaatattgtcagaaagaggctcatcgaaggtgccccgagaattgatggaagagatttagatactgttagacctttgtttattgaaactggtgtcttaaagaatactcatggttctgcattatttacccgaggtgaaactcaagcaattgttacctccactctcggttctcctagacaagctcaactaatagatgctttagaaggagagtataaagaccaatttatgcttcattacaactttcctccttattcggtaggtgaagcaggatttatgtctggtccaaaaagaagagagatagggcatggcaaacttgcaaggagagctttagaggctgttttaccttcacctgatgactttccttatacaataagagtagtatctgaaataacagagtcaaatggttccagctcaatggcgagtgtttgtggctcaagtcttgcacttatggatgcaggtattcctcttaagtccgcggtggctggtatagctatgggattggttaaagaagaagcaggattcgcagttattactgatatcttaggggatgaagatcacctcggtg

SEQ ID NO: 257079 - DNA, 886 bp, Unknown
  Bacterial polypeptide expressing nucleotide sequence isolated from the Sargasso Sea
ataaagataagtatttcttcaaaaatagatggactaaaagatgataatgctgtaaaaaaatctctttctttaaataacaagctcctagaaaatagttataaagctttaaccaaaaagttaatgagagagcagataatcaaagaagggaaaagagtcgatggaagagaattaaatgaagtaagagctattgatgctgatgctgcagttttacctaacagagttcatggatcagcgttattccaaagaggtttaactcaagtcctctccactgcaacattgggcactccaagcgatgctcaggaaatggacgatttaaaccctaatactgataaaacctacatacatcattacaacttcccaccttactcagtgggagagactcgaccaatgcggactccaggaagaagagaagttggtcatggagctttagcagaaagggcgttaatacccgtactaccagcaaaagatactttcccatatgttttaagagttgttagcgaagtcttgagttcaaacggctcaacctctatggcttcagtatgtggaagtactcttgcacttatggatgcaggagtaccattaaaagcccctgtaggaggagcagctatgggtttaatcaaagaaggaaaagaagtacgcatattgactgatattcaaggcattgaagactttcttggagacatggatttcaaagttgcagggacagaaaaaggaattacagccttgcaaatggatatgaaaataactggacttccaattgagacaattggggaagctattaatcaagcacttcctgcgaggacacacatattaggaaaaatgctagatgcaattgagacaccaaaagacaacttatctcctcatgccccaagactgttaagcttta

SEQ ID NO: 257080 - DNA, 883 bp, Unknown
  Bacterial polypeptide expressing nucleotide sequence isolated from the Sargasso Sea
ttagaaacaggaaaagtagctcgtcaagcagatggagcagtgatagcaacgattggagagacggttgttttggcaactgttgtaggagctaaaaaagtaaatcctgaagttgattacttcccactttctgtaaactatcaggaaaaatattatgctgctggaaaaattccaggtggatattttaaaagagaagcaagaccaactgaaagtgaaacattaatttcaagattaattgataggcctataagaccattgttcccggatgaatttaaaaatgaagttcaattacttccaactgtaatatcttatgataaagaaaacgaagctgatattttatctatcattgcttcatctgctgctttagcaatatctggaatgccatttcttgggccggttggagcatcaagagttggtttcatagatggaaaatatgtattaaatccgtcaaaaacagatttagaaaaatccaaattagatcttgttgttgcgggaactaaagatgcagttctaatggttgagtctgaagcaaatggattaacagaagaagagatgttgaatgctgttaaatttggtcatgaaaattttgttccagtaattaaaatgatagaagagcttgctaaagaatgtagaaaaccagattgggttgttgagaaaaaagatttatctgaagttaagaaaaaattagaaaaggagtttactgatgatcttaaaaaagctttttctacaagagataagcaggatagatcaaatcaaatatctgaaataacagaaaaagcaaaaaaactctatgaagaggatgaaaattacactgagcttgatgtaaattacgagcttaagaatttagaaaaaagaatagtaagaacagacattcttaaaaataaaa

SEQ ID NO: 257081 - DNA, 611 bp, Unknown
  Bacterial polypeptide expressing nucleotide sequence isolated from the Sargasso Sea
aatgtttaaagtatttaataaagaaatagaagtagctggaaaaaaaataagtttagaaacaggaaagatagcaagacaagcagatggagcaataattgctaaatgtggagaaacagttgtcatggcaactgtagtaggtgcaaaaaaaataaatccagatgttgattacttcccattatcagtaaattatcaggaaaaatattatgcagcaggaaaaattcctggaggatattttaaaagagaagcaagacctacggaaagtgaaactcttatttcaagactaatagatagacctataagaccactattcccagatgaattcaaaaatgaagtacaattactgccaacagtaatatcttatgataaagaaaacgaagcagatattttatcaattattgcttcttcagcagcattagccatctcaggaatgccttttatgggaccagttggagcctctagagttggctttgttgaaggaaaatatgttcttaatccttcaaagaaagaattagaaaattcaaaattagatttagttgttgctggaactaaggatgcagttttaatggttgagtctgaagctaacggattaacagaggaagaaatgttaaatg

SEQ ID NO: 257082 - DNA, 845 bp, Unknown
  Bacterial polypeptide expressing nucleotide sequence isolated from the Sargasso Sea
aacaatagtaagggggactgacattcttaaaaataaaaatagaattgatggtagaggattatctgatgttaggcctatttcttgtgaggtaggaattttaccaagaactcatggctcagctttattcactaggggagaaacacaggcaattgtaactgcaactttaggaacctcagatgatgaacaaagaatcgaaagcttagatggattacaaagagaaaggtttatgcttcactataattttccacctttctcggttggtgaaacaggtagaattggcactggtagaagagaaataggacatggtaaattagcttggagagctatccattcttcattaccatcaagtgagtcatttccctacacatttagagttgtttcagaaattacggagtctaatggctcttcttcaatggctacagtttgtggaacatcacttgcactaatggatgcgggtgtgcctattaaagagcctgttgcaggaatcgcaatgggattgattaaagagggagatgagtttagcgtcttatcagatattttaggtgatgaagatcatcttggggatatggattttaaagtagccggaactaaaaacggaattacttcacttcaaatggatattaaaataactggtattacatttgaaattatggaacaggcattaagccaagctaaagatggaagaattcatattttaggtgaaatgaataaagcattatcagtttcaagatcagatgttgggaaacacactccaaaaatggaaaaaattaatgttgataaaaaggacattgctgctgtaattggaaagggtggagcaacaataagagagattgtagaaaaatcag

SEQ ID NO: 257083 - DNA, 892 bp, Unknown
  Bacterial polypeptide expressing nucleotide sequence isolated from the Sargasso Sea
aagattagagagtttagaaggcatgcaaagatctaattttatgttacactataattttcctcccttttcagttggagaatgtggaagaataggaactggacggagagaaataggtcatggtaaactcgcttggagagctataaattcttctttaccaaaaaaggataatttcccttatacattaagagtagtttcagaaataacagagtcaaatggatcctcctcaatggcaactgtttgtggaacttcattatcattaatggatgcaggtgttccaatcaaagagccagttgctggcattgcgatgggattaataaaagagggtgataatttttcagtgctctcagacattctaggcgatgaagatcatttaggagatatggatttcaaagtagctggaacaaaaaatggtatcacctcacttcagatggatatcaaaattactggtattacatttgagattatgaaaaaagcattagatcaagcaaaaagcggaagagaacatattctaaatgaaatgaataaagctatcaaaacttcgagaaaagagttttctaaacacacaccaaaaatggaaactattaaagtagataagaaagatatagccactgtgattggtaagggtggagcaactattagagaaattgttgaaacttcaggggctaaagttgatgtaaaggatactggcgaagtaacagttgctgctccagatgagtcttctagaaataaggctattgaatttattaaaaatttaatcgctaaacctgaaatgggtaaaatttataaaggtaaagttgttaaaattatggagtttggagcctttgtaaacttcttaggaaaacaagatggtcttgtgcacatttctgagttagctgacaaaagagtggcaaaa

SEQ ID NO: 257084 - DNA, 877 bp, Unknown
  Bacterial polypeptide expressing nucleotide sequence isolated from the Sargasso Sea
accaactgaaagtgaaacattaatctctagattaattgatagaccaatcagacctttgtttcctgatgaatttaaaaatgaagtacagttgctaccaacagtaatttcatacgacaaagaaaaccaaccagatattctagcaatcactgcttcatcagcagcgttagcaatttcagggatgccatttatgggtcctgtcggagcatctagagtaggttatgttgatggtaagtatattctcaatccttcaaaagaggagttagaaagctcaagtttagatttagttgtggcaggtacaaaagatgcagtgcttatggttgaatctgaaacatcaggtttatctgaagaagtaatgttagcagcagttaaatttggacatgaaggatttgttccagtaatcgaaatgattgaggaacttgcaaaagaatgcagaaaacctgaatggattgttgaaaaaaaagatttatcagaagttaaacaaaagcttgaagaaacttttacagaagacttaagaaaggcttttgcaacaagggacaagcaagatagatcaaatcaaatttcagaaattactgacaaagctaaaaagctttttgaagagaatgaaaattattctgatcttgatgttaactcacagcttaaaaatctagagaagaaaattgtaagaactgatattcttaaaaataaaaatagaatagatggtagaggattatctgatgtaagaccaatctcatgtgaagttggtgtattaccaagaacacacggttctgctttatttactagaggggaaacacaagcaattgttgtaactaccttaggaacatctgatgatgaacaaagaattgaaagtttagatggtcttcaaagggaaagatttatg

SEQ ID NO: 257085 - DNA, 918 bp, Unknown
  Bacterial polypeptide expressing nucleotide sequence isolated from the Sargasso Sea
aatccagacatggattattttcccattatcggtcaattaccaagaaaaatactatgctggtggaaagataccaggtggctattttaaaagagaagcaagaccaactgaaagtgaaacattaatttcaagattaattgatagaccaatcagacctttgtttccggatgcatttaaaaatgaagtgcagttgttaccaactgtaatttcatacgataaagaaaaccaaccagatattctagcgattaccgcatcatctgcagctttagctatttcaggaatgccatttatgggtccggtaggagcatccagagtaggttttgttgatggcaagtatattcttaatccatcaaaagccgaattagaaaactctaatttagatttagttgtagcaggtaccaaagatgccgttcttatggttgagtctgaagcgaacggtttaacagaagaggaaatgttaaatgcagttaaatttggtcatgaaggctttattccggtgattaaaatgattgatgaactcgcaaaagaatgtagaaaacctgaatggactgttgaagaaaaagatttatctgaggttaagaaaaaacttgaagaaacttttacaaaagacttgaagaaagcttttgcaacaagagataaacaagatagatcaaatcaaatctcagagataacagataaagcaaagaaactttatgaagaaaatgaaaattacacagatcttgatgtaaacagtcaattaaaaaatctcgaaaagtctattgtaagaactgacattcttaaaaacaaaaatagaattgatggaagaggcttatctgatgtaagaccaatttcttgtgaagtcggtgttttgccaagaactcacggctcagcattgtttactagaggagaaacacaagcaattgtagttgctactttaggtac

SEQ ID NO: 257086 - DNA, 967 bp, Unknown
  Bacterial polypeptide expressing nucleotide sequence isolated from the Sargasso Sea
aagaattgaggcacttcaaggttcttataaagaaaatttcatgcttcattataactttccaccttactcagttggagaagttggaagaatgggttcagcaggtagaagagagattggtcatggtaaattagcgtggagagcccttaaagctgtattgcctaataaagaagtttttgattatacaattcgtttagtatcagatatcactgaatcaaatggttcttcatctatggcaactgtttgcggatcttcacttgctctaatggatgccggggttccaattaaaaattcagtttcaggtattgcaatgggattaatcaaagagggtgatgattttgctgtattatcagacattttaggtgatgaagatcatctgggtgatatggattttaaagtagcaggtactaaagatggaataacatcattgcagatggatattaaaatcactggcatcacatatgaaataatggaaaaagctctcgaccaagctaaaggtggaagagattatatcttaaatgaaatgaataaagcattagactctccaagaactgagcttggaccttacacaccaagagtcgaaacgatgaaagtcaaaagagataatataggtgaaattattggaaaaggtggtgctacgataaaagatataattgaaaaatctggagcaaaaattgatattagtgatagtggaagtgttaaaatagctggaaccaatgatgagtcaatccaagccgcaatggaattaataaactcaattatcgaagaacctgaaattggtcaggtatatgaaggaaaggttgttaaaataatggaatttggtgcatttgttaatttctttggaaaaagagatggtcttgttcatatttcacaattatctgaagagagagtagagaaagttactgacgttgtaagtgaaggtgatatagtgaaagtcaaagtaatcggttttgataaaggtaaagtaaaa

SEQ ID NO: 257087 - DNA, 961 bp, Unknown
  Bacterial polypeptide expressing nucleotide sequence isolated from the Sargasso Sea
aaaaataaaagttgagactcaagttaaaattgaatctttgaaagatgataacgagttaaaaattcttatttcagaaaatgataagttactaggttcagactttaaaaaacttacaaagaaattaatgaggttacaaattattaatgatggcaaaagagttgacggtagagatctagacgaagttagaaaaatatcagcttctacaggaattcttcctaaaagagtgcatggttcagcattatttcaaagaggattaacccaagttttatctacaactactttaggtacgccgagtgatgcacaagaaatggatgaccttaatcctagtactgagaaaacttatttacatcactataatttccctccttattcagttggggaaacaagaccaatgagaactcccggaagaagagaaattggccacggagcattagctgagagagcaataatgcccgtgctgccaggcaaagaaaaatttccttatgtattaagggtagttagcgaagttttaagttctaacggatcaacttcaatggggtcagtatgtggaagtactctctcattactagacgcaggggttccattaaaagctccggtaagtggaactgctatgggccttatcaaagaaggcaaagaaattcgaattcttacagatattcaaggaattgaagacttcctcggagacatggactttaaagttgcaggtactgataagggtataactgctttacaaatggatatgaaaattacaggtttgccagtttctattatttctgatgcgattaaaaaagctcgtcctgcaagattacatatcttagaaaagatgcaacaggcaatagacaaacctcaagaatctctctctcctcatgctcccagacttttaagctttagaattgatcctgagctcataggaacagttattggccctggtggaagaactatcaaaggaataactgaaaga

SEQ ID NO: 257088 - DNA, 836 bp, Unknown
  Bacterial polypeptide expressing nucleotide sequence isolated from the Sargasso Sea
acagtaagctatcaagaaaaattttatgcagcaggtaaaattcctggcggtttttttaagcgtgagggaagaccaacagaatttgaaactctaacctcgcgtttaattgacaggcctattagacctttatttcctgaaggttttaaaaacgagactcaagttattttaactgttttatctcatgatactgaaacaaatcctgatattgttgcgatgatagcagcttctagtgccttgactttatccggaataccattcatgggaccaattggtggatgtagagttggttatgacggaaaagattacatattaaatccaaaaattaatgaagaaactcaattagaccttgtcgtatctggaactcaagatgctgtcctgatggttgagtctgaagctaaagaactttctgaagaaattatgttgggtgcagttaaatttggacatgattcaatgcaagaagtaataaaaattattattaatcttgctgaggagtgcgcaagagatccatgggagtttgaatataatgttaatgatgaattaatgaatgagcttaaaagtgaattcgaagatcaaatcaaaaaaagctattcaattgttgataagatggaaagacaaaactctttaagcgaaattaagtctgctgtagaagaaaaatacgctgacatcgaagatgaaaatattaatgaagtaatgtcgtatttcaaaaaaattgaaaaagatgtggttagatctcaaattttgaacgataaatctagaattgatgggcgtaagcttgatgaagtaagagatattacttcagaagtttcgtggttacccagaacacatggatcgtcttt

SEQ ID NO: 257089 - DNA, 943 bp, Unknown
  Bacterial polypeptide expressing nucleotide sequence isolated from the Sargasso Sea
aatgttaaatgcagttaaatttggtcatgaaggttttgttccggtaattgaaatgatagaacaacttgctaaagaatgtaaaaaacctgattggatagtggagaaaaaagatctttctgaagttaagaaaaaattagaagaagattttactgatgatttaaaaaaagcttttgcaacaaaagataaacaagacagatcaaatcaaatttcagaaattactgataaagcgaaaaagctttatgaagaaaatgaaaattattcagatcttgatgttaattcacaactaaaaaatcttgaaaaaaatattgttagaacagatattttaaaaaataaaaatcgtattgatggtagaggtttagcggatgtaaggccaattgaatgtgaagttggaatattacccagagttcatggttcagcattgtttactagaggtgaaactcaagcgatagtaactactacactaggaacttctgatgatgaacaaagaatagaaagtttagaaggattacaaagagaaagatttatgcttcactacaattttcctcctttttcagttggtgaaactggtagaattggaactggaagaagagaaattggacatggaaaattagcctggagagcaattaattcatctttaccttcaaaagaaagtttcccttatacttttagaatagtatctgaaattacagaatccaatggctcatcttcaatggcaactgtttgtggaacttctctagcattaatggatgccggtgttcctattaaagaaccagttgcaggtattgcaatgggattaattaaagagggtgatgattttagtgtattgtcagatattttaggagatgaagaccacttaggtgatatggattttaaagttgctggaactaaagatggaattacatctctttcaatggatattaaaattacaggtattactttttga

SEQ ID NO: 257090 - DNA, 955 bp, Unknown
  Bacterial polypeptide expressing nucleotide sequence isolated from the Sargasso Sea
tttcagggtccgattggtgctgcaagagttggattgtttgaagatagttatgttttaaatccatcatataaccaactttctaattcttatttagatatggttgtcgcaggtacaaaagatgctgttttaatggtggaatctgaagcaaaagaacttagtgaagatttaatgttaggtgctgttttatatgctcaccaagaaatgcaagcagttgtaaatgcttgcaatgaattgaaagaaaaagtaaacccaaatatttgggacatagaagaacaagatttatcacactttgaaaaagatattttagaaaattattcatctaaaattaaagaagcatttaaaacatctgataaatcccttagaggagaaatgatttctaaaattcataaagatgttaaggattcggctggtgaaattgatgaaatcgaattatcaaaaatgatgaaaagtcttaaaaatgttgagaaagatatcttgcgtaaagatattttggaaaataatcaaagaattgatggaagatctctcgatcaagtaagaccaattgaaattgagacatctgtgctctcaagagcgcatggctcagctttatttacacggggtgaaacacaatcaattgtagtagcaacccttggaagcactaaagacgctcaaagaattgaaaatttaaatgctgaaacaacagacccatttatgcttcattacaactttccaggttatagtgtcggcgaaataagttttcctggcggcccaaagaggcgtgaaataggacatggaaacctcgcaaaaagggcaattaaaaatgtactacctaatcttgaagagtttgggtacacgataagggttgtatctgaaatcactgaatcgaatggatcaagctccatggctacagtttgtggtactagcttgtcattgatggatgctggagtaccaataacatcaccctgttgccaggggt

SEQ ID NO: 257091 - DNA, 949 bp, Unknown
  Bacterial polypeptide expressing nucleotide sequence isolated from the Sargasso Sea
gtttatcagaaggaagaaatgttaaacgcagtaaaatttggtcacgaaggttttattcctataattcaaatgattgaagatctttcaaaagaatgcagaaaaccagaatgggttgttgaaaaaaaagatctttctgaaataaaaaagaaattagaagaggaatttactgaagatttgaaaaaagcattctctacaagagataaacaagatagatctaatcaaatttcagaaattacagataaagcaaaaaaactttatgaggagaatgaagattacacagatttagatgtaaattccgaattaaaaaatttagaaaaatcgattgtaagaactgacatattaaaaaataaaaatcgtattgatggacgaggtcttgcagatgtaagaccaataatgtgtgaggttggaatattacctagagttcatggctcagctttgtttacaagaggtgaaactcaagcaattgttacaactactttaggcacttcagatgatgaacaaagaattgaaagtttagatggtcttcaaaaagaaagatttatgttgcattataattttcctccattctcagttggtgaaactggtagaattggaacaggtcgaagagagataggtcatggaaaattagcttggagagcaattaactcgtcactaccatcaaaagaaagttttccttatacatttaggattgtgtcagaaataaccgagtcaaatggttcatcctcaatggcaactgtttgtggaacttctttagctcttatggatgctggtgtcccaataaaagagccagtcgctggaattgcaatgggtttaattaaggaaggtgatgattttacagttttatcagatattcttggtgacgaagatcatttaggagatatggactttaaagttgctggtactaaagatggtattacatcgttacaaatggatataaaaattacttgaa

SEQ ID NO: 257092 - DNA, 759 bp, Unknown
  Bacterial polypeptide expressing nucleotide sequence isolated from the Sargasso Sea
agaaagtttagatggattaaaaagagagagatttatgcttcactacaattttcctcctttttcagttggagaaactggaagaattggaactggtagaagagagataggtcatggtaagttagcttggagagcaattcattcttcattaccttcttcagaagttttcccatatacttttagggtagtttcagagattaccgagtctaatggttcctcttcaatggctacagtttgtgggacatcactagcattaatggatgctggggtgcctataaaagagcctgtagcaggtatcgcaatgggattaattaaagaaggtgatgattttagtgtcttatctgacattttgggtgatgaagatcatttaggagacatggactttaaagttgcaggtaccaaagaaggaattacttcacttcaaatggatattaaaattactggtattacatttgaaattatggagcaggcattaagtcaagcaaaagaaggaagaattcatattttagatgaaatgaataaagctttaggcaaatcaagagatgaggttggaaaacatactcctaaaatggaaaaaattacagttgataaaaaagatattgcagcagttattggaaaagggggagcaacaatcagagaaatagtagaaaaatcaagtgctaaagtagatgtgaatgatgaaggggttgtaacagtagcagctcctgatgaagaatctagaaacattgcaatgcaaatgattaaagatattactgcaaaggc

SEQ ID NO: 257093 - DNA, 972 bp, Unknown
  Bacterial polypeptide expressing nucleotide sequence isolated from the Sargasso Sea
gattataccaaagtagaagtaatggatcaattaaaatcattagaaaaagatattgttagaacaaatattttaaaaaataaaatacgtatagatggtcgaaaattggatgatgttagaaagattgaatgtgaagtgggaattttaccgaggtctcatggctctgctttatttacaagaggagagacccaggcaattgttgcgaccacggtgtcaacagcagaggatgagcaaaagattgaaagtttagagggtatgatgaaatcaagatttatgcttcattataattttcctccattttcagttggagaagtagggagaattggaacaggaagaagagaaatcggtcacggtaaattagcctggagagcgattaattcatctttacctaccaaagaagagtttccttatacaattagaatagtttctgaaataacagaatcaaatggatcatcatctatggcaactgtatgtggatcatcaatgtcattgatgcatgctggggttccaataaaaaaacctatagcaggaattgcaatgggtttgattaaagaaggtaaggattattcagtattaagtgatattttaggtgacgaagatcatttaggtgatatggattttaaagtagctggtacagatgagggtattacctcgttacaaatggacattaaaataacaggtataacatttgaaattatggagaaggcattaaatcaagcaaaggacgggagattaaaaatactaaatgcaatgtctaaagcaatttcaaaatcaaattctgagttgtcaaaatacacccctaagatggagaaaattcaagtagagaaaaaagagattgccgcgattattggtaagggtggggccactataagagaaatcgttgagacatccggcgcaaaggttgatatcaatgatgatggcatagttaccatatctgccgctgatgaagaaacaagaaataaagctattaaaatg

SEQ ID NO: 257094 - DNA, 819 bp, Unknown
  Bacterial polypeptide expressing nucleotide sequence isolated from the Sargasso Sea
agacctttgtttcctgatgaatttaaaaatgaagttcaattattacctacagtaatttcatatgataaagaaaaccaaccagatattttagcaattaccgcttcatcagcagcgctagctatatcaggaatgccatttatgggtcctgtaggtgcatctagggtaggttatgttgatggtaagtatattcttaatccatcaaaagctgagttagaaaattcaaatttagatttagttgtggcaggcactaaagatgctgtgcttatggttgagtctgaagcgaatggtttaacagaagaagagatgttaaatgctgttaaatttggacataaaggctttgttccagtaatcgaaatgattgaggaacttgcaaaagaatgcagaaagcccgagtggattgttgagaaaaaagatttatctgaagtgaaacaaaaacttgaggatacttttacagaagacttaaagaaagcttttgccacaagagataagcaagatagatcaaatcaaatttcagtgattactgataaagctaaaaaactttatgaagaaaatgaaaattattctgatctagatgttaatacagagcttaaaaatcttgaaaaatctatagttagatcagacattcttaaaaataaaaatagaattgatggtagaggtttgtcagatgtaagacccatctcatgtgaagttggtgttttaccaagaactcatggttctgctttgtttacaagaggagaaactcaagcaattgttgttactacattaggcacatctgatgatgaacaaagattagaaagtttagacggacaacaaagagaa

SEQ ID NO: 257095 - DNA, 991 bp, Unknown
  Bacterial polypeptide expressing nucleotide sequence isolated from the Sargasso Sea
gctttatgaagaaaatgaaaattattcagatttagatgttaattctcaacttaaaaatcttgaaaaatctattgtgagaactgatattttaaaaaataagaatcgtattgatggcagaggtctatcggacgtaagaccaattgaatgtgaagttggcatactgcctagagctcatggttcagcgctatttacaagaggtgagacccaagcaattgttaccactactcttggaacttctgatgatgaacaaagaatagaaagtttagagggattgcaaagagaaagatttatgcttcattacaattttccaccattctcagttggtgaaactggtagaattggaactggaagaagagaaattggacatggaaagcttgcttggagagcaattaattcttcattaccatcaaaagaaagttttccttacacttttagaatagtatctgaaataacagagtctaacggttcatcttcaatggcaactgtttgtggaacgtcactagcattaatggatgccggtgttccaattaaagaaccggtagctggtattgcgatgggcttaattaaagaaggtgatgagtttagtgtattgtcagatattcttggagatgaagatcatttaggtgatatggactttaaagtagctggaacgaaagatgggataacatcccttcaaatggatattaagattacaggtattacatttgaaattatggaacaggctttaaatcaagctaaagatggaagaattcatatcttaggagaaatgaacaaagcactagataaatctagagcagaagttggtaaacacactccaaaaatggaaaaaattacagttgataaaaaagatattgcggctgttattggtaaaggtggagcaacaataagagaaattgtggaaaattcgggtgctaaagttgatgttaatgacgaaggtgttgtaactgtagctgccccagatgaagaatctagaaataaagcaatgcaaatg

SEQ ID NO: 257096 - DNA, 790 bp, Unknown
  Bacterial polypeptide expressing nucleotide sequence isolated from the Sargasso Sea
tcttgaaagaacacatggttctgcattatttaccagaggagaaactcaagcattagtagtaactactttaggaacaggtcaggatgaacaacgtattgatgctattgagggggaatataaagaaaattttatgcttcattataattttcctccatactcagtaggcgaagtaggaagggcaggctctaccagtcgtcgtgaaattggacatggtaaattagcttggagagcaattcatccaatgttaccttcagcagaaaaatttccatatacttatagagtggtatcagaaattaccgaatcaaatggatcaagttcaatggcaacagtttgtggaacctccttgtctttaatggatgccggagttcctcttgaaaaaccaatcgctggtattgctatgggattaatcaaggaagataaaaattatttagttttatctgatattttaggggatgaagatcatctaggagatatggatttcaaagtcgcaggaactaaagatggaattacttctctacaaatggatattaaaattactagtataacatccgctattatgaaagaagcacttgctcaagcaaaagagggaaggctccatattttaaatgaaatgtcaaaagctattgataaatcaagagaagaaatttctaattatgctcctacaataacaactattcaggtacacaaagataagatacgtgaagtaatcggaaaaggtggcgcagtaataagagagatcactgaaaaaacgggtgcaaaaattgaaatcaatgacgaaggtcttgtaagt

SEQ ID NO: 257097 - DNA, 976 bp, Unknown
  Bacterial polypeptide expressing nucleotide sequence isolated from the Sargasso Sea
gattgttagaactgatatattaaaaaataaaaatcgtatcgatggaagaggactttcagatgtaagacctattatgtgtgaagttggaatactgccaagaactcatggttcagcactatttacaagaggtgagacacaagcaattgtaacaactacacttggaacttcagacgacgaacaaagaattgaaagtttagatggtctacaaagagaaagatttatgcttcactataactttcctccattttcagttggtgaagttggaagagtgggtacaggcagaagagaaattggtcatggaaaacttgcatggcgagcaatcaattcttctttaccttcaaaagaaagctttccttatacatttagaattgtatcagaaattacagagtctaatggctcatcgtccatggcaacagtttgtggtgcttcattagctttaatggatgctggagttccaattaaagaaccagttgcaggtattgcaatgggattaataaaagaaggcaatgattttagtgttttgtctgacatattaggggatgaggaccatctaggagacatggattttaaagttgcaggaacaaaagatggaattacgtcgcttcaaatggatataaaaattacaggaattacatttgaaataatggaacaagctctaaagcaagctaaagatggaagagttcatatcttaggtgaaatgaataaagcattaaataaatctagagcagatgttggtaaacacactcctaaaatggaaaaaataactgtagataaaaaagatattgcaactgtaattggaaaaggtggcgcaacaataagagaaattgttgaaaagtcaggagcaaaagttgatgtaaatgatgaaggagttgtaactgttgctgctccagatgaagaatctagaaataaagctatgcagtttattaaggatcttactgccaaggccgaaatgacaaaatttacaacggtaaagtaa

SEQ ID NO: 257098 - DNA, 863 bp, Unknown
  Bacterial polypeptide expressing nucleotide sequence isolated from the Sargasso Sea
gaagtagcaggaaagaagataagtttagaaacaggcaaagtagcaagacaggcagacggagcaataattgcaacatgtggagagacagtagtactagcaacagtcgtgggagcaaaaaaagtaaatcctgatgtggattactttccattatctgtaaattaccaagaaaaatattatgcagcaggaaaaattccaggtggatattttaaaagagaagctagaccaactgagagcgaaacattaatctctagattaattgatagaccaattagacctttatttcctgatgaatttaaaaatgaagttcaattgttaccaactgtaatttcctatgataaagaaaatgaaccagatattttatcaatcaacgcttcatcagcggcattagctatatcaggaatgccatttatgggtccagtaggagcttcaagagttggttttatagatggaaaatatgttttaaatccatctaaagtagagttagaaaaatcaaaattagatttagttgtagcaggtacaaaagatgccgtgcttatggttgagtctgaggcgaacggtttaacagaagaagaaatgttaaatgcagtaaaatttggtcatgagggctttgttcctgtaatcgagatgattgaggaacttgcaaaagaatgtagaaaacccgagtggactgttgaaaagaaaaatctatcagaagttaagaaaaaacttgaggaaacttttacagaagatcttaagaaagcttttgcaacaagagataaacaagatagatcaaatcaaatttcagagattactgaaaaagctaaaaaactttatgatgacgatgaaaattattctgatctagatgttaactcagagcttaaaaa

SEQ ID NO: 257099 - DNA, 733 bp, Unknown
  Bacterial polypeptide expressing nucleotide sequence isolated from the Sargasso Sea
atgcaaagatctaattttatgttacattacaattttccacctttttcagtcggtgagtgcggtaggataggaaccggtagaagagaaataggtcacggaaaattagcttggagagcaattaattcttctctaccttctaaagaaaattttccttatacgttaagagttgtctctgaaataacggagtcaaatggatcttcatcgatggcgacagtttgtggaacttcactgtcccttatggatgctggcgttcctattaaagaacctgtagctggtatcgcaatggggttaattaaagaggggaataatttttctgttctttctgatattttaggtgacgaagatcacttaggtgatatggattttaaagtagccggcacaaaaaatggtattacttcacttcaaatggatattaaaataactggtattacatttgaaatcatggaaaaagctttagaccaagccaaaggtggaagagaacatattttagctgaaatgaacaaagcaatcaaaacttcaagaaaagagttttcaaaacacacaccaaaaatggaaacaattaaagttgataaaaaagatattgcaactgtaatcggtaaaggcggagcgacaataagagaaatagtagaaacgtcaggagctaaagttgatgttaaagacacaggagaggtaacggttgctgcaccagatgaagactcaagaaataaagctattgaatttataaaaaatctgg

SEQ ID NO: 257100 - DNA, 865 bp, Unknown
  Bacterial polypeptide expressing nucleotide sequence isolated from the Sargasso Sea
atgggtccagtcggagcttctagagttggatatattgatggaaaatatgttttaaacccgtcaaaagttgagcttgaaaaatctaaattagatcttgtagttgcaggtacaaaagatgctgtgttaatggttgagtcagaagcaaatggattgacagaagaagaaatgttaagcgctgtcaaatttggacatgaaggttttgttccagtaatcggaatgatagaagaacttgcaaaagaatgtagaaaaactgagtgggttgttgaaaataaagatctatccaaagttaagaaaaaacttgaagaaacatttacagaagatctaaaaaaagcttttgcaacaagagataaacaagatagatcaaatcaaatttcagaaattactgataaagcaaaaaaactttatgagaaagacgaaaattatacagatcttgatgtaaactcagagcttaaaaatcttgagaaaaaaattgtaagaactgacattctaaaaaataagaatagaattgatggaagaggtttatctgaagtaaggccaatttcatgtgaagttggggttttacctagaactcatggttctgcattatttactagaggagaaacgcaagcaattgtaactgctactttaggaacatctgatgatgagcaaagaatagagagtttagatggtcttcaaagagaacgatttatgcttcattataattttcctcctttctcagttggtgaaactggaagaattggaactggaagaagagaaataggtcatggcaaattagcatggagagctattcattcttcattaccctcaaaagaggcgtttccatatacttttagattagtatcagagattaccgagtctaatggtt

SEQ ID NO: 257101 - DNA, 655 bp, Unknown
  Bacterial polypeptide expressing nucleotide sequence isolated from the Sargasso Sea
atgtttaaagtgttaaaaaaagaaatagaagttgcaggaaaaaaaatttccctagaaacaggaaaaattgctagacaagctgatggagcaataattgctaaatgtggtgaaactattgttcttgcaacagtagttggcgcgaagaaggttaatccagaagtagattactttccattatcagtaaattatcaagaaaaatattatgcagcaggaaaaattccaggtggttattttaaaagagaagctagaccaacagagagcgaaactcttatttcaaggttaattgatagaccaataagaccattatttccagatgaatttaggaatgaagttcaacttttgcctacagtaatttcctatgataaagaaaatgaagctgatatattatcgatcatcgcatcttctgctgcattggcaatctctggaatgccttttatgggtccagtcggtgcttccagagttggctttattgatggaaagtatgttcttaatccctcaaaaaaagacttagaaaaatcaaaactagacttagttgttgctgggacaaaagatgctgtcttaatggttgagtctgaagccaaaggtcttacggaaaaacaaatgttagacgcagaaaaatttggtcacgaaaattttgttccacttatcaaaatga

SEQ ID NO: 257102 - DNA, 891 bp, Unknown
  Bacterial polypeptide expressing nucleotide sequence isolated from the Sargasso Sea
aagaattgaaagtttagatggtcttcaaaaagagagatttatgttgcactataattttcctccgttctcagttggtgaaattggtagaattggaactggtagaagagaaattggacacggtaaactagcatggagagcaattaactcatcactaccttcgaaagaaaattttccttacacatttaggatagtttccgaaataactgaatctaacggctcatcctcaatggcaactgtttgtggaacttcactagctctcatggatgcaggtgttccgattaaagagccagttgctggaattgccatgggtttaattaaagagggtgatgacttcactgtgttatcagatattcttggtgacgaagaccatttaggggacatggattttaaagttgctggtactaaagatggtattacatccctacaaatggatataaaaattactggaatcacttttgagataatggaacaagctttaaatcaagctaaagatggaagaattcatatcttaggtgaaatgaacaaagcactttctaaatcaagagataatgttggcaaacacacaccaaaaatggaaaaaattacagttgataaaaaagatatcgcagcagtaattggtaaaggtggtgcaacaattagagaaatagttgagaaatctggagcaaaagttgatgttaacgatgagggtgaagtaacagttgctgcacctgatgaagagtcgagaaatattgcaatgcaaatgataaaagatattactgctaaagctgaattaaataaaatttataacggtaaagttatgaaaattatggaatttggcgcttttgtaaattttttaggaaagcaagatggattagttcacatttcagaacttgcagataaaagagttgctaa

SEQ ID NO: 257103 - DNA, 892 bp, Unknown
  Bacterial polypeptide expressing nucleotide sequence isolated from the Sargasso Sea
agcaaagagagctattcaagctgtacttccagataatgaagattttccatacactgttcgtatagtttcagatgttcttgaatcaaatggctcgtcatcaatggcaactgtttgtggatcctcactttctttgatggatgctggagttcctattgaggctcctgtcgctggaattgcaatgggtttaataaaagaaggagatagctatataatactttcagatatcttgggtgatgaagaccatttaggagatatggactttaaagtttgtggaacttctgagggaatcacagcgttacaaatggacatcaaaataaaaggtattagtgaagatattatgaaagaagcattagagcaagcaaagaaaggaagaaatcacatactttctgaaatgtctaaaacaatatcatcacagaaagaaaatatttcttcatatgctcctaggattacaacgataatggttgatccagcaaagataaaagatatcattggttctgggggaaaaaatataaggaaacttatcgaagataataatgttaaaattgatgttgatgatactggtagagtaaatgtcattgcagttaacgaagaggatgctaaaggcgcattaaaagatatagcttatattgttcgtgatattgaagtaggtaaatattatataggttctgtaaaaagagttttagattttggagctatagtcggcctaagccctaccatggatggtttaatacatgtttcggagcttgcaaaggaaagagtggcaaaggttacagatatccttaatgagggagacgaagttctagttaaatgtttagaaaagggacgagatggtaaaattagattgagtagaaaagaggctctcgatcaaaacattgaagatttcagagaataa

SEQ ID NO: 257104 - DNA, 838 bp, Unknown
  Bacterial polypeptide expressing nucleotide sequence isolated from the Sargasso Sea
aatgtttaaagtatataagaaggaaattgaagtagcaggaaaaaagataagtttagagacaggtaaaatagcaagacaagcagatggcgcaattatcgcaaaatgtggagaaacagttgttttagcaacagtagttggagcaaagaaagtaaatccagaagtggattactttccattatcagtaaattaccaagaaaaatattatgctgctggaaaaattccaggaggatattttaaaagagaagcaagaccaactgagagtgaaacattaatctcaagattaattgatagacctatcagaccattgtttcctgatgaatttaaaaatgaagttcagttattaccaacagtaatttcttatgataaagaaaatgaagcagatattctatctataatagcttcttcggcagcattagcaatttcaggcatgccttttaagggtccagttggcgcctctagagtaggttttatagatggtaaatatgttttaaatccttctaaaattgaattagaaaagtctaaattagatttagtagttgcaggtacaaaagatgcagttcttatggttgagtctgaagcaagtggtttaactgaagaagaaatgttaaatgcagtgaaatttggtcacgagggatttgttccagtaattaaaatgatagaagaatttgcaaaagaatgtaaaaaaactgagtggactttcgaaaagaaagatttatctgaagttaagaaaaaacttgaggaaacttttactgaagatttaaagaaagcttttgcaacaaaagataaacaagatagatcaaatcaaatttcagaaattacagataaagccaaaaaactt

SEQ ID NO: 257105 - DNA, 843 bp, Unknown
  Bacterial polypeptide expressing nucleotide sequence isolated from the Sargasso Sea
aatgtcatatttgaaaaaaattgaaaaagatgtagttagatcgcaaattttgaatgataaatctagaattgatgggcgtaagcttgatgaagtaagagatatttcttcagaagtttcatggttgcctagaacacatggttcttccttgtttactagaggtgaaacacaggcaattgttgttgcaactttaggatttggagaagatgagcaacggattgaggcacttcaaggttcttataaagaaaatttcatgcttcattataattttcctccatattcagttggggaggttggaagaatgggttcagcaggtagaagagaaataggtcatggtaaattagcttggagagcccttaaagcagtattgcctaataaagaggattttgattatacaatccgcttagtatcagatattactgaatcaaatggttcatcatcgatggcaactgtttgtggatcttcacttgctctaatggatgctggggttcccatcaaaaattcagtttcaggtattgcaatgggattaattaaagagggcgatgattttgctgtattatctgatattctcggtgatgaagatcatttaggcgatatggattttaaagtagcaggcaccaaagacggtgttacatcattgcagatggatattaaaatcaccggaatcacatatgagataatggaaaaggccctagaccaagctaagggcggaagagaatatatcttaaatgaaatgaataaagcgttaaactctccaagaactgagcttggaccttacacacctagagttgaaatgatgaaagtcaaaagagataatattggtgaaattattgggaaaaggtggtg

SEQ ID NO: 257106 - DNA, 850 bp, Unknown
  Bacterial polypeptide expressing nucleotide sequence isolated from the Sargasso Sea
tataagaatgaaattgaagtagcaggaaaaaaaataagtttagaaacaggtaaagtagcaagacaggcagacggtgcaataatcgcaaaatgtggtgagacagtcgtattagcaacagtggttggagcaaaaaaagtaaatcctgaggtggattattttccactgtcagtaaattatcaagaaaaatattatgcagcaggaaaaattccaggtggatactttaagagagaggcaagaccaactgaaagtgaaacattaatttcgagattaattgatagaccaattagacctctatttcctgatgaatttagaaatgaagttcaattgttaccaactgtgatttcttatgataaagaaaatgaggctgatatcttatctattacagcatcttcagccgcgttggctatatcaggaatgccctttaaagggcctgttggagcatctagagttggatttattaatggagaatatgttttaaatccatcaaaagctgagcttgaaaattcaaagctcgatttagttgtggctggtacaaaagatgcagtgctcatggttgagtctgaggcaaatggtttatctgaggaggaaatgttaaatgcagttaaatttggacatgaaggatttgttcctgtaattaaaatgattgaggaacttgcaaaagaatgcagaaaacctgaatggacggtcgaaaagaaggatctatctgaggtaaagaaaaaattagaaggaacttttacagaagatcttaaaaaagcttttgcaacgagggacaaacaagataggtcaaatcaaatttcagaaattacagataaagctaaaaaactttatgaagaagatgaaaattatacag

SEQ ID NO: 257107 - DNA, 859 bp, Unknown
  Bacterial polypeptide expressing nucleotide sequence isolated from the Sargasso Sea
aagtttggaaggtcttcaaagggaaagatttatgcttcattataattttccaccattctcagtcggagaaactggaagaattggtacaggaagaagagaaattggacatggaaaacttgcatggagagctataaattcttcactaccatcaaaagaaagttttccttatacatttagaatagtatctgaaatcacagagtctaatggctcatcatcaatggcaacagtctgtggaacttcattagcattaatggacgctggtgttccaatcaaagaaccagttgcaggtattgctatgggcttaattaaagaaggtgaagatttcagagtattgtcagatattctaggagatgaagatcacttaggtgatatggattttaaagttgcaggaactaaagatggaattacgtcacttcaaatggatattaaaattacaggaattacctttgaaataatggagcaagctttaaaacaggctaaagatggaaggattcatatcttgggcgaaatgaataaagctttagacaaatcaagagaaggtgttggtaaacatactccgaagatggaaaaaattactgtcgataaaaaagatattgcaacagttattggaaaaggaggcgcaacaataagagaaatagttgaaaaatcaggcgctaaagtagatgttaatgatgagggagttgtaacagttgcagctccggatgaagaatctcgaaacattgctttgcaatttataaaagacataactgctaaagctgaattgaataaaatttataacggagaagttatgaaaattatggaatttggagcatttgttaactttcttgggaaaacaagatggtttagttcatatttctga

SEQ ID NO: 257108 - DNA, 666 bp, Unknown
  Bacterial polypeptide expressing nucleotide sequence isolated from the Sargasso Sea
gagttgtattcagaaatcacagagtctaatggttcaagttcaatggcttcagtctgtggcacatctttatcattaatggatgctggagttcccctttcaagtccagttgctggtatagctatggggcttattaaagaaggagatgactttgcagttctaactgatatattgggagatgaagatcatttaggggatatggacttcaaggttgctggaactgaatctggtataactgctctccaaatggatatcaaaattaaaggtataaatgaatcaattatggaaactgcattagcaaaagctaaaaatgcaagaaatcatatattgggcataatgaatgaagtaatttcatcagctaaagatttatctgaaaatgctccagctatgaaaacatttatggttgataaaggtaaaattaaagagattattggcaaaggcggcgctgtgataaaaggaatgcaagaaaaaactggagcaactgtcgatgtaaatgatgatggtgttgtttctgtgtttggtcaaaatcagtcatcaatgaaagaatgcttagctattattgaagaaattttagaagagcctgaactaaacaaggtatataaaggtaaggttgttaaaattgttgaatttggtgcttttgtaaatatacttccaggaaaagatggtctt

SEQ ID NO: 257109 - DNA, 829 bp, Unknown
  Bacterial polypeptide expressing nucleotide sequence isolated from the Sargasso Sea
ccctctatgggatcagtctgtggaagtacactttcattacttgatgccggggtccctctaaaagctcctgtaagtggaactgcaatgggtttaattaaagaaggtaaagaagtaagaatacttaccgatatacaagggattgaagattttcttggagatatggatttcaaagttgctggcactgagaaaggcattacagcattacaaatggatatgaaaattacgggcttaccagtcgctgttatttctgatgctattaaaaaggctcgacaagcaagattacatatcttagaaaaaatgcaagaagcaataaataagcctcaagaatccctatctcctcatgcaccaagactattaagcttcagaattgatccagaacttataggtactgtaataggacctggagggagaactattaaaggtattactgaaagaactaatacaaaaatcgatattgaggatggtggaattgttactattgcttctcatgacggtgctgcggctgaagaagctcaaaagataatagaaggattaactagaaaagttcatgaaggtgaagtcttttcaggagttgtaactagaattatcccaataggggcttttgtagaaatccttcctggcaaagagggcatggtgcacatctctcaattatcagaagctagagttgagagggttgaagatgtagttaggcaaggcgatgaggtaacagtaagagtaagagaaatcgatagtagaggaagaattaatcttactttaagaggagtctcacaaaatagcggcatgtcttatcctgaaccaactccaaccccagttgcccctctcaattaag

SEQ ID NO: 257110 - DNA, 871 bp, Unknown
  Bacterial polypeptide expressing nucleotide sequence isolated from the Sargasso Sea
agttgtagcaggtactaaagatgcagtccttatggttgagtctgaaacatcaggtttatctgaagaagtaatgttagcagcagttaaatttggtcaccaaggatttgttccagtaatcgagatgattgaggaactcgcaaaagaatgcagaaaatctgaatggattgttgagaaaaaagatttatctgaagttaaacaaaaacttgaggaaacttttactgaagatcttaaaaaggcttttgcgacaagagataaacaagatagatcaaatcaaatctcagaaattaatgaaaaagctaaaaagctttttgaggaaaatgaaaattactctgatcttgatgttaactctcagcttaaaaatctagagaagaaaattgtcagaactgatattcttaaaaataaaaatagaattgatggtagaggattgtccgacgtaagacctatctcatgcgaagcgggtgttttaccaagaacgcatggttctgctttgtttactagaggagaaacgcaagcaattgttgttactactttgggtacatctgatgatgagcaaagaattgaaagtttagatggtcttcaaagagaacgatttatgcttcattacaatttccctccattttcagttggtgaaactggaagaattggaactggtagacgcgaaattggtcatggtaaactagcttggagagcaatcaattcttcattaccttcaaaagaggcgtttccatacacttttagaatagtatcagagattacagaatctaatggttcctcttctatggctactgtctgtggagcatctctagcattaatggatgcgggtgttccgataaaagaaccagttgcaggtattgcaatgggtttaattaaa

SEQ ID NO: 257111 - DNA, 748 bp, Unknown
  Bacterial polypeptide expressing nucleotide sequence isolated from the Sargasso Sea
atgaaagaagtgatttcaagagaaatgaactggggcgaccagaaactaaaaatagaaacaggaaaagtagcaaaacaggcaacagcatcaacaattgttagctatggtgatacagttgttatggcaaatgtcgtagcagctaaagagccaaaaccagatttagatttttttccacttacagtaagttatcaggaaaaattttatgctgctggtaaaattccaggtggtttttttaaaagagagggaagaccaacagagtttgaaactcttacctcaagattaattgatcgtccaatcaggcctctctttccagaaggctttaaaaatgaaactcaagttatattaactgtgctttcgcatgacggagaaaccaatcctgacattgttgcaatgattgcagcctcaagtgcattaactttgtctggagttccttttatgggcccaattggtggctgtagagtgggttatgatggatcaaattatacattgaatccaaaaataaacgatgatggagatcttgatcttgtcgttgcaggcactagcgacgctgtactaatggttgaatctgaagcaaagcagctttcagaggaaataatgttaggagcggtaaagtttggtcatgagtcaatgcaagaagttataaaaatcataatcaatcttgctgaggaatgcgcaaatgacccttgggagttcagtcatacaattaatgagtcattgttagatgaaattaaaaaaacttgtgaagata

SEQ ID NO: 257112 - DNA, 937 bp, Unknown
  Bacterial polypeptide expressing nucleotide sequence isolated from the Sargasso Sea
ggggcgatcaaatttaattatagaaacaggaaaaatagctaaacaagcaacagcatctactatcgtaaaatatggtgatacagttgttatggctaacgtcaccgcggctaaagaaccaaaattagatcaagatttttttcctttaacagtgagttatcaggaaaaattttatgccgcaggaaaaatacctggaggcttttttaaaagagaaggcagaccaactgaatttgaaacacttacgtccagactaattgatagacctattagaccactatttcctgaaggatttaaaaatgaaactcaagttgtattaactgttctttctcatgatggtgaaacaaatgccgatgtagttgctatgatagctgcttcaagcgcactaacattgtcaggcataccttttatgggtccaataggtggttgtagagtgggatataatggtgagaaatatattctaaacccaaaaataactaatgagactgagttagatcttgttgttgctggcacagcgtcagcagttttaatggtggagtcggaggcaaaccaattatcagaggaagtcatgcttggtgctgttaaatttggtcacgaatccatgcaagacgttatcaaagttattattaatcttgctgaggaatgtgctaaagacccttgggaatttgaacatatagagaatagtgaattattgaatagtcttaaagaagaatacacagatgatattaaaaaaagttactctatcgtagataaaatggaaaggcatagttcattaagtgaaattaggtctaggattgaagatgcttattcaggtaactcggatataaatatgaatgaagtgatgggttattttaagaaaattgagaaagggattgttcggtctcaaatattagaagaaaagaagagaattgatggaagatctctgaatgaagttagaaatatt

SEQ ID NO: 257113 - DNA, 895 bp, Unknown
  Bacterial polypeptide expressing nucleotide sequence isolated from the Sargasso Sea
tgcaaataagttagttgatcagttagatataacaaaacgcgaagtattaaatgaggaaattgatgaggatttgaaaaagcaagtttctgatgtggttaaagataaaattgataatgcaattaatactgctgataagctagagcgggaaaaaaagattggcgagcttcatgatgaagctcaagctcattttgaagaatcccatcctgaatcagaaaaaataattaatggatttgtaaatgatgagttaaaaacagcttttagagaacaaattttagctaaaggtgtacgctctgatggtaggaaaactactgacattagaccaatatcaatcgaaactggtattttacctagaactcatggatctgcattgtttactaggggagaaactcaggcgatagttgttcttacaatgggtacaccaagagatgagcagattattgatagtatggatgttgatatgaagaaaaagttttttcttcactacaactttccaccatatagcgttggagaaacaggccgcattggttttacaggccgaagagaaataggccatggtaatttagcagagcgagctgttaaagaaataatgcctgattatgaggattttccttatacagtgagaatagtttcagaaataacagaatctaatggttcttcttcaatggcatctgtctgcggaggttccttggctctgatgcatgctggagccaaaacaaaaggtcatgttgccggtattgctatggggcttattaaagatgaagataggcatgccgttttaagtgatatattaggcgcggaagatcatcttggtgatatggattttaaggtcgctggaacaagagaaggaatatccgcaattcagcttgatcttaagattgatggcatatctttttga

SEQ ID NO: 257114 - DNA, 889 bp, Unknown
  Bacterial polypeptide expressing nucleotide sequence isolated from the Sargasso Sea
gaaaaagatattgttagacccgcaattcttaaagataaaaagagaattgatggcagaggactcgctgatgttagaaagattgaatgtgaagtaggtgttttaccaagaacacatgggtcagctctatttacaagaggggaaactcaagcattagtagttacaacattaggtatgtcagatgacgaacaaagacttgaaagtttagatggtatgcaaagatctaactttatgttgcactataattttccacctttctctgttggtgaatgtggtagaataggcactggtagaagagaaataggacatggcaaattagcatggagagctataaattcttcattacctttgaaagaaaatttcccctatacactaagagttgtttcagaaattacagagtcaaatggatcttcttcaatggcaacagtgtgcggaacctcactgtcattaatggacgctggagtaccaattaaagaaccagttgcaggaatagcaatgggtttaataaaagagggcgaaaagttttcagttttatctgatattcttggagatgaagatcacttgggagatatggattttaaagtcgctggtacaaaagatggtatcacatcattacaaatggatataaagataaccggaattactttcgaaattatggaacaagctttaaatcaagctaaggctggcagagagcatattttgaacgaaatgaacaaagctataaaaacatcgagaaaagagttttcaaaacatactccaaaaattgagacaattaaagtcgataaaaaagatatagcgacagtaattggtaaaggtggagcgacgattagagaaattgtcgaaacatctggagcaaaagttgacgtaaaagatactggagaagttactgtgg

SEQ ID NO: 257115 - DNA, 795 bp, Unknown
  Bacterial polypeptide expressing nucleotide sequence isolated from the Sargasso Sea
aatgtttaaagtatataagaaggaaattgaagtagcaggaaagaagataagtttagaaacaggtaaggtagcaagacaagcagacggtgcaataatcgcaacatgtggagaaactgtcgttttggcaacagttgtaggagctaagaaagtcaatccagatatagattattttcctctatctgtaaattaccaagaaaaatattatgcagcaggaaaaattccaggtggatattttaaaagggaagcaagaccaacagagagtgaaacattaatctctaggttaatagatagaccaattcgaccattgttccctggtgaatttaaaaatgaagtccagttattacctactgtaatttcttacgataaagaaaatgaagcagatattttatcgataatagcttcatcagcagcattagcgatttctggcatgccatttatgggtccagttggagcttcaagagttggttttattgatggtaaatatgtattaaatccttctaagactgaactagaaaaatctgaattagatttagtcgtagctggtacgaaagatgctgtgctaatggtagagtctgaagcaagtggtttatcagaagaagaaatgttaaatgcagttaaatttggccatgaaggatttgttcctgtcattgaaatgatagctgaacttgcaaaagaatgtagaaaacctgaatggactgttgaaaagaaagatctgtctgaaattaagaaaaaaattgagaaaacttttactgaagacttaaagaaagcctttgcaacaagagataaacaagatag

SEQ ID NO: 257116 - DNA, 981 bp, Unknown
  Bacterial polypeptide expressing nucleotide sequence isolated from the Sargasso Sea
gtagctggtacaaaagatgcagtattgatggtggagtctgaaacctcaggtttatcagaaaaaataatgttagacgcagttaaattcgggcatgaaaattttataccagtaataaatttaatagaaaagttagaaaaaaaggccagcaaaactaagtgggaaatagaagaagtagatcacgctgaattaaagaaaaaaatagctaaagaatttgaaagtgatttaagaaaagcttttaaagaaattgataagaaaaaaagatcaacagctatttcagagatagactcaaaatgtaaagaaatgtttaaagaggacgagaacgtcacagagaatcaagctatggctcaactcaaatctcttgaaaaagatattgttagaacagcaattttaaaagataaaaaaagaattgatggtagaggactagctgatgttcgaaaaattgaatgtgaagttggtgttttacccagaactcatggctccgctttatttacaagaggagaaactcaagcattagtagttacaacattagggatgtcagacgatgaacaaaggcttgaaagcttagatggaatgcaaagatcaaactttatgttgcactataattttccacctttttctgttggagagtgtggaagaataggtactggaagaagagaaataggacatgggaaacttgcttggagagctataaattcatcgttacctctaaaagaaaatttcccttatactttaagagttgtatcagaaataaccgaatctaatggatcctcttctatggcaacagtctgtggaacttcgttgtcactaatggatgcaggagtaccaatcaaagaacctgttgcaggaatagcaatgggattaattaaagagggcgaaaaattctctgtcttgtcagatattttaggagatgaagatcacttaggtgatatggattttaaagtggcaggtacaaaagatggtattacatctttacaaatggat

SEQ ID NO: 257117 - DNA, 774 bp, Unknown
  Bacterial polypeptide expressing nucleotide sequence isolated from the Sargasso Sea
aaactttaatttcaagattaatagatcgaccaatccgcccattatttcctgatggttttagaaatgaagtgcaagttttaccaaccgttctttcttatgataatgaaaacgaagcagatatcttatcaattattgcatcttcagctgctttagcgatttcaggcttgccttttcaaggacccgttgctgcatcaagagttgggtatataaataataactatgtattaaatccatctaaagaacagttaaaagaatcaaaattagatttagttgttgccggtacaaaagatgctgttttaatggttgaatctgaagcttcaggtttaaccgagaaacaaatgttagacgcagttaaatttggtcatgaaaaatttgctccaattattaaagcaatagatagtcttaaaaaaaaatgctcaaaagaagcgtggaaaattgaagataaagattacagcaaattgagtgataaaatttcaaaaaaattagcaaaagatttagaaaaagctttttcagagaaggataagaaaaaaagatcagaattagttaatttagcaacagaaaaatgtaaatcactatttgaaggtgacgaaacttattctgaacttgaaatacttttacagttaaaaaatctagagaaagatattgttagaacaaaaatacttaaaacaaaaaagagaattgatggtagaggtttatcagatgtaagacctattaagtgtgaagttggagtattgcctagaactcacggatcagctttatttaccaggaggtgaa

SEQ ID NO: 257118 - DNA, 728 bp, Unknown
  Bacterial polypeptide expressing nucleotide sequence isolated from the Sargasso Sea
aatgtttaaagttgtaaaaaaagaaatagaagtaagtggaaagaaaataagtttagaaacaggtaaaatagcaagacaagcagatggcgcaataatagctcagtgtggtgaaacagtagttttagcaacagtagttggtgcaaagaaagtaaatccagatatggactattttcctttgtctgtaaattaccaagaaaagtattatgcggctggtaaaattccaggtggatattttaaaagagaagccagaccaactgaaagtgagactttaatatcaaggttaatagatagacctatccgacctttgttccctgatgaatttaaaaatgaggtacaattattaccaacagtaatatcttatgataaagaaaatgaggctgatattttatcaataattgcctcttcagctgcattagctatatcaggtatgccttttatgggtcctgtgggagcttctagagttggctttattaaaggagaatatgtgcttaacccatctaagaaagaattagaggaatcaaaattagatttagtagttgcgggaactaaagatgcagttttaatggtcgaatcagaagcaaatggtttaacagaggaggaaatgttgaacgctgtaaaatttggccatgaaggttttattccaataattcaaatgatagaagatctagcaaaagaatgcagaaaaccagaatgggttgttgaaaaaaaagatctttcagaaataaaaa

SEQ ID NO: 257119 - DNA, 853 bp, Unknown
  Bacterial polypeptide expressing nucleotide sequence isolated from the Sargasso Sea
gtaccagtaattgagatgattgaggagcttgcaaaagaatgcagaaaacctgagtggactgttgaaaagaaagatttatcggaagttaagaaaaaattagaggaaacctttacagaagatctaaaaaaagcttttgcaacaagagacaaacaagatagatcaaatcaaatttcagagattactgataaagctaaaaaactttatgaggaagatgaaaattacacagatcttgatgttaacagtcagttaaaaaatcttgaaaaatcaattgtcaggactgatattctaaaaaataaaaatagaattgatggtagaggtttatcagacgtaaggcctatcgaatgtgaagtgggtgttttaccaagagcacacggttctgcattatttactagaggagaaacacaagcaattgttgtcgcaactttaggaacatctgatgacgagcaaagaattgaaagtttagatggattacaaagggagcgatttatgcttcactataattttcctcctttttcagttggagaaactggaagaattggaacaggtagaagagaaattggtcatggtaaactagcttggagagcaattaattcttcactaccttcaaaagaagcatttccatatacttttagagttgtttcagagattacagaatctaatggttcgtcttcaatggctactgtttgtggaacttctttagcattaatggatgctggagtaccaataaaagagccagttgctggtattgcgatgggattaattaaagaaggagatgatttcagcgtcctatcagatatattaggtgatgaagatcacctaggtgatatggactttaaagttgctgggactaaag

SEQ ID NO: 257120 - DNA, 951 bp, Unknown
  Bacterial polypeptide expressing nucleotide sequence isolated from the Sargasso Sea
ttaagggctaaagtgagtcctataccgtgggagttttctgaagacgagttaactgctgaatttaagaataagattgcagactcttttacagaagaaatagcaagcgcgtttaaaattgcagataaagcatctagaggagaagcaatcaatgctgttagggtcaaaataaatgaggctcatgatgaattggatgatttagaaagaggtaaattaatgaatgccttcaaattagttgaaaaagatgtcgtaagaaaaagcatcttggctaacgaaccaagaatagatggaagagatttagatacggttagaccaatatatgttgaaactgatgtccttccaagcgtccatggatcttctttatttacgcgcggagaaacacaagcattagttgcagcaactcttgggtcaataagagatgctcaaagaatagaagggcttaatggagaagaatctaatacctttatgctgcattacaattttcctgcatatagcgtaggcgagattgggatgccattaggaccaaagcgaagagagattggccatggaaatcttgcaaaaagagctattaaagctgttcttcctagctcagaagaatttggttataccttaagggttgtctctgaaatcacagaatcaaatggatcaagttctatggcttcagtctgcgggacttcactttcgttaatggatgctggcgtgcctatcagcaatccagttgctggagtagcaatgggcttaattaaagaagaaaatagttttgctgttttaacagacattcttggtgacgaggatcaccttggcgacatggactttaaggtcgctggtaccaaagagggtgttacggccttgcaaatggacataaaagttcaaggcattacatctgaaatcatggaatctgctctagagaaagcaaaaaatgctcgtatgcatattttagagaaaatgaatgaa

SEQ ID NO: 257121 - DNA, 747 bp, Unknown
  Bacterial polypeptide expressing nucleotide sequence isolated from the Sargasso Sea
cccaccatattctgtaggagagattggatttattggatccccaaaaagaagggaaattgggcatggtaaacttgctagacggggcgtacaagctgttatgccaactctagaggattttccatatactatcagagttgtctcagaaataatggaatctaatggttctagctcaatggcatctgtatgtggctcaagtctttcaatgatggatgctggggtaccattatcagctcctgtcgccggtatagctatgggtcttgtgaaagaaggtgataaatttgtagttttaactgatattcttggtgatgaagatcacttgggtgacatggacttcaaggtagctggaactgaatcaggaattaatgcattgcaaatggatattaaagtagatggaataacatctgagattatgtctcaagcattagttcaggctaaagatgctagattacatattctagcagagatggctaaagtcataagcaagccaaaagaagatatgtcagagtttgctccaagatatacgcatattaaaatcgatccttctaaaatagcagctgtaattggtaaaggtggcgcagttataagatcaattgtggaagagacaggcgcagttatagatataacagatgatggtgtagtgaaaattgcggctactgatcaatctattagtgatcatgctaaatcaatgattgaagaaataacagctggaccacaagtgaataagatctatgaaggtaaagtagtaaa

SEQ ID NO: 257122 - DNA, 886 bp, Unknown
  Bacterial polypeptide expressing nucleotide sequence isolated from the Sargasso Sea
aaacagaattgatggaaggggactttcagatgtaaggccgataatgtgtgaagttggaattttaccacgaacacacgggtctgcattatttacaaggggtgaaactcaagcaattgtaacaactacactaggaacttcagatgatgaacaaagaatagaaagcttaaatggattgcaaagagaaagatttatgcttcactataacttccctccgttttcagttggtgaaacaggtagaattggaacaggaaggagagaaattgggcatggaaaacttgcttggagagcaataaattcttctttaccatcaaaagaaagttttccatatacatttaggattgtatcagagattacagaatctaatggttcatcatcaatggcaacagtatgtggaacttcattagcattaatggatgccggagttccaataaaagagccagttgctggtattgctatgggattaattaaagaaggtgaagactttagtgtattatcagatattcttggagatgaggatcatttaggtgatatggatttcaaagtagcaggcactaaagatggaattacatcacttcaaatggacattaagattactggaattacatttgaaataatggaacaagcattaaaacaagcaaaagatggacgaattcacattttaggtgaaatgaataaagctttaaataaatcaagagaaggcgtcggaaaacatactccaaaaatggaaaaaataactgtagataaaaaagatatcgcaactgttattggaaaaggaggcgcaactataagagaaatagttgaaaaatcgggcgctaaagttgatgtaaatgacgaaggaattgttacagttgcagcgccagatgaagaatctagaaatatgcttaaa

SEQ ID NO: 257123 - DNA, 799 bp, Unknown
  Bacterial polypeptide expressing nucleotide sequence isolated from the Sargasso Sea
atgtttaaagaatttaaagaagaaatagattttggtggaaaaaaagtaattttagaaacaggaaaaattgctcgtcaagccgatggagctattattgcgacttgtggtgagactgttgttattgcaacagtagttggtgcaaaaaaagttaatccagaaactgattattttcctctttcagtaaactatcaagaaaaatactatgcagctggaaaaattcctggaggttattttaaaagggaagcaagaccaacagaatctgaaactttgatatctagattaattgacagaccaatcagacctctatttccggaaaactttaaaaatgaagtacaagtccttcctacggtgctctcatatgatcaagaaaatgaagctgatattttatctataattgcttgttcagcagccttagcaatttctggtcttccttttaaaggtcctatagcagcatcaagagttgggtttatagacaataaaaatgtgctgaatccaactaaaaaagaattagaaaactcaaagttagacttagttgtagctggaacaaaagatgcggtgttgatggtagagtccgaagcatcaggcttaacagaaaaacaaatgttggacgctgttaaatttggtcacgaaagttttgctaatgtaataaaaggtatagaaaatttagcaaaaaaagcctcaaaagaaaaatggaaaatagaagaaaaagatttaagtgaagtctcaaaaaaaataaaaaaagagcatacaaaagatttagaaaaagcgtttcagaaaaagacaaaaagaaaaggtcaga

SEQ ID NO: 257124 - DNA, 837 bp, Unknown
  Bacterial polypeptide expressing nucleotide sequence isolated from the Sargasso Sea
tcttcagctgcattagctatatcaggaatgccatttatgggacctgtaggtgcatctagagttggttatattgatggtaagtatgttttaaatccatcaaagactgatttagaaaaatcaaaattagacctagttgtagcaggtacaaaagacgccgtgcttatggttgagtctgaagcaagtggtttgacagaagaagaaatgttaaatgcagttaaatttggccatgaaggctttgttcctgtgattgaaatgattgaggaacttgcaaaagaatgtagaaaacccgattggtcagttgaaaagaaagatttatctgaagttaagaaaaaacttgaagaaacatttaatgacgatctcaaaaaagcttttgcaacaagagataaacaagatagatcaaaccaaatctctgaaattactgataaagctaaaaaactttatgaggaggatgaaaactatactgatctagatgtaaattctgagcttaaaaaaattgaaaaatctatagttagaacagatattttaaaaaataaaaatagaattgatggtagaggattatctgatgttagacctatttcttgtgaagtaggaattttaccaagagttcatggttcagctttatttactagaggtgaaacacaggcaatagtaacagcaactttaggtacttccgacgacgaacaaagaattgaaagtttagatggattacaaagagagagatttatgcttcattataacttcccacctttttcagttggtgaaacaggcagaataggaactggtagaagagaaataggacatggtaaattagcttggagagctattcattcttcacta

SEQ ID NO: 257125 - DNA, 649 bp, Unknown
  Bacterial polypeptide expressing nucleotide sequence isolated from the Sargasso Sea
caagaagtcatttatgctgcattataacttcccgccattctcggtaggcgaggctcgcccattccgtggcacttcgcggagggagatagggcacggaaatctcgctgagcgagcgattcagccactcctgccggagtatgatgacttcccctacacgatccgggttgtctccgatgttcttgagtcgaatgggtcttcgtcaatggcgacggtctgtggttcttcgctctctctcatggatgccggtgtcccaatcaaggcgccatgtgctggagtggctatggggcttatcaaggaaggtggagatgtcgccattcttactgatatcctcggcttggaagacgcactgggagatatggactttaaagttgcaggtactcgagatggtgtgacgtctattcagatggatatcaagatagaaggcctgacgatggatatcctgaccgaagctctggaacgagcgacaaagggacgtctccacatccttgaccagatgggtcaagcgttggaggctcatcgcgaagacttgtctgactatgctccacgcatcgtatcaatccagatcaacccggaaaaaatcggagagatcatcgggccgaagggtaagactatccgagcgattcaggaggagtcgggtgcgtcgatttga

SEQ ID NO: 257126 - DNA, 725 bp, Unknown
  Bacterial polypeptide expressing nucleotide sequence isolated from the Sargasso Sea
aaaattagatctagttgtagcaggtacaaaagatgctgtgctcatggttgagtctgaagcaagtggtttaacagaagaagaaatgttaaatgcagttaaatttggacatgaaggatttgttccagtaattgaaatgatagaggaacttgcaaaagaatgcagaaaacctgagtggatagttgagaaaaaagacttatctgaagttaagaaaaaacttgaggaaacttttacggaagatcttaagaaagcttttgcaacaagagataaacaggatagatcaaatcagatttcagagattactgataaagctaaaaagctttatgaggaagatgaaaactacacagatcttgatgttaacagtcagttaaaaaatcttgaaaaatcaattgttagaactgatattctaaaaaataaaaacagaattgatggtcgaggattatcagatgtaagacctattgaatgtgaagtgggtgttttaccaagagcacatggttctgctttatttactagaggagaaacccaagcaattgttgtagcaactttaggaacatctgatgacgagcaaagaattgaaagtttagatggattacaaagagagcgatttatgcttcactataattttcctcctttttcagttggagaaactggaagaattggaacgggtagaagagaaattggtcatggtaaattagcttggagagcaattaactcttcattacctacaa

SEQ ID NO: 257127 - DNA, 814 bp, Unknown
  Bacterial polypeptide expressing nucleotide sequence isolated from the Sargasso Sea
gtttgtggaagcactctttcattattagatgctggtgttccattaaaatcgcctgtgagcggaaccgcaatgggtttaatcaaagaaggtaaagaaattagaatccttactgatatccaaggaattgaggattttcttggagatatggattttaaagttgctgggacagaaaagggtataactgctttgcaaatggatatgaaaataacaggtctacctgttgcggttatttcagatgctatcaaaaaagctcgtccagcaagattacatatcctagaaaagatgcaagaagcaatagataagcctcaagaatctttatcccctcatgcaccaagattactgagcttcagaattgatccagaattaataggaactgtaattggacctggaggaagaactattaaaggtataacagaaagaacaaatactaaaatagacatagaggatggtggaattgttacgattgcatcccatgatggagcagcagcagaagaagcacaaaaaatcatagaaggccttacaagaaaagtacacgaaggtgaaattttctcaggagtcgtaacaagaataatcccaataggtgcttttgtcgaaatccttccaggtaaggaagggatggttcatatttctcaattatctgaagcgagagttgaaagagttgaagatgtagtaaggcagggtgacgaggtaactgttagagttcgtgaaattgatagtagagggaggattaaccttacactaagaggcgtcgctcagaatggtggtatgtcttatccagaaccaaccccaactcctgtggcaccacttagttaag

SEQ ID NO: 257128 - DNA, 778 bp, Unknown
  Bacterial polypeptide expressing nucleotide sequence isolated from the Sargasso Sea
cctagagttcatggttctgctttgtttacaagaggtgaaacacaagccattgtaacaactacacttggaacttcagatgatgaacaaagaatagagagtttagatggtcttcaaaaagagagatttatgttgcactataactttcctcctttttctgtaggtgaaacaggaagaattggaacaggaagaagagaaattggtcacggtaaattggcttggagagcaataaattcttctttaccctcaaaagaaaattttccttacacatttagaattgtttctgaaataacagagtcaaatggatcatcttcaatggctacagtttgtggaacttcacttgctctaatggatgcaggtgttccaattaaagagccagttgctgggattgcaatgggtttaattaaagaaggtgaggatttttctgtgctatcagatattcttggtgatgaagatcacctaggagatatggattttaaagttgcaggtactaaagatgggatcacatctttgcaaatggatattaagataactggaattacatttgaaattatggagcaggctttaaatcaagcaaaagatggaagaattcatattttaggggaaatgaataaagctcttgctaaatcaagagataatgttggtaaacacacaccaaaaatggaaaaaattacggttgataaaaaagatattgcggcggtcattggaaaaggtggagcaacaattagagaaattgtcgaaaaatctggtgctaaagtcgatgtaaatgatgtcggagaag

SEQ ID NO: 257129 - DNA, 751 bp, Unknown
  Bacterial polypeptide expressing nucleotide sequence isolated from the Sargasso Sea
actgcaatggggattaattaaagaggataaagaagtaagaattcttactgatattcaagggattgaggatttcctaggtgatatggatttcaaagttgccgggacagagaaaggaatcaccgcactacaaatggacatgaaaataacaggactgccagtatcagtaatttctgatgcaattaaaaaagctcgtccggctagattgcatatattagaaaaaatgcaagaagctattgacaagcctcaagactcattatctccacatgctccaaggttgttaagctttagaatagatccagaattaatcgggactgttattggccctggtggaaggactattaaaggaattaccgaaagaactaacacaaaaatagatattgaagacggtggaattgttactattgcctctcatgatggagcagctgcggaagaagcacaaaaaattattgaaggtctaacgaggaaagttcacgaaggggagattttctcaggtgtggtaacgaggataatcccaataggcgcatttgttgaaattcttccaggtaaagaaggtatggtacatatttctcaattatctgaagcgagggttgaaagagttgaggatgtagtaaggcaaggtgatgaagtaacagttagagtccgtgaaattgatagtagaggcaggataaatcttaccctacgtggtgttgcacaaaatggagggatgtcctacccagagccaactccaacaccagtcgcgccacttagctaa

SEQ ID NO: 257130 - DNA, 868 bp, Unknown
  Bacterial polypeptide expressing nucleotide sequence isolated from the Sargasso Sea
aagcagaatggagcaattatagctcaatgtggtgagactgttgttttagctacagttgtcggtgccaaaaaagtaaatccagatatggattactttccattatctgtaaattatcaagaaaaatattatgcagctggtaaaatcccaggtggatattttaaaagagaagctagaccaacagaaagtgaaacactaatatcaagattaattgatagacctatcagaccattgtttccagatgaatttaaaaacgaagtgcaactattacctacggtaatatcttatgataaagagaatgaagcagatattttatctatcattgcatcttcagcggctttagcaatctcaggaatgccttttatgggtcctgtgggtgcttctagagttggctttattaaaggaaagtacgttcttaatccttcaaaaaaagaattagaggaatctaaactagacttagttgtagcaggaactaaagatgcagttttaatggttgagtcagaggcaaaaggtttaactgaggaagaaatgctaaatgctgttaaattcggtcatgaaggatttgttccaataatagaaatgatcgaagatctcgcaaaagaatgcagaaaaccagagtggacagttgaaaaaaaagatctttctgagataaaaaagaaattagaggaagaatttaccgaagatttaaaaaaagcatttgctacaaaagataaacaagacagatcaaatcaaatttctgaaattactgagaaagctaaaaaactttatgaagagaatgaagattacactgacctagatgtaaattctcaacttaaaaatttggaaaaatctattgtaaggactgatattcttaaaaataaaatcgtataga

SEQ ID NO: 257131 - DNA, 853 bp, Unknown
  Bacterial polypeptide expressing nucleotide sequence isolated from the Sargasso Sea
tctgaactcaggtttatctgaagaagtaatgttggcagcagtcaaatttggtcatgaaggatttgttccagtaatcgaaatgattgaggaacttgcaaatgaatgcagaaaacccgagtggactgttgagaagaaagatttatctgaagttaaacaaaaacttgaggaaacttttacagaagatcttaaaaaagcttttgcaacaagagataaacaagatagatcaaatcaaatttcagaaattactgataaggctaaaaagctttttgaagagaatgaaaattattctgatcttgatgttaactcacaacttaaaaatctagaaaagaaaattgttagaactgatattcttaaaaataaaaacagaattgatggtagaggattgtctgatgtaagacctatatcatgtgaggttggtgttttgccaagaacacacggttctgctttgtttactaggggagaaacacaagcaattgttgttactaccttagggacatctgatgatgaacaaagaattgagagtttagatggccttcagagggaaagatttatgcttcactacaattttcctcctttttcagttggtgaaactggaagaattggaactggaagacgagaaattggtcatggtaaactagcatggagagcaattaattcttcattaccttcaaaagaggcttttccatatacttttagaatagtatcagagattacagagtctaatggttcttcttcaatggctactgtttgtggggcttctctagcattaatggatgcgggtgttcctataaaagaaccagttgcaggtattgcaatgggtttaattaaagagggagatgattttagtgtctta

SEQ ID NO: 257132 - DNA, 925 bp, Unknown
  Bacterial polypeptide expressing nucleotide sequence isolated from the Sargasso Sea
atttagaaatgaagtacaattattaccaacagttgtatcatacgataaagaaaatgaaccagatattttatcaattatagcttcttcagcagctttagcaatttctggattgccttttttaggtcctgtaggtgcttcaagagttggatatattaatggaaaatatattcttaatccatccaaaatagaattagaaaaatccaaattagatcttgttgtagcaggaacaaaagatgcggttttaatggttgagtcagaggcaaaaggcttaaccgaagaagagatgcttagtgcagtaaagtttggacatgaaaactttgttccaataattaaagcaattgaagaattagcaaaagaatgtggaaaaacagcgtgggaagttgaaaagaaagatctttcagaagtaaagaaaaaattagaaaaagaatttaaaaaagaattagaaaaagctttttcaattaaagataaaaaagaaagatcagatcttatttctagtataacagaaaaggcaaagaaattatatgaagaagatgaaaatatatctacgctagatgttagttatgaactaaagaatttggaaaaaagaattgtgagaaccgaaatattaaaaaataaaagtcgtatcgatggaagaggtttgtctgatgttagaccaatagcgtgtgaagttggtattttgcccagaactcacggatccgcattatttactagaggagagacacaggcaattgtaactacaactcttggaacatcagaagacgaacaaagaattgagtctttagacgggttaattagagaaagatttatgcttcattataattttcctccattttctgtaggagaaactggtagaataggaacaggaagaagagaaattggacatggaaaattagcttggagagcattaagtcgtctttacttctaa

SEQ ID NO: 257133 - DNA, 925 bp, Unknown
  Bacterial polypeptide expressing nucleotide sequence isolated from the Sargasso Sea
tatgtccttaatccatcaaaaaaagaattagaaaattcaaaattagatctcgttgttgcaggcacaaaagatgcagttttaatggttgaatctgaaacaagcggattaactgaagaggaaatgttaaatgcagttaaatttggtcatgaaaattttataccattaattgaaatgattgaagaacttgctgcagaatgtaaaaaacctgactggatagtagaaaaaaaagatgtatcagaagttaagaaaaaacttgaagatgaatttactgatgaattaaaaaaagctttttccataaaagacaaaaaagaaagatcaaatttaatttctgaaataacggacaaagcaaaaaaattgtttgaagaaaatgaaaattttacagacttagacgtgaattctgagctcaaaaatttagaaaaaagaatagttagaacagatatattaaagaacaaaaaaagaatagatggaagaggtctttcggatgtaagaccaattatgtgtgaagtaggaattttaccaagaacacacggatctgcactttttacaagaggcgaaacacaagcaattgtaacaaccacacttggaacttctgatgatgaacaaagaatagaaagtttagagggtcttcaaagagaaagatttatgttgcactataattttcctcctttttcagttggtgaaactggaagaattggaacaggaagaagagaaattggacatggaaaacttgcttggagagctatcaactcatctttacctccaaaagaaggtttcccatatacatttagaattgtatcagaaataactgagtcaaatggttcatcatctatggcaacagtttgtggaacttctcttgcgttaatggacgctggtgtgccaataaaagaaccagttgcaggtattgccatgggattaattaaagagg

SEQ ID NO: 257134 - DNA, 826 bp, Unknown
  Bacterial polypeptide expressing nucleotide sequence isolated from the Sargasso Sea
tgaaactgatttaagaaaagcttttagtgaaatagacaaaaaaaaaagatctactgcaatttctgaaattgatactaaatgcaaagagatgttcgctgaagaagagaatataactgaaaatcaggcaatgtcacaactaaagtctttagaaaaagatatcgtgagaactgcaattttaaaagatggcaaacgtattgatggaagaagtctatcagatgtgagacaaattaaatgtgaagtaggagtacttcctagagctcatggatcagctttatttacaagaggcgaaacacaagcgctagtagtaactactttaggtatgacagatgatgaacagagattagagagcttagatggaatgcaaagatctaattttatgttacattataattttccacctttttccgtgggagagtgcggaagaataggtactggaagaagagaaattggtcacggtaagttagcatggagagctatcaattcatctctaccaagtaaagagaatttcccttacacacttagagtagtttcggagattacagagtctaatggatcatcatcaatggcaacagtttgtggtacttctttatctttgatggatgcaggggttccaattaaagaacccgtagctggaatagcaatgggattgattaaagaaaaagataaattttcagttttatcagatatcttaggagatgaagatcatttaggagacatggattttaaagttgctggaactaaagatggaataacatcattacagatggatataaagatcactggaattacttttgaaataatggaaaaagctttaaatcaagccaaa

SEQ ID NO: 257135 - DNA, 832 bp, Unknown
  Bacterial polypeptide expressing nucleotide sequence isolated from the Sargasso Sea
agaggtgaaacccaagcaattgtaacaactacacttggaacttcagatgatgaacagagaatagaaagtttagaaggtcttcaaagagaaagatttatgcttcactacaattttccaccgttctcagttggtgaaacaggaagaattggaaccgggagaagagaaataggacatggaaaattagcatggagagcaataaattcatctttaccatcaaaagaaagttttccatatacattcagaattgtatcagagattaccgagtccaatggatcctcttccatggcaacagtttgtggaacttcattagcgctaatggatgctggcgttccaataaaagaaccagttgcaggtattgcaatgggattaataaaagaaggtgatgactttagtgtactatccgacattcttggagacgaggatcatttaggcgatatggattttaaagttgctggtactaaagacggaattacttcactccaaatggatatcaagattacaggaataacatttgatataatggaacaagctttaaaacaagccaaagatggtagaatacatattttaggagaaatgaataaagctttaggtaaatcaagagatggtgttggcaagcatactccaaagatggaaaaaataaccgtagataaaaaagatattgcaacagtaattggaaaaggtggagcaacaataagagaaatagttgaaaaatcaggtgctaaagtagatgttaatgacgaaggaatagtaacggttgcagcaccagatgaagagtctaggaatattgccttacaatttatcaaagatcttactgctaaagctgaattaaata

SEQ ID NO: 257136 - DNA, 853 bp, Unknown
  Bacterial polypeptide expressing nucleotide sequence isolated from the Sargasso Sea
aggaaaatgttaaatgctgttaagtttggccataaaggttttgttcctataattgatatgatacaggaaatagctaaagaatgtaaaaaacctgattgggttattgagaaaaaagatctttcagaagtaaaaaataaacttgaaagtgaatttacagaagaacttaaaaaagcattttcaataaaagataaacaagaaagatcaaatttaatatctgatataactgataaagcaaaaaagctttacggagaagatgaaaattattcagatctcgatgtcaattccgaacttaaaaatctagagaaaagaattgtgagaacagatattctaaaaaataaaaatagaattgatggcagaggtcttgcagatgttagaccaatcatgtgtgaagttggtatactcccaagagtacatggttctgctttatttactagaggagaaacacaagcaattgttactactacacttggtacttccgatgatgagcaaaaaatagagagtcttgatggattgcaaaaagaaagatttatgcttcattataattttccacctttttcagttggagaaactggaagaataggtactggcagaagagaaattggtcatggaaagttagcttggagagcaataaattcttctttaccttcaaaggaaagttttccctacacatttagaattgtttcagaaataacagagtcaaatggttcgtcatcaatggcaactgtttgtggttcttctttagcactaatggatgcaggagtaccaattaaagaaccagttgctggtattgcaatgggcttaattaaagagggagatgattttagtgtgctttcagaatattttaggagatgaa

SEQ ID NO: 257137 - DNA, 932 bp, Unknown
  Bacterial polypeptide expressing nucleotide sequence isolated from the Sargasso Sea
gagagcttctaaaacaggcaatagaattgatggacgagatactagcacagtaagacctattgtttgtgaaactggtgttttaagtagaactcatggttcagcattatttactagaggtgaaacacaagcattagttgttacaactcttggaacgggaatggatgagcaaagaattgatgccatcgaaggtgaatataaagaaaattttatgcttcattataattttccaccatattcagttggagaagttggaagagttggttcaacaagtagaagagaaattggtcatggtaaattagcatggcgagctattcacccaatgctaccatctaatgataaatttccttatacatatagagttgtatcagagataactgaatcaaatgggtcaagctctatggctacagtatgtggaacctcaatgtcgatgatggatgccggagtgccacttgaaaaacctattgctggtattgcaatgggtttaatcaaagagaaagataattatgtggtcctgtcagatatattaggtgatgaagatcatttaggtgatatggattttaaagttgctggaacaaaagatggaataacatctttgcaaatggatattaaaattaccagtattacatctgctataatgaaagaagcccttgaacaagctaaagaaggtagaattcacattttaggagaaatggctaaggcaatagaaaagccaaaagaaaaaatatctgattacgcaccaacaattactacattccatgttcataaagataaaatccgagaagttattggtaaaggtggtgcggttattagagaaattagtgaaaccactggtgctaaaattgaaattgatgatgaaggattagtaagtgttgctgcagtagacgcaaaatcaggtaatgacgcaatagaatggataaagggtattgtagaag

SEQ ID NO: 257138 - DNA, 568 bp, Unknown
  Bacterial polypeptide expressing nucleotide sequence isolated from the Sargasso Sea
actcatggttctgcgttgtttacaagaggcgaaacacaagcaattgtaacaactacacttggaacttcagatgacgaacagagaattgaaagtttggaaggtcttcaaagagaaagatttatgcttcattataattttcctccattttcagtcggtgaaactggtagaattggaacaggaagaagagaaattggacatggaaaacttgcttggagagcgattaattcgtctttaccttcaaaagaaagtttcccttacacatttcggattgtatcagaaataactgaatctaatggttcgtcatcaatggcaacagtttgtggaacttcattagcattaatggatgcaggtgtaccaataaaagaaccagttgcaggtattgctatgggattaattaaagaaggtgacgattttagtgtattatcagacatccttggagatgaagatcatctgggtgatatggattttaaagttgcaggaacgaaagatggaattacatctcttcaaatggacattaagataacaggaattacatttgaaataatggaacaagctttaaaacaagcta

SEQ ID NO: 257139 - DNA, 802 bp, Unknown
  Bacterial polypeptide expressing nucleotide sequence isolated from the Sargasso Sea
gtaaactaccaagaaaaatattatgcaggtggaaaaattccaggtggatattttaaaagagaggcaagaccaactgagagcgaaacattaatttcaagattaattgatagaccaatcagacctttgtttcctgatgaatttaaaaacgaagtacagttattaccaacagtaatttcatatgacaaagaaaaccagccagatattttagcaatcactgcttcatcagcagcactagctatttcaggtatgccttttatgggccctgttggagcctcaagagtaggtttcgtcgatggtaagtatatccttaacccatcaaaagctgaattagagaattcaagtttagatttagtagtagctggtactaaagatgctgtgctcatggttgagtctgaagcaaatggcttaacagaagaggaaatgttaaatgcagttaaatttggacatgagggttttgttccagtaattgaaatgatagaggaacttgccaaagagtgtagaaaaccagaatggactattgagaaaaaagacttgtctgaagttaagaaaaaacttgaagcaacatttacagatgatttaaaaaaagcttttgcaacaaaagataaacaggatagatcaaatcaaatttcagaaataacggataaagctaaaaaactttacgaagaagatgaaaattacactgatcttgatgtaaatagccaattaaaaagtttagaaaaatctatagtaagaactgatattcttaaaaataaaaatagaatagatggtagaggtttatctgatgtaagggcaatttcatgtg

SEQ ID NO: 257140 - DNA, 766 bp, Unknown
  Bacterial polypeptide expressing nucleotide sequence isolated from the Sargasso Sea
aagaagaaaattgctggaaaatttgaaaatgatttaagaagtgcgtttaaagaaatagataagaaaaaaagatcaacatctatttctgaaatagaaagcaaatgtaaagaaatgtttgctgaagacgaaattgtaacagaaaatcatataatgagtcagcttaaatctttagaaaaagatatagtgagaacagcaattttaaaagaaaaaaaaagaattgatggtagaggtctatcagaagtgagacaaattaaatgtgaggttggtgttttaccaagaactcatggttctgctctttttactagaggagaaacacaagctcttgtagttactacacttggaatgactgatgatgaacaaagattggaaagtctagagggtatgcaaagatcaaactttatgttgcactataattttccgccattttcagttggagaatgtggaagaataggaactggtagaagagaaattggtcatggaaagctcgcttggagagcaataaattcatctttaccatctaaagaaaactttccgtatacgcttagagtagtttcagaaataacagagtccaacggatcatcatctatggctacagtttgtggaacttcattatctttaatggatgcaggagttccgattaaagaaccagttgctggaattgctatgggattaatcaaagaaggtgaaaatttttctgtgctttctgacattttaggagacgaggatcatttaggagatatggattttaaagttgcagggacaaaaa

SEQ ID NO: 257141 - DNA, 870 bp, Unknown
  Bacterial polypeptide expressing nucleotide sequence isolated from the Sargasso Sea
ctcaacccttcaaaaatggaattaaagaaatctaaattagatttagttgtagcaggaactaaagatgcagttttaatggtagagtcagaggcaaatggcttaactgaagaagaaatgttaaatgcagtcaaattcggtcatgaaggatttatcccaataatagaaatgatagaagacctagcgaaagaatgtggaaaagccaaatgggaagttgagaaaaaagacctttctaaagtaaaaaaaacattagaggaagaatttaccgaggacttgaaaaaagcattttctactagagataaacaagatagatcaaatcaaatttctgaaataaccgagagagcaaaaaaactttatgaagaaaatgaagaatatactgatttagatataaattcgcagctcaaaaatttagaaaaatcaattgtaagaactgatattcttaaaaataaaaatcgtatagatggaagaggtcttgctgacgtcagaccaattatgtgtgaggtgggtatattgcctagggttcatggttctgctttatttacaagaggtgaaacgcaagctattgttactactactcttggtacatcagatgatgaacaaagaattgaaagtttggatggtctgcaaaaagagagatttatgttgcattataacttccctcctttctcagtaggtgaaactggtagaattggaactggtagaagagagataggtcatgggaaattagcatggagatcaatcaattcatcactacccccaaaagaaagttttccttatacatttagaattgtatctgaaataactgagtcaaatggttcatcatcaatggcaactgtttgcggcacttctcttgctttaatggatgcaggtgta

SEQ ID NO: 257142 - DNA, 759 bp, Unknown
  Bacterial polypeptide expressing nucleotide sequence isolated from the Sargasso Sea
aatgtttaaagtttttaaaaaagaaacaaattttggaggaaagaaaatcacccttgaaacaggaaaggttgctcgtcaagcagatggagcaataatagcaacttgtggtgagactgttgttttagcaacggccgtgggtgcaaaaaaagttaatccagatgtagattattttcctttatcggtaaattaccaagaaaaatattacgctgctggtaaaatacctggaggatactttaaaagggaagcaagacctacagagagtgaaactcttatctcacgattgattgatagacctataagacctttgtttccagatgaatttaaaaatgaagtacaagtgttacccacagtaatttcatatgataaagaaaatgaggccgatattttatctatcattgcctcttcggctgcattagccatttctggaatgccttttttaggaccaattggagcgtcaagagttggtttcatcggtggaaaatatgttttaaatccatcaaaaaaagatttagagaattcaaaactagacttagtcgtggcagggactaaagacgctgtattgatggtagaatcagaggctagcggtttaactgagcaacaaatgctggacgctgtcaaatttggtcatgagggatttgcaccggttattaaaatgatcgaggacttagcaaaggaatgtaaaaaacctgactgggttgttgagaaaaaagatctgtcatctgtaaagaaaaaattagagggtgaatttaccaaagactt

SEQ ID NO: 257143 - DNA, 996 bp, Unknown
  Bacterial polypeptide expressing nucleotide sequence isolated from the Sargasso Sea
tttgtctgatgtaagacctattgaatgtgaagtgggtgttttaccaagagcacatggatctgctttatttactagaggagaaacacaagcaattgttgtcgcaactttaggaacatctgatgatgaacagagaatcgaaagcttagatgggcttcaaagagaacgatttatgcttcactataattttcctcctttttcagttggagagactggaagaattggaacaggtagaagagaaattggtcatggtaaattggcatggagagcaattaattcttcattaccatcaaaagaagcatttccatatacttttagggtagtttcggagatcacagaatctaatggttcttcttcaatggctactgtttgtggaacttcattagcattaatggatgcaggagtaccgattaaagagccagttgctggtattgcaatgggattaattaaagaaggtgatgacttcagcgtactttcagatatcttaggtgatgaagatcatcttggtgatatggactttaaagttgctggaactaaagatggaattacttctcttcaaatggatatcaaaattacaggtattacatttgaaattatggagcaagcattaagccaagctaaagatggaagagttcatattttgggagaaatgaataaagcattatctgcttcaagatctgatgttggaaaacatactccaaaaatggaacaagttaatgttgataaaaaagacattgcagctgtaattggaaaaggtggtgcaacaattagagagatagttgaaaaatcaggtgcgaaagtagatgtaaatgacgaaggtgtagtaacagttgctgcgccagatgaagagtctagaaacattgcaatgcaaatgatcaaagacatcaccgcaaaagctgaatttgataaaatttattcagggaaagttatgaagattatggagtttggtgcatttgtttatttcttgggaaaacaggatggactagttcatatctcaga

SEQ ID NO: 257144 - DNA, 997 bp, Unknown
  Bacterial polypeptide expressing nucleotide sequence isolated from the Sargasso Sea
cattatgtccttaatccatcaaaaaaagaattagaaaattcaaaattagatctcgttgttgcaggcacaaaagatgcagttttaatggttgaatctgaaacaagcggattaactgaagaggaaatgttaaatgcagttaaatttggtcatgaaaattttataccattaattgaaatgattgaagaacttgctgcagaatgtaaaaaacctgactggatagtagaaaaaaaagatgtatcagaagttaagaaaaaacttgaagatgaatttactgatgaattaaaaaaagctttttccataaaagacaaaaaagaaagatcaaatttaatttctgaaataacggacaaagcaaaaaaattgtttgaagaaaatgaaaattttacagacttagacgtgaattctgagctcaaaaatttagaaaaaagaatagttagaacagatatattaaagaacaaaaaaagaatagatggaagaggtctttcggatgtaagaccaattatgtgtgaagtaggaattttaccaagaacacacggatctgcactttttacaagaggcgaaacacaagcaattgtaacaaccacacttggaacttctgatgatgaacaaagaatagaaagtttagagggtcttcaaagagaaagatttatgttgcactataattttcctcctttttcagttggtgaaactggaagaattggaacaggaagaagagaaattggacatggaaaacttgcttggagagctatcaactcatctttacctccaaaagaaggtttcccatatacatttagaattgtatcagaaataactgagtcaaatggttcatcatctatggcaacagtttgtggaacttctcttgcgttaatggacgctggtgtgccaataaaagaaccagttgcaggtattgccatgggattaattaaagagggagatgattttagtgtgttgtcagatatcctcggagatgaggatcatcttggagatatggatttttaag

SEQ ID NO: 257145 - DNA, 694 bp, Unknown
  Bacterial polypeptide expressing nucleotide sequence isolated from the Sargasso Sea
gtggttagatcccaaattttgaatgataaatctagaattgatgggcgtaagcttgatgaagtaagaaatatttcttcagaagtctcatggctgcccagaacacatggatcttctttgtttactagaggtgaaacacaggcaatagttgttgcaactttaggttttggagaagatgagcaacgaattgaggcacttcaaggttcttacaaagaaaatttcatgcttcattataattttcctccatattcagttggtgaagttggaagaatgggttcagcaggtagaagggaaattggtcatggtaaattagcttggagagcccttaaagcagtattgcctaataaagaggattttgattatacagtccgcttagtatcagatattactgaatcaaatggttcatcatcgatggcgactgtttgtggatcttcgcttgccctaatggatgctggtgttcccattaaaaattcagtttctggtattgcaatgggtttgattaaagagggcgatgattttgctgtattatctgatatcttaggtgatgaagatcatttaggtgatatggattttaaagtagcaggcaccaaagacggtgttacatcattgcagatggatattaaaatcactggaatcacatatgagattatggaaaaagctctcgaccaggctaaaggaggaagagaatacatctcta

SEQ ID NO: 257146 - DNA, 836 bp, Unknown
  Bacterial polypeptide expressing nucleotide sequence isolated from the Sargasso Sea
ggtggtttttttaaaagagaagggagaccttcagaaaaggaaacactagtttctcgtttaatagatagaccaattagaccattatttgcagatggctttaaatgtgaaactcaagttattgctacagtcatcagctatgatacagaaaatgatgcagatattgttgctatgattgcctgctctgcagcgttaactctttctggggtgccttttatgggcccaattggagcagcaagagttggttataaggatggagaatatattcttaatcctacaaaaacagaaatggagaattcggaattagatttagttgttgctgggactaaagatgcagttcttatggtagaatctgaagcaaaagaattatctgaagaaattatgcttggcgcagtaacatttggtcaggagaatttttctccaattatagaatcaataattagtttggctgaaaaatctgcgaaagaacctagagattttaaaaagaaagatctttctgaattagagaaaaaggtcaattcaataattaaggacaagctagaaaacgcatataaagaagcagataaacaaaaaagaacagaattgatagcagaaataaaaagtgaagttattgaagaactctcctcagacaatgttgatgaacaggatgagcttagtgaaactttaataggatctgctttcaaaaatatagaaaaaaatattgtaaggaatagtatattaaatactggtgaaagaattgatggaagagatcttgaaaccgtaaggccaatacaatctgatgtaagtattttaccattaactcatggatcagcgctttttacaagaggtgaaacacaagc

SEQ ID NO: 257147 - DNA, 916 bp, Unknown
  Bacterial polypeptide expressing nucleotide sequence isolated from the Sargasso Sea
gcattagcaatctcaggaatgccatttatgggccctgtgggagcttctagagttggctttattgaaggaaaatatgtcctcaatccatcaaagactgaattagagaaatccaaattagatttagtagtagcaggaactaaagatgcagttttaatggttgagtccgaagcaaatggtttaacagaggaagaaatgttgaatgctgttaaatttggacatgaaggtttcgttccaataatagaaatgatcgaagatcttgcaaaagaatgcagaaaaccagagtggacagttgagaaaaaagatctttctgaaattaaaaaaaaattagaagaagaatttactgaagatttgaaaaaagctttctctacaagagacaagcaagatagatcaaatcaaatttctgaaattaatgaaaaagctaaaaaattatatgaggaaaatgaagcttacaccgatttagatgtaaattctcaacttaaaaatctagaaaaatccattgtcagaactgatattcttaaaaataaaaatcgtattgatggaagaggacttgcagatgtaagaccaattatgtgcgaagttggaatactcccaagagttcacggttcagctttatttacaagaggagaaacgcaggctattgtaactactactcttggaacttcagatgatgaacaaagaatagagagcttagatggccttcaaaaagagagatttatgttgcactataattttcctccattttcagttggcgaaactggaagaattggaacaggaagaagagaaattggtcatggcaaattagcgtggcgagcaataaactcatctttaccatcaaaagaaaactttccttacacattcagaattgtttcagagatcactgaatctaatggttcatcttcaatggcaactgtttgtg

SEQ ID NO: 257148 - DNA, 871 bp, Unknown
  Bacterial polypeptide expressing nucleotide sequence isolated from the Sargasso Sea
atgcagcaggaaaaattccctggtggatattttaaaagagaagcaagaccaacagagagtgaaacattaatctcaagattaatagacagacccataagaccattgtttccggatgaattcaaaaatgaagtacaattacttccaactgttatatcttatgataaagaaaatgagtctgatatattatcaataattgcctcctcagctgcattagctatctcaggaatgccatttatgggtcctgtaggtgcttctagagttggcttcattgaaggaaaatatgtccttaatccttcaaagaaagatttagaaaattcaaaattagatttggttgtggcaggaacaaaagacgcagttttgatggttgagtctgaagcaaatgaattaactgaggaagaaatgttgaatgcagttaagtttggacatgaagcttttgtgcctataattgaaatgattgaggaacttgcaaaagaatgtaaaaaacctgattgggttgtagagaaaaaagatctttctgaagttagaaaaaaactagaggaagaatttacagatgatttaaaaaaagcttttgctactagagacaaacaagatagatcaaatcagatttccgagattactgataaagccaaaaagctttatgaagaaaatgaagattattcagatttagatgttaattcacaactcaaaaatcttgaaaaatctattgttagaactgatattttaaaaaataaaaatcgtatagatggaagaggtctttcagatgtacgaccaattgagtgtgaagttggaatattgcctagagttcatggttctgcattatttactagaggagaaactcaagcgatagttactacaacgttaggaacttcgg

SEQ ID NO: 257149 - DNA, 937 bp, Unknown
  Bacterial polypeptide expressing nucleotide sequence isolated from the Sargasso Sea
ttcagaagtaaaaaataaattggaaagcgaatttaccgaggaacttaaaaaagcattttcaataaaagataaacaagaaagatcgaatttaatctcagaaataactgataaagcaaaaaagctttatgaagaaaatgagaattataccgatcttgacgtaaattctgagcttaaaaatttagaaaaaaggattgtcagaacagatattctaaaaaataaaaatagaattgatggtagaggtcttgcagatgttaggccaattatgtgtgaagttggaattcttccaagagttcatggttctgctttgtttactcgaggagaaactcaagcaatagtcacaactacacttggtacatctgatgatgagcaaaaaatagaaagtttagagggtctacaaaaagagagatttatgcttcattataattttccacctttctctgttggagaaactggtagaataggtaccggaagaagagaaataggtcatggaaaattagcctggagagcaataaattcttctttgccttctaaagagagttttccctacacatttagaattgtatctgagataactgagtcaaacggttcttcttctatggcgactgtttgtggttcatctttggcattgatggatgctggtgtaccaattaaagaaccagttgctggtattgcaatgggcttgattaaagaaggagaagaatttagcgttctttcagatattcttggagatgaagatcatttaggtgatatggactttaaagttgctggaactaaagacggaataacatctcttcaaatggacattaaaattacaggtataacatttgaaattatggagcaagccttaaaacaagcaaaagatggaagaattcacattctaggtgaaatgaataaagctttatctaaatcaagggaagatgtggaaaacatactccta

SEQ ID NO: 257150 - DNA, 797 bp, Unknown
  Bacterial polypeptide expressing nucleotide sequence isolated from the Sargasso Sea
aaaagatttatctgaagttaagaaaaaacttgaagaaacttttactgatgaattaaaaaaagctttttcaacgagagataaacaagatagatcaaatcaaatttcagagataactgataaagctaaaaaactttacgaggaaaatgaaaattattcagatcttgacgtaaatagtcagttaaaaaatttagaaaaatctattgtcagaacagacattcttaaaaataagagtagaattgatggcaggggtttatcagatgtaagacctatctcgtgtgaagtaggtgttttaccaaggactcatggttcagcattgtttacaagaggagaaacccaagcgattgtagttgctacacttggtacttctgatgatgaacagagattagaaagtttggatggtcaacaaagagaacgatttatgcttcattacaattttcctcctttctcagttggtgaaactggaagaataggaacaggaagacgtgaaattggacatggcaaattagcatggagagcaataaattcctcattaccttcgaaagattcctttccttacacttttaggatagtttcagaaataacagagtccaatggttcttcttcaatggcaacagtttgtggaacttcactagcattgatggatgcaggcgttccaattaaagagccagtagcaggtatagcgatgggattgataaaagagggagatgattttagtgttttatcagatatcttaggtgatgaagatcatttaggagatatggattttaaagttgctggaactaaagatggaattactt

SEQ ID NO: 257151 - DNA, 801 bp, Unknown
  Bacterial polypeptide expressing nucleotide sequence isolated from the Sargasso Sea
gtgtagaaaaccagaatggactgtcgagaaaaaagatttatctgaagttaagaaaaaacttgaagcaacgtttactgatgaccttaaaaaagcttttggtactaaagataaaaaagatagatcaaatcaaatatctgaaatcacagataaagctaaaaaactttttgaagaaaatgaaaattacactgatcttgatgtaaatagtcaattaaaaaacttagaaaaatctattgtaagaagtgatattcttaaaaataagaatagaatcgacggtagaggtctgtcagatgtaagagctatttcatgtgaagttggagtattacccagaactcatggttcagcattatttactagaggtgaaactcaagcaattgtagttgccacattaggaacatcagatgatgaacaaagattggaaagtttagatggacaacatagagaaagatttatgcttcactataattttccacctttctcagttggtgaaactggaagaattggaactggaagacgagaaattggtcacggtaaactagcatggagagcaattaattcttcattacctccaaaagaatcgtttccctacacttttagaatagtttcagaaattacagagtccaatggttcttcttcaatggctactgtttgtggaacttctttagcattaatggatgctggtgttccaatcaaagaaccagtagcaggtattgcaatgggtttgattaaagagggtgatgattttagcgtcttatcagacattttaggtgatgaagatcacctaggtgatatggatttcaaagt

SEQ ID NO: 257152 - DNA, 858 bp, Unknown
  Bacterial polypeptide expressing nucleotide sequence isolated from the Sargasso Sea
cactgcatcttcagcagctttagctatatctggaatgccatttatgggacctgtaggagcttcaagagtaggttttattgatggtaaatatgttctaaatccatctaaagcagatttagaaaaatcaaaattagatttagttgtagcaggtacaaaagatgctgtgcttatggttgaatctgaagcaagtggtttaacagaagaagaaatgttaaacgcggttaaatttggacatgaaggatttgttcctgtaattgaaatgatcgaggaacttgcaaaagaatgcagaaaatctgagtggactgttgaaaagaaagatttatctgaagttaagaaaaaacttgaggaaactttcacggaagatcttaagaaagcttttgcaacaagagataaacaagatagatcaaatcagatttcagagattactgataaagctaaaaaactttatgaggaagatgaaaactacacagatcttgatgttaacagtcagttaaaaaatcttgaaaaatcaattgttagaacagatattctgaaaaataaaaatagaattgatggtagaggcttatcagatgtgaggcctatcgaatgtgaagttggcgttctaccaagagcacatggttctgcattatttactagaggtgaaacccaagcaattgttgtagcaactttaggaacatctgatgacgagcaaagaattgaaagtttagatggattacaaagagagcgatttatgcttcactataattttcctcctttttcagttggagaaactggaagaattggaactggtaggagagaaattggtcatggtaaattagcttggagagcaattaattcttcactaccaactaaagaagc

SEQ ID NO: 257153 - DNA, 781 bp, Unknown
  Bacterial polypeptide expressing nucleotide sequence isolated from the Sargasso Sea
aatgtttaaaatatataaaaaagaaatcaaagttggtgaaaaaaaaataattttagaaactggaaaaatcgcaagacaagcagatggtgcagttattgctcaatgcggtgaaaccgttgttatggcaacagttgtaggggcaaagaaagttaatccagatatagactattttccattgtcggtaaactatcaagaaaaatattatgctgctggaaaaattcctggaggatattttaaaagagaagctagacctactgaaagtgaaacattaatctcaagattaattgatagaccaattagaccattatttcctgacgaattcaaaaatgaagttcaattactaccgacagtaatatcttatgacaaggaaaatgaagccgatatattatctataattgcttcttctgccgcattagcaatatcaggtatgccctttaaggggccagttggcgcatctagagttggttttatagatggaaaatatattctaaatccttcaaagaaagagttagaaaattctaaattagatctagtcgtagcagggactaaggacgcagttttaatggttgagtcagaggcaaatggattaacagaggaagaaatgttgaaagcagtaaagtttggtcatgaaaactttgttccaataattaatatgatagaagaacttgctagtgaatgcaaaaaacctgattgggtagttgaaaaaaaggatctttcagaagtaaagaaaaaaattgaaaacgaatttacagatgaattaaaaaaagctttttccatcaaa

SEQ ID NO: 257154 - DNA, 782 bp, Unknown
  Bacterial polypeptide expressing nucleotide sequence isolated from the Sargasso Sea
atctaaaataaacgaagactttggtaaagagtttatagatgcctataaaataactgaaaaacaaaaaagatcagaaaaattatcttcgctaagaaacgaaatttctgaaaaatttgtaagtgatacactctcaccagtattagtttcagatgcaataaaaaatgtagaaaaagatatagttagaggagaactaattaatactggtaatagaattgatggaagagatacaaaaacagtccgtccaattgtgtgtgaaactggagttttagaaagaactcacggatctgcattatttacaagaggagaaacacaagctcttgtagtttcaactttaggaactggacaagacgagcaaagaatagatgcgattgatggtgaatatactgagaattttatgttgcactataattttccaccttactctgttggagaagttggaagaatgggttctaccagtagaagagaaataggacatggaaaattagcctggagagctattcacccaatgttaccttcaaaagaaaagtttccatacacttatagagttgtatccgaaattacagaatctaatggatctagttctatggcaactgtttgtggtacctcaatgtctttaatggatgcaggagtgcctttagaaagaccagtagcaggtatcgcgatgggcttaattaaagagaatgataaatatgtgatattatcagacatacttggtgatgaagatcatcttggtgatatggattttaaagttgcaggaacttctgaaggtataacttcataaa

SEQ ID NO: 257155 - DNA, 881 bp, Unknown
  Bacterial polypeptide expressing nucleotide sequence isolated from the Sargasso Sea
gtttactgaagatgagaaggtgaccgaaaatcaagctatggcacaattaaagtcgctagaaaaggatatagttagaacagcaatattaaaagataagaaaagaattgatggcagaggtttagctgatgtaagacaaattaaatgtgaagttggagtactgccgaggacgcacggttctgctttgtttactagaggagaaacccaagcattagtagttacaactctaggaatgaccgatgatgaacaaagattagaaagtctagagggaatgcaaagatcgagtttcatgttacattacaattttcctcctttttctgttggagaatgcggtagaattggaactggcagaagagagataggacatggtaaactggcctggagagcgataaattcctcattaccattaaaggaaaatttcccttacactttgagagttgtttcagaaattactgagtctaacggttcttcctcaatggctacagtttgtggaacttcgttatctttaatggatgcaggcgtacctataaaagaaccagttgctggtatagcgatggggttaataaaagaaggtgataaattttcggtgctttcagatattttgggtgacgaagatcatttaggagatatggattttaaagttgctggaacaaaggatggaataacatctcttcaaatggacattaaaattacaggtataacatttgaaatcatggaaaaagctctaaatcaagctaaagctggaagagagcatattctaactgaaatgaataaagcacttaaatcatcaagaaaagaattttcaaaacatactcctaaaatggagactataaaggttgataaaaaagatattgcgacagtaataggtaaaggaggggcaacga

SEQ ID NO: 257156 - DNA, 706 bp, Unknown
  Bacterial polypeptide expressing nucleotide sequence isolated from the Sargasso Sea
tatgtttaaaatcacaaataagtcttgcacatggggtggaagaaaattaactatagaaacaggtaaagtggcaagacaagcagatggttcagttgttgttacttacggggagacaaaagttttatgtacagttgtaggcaacaaagatgaagctctagaaaatgacttctttcccttaactgtacactacattgagaagttttattccattggaaaaataccaggaggttatctcaaaagagagggaagaccgagcgaaaaagagactcttgtatctagactaatcgacagaccaattaggccattgtttcctgaacagtttttaaatgaagtacaagtaatttgtcaggtattaaattatgacttgattaatagtcctgaaataccggccatgattggtgcttcagcagccttaacattatcaggaattccctttttaggaccattaggagcagcaaaggtaggaaaaattaacaataaattaatcttaaatccatcgaatgaagaattaacagagagcgatttagaattagttgtagcgggtacaaaaagtggcgttttaatggtagagtctgaagcaaaagaattatcagaagataaaatgcttgaagcagtggttttcggacagaaagcttatactgaaataattgatttaattgttgagcttgcagaagaggttgccaaagacccttgggaattagaagag

SEQ ID NO: 257157 - DNA, 904 bp, Unknown
  Bacterial polypeptide expressing nucleotide sequence isolated from the Sargasso Sea
gaagctagaccaactgaatctgaaactttaatatcaagactcattgatagaccaatcagacctttgtttccagaaggttttagaaacgaagtacaagttctacctacggtaatttcatacgacaatgaaaatgaagccgatatattatcaataatagcatgttcggctgctttatcgatttcaggactaccttttaaggggccagtaggtgcatctagagttggttttattaatggcaagcgtgttttaaatccaactaaaaaagaactagaaaattctaaattggatttagttgtagccggaacaaaggatgctgttctgatggtcgagtcagaagcttcgggcttaacagaaaaggaaatgctagaagctgtgaagtttggtcacgagagttttgtttcggtgatcaaaggtatagaaaagttagcaaaaaaatgtgctaaggaagcctggaaaattgaaaaaaaagattacagtaaagttactaagaaaattcaaaaagaacttacaaaagatttagaaaaagcattctcagaaaaagataaaaagaaaagatctgaattaattaatttagcaggcgataaatgtaaatccttgtttgagaaagatgaaactcttttggaacatgaaataatgctccaacttaaaaatctagaaaaagacattgttagaaccagaattttaaaaagtaaaaaaagaattgacggaagaggtttgtcagatgtaaggccaataaaatgtgaggttggaattttaccaagagttcacggttcggctttatttactagaggagaaactcaggctctagtaacgacaactttgggtacaacagatgatgagcaaagaatcgaaagtttagagggcttaaaaagacagagatttatgttgcattataatttccacc

SEQ ID NO: 257158 - DNA, 910 bp, Unknown
  Bacterial polypeptide expressing nucleotide sequence isolated from the Sargasso Sea
cggcaagatagctcgtcaagctgatggtgctataatagcaacttgtggggagactgttgtaatatcaaccgttgttggagcaaaaaaagtaaatccagatgtcgattactttccgttgtcagtaaattatcaagagaaatattatgctgcgggaaaaattcctggcggttattttaaaagagaagcaagaccaactgaggcagaaactttaatatcaagattaattgacagacctatacgtcctttgtttcctgataattttagaaacgaaatacaagttttacctactgttctttcttatgataatgaaaacgaagcagatgttttatcgattattgcatcatccgcagctctagcaatatctggtctgccttttcaaggtcctgtagctgcctcgagggtaggttatataaataataaatatattttaaatccatcaaaggaacaattaaaagaatccaaattagatttagttgttgctggaacaaaagatgcggtattgatggttgagtcagaagcttctggtttaacagaaaaagaaatgctagatgcagttaaatttggtcatgaaaaattaggaccagtaataaaagcaatagaaaatttaaaaaagaagtgctcaaaagatgcatggaaaatagaagataaagattatagtaaggttaaagacaagattagcaaggaattgaaaaaagatttagaaaaagccttctcagaaaaagataagaaaaaaagatctgagttagtaagtgaagcaactgaaaaatgtaaaactttatttgagggtgacgaaaatttttcagaaattgaagtacttatacaattaaaaaatttagaaaaagatattgtacgttcaaaaatacttaagacaaaaaaaagaattgatggtagaggtttagctgatgtaaga

SEQ ID NO: 257159 - DNA, 826 bp, Unknown
  Bacterial polypeptide expressing nucleotide sequence isolated from the Sargasso Sea
attaattgatagaccaatcagacctttgtttcctgatgaatttaaaaatgaagtacagttattaccaacagtaatttcatacgataaagaaaatgaaccagatattttgtcaattactgcatcttcagcagctttagctatatcaggaatgccatttatgggtcctgtaggtgcttcaagagttggttttgtagatggaaaatatgttttaaacccatctaaagcagaattagaaaaatcaaaattagatctagttgtagcaggtacaaaagatgctgttcttatggttgagtctgaagcaagtggtttaacagaagaagaaatgttaaatgcagttaaatttggacatgaaggatttgttccagtaattgaaatgatagaggaacttgcaaaagaatgtagaaaacctgagtggatagttgagaaaaaagacttatctgaagttaagaaaaaacttgaggaaacttttacggaagaccttaagaaagcttttgcaacaagagataaacaggatagatcaaatcagatttcagagattactgataaagctaaaaagctttatgaagaagatgaaaactacacagatcttgatgttaacagtcagttaaaaaatcttgaaaaatcaattgttagaactgatattctaaaaaataaaaatagaattgatggccgaggattgtcagatgtaagacctattgaatgtgaagtgggtgttttaccaagagcacatggctctgctttatttactagaggagaaacccaagcaattgttgtagcaactttaggaacatctgatgacgagcaaagaattgaaagtttagatgga

SEQ ID NO: 257160 - DNA, 685 bp, Unknown
  Bacterial polypeptide expressing nucleotide sequence isolated from the Sargasso Sea
gatgggtttgattaaagatggcgatgagtttgcagttctaacagatatccttggagatgaagatcatttgggagatatggattttaaagttgctgggtctgaaaaaggaataacggcattacaaatggacataaaaattgatggtataaatgaaaaaataatggatgaagcgcttaccagcgcaaaagttgcaagaatgcatattcttgaaaaaatgaacgaagttctttctaagcctaaggaattagcttcagatgctccatcaatgcaaaaattcatggtcaataaagataagataaaagaaattattggaaagggtggagcagtcattaagtccatccaagaagagtctggagctgttgtggatataaacgatactggagaaatatcagtctttggtgacaaccaagctaagatgcaggcagcacttgatattatcgataagattattgaagagcctgaattagacaaagtttacgaaggaacagttgttaaaattgtggactttggagcattcgtaaatattttacctgggaaggatggattgcttcatatttcagagatttcggaagagagaactgaggatgtttcagcagttctagaagagggacagaaggttaatgttaagcttattggctttgataggggtaaaatgaaactgtcaattaaagctcttagtaaataa

SEQ ID NO: 257161 - DNA, 781 bp, Unknown
  Bacterial polypeptide expressing nucleotide sequence isolated from the Sargasso Sea
tttgaaaaaagcattctctacgagagataaacaagacagatcaaatcagatttctgaaattaatgataaagcaaaaaaactttatgaggaaaatgaagattacacagacttagatgtaaattcccaacttaaaaatctagagaaatcaatagttagaactgatatcctaaaaaataaaaatcgtattgatggaagaggtcttgcagatgtaagaccaataatttgtgaagtaggtatattacctagagtacatggatcggcattatttactagaggtgaaacgcaagcgattgtaacaacaactttaggtacttcagatgatgaacagagaattgaaagtttggatggccttcaaaaagaaagatttatgctacattataattttcctcctttttcagtcggtgaaactggtagaattggaactggtagaagggaaattggacatggtaaattagcatggagagcaattaattcttcgcttccatcaaaagagagttttccttatacatttagaatagtatcagaaattacagagtcaaatggctcatcttcaatggcaactgtttgcggtacatctcttgctcttatggatgctggagtacctattaaagaacctgtggctggaattgcgatgggtttaatcaaagagggtgacgatttcacagtattatcagatattcttggagatgaagatcacttaggagatatggattttaaagttgctggtactaaagatggtattacatcattacaaatggatatcaagataactggaatcaca

SEQ ID NO: 257162 - DNA, 876 bp, Unknown
  Bacterial polypeptide expressing nucleotide sequence isolated from the Sargasso Sea
ggaacttcagatgatgaacaaagaatagagagtttagatggtcttcaaaaagagagatttatgttacactataactttcctccattctcagttggtgaaacaggaaggattggaacaggtagaagagaaataggtcatggtaagttagcatggagagcaattaactcttcacttccatcaaaagaaagttttccctatacttttaggattgtatcagaaatcactgagtctaacggttcatcttcaatggcaactgtttgtggaacttcacttgctcttatggatgcaggtgttccgattaaagagccagttgcaggtattgcgatgggtttaataaaagaaggtgatgatttttctgtactgtcagatattcttggtgatgaagatcatctaggagatatggattttaaagttgcaggaactaaagatgggatcacatctttacaaatggatattaagattacaggaattacatttgaaataatggagcaagctttaaatcaagccaaagacggaagaattcatattttgggtgaaatgaataaagcattagacaaatctagagatgaagttggaaaacatactccaaaaatggaaaaaattacggtagataaaaaagatattgcagcagtgattggaaaaggtggagcaacaattagagaaattgttgaaaaatctggtgctaaagtagatgtaaatgatgaaggtgtagttacagttgcagctccagatgaggagtcaagaaacattgctatgcaaatgatcaaagacataacagcaaaagctgaattaaacaaaatttataatggaaaagtcatgaaaattatggaatttggtgcttttgttaatttccttggaaagcaagatggacctttg

SEQ ID NO: 257163 - DNA, 781 bp, Unknown
  Bacterial polypeptide expressing nucleotide sequence isolated from the Sargasso Sea
aatgaggtcacaaattattaatgacgggaaaagagtcgatggccgcgaattagatgaagtcagaaagatttcagcatctgcaggaatacttccaaaaagagttcatggttctgcattatttcaaagaggtttgactcaagtcttatcaacaacaactttaggaactccaagtgacgctcaggaaatggatgaccttaatccaagcaccgaaaaaacttatctgcatcactataatttcccaccatattcagttggggaaactagacccatgagaacccctggcagaagagaaattggccatggagctttagctgagagagcaataattcctgtacttccaggaaaagaaacatttccatatgtgttgagggttgttagcgaagttttaagttcgaacggatcaacttctatgggttctgtatgtggaagtacactttcgttattagatgcaggagttcctctaaaagcccttgtcagtggtaccgccatggggttaatcaaagaaggtaaagaggtacgaattcttacagatattcaaggcatcgaggacttccttggggatatggactttaaagttgcggggactgaaaagggaataacagcattacaaatggatatgaaaattacaggtctttccgtttctgttatttctgatgcaatcaaaaaagctcgccctgcaagactacatatcttagaaaaaatgaaagaggcaatagataaaccccaagaatcattatctcctcatgcgccaagactcttaagctttaggattgatccagag

SEQ ID NO: 257164 - DNA, 870 bp, Unknown
  Bacterial polypeptide expressing nucleotide sequence isolated from the Sargasso Sea
gttggagcttctagggtcggatacattgatggaaaatatgttttaaatccatcaaaggtagaacttgaaaaatcaaaacttgatctggttgtagcaggaacaaaagatgctgtgcttatggttgaatctgaagcaaatgttttaacagaggaagaaatgttaaatgcagttaaatttggtcatgagggctttgtaccagtgataaaaatgatagaagaattagctaaagaatgtaaaaaacctgagtggtctatcgaaaagaaagatttatccgaagtgaaaaaaaaacttgaggaaacttttacagaggatctcaaaaaagctttcgcaacaagagacaaacaggatagatcaaatcaaatttcagagattactgagaaagctaagaagatttatgaagaggatgaaaattacactgatcttgatgtgaatagtcagttgaaaaatcttgagaaaacaattgtaagaacagatatcctcaaaaataagaatagaattgatggaagaggtttatcagatgtgagaccaatttcatgtgaagttggagtattgcctagaactcatggttcgtctttatttactagaggagaaacacaagctattgtaactgctactttaggaacttctgatgatgaacaaaggatagaaagcttagacggattaaaaagagaaagatttatgcttcactataattttccaccattttcagttggagaaactggtagaattggaactggaagaagagaaataggacatggcaaactagcctggagagctattcattcttcattaccatcaaaagaggcatttccttatacttttagagtagtgtctgagattaccgagtctaatggttcatcttcgatggct

SEQ ID NO: 257165 - DNA, 839 bp, Unknown
  Bacterial polypeptide expressing nucleotide sequence isolated from the Sargasso Sea
gagttttgtaccagttataaaaataattgaggaattagctcaagaatgtaaaaaggtagattgggttgttgaaaaaaaagacctttcagatgttaagaaaaaaattggaaaagaatttactaaagatcttaaaaaagccttctctataaaggataagcagcaaagatctaatttaatatcagaggtttctgataaagctaaaaaactttatgaggaaaatgaaaattatacagaattagatgtaatgtatgagcttaaaaatttagaaaaagacattgttagaacagatattctcaaaaacaaaaatcgtattgatggaagagaactttctgaagtgagaccaatttcatgtgaggtaggaattttgccaagagcccatggatcggctttatttacaagaggagagactcaggcaatagtagcaactacacttggaacatcagatgacgaacagagaatagaaagtttagagggtcttcaaagagaaagatttatgcttcattataattttccaccattttcagtaggagaaacaggaagaattggaacaggaagaagagaaattggtcacggcaaactcgcatggagagctataaattcatccttaccttcaaaagaaagttttccttatacttttagaatagtatcagaaataacagagtctaatggttcatcttcaatggcaacagtttgtggaacatcattagctttaatggatgcgggagttcctattaaagaaccagttgctggtattgcaatgggattaattaaagaaggagaaaattttagtgtattatctgatattcttggagatgaagatcatttaggtgatatggatt

SEQ ID NO: 257166 - DNA, 820 bp, Unknown
  Bacterial polypeptide expressing nucleotide sequence isolated from the Sargasso Sea
ccaatggattaagagtgttgactacagcgacgaaattatagagagagttcgttctgtggcgactcctcagctaactgaagtaatggcaattggcgacaaagcagaacgcgaagctcgccaggatgaagtcaccgctgaaatacgagctcaacttgaagaagagttctcagaaactgctgatgcagcgaaacaaattggtgcagcagtgcgatcggtttcgaaagaaatcgtgcgccgacgtatcgcagaagacggctttcgtatcgatggtcgagctacgaatgaggtacgcccactgtcagctgaggtcgcttatgtaggtgaaaccgcacacgggtcgggtttgttccaacgtggtgaaacacaggtattaaacgtcacaacgttgggtatgagtcgaatggaacaacttattgacacactcaacccgaatgaccgtaagaggtacatgcaccactacaacttcccaccattttctaccggtgaagctggatttatgcgcggtcccaagcgcagagagatcgggcatggagcactagccgaaagagccttgttgtccgcgattccgtcaaaggacaagtttccgtacaccctgagattggtctcagatgttctgtcatcaaatggttcgacttcaatgggttcggtctgcgcatcctcactttcattgatggatgccggagtgccgatccgaagtcacgtttcaggaattgccatgggcttggtttacgccgaaggcaagtacgtgactcttaccgacatcttgggagcggaggacgcttttggagacatggacttcaaaatcgcgggaccgaagacg

SEQ ID NO: 257167 - DNA, 925 bp, Unknown
  Bacterial polypeptide expressing nucleotide sequence isolated from the Sargasso Sea
aatgaagttcagttattaccaactgtaatatcatatgataaagaaaatcaaccagatattctagcaatcatagcttcatcagcagcactagctatttcagggatgcctttcatgggtcctgttggagcgtctagggttggttttgttgacggaaagtatattcttaatccatcaaaatctgaattagagaactcaagtttagatttagttgtagcgggtacaaaagatgctgtgctgatggttgagtccgaggcaaatggtttaacagaagaggagatgttaaacgcagttaagtttggacatgagggatttgtcccagtaatccaaatgatagaagagcttgctaaagaatgtagaaaaccagaatggaaagttgagaaaaaagacttatctgaagtaaagaaaaaattagaatcgtcatttactgatgatcttaaaaaagcttttgcaacaaaagataaacaagatagatcaaatcaaatttcagaaatcacagataaagccaaaaaactttacgaagaagacgaaaactacactgatcttgatgtaaacagccaattaaaaagtttagaaaaatctattgtaagaactgatattcttaaaaataaaaatagaattgatggcagaggtttatctgatgtaagagctatttcatgtgaagttggtgttttgccaagaactcatggttctgcattatttactagaggtgaaactcaagcaatagttgttactactttaggaacttctgatgatgaacagagattagaaagtttggacgggcagcatagagaaagatttatgctacattataatttccctcctttttcagttggtgaaactggaagaattggaactggtagacgtgaaattggtcatggcaaacttgcttggagagcaattaactcttcactaccttcaaaagagt

SEQ ID NO: 257168 - DNA, 876 bp, Unknown
  Bacterial polypeptide expressing nucleotide sequence isolated from the Sargasso Sea
aaaaaagtaaacccagatgtagactactttcctttgtcagtaaattatcaagaaaaatattacgcggcaggaaaaattcctggtggttattttaaaagagaagcaagaccaacagagagtgaaacattaatatcaagattgattgatcgacctataaggccattgtttccagacgagtttaaaaatgaggtacaagtacttccaacggtaatttcgtacgataaagagaacgaggcagatattttgtcaataaatgcttcatctgcagccttagccatttcaggtatgccttttttaggtcctgtcggggcatcaagagtaggttttgtagatggaaaatacatattaaatccatcaaaaacagatcttaaaaattctaaattagatttagtagttgctggaactaaagatgcagttttaatggtagagtctgaagcaagtggtttaactgaagaagaaatgttaaatgcggtgaaatttggtcatgaaggatttgttcctgtgatcaaaatgatagaagacttagcaaaagaatgtagaaaacctgattgggttgtagagaaaaaagatctttctgaagtaaagaaaaaattagaatctgaatttacagctgaattaaaaaaagctttttcgactagagataaacaagaaagatcaaatatgatctcagaaataactgataaagctaaaaaactttatgaggaaaatgatgaaataactgacctagatgttaattcggaattaaaaaatttagaaaaagcaattgttagaactgatattcttaaaaacaaaaatcgtatagatggaagaggactttcagatgtaagaccaataatgtgtgaagtggaattttgccaagagttcatggttcagcgt

SEQ ID NO: 257169 - DNA, 955 bp, Unknown
  Bacterial polypeptide expressing nucleotide sequence isolated from the Sargasso Sea
ctagttgtagcaggtactaaagatgcagtgcttatggttgagtctgaaacatcagggctatctgaagaagtaatgttagcagcagtcaaatttggtcacgaaggatttgttccagtaatcgaaatgattgaggaacttgcaaaagaatgtagaaaacctgagtggactgttgagaagaaagatttatctgaagttaaacaaaaacttgaggaaacttttacagaagatttaacaaaagcttttgctacaagagataaacaagatagatcaaatcagatttcagaaattactgagaaagctaaaaagctttttgaagaaaatgaaaattattctgatcttgatattaactcacagcttaaaaatctagagaagaaaattgttagaactgatattcttaaaaataaaaacagaattgatggtagaggattatctgatgtaagacctatcgaatgtgaagttggtgttttaccaagaactcacggttctgcattgtttactagaggagaaacacaagcaattgttgtaaccactttaggtacatctgatgatgaacaaagaattgaaagtttagatggtcttcaaagagaaagatttatgcttcactataattttcctcctttttcagttggtgaaactggaagaattggaactggtagacgtgaaattggtcacggtaaactagcttggagagcaatcaattcttcattaccttcaaaagaggcttttccatacacttttagaatagtatcagagattacagaatctaatggttcttcttcaatggctactgtttgtggggcttccctagcattaatggatgcaggtgttccgataaaagaaccagttgcaggtattgcaatgggtttaattaaagagggagatgattttagtgtcttatcagatattttaggtgacgaagatcacttaggggatatggacttcaaagttgcaggaa

SEQ ID NO: 257170 - DNA, 994 bp, Unknown
  Bacterial polypeptide expressing nucleotide sequence isolated from the Sargasso Sea
gatattttatcaatcattgcttcatcagcagccctagcaatatcaggcatgccattcatggttcctgttggagcatcaagagtaggatttattgatggcaaatatgttcttaatccgtctaaaaaagaattagagaattcaaaattagatctagtagttgcaggaactaaagatgcagttttaatggttgaatctgaaactaaaggtttaacagaagaagaaatgcttaaagcagttaaatttggacatgaaaattttgttccaataattaatataatcgaagaacttgcaaaagaatgtaaaaaacctgattgggttgtagagaaaaaagatctttccgaagttaagaaaaaaattgaaaaagaattcacatccgaattgaaaaaagctttttcaactagagataaacaggaaagatcaaatcttatttctgaaataaatgataaagcaaaaaaaatatttgaagaaaatgaaaactttactgatttagatgtcaattatgaacttaaaaatttagaaaaaagaatagttagaactgatatcttaaaaaataaaaaacgtattgatggaagaggactttcagatgtaagaccaattatgtgtgaagttggaattttacctagagttcatggttcagcattatttactagaggcgaaactcaagcaatagtaacaactacacttggaacttcggacgacgaacagagaattgaaagtttagaaggtcttcaaagacaaagatttatgttacattataattttcctccattctcagttggtgaaactggaagaataggaacaggaagaagagaaattgggcatggaaaattagcttggagagcaataaattcatctttaccgtcaaaagaaagtttcccttatacatttagaatagtgtcagagattacggagtctaatggatcgtcctctatggcaacagtttgtggaacttcattagcattaatggatgctggtgttccaataaaagaaccag

SEQ ID NO: 257171 - DNA, 739 bp, Unknown
  Bacterial polypeptide expressing nucleotide sequence isolated from the Sargasso Sea
aatgtttaaagtatataagaaagagattgaagtagcaggcaaaaagataagtttagaaacaggaaaaatcgcaagacaagcagacggcgcaatcatagcacaatgtggtgaaacagttgttatggcaactgtagtaggagcaaaaaagataaatccagatgttgattactttcctttatcagtaaattaccaagaaaaatattatgcggcaggaaaaattcctggaggatattttaagagggaagcaagaccaacggaaagtgaaacattaatttcaaggttaattgatagacctataagaccactttttcctgaagaatttaaaaatgaagtacaattacttccaacagttatttcttatgacaaagaaaatgaagcagatattttatcaataattgcatcatctgcagcattagccatatcaggaatgccttttatgggccctgttggagcttctagagttggttttattgaaggaaaatatgtactaaatccaacaaaaaaagaactagaaaattctaaattagatttagtagttgctggtacaaaagatgctgttttgatggttgaatcagaggcaaacggactaacagaagaagaaatgttaagtgctgttaagtttggtcacgaaggctttgttccagtaattgaaatgatagaacaacttgcaaaagaatgtaaaaaacctgactgggttgtagaaaaaaaagatctaactgaaattaagaaaaaattggaa

SEQ ID NO: 257172 - DNA, 846 bp, Unknown
  Bacterial polypeptide expressing nucleotide sequence isolated from the Sargasso Sea
gttagtagtcacaactttaggtatgtctgacgatgaacaaagactagaaagtttagacggtatgcaacgatcgagctttatgttgcattacaattttccacctttttctgttggtgagtgtggcagaataggaacaggtagaagagaaataggccatggtaaattagcatggagagctatcaactcatcattaccattaaaagaaaatttcccttatactctaagagtagtatctgagattactgagtcaaatggatcttcttcaatggcaacagtctgcggaacatctttgtcactaatggatgcaggtgtaccaattaaagaaccagttgcaggaatagccatgggtttaattaaagagggtgaaaagttttcagttttatctgatattttaggagatgaggatcatttaggtgatatggattttaaagtagcaggaacaaaagatggtattacatctttacaaatggacataaaaataacaggaattacttttgaaattatggaacaagctttaaatcaagctaaggctggcagagagcatattttgaacgaaatgaacaaagctataaaaacatcgagaaaagaattttcaaaacacactccaaaaattgaaacaattaaagtcgataaaaaagatatagcgacagtaattggtaaaggtggagcgacgattagagaaattgtcgaaacatctggagcaaaagttgacgtaaaagatactggagaagttactgtggcagcgcctgatgaaaaatcaagaaatgctgctattgagatcattaaaggattaatagcaaagccagaagtaggtaaaatttataaaggcaaagtagtaaaaataat

SEQ ID NO: 257173 - DNA, 918 bp, Unknown
  Bacterial polypeptide expressing nucleotide sequence isolated from the Sargasso Sea
caaagaattgaagctctacaaggttcctataaagagaactttatgcttcattataattttcctccttactcagttggagaagttggaagaattggagcaacaggaagaagagaaattggtcatggtaagcttgcctggagagctttaaaagctgtgttaccaagcaaagaagattttgattatactattagattagtttcagatatcacagagtcaaatggttcatcgtctatggcaactgtttgtggctcttcacttgcactgatggatgctggagttccaataaaaaattctgtttctggtattgcaatgggcttaattaaagaaggtgacagttttgcagttttatccgatattttaggcgatgaagatcatctgggtgatatggattttaaagttgctggaacaaaagatggaataacttctctgcaaatggatataaagattactggaataacaactgaaattatggatcaagctcttaaccaagcaaaaggtggaagacttcacatcttagatgaaatgaataaagctattgactctcctagaaccgaattaggtccgtacaccccaagagttgaaatgattaaggtgaagagggataatataggagagataattggaaagggtggtgccactattaaagacattattgaacaatcgggtgcaagtgttgatataagtgataatggtacagtaaaaattgctggaaccagcaaggagtcaatacaaaaagctatagatcttattaattctataatcgaggagcctgaagttggacaagtttatgaaggtaaagtagttaagattatggaatttggggcttttgttaatttctttggtaaaaaagatggattagtgcatatttcacaattatctgatgaaagagttgaaaaagttactgacgttattaacgaa

SEQ ID NO: 257174 - DNA, 753 bp, Unknown
  Bacterial polypeptide expressing nucleotide sequence isolated from the Sargasso Sea
aatgtttaaagtatataagaaggaaattgaagtagcaggaaagaaaataagtttagaaacaggtaaagtagcaagacaggcagacggtgcaataatcgcaacatgtggagaaacggtcgttttagcaacagtagtgggagcaaaaaaagtaaatcctgacgtagattattttccattatctgtaaattaccaagaaaaatattacgcagcaggaaaaattccaggtggatattttaaaagagaagcgaggccaacagaaagtgaaacactaatttctagattaattgatagaccaatacgacccttgtttcctgatgaatttaaaaatgaggttcaattgttaccaactgtaatttcttacgataaagaaaatgaagcagatattttatcaattacagcttcatcagcagcattggctatatcaggaatgccatttaagggccctgttggagcttctagagttggatatattgatggaaagtatgttttaaatccctctaaagtagaattagaaaaatcaaaactagatttagttgtagcaggcacaaaagatgctgtgcttatggttgagtctgaagcaagtggtttaacagaggaagaaatgttaaatgcagttaaatttggtcatgaaggttttgttcctgtgattaaaatgattgaagaacttgcaaaagaatgtagaaaacctgaatggattgttgaaaagaaagatctatctaaagttaagaaaaaacttgaaagtgcttttacaga

SEQ ID NO: 257175 - DNA, 880 bp, Unknown
  Bacterial polypeptide expressing nucleotide sequence isolated from the Sargasso Sea
tgttaggacgaagttattgaaaactaaaaatagaattgatggtaggggggttgcagatgtaagaaaaatagattgtgaaactggtttattatccaggtcgcatggatcagctttatttactagaggagaaactcaagcacttgtatctttaactttaggtacttcagatgatgaacaaatggttgactctcttgatggaatgtctaaagaaaaatttatgttgcattataacttcccacctttttctgtaggagaagcaggtagaatgggaggtacaggaagaagagaaataggacatggaaaactagcttggagggcaataaacccattacttccaagcgtagaagaatttccatatactcttcgcatagtttctgaaattacagagtctaatggctcttcttctatggctactgtatgtggcagttctttagctttaatgaatgcaggagttcccattaaaaaacaagttgcaggaatagctatgggtctaattaaagaaggagataaatttttagtattatcagatattttgggtgatgaagaccatctaggagacatggactttaaagtagctggtactaaggatgggataacatccttgcaaatggatataaagatagactcaataacaaaaaaaataatgtcagatgccttaaaacaagctaaaaaaggaagagaaattattttaaaggctatggataaagaaattagtaagcctaacactaagatgaataagtatgctcctaaaatggttactatgactgtaaaaaaagaaaaaattagagaagtaataggtgcaggaggaaaagttataagagaaatagtagaaacttcaggagctaaagttgatattaatgatgatggagtaataaaatag

SEQ ID NO: 257176 - DNA, 851 bp, Unknown
  Bacterial polypeptide expressing nucleotide sequence isolated from the Sargasso Sea
agtaaatccagatattgattatttccctctgtcagtaaattatcaagaaaaatattatgcagcgggaagaattcctggaggatattttaaaagagaggcaagaccaactgaaagcgaaacactgatctcaagattaattgatagacctatcaggcctttatttccagatgaattcaaaaatgaagtacaagtactcccaactgtaatctcttatgataaagaaaatgaagcagatatattatctattatcgcttcatcagcagcattagcaatctcgggaatgcctttcttagggcctgttggagcttcgagagttggttttatagatgggaagtatgttttaaatccatcaaaattagaacttaagaattccaaattagatttagtagttgctggaactaaagatgcagttttaatggttgagtctgaagcaagaggtttaacagaagaagaaatgttaaatgcagtgaagtttggtcatgagggatttgtgccagtgattaaaatgatagaagacttagctaaagaatgtaaaaaatctgaatggattatagagaaaaaagatctttctgaagtaaagaagaagttagaaactgaatttacagctgaattgaaaaaagctttttcaattagaaataaacaagaaagatcaaatatgatctcagaaattacagataaagcaaaaaaactctatgaagagaatgaagaaataacagatttagatgttaattctgaattaaagaatttagaaaaaacaatagtaagaactgatattctaaaaaataaaaatcgtattgatggaagaggattgtcagatgtaaggccaataatgtgtgaagttggaattcttc

SEQ ID NO: 257177 - DNA, 808 bp, Unknown
  Bacterial polypeptide expressing nucleotide sequence isolated from the Sargasso Sea
caaaggactgaattagagaaatccaaattagatttagttgtagcaggaactaaagatgcagttttaatggttgagtcagaagcaaatggtttaacagaggaagaaatgttgaatgctgttaaatttggacatgaaggcttcgttccaataatagaaatgatcgaagatcttgcaaaagaatgtagaaaaccagaatggacagttgagaaaaaagatctttctgagattaaaaagaaattagaggacgaatttactgaggatttgaaaaaagctttctccacaagagacaagcaagatagatcaaatcaaatttctgaaattaatgaaaaagctaaaaaattatatgaggaaaatgaagcttacactgatttagatgtaaattctcaacttaaaaatttagaaaaatctattgtaagaactgatatcttaaaaaataaaaatcgtattgatggtagaggacttgaagatgtaagaccaatcatgtgcgaagttggaatactcccaagagttcacggttcagctttgtttacaagaggagaaacgcaggctattgtaactactacacttggaacttcagatgatgaacaaagaatagagagcttagatggccttcaaaaagagagatttatgttgcactataattttcctccattctcagttggagaaacaggaagaataggaacaggtagaagggagataggtcatggtaagttagcatggagagcaattaactcatcacttccatcaaaggaaagttttccctatacatttaggattgtatccgaaatcactgaatctaacggctcat

SEQ ID NO: 257178 - DNA, 737 bp, Unknown
  Bacterial polypeptide expressing nucleotide sequence isolated from the Sargasso Sea
aatgtttaaacaatttaaagaagaaatagattttggagggaaaaaattaactctagaaacaggaaagattgctagacaagcagatggcgcagtcattgctacttggggggaaacagtagttatagcaactgtagtaggagcaaaaaaagttaatcctgaaacagattattttccactatctgtaaattatcaagaaaaatattatgcagctggaaaaattcctggaggttattttaaaagagaagcaagaccaactgagtctgaaactttgatttcaagattaattgatagaccaattagaccattgtttccagaaagctttagaaatgaagttcaagttttaccaactgttctatcttatgataatgaaaatgaagcagatattttgtcgataattgcttcatcagcagctctatcaatatctggattaccatttaaaggtccagtgggagcttcaagagtaggatttattgatggaaaatgtgttctcaatccaaataaaaaagaattagaaaattcaaaattagatttagttgtagcaggaacaaaagatgcagttttaatggttgagtcagaagcatcagggcttaccgaaaaagaaatgttggatgcagtcaaattcggtcatgaaggatttgttccagtaattaaaggtatagaaaaattatctaaaaaatgttcaaaagaaaagtggaaaattgaaagagaagattttagtaaaatatcaaaaaaaattg

SEQ ID NO: 257179 - DNA, 925 bp, Unknown
  Bacterial polypeptide expressing nucleotide sequence isolated from the Sargasso Sea
tttcctcctttttcagtcggtgaacccggaagaattggaactggtagacgtgaaattggtcatggtaaacttgcttggagagcaattaactcttcattaccctcaaaagaggcttttccatatacttttagaatagtatcagagattacagagtctaatggttcttcttcaatggctactgtttgtggagcatctttggcattaatggatgcaggtgttccaataaaagaaccagttgcaggtattgcaatgggtttaattaaagaaggtgatgattttagtgtcctatcagatattttaggtgatgaagatcacttaggtgatatggattttaaagttgctggaactaaagatggaattacttcacttcaaatggatatcaaaattactggtattacatttgaaatcatgaagcaagctttgaagcaggctaaagatggaagaattcatattctaggtgaaatgaataaagctttaggtgagtctagatctgatgttggaaaacacaccccaaaaatggagcaagtaacagttgataaaaaagacattgctgctgtaattggaaaaggtggagcaaccataagagagatcgttgaaaagtcagctgcgaaggttgatgtaaatgatgaaggagttgtaacagttgccgctccagacgaagagtcaagaaagattgctatgcaaatgatcaaagacatcactgcaaaagctgaaatgaataaaatttattcaggtaaggtgatgaagattatggagtttggtgcatttgttaatttcctaggaaaacaagatggacttgttcatatttcagaactggcagacaaaagggtagctaaagttactgacgttgttaaagaaggcgacgaagtaaaagttaaagtgattggtttcgatagaggtaaagttaaactttctatgaaacagg

SEQ ID NO: 257180 - DNA, 754 bp, Unknown
  Bacterial polypeptide expressing nucleotide sequence isolated from the Sargasso Sea
atgtttaaagtatacaaaaaagaaattgaagtagcaggtaaaaaaataagtttagaaacagggaagattgcaagacaagcagatggcgctataatagcaaaatgtggtgaaacagttgttatggcaacagtagtaggtgcaaaaaaagttaatccagatgttgattattttcctttatcagtaaattatcaggaaaaatattatgcagccggaaaaattcctggcggatattttaaaagggaagcaagacctacagaaagcgagactcttatttcaagattaattgaccgaccaataaggccattatttccagacgaatttaaaaatgaagtacaattacttcctactgtaatatcttatgataaagaaaatgaagcagatatattatcaataatagcatcttcagcagctctagctatttcaggaatgcctttcatgggacctgtgggagcctctagagttggctatattgaaggaaaatatgttcttaatccttcaaagaaagaattagaaaattcaaaattagatttagttgttgcaggaaccaaagatgcagttttaatggttgagtctgaagcaaacggattaacagaagaagaaatgttaaatgctgttaaatttggtcacgagggttttgttccaataatcaaaatgatagaagaactttcctcagaatgtaaaaaaccagattgggttgtagagaaaaaagacctttctgaagttaagaaaaaacttgaggaagaatttacaggtg

SEQ ID NO: 257181 - DNA, 861 bp, Unknown
  Bacterial polypeptide expressing nucleotide sequence isolated from the Sargasso Sea
agatgctgtgcttatggtagaatcagaggctagtgtattaacagaacaacaaatgttagatgcagtaaaatttggtcatgaaggatttgtgcctgttatcaaaatgatcgaagatttagctgaggaatgtaaaaaacccgattgggtagtcgagaaaaaagatttatctgaggttaagaaaaaattagagagtgaatttaccaaagatttaaagaaagcattttctattaaaattaaacaagatagatcaaatttaatctctgaagttactgagaaagcaaaaaaactttatgaagaagacgagaaatttacggagcttgatgtaatgcatgaacttaagaatatcgaaaaaggaatagttaggacagatattttgaaaaacaaaaatcgtattgacggtagaggacttgctgatgtaagaccgattatgtgtgaggttgggatactacctagagttcatggatctgcattattcaccagaggagaaactcaagccattgttactacaactttaggaacttcagatgatgaacaaaggattgaaagtttagatggtctcaaaagagaaagatttatgcttcactataattttcctccattttcggttggagaaacagggagaattggaactggaagaagagaaataggccatggaaaattagcatggagagctatcaattcttcattaccttctaaagaaagcttcccatatacttttagaatagtctctgaaattaccgagtcgaacggatcttcctcaatggcaacagtatgtggttcatctctagcactaatggatgccggcgtaccgattaaggaacctgtagctggcatagctatgggactaataaaagagggaga

SEQ ID NO: 257182 - DNA, 668 bp, Unknown
  Bacterial polypeptide expressing nucleotide sequence isolated from the Sargasso Sea
aatgttcaaagtagttaaaaaagaaatagaagtaagtgaaaaaaaaataagtttagagacaggaaaaatagcaagacaagcagatggagcaattgtagctcaatgtggggaaactgttgttttagcaacagtagttggtgcaaaaaaagtaaatccagatatggactactttccattatctgtaaattaccaagaaaaatattacgcagctggtaaaatcccaggtggatattttaagagagaagcaagaccaacagagagcgaaacattaatttcgagattaattgatagaccaatcagaccattgtttcctgatgaatttaaaaatgaagtgcagttattaccaacagtaatatcttatgataaagagaatgaagcagatattttatctatcattgcatcttcagccgctctagcaatttcaggaatgcctttcatgggcccggtaggagcatctagagttggctttattaaaggaaaatacgttctcaacccttcaaaaaaagagttagaagaatctaaactagatttagttgtagcaggaactaaagatgcagttttaatggttgagtcagaggcaaatgggttaacagaggaagaaatgttgaatgctgtgaaatttggtcatgaaggtttcgttccagtaatagaaatgatcgaggaacttg

SEQ ID NO: 257183 - DNA, 820 bp, Unknown
  Bacterial polypeptide expressing nucleotide sequence isolated from the Sargasso Sea
agatcttaagaaagcttttgcaacaagagataaacaggatagatcaaatcagatttcagagattactgataaagctaaaaagctttatgaggaagatgaaaactacacagatcttgatgttaacagtcagttaaaaaatcttgaaaaatcaattgttagaactgatattctaaaaaataaaaacagaattgatggtcgaggattatcagatgtaagacctattgaatgtgaagtgggtgttttaccaagagcacatggttctgctttatttactagaggagaaacccaagcaattgttgtagcaactttaggaacatctgatgacgagcaaagaattgaaagtttagatggattacaaagagagcgatttatgcttcactataattttcctcctttttcagttggagaaactggaagaattggaacgggtagaagagaaattggtcatggtaaattagcttggagagcaattaactcttcattacctacaaaagaggcgtttccatatacttttagagtagtttcagagattactgaatctaatggttcttcttcaatggctactgtttgtggaacatcattagcattaatggatgcaggggttccaattaaagagccagttgctggtattgcaatgggattaattaaagaaggtgatgattttagtgtcttatctgacattttaggtgatgaagatcacttgggtgacatggactttaaagttgctggaactaaagatggaattacttctcttcaaatggatatcaaaattacaggtattacttttgaaattatggagcaggcattaagccaagctaaa

SEQ ID NO: 257184 - DNA, 880 bp, Unknown
  Bacterial polypeptide expressing nucleotide sequence isolated from the Sargasso Sea
atagctcaatgtgagaaaacagttgttttagctacagttgttggtgcaaaaaaagtaaatccagatatggattatttcccattgtcggtcaattatcaggaaaaatattatgcagctggaaagataccaggcgggtattttaaaagagaagctagacctacagaaagtgaaactttaatttcaagattaattgatagacccatcagaccattgtttccagatgaattcaaaaacgaagtacagctattaccaacagtaatatcttatgataaagagaatgaagcagatattttatctattattgcatcttcagcagctttagcaatctcaggaatgcctttcatgggtcctgtgggggcatctagagttggctttattgaaggaaaatacgtcctaaatccatcaaagactgaattagaaaaatctaaactagatttagtagtagcaggaactaaggatgctgttttaatggttgagtccgaagcaaacggtttaacagaggaagaaatgttgaatgctgttaaatttggacacgaaggttttgttccaataatagaaatgatcgaagaccttgctaaagaatgtagaaaaccagagtggacagttgagaaaaaagatctttccgagataaaaaagaaattagaagatgaatttacagaagatttgaaaaaagctttctctacaagagacaagcaagatagatcaaatcaaatttctgaaattactgaaaaagctaaaaaattatatgaggaaaatgaggcttacactgatttagatgtaaactctcaacttaagaatttagaaaaatctattgtaagaactgatattctaaaaaataaaaatcgtatagatggaagaggtctagcagatgtaagaccaa

SEQ ID NO: 257185 - DNA, 790 bp, Unknown
  Bacterial polypeptide expressing nucleotide sequence isolated from the Sargasso Sea
aaaaatttagaaaagacaattgtaagaacagatattcttaaaaataaaaatcgtatagatggaagaggtttgtcagacgtgagacctataatgtgtgaggtaggtattttgccaagagttcatggatctgcattatttacaaggggcgaaacccaagcaattgtaacaacaactctaggaacgtctgacgatgagcaaaaaattgaaagtctagatggattgcaaaaagaaagatttatgcttcattataattttccaccattttcagttggagaaactggaagaattggaacgggcagaagagaaattggccacggaaaacttgcctggagagctattaattcatctttaccatcaaaggaaagctttccatatatttttagaatagtttcagaaattacagaatcaaatggttcttcttcaatggcaactgtttgcggaacttcgttagcattaatggatgctggtgttccaataaaagaaccggtagctggtattgcaatggggttaattaaagaaggcgatgatttcagtgtattatcagacatattgggtgatgaagatcatcttggtgatatggattttaaggttgctggaaccaaagatggaattacatcacttcaaatggatataaaaattacaggaatcacgtttgaaataatggaacaagctttaaatcaagctaaagatggaagaatccacattttaggtgaaatgaataaggctttatcaaaatcaagagatggtgttggaaaacatactccaaagatggaaaaaaatttctgttgat

SEQ ID NO: 257186 - DNA, 939 bp, Unknown
  Bacterial polypeptide expressing nucleotide sequence isolated from the Sargasso Sea
tgaagtggattattttcctttatcagtaaattatcaagaaaaatattattcagcaggaaaaattcctggaggatattttaaaagagaagcaagaccaactgaaagcgaaactcttatatcaagactaattgatagaccaatcagaccacttttccctgatgaatttagaaatgaagtccaattacttccgacagtaatatcttatgataaagaaaatgaagctgatattttatcgattattgcttcatcagcagctttagctatatcaggcatgccattcaagggtcctgtgggagcttctagagtaggctttattgatggaaaatatgttcttaatccatcaaaaaaagaattagaaaattcaaaattagatttggtagttgctggaactaaagatgcggtattaatggtggagtcggaagctagcggcttaacagaagaagaaatgctaaatgcagttaaatttggtcatgaaaaatttgttccagtaattaaaatgatcgaggaacttaaaaaagaatgcaaaaaacctgattgggaaatagagaaaaaagatttgtctgatgtaaaaaaaaatttagaaaaagaatttacggatgagcttaaaaaagctttttctataaaagacaaaaaagaaagatcaaatcttattgctgacataactgatagggctaaaaaaatttacgaaaatgatgaaaatatttctgaactagatgttaattacgaattgaaaaatttagaaaaaagaatagttagaacagatatcttaaaaaataaaaatcgtattgatggaagaggacttgcagatgtaagaccaattatgtgtgaagtaggaatactaccaagaactcatggctcagcattatttaccagaggtgaaacccaggcaattgtaacaacaacacttggaacctcggacgatgagcaaagaattgaaag

SEQ ID NO: 257187 - DNA, 836 bp, Unknown
  Bacterial polypeptide expressing nucleotide sequence isolated from the Sargasso Sea
aaactagattctgaaaaattaacattaattagatcagaaatttctgaaaaatttacttcggatactctttcagcagtccaattagcagatgcaattaaaaatgttgaaaaagatattgtaagaggagaattactaaacagtggtaataggattgatggtagagatacaaaaactgtaagacctattatttgtgaaactggaattttagaacgaacacatggttctgctttatttaccagaggtgaaacacaagcaattgttgtatcaactcttggaacggggcaagatgaacaaagaattgatgcaatagatggagaatacactgaaaatttcatgcttcattataattttccaccatactcagttggagaagtgggtagagtaggctcaacaagcagaagggaaattggtcacggaaagttagcatggagagctattcatccaatgctacctccaaaagaaaaatttccttacacttatagagttgtgtcagagattacagaatcaaatggatcaagctctatggcaacagtttgtggaacgtcaatgtcattaatggatgctggagtaccattagaaagaccagttgcaggaattgcaatgggcttaattaaagaaaaagataaatatgtaattttatctgatattttaggtgatgaagatcatttgggagatatggattttaaagtcgctggaacgtctgaaggaattacatctcttcaaatggacattaaaattacaagtataacagcagaaataatgaaagaagccctagctcaagctaaagatggacgttttcatattttagatgagatgggcaaagcaatatcaaaacc

SEQ ID NO: 257188 - DNA, 913 bp, Unknown
  Bacterial polypeptide expressing nucleotide sequence isolated from the Sargasso Sea
attggtatgcctatgggggccaaaaagaagagaaattggacatggaaacctagcaaaaagggccattaaggcagtacttcctgataatgaggaatttggatataccatcagagtagtatctgaaattacggaatcaaatggatcaagttcaatggcaactgtttgtggaacttctttatccttgatggatgctggtgtaccaataactgctcctgttgctggtatagcaatgggtttaattaaagatgatgaagaatttgcagttttaacggatattttgggagatgaggatcatcttggagatatggactttaaagttgcaggctcagaaactggaattactgcactacaaatggacataaaaattaatggaattaatgaagaaattatggaagttgctcttgagaaagccaaaaatgcaagaatgcatatcctagcaaaaatgaatgaagtgatttcaacaccaaaaagtgttgctgaagatgcacctgctatgaaaactcttttagtaaataaagataaaattaaagatattattgggaaaggtggctcagtcattaaatcaattcaagaagatactggtgctgttgtagatattaatgatcaaggagaagtatcagtttttggaaacagtcaaccaataatgcaagctgcacttgatttaattgacaaaattactgaagaacctgaagttggcaaagtatacgatggtactgttgtaaagatcgtcgattttggtgcttttgtaaatatattacctggaagagatggcttacttcatatttctgaaatttccaatgaacgaaacagaaatgttggtgatgttttggaagaaggtcaaaagcttcaagtaaaactaatcggatttgacagaggcaagatgaaactgtcgataaaagctcttagtaaataa

SEQ ID NO: 257189 - DNA, 911 bp, Unknown
  Bacterial polypeptide expressing nucleotide sequence isolated from the Sargasso Sea
tgatataactgaaagagcaaaaaagctttatgaagaagatgaaaatatttctgagttagatgttaactatgagttaaaaaatttagaaaaaaaaattgtaagaacagatattcttaaaaataaaaaaagaatagatggtagaggtttagcagatataaggcctatagagtgtgaagttggaattttaccaagaactcatggatcagctttatttactagaggtgaaacccaagcaattgtcacaacaacgcttggaacctcggatgatgagcaaagaatcgagacattagatggattggttaaacaaagatttatgcttcattataattttcccccattttctgtaggtgaaactggtagaataggaacaggaagaagagaaataggacatggaaaattagcatggagagccattaagtcatctttgcctccaaaagaaagttttccctatacatttaggattgtatcagaaatcacagaatctaatggatcatcttcaatggcaacggtttgtggaacttcattagcattgatggatgctggtgttccaataaaagaaccagtagctggtattgcaatgggattaataaaagaaggaaaagattttagtgttttatcagacattttaggagatgaagatcaccttggtgatatggattttaaagttgcaggaacaaaaaacggaataacttcacttcaaatggatattaaaattacaggaattacatttgaaataatggaacaagctttaaatcaagctaaagatggaagaattcacatattaggtgaaatgaataaagctttagataaatctagagcagatgttggtaaacatactccaaaaatggaaaaaataactgtagataaaaaaaatattgccactgtaattgaaaaggtggtgcaactataag

SEQ ID NO: 257190 - DNA, 631 bp, Unknown
  Bacterial polypeptide expressing nucleotide sequence isolated from the Sargasso Sea
atgtttaaagtagtaaaaaaagaaatagaaataagtggaaagaaaataagtttagagacaggaaaaatagcaagacaagcagatggagcaattatagctcaatgtggggagacagttgttttagcaacagttgttggtgctaaaaaagtaaatccagatatggattattttcctctatccgtaaattatcaagaaaaatattatgcagctggtaaaattcctggtggttattttaaaagggaagcaaggccaactgaaagcgaaactctaatttcaagactaattgatagacctatcagaccattgtttcctgatgagtttaaaaatgaagtgcaactattaccaacggtaatatcctacgatagagagaatgaagcagatattttatctatcattgcatcttcagctgctctagcaatctcaggaatgccttttatgggtccagtgggagcttctagagttggctttattgaaggaaagtacgtcctcaacccatcgaagactgaattagagaaatccaaattagatttagttgtagcaggaactaaggatgctgttttaatggttgagtctgaagcaaatggtttaactgaagaagaaatgttgaatgcaataaaatttggtcactgaa

SEQ ID NO: 257191 - DNA, 840 bp, Unknown
  Bacterial polypeptide expressing nucleotide sequence isolated from the Sargasso Sea
gatttagttgtagcaggtacaaaagatgctgtacttatggttgagtctgaagcaactggtttaactgaagaagaaatgttaaatgcagttaaatttggtcatgagggatttgttcctgtaattgagatgattgaggaacttgcaaaagaatgtagaaaacctgagtggactgttgaaaagaaagatctatcagaagttaagaaaaaacttgaagaaacttttacagaagatcttaaaaaagcttttgcaacaagagacaaacaagatagatcaaatcaaatttcagagattactgataaagctaaaaaactttatgaggaagatgaaaactacactgatctagacgttaatagtcagttaaaaaatcttgaaaaatcaatagttagaacagatattctaaaaaataaaaatagaattgatggtcgaggattgtcagatgtaagacctatttcttgtgaagtgggtgttttaccaagagcccacggttctgcattatttactagaggtgaaactcaagcaattgttgttgcaactttaggcacatctgatgatgaacagagaattgaaagcctagacgggcttcaaagagaacgatttatgcttcactataattttcctcctttttcagttggggaaactggaagaattggaacaggtagaagagaaattggtcatggtaaattagcttggagagcaattaactcttcattaccatcaaaagaagcatttccatatacttttagagtagtttcagagattacagagtctaatggttcttcttcaatggctactgtttgcggaacttctttagcattaatggatgctggagtaccaatcaaa

SEQ ID NO: 257192 - DNA, 735 bp, Unknown
  Bacterial polypeptide expressing nucleotide sequence isolated from the Sargasso Sea
gtaacagctaccttgggcacttctgatgatgaacaaagaattgaaagtttggatggattacaaagagaaagatttatgcttcactataattttccaccattctcggttggagaaacgggaagaattggaactggtagaagagaaataggacatggtaaattagcgtggagagctattcattcttcgttaccctcaaaagatgcatttccttatacttttagagtagtgtctgagatcacagagtcaaatggttcatcttcaatggctactgtttgtggaacatcattagcattaatggatgctggagttccgattaaagaaccagttgcaggtatagcgatgggtttaatcaaagaaggtaatgattttagtgtcttatcagatattttaggagatgaagatcatctcggagacatggactttaaagttgcgggaactaaagatggaattacttcacttcaaatggatattaaaattactggtattacatttgaaattatggagcaagcattaagtcaagctaaagatggacgagttcatattttggatgaaatgaataaagcattatcagcttcaagagcagatgttggaaaacacactccaaaaatggaaaaaataaatgttgataaaaaagacattgctgctgttattggaaaaggaggagcaacgataagagaaatagtcgagaaatcaggtgcaaaagtagatgtaaatgacgaaggtgtagttacagtt

SEQ ID NO: 257193 - DNA, 613 bp, Unknown
  Bacterial polypeptide expressing nucleotide sequence isolated from the Sargasso Sea
aatgtttaaagtatttaaaaaagaaatcgaagttggaaaaagaaaaataactttagaaactggaaaaatagcaaggcaagctgatggtgcagttattgctcagtgtggtgaaaccgttgttatggcaacagttgtaggggcaaagaaagttaatccagatatagactactttccattgtcggtaaactatcaagaaaaatattatgctgctggaaaaattcctggagggtattttaaaagagaagctagacctactgaaagtgaaacattaatctcaagattaattgatagaccaattagaccattgtttcctgatgaattcaaaaatgaagttcaattactcccgacagtaatatcttatgacaaggaaaatgaagccgatatattatctataattgcttcttcagctgcattagcaatatcaggtatgccctttaaggggccggttggcgcatctagagttggtttcatagatggaaaatatgttctcaatccttcaaaaaaagagttagaaaattctaaattagatctagtcgtagcagggactaaggacgcagttttaatggttgagtcagaggcaaatggattaacagaggaagaaatgttgaaagca

SEQ ID NO: 257194 - DNA, 895 bp, Unknown
  Bacterial polypeptide expressing nucleotide sequence isolated from the Sargasso Sea
ataaaaattgaaactcaaacaaaaattgagtctttgaaagaggacaaccaattaaaagttttgttatcagaaaatgataaattaattcattctgactttaaaaaactaacaaaaaaattaatgaggtctcaaatcattaatgatgggaaaagagttgatggtcgcgatttagatgaagtcaggaagatatcagcctctgcaggtatccttccaaaaagagtccatggttcagctttatttcagagaggtttaactcaggttttatctactacaacacttggcacacctagtgacgcccaggagatggatgatcttaatccaagcactgagaaaacttacttacatcattataattttcctccatattctgtaggagaaactagacccatgagaaccccaggcagaagagaaatcggacatggtgcgttagcagaaagggctataattccagttttgccaggtaaagagacatttccttacgtattaagggtagtgagtgaggtcttgagctcaaatggttctacttcaatgggatccgtttgtggaagcacaatatcattattggatgctggagtacctttaaaagcccctgttagcggtaccgccatgggattaataagggaaggcaaagaaattagaatccttacagatattcaaggcatagaagattttcttggagatatggatttcaaagttgcaggcacagagaaaggtataactgctttgcaaatggatatgaaaataactggattaccagtttctataatttccgatgcaataaataaagcacgcccagctagaattcatattttagaaaaaatgcaagaggccatcgataaaccacaggaatcattatcgcctcatgctccaagacttctaagctttagaattgatc

SEQ ID NO: 257195 - DNA, 763 bp, Unknown
  Bacterial polypeptide expressing nucleotide sequence isolated from the Sargasso Sea
ctcgttagtggaacggcaatggggtctaattaaagagggtaaagaagttcgaatccttacagatattcaaggtattgaagattttctcggagatatggatttcaaggttgctgggactgaaaaagggataacagcattgcaaatggatatgaaaattacaggattaccggtatcgataatttctgatgccattaaaaaagctcgtcctgcgagattgcatatcttagaaaaaatgcaggaagcgatagataaacctcaagattcattatctcctcatgctcctagacttttaagttttaggattgatccagaacttattggaactgtaattggacctggaggtagaactattaaaggaattacagaaaggactaatacgaaaattgatatagaggatggaggtatagttacaatagcttctcatgatggggccgctgcagaagaagctcagaaaatcattgaaggcttaacgagaaaagttcatgaaggtgaaattttctctggtgtagtaaccagaataatccctataggtgcttttgtggaaattcttcctgggaaagaagggatggtgcatatctctcaattatcagaagcaagagttgagagagtagaagatgtcgttagacaaggtgacgatgtcactgtcagagttcgggaaattgatagcagaggaaggataaatcttacattgaggggtgttgctcaaaatggaggcatgtcatatcccgaaccaactcctacacctgtagctcctcttaattaa

SEQ ID NO: 257196 - DNA, 832 bp, Unknown
  Bacterial polypeptide expressing nucleotide sequence isolated from the Sargasso Sea
gatgttcaaagaatataaagaagaaatagactttggtggtaaaaaacttacattagaaacaggtaagattgcacgtcaagctgacgctgcaataattgcaacttggggagaaactgtagttatttctactgtagttggagcaaaaaaagtcaatccagaaatagattactttcctctatctgtaaattaccaagaaaaatattatgctgctggaaaaattccaggaggttattttaaaagagaagcaagaccaaccgagtccgaaaccttaatatctagattaatcgatagacctataaggcccttgtttcctgatgacttcaggaacgaagtgcaagttttaccaacagtactttcatatgataatgaaaacgaagcggatatattatcaataatagcatcctcagcagcattatcaatttcgggactaccttttaaagggccagtaggagcatccagggttggttttatagatggtaaatatattttaaatccaacaaaaaaagagttagaaaattctaaattagatttagtagtggcaggtactaaagacgctgttttgatggttgagtctgaagcatcaggattaacagaaaaagaaatgctagatgctgttaagtttggtcatgatggttttgtttcagttgtaaaaggtatagagaaactgtcaaaaaaatgttctaaggatgcatggaaaattgaaaaaaaagattacagtaaagtttataaaaaaatagaaaaagaacttaccaaagattggaaaaaagcattttcagaaaaagataaaaagaaaagatctgaactaataagtttagcaggagataatccatag

SEQ ID NO: 257197 - DNA, 916 bp, Unknown
  Bacterial polypeptide expressing nucleotide sequence isolated from the Sargasso Sea
aatgtttaaagtatataagaaagaaattgaagtagcagggaagaagataagtttagaaacaggtaaagtagcaagacaagcagacggagcgattgtagcaacatccggcgaaacagttattttagcaacagtagtaggtgcaaagaaagtaaatcctgatatggattattttcctttgtcggtaaactaccaagaaaaatattatgcaggtggaaaaattcctggcggatattttaaaagagaagcaagaccaactgagagtgaaactttaatctcaagattaattgatagaccaattagacctttgtttcctgatgaatttaaaaatgaagtacagttgttaccaactgtgatatcatatgataaagagaatcaacctgatattttagcaattacagcctcatcagcggcactagctatttcagggatgccttttagaggtcctgttggagcatctagagttggttttgttgatggaaagtacattcttaacccatcaaaagctgaattagagaactcaagtttagatttagttgtagctgggacaaaagatgctgtactgatggttgagtcagaagctaatggtttatcagaagaagaaatgttaaacgcagtgaagtttggacatgaaggatttgtacctgtgatccaaatgatagaagagcttgcaaaagaatgtagaaaaccagaatggaatgttgagaaaaaagatttatctgaagttaagacgaaactagagttgacatttactgatgatcttaaaaaagcttttgcaactaaagacaaacaagatagatctaatcaaatttcagaaattacagataaagccaaaaaactttatgaagaagatgaaaattacactgatcttgatgtaaacagtcaactaaaaagtttagaaaaatctatagtaagaact

SEQ ID NO: 257198 - DNA, 587 bp, Unknown
  Bacterial polypeptide expressing nucleotide sequence isolated from the Sargasso Sea
gcagcaggtaaataccaggggggatattttaaaagggaagcaaggccaacagagtctgaaactttgatatcaagattaattgatagacctattagaccgttattcccagaaagttttagaaatgaagttcaagttttaccaacagttctatcttatgacaacgaaaacgaagcagacattttatctataatcgcctcatctgcagctttgtcaatttcagggttaccatttaatggacccgtcggcgcatcaagggttggctttattgatggaaaatgtgttttaaatccaacaaaaaaagaacttgaaaaatcaaaactggatttagtagtagctgggacaaaagatgctgttttaatggttgagtcagaagcatcagggctcacagaaaaagaaatgttagacgctgtcaaatttggtcatgagagttttatttcagttataaaaggtattgaaaaattagccagaaagtcttcaaaagaaaattggaaaatagaagaaaaagattttagtaaggtatcaaaaaagattgaaaaagagctaacgagagatttagaaaaggccttttcagaaaaagataaaagaac

SEQ ID NO: 257199 - DNA, 832 bp, Unknown
  Bacterial polypeptide expressing nucleotide sequence isolated from the Sargasso Sea
tttaaaagagaagcaagacctactgaagctgaaactttaatttctagacttattgatagacccataagaccattattcccctctagttttatgaacgaggtgcaattgttgcctactgttttatcttatgatggagaaaatcaaccagatattttatctataattgcttcatcagctgctcttgcgatatcaggacttccctttcaaggtcctatcgctgctagcagagttggatataaagatgaaaagtttttattaaacccatctatcgaagaactaaaagattccaaattagatttagttgttgctggaactaaagatgcagttttaatggtggagtcagaaacgtcaggattaacggaaaaagtaatgttagatgcagtaaagtttggacatgaaaattttataccagtaattgaagcaatagaaaaattagctaaaaaagctagcaaaccaaaatgggaagtagaagaagtagatcattcagatgttaaaaagaaaattactgataaatttgaaaaaaatcttagaactgcatttaaagaaacagataaaaagaaaagatcaactgctatatctgaaatagagtcccaagtaaaagaaatgtttgctgaagatgaaactgtgactgaaaatcaatctatggcacaattaaagtctctagaaaaagatattgttagaacagcgatattaaaagacaaaaaaagaatcgatggacgtggactatcagatgtaagacaaatccaatgcgaagttggagtgcttcctagaacccatggttctgctttatttacaagaggagaaactcaggcattagttgttacaacgctag

SEQ ID NO: 257200 - DNA, 904 bp, Unknown
  Bacterial polypeptide expressing nucleotide sequence isolated from the Sargasso Sea
ttggggacatcagatgatgaacaaagaattgaaagtttagatgggttacagaaagagagatttatgcttcactacaactttccaccgttttctgttggagaaacaggaagaattggaactggtagaagagaaattggacatggtaaattagcatggagggctattcactcttcgttaccatcaaaagaggcatttccatatacgtttagagtagtttctgagatcactgagtcaaatggatcatcatcaatggctactgtttgtggaacatcactcgcattaatggacgctggagtacctattaaagaaccagttgctggtatagcaatgggattaattaaagaaggtgatgactttagtgtcttatcggatattttaggtgatgaagatcacttaggtgatatggactttaaggttgctggtactaaagatggaattacttctcttcaaatggatattaaaattactggtataacatttgaaattatggaacaggcattaagccaagctaaagaaggaagaattcatatcttaggtgaaatgaataaagcattatcggcttcaagatcaaatgttggtaaatatactccaaaaatggaaaaaattaatgtagataaaaaggacattgctgctgtaattggaaaaggtggcgcgactatcagagagatagttgaaaaatcaggtgcaaaagtagatgtaaatgatgagggagttgttactgtagctgctccagatgaaaaatctagaggcatagctttacaaatgatcaaagatatcactgcaaaagctgaactaaataaaatttattctggaaaagtaatgaaaattatggagtttggtgcatttgtaaattttttaggaaagcaggatggacttgttcatatttcagaactgcagacaaaag

SEQ ID NO: 257201 - DNA, 881 bp, Unknown
  Bacterial polypeptide expressing nucleotide sequence isolated from the Sargasso Sea
agaaagattcatgcttcattacaactttccacctttttcagttggagaaactggaaggattggaacaggtagaagagaaattggacatggaaaacttgcttggagagcaataaattcatcattaccatcaaaggaaagcttcccatatacttttagaatagtttctgagattacagagtctaatggttcttcttcgatggcaactgtttgtggaacatcactagctttaatggatgctggtgttcctataaaagaaccagttgctggtattgcaatggggttaatcaaagaaggagatgattttagtgttttatctgacattttaggtgatgaggatcatttgggagatatggattttaaagttgctggaacaaaagatggaattacatctcttcaaatggatattaaaattacaggtataacgtttgagataatggaacaggctttaaaacaagcaaaagatggaagaattcacattttaggtgaaatgaataaagcactctctaaatcaagagatgatgttggaaaacacactccaaaaatggaaaaaatatctgtagataaaaaagatattgcaactgttattggaaaaggtggagcaacaattagagaaattgttgagttatcaggtgctaaagttgatattaatgatgaaggcgaagtcactgttgcagcaccagatgaagagtctagaaacaaagcaatgcaaatgattaaagatctaactgcaaaagctgaactaaataaaatttataatggtaaagttatgaaaattatggaatttggtgcatttgttaatttcttaggaaaacaagatggacttgttcatatttcagaacttgctgacaagagagtagctaaagtaactgatgtttgtaaag

SEQ ID NO: 257202 - DNA, 737 bp, Unknown
  Bacterial polypeptide expressing nucleotide sequence isolated from the Sargasso Sea
acttcaaagagaaagatttatgcttcattataattttcctccattctcggtaggagaaactggaagaattggtactggaagaagagaaataggacatggaaaacttgcctggagagcaattaattcatctttaccatcaaaagaaagcttcccttatacatttagaatagtatcagaaattacagagtctaacggttcatcatcaatggcaacagtttgtggaacttcattagcattaatggatgctggtgttccaataaaagaacctgttgcaggtattgctatgggattaataaaggaaggtgatgaatttagtgtactatcagacattcttggagatgaggatcatttaggtgatatggattttaaagttgctggaactaaagatggcattacatctcttcaaatggacataaaaattactggaattacatttgatataatggaacaagccctaaaacaagctaaagatggaagagttcatatcttaggggaaatgaataaggctttagataaatcaagagaaggtgttggtaagcacactccaaagatggaaaaaataactgttgataaaaaagacattgctactgtaattggaaaaggtggagcaacaataagagaaatagttgagaaatcaggagccaaagtagatgtaaatgatgaaggtgttgtaacagttgctgcgccggacgaagagtctagaaatattgccctacaatttattaaagatttaactg

SEQ ID NO: 257203 - DNA, 802 bp, Unknown
  Bacterial polypeptide expressing nucleotide sequence isolated from the Sargasso Sea
ggaatgccattcatgggtcctgttggagcgtctagagttggatatatcgatggcaaatatgttttgaacccgtcaaaaactgaacttgaaaaatcaaaattagatttagttgttgctggtacaaaagatgctgtgcttatggtcgagtctgaagcgaacgggttaacagaggaagagatgttaaatgcagtaaaatttggtcatgaaggatttgttccagtgattaaaattatagaggaactggctaaagaatgtaggaaacccgagtggattgttgagaagaaagatttatctgatgtaaagaaaaaactagaggaaacttttactgaagatcttaaaaaagcatttgcgacaagagacaaacaagacagatcaaaccaaatttcggaaattaccgataaagcaaaaaaactttatgaggaagatgaaaactacacagatcttgatgtaaattctgagctaaaaaatcttgaaaaaacaattgtcagaacagatattctaaaaaataaaaatagaattgatggcaggggtttatctgatgttaggccaatctcatgtgaggttggggttttgccaagaacacatggctctgctttgtttactagaggcgaaacgcaagcaatcgtaactgccactttaggcacatctgatgatgaacagagaattgagagcttagatggattacaaagagaaaggtttatgcttcattataattttccacctttttctgttggcgagactggtagaataggaactggcagaagagagataggtcatggtaaattagcatggagagcaatta

SEQ ID NO: 257204 - DNA, 679 bp, Unknown
  Bacterial polypeptide expressing nucleotide sequence isolated from the Sargasso Sea
caaagattagaaagtttagatggtcaacatagagagcgatttatgcttcattataattttcctcctttttcagttggagagacaggaagaattggaactggaagacgagaaattggtcatggtaaacttgcttggagagctattaattcttcattgccttcaaaagaggcattcccttatacttttaggattgtttctgaaattacggagtctaacggctcttcttcaatggctactgtttgtggaacatctctagcattaatggatgcaggagtacctattaaagaaccagtagcaggtattgccatgggtttaattaaagaaggtgataattttagcgttttatcagatattctaggcgatgaagatcatttaggagatatggactttaaagttgccggaactaaagatggaattacttctcttcaaatggatattaagattactggaattacatttgaaattatggagcaagctttgagccaagccaaagatggacgagtccatattttaaatgaaatgaataaagcgttatctacttctagatctgatgtaggaaaacacacaccaaaaatggaacaaattaatgttgataagaaagatattgctgcagtaataggaaaaggtggagcaacaattagagaaattgttgaaaaatcaggagctaaagtagatgtaa

SEQ ID NO: 257205 - DNA, 862 bp, Unknown
  Bacterial polypeptide expressing nucleotide sequence isolated from the Sargasso Sea
gttagatgttatgcatgaacttaaagatattgaaaaaggtattgtaagaacagatatcttaaaaaataagaatagaattgatggtagaggacttgctgatataagaccaataatgtgtgaagttggaatacttccaagagttcatggatctgcattatttaccagaggagaaactcaagcaattgtaacaacaactttaggaacttcagatgatgaacaaagaattgaaagtttagagggccttcaaagagagagatttatgcttcattataattttcccccattttctgttggtgagactggtagaattggaaccggaagaagagaaataggtcatggtaaattggcttggcgagctattaaatcttcattgccgtctaaagaaagttttccttatacttttagaatagtctctgaaataaccgagtcaaacggttcttcttcaatggcaacagtatgtggctcatctcttgccttaatggatgcgggagttccaattaaagaacctgtagcaggaatagcaatgggattgattaaagaaggaaaagattttagcgtactttcagatattcttggtgatgaagatcatcttggagatatggattttaaagttgcaggaactaaggatggaattacctctcttcaaatggacataaagattacaggcattacttttgagattatggagcaagcactaaaacaagccaaagatggcagagtccacattttaggggagatgaataaagctctggctaaatcaagagacaacgttggtaaacacactccaaaaatggaaaaaatcacagttgataaaaaagatatagcaactgttataggcaaaggcggggctactataagagaa

SEQ ID NO: 257206 - DNA, 904 bp, Unknown
  Bacterial polypeptide expressing nucleotide sequence isolated from the Sargasso Sea
taccgctgggagagaacgaatcgcggaaactcaaaccattgcagataaaagtgcacggtcagaagccgaagccgaagtaagtgcagcgattcaagaagaattagcagaacagtttgcagaaatcgatgacgctgaaactcaaataagtgcagcaatccgatcggtaactaaagattctgtccgtaagcgaattgttgaagaagaggttcgtatagatgggagaaacccatcagaaattagagctctctcctcagatgtcggcatcattccaactgcccatggatctggtctcttccaaagaggagaaacacaagtaatgaatgttgccaccttagggaccggaaaaatggatcaaatgattgatggcattgatccaattgaccgaaaaaggttcatgcaccattacaatttccctccattctcaactggagaaacaggatttatgcgagggcctaagcgccgagaaataggacatggcgctcttgccgaaagagccttattcccagttgttcctaatttcgaagactttccttatacgctccgactggtatcagaagttttgtcatcaaatggatcaacctcaatgggttcggtttgctcgggcactctgtcaatgatggatgccggagttccaattaaagccccagtagctgggattgcgatgggtcttgttctccatgaaggcaaatacgtaacacttaccgacattcttggagcagaagatgcctttggagacatggatttcaaagtggctggaacagaggaatttgtgacagcactacagcttgatacaaagatcgacggcatccctgctgaagttcttgcatctgcattaaatcaagcaaaagaagccagaatgcaaatcctttcagtaatgacaaacgcaattcctgcgccacgtgac

SEQ ID NO: 257207 - DNA, 646 bp, Unknown
  Bacterial polypeptide expressing nucleotide sequence isolated from the Sargasso Sea
aatgtttaaagtagtaaaaaaagaaatagaagtagcaggaaaaaaaataagtttagaaactggaaaaatagcaagacaagcagatggtgcaataattgcgcaatgtggtgaaacagttgtattagctacagcggtaggagcaaaaaaagtaaatccagatgtagattactttcctttgtcagtaaattatcaagaaaaatattatgcagcaggtaaaattcctggtggatattttaaaagagaagcaaggcctacagaaagtgaaacattaatctcaagattaatagatagacctataagacctttgtttccagatgaattcaaaaatgaagtacaggtacttccaacagtaatttcatacgataaagagaatgaagcagatattttatctattattgcttcatcagcagctttagcaatttcaggaatgccttttatggggcctgtgggtgcttctagagttggctttattgaaggaaagtacgtgcttaacccttctaaggaagaaattaaaaattcaaaattagatttagttgtggcaggaacaaaagatgctgttctaatggtagaatccgaggctgacggtttaacggaagaagaaatgttaaatgctgttaaatttggccacgaaggttttgtgcccgta

SEQ ID NO: 257208 - DNA, 844 bp, Unknown
  Bacterial polypeptide expressing nucleotide sequence isolated from the Sargasso Sea
gtaataatggtcgaatcagaagccaaagaactatctgaagatcagatgcttgggggtattctttttgcgcaccaagaaatgcaagtaataataagtgctattaaagaaatggcttcagaggtagggaaaccaacatttgaatatgaaccaaagactttggataaagatctagtagatactatcaaagattcttattcagatttaatttctgacgcttaccaaattcgagataaacaagaaagagttcaaactctcaatcagttaaaagaaaaaattacagaagatcttgttaatgaagaagaagattctccaaaaagctcggatctaatggatgttttcaaaaaaatagaaaaaacaatagttagatccaacttaataaagggtgagccaagaatagatggaagagacttagatactgtaagacctctctttatcgaagctggagttttgaagaatactcatggatctgctttatttactcgaggagagacacaagcacttgttgcggctactttaggttctcccaggcaggcacagcttattgatgctttagaaggagagtttaaagaccaatttatgcttcattataattttcctccttattctgtaggggaagcaggattcatgtcgggtccaaaaagaagagagattggccacgggaaactagcaagaagggctttggaggctgttttaccttctccagaagactttccatataccattagagtagtttcagagatcactgaatcaaatggttcaagttcaatggctagtgtttgtggatcaagtttagctcttatggatgcgggaatccctatgaaagctccggttgctggaatagcta

SEQ ID NO: 257209 - DNA, 866 bp, Unknown
  Bacterial polypeptide expressing nucleotide sequence isolated from the Sargasso Sea
tgcttcagagttggatttattgatggaaagtatgttcttaatccatcaaaaaaagaattagaaaaatctaaattagaccttgttgtagctggaacaaaagatgcagttttgatggtcgaatcagaagccaatggtttgacggaagaagaaatgcttaaagcagtaaaatttggacatgaaaattttgttccaataatcaaaacaattgaagaacttgctaaagaatgtggaaaaactacttgggaagttgaaaaaaaagatctttctgaagtaaagaaaaaaatagaaaaagaatttgcaaaagaattagaaaaagctttttcaattaaaaataaaaaagaaagatcggaccttatttctcaaataacagaaaaagcaaaaaaactattcgaagaagatgaaaatatatctgatttggatgtaaattttgaactaaagaacttagaaaaaagaattgtaagaactgatatattaaaaaacaaaaatcgtattgatggcagaggactatctgatgtaagacctataatgtgtgaagtaggtattttacctagagtgcacggttctgcattatttacaagaggagaaacacaagcaattgtaacaactactcttggaacttcagatgatgaacaaagaatagagacattagatggattgataagagaaagatttatgctccattataattttcctccattttcagtaggagaaactggtagaattggaacaggaagaagagaaattggacatggaaaattagcctggagagcaataaagtcgtccttgccttctaaagaaagttttccttacacttttagaattgtttcagagataacagagtctaacggctcatcatcaatggcaac

SEQ ID NO: 257210 - DNA, 871 bp, Unknown
  Bacterial polypeptide expressing nucleotide sequence isolated from the Sargasso Sea
aaaagatgctgtgctcatggttgagtctgaagcaaatgggttatcagaggaggagatgcttaatgcagttaaatttggtcatgaaggttttgtgccagtaattaagatgatagaggaacttgctaaggagtgtagaaaacctgagtggattgtagagaaaaaagatttgtctgaagtaaagcaaaaactagaatcaacatttactgacgatcttaaaaaagcttttgccacaagagataagcaagacagatcaaatcaaatttctgagataacagataaggctaaaaaactttatgcggaagatgataactatactgatcttgatgtaaattctgagcttaagagtttagaaaaatcaattgtaagaacagatattcttaagaataaaaataggattgacggtaggggattatctgacgtgagacctatttcgtgtgaagtaggagttttaccacggactcatggttctgctttatttactagaggagaaacgcaagcaattgttacggccactttaggtacatctgatgatgaacaaagaatagaaagtctagatggactgcaaagagagagatttatgcttcactataattttccaccattttcagtcggagaaactggaagaataggaactgggagaagagaaattggacacggtaaattagcttggagagcaatacattcttcattaccatcaaaagaatcttttccatatacttttagggtagtttctgagattactgagtctaacggttcttcctcaatggctactgtttgtggtacctctttagcattgatggacgctggtgttccaataaaagaaccagtcgcgggtatagcaatgggtttaattaaagaaggcaataatttt

SEQ ID NO: 257211 - DNA, 509 bp, Unknown
  Bacterial polypeptide expressing nucleotide sequence isolated from the Sargasso Sea
cactgttgttggtaaaaaagaagctgaagcaggccgtgacttctttcctctgactgttaactatcaagaaaagacctacgcagcaggtaaaattcctggtggtttctttaagcgtgaaggtcgtccttcagaagatgagacattaatcgctcgcctgatcgaccgtccaattcgtcctcttttccctaatggcttcacaaacgaagttcaagtgatcattactgttgtatctgtcgatccacaaatcgagccggatattatttcaatgatcggtacttcggctgcgcttgctatttcgggtatcccattcagcggcccattaggtgcagcgcgcgtgggttatatcaatggcgaatacgtactgaacccaactgttgaacagttagcgactagccaattaaacctagttgttgctggtactgaaagcgcagtactgatggttgagtcagaagctcaagccttaccggaagaagtgatgttaggctctgtggtttacggtcatgaccaac

SEQ ID NO: 257212 - DNA, 970 bp, Unknown
  Bacterial polypeptide expressing nucleotide sequence isolated from the Sargasso Sea
aagcgcattcaaagagatagataaaaagaaaaggtcaacagcaatatctgaaattgaattaaagtgtaaagaaatgtttgctgaagatgattcactaacagaaaaccaagtaatggcccaactaaaatctttggaaaaggatatagttagaactgcaattttaaaagataaaaaaagaattgatggaagaggtttagcagatgttaggcaaattaaatgtgaagtaggcgtcttaccaagaactcatggatctgcattatttactagaggagaaactcaagcacttgtagtaactacattaggtatgtcagacgatgaacaaagactagaaagcttagaaggtatgcaaaaatctaactttatgttgcattataattttccaccattttctgtaggagagtgtggaagaattggaacaggaagaagagaaataggtcacggaaaattagcatggagagcaataaactcatcactacccaaaaaggaaaatttcccatacacattaagagttgtttctgagataaccgagtccaatggatcttcatctatggctacggtttgcggaacttctttatctcttatggatgcaggagtccctatcaaagagccagtagctgggatagctatgggactgatcaaagaaggagatgatttttctgtattatcagatattttaggtgacgaagatcatctaggagatatggattttaaagttgcaggcacgaaaaatggaataacatcgttacaaatggatattaaaataacaggtattactttcgaaatcatggaaaaagctttagatcaagcgaaatccggaagagagcatattcttggagaaatgaataaagctattaaaacatcaagaaaagaattttcaaaacacactccaaaaatggaaacaataaaagtagataaaaaagatatagctacagtaataggtaaaggtggagcaacaataagagagattgtg

SEQ ID NO: 257213 - DNA, 962 bp, Unknown
  Bacterial polypeptide expressing nucleotide sequence isolated from the Sargasso Sea
tggtaaaattccaggtggatattttaaaagagaggcaagacctactgaaagtgaaacattaatctctagattaattgatagaccaataagaccattgtttcccgatgaatttaaaaatgaagttcagttattaccaacagtaatttcttatgataaagaaaatgaagcggatatattatcaattatagcttcatccgcagcattagcaatatcaggaatgccatttatgggtccagtgggggcttctagagttgcatatatagatggaaaatatgttttgaatccatcaaaaggtgaacttgaaaaatcaaaattagatttagtagtagcaggcactaaagatgctgtgcttatggtcgaatctgaggcaaatggtttaacagaggaagaaatgttaaatgcagttaagtttggtcatgagggttttgttcccataattaaaatgattgaggaacttgcaaaagaatgtagaaaacctgaatggaatgttgaaaagaaagatttatctgaggttaagaaaaaacttgagaaaacttttacagaggatttaaaaaaagcttttgcaacaagagacaaacaggataggtcaaatcaaatttctgaaataactgataaagcaaaaaaactttatgaggaaaatgaaaactatacagacttagatgtaaattctgaactcaaaaagatagagaaatcaattgtaagaacagatattttaaaaaataaaaatagaatagatggcagaggattatctgatgttagacctatatcttgtgaagttggtattttacctagagttcatggttcagccttattcactagaggagaaacacaagcaatagtgactgctactttagggacatctgatgatgagcaaagaattgaaagcttagatggactacaaagagaaagatttatgcttcattacaattttccaccattttcagttgggagaactggaagaa

SEQ ID NO: 257214 - DNA, 831 bp, Unknown
  Bacterial polypeptide expressing nucleotide sequence isolated from the Sargasso Sea
cttgatgttaacagtcagttaaaaaatctggaaaaatcaattgtcagaactgatattctaaaaaataaaaatagaattgatggtcgaggtttatctgatgtaagacctatcgaatgtgaagtgggtgttttaccaagagcacatggttccgcactgtttactagaggcgaaacccaagcgattgttgtagcaactttaggaacatctgatgacgaacaaagaattgaaagtttagatggattgcaaagagaaagatttatgcttcactataattttcctcccttttcagttggagaaactggaagaattggaacaggaagaagagaaataggtcacggtaaattagcttggagagcgattaattcttcattaccacccaaagaagcatttccatatacttttagggtagtttcagagattaccgaatctaacggttcttcctcaatggctactgtttgtggaacttctttagctttaatggatgctggagtaccaattaaagagccagttgcaggtattgcaatgggattaattaaagaagatgatgactttagtgttctgtcagatattttaggtgatgaagatcacttaggtgatatggattttaaagttgctggaactaaagatggaattacttctcttcaaatggatatcaaaattacaggtattacatttgaaattatggagcaggcattgagccaagctaaagatggaagagttcatatcttaggtgaaatgaataaagctctatcagcttcaagatctgatgttggaaagcacactccaaaaatggaacaagttaatgtagacaaaaaagacattgctgctgta

SEQ ID NO: 257215 - DNA, 851 bp, Unknown
  Bacterial polypeptide expressing nucleotide sequence isolated from the Sargasso Sea
acacgatgcgcgtgtctccgaaattaccgagtccaacgggtcgtcatccatggctacagtttgcggcacgtcgctctcgctgatggatgctggagtgcctctgccgcgccctgtagcgggcattgccatgggtcttatcaaggaggacgaaggcgtggctgtactctccgatatccttggtgatgaagatcacttaggcgacatggatttcaaagttgctggcacggaagacggaataaccgcgcttcaaatggacattaaaatcacatctatcaccgaagacattatgaagaccgcgcttgcgcaagcgcgagatggccggctgcatattctaaaagaaatggcaggggctatctcaactgctcgagaggacgtaagccagaatgctccgcgtattaccgtgatcaacattccgaaagacaagatacgtgaggttatcgggccaggcggcaaggttatccgtgaaatctgtgaaaccacgggagctaagattgacatcgaagacgatggaacagttaaggttgcggcggtcgatgagtcggcggcggaggcggctatcaatgaaatcaagaatattactgcggaaccagaggttggcgtgatatattctggcaaagtagtaaaaactgtggactttggggcattcgtaaacttcctcggcgcgcgtgatggtctggtacacattagtgagctgcgcccggagcgagttgaaaaaaccacggacatcgtcaaggaaggggaccaagtgaaagtcaagctcattggcattgatgaccggggcaaggtgaaactatcgatgaaagctgttgatcaagataccggaaaagaaatcaccggtgaccagtcgtaag

SEQ ID NO: 257216 - DNA, 860 bp, Unknown
  Bacterial polypeptide expressing nucleotide sequence isolated from the Sargasso Sea
aatgtttaaagtatacaagaaagaaattgaagtagcaggaaaaaagataagtctagaaacaggaaaaatcgcaagacaagcagatggtgcaattatagcacaatgtggtgaaacagttgttatggcaactgtagtaggagcaaaaaagataaatccagatgttgattactttcctttatcagtaaattaccaagaaaaatattatgcagcaggaaaaattcctggaggatattttaagagggaagcaagaccaacggaaagtgaaacacttatttcaaggttaattgatagacctataagacctctatttcctgaggaatttaaaaatgaagtacaattacttccaacagtcatatcttatgacaaagaaaatgaatcagatattttatcaataattgcatcatctgcagctttagcaatatcaggaatgccttttatgggtccagttggagcttctagagttggttttatcgaaggaaaatatgtactaaatccaacaaaaaaagaattagaaaattcaaaattagatttagtagttgctggcacaaaagatgcggttttgatggttgaatcagaggcaaacggactaacagaagaagaaatgttgaatgctgttaaatttggtcacgaaggatttgttccagtaattgaaatgatagaacagcttgcaaaagaatgtaaaaaacctgactgggttgttgaaaaaaaagatttaactgaagttaagaaaaaattagaacaagaatttactgctgatttaaaaaaggcttttgcaacaaaagacaagcaggatagatcaaatcaaatttcagaaattacagataaagccaagaaactttatgaagagaatgaaaattatt

SEQ ID NO: 257217 - DNA, 1162 bp, Unknown
  Bacterial polypeptide expressing nucleotide sequence isolated from the Sargasso Sea
ggagcatctagagtaggttttattgatggaaagtatgttcttaatccttcaaaacaagatttagaaaattcaaaattagatcttgttgtggcaggtacgaaagatgcagttttaatggttgaatctgaaacaagcggattaacagaagaagaaatgttaaatgcagttaaatttggccatgaaggttttgttccagtaattgatatgattgaagaacttgctgcagaatgtaaaaaacctgactgggttatagaaaaaaaagatctttcagaagttaagaaaaaaattgaagatgaatttacagaagaattaaaaaaagcattttcaatcagagataaacaagaaagatcaaacttgatttctgaaataacagacaaagctaaaaaactatttgaagaaaatgaaaattttacagatttagatgttaactctgagcttaaaaatttagaaaaaagaatagtacgaacagatatcttaaaaaataaaaatagaattgatggaagaggactatcagatgtaagaccaattatgtgtgaagttggaattttgccaagaactcatggttctgcattatttacaagaggcgaaactcaagcaattgtaacaactacattaggaacctctgatgatgagcagagaattgaaagtctagaaggtcttcaaagacaaaggtttatgcttcattataactttcctccattttcagttggtgaaactggaagaattggaactggaagaagagaaattggacatggaaaacttgcatggagagcgattaactcatctttaccttcaaaagaaagttttccttacacatttaggatagtttctgaaataacagagtcaaatggatcatcttctatggcaacagtttgtggaacctctttagctcttatggatgctggtgttcctataaaagaaccagttgctggtattgctatgggattgattaaagaaggtgatgactttagtgtgctttcagacattcttggagatgaggatcatctaggtgatatggattttaaagttgctggaacaaaagatggaattacatctcttcaaatggatataaagattactggaattacatttgaaataatggagcaagctctaaaacaagctaaggatgggagaattcacatcttaggtgaaatgaataaag

SEQ ID NO: 257218 - DNA, 1175 bp, Unknown
  Bacterial polypeptide expressing nucleotide sequence isolated from the Sargasso Sea
agatatagttagaactgcaattataaaagaaaagaaaagaattgatggaagaggattagcagacgtaagacaaatcaaatgtgaggtaggagttttaccaagaactcacggatctgctctatttacaagaggagaaacgcaagcacttgtagttacgacactaggaatgacagatgatgaacaaagattagaaagcctagagggcatgcaaagatcaaacttcatgttgcattataattttcctccattttcagttggggaatgtggtagaataggtactggcagaagagaaattggacatggaaaacttgcttggagggcaataaattcatctttaccaacaaaagagaactttccatacacattaagagtagtttcagaaataacagagtctaacggatcttcatcaatggctacagtttgtggaacttcactatcattaatggatgcaggagtcccaataaaagaaccagttgctggtattgcaatgggcttaatcaaagagggtgaggatttttctgtattatcagatattttaggagatgaagatcatttaggagatatggattttaaagtagctggtacaaaaaatggcatcacctcacttcaaatggatattaaaatcacaggtataacttttgaaattatggaaaaagctttagatcaagcaaaagaaggaagaaaacatattttaggtgaaatgaacaaagccattaaaagttcgagaaaagaattttcaaaacacactccaaaaatagagacaattaaagttgataaaaaagatatagctacggtaattggaaaaggtggtgcaactattagggaaattgttgagacctcgggagccaaagttgatgtcaaagatactggagaagtaactgttgctgcaccagatgaagcatccagaaacaaagctatagattttattaaaaatttaattgccaaaccagaaatgggtaaaatttataaaggaaaagttgttaagataatggaatttggagcttttgttaactttttaggaaaacaagatggtcttgtacatatatctgagcttgctaacaaaagagtagcaaaagttggagatgttgtaaaagagggtgatgaagtttcagttaaagttgttggttttgatagaggaaaagtaaaactttctatgaaacaagcatcagcttaat

SEQ ID NO: 257219 - DNA, 1654 bp, Unknown
  Bacterial polypeptide expressing nucleotide sequence isolated from the Sargasso Sea
gccccttggtgcataaaaataggttttatagataatgaatttgttattaaccctaataaagatcagctaaatgaatctaaattagaacttgttgtggctggaacaaaagaaggtgtgttaatgatagaatcagaagctcatgagctttctgaacaacaaatgttagatgctgttgttttaggtcaagaaagttataagcctgttatagaagcaattatttcacttgctaaaaaagctgcaaaagaaccatgggtaataaaagaaaaagatgaagagttaaaaaatttaccaataaaaattaatgaagaatatggtaataaatttattgaagcatataaaataatagaaaaacaaactagatctgaaaaattaaattcaatcagatcagaaatttctgataaatttatttcagatactctttcatcagttttattatctgatgcaattaaaaatgttgaaaaagatattgtaagaggtgaattaataaatactggaaataggattgacggcagagatactaaaactgtaagacccattatatgcgaaacaggtgttttagaacgtacccatggctctgctttatttactagaggtgaaacacaagccatagttgtatcaacccttggcactggacaggatgagcaaagaatcgatgcaattgatggtgaatatacagaaaattttatgcttcattataattttcctccatattctgtgggagaagttgggagagtaggctcaactagtagaagagaaattggtcatggaaaattagcatggagagctattcatccaatgctaccatcaaaagataaatttccctatacctatagagttgtatcagaaataacagagtcaaatggatctagttcaatggctacagtttgtggtacatcaatgtcattaatggatgctggagtaccattagaaagacctgtggctggaattgcgatgggcttaattaaagaaaatgataaatatgtaatcttatctgatattttgggtgatgaggatcatttaggtgatatggattttaaagttgctgggacttctgaaggaattacatctttacaaatggatattaaaattactagtatcactgctgaaataatgaaagaagctttggcgcaagcaaaagaaggtcgttttcatatattaggagaaatggcaaaagcaattgaaaagccaaaaaaatctatatctcaatatgctccgacaataacaaatctacaaattaataaagacaaaattagagaagttattggtaaaggcggtgcagtaattagagaaatatcagaaacaacaggtgctaaaattgaaattaacgatgaaggaatagttagtattgctgcggttgatcaaaagtccggtaatgatgcattagagtggattaaaggaattgtagaagaaccagaaattgggaaaatttatgaagggaaagttataaaaataatggattttggagcttttgttaattttatgggatctaccgatggattagttcatattagtcagttgaaaaatgaaagagtggcgaaagttgaagatgttatcagtgagggagatattgttaaagttaaggtattagatattgactcaagaggtaagataaaactttcaatgaaagcagttgagtcagatagcaaagattaaa

SEQ ID NO: 257220 - DNA, 1264 bp, Unknown
  Bacterial polypeptide expressing nucleotide sequence isolated from the Sargasso Sea
atgcagacaaaagaatttaaattaggttcccaaacagtaaaaatagaaacaggtctcatagcaaagcaggcaaatgcatcggtaaccgtagaaatagatggtacagtcattttgggtacgctggtcgcatcatcagaacctaacacaagagattttttccctttaacagtaaattataatgaaaagtcttatgctgcaggaaaaatacctggaagtttttttaaacgagaaggaagaccaagtgaaaaggaaacgttaataagtcgtttgattgatagacctcttaggcctttatttgccgcgacttataatcaagaagttcaaataattttaacattagtgtcatataatccagaaatagatcctgaagttccagcattaattgctgcatcaacatgtgtgaagcttgcgggtttaccatttaatggaacattaggtgcagttaaagttggttatgaaaataacgaatatgttctcaaccctacatcgtcacagcttgagacatctctcctagatttgacagtagctgggacaaacaatgctgttttaatggttgagtcagaggctaaagaacttactgaaaaacaaatgctagatgctgttaattttggacatgataaaatgcaggatattataaaagctatcgacgagctagtcagtgaagtaggtgtaaatatcatggaagcagaacctgcagaagataactcagagttatacaattctttaaaaacaaaatatggcaaccaaatatctgatgcatatcaaataactatcaaacaagatagatatcagaaactatcaacattaaaagaggaaataatgtctaaagaagtttctgatgaagatgacaactcagataaattatctacagtttttaatgatttaaaaaaagacattgttagagaaagaattctaagtggcgaaaaaagaatcgacggaagagataattcgacagtaagacctatatcagttcaaacaggtgtcctaccgaggactcatggttctgcgttattcactagaggcgagacccaagctttagtagtcgctacattaggtacaaataaggatgctcaaataattgattcactaaacggcagagctgatgattcatttatttttcattataacttcccaccatattctgtgggagaaattggaatgattggctcaccaaaaagaagagaaattggtcatggaaagctcgctagaagaggcgtacaagcagtgatgccatctttagaggattttccatacacaattagag

SEQ ID NO: 257221 - DNA, 1204 bp, Unknown
  Bacterial polypeptide expressing nucleotide sequence isolated from the Sargasso Sea
aatgaaattcttaattcaaggctaattgatagacctcttcgtccattatttcataaagattttaaaaacgaaacacaagtaatatgcactgttatcaattatgatggagaaaatgatccagctatttgtgctatgattggatcatctgcagctactacaattgcaggtcttccattccttggaccattagcttgtgcgagagtgggttattctagtggtgaatatattttaaacccaacagttgaagaattagatggtagtgaacttgatcttgttgtggcaggaacaagagatggagttttgatggttgaatcagaagctagtgaacttccagaaaaaataatgttaggtgctgttcaatttggctttaaagagtttcagtgtgtaattgataaaataattgagcttgctgaaatgtctgcaaaagaatcttgggaaatttccaaaccagataagccaagttattcaaaaaaacttatagaaaaagtccaaaaagagatttcacccctttacaaaataaaagaaaagaaaaaacgaaatcaaagtctaaatgtaacaagagataaaattattgaggattttttggatgaaaattcagaaccaggaataattaactctctaattaaagaagaggaaaaaaatattgtaaggtcatctattttaaattcaaaaaaaaggattgacggaagagaccttactacagttagagatatagatgtcagaatagatcttcttgaaaatgttcatggaagctccctttttaccaggggtgaaacacaggcacttgttacatcaacattaggaacgagcagtgatgaacaaaccaaagatactctcgacggcgacaaaaaagaaaaattcatgctacactataattttccacccttctcagttaatgaagttggtagaatgggttcaacaggaagaagagaaattggtcacggaaagttagcctggagagccatcaaccctattttgaataagcttgatgaatttccttacaccgttagagtggtttcagaaattacagaatcaaatggatcttcttcaatggccacagtttgtggaacatcattagcccttatggatgccggtgtccctataaaaaagtcagttgctggagtagcaatgggtttaattaaagaagataataattttgttgtattaactgatattttgggagatgaagatcatttgggtgaca

SEQ ID NO: 257222 - DNA, 1477 bp, Unknown
  Bacterial polypeptide expressing nucleotide sequence isolated from the Sargasso Sea
ttaatggtagaatctgaagcacatcaattaagtgaagaaaaaatgcttgaagcagttgttttaggacaagaatcttacttaccagtaattgatgcaataatatctttagcaaaaaaagctgcaaaagaaccatgggatattccagaaaaggaaagtgaaattgtaaatcttcctaaattaattgctgatgagtatgcaaataagtttagtgatgcttataaagtaacagaaaaacaaaaacgtgtagaaaaacttaatgaaataaaacttgagatcgaagaaaaattcttaagtgagactcttacagccgttatagtttcagatgccattaagtcagttgaaaaagatgttgtcagaggtgagcttcttaaaactgggaatagaattgatggacgtgataccagaacagtaagacctattgtttgtgaaacaggtgtattaagtcgaacacatggctcagcattatttacccgaggagaaacacaagctttagttgttacaactcttggtacaggaatggatgaacaaagaattgatgctatcgaaggggaatataaagaaaattttatgcttcactataattttcctccatattctgttggggaggttggcagagttggttcaacaagcagaagagagataggtcatggtaaattagcatggagagcaattcacccaatgttaccatcaaatgatcaatttccatatacctatagagttgtatcagagataacagaatcaaatggatctagttcgatggctacagtatgtggaacttcaatgtcgatgatggatgcaggcgttcctctcgaaaaacctattgctggaattgcaatgggtttaattaaagaaaatgatgattatgtggttttgtcagatattcttggagatgaagatcatttaggtgacatggattttaaagttgccggaacaaaagatggaataacatctttgcaaatggatattaaaattaccagcatcacatctgctataatgaaagaagcacttgaacaagctaaagagggtagaattcatattttaggagaaatggctaaggcaatagaaaaacctcaagaaaaaatttctgattatgcgccaacaattactacattccatgttcaaaaagataaaataagagaagttatcggtaaaggtggggcagtaattagagagataagcgaaactacaggggctaaaatagaaatagatgatgaaggtttagtaagtgttgccgcagtagattctaaatctggaaatgatgctatagaatggattaaaggtattgtagaagaacctgagatcggtaagatttatgaaggtaaagttgtaaaacttatggactttggtgcctttgttaattttatgggatcaaaagatggtttagttcatattagccagcttaaaaatgagcgagtagaaaaagtcagtgatgtaattaatgaaggcgatgtggtcaaagtcaaagttttagatattg

SEQ ID NO: 257223 - DNA, 712 bp, Unknown
  Bacterial polypeptide expressing nucleotide sequence isolated from the Sargasso Sea
tctgcattgtttacaagaggtgaaactcaagcgatagtcacaactacacttggaacttcagatgatgagcaaaggattgaaagcttagaaggtcttcaaagagaaagatttatgcttcattataattttccaccattctcagttggagaaaccggaagaattggtactggaagaagagaaattggacatggaaaacttgcatggagagcaataaattcctctttgccatcaaaagaaagttttccttatacttttagaattgtttcagaaattactgagtccaatggatcttcttcaatggcaacagtttgtggaacttcattagcattaatggatgctggggttccaattaaagaaccagttgctggtattgcaatgggcttaattaaagaaggtgatgattttagtgttctatcagatattctaggagatgaagatcatttaggtgatatggactttaaagttgctggaacaaaagatggtattacatctcttcaaatggatattaaaattactggaattacatttgaaattatggagcaggctttaaaccaagcgaaagatggaagaatccacattttaggcgaaatgaacaaagcattaaataaatcaagagacaatgttggtaaacatacgccaaagatggaaaaaataactgtagataaaaaaagatattgcaactgtcattggaaaaggtggagcaacaattaga

SEQ ID NO: 257224 - DNA, 1360 bp, Unknown
  Bacterial polypeptide expressing nucleotide sequence isolated from the Sargasso Sea
tcagaaataaaaaagaaattagaggaggaatttactgaagatctaaaaaaagcattctctactagagataaacaggatagatcaaatcaaatttctgaaattactgaaaaagcaaaaaaactttatgaagaaaatgaagattacacagacttagatgtaaactctcaacttaaaaatttagagaaatctatagtaagaactgacatactaaaaaataaaaatcgtattgatggaagaggtcttgcagatgtcagaccaataatgtgtgaagttggtattttacctagagttcatggttctgcactatttacaagaggtgaaacccaagcaattgttacaactactttaggtacatcagatgatgaacaaagaattgagagtttagatggtcttcaaaaagagagatttatgttgcactataattttccaccattttcagtaggtgaaactggtagaattggaacaggcagaagagagattggtcatggtaagttagcatggagagcaattaactcatcacttccaccaaaagaaagtttcccatatacgtttagaattgtgtcagaaataactgagtctaatggctcatcttcaatggcaactgtttgtggaacttcacttgctctcatggatgcaggagttcctatcaaagaacctgtagctggaattgcaatgggtttaattaaagaaggtgatgattttacggtcttatcagatattcttggtgatgaagaccatctaggggatatggacttcaaagttgctggaactaaagatggcatcacatctttacagatggatattaagataactggaattacatttgagattatggagcaggctttaaatcaagctaaagatgggagaattcatatcttaggtgaaatgaataaagctctttctaaatcaagagataatgttggtaaacacacaccaaaaatggaaaaaatcacagttgataaaaaagacatcgcagcagtaattggtaagggtggtgcaacaataagagaaatagttgaaaaatctggagcaaaagttgatgttaacgatgagggtgaagtaacagtagcagcaccagatgaagagtctagaaatgtggcgatgcaaatgattaaagatattaccgctaaagctgaattaaataagatttataacggtaaagttatgaaaattatggaatttggtgcttttgtaaatttcttaggaaaacaagacggattagttcatatttcagagcttgcagataaaagagttgccaaagttactgacgtagtcaaagaaggtgacgaagttaaagtaaaagttattggatttgatcgaggaaaagtaaaactatctattaagcaggccgctatttaga

SEQ ID NO: 257225 - DNA, 1076 bp, Unknown
  Bacterial polypeptide expressing nucleotide sequence isolated from the Sargasso Sea
aatgtttaaaatatttaaaaaagaaattgaaattaatggtaaaaaaataactttagaaactggtaaaattgccagacaagctgatggagcaataattgctcaatgtggagagactgttgttatggcaacagttgtaggcgcgaaaaaaataaatcctgaagtagactattttcctttatctgtaaattaccaagaaaaatattatgcagcaggaaaaataccaggaggatattttaaaagagaagcaagaccaactgatagcgaaactttaatatcaagactaatagatagaccaataagacctttatttcctgatgaatttaaaaatgaggttcaattgcttccaacagtaatttcttatgataaagaaaatgaaccagatattttatctataattgcatcgtcagctgcactctctatatctggaatgccctttctagggccgataggtgcatcaagagtaggatatattgatggaaaatatgttcttaatccatcaaaaaaagatttagaaaaatcaaaattagatttagttgttgcaggaactaaagatgcagtattaatggttgaatctgagacaaaaggtttaaccgaagaggaaatgttaaatgcagttaaatttggacataaaaactttgttcccattattgaaatgatagaagaattagccaaagagtgtaaaaaaccagattggatagtagaaaaaaaagatctttcagatgtaaaactaaaactagaaaaagaatttacagatgaacttaaaaaagctttttctataaaagataaacaagaaagatcaaatttaatctctgaaattactgaaaaatcaaaaaaactctttgaggatgacgaaaactttacagacttagatgtaaatcatattttaaaaaatctagaaaaaaaaatagttagaactgatattcttaaaaataaaaatcgaatagatggaagaggtttagcagatataagacaaattaaatgtgaagtaggaattctccatagagttcatggttccgcactttttaccagaggagaaacacaagcaattgttacaactacgttaggaacttctgatg

SEQ ID NO: 257226 - DNA, 1562 bp, Unknown
  Bacterial polypeptide expressing nucleotide sequence isolated from the Sargasso Sea
gttggatttagttgttgcgggcacaaaaagctctgttttaatggtcgaatcagaggcgaaagttctttctgaagacgtgatgttaggggcggtaaattatggacatgagcagatggctgttgcgatcgacgctattgctgaattagcgtctaaagctgacacggggacctttgaatggactgaggctgcaattaacgaggagctgtctcaagtaattgtggagaaatttgagaaacaaataggcgaagcatatggcatcctaaataaattagagaggagagataaattaagggagataaaggacgatatacgttcgatgactgactctttggaagatatagaagcctcggaaaacgacgtggctagtataatagataagctggagcacgacgtggtcagaaatgccgtgctttctggcgagaagcgcatcgacggcagaggtaaggaagatgtgagaccaatattttcagaggttgacgtaatgcccaggacacacggttctgcgttatttacgcggggtgaaactcaggccctggttgttacttccttgggcacagaaagagactctcaaatcattgatgcgatagagggagagcgaagagaatcatttatgctgcattataattttcctcccttttgcgttggagaaacaggtcgagtcggcactcctaaaaggcgagaaatagggcatgggcgtctggcaaagagaggcattcaggctgtgatgccggatatgagtactttcccatatgttattcgtgtggtatcggagataaccgaatcgaatggctcgagttctatggctagtatatgtggtaccagtatgagtttaatgaatgcaggtgtgcccgtaactgcgcctgtggcgggtattgcaatggggctcataaaggaaggcaatgattatgttgtgttgtccgatatcatgggagatgaggatcacttaggtgacatggattttaaggtagcaggaactgatgaaggtgtcacggctctgcaaatggacataaaaatagatggtattacctcggaaatcatggaggttgcattggcgcaggcgcgggatgggcgccttcatatccttaatgagatgaataaggtaatcagtacccctagagaagagatgtctgagcatgctccgagaataatcaccttcagaattcctacagataagataagagatgtgatagggaaaggcggagcaacaattagacaaattacagaagaaactggggcgaccatagatattgatgatgacggaacaataaaaattgcttctgttgacaatgctgcgggacaagcggcaagaaccagggtggaagctataacagcagacatagaagtgggaactgtgtatcaaggcaaggttcaaaaactaatggacttcggagcatttgtgaatatactacctggaaaggatggactggttcacatatcccagatatcagaggagcgcgtggaaaacgtgagtgacaagttgtctgagggcgacacggtaaaagtgaaggttctagaagttgataaacaaggaagaattcgccttagtatgaaggcagtataaa

SEQ ID NO: 257227 - DNA, 1600 bp, Unknown
  Bacterial polypeptide expressing nucleotide sequence isolated from the Sargasso Sea
aaatgaggtgcaagttttacctacagtactttcttatgatggagtcaatgaaccagacatattggcaattatcgcaagttcagcggctttagcaatatcaggtatgccttttcaaggaccagttggagcatccagagttggatatataaatgataaatatgttttaaatccaacgaaagaagaaattgaaagctcaaaactagatttagtagttgcaggaactaaggacgcagtactaatggtagaatctgaagcttcaggtttgtcggaaaaaattatgctagatgctgttaaatttggccatgaaaaatttattccagtaattgaagcaattaataaattggttaaagattgtggaaaagaaaaatgggttattgaaaagaaagatttatctgaaattaaggaaactttagaagcgacttttacagaagatttacagaaagcttttgctacaaaagataaacaagataggtcaaatcaaattttagaaataactgataaagccaaaaaaatttttggagaagatgaaatatacactgatttagatgttttaatgactttaaaaaaactcgaaaagaaaattgttagaacagatattttgaaaaataaatcgagaattgatggtcgttctttaacagatgtaagacaaattaattgtgaagtaggagttcttccaagaacacatggttctgctttatttaccagaggtgaaacacaagctttagttactttaactctggggacttcagaagacgagcaaagagtggaaagtcttgatggattaaagcgtaatagatttatgcttcattataattttccacctttttcagtgggtgaagttggaagaattggaacaggaagaagagaaataggccatggtaaattagcatggagagctcttaaatcatctttaccaaaacaagaaaaatttccttacacttatagaattgtttcggaaattactgagtcaaatgggtcatcttcaatggcaacagtttgtggatcctctttagcattaatggatgcaggagttccaatgaaagattccgtagctggaattgcaatgggcttaattaaagaaggaaaagacttttcagttctttcagatattttaggagatgaagatcatttaggagatatggattttaaagttgctggaacaaaagatggtattacttctttacaaatggatattaaaataactggaataacttttgaaattatggataaggcattgtcccaagctaaagatggaagaattcatattttaggtgagatggcaaaagctttaacaggttcaagagatgcggtttctaaatatactccaaaaattgaaacagtcatggttgataaaaaagatattgcagctgtaattggaaaaggtggtgcaacaatcagagaaattgttgaaatgtcaggggcaaaagtagatgtaaaagatacaggagaggtaacggttgcagctccagatgaagaatccagactaaaagcaatgaatatgattaaagatattattgctaaacctgaaataaataaaatttataaaggtaaagtaattaaaattatggattttggagcttttgttaattttttaggtaaa

SEQ ID NO: 257228 - DNA, 1228 bp, Unknown
  Bacterial polypeptide expressing nucleotide sequence isolated from the Sargasso Sea
tgcagatgaagaaaaacaagcatttgatgaggtaaactcaaaatttagaacagatattgttgatgctttcactactacaaataaaaaagagagaagtgaaaaaattagcgccattcaagacaaactagtcgaaagtttagacgaagaactacacgatcttcaccttaaacaattcaaagaagttgaaaaagacgtcgtaagaaggaatattttaaatgaccaaaaaagaatagatggaagaggaatgacagaagttagagatataaatatagaaactaattttttaccttccgttcatggctcagcactctttactagaggcgagacacaagcaattgtaacaacaacattaggttcaggaagagacgtccaaactgtagacgcacttcaaggagagataaaagataattttatgcttcattataattttccaagctatagtgttggtgaattaggttttcctatgggtccaaaaagaagagaaataggacatggagctcttgcaaagagatctttaaagtttgcagtaccgagtttagaagattttccttatgccattagagttgtaagtgagataactgaatcaaatggttcaagctcaatggcttctgtttgtggcggaagtcttgcacttatggccgcaggcgtaccaattaaagaaaatgtcgctggagtagcaatgggactgataaaagaagaggacaaatatgaagttcttaccgatatcttaggagatgaagatcatctaggagatatggattttaaagttgctggaactaagaatggtgtgacaggtcttcagatggatataaaaatagaaggtattaatgaagaaatacttgaaaaagcattaatgcaagcaaaagaagctagaatgcatattttagaaaaaatggatgcagttctttctacaccacttgagttaacaagtcttgctccttccttcactaaatttagcgttcataaagacaaagtaaaagttgtcattggtaaaggtggatcaacaatcaaaggcttacaagaggagtttggtgtaacaattgagcttcaagatactggtgaagtcagtgtatttgctgaaaataaagaaattgctgagaaagcaaaagaaaaaatagaattactgtgtgctgaacctgaggaaggcaagatatatgagggagtggtagccaaagttgttgaatttggtgcatttataacgatcatgccaggaaaagacggattattg

SEQ ID NO: 257229 - DNA, 686 bp, Unknown
  Bacterial polypeptide expressing nucleotide sequence isolated from the Sargasso Sea
catggctatactatgcgccgcgtttaaaagcgataaaataaagattgaaattaaaggacaaatagtgactcctattactaaatcatttcagtatggacagcatactgtaactctagagacgggtgtaattgctcgtcaggcaacagctgcggttcttgcgagcatggacgatacgtctgtactggtaacagtagttggtaaaaaagaagccaaagcagatcaagacttcttcccacttactgttaactaccaagaaaaagcgtacgctgcgggtaaaatcccaggtggtttcttcaagcgtgaaggtcgtccatctgaaggtgaaacactgattgcacgtcttatcgaccgtccaatccgcccattattcccagaaggtttcaaaaacgaagtacaagttgttgttactgtaatgtctgctaacccagatatccctacagacatcatctctatgattggtacttcagcagcccttgctatctctggtattcctttcaacggcccaatcggtgcggctcgtgttggttttagcaacggtgaatacattctaaatacacgcgcagaagagcaagctgaaagcgagcttgaccttgttgttgcgggtactgaaggcgcagtacttatggttgaatcagaagcaagcgtgctttctgaagacaccatgctaggtgcggttatgttcggtc

SEQ ID NO: 257230 - DNA, 1762 bp, Unknown
  Bacterial polypeptide expressing nucleotide sequence isolated from the Sargasso Sea
aatgtttaatatacacagtgaagaaataagttggggtgatagaaccctaaaaattgaaacaggaaaaattgcgaggcaagcagacggtgcagtcattgttacctatggcggaacctcagtaattgcaacagtatgcgcggaaaaaaaacctaaagctggcattgatttttttcctttaacggtaaattatcaagagaaatcctacgcatctggtaagattccaggcggctactttaagcgtgaaggaaggcctacggagagagagactttaatatcaaggctcatagatagaccaataagaccacttttcgttaaagagtttaaaaatgaaacacaagtcatagcgactgttttgacttatgatcatgaaaatgacccagatatagtagctatgattgcttgctcagccgctttgacaatttcagggataccctttaaaggacctattggggcagcaaaaattggattgattgagaatgaaatgattttaaacccgaaagttgaagatattgaaaattctcaacttgaacttgttgtagcgggtacaaagaacgcaatcttgatgattgagtcagaggcatccgagttaagtgagaaaatgatgcttgaggcggtaatgtttgctcatgaatctatgcaagaagtgattgaaatgataattaatcttgcaaggaaatgtgctaaagacccaatgattattgaagaaaaggataatgctgatattacaagctttatagatggtgaggtaagattaaagcttgagaaagcttttcaaattacagataagcaggaacgctataatcaagttggaactatcaaagatgagatgattgaaaagctcaacgagaaatttgatgataattatgatgaaatcgaagcgtcaggagtatttaaagatattgagagtagcattgtcagaagctcaattttgaaagactcaaaaaggatagacggaagaggattatctgatattcgcccaatttccgttgaagtaggtctacttccacaaacacacggctcttctctattcactagaggtgagactcaggcgatagttgtgacaacacttggaactgccgaggatgaacagtatatagactccttagatggaacaaaaaaacaaaacttcatgcttcactacaactttccccccttctcagttggcgaggttggtagaatcggagcaaccggaagaagggaaattggtcacggaaaattagcgtggcgtgccgtaaatccattactcccaagcaaagaagatttcccatatacaattagagtggtctccgagataacagagtcaaatggttcatcatcaatggcgaccgtctgcggaacatcattagctctcatggatgcgggtgtcccaattcgtgagccaattgcaggaattgcaatgggtctaattcttgaaggaaaggactatgctgtcctgtctgatattattggagatgaagaccaccttggtgatatggactttaaggttgcgggtacgagcaaagggattacaacacttcaaatggatattaaaattgcaggaataaccaaagagattatgaaaaaagccctagatcaagctaaaaccggcagaaaacacattctatcagagatggagaaagcaataaaggcatcaagagacgatgttgccgacactgctccgagaattgtaactatgaatatcccgactgataaaataaaagatgtgattggctcaggaggaaaggtcataaaagagatggttgagcaaaccgggcaaaaataa

SEQ ID NO: 257231 - DNA, 1744 bp, Unknown
  Bacterial polypeptide expressing nucleotide sequence isolated from the Sargasso Sea
ggttcagttattgcctaccgtgctatcttacgatggggaaaatcaaccagatattttatctataattgcttcatccgcagcattagctatatctggactacctttccaaggaccaattgctgcaagtagagttggatataaagatggaaaatatttattaaatccttctccaacagaattgcttgactccgaattagatttagttgtggcaggcacaaaagatgcagttctaatggtagagtcagaaacaacaggactaagtgaaaaaattatgttggacgcagtaaagtttggacacgaaaattttttacctgcaatcaaagcaattgaaagtttagctaaaaaagctggaaaacctaaatgggaaatagaagaaatagatcactcagaaattaaaaagaaaattgctggtacttttgagaaagatttaagaaaagctttccaagaaactgataaaaagaaaagatcagccgctatttctgaaatagacactaaatgtaaagagatgttcgcagaagatgagaatataactgagaatcaagcaatggctcaattaaagtcactggaaaaagatatagttagaacagcaattttaaaagataagaaaagaattgacggtagaggtctggcagatgtgagacaaattaaatgtgaggtaggcgtattaccaagaacacatggatcagccttatttacaagaggagagactcaagctttagtagttactacattaggtatgtcagatgatgaacaaagattagaaagccttgacggaatgcaaagatcaaattttatgctccattataattttcctccattttcagtaggtgaatgtggaagaataggtactggcagaagagaaatagggcatggtaaattagcttggagagctatcaagtcgtctttaccaaaaaaagaaaattttccttacactttaagagttgtttctgaaattacagagtcaaatggatcatcttcaatggcaacagtttgtgggacttcgttatcattaatggacgcgggagtgcctataaaagaaccagtagcaggtatagctatgggtttgattaaagagggagataaattttctgtattatcagatattttaggagatgaagatcatttaggtgatatggattttaaggtagccggaactaaagatggcatcacctctcttcaaatggatattaagattacaggaattacatttgaaattatggaaaaggctttggatcaagctaaagctggaagagaacatatcttaggagagatgaataaatccttaaaatcttcaagaaaagaattctcaaaacacactcctaaaatggaaacaataaaagtggataaaaaagatattgcaacagttataggcaaaggtggagcaacaattagagaaatagttgagacttcaggagcaaaagtagacgtaaaagacacaggagaagttactgttgcagctccagatgaagagtcaagaaacaaagcattagaatttattaaaagtcttatagcaaaaccagaaatgggaaaaatttataaaggtaaagtggttaagattatggaatttggagcttttgtgaattttctaggaaaacaagatggtttagttcatatttcagaactcgcaacaaaaagagttgcaaaagtaggagatgttgtaaaagaaggagacgaagtttctgtaaaagttgtgggttttgacagaggcaaagtaaaattatctatcaagcaagccgtagcttaa

SEQ ID NO: 257232 - DNA, 1390 bp, Unknown
  Bacterial polypeptide expressing nucleotide sequence isolated from the Sargasso Sea
agtgctttcctacgataatgaaaacgaagctgacatattgtcgataatagcatcctcagccgccttatcaatctcaggattaccttttaaggggccagtaggtgcgtctagggttggttttataaatggcaagtgtgttttaaatccaactaaaaaagaactagaaaattctaaattagatttggttgtagctggaacaaaagatgctgttttgatggttgagtcagaagcttcaggcttaacagaaaaagaaatgttggatgcagtaaagtttggtcacgaaggtttttcttcagtaattaaaggtatagaaaaattagcaaaaaaatgttcaaagaaagattggaaaatcgaaaagaaagattacagtaaagttgttaagacaataaaaaaagaacttacaaaagatttagaaaaagcattttcagaaaaagataagaagaaaagatcggaattaattaatttggcaggagaaaaatgtaaagctttgtttgaggatgacgaagatctcttggaacacgaagcaatgttgcaacttaagaatttagaaaaagatattgttagaactagaattttaaaaagcaaaaagagaattgacggaagaggtttagcagatgtaagaccaataaaatgtgaagttggaattttaccaagagttcatggttcagccttatttactaggggcgaaacccaagctttagtaacaacgacattaggaacatcagacgatgaacagagaattgaaagtttggaaggtttaaaaagacaaagattcatgttgcattataattttcctccattttctgtgggagaaacaggcagaattggtacaggtagaagagaagttggacatggaaaattagcttggagagctttaaattcttcacttcctaaaaaagaaaattttccttacactttaagaatcgtttctgagattacagaatccaatggatcttcttcgatggctacagtttgtggatcttctttagcgttaatggatgcagctgttcctatagcagaacctgttgcaggaatagccatgggattaatcaaggaaaaagataaattttctattttgtcagacattctgggagacgaggaccatctaggggatatggattttaaagttgctggaacaaaagacgggattacttccttgcaaatggatataaaaattacaggaattacttttgagattatggaacaagcccttgctcaagcaaaagaaggaagagttcatatcttaaatgaaatgaataaaacactcaaatcatcaagaaaagaagtaggaaaacacactccaaaaatggaaaccataaaagttgataaaaaagatatagcaaccgttataggcaagggtggtgctacaataagggaaatagtagaaaag

SEQ ID NO: 257233 - DNA, 2068 bp, Unknown
  Bacterial polypeptide expressing nucleotide sequence isolated from the Sargasso Sea
tatgaataaattagtaaaaaaagagatccctatgggatcaaaaaccttagtattagagactggaaaaatagcaagacaagcaagcgcatctgtaattgcttcgatgggtaatacagtagtaatgtgtgctgttgtaacaaagactagtgatgaaaaaagagacttttttcctctaagtgtccattatagtgaaaaaacgtattctgctggaaagatcccaggtggatatttcaaaagagagggaagaccaactgaagttgaaaccttaacttctagattaatagacagaccattaagaccacttttccctgatttctttaaggaagaagttcaggtgaattgcatgttgttgtctttagataaagataatccaccagatgtggttgcaatgttagctgcttcagcagcgatgtctattgctgacgttccatttatggggccaattgctggagcaagagtaggatttattgatgacgaatatgttcttaatccttcttttgagcaaatgggccaatccgatctagatatgatcatagcaggatcagaaaatgctgttttgatggtcgaatcagatgctaatgaattaagtgaagacctaatgatcggtggaattctttttgcacatgaagaaatgaaaccagtcataaattcaattaagggttttgcagatgaagtcttgcctgaaagatccaagcatgaaaataaatatgcagatgaagaaaagcaagccttcgatactatcgactcaaaagttagagaagatcttgttgatgccttcactactatcgataaaaaagagagaaatgagaaagtaggttccattaaagataatttaatgcaggacttagatgaggagctacatgatctttatacaaaacagttcaaggaagtagaaaaagatgttgttagaggaaatgtattaaatgatcaaaagagaatagatggaagaggaatgactgaagttagagacattactatagaaactaactttttgccttcagttcatggctcagctctttttacaagaggtgagacacaagcaattgtcacaactacattaggctcaggaagagatgtacaaactgttgatgctcttcaaggagaaataaaagataattttatgcttcactataattttcctagctatagtgttggtgaattaggttttccaatggggccaaaaagacgagaaataggccatggagctcttgcaaaacgatctttaaagtttggagtgcctagtctagaagattttccatatgctataagagttgtcagtgaaatcactgaatcaaatggctctagttcaatggcttctgtttgtggtggaagtcttgcacttatggctgcaggcgtaccaatcaaagaaaatgttgcaggagttgcaatgggattaataaaagaaggtgacaaatatgaggttttaacagatatcttaggtgatgaagatcatcttggagatatggactttaaagtagctggaacaaagaatggtgttactggccttcaaatggatataaaaatagagggaatcaatgaagaaatacttgaaaaagctctaatgcaagccaaagaagccagaatgcatatcttagaaaaaatggatgcagtcctatcaaagccacttgaattaacagaccttgccccttcttttactaaattcaaagtccataaagacaaagtaaaagtagttattggaaagggtgggtcaacaatcaaaggcttacaagaagagtttggtgtaacaattgagctgcaagattctggtgaagtgagtgtatttgctgagaataaggaaatcgctaaccaagcgaaagaaaaaatagagttaatgtgtgctgaacctgaagaaggaaaggtttatgaaggtctagtagctaaagtagtagaatttggcgcatttgtgactattatgcctggtaaggatggccttttacatatatctcaatttaaagaagactttgaacacctaacagacgttatcaatgagggagatactattaaagtaaaacttgttgaagttggtaggcaagggagactcaaattagagtttgctgattcagaataa

SEQ ID NO: 257234 - DNA, 1561 bp, Unknown
  Bacterial polypeptide expressing nucleotide sequence isolated from the Sargasso Sea
aatggttacaggtaaaaaagataaaatttgtatgattgcaggtggttcaaattttgttccagaaaaaacaattttagaagcgcttgatgttgctatggaaggaattaataatattgttgatcttcagatggaattctcagagcattttgataattcatatgaggttgttgaaacaaaaatcttaactgatgatatagaaaaatcacttgatgatacttattcagcaaaaattgaaaaaatatttgacttagatacaaaacaagcaagggatgatgaatataatgcgattgaaaaagaagcattagaacctttcattgaagatgaagtaatgtatcctgaagtaaagaatcacattaaaaatatgtttaaaaatgcagtaagaaaaaccgtattagataaaaaagttagagttgatggtagaggtttagaagatattagagatattagtattgttccatctattcttccaagagttcatggatctgcattatttactagaggagaaactcagtcaattgctgctttaacacttggatcaagtcgagatgaacagattattgattcaatggcgagtgattacaaaaaatcgttcttacttcattataactttcctccatattgtgttggagaagttggtagaattggttttactaatagacgagaaattggtcatggtcacttagctgaaagatcattaaagccgatattaccttcatctgaagattttccttacacagttcgtattgtgtcagaaattacagaatcaaacggatcctcatcaatggcatcagtttgtggtggatctttagctatgatgaacgcaggtgtaccaattaaagaacacgttgccggtatagctatgggcttaataatggatgatgaagataattatgctgtattaagtgatattttaggtactgaagactttttgggagatatggactttaaagttgccggtactaaagatggtattagtgcaattcaattagatttaaaagttccaggtctttccatggatgtattatctaatgcactagaacaagcaaataaaggtagattacacattcttgatgaaatgaataaggcaattgataaacctaacgctatatcgcaatatgcgcctcaaattgaatcttttatgatagataaagataaaattggtgctttaattggcccaggaggtaaaaatattaaagctcttcaggaaaatgcggaatgtgttatcaatattgatgatgatggtacagtaagtgtttcagctgaagataaaactaaattagataatgctatatctcaaattaaagcagttgttcaagatcctgaagttggaacagtatttgatggaaaagttactaaaattcttgattttggagcttttgttgaatttgctcctggtagagaaggattagttcatatttctcaattagcatgggagcgtgttaataaggttgaggacgtgctttcagagggcgatgaagttaaaataaaactctttgaaatagacaaacaagggcgtttaaacttcagtatcaagctacttactgaaaaaccagagaaatag

SEQ ID NO: 257235 - DNA, 2019 bp, Unknown
  Bacterial polypeptide expressing nucleotide sequence isolated from the Sargasso Sea
gatgaaaatagaacataaatttgagttgggtaaccaacaaattacattagaaacaaatcgaatagcaaaacaagcagatgcatctgtggttgtaacctgcggcgaaacaatggttatggccaatatttgtgcagcaaaaacacaaaaacctgatattgattttttcccattaacagttaactatcaggaaaaatattatgcctccggtaaaataccggggggtttttttaaaagagaggctagaccgactgaaagagaaacattaacaagtcgtttaattgatagacctattaggcctctatttcacaaaaactttaaaaatgaaactcaagtaacattaactgtcctatcttacgatagcgttgttgatcctgatattattgcaatgtatgcaaccggcgcagcattagcgatttcaggtcttcctgtggcaggtactttgggttccgctagagttggatatatagatggaaagctagttgcaaatccatctatccaagatatggaaaactctgaactagatcttgttgtagctggaacagaagagggtgtcctaatggttgagtctgaagcccaagaactctctgagaacaccatgctagaggcagtaatgtttggacatgatttttatcagacatttattaaagaagttcaaaactttgcaagcaaaacagaaattaagacttttgaagtcccaagcctacctgatttttatgaaggtttacaaaaagacattgaaagtaaaatttcagatcctattcgtgaagcatacggtttagttgataagcaagagcgaagtcaaaaacttacagagatcagatcttctattatcgataatgttgaagatgatcagattttagccgctacaacaatcattaaagatatagaaaaaaacgtagttcgaggtgatatcatcaaaaataaaagccgtattgacggaagaaaattagatgaggtaagacaaatcacatgcgaattagacattcttcctcgagctcatggttcaagcctctttactcgtggagaaactcaagcattagttgttaccacattaggaacgggtgatgatgagcaaatgattgactctcttgatccaatgcacaaacaacatttcatgttgcattataattttcctccttactctgtaggagaggtaggaagagtaggagcaactggtagaagagaaattggtcatggaaaactagcatggcgtgcagttcatccaatgttaccaaaaaaagaggacttcccatacacactaagattagtatctgagataactgagtccaatggttctagttctatggctacagtatgtggctcatctcttgctttgatggcagctggtgtaccaattaaaaaacatattggtggtatagcaatgggtctaatcaaagagggtgaggactttgtggtgcttagtgatattttaggagatgaagatcacttaggtgacatggactttaaagtagctggtactatggatggtattacttctcttcaaatggatattaagattaccagtattactaaagagattatggaaattgctttaaatcaagcatctggtggaagaaaacatattattggtgttatgtcagatgccttaccagaagctcgagcaaaattttctaagcatgctcctcaagtaatctctatcacaattgataaagctaaaataaaagatgttattggctcaggcggtaaagtaattaaaaacatagtcgaagtttctggagcaaaactagaagtcaatgatgatggaattgtaaaaattgcatccagcaatgaagagtcaattaataaagctaaacaaatggtggaagacattgtagcagaacctgaagttggaaaagtctacacaggtaaagttgtaaaaattgttgagtttggagcctttgtaaactttatgggtgcaagagatggattacttcatgtctcacaaatttcacaaaaaagagtcgagaatgtctctgatgttttatctgagggacaagaagttcaagttaaagtgctcga

SEQ ID NO: 257236 - DNA, 628 bp, Unknown
  Bacterial polypeptide expressing nucleotide sequence isolated from the Sargasso Sea
catctgggagatatggactttaaagtagctggaacagaagagggaattacagctctgcaaatggatataaagattgatggtataacggaagaaatattcgatgttgctttagaaaaagcccaaaaggctagaacacatattctagaaagcatgaatgaggtgctctctgaatctagagaagaattatctgataaggcaccccaagctgtagttatacatataaatacaaaaaaaataagagatgttataggcaagggtggagaaactataagaggattaacagaagagactggagccatcattgaagtagaagatagcggaaaggtaacaatatatggagatacacctgaatctagagaaagcgcattacaaaaaatagaagaaattacggcagagcctgaggtgaataaaatttacacaggaacagttgcaaatattatggattttggtgcttttgttacgataatgcctggcagagacggcttagtgcatgtatctgagatttctgaagaaagggttgaaaatgtttcggattattttgtacaaggagaagaagtaaaggtaaaagtgttagaagttgataggcaaggaaagatacgtctaaccatgaaaggcttagatgactaaa

SEQ ID NO: 257237 - DNA, 854 bp, Unknown
  Bacterial polypeptide expressing nucleotide sequence isolated from the Sargasso Sea
aatgttcaaagttaataaaaaagaaatagaattaaacggaaaaaaaattagtttagaaacaggaaagatagcaagacaggcagatggggcaataatagctcgttgtggagagactgttgtgatggcaacagtagttggagctaaaaaggtaaatcctgaggtagattattttccattatcagtaaattatcaagaaaaatattattctgcaggaaaaatacctggtggttattttaaaagagaagcaagaccaacagagagcgaaacacttatctcaagacttattgatagacctataagacctttattcccagatgaatttagaaacgaggtacaattgcttcccacagttatttcttatgataaagaaaacgaatctgatattttatcaataattgcatcttcagctgcacttgccatttcaggaatgccatttatgggacctgttggtgcttcaagggttggttttattgatgggcaatacgttttgaacccttctaaaaaagaattagaaaaatcaaaattagacttagttgttgctggaactaaagaagcagttttaatggttgagtctgaagctaatggtttaagtgaagaagaaatgttaaaagctgtaaaatttggtcacgaaaattttattccaataattaaaatgatagaagatcttgcaaaagattgtaaaaaacctgactggatagtagagaaaaaagatctgtcagaagtaaagaaaagaatagataaagaatttagtgctgaacttaaaaaagccttttcaataaaagacaaacaggaaagatctaatcttatatctgatataactgaaagagcaaaaaagctttatgaagaggatgaaa

SEQ ID NO: 257238 - DNA, 661 bp, Unknown
  Bacterial polypeptide expressing nucleotide sequence isolated from the Sargasso Sea
gctttattcactagaggagaaacccaagcaattgtgactactactttgggtacatctgatgatgagcaaagaattgaaagcttagatggacttcaaagagaaagatttatgcttcactataattttccaccattttcagttggagaaacggggagaataggaactggaagaagagaaataggacatggcaaattagcatggagagctattcattcttcattaccctcaaaagagacatttccctatacttttagggttgtttctgaaattaccgagtctaacggttcgtcttcaatggctactgtttgcggaacatcacttgcattaatggatgctggagttccaatcaaagaaccagttgcaggtatagcaatgggactaattaaagaaggtgatgattttagtgtcttatcagatattttaggtgatgaagatcatttaggtgacatggactttaaagttgctggaactaaagatggaattacttccctccaaatggatatcaaaattacaggtattacatttgaaattatggaacaagcattaaaccaagctaaagatggaagagtttatattttaggtgaaatgaacaaagcattatcagtcttcaaggtcagaagttggaaaacatactccaaaaatggaaaaaataaatgttgat

SEQ ID NO: 257239 - DNA, 2158 bp, Unknown
  Bacterial polypeptide expressing nucleotide sequence isolated from the Sargasso Sea
atgtccgtaacaaatgtcacatgcaatattggtgataaagaaattaaatttgaaacaggtaaattagctctccaggctcctggttctgtagttgtaacatctggagatacaaatgttcttgtaacaacagttgcaaatgaatcagtaagagaaggtattgatttctttcctttgactgtcgatgtcgaagagagaatgtatgccgctggtaaaattcctggtggattttttagaagagaaggaaggcaaacagagaaagcaattttagcctgtcgattaatagatagaccactaaggccttcttttaaagatggttttagatgtgaaacacaaattattgctacagttttgagtgttgataacgaaaacgaatatgacgttttatctctaaatgctgcctcacttggtttacaacttgctggtattccattggaatcaccagttggcgcagtaaggatgtctctcattaatgatgagtgggttgtacaagctacaaatacagaacaagaagattcaatttttgatatggtcatagcaggaaaactcaatgaaaataatgaaattgatattgtcatggttgaagctggcgccaaggaaaatacatttgaaaaaatagacgatggaagccttgctccatctgaagaaatagttgcagacggtatagacatgtctaaagattatattttatcgttaataaattctcaaaaagagctagtttcaatgaatgatatcccatctgttgattggccacttgttgaagattataccgatgaactaaagtcaaaaattgaggcaagctgcaaagaagaactttctgaaattgcttcaataattgataggtctgagagaagctcacgccaaaatgaattacaagaaaaagttgttgaagaatttttagatgaagaagaggataactcaaaagctatcaaattagcctttaaatctatatttaaagaattagttagggatagagttgttagtggaggtccaagacttgatggaagatctcctacagatattagaaatatttcttctgaaatcaatttattacctatggttcatggatcatctttgtttcttagaggtgaaactcaggtattgaatgtaacaacattgggcatgtcaaggcttgaacaaatgttagacacgatagatacagttacctcaaaaaggtatatgcatcattacaattttccaccatattcaacaggtgaggcctacatgatgaggggaccaaaaagaagggagataggtcatggtgctttggcagaaaaagcgatactacctgttattcctccaaaggctgactttccctacaccataagagttgtgagtgaagctatttcatcaaatggctctacttctcaagcttctgtatgtgcatcaagtctttctttgatggcagctggtgtgccaattagagaacacgtttcaggaatagcaatgggtttaatatctaaaaataaagaatttgtaactttaaccgatattttaggagcagaggacgcattaggagatatggactttaaagttgcaggaaccagaggagtgataactgctcttcaattagatatgaaaattgaaggtctaccgtccgatattttaagaaaagctcttgagcaagcaaaagatgcacgacatcatatcttggatatcatggaagatactatttcagaaccggctgattctttatctggtaatgccccaagactggaatcaattgaactacctaaagataaaattggtgaggtaattgggccaaaaggaaaaaacatcaggaagattgaagaggaaaccggtgcaagtgttgagattgatgatgatggaatactcacacttggttcaacagaacaagaatctcttgatacagcgaaagagatggtaatggcaattattgatcctgaggaaccagaattaaatcaagagtatgaaggagaggttgttagtctggctaaatatggggcgtttattaacattctccctgggagagatggattaatgcatatatcaaaatttcactctgaaattagagtcggcgatcccgaaaaggtacttactgtaggagataaaattcaggtagtagttgactcaattgaaaatggaaaagttggtttaacactcagtaaacgatatagaaataccagaggatgcaattgag

SEQ ID NO: 257240 - DNA, 1953 bp, Unknown
  Bacterial polypeptide expressing nucleotide sequence isolated from the Sargasso Sea
tatgtccgtaacaaatgttacatgtaaaattggcgaaaaagaaattaaatttgaaactggtaaattagctttacaagctcccggtgctgttgtagtaacttctggagaaacaaatgtattagttacaaccgttgcaaatgaaactgtaagagagggaatagattttttcccactaacagtagacgtagaagagagaatgtattcagcaggaaaaattcctggtggattttttagaagagaaggaagacaaacagaaaaagctattttagcttgcagattaattgataggccccttagaccgtcttttaatgatgggtttagatgtgaaacacaaattattgcaacagttttaagtgttgacaatgaaaatgaatatgatgttcttgcattaaatgctgcatcactaggcttacagcttgctggtgtgccactagattcaccaattggagcagtaagaatgtcattaataaatgacaactgggttgtacaagcatcaaactcagaaatggaagaatcagtatttgatatggttgttgctggtaatttaaacgaaaataatgatgtagatatcgtaatggtagaagcaggagcaacagaaactgcttttgataaaatagaatctggaagcactacaccaacagaagatattgttgctgatggtattgataaatcaaaagaatatatttctgagttaattaaagcacaagcagaattagtatcacaaaatgaaataccagatgtagtctggcctctgattgaagactatacaccagaattattgtctgaattagaggaagcatttaaatctgatatagaaactattacttcaataactgatagaaaagagagaagtactaagcagtcagaattagaagaatctgcagtagaaaaatatttaaacgaagaagaagataacacaaaagcaataaagttagcctttaaatcaattgttaaaaatgttgttagggatagagtgatctctggcggtgcaaggttagacggaaggactccaactgatattagaaatatttctgctgaaattgatttattaccaacagttcatggttcatctttatttcttagaggagaaactcaagttttaaatgtgacaactttaggtatgggacgtttagagcaaatgttagatacgatagatactgtcacttctaaaaggtatatgcaccattataactttccaccatactcaacaggtgaagcatatatgatgagagggccaaagaggagagaaattggacatggtgctttagcagaaaaagcattagtccctgtaatacctactaagatagattttccttatactatcagagtagtaagtgaagctatatcatctaatggatcaacatctcaagcttctgtatgtgcatcaagcttatcattgatggctgcaggtgtgcctataaaagaacatgttgctggaattgctatgggattaatttcaaaagatgacaattacgttactttaacagacatattaggagcagaagatgctctcggtgatatggattttaaagttgctggaactaggaatatgattacagcacttcaattggatatgaaaattgaaggtttaccttctgatgttttaagaaaagcattaaatcaagcaatggacgcaaggcatcacatattagatattatggaagatgcaatctctgaaccagctgaaagcttgtcaggtaatgcgcctaggttagaaacagttgagttaccaaaagataaaattggtgaggtaattggacctaaaggtaaaaatattagaaagatagaagaagaaactggcgtaagtgtagaaattgatgatgaagggatacttacattaggttctaccgaagaggactcactagcagaagcaaaagaaatggttatgttgataattgacccacctgaagttgaagtagacacagattacgatggtgaggttgtaagcgtagc

SEQ ID NO: 257241 - DNA, 1156 bp, Unknown
  Bacterial polypeptide expressing nucleotide sequence isolated from the Sargasso Sea
gtaggtgcatcacgagtaggatttattgatggaaaatgtgttcttaatcctacaaagaaagaattagaaaattcgaaattagatttagttgtagcaggaactaaagatgcagttttaatggttgagtcagaagcatcaggacttaccgaaaaagaaatgttagatgcagttaaatttggtcatgaaggatttgttccagtaattaaaggtatagaaaaattatctaaaaaatgttcaaaagagaagtggaaaattgaagaaaaagattttagcaaagtatcaaaaaaaattgcaaaagagcttaccaaggatttagaaaaagctttttcagaaaaagataaaaagactagatcagatttaattagccaagccggagagaaatgtaaaagtttgttcgaaggagacgaagatctgttagaacatgaaataatgttgcaacttaaaaaacttgaaaaaaacattgttagaacaagaattttaaaaaacaaaaaaagaattgacgggagaggtttatctgatgtaaggcctattaaatgtgaagttggagttttaccaaggacacatggatcagcattatttacaagaggagaaactcaagctttagttaccacaacattaggcaccacagatgatgagcaaagaatagaaagtttagaaggtttaaagagacaaagatttatgcttcattacaattttcctcctttctcagttggtgaaactggaagaattggaacaggaagaagagaagtaggacacggtaaattagcttggagagctctaaattcttctcttcctaaaaaagaaaactttccatacacgcttaggattgtttcagaaattacagagtctaatggatcctcttcaatggctactgtttgtggatcttcacttgcattaatggatgcagcagttccaatagcagaaccagttgctgggatagccatgggattaataaaagaaaaagatgatttttcgatcttatcagatattttaggcgacgaagatcatcttggtgatatggattttaaagttgcaggtacaaaagatggaatcacatcattgcagatggatataaaaattacaggtatcacatttgaaattatggaaaaagcacttgcccaagctaaagatggaagagttcatatcttaaatgaaa

SEQ ID NO: 257242 - DNA, 721 bp, Unknown
  Bacterial polypeptide expressing nucleotide sequence isolated from the Sargasso Sea
aatgtttaaagtatacaagaaggaaattgaagtagcaggaaagaagataagtttagaaacaggcaaagtagcaagacaggcagacggtgcaattatagccactagtggtgaaacagttattttagcaacagtcgtgggagcaaagaaagttaatccagatatggattacttccctttatcagtaaactaccaggaaaaatattatgctggaggaaaaattcccggtggttattttaaaagagaagcaagaccaactgaaagcgaaacattaatctctagattaattgatagaccaatcagacccttgtttcctgatgaatttaaaaatgaagtacaattgttaccaacagtaatttcatatgacaaagaaaatcaaccagacattttagctattactgcttcatcagcagcattggctatttcaggaatgccattcatgggtcccgttggagcatctagggttggttttgttgatggtaaatacattcttaacccatcaaaaactgaattagagaattcaagtttagatttagttgtagctggcactaaagatgctgtccttatggttgagtcagaagctaatggtttaactgaagaagaaatgttaaatgcagttaaatttggtcatgaagggtttgttccagtaattaaaatgatcgaggaacttgctaaagaatgcagaaagccagagtggactgtagaaaaaaagagatctatctga

SEQ ID NO: 257243 - DNA, 1036 bp, Unknown
  Bacterial polypeptide expressing nucleotide sequence isolated from the Sargasso Sea
attgttgtccaacttttgggttcagagcgatcatcacaaatcattgatgccttagaaggtgagtataaagacaaattcatgttgcactataattttcctccttactctgtgggtgaagtcggttttatgggatctccaaagagaagagagattggacacggtaaacttgctcgtagagcattggaagcagttttacctaacatggctgaatatccatataccattaggattgtttcggagataactgaatcaaatggttctagttcaatggctactgtatgtggttctagcctttctttgatgcatgcgggtgttcctatcaaatctcatgttgcaggtattgcgatggggctagttatggaaggcgataaatataaagttctgaccgatattcttggtgatgaagatcatcttggcgatatggattttaaagtagctggaactgataacggaatcactgcacttcaaatggatattaagatcgccggcattactgaagaaattatgaaagacgctctcagtcaagcaaaggatgcaaaggatcatattcttaaaataatgaatgaagcaatatcatcaccatctgaggaatattctccttatgctccatccatcattagcattactgttcctaaagataaaatcagagatgtcataggtaaaggcggcgcaacgattagatcaatcacagaggtaaccggtgctcaagttgatatcaatgatgatggcattgtaacaattgcatctgttgatcaagcatctggtcttaaagcaaaagagaaaattgaattactcacagctgacgtcgaagtagataaaatctatgagggcagggtagctaaaataatggatttcggagcatttgttaccatacttcctggcaaagatggtctagtccacatatcagaaatctccgaagagcgagttgaatcagtgagtgatgttcttagtgaaggccaagttattcaagtaaaagtaattgaggttgatcggcagaatagaataagactttctatgaaagcgattaaggactaac

SEQ ID NO: 257244 - DNA, 976 bp, Unknown
  Bacterial polypeptide expressing nucleotide sequence isolated from the Sargasso Sea
atgtttaaagtagtaaaaaaagaaatagaagtaagtggaaaaaaattaagtttagaaactggaaagatagcaagacaagcagatggagcgattatagctcaatgcggagagacagttgttttagcaacagttgttggtgcaaaaaaagtaaatccagatatggattatttcccattgtcagtcaattatcaggaaaaatattatgcagctggaaagataccaggtgggtattttaaaagagaagctagacctacagaaagtgaaactttaatttcaagattaattgatagacccataagaccattgtttccagatgaattcaaaaacgaagtacaactattaccaacagtaatatcttatgataaagagaatgaagcagatattttatctatcattgcatcttcagcagctcttgcaatctcaggcatgcctttcatgggtcctgtgggagcctctagagttggctttattgaaggaaaatacgtccttaatccttccaaaaaagaattagaaaaatctaaattagatttagttgtagcaggtactaaagatgcagttttaatggtggagtccgaagcaaatggtttaacagaggaagaaatgttgaatgctgttaaatttggacatgagggtttcgttccaataattgaaatgatcgaagaacttgcaaaagaatgtagaaagcccgaatggacagttgagaagaaagatttatctgaagtaaaaaagaaattagaagaggaatttactgaagatttgaaaaaagctttctctacaaaagataagcaagatagatcaaatcaaatttctcaaataaacgaaaaagctaaaaatttatatgaggagaatgaagcttactctgatttagatgtaaattctcaacttaaaagtttagaaaaatccattgtaagaactgatattcttaaaaataaaaatcgtattaatggaagaggtctagcagatgtcagaccaatta

SEQ ID NO: 257245 - DNA, 1201 bp, Unknown
  Bacterial polypeptide expressing nucleotide sequence isolated from the Sargasso Sea
atctctagactgattgatagaccgataaggcctctgttcccagaagattttaaaaatgaagtacaagttcttccaacagtactttcttacgataatgaaaatgaagcagatatattatcaatcattgcttcatcagccgcattatcaatttcaggattacccttcaaaggaccagtcggtgcatcaagagttggtttcattgatggtaaatgcattttaaatccaactaagaaagaattagagaattcaaaattagatttagttgttgcaggtactaaggatgccgtattgatggttgaatcagaagcttctggtttaacagaaaaagaaatgctggatgcagtaaaatttggtcatgaaggatttgtttcagtcataaaaggcatagaaaaattaacaaaaaaatgttcaaaagaagcttggaaaattgagaaaaaagattatagcaaagttttcaaaaaaattgaaaaagaactcaccaaacatttagaaaaagcgttttcagaaaaagataaaaagaaaagatctgaattaataagttcagcaggagaaaagtgcaaagctttattcgaagacgatgaaactcttttggaacacgaaataatgtcccaactaaaaaatttagaaaaaaatattgtaagaactagaattataaaaagtaaaaaaagaattgacggtagaagcttatcagatgttagaccaatacattgtgaagttggtgttttacctagagctcatggttcggctttgtttactagaggagaaacgcaagctctagtaacgacaactttaggtaccacagatgatgaacaaagaattgaaagtctagagggcttaaaaagacaaagatttatgttacattataattttccacctttttctgtaggagaaactggcagaattggaacaggtagaagagaggttggtcatggaaaattagcttggagggccttaaactcttctcttccaaaaaaagaaaattttccctacactttaagaatagtttcagagattacagagtctaatgggtcttcctcaatggcaacagtttgtgggtcatcgttagcattaatggatgcagctgttcctatagcagaacctgtagccgggattgcgatgggattaatcaaggaaaaggataaattttctattttatcagatattttgggagacgaagatcatctgggtgatatggacttta

SEQ ID NO: 257246 - DNA, 915 bp, Unknown
  Bacterial polypeptide expressing nucleotide sequence isolated from the Sargasso Sea
aaacaggtagaataggaactggtagaagagagataggtcatggtaaattagcttggagagctattcactcttcattaccatcaagcgagtcatttccttacacatttagagttgtctcagaaattacagaatctaacggctcctcatcaatggctacagtttgtggaacatcacttgcattaatggacgcaggtgttccaataaaagaaccagttgctggtattgcgatgggattaattaaagagggtgatgagttcagtgttttatcagatattttaggtgatgaagatcatcttggggatatggattttaaagtagctggaactaaagatggaattagttctctgcaaatggatataaaaattacaggtattacatttgagattatggaacaggcattaaatcaagctaaagatggaagaattcatattttaggtgaaatgaataaagcattatcagcttcaagatcagatgttggaaaacatactccgaagatggaaaaaatctctgttgataaaaaagacattgctgctgtgatcggaaaaggtggagcaacaataagagagatcgtagaaaaatcaggtgcaaaagttgatgttaatgatgaaggtatagtgactgttgctgcaccagatgaagaggctagaaatattgctatgcaaatgattaaagacatcactgctaaagctgaattgaataaaatttattcaggcaaagtaatgaaaattatggaatttggtgcgtttgtaaatttcttaggcaaacaagatggacttgtccatatttctgaacttgcggacaaaagagtagcaaaagttacagatgttgtaaaagaaggcgatgaagtaaaagtaaaagtaattggcttcgatagaggtaaagtaaagctttcaatgaaacaagctgctaaataaa

SEQ ID NO: 257247 - DNA, 781 bp, Unknown
  Bacterial polypeptide expressing nucleotide sequence isolated from the Sargasso Sea
gttgagaaaaaaagacctttctgaagttaagaaaaaactggaagaaacatttacagaggatctgacaaaagcttttgcaacaagagataaacaggatagatcaaatcaaatttcagaaattactgataaagcaaaaaaactttatgaagaaaatgaaaattttacagatcttgatgtaaattatgaacttaaaaatttagaaaaaagaatagttagaacagatatcttaaggaataaaaataggattgatggaagaggtctttcggatgtaagaccaattgaatgtgaagttggaattttaccaagggtacacggttcagcattatttactagaggagaaactcaagcaatagtcacaactacacttggaacttctgatgatgaacaaagaattgaaagtttagaaggattgcaaagagaaagatttatgcttcactacaactttcctccattttcagtaggagaagttggaagagtaggtacaggaagaagagaaattggacatggaaaattagcatggagagcaataaattcatctttaccatcaaaagagagttttccttatacttttagaattgtctcagagattactgagtccaatggttcatcatcaatggctactgtttgcggaacatctttagcattaatggatgccggcgtaccaatgaaagaaccagttgctggtattgcaatgggtttaattaaagaaggtgatgattttagtgtattatcagacattttgggagacgaggatcacctaggtgatatggattttaaagtt

SEQ ID NO: 257248 - DNA, 721 bp, Unknown
  Bacterial polypeptide expressing nucleotide sequence isolated from the Sargasso Sea
atgtttaaagtatataagaaagaaattgaagttgcaggaaaaaaaataagtttagaaacgggtaaaattgcaagacaggcagatggagcaattattgcacaatgtggcgagacagttgttatggcaactgttgtaggggctaaaaaagtaaatccagatgttgattactttcctttatcagtcaattaccaagaaaaatattatgctgcaggtaaaattcctggtggatattttaaaagagaagcaagaccaacagaaagcgaaactcttatttcaaggttaatcgatagacctataagacctttgtttccagatgaatttaaaaatgaagtgcaattacttccaacagttatatcttatgataaagaaaacgaagcagatattttatcaattattgcttcatcagctgcattagctatctcgggaatgccttttatgggtcctgttggagcttctagggttggctttattgaaggaaaatacgtccttaatccttctaagaaagaattagaaaactctaaattagatttagttgttgctggaacgaaagacgcagtcttaatggttgagtctgaagctaatggattaacagaagaagaaatgttagatgcggttaaatttggtcatgagggtttttctccaataattaaaatgatagaagaacttgcgttggaatgtaaaaaacctgattgggttgttgagaaaaaaagacctttctgaa

SEQ ID NO: 257249 - DNA, 1423 bp, Unknown
  Bacterial polypeptide expressing nucleotide sequence isolated from the Sargasso Sea
tattcctgaaattgaatattctataaaagaagataattctgaattaaaagaaaaaattataaatattgtaagagatgacctagtaagtgcttattcgattccagaaaaggctaaaagacaggaatcagtctctcttgctcgagataaaatgaaagagagtcttagcgatgaagatttggaagatgaaaacgctgtttctggatatttcaaatcagtagaatcagaaatagtaagatctaggctccttaatggagattcaagaatagatggaagagaccttgatacagtcagaccaatagatatagaagttggatttttaaataaatctcacggttcttgtttgtttacgagaggtgagactcaatctattggtgttgcaacactaggtgggtctagagatgctcaattaattgatgctctagaaggtacaacaaatgatccctttatgcttcattataactttcctccattttctgttggtgaagcaggttttataggggcgccaaaaagaagagaaatcggtcatggaaaattggcacgaagagctttggaagcagttttgccatcccaagaagagtttccctacaccataagggttgtatccgaaataactgaatcaaatggctctagttccatggcaacagtttgttcttcaagtctatcaatgatggatgcaggaattcctattaagaaagctgtggcaggagtagctatgggacttgttcttgatggtgatgatttctgcgtcataacagatattttaggagatgaagatcatctaggagatatggattttaaggtagcaggaacttcagatggagtaacggctcttcagatggatatcaaagttaaaggaatatcagaagagataatggaggtagctcttgagaaagcacagacagcaaggactcacatccttgaaaaaatggactctgtattggactcaccaagaaaagaactttctccaaatgccccgcaagccgtaaatatgactattgcaaaagataaaattagagaagtgattggaaaaggcggttcggtaattaaaagtattaccgaaaaatctggtgcaaatgttgatattaatgatgatggagagattaaaatatttggggattcacctgaatcaaggcaaacagccatagatcttattaataaaattgttgcagatcctgaagtcggtcacatttataccggaactgtagttaaaattgtcgagttcggagcttttgtttcaatagatggtggcaaagaaggcctagttcatgtctcagaaatcatggaagaaagggttgagaaagtttctgactaccttgttgaaggagaagaagtagatgttaaagtcattggtattgatgacagaggcagggtaaaactcagcatcaaagcagtaaattcaccggaaggaactacccaaggataa

SEQ ID NO: 257250 - DNA, 1189 bp, Unknown
  Bacterial polypeptide expressing nucleotide sequence isolated from the Sargasso Sea
aatgtttaaaatatttaaaaaagaaattaaagtcggtgaaaaaaaaataattttagaaactggaaaaattgctagacaagcagatggtgcagttattgctcaatgtggtgaaacagttgttatggcaaccgtcgtgggtgctaagaaagttaatccagatgtagactattttccactatcagtaaactatcaagaaaaatactatgctgctgggaaaattcctgggggatattttaaaagagaagcaagacctacagaaagtgaaacattaatctcaagattaattgatagaccaattagaccattgtttcctgatgaattcaaaaatgaggttcaattacttccaacagtaatatcttatgataaggaaaatgaagctgatatattatctataattgcttcctctgccgcattagcaatatctggtatgcctttcaagggacctgttggtgcatctagagttggttacatagacggaaaatatgttcttaatccttcaaaaaaagagttagaaaattctaaattagatctagtcgtagcaggaactaaggatgcagttttaatggttgagtcagaggcaaatggattaactgaagaagaaatgttgaaagcagtaaagttcggccacgaaaattttgttccaataattaatatgattgaggagcttgctaatgaatgtaaaaaacctgattgggtagttgaaaaaaaggatctttcaaaagtaaagaaaaaaattgaaaatgaatttacagatgatttaaaaaaagctttttctattaaagataaaaaaacaagatcaaacctaatttcagaaatcacagataaagcaaagaaattatttgaagaagatgaaaattttacagatctagatgtaaactcagagcttaaaaatttagaaaaaagaattgtaagaaccgatatcctaaaaaataaaaaacggattgatggaagagggctctctgacgtaagacaaataatgtgtgaagtaggtatacttcctagaacacatggatctgctttatttacaagaggcgaaacacaagcgattgttactacaacactaggaacttcggatgatgagcaaagaattgagagccttgagggattacaaagagaaagatttatgcttcattataactttccgcctttctcagttggtgagaccggtaggatagggactgaagaaggg

SEQ ID NO: 257251 - DNA, 625 bp, Unknown
  Bacterial polypeptide expressing nucleotide sequence isolated from the Sargasso Sea
tcttggcgatatggattttaaagtagctggaactgataacggaatcactgcacttcaaatggacattaaaatcgccggcattactgaagaaattatgaaagatgcgctcagtcaagcaaaggatgcaaaggatcatattcttaaaataatgaatgaagcaatatcatcaccatctgaggaatattctccttatgctccatccatcattagcataactgttcctaaagataaaatcagagatgtcataggtaaaggcggcgcaacaattagatcaatcacagaggtaaccggtgctcaagttgatattaacgatgatggcattgtaactattgcatctgtagatcaagcatctggccttaaagcaaaagaaaaaattgaattactcacagctgatgtcgaagtagataaaatctatgagggcagggtagctaaaataatggatttcggagcatttgtaaccatccttcctggtaaagatggactagtacacatatcagaaatttctgaagaacgagtggaatcagtaagtgatgttcttagtgaaggtcaagtaattcaagtaaaggtgattgaagttgatcgacaaaatagaataagactttccatgaaagcaatcaaagattag

SEQ ID NO: 257252 - DNA, 1288 bp, Unknown
  Bacterial polypeptide expressing nucleotide sequence isolated from the Sargasso Sea
caggatagatcaaatcaaatttcagaaattacagataaagcgaagaaactttatgaggacaatgaaaattattctgatttagatgttaattctcaattaaaaaatctagaaaaatctatagttagaactgatattttaaaaaataaaaatcgtattgatggtagaggtttagcagatgtaagaccaatagaatgtgaggttggaatattacctagagtgcatggctctgcattatttactagaggtgaaactcaagcaatagtaactactactcttggaacttctgatgatgaacaaagaattgaaagcctagacggattacaaagagaaagatttatgcttcactataactttcctcctttttcagtaggtgaaactggaagaattggtactggtaggagagaaattggacatggaaaacttgcttggagagctatcaattcttcattaccccctaaagagagctttccatatacttttagaatagtttccgaaattactgaatcaaacggttcatcttcaatggctactgtttgtggaacttctctagcattaatggatgctggtgttccaatcaaggaaccagttgctggaattgccatgggtttaattaaagaaggtgatgactttagtgtattatctgacattctaggagatgaggatcacttaggtgatatggatttcaaagttgctggaaccaaagatggaattacatcacttcaaatggatatcaaaattacaggtattacatttgaaattatggaacaagctttaaaacaagctaaagatggaagaattcatatcttaggtgaaatgaataaagcgctggataaatcaagagcagatgttggtaaacacacaccaaaaatggaaaaaattacagttgataaaaaagatattgcagctgttattggtaaaggtggagcaacaatcagagaaattgttgaacattcaggtgccaaagttgatgttaatgacgaaggagttgtaacagttgctgcgccagatgaagaatctagaaataaagcgatgcaaatgattaaagatattacagctaaggctgaattgaataagatctataatggaaaagttatgaaaatcatggaatttggtgcatttgttaactttttaggaaaacaagatggtcttgttcatatatcagaacttgctgataagagagtggcaaaagtaactgatgttgtcaaagaaggtgatcaagtgaaagttaaagtaattggatttgatagaggaaaggtaaaactttctattaaacaggctgctgtataat

SEQ ID NO: 257253 - DNA, 1162 bp, Unknown
  Bacterial polypeptide expressing nucleotide sequence isolated from the Sargasso Sea
atgtttaaaatatataaaaaagaaatagagattgctggaaaaaaaattattttagagacaggtaaaatagctagacaagcagatggagcgataattgccacttgtggagaaacagttgtgctggcaactgcggttggtgctaaaaaaattaatcccgatgtagattattttccactttcagtaaattaccaagaaaagtattatgcagctggaaaaattcctggaggatattttaaaagagaagcaagaccaactgacaacgagacattaatttcaagattaattgatagaccaattagaccattatttccggaagagtttaaaaatgaagttcaagttctaccaacagttatctcttacgataaagaaaatgagtctgatattttatcgataattgcatcctctgcagcgcttgcaatatctggaatgccttttctaggaccagttggagcgtctagagtggggtatattaaaggtaaatatgttcttaacccatcaaaagaggagctaaaaaattcaaaattagatcttgtagttgctggaactaaggatgcagtattaatggttgagtcagaggcaagcgatttatcagaggaagaaatgctaaatgctgtaaaatttggtcacgagggttttgtgcccattatagcgatgatagaagaacttgctaaagagtgtaaaaagcctgattggataatagaaaaaaaagatctatctgaagttaagagaaagctagaaaaagagtttactaatgatttaaagaaagccttttctaccagggacaaacaggaaagatctaatatgatttctgaaatcacagataaatcaaaaaaaatctttgaggatgatgaaaattacacagatttagatgtaaactcacaactgaaaaatttagaaaaaaatatagttagaactgatattctaaaaaataaaactagaatagatggaagaggacttgctgatgtgagaccaataaaatgtgaggtaggaatccttccaagagtacacggatcagcactttttacaagaggagaaactcaagctattgtgacaactactctcggaacatctgatgatgaacaaaaaattgaaagtttagatggattacaaaaagaaagattcatgcttcatttacattttccccccgttttcagttggtgaa

SEQ ID NO: 257254 - DNA, 1270 bp, Unknown
  Bacterial polypeptide expressing nucleotide sequence isolated from the Sargasso Sea
gatttcagaaattactgacaaagctaaaaagctttttgaagaaaatgaaaattattctgatcttgatgttaactcacagcttaaaaatctagagaagaaaattgttagaactgatattcttaaaaataaaaacagaattgatggtagaggattatctgatgtaagacctatcgaatgtgaagttggtgttttaccaagaactcacggttctgctttgtttactagaggagaaacacaagcaattgttgtaaccacattaggtacatctgatgatgaacaaaggattgaaagtttagatggtcttcaaagagaacgatttatgcttcactataattttcctcctttttcagtcggtgaaactggaagaattggaactggtagacgtgaaattggtcacggtaaacttgcttggagagcaatcaattcttcattaccttcaaaagaggcatttccatatacttttagaatagtatcagagattactgaatctaatggctcttcttcaatggctactgtttgtggagcatctttagcattaatggatgcaggtgttccgataaaagaaccagttgcaggtattgcaatgggattaattaaagagggagatgattttagtgttttatcagatattttaggtgatgaagatcacttaggagacatggactttaaagttgctggaactaaagatggaattacttcacttcaaatggatatcaaaattactggtatcacttttgaaatcatggagcaggctttaaagcaggctaaagatggaagaattcatatcttgggtgaaatgaataaagctttatcaaattcaagagatgaagttggaaaacatactccaaaaatggaacagataactgttgataaaaaagatatcgcagctgtaattggaaaaggtggtgcaacgatcagagagattgttgaaaaatcgggtgcaaaagtagatgtaaatgacgaaggtgtagtaacagttgctgctcctgatgaagagtctagaaacatcgctatgcagtttattaaagacatcacagcaaaagctgaaatgaataaaatttattcaggaaaagttatgaaaattatggagtttggtgcatttgtaaatttcttaggaaaacaagatggacttgttcatatttcagaactagcagataaaagagttgctaaagttactgatgttgtcaaagaaggtgacgaagtaaaagttaaagtaattggtttcgatagaggtaaagttaaactttctatgaaacaagctgctgaataa

SEQ ID NO: 257255 - DNA, 745 bp, Unknown
  Bacterial polypeptide expressing nucleotide sequence isolated from the Sargasso Sea
ttagctttaatggatgcaggaataccagtaaaagcgccagttgctggcatagctatgggccttgttaaagaggtgaatgattttgctgtaattacagatattttaggtgatgaagatcacctaggagacatggattttaaagtggcaggtacggaagagggtattacggctcttcaaatggatattaagatagatggcataacagaagagatttttgatgtggctctagaaaaagctcaaaaggccaggtctcatattttaaatagcatgaatgcggttttggacaaatctagagaagaattgtcagacaaagcaccccaagctgttgttatacaaataaatacaaaaaagataagagatgttataggtaaaggcggggagactataagaggtttaactgaagagactggagctattattgaagtggaagataacggaaaagtaacaatatatggagatactcctgaatctagagaaagcgccttacaaaaaattgaagaaattacagcagaacctgaaatcaataaaatttatacagggacagttgctaacataatggatttcggtgcttttgtaacaataatgcctggaagagatggattagtgcacgtatccgaaatttctgaagaaagagtagaaaatgtttcagattattttattgaaggtgaggaagtaaaggtaaaagtattggaagttgatagacaaggaaagatacgtttaactatgaagggcctagacgattaaa

SEQ ID NO: 257256 - DNA, 1117 bp, Unknown
  Bacterial polypeptide expressing nucleotide sequence isolated from the Sargasso Sea
attaactgaagaagaaatgttaaatgcagttaaatttggccacgaaggttttgttccagtaattaaaatgatcgaagaacttgctgcagaatgtaaaaaacctgactgggctgtagaaaaaaaagatctttcggaagttaagaaaaaaattgaagatgaatttactgaagaattaaaaaaagcattttcaatcaaggataaacaagaaagatcaaacttgatttctgaaataacagacaaagctaaaaaactatttgaagaaaatgaaaattttacagatttagatgttaactctgaacttaaaaatttggaaaaaagaatagttcgaacggatatcttaaaaaataaaaatagaattgatggaagaggactttcagatgtaagaccaattatgtgtgaagttggaattttaccaagaactcatggttctgcattatttacaagaggagaaacccaagcaattgtaacaactacattagggacttctgatgatgagcagagaattgaaagtctagaaggtcttcaaagacaaagatttatgcttcactataactttcctccattttcagttggtgagactggaagaattggaactgggagaagagaaattggacatggaaaacttgcatggagagcgattaattcatctttaccttcaaaagaaagtttcccttacacatttagaatagtatcagaaataaccgagtccaatggctcatcatcaatggcaacagtttgtggaacttcattagcattaatggatgctggtgtaccaataaaagaacctgttgcaggtattgccatggggttaattaaagaaggtgatgactttagtgtgttatcagacattcttggagacgaggatcatctgggtgatatggattttaaagttgctggaacgaaagatggaattacatctcttcaaatggatataaaaattactggaattacatttgaaataatggagcaagctttaaaacaagctaaagatggtagaattcatatcttaagagaaatgaataaagctttagataaatcaagagaaggcgttggcaagcatactcctaagatggaaaaaataactgtagataaaaaaagatattgccactgtaattga

SEQ ID NO: 257257 - DNA, 1267 bp, Unknown
  Bacterial polypeptide expressing nucleotide sequence isolated from the Sargasso Sea
tgaagttatagaatggggtggaaaaaaattaacaattgaaactgggagggttgctagacaggcacatggttcagttatagctacatacggtggtacatcagttttagcgacagttgttgctgatagagaagaaaagaaaggtctagatttctttcctttaacagtaaattaccaagaaaaagcttatgccgcaggtaaaatacctggtggtttttttaaaagagaaggtaggccttcagaaaaagaaacattagtttcaagattaattgatagacctataaggcctttatttgcggatggctttaaatgtgaaactcaagttattgctactgtaataagttatgataatgaaaatgatccagatatagttgcgctgatagcatgttcagccgctctaaccttatcaggtgttccttttatgggtccaattggtgcagctagggttggcttcaaagatggcgaatatatattaaatcctacaaatgaagaaatggagacttctgatcttgatcttgtagttgctggaacaaaagatgctgttttaatggtagagtctgaagctaaagaattatctgaagaacagatgttaggagcggttacttttgggcaagaaaatttttctcaagtcattgattctataatcagtctagctgagaaagcagcaaaagagcctagagagtttcaaaaaaaagatacatctgatgttgagaataaagtaagttcaattgttaaagatgatttatcaaaagcatacaaggaagcggacaaacaaaaaagaactgaaaaaattgctgagattaaaaagaatcttatttctgaattagtttctgatgatgatgaagatgaagataataacgaatcatcagtatcatccgcttttaaaacaattgaaaaaaatattgttagaaatagtatcttagatactggtgaaagaattgatggtcgtgatctagaaacagtcaggcctattcaatccgatgttagtgttttaccccttacacatggttcagcactcttcacaagaggagaaacacaggctttagtagtcactactcttggcacaggagacgatgaaaaatttgttgatggattagacgaaacctataaagaacgatttatgcttcattataatttccccccttattcagttggtgaaactggaagaactggttttactgggagaagagagataggtcatggtaaactggcgtggagagctcttaaagcagtaatgcctgaatatgattcctttccttatacaattaga

SEQ ID NO: 257258 - DNA, 2068 bp, Unknown
  Bacterial polypeptide expressing nucleotide sequence isolated from the Sargasso Sea
tatgaaaaatattgtaaggaaagagatcccaatgggatcaaaaacacttgtacttgaaacaggaaaaatcgcgagacaggctactgcctctgtaatagcatcaatgggtggcactgttgttatgtgtgctgtagtcacaaaacctagtgctgaaggaagagatttcttccccttgagtgtgcactatatggaaaaaacttatgctgctgggaaaatccctggaggttatttcaaacgagaaggtaaaccgactgaaatagaaacattaacttcaagattaatcgatagaccattaagacctctatttccagatttttatgtagatgaagtccagttaaattgtatgcttttatcgttggataaagacaatccacctgatgtcgttgctcttatagctgcttcagctgctatgtccatagcagatgttccattcagaggcccaatggctgcagcgagagtaggttttgtaaacgacgagtatgtcttaaatccatcatttgctgaaatggatgaatcagatcttgatatggtagtggctggctctgaaagtgcagttcttatggttgaatctgatgcaaatgagttaagcgaagatttgatgataggagcaattctttatggtcatcaagaaatgaaaccagtaattaaacaaatagatgaatttgccaaagaagttcttccagagaagtcagattttacaaatccaaatgaagaagaagagaagaaaatctttgatgaagttagtgagaaatgtggagctggtctcagtgaagcgttcacgacaactgacaaaaaagaacgaggtaaaaaaattactgcggtaaaggaaaccttgttggatagccttgatgaagattcacataatgcttatttgaagcaatttaaagaagtcgaaaaacatattgttagagagaatattttgggtgcgcaaaaaaggattgatggtagaggtctcactgaagttagggacataagtgttgagactaattttttaccttcagtacatggttccgccctatttactagaggggaaactcaagcaatcgttactgcaacacttggctcaggcagagatattcaaaccgtagatgctctagcaggtgaaatcaaagataattttatgcttcactataattttccaagctatagtgtgggtgaattaggttttccaatgggccctaaaagaagggaaattggccatggagcacttgcaaagagatcactacaatttgctgttccaagtgtagaggaatttccatatgcaataagagtagtcagtgaaattacagaatcaaatggctcaagctcaatggcatctgtttgcggtggaagtttagctttgatggcagctggcgtaccaattaaagagaatatagctggtgttgcaatgggacttgtcaaagatgatagtcgctatgaagttctaaccgatattctgggtgatgaggatcatttaggtgatatggattttaaggttgcaggaacaaagaatggtgtctcaggtctccaaatggatattaaaattgaaggcataaatgaggagatacttgaaaaagcgttaatgcaagcaaaagaagcaagaatgcatattctgggagaaatggataaagttcttgctaagccaaatgaattgacaggtttagcaccttatttctgtaaatttaaagttcacaaagataaagttaaagttgtgatcggtaaaggcggttcaacaattaaaggattgcaagaagagtttggtgttactatcgaacttcaagatacaggtgaagtaaatgtatttggcgaaaataaagaagttgccgaagctgctaaagaaaaaattgaattactctgtgcagaacctgaagttggtaaagattatgatgcagttgtagctaagattatggagtttggtgccttcgttacattcatgcctggcaaagacggcctgctacatatatctcaatttaaagaagattttgatcagttaactgacgtcataaatgaaggcgataagataagagtaaaagtaactgaaataagaagagacggaaaaattaaactcgagttttcagactcagaatag

SEQ ID NO: 257259 - DNA, 1049 bp, Unknown
  Bacterial polypeptide expressing nucleotide sequence isolated from the Sargasso Sea
aagaggtgaaacacaagccattgtaacaactacacttggaacttcagatgacgaacaaagaatagagagtttagatggtcttcaaaaagagagatttatgttacactataattttcctccattctcagttggtgaaacaggaaggattggaacaggtagaagagagataggtcatggcaagttagcatggagagcaattaactcttcgcttccatcaaaggaaagttttccctatacatttaggattgtctcagaaataactgagtctaacggttcatcttcaatggcaactgtttgtggaacttcacttgctcttatggatgcaggtgttccgattaaagagccagttgctggaatagcaatgggtttgatcaaagagggtgaggatttctctgtgctatcagatatacttggtgatgaagaccacttaggagatatggattttaaagttgcaggtactaaagacggcatcacatctttacaaatggatattaaaattacaggaattacatttgaaataatggagcaggctttaaatcaagcaaaagatggtagaattcatattttaggtgaaatgaataaagctttaagtaagtctagagatgatgttggaaaacatactcctaaaatggaaaaagttacggttgataaaaaagatatcgctgccgtaattggaaaaggtggggcatcaattagagagatcgttgaaaaatctggtgccaaagttgatgtaaatgatgaaggtgtagtaactgttgctgctccagatgaagagtctagaaacattgctatgcaaatgatcaaagacattacagcaaaagctgaactgaataaaatttattcaggtaaagttatgaagattatggagtttggtgcatttgtaaatttcttaggaaaacaagatggacttgttcatatttcagaactagcagataaaagagttgctaaagttacagatgttgtaaaagaaggcgacgaagtaaaggttaaagtgattggttttgatagaggaaaggttaaactttccatgaaacaagctaatgaataga

SEQ ID NO: 257260 - DNA, 1328 bp, Unknown
  Bacterial polypeptide expressing nucleotide sequence isolated from the Sargasso Sea
tatggaaattgaagaaagagaatttggcaaggctaaccttagccttgaaacaggacggctggcccgtcaagccaacggatcagtcctggttcggtatggcgacaccatggtcttggttgcggccaccgcagcaccaggctctggagcaggagcagattttttcccgctttcagtattttatgtggaaaaagcctatgcagcagggagaatcccagggggattctttaaacgtgaagcccgattgtctgatagtgaaacgttgatttccaggattatcgatcgtccgttgcgcccatcttttcacgaaaactatctcgcggaaactttgattgtcgccaccgttttgagccatgacctggagttcccttctgatgtagcagccatgatcggagcatcagcagccctttctgtctcggacatccccttgcttcaacccatcgggggaatccgggtcgggatgatcgatggagaattcattaccaatccaaatcccgaagagatcaccaacagtcaaatgaatatcttcatggcaggttctcgggacgcaatcctgatggtagaaggtgaagcgaacgaagtgagcgaatccgtcatgctggacgccctctggtatgggcatgaacagattcagcctatcatcgatatgcaggaagaactggttcaacgttgcggcaaagccaaacgggaagtggaagcacctgctgtggatgaagatttaaagaaaaaagtctatcaagctgcgcccaaaaaaatccagaaagcattgcagatcaaagaaaaacaggaacgctacgcaagtctggatgaagcctcagcagagatcgttagcgaagtcggaggggaagaagcagatgattccgtagtaacagagatcaaaacccatgtagctgagatcaaaaagaaggaaatgcgtgaaaaactgatcaaggatcaggtgcgcattgacggaagaactccaaccgaaattcgacccatcacctgtgaaacaaaagtgttgcctaggacccatggatcagccgtcttcacccgcggagaaacccaggcattgggtgtgaccacattgggaacccgtgaagacgaacagatgattgacgccttgccaggactttcttataagaatttcatgcttcactataatttccccagtttttcagtgggtgaaacgagacctccaagaggacctggccgtcgtgaaattggacatggtaccttagctgaaagaggattagctccgatgcttcctacgaaagaggaatttccctacaccatccggctggtttcagaagttctcgaatccaatggctcttcctccatggccacggtctgtg

SEQ ID NO: 257261 - DNA, 1095 bp, Unknown
  Bacterial polypeptide expressing nucleotide sequence isolated from the Sargasso Sea
taaagctaaaaaactttatgaggaaaatgaggaaataactgacctagatgttaattcagaattaaaaaatttagaaaaagcaattgtaagatccgatattcttaaaaataaaaatcgtatagatggaagaggactttcagatgtaagaccaataatgtgtgaggttggaattttgccaagagttcatggctcagcgttgtttacaagaggagaaacccaagcaattgtaacaactactctaggaacttcagatgatgagcaaaaaattgaaagtttagatggtttgcaaaaagaaagatttatgcttcattataattttccaccattttcagttggtgagactgggagaattggaactggcagaagagaaattggacatggaaaacttgcttggagagcaataaactcatctttgccaccaaaagaaacttttccttatacatttagaatagtttcagaaatcacagaatctaatggttcatcttcaatggcaactgtttgtggcacttcattagcattaatggatgcaggtgtaccaattaaggagccagtagcaggtattgcgatgggactaataaaagaaggagatgattttagtgttttgtctgacattctaggtgatgaagatcatttaggtgatatggattttaaagttgccggaactaaagatggaataacatcgcttcaaatggacatcaaaataacaggtattacatttgaaattatggaacaggctttaaaacaagctaaagatggaagaattcatattttaggtgaaatgaacaaagctcttgctaagtcaagagatgatgttggaaaacatactccaaaaatggaaaaaatatcagtagataaaaaagatatcgcaacagttattggaaaaggtggcgcaacaataagagagatcgtggaggtctccggagccaaagttgatatcaatgatgaaggagtagtaactgttgccgcgcctgatgaagattctagaaacaaagcaatgcaaatgattaaagatttaactgcaaaaccagaaatgaataaaatctataatggaaaagtaatgaaaattatggagttcggtgcatttgtaaatttctt

SEQ ID NO: 257262 - DNA, 1207 bp, Unknown
  Bacterial polypeptide expressing nucleotide sequence isolated from the Sargasso Sea
ggcaagcgggtggacggtcgcgcccttgatgaggtgcgtgcgatcagtgccatggctggggtgttacctcgacgggtacacggctcaggtttgttccagcgtggtctgacccaggtgctctccaccgccaccctgggcacccccagcgatgcccaggagatggatgacctccatcccagcaccgagaagctgtacctgcaccactacaacttcccgccgtactccgtcggcgagacccggccgatgcgctcccctggacgccgtgaaatcggccatggtgccctggctgaacgggccatccttcctgtgcttcccgccaaagacaccttcccctatgtggtgcgggtggtgagtgaggtgctcagttccaatggctccacgtcgatgggatccgtctgcggcagcaccctgtcgctgatggatgccggcgtgcccctcaaggcaccggtgagcggtgccgccatgggcctgatcaaggagggcgacgacatccgcatcctcaccgacatccagggcattgaggatttcctcggcgacatggacttcaaggtggccggcagcgaaaagggcatcaccgccctgcagatggacatgaaggtcaccggtctgccggtgaaaacgatcgccgaggcgatcaatcaggcccgtccagcccgtctgcacatccttgaaaagatgctggaggcgatcgacacgccccgcgagggcctctccccccatgccccgcgtctgctgagcttccggatcgatcctgagctgatcggcacagtgatcggccccggcggccgcacgatcaaaggcatcactgagcgcaccaacaccaaaatcgatatcgaggacagcggcattgtcaccatcgcctcccatgacggagcggcggccgatgaagctcagaagatcatcgaaggcctcacccgcaaagtgaacgagggcgaggtgttctccggatcgatcacgcggatcatccccatcggtgctttcgtcgagatccttcccggcaaggaaggcatgatccacatctcccagctgtcagaagcccgggtggagaaggtggaagacgttgtgaaggtgggtgacgaggtcaccgttcgcgtgcgcgaaatcgacaatcgcggccggatcaatctcaccctccggggcgtgccccagagcggcgatggctccggggacgagcctcagcccaccccggtggcccccctgagctgat

SEQ ID NO: 257263 - DNA, 1152 bp, Unknown
  Bacterial polypeptide expressing nucleotide sequence isolated from the Sargasso Sea
gatgtttaaagtatttaaagaagaaatagattttggtggaaaaaaaataaccttggaaactggaaagattgctcgacaagcggatggtgcaattattgctaccatgggggaaacagtagttatagctaccgttgtcggtgcaaaaaaagttaatcctgagacagattattttccattatctgtaaattaccaagagaaatattatgcagcaggtaaaataccaggaggatattttaaaagagaagcaagaccaacagagtctgaaactttgatttcaagattaattgatagaccaattagaccgttatttcctgaaagttttagaaatgaagttcaagttttaccaactgttctatcttatgataatgaaaatgaggcagatattttatcaataatcgcgtcatctgcggcactgtcaatttcaggactaccatttaatggacccgttggtgcatcaagggtcggcttcattgatggtaaatgcgtcctaaatccaacaaaaaaagaattagaaaattcaaaacttgatttagttgtagcaggaacaaaagatgccgttttaatggttgagtcagaagcatctgggctgacagaaaaggaaatgttagatgcagtcaaatttggtcacgaaagttttatttctgttataaaaggtatagaaaaattatccaaaaagtcttccaaagaaaagtggaaagttgaagaaaaagactttagcaaagtatcgaaaaaaattgaaaaagagcttacaaaggatttagaaaatgcgttttcagaaaaagataaaaaaactagatcagaattaataagtcaagctggagagaaatgtaaaagtttgtttgaagaagatgaaactcttttagaacatgaaatcatgttacaacttaaaaagcttgaaaaaaatatagttagaacgagaattttaaaaaataaaaaaaggatcgatggtagaggtttgtctgatgtaagacctattaaatgtgaagttggagttttaccaagaacccatggatcagcattatttacaagaggagaaactcaagctttagtaactacaacattaggtactacagacgacgaacaaagaattgaaagtttggaaggtttaaagaggcaaagatttatgcttcattacaattttccaccattttc

SEQ ID NO: 257264 - DNA, 1417 bp, Unknown
  Bacterial polypeptide expressing nucleotide sequence isolated from the Sargasso Sea
cgaggatctagccaaagaatgcaaaaaacctgattgggtagtagagaaaaaagatctttcagaagtaaaaaataaattggaaagcgaatttactgaggaacttaaaaaagcattttcaataaaagataaacaggaaagatcaaatttaatttctgagataactgataaagcaaaaaagctttatgaagaagacgaaaattatacagatcttgatgtaaattctgaacttaaaaatttagaaaaaagaatcgtaagaacagatattcttaaaaataaaaatagaattgatggtagaggtcttgcagatgttagaccaattatgtgtgaagttggaattcttccaagagtacatggctccgctttatttactagaggagaaacccaagcaatagttacaactacacttggtacatctgatgatgagcagaaaatagaaagtcttgaagggttacaaaaagaaagatttatgcttcattataattttccacctttttctgttggagagacaggaagaataggtactggaagaagagaaattggtcatgggaaattagcttggagagcaataaattcttctttacctacaaaggaaagttttccatatacatttagaattgtatcagagataactgagtcaaatggttcttcatctatggcaactgtttgtggttcatctttggctttaatggatgcaggtgtaccaattaaagagccagttgctggtattgcaatgggattaattaaagagggagaagaatttagcgttctttcagatattttaggagatgaagatcaccttggtgatatggattttaaagttgccggaactaaagacggaataacatctcttcaaatggatattaaaattacaggaataacatttgaaattatggagcaagccttaaaacaagcaaaagatggaagaattcatatcttaggtgaaatgaataaagctttatctaaatcaagagaagatgtaggaaaacatacacctaaaatggaaaaaataactgtagataagaaagatattgctacagtcattggaaaaggtggtgcaactataagagaaatagttgaagtgtcaggtgcaaaagttgacatcaacgacgaaggcgaagtcacagttgctgctccagatgaagaatcaagaaataaagctacacaaatgattaaagacttaactgctaaagctgaactcaataaaatttataacggtaaagtaatgaaaattatggaatttggtgcatttgttaatttcctaggaaaacaagatggccttgttcacatatcagagcttgctgataagagagttggtaaggtaactgatgtagttaaagaaggtgatgaagttaaagttaaggtaataggctttgacagaggaaaagttaagttatcaattaaacaagctgcaatataa

SEQ ID NO: 257265 - DNA, 1504 bp, Unknown
  Bacterial polypeptide expressing nucleotide sequence isolated from the Sargasso Sea
gtagctggtacaaaagatgcagttttaatggttgaatctgaaacaagtggtttaacagaagaagaaatgttaaatgcagttaaatttggacatgaaaattttgttcctataattaaaatgattgaagaacttgcagcagaatgtaaaaaaccagactgggttgtagaaaaaaaggatctttccgaagttaagaaaaaaattgaagatgaatttacagaagagttaaaaaaagctttttcaataaaagataaacaagaaagatcaaatttaatctctgaaataacagataaagccaaaattttttttgaagataatgaaagttttacagatttagatgttaactcagaactaaaaaatttagaaaagagaatagtcagaacagatattttaaaaaataaaaatagaattgatggacgaggactctcagatgtaaggccaattatgtgtgaagttggaattttaccaagaactcatggttctgcattatttaccagaggtgaaacacaagctattgtaacaactactctaggaacttcagatgatgaacaaagaatagaaagtttagaaggtcttcaaagggaaaggtttatgctccactataactttcctcctttctcggttggagaaacaggaagaattggaactggaagaagagagattggacatggaaaacttgcttggagagcaattaattcatctttaccttcaaaagaaagctttccttatacatttagaattgtatcagaaataaccgaatctaatggttcatcatcaatggcgacagtatgtggaacttcattagcattaatggatgccggtgttccaataaaagaaccagtcgcaggtatagctatgggattaattaaagaaggcgatgattttagtgtgttatcagatattttaggtgatgaagatcatttgggcgatatggattttaaagttgctggaactaaagatggaattacatctctacaaatggacataaagattactggaattacatttgaaataatggagcaagcattaaaacaagctaaagatggaagaattcatatcttaggtgaaatgaataaagctttagataaatcaagagaaggtgttggtaagcatactccaaagatggaaaaaataactgtagacaaaaaagatattgctactgttattggaaaaggtggagcaactataagagaaatagttgaaaaatcaggcgcaaaagtagatgtaaacgacgaaggagtagttactgttgcggcaccagacgaagagtctagaaatattgctttacaatttattaaagaccttactgctaaagctgaattaaataaaatttataatggaaaagttatgaaaattatggaatttggagcatttgttaattttctcggaaaacaagatggtcttgtccatatttcagaacttgcagacaaaagagttgccaaagtaactgatgtggtaaaagaaggagactcagttaaagttaaggttataggttttgatagaggta

SEQ ID NO: 257266 - DNA, 661 bp, Unknown
  Bacterial polypeptide expressing nucleotide sequence isolated from the Sargasso Sea
atgtttaaagtatacaagaaggaaatagaattagcaggaaagaaaataagtttagaaacaggtaaagtagcaagacaggcagacggagcaatcatcgcttcatgtggtgaaacagttattttagcaacagtagtgggagcaaagaaggtaaatccagatatggattacttccctttatcagttaactaccaagaaaaatattatgcaggtggaaagatccctggtggatattttaaaagagaagcaagaccaacagaaagtgaaacattaatctcaagattaatagatagaccgattagacctctgtttccagatgaatttaaaaatgaagttcagttattaccaactgtaatttcatatgataaagaaaaccaaccagatatattagcaattacagcttcatcagctgctctcgctatctctgggatgccttttatgggtccagtaggtgcatctagagttggctttgttgagggtaaatatattcttaatccatcaaaagctgaattagaaaaatcaagtttagatttagtagttgctggaactaaagatgctgtgcttatggttgagtccgaagctaatggtttaactgaagaagagatgttaaatgcagtcaaatttggtcacgaaggatttattccagtaatcgaaatgatagagg

SEQ ID NO: 257267 - DNA, 1371 bp, Unknown
  Bacterial polypeptide expressing nucleotide sequence isolated from the Sargasso Sea
gagggatttgttccagtaattaaaatgattgaggaacttgcaaaagaatgtagaaaacctgattggactgttgataagaaggatctatcagaagttaagaaaaaattagaagaaacttttacagaagatcttaaaaaagcttttgcaacaagagacaaacaagatagatcaaatcaaatttcagagattactgataaagctaaaatgctttatgaggaagatgaaaactacacagatcttgatgtaaatagtcagttaaaaaatctggaaaaaaaaattgttagaactgatattcttaaaaataaaaatagaattgatggcagaggtttatctgatgtaagacctatcgaatgtgaggtgggtgttttaccaagagcacatggttcagctttattcactagaggagaaacgcaagcaattgttgtagcaactttaggaacatctgatgatgagcaaagaattgaaagtttagatggattacaaagagagagatttatgctccactacaactttcctcctttttcagttggagaaactggcagaattggaacaggcagaagagaaattggacatggtaaattagcttggagagcaatcaactcttcattaccaacaaaagaagcatttccgtatacttttagagttgtttcagagattacagagtctaatggttcttcttcaatggctactgtttgtggaacctctttagcattaatggatgctggagtgcctattaaagaaccagttgcaggtattgcaatgggattaattaaagaaggtgatgattttagtgtcctatcggatatcttaggtgatgaagatcacttaggcgatatggacttcaaagttgctggaactaaagatggaattacttctcttcaaatggacattaaaattacaggtataacatttgaaattatggagcaggcattaagccaagctaaagatggaagagttcacattttaggagaaatgaataaagcattgtcagcctcaagatctgatgttggaaaacatacaccaaaaatggaacaagttaatgttgataaaaaagacattgctgctgtgattggaaaaggtggtgcaacaataagagagatagttgaaaaatcaggcgcaaaagtcgatgtaaatgacgagggtatagttacagttgctgctcctgatgaagagtctagaaacattgcaatgcaaatgattaaggacattactgcaaaagctgaattaaataaaatttattctggtaaagtaatgaagattatggagtttggtgcatttgtaaattttttaggaaaacaagatggacttgttcatatctcagaacttgctgataaaagagtagctaaagttactgatgtgttaaagaaggtg

SEQ ID NO: 257268 - DNA, 1537 bp, Unknown
  Bacterial polypeptide expressing nucleotide sequence isolated from the Sargasso Sea
atgtttgatatttataaagaagagatgaattttggtggaaaaaaattaatattagaaacaggaaaaatagcacgacaagctgcaggatctgtaatggttacttatgggggaactcaagtgttatgtactgtagttgctgcaaaggacataatgccaaatcaggattggtttccactttctgttcattatcaagaaaagtcttcagcagcaggtaagattccaggagggttttttaaaagagagggccgccctagtgaaaaagaagttttaacttctaggttaatagatagaccaatccgtcccctatttatggacggctttatgaatgaagtacaagttatttgtactgtttttagtcatgatttggagaatgacgcagatattccttctattattggaacatctgctgctttaactatttctggagttccatttttggggcctataggaggagctagagttgcttggattgataataaatatgtactaaatccttcatatgaagaattagaaaattctaaattagatctagtggttgcgggcactaatcagggtgttttaatggttgagtctgaggctaatgagttatctgaaaaagttatgttaggtgctgtagattatggccataaagaaattaaaaaagttataaaaactattattaacctagctgagcaagctgctaaagatccatgggattttaatgctcctgttgtgggagataaagaagtaaagcatgttgaaaaacatacaaaaacagttttaaagaaagcatattcagaactagtaaagcaaaaacgccagaacatgcttagtgagattagaagtaaagttttagaagaggccgaaactctagatctagatatacctcaggtcaatagccaattaaaaaaagctgaaaaagatttagtaagagggcaagtattaaaaactagtaaaagaatagatggtagagggttaaataagattagacctatagtttcagaagttaatgttttggaaagaacacatggctccgcattatttactagaggcgaaactcaagcacttgtatcaactacattaggcagcagtagagatgagcaaattttagattctctagaaggggattctaaaagaagttttatgttgcattacaattttcctccttattctgttggagaggcaggtagattaatgacaggaagaagagaaacaggacatggcatgctagcgtggagagctattcacccaatgttgccggatcatgaagactttccttatactataagagttttgtcagaaataacagaatctaatggttcttcttctatggcaactgtttgtggaacttcattagctttaatggatgcaggtgttcctttaaaaaaaccagttgctggtatagctatggggctcattaaagagggagaagattttgctgttctatcagatattttaggtgatgaagaccatttaggtgatatggacttcaaagtggctggtactgataatggtataacctcattacaaatggatattaaaatcacttcaataacta

SEQ ID NO: 257269 - DNA, 1147 bp, Unknown
  Bacterial polypeptide expressing nucleotide sequence isolated from the Sargasso Sea
agtccaagtgcttcctacagtttatcttacgataacgaaaatcaccctgacattttatcaattaatgcttcttctgcagctttagctatatcagggttaccgttcttaggaccaatagctgcaagtagagttggatacaaagatggaaaatatttattaaatccatcagttgaggaattaaaagagtccgagttagatttagttgttgctggaactaaagatgcagttttaatggtagagtccgagacgtcaggattatctgaaaaagttatgttagatgcagttaaatttgggcacgaaaactttgtaccagtaattgaagcaatcgaaaagctagctaaaaaagttggaaaaccaaaatgggaagttgaagaagtgaatcactccgaaattaagaagaagataactgagaaatttgaaagtggtttaagaagtgcttttaaagaaatagataagaaaaaaagatcgacagctatttctgaaatagaaactcaatgtaaagaattttttgcagaagatgaaactgtgtcagaaaatcaagtaatgagtcaattaaaatctttagaaaaagatatagtgagaactgcaattttaaaagaaaagaaaagaattgatggaagaggtttagcagatgtaagacagattaagtgtgaagtaggtgttttaccgagaacgcatggctctgccctttttaccagaggagagacacaagctcttgtagtaacaacacttggaatgacagatgatgagcaaagattagaaagtcttgaagggatgcaaagatcaaattttatgttgcattataattttcctccattttcagttggagaatgcgggagaataggtactggtagacgagaaataggacatggaaaacttgcttggagagcaataaactcatccttacctaaaaaagaaaattttccatatacgttaagagtagtttcagaaataacggagtctaatggatcctcatcaatggcaacagtttgtggaacttcgctatcgttaatggatgcaggagttcccataaaagagccagtagctgggattgctatgggactaattaaagaaggtgaagatttttcagtgttatcagacatcttaggagatgaagaccatttaggagatatggactttaaagttg

SEQ ID NO: 257270 - DNA, 1021 bp, Unknown
  Bacterial polypeptide expressing nucleotide sequence isolated from the Sargasso Sea
aaggaaattgaagtatcaggtaagaaaataagtttagaaacaggtaaagtagcaagacaggcagacggtgcaattgtagcaacatgtggagagacagtcgttttagcaacagtggtgggagcaaaaaaagtaaatcctgatgtggattactttccattatctgtaaattatcaagaaaaatattatgcagcaggaaaaattccaggtgggtactttaaaagagaagcaagaccaactgaaagtgaaacattaatttctaggctaattgacagaccaataagaccactatttcctgatgaatttaaaaatgaggttcagttattaccaactgttatttcttatgataaagaaaatgaggcagatattttatcgattatagcttcttcagctgcattagctatatcaggaatgccatttatgggtccagttggagcttcaagagttggattcatcgatggaaaatatgttttaaatccttcaaaaattgaactggaaaaatcaaaattagatttagttgtagcaggtacaaaagatgctgttcttatggttgagtctgaagcaagtggattaacagaggaagaaatgctaaatgcagtaaaatttggtcacgaaggttttgttccagtaattaaaatgatagaggaacttgcaaaagaatgtaaaaaaccggaatggactgttgaaaagaaagatctttcagaagtaaagaaaaaacttgaaaaaaccttcacagaagatcttaaaaaagcttttgcgacaagagataagcaagatagatcaaatcgaatttcagaaatcacagataaggctaaaaagctttatgaagaaaatgataattatactgatcttgatgtgaattctgaacttaaaaatctggaaaaaactatagtaagaacagatattctaaaaaataaaaatagaattgatggaagaggtttatctgatgttaggccaatttcatgtgaggggggtattttgccaagaacacatggttctgctttattaccagaggagaaacgca

SEQ ID NO: 257271 - DNA, 826 bp, Unknown
  Bacterial polypeptide expressing nucleotide sequence isolated from the Sargasso Sea
atgcgtgtagtttcagaaataacagaatcaaatggatctagttcaatggcgtctgtatgcggcacatctttatcattaatggatgctggtgttccaatatcgagtccagttgcaggaattgcaatgggattaatcaaagaaggagatgattttgcagtccttacagatattttaggagatgaagatcatcttggcgatatggattttaaagtagccggaacagactcaggtataactgctttacaaatggacattaaaattagtggtataaatgaatcaattatggaaactgctttagctaaagcaaaaaatgctagaaatcatattttaggaatcatgaatgaagtaatttcatctccgaaggatctttctgaaaatgctcctgcaatgaaaacatttatggttgataaagacaaaataaaagaaatcattggaaagggcggagctgttattaaatcgatgcaagagaaaactggtgctacagttgacatcaatgatgatggagttgtttcagtctttggacaaaatcagtcatctatgaaagagtgtcttgctattattgaagaaatattggaagagccagagttaaataaagtatataaaggtaaagtagtcaaaattgttgagtttggagcttttgtaaatattcttcctggcaaagatggtcttgtccatatttctgaaatttcaactgaaaggactgaggatgtaaatgatgtccttgaagaaggccaagaagttgaagttaaacttattggttttgatagaggaaagatgaagttatctatgaaggcattagcagaaaatgcctcagattcagactaga

SEQ ID NO: 257272 - DNA, 1081 bp, Unknown
  Bacterial polypeptide expressing nucleotide sequence isolated from the Sargasso Sea
agaaagcctgaatggacagttgagaagaaagatttatctgaagtaaaaaagaaattagaaaaggaatttactgaagatttgaaaaaagctttctctactagagataaacaagatagatcaaatcaaatttctgaaattactgaaaaagctaaaaaactttatgaagagaatgaagattactcagacctagatgtaaattctcaacttaaaaatttagaaaaatccattgtgagaactgatattcttaaaaataaaaatcgtattgatggaagaggtctttcagatgtaagaccaattatgtgtgaagtaggtatattgccaagagttcatggctcagcactatttactagaggagaaactcaagcaattgttacaactactttaggtacatctgatgatgagcaaagaattgaaagtttagatggtcttcaaaaagaaagatttatgcttcactacaacttcccaccattttcagttggtgaaacaggaagaattggaacaggaagaagagaaatcggtcatggtaaattagcgtggagagcaataaactcatcattaccatcaaaggaaaactttccttacacattcagaattgtttccgagataaccgagtctaatggttcatcatcaatggccactgtttgtggaacttcgttagctcttatggatgcaggtgttccaattaaagagccagttgctggtattgcgatgggtttaattaaagaaggtgatgatttttctgtactttcagatattttaggtgatgaagatcacttaggtgatatggattttaaagttgctggaactaaagatggaattacatcattacaaatggatattaaaattactggaattacatttgaaattatggaacaggctttaaatcaagcaaaagatgggagaattcatattttgggtgaaatgaataaagcattagacaaatctagagatgatgttggaaaacatactccaaaaatggaaaaaattactgttgataaaaaagatattgcagcagtcattggaaaaggtggagcaacattagagaaattgtccgaaaatctggtgctaaagttgatgtaaa

SEQ ID NO: 257273 - DNA, 703 bp, Unknown
  Bacterial polypeptide expressing nucleotide sequence isolated from the Sargasso Sea
atgtttaaagtatttaaaaaagaaatagatataggcggaaaaaaaattacactagaaacgggcaaaattgcaagacaagctgatggagcggtaattgcaacatgcggtgaaacagtagttatggctactgttgtaggtgcaaaaaaagttaatccagatatagattattttccactttcagttaattaccaagaaaaatattatgcagctggaaaaattccaggaggatattttaaaagagaagctagaccaactgaaagtgaaactctaatttctagattaattgatagaccaataagacctttattccctgatgaatttagaaatgaagtacaattattaccaacagtaatatcttatgataaagaaaatgaagctgacattttatcaataattgcatcctctgctgctttagcaatctctggaatgcctttcatgggaccagtcggagcttcaagagttggctttatagatgaaaaatttgtgcttaatccttcaaaagtagaattagctaaatccaaattagatcttgtagttgcaggaacaaaagatgcagttttgatggttgaatcagaggcaaatggtttgtccgaagaggaaatgcttaatgcagtaaaatttggtcatgaaaattttattccggtaattaaagcaattgaagaactatctaaagaatgtggaaaacctgcatgggaagtttgaa

SEQ ID NO: 257274 - DNA, 1099 bp, Unknown
  Bacterial polypeptide expressing nucleotide sequence isolated from the Sargasso Sea
tattgtgcgcggatcgatcctggatacggggataaggatcgacggtcgcgacacaaaaaccgtccggcctatagaatcagaagttggtattcttccaagagcacatggctccgccctgttcacaagaggggagacacaagcactcgttgtgacgactttaggaaccgggcaagatgaacaaattatagacgccttagaaggtgaatatcgcgaaaactttatgctacattataatttcccgccatactctgttggggaagctggtagaatgggtggcgccggacgacgagagattggtcatggtaagttggcatggagagcgatcagaccattacttccaatcaaggaggactttccatacactattcgtgtggtctctgaagtaacagaatctaatggttcttcttcgatggcaacagtttgtgggacctctatgtctatgatggattcaggagttccacttggacaaccctgtgccggaattgccatgggcttaataaaagaaggggatcgcttcgccgtactatctgatattttgggcgatgaagatcaccttggcgatatggatttcaaagtggcaggaacatcgaccggcatcacatcgctacaaatggatattaaaataacctctataaccgaagaaattatgaaagtagcccttgagcaggcccgagaaggtcgattgcatattttagcagaaatggaaaaggcaatagagcaaggccgtgaaacagtctctgataatgctcctagagttaccacactttcaatcaacaaggaaaagataagagacgttatcgggccaggtggaaaaattattagagaaatttgcgaagcaacgggtgccaaaatagatattgacgacaatggaactattaaagttgccgctgttgacaatgatgcaggtcaagctgctattgattggataaagtctattgttgccgaaccggaacttggtgtaatttataatggtaaagtggtgaaaaccgtcgattttggcgcctttgtgaactttttgggccccagagacggcttggtacatataagtgaactattgccaggaagagtaaataaaacaacggatgttgttaaagttgac

SEQ ID NO: 257275 - DNA, 1351 bp, Unknown
  Bacterial polypeptide expressing nucleotide sequence isolated from the Sargasso Sea
ttaataaatgctcaaaaagaattagtttctatgaatgatgtaccttctgtagattggccaattattgaagattattcggacgaattaaaatcaaaaattgaagcaagttgcaaagaggaattaaatgaaatctcttccattactgaaagatctgaaagaagtagtcgacaaaatgaattacaagaaaaagttgtagaagagtttttagatgaagaagaagataactcgaaagcaatcaagttagcctttaaatcaatatttaaagaattggtaagagaccgagtagttagtggtggtccaagacttgatggaagatcaccaacagacattagagatatatcttctgagattaacttactaccaatggtccatggttcatccttatttctaagaggagaaacacaagtattgaatgtaacaactttaggtatgtcaagactcgaacaaatgctagacaccatagatactgttacttcaaagagatatatgcatcactataattttccaccatattcaactggtgaagcttacatgatgagaggtccaaaaagaagagaaattggtcatggagcattagctgaaaaagcaatgcttcctgtcattcctccaaaagctgattttccttacactataagagttgttagtgaagcaatatcatctaatggatcaacatcccaagcctcagtttgtgcatctagtctttctttgatgtcagcaggagtcccaataagagaacatgtatctgggatagcaatgggtttaatttctaaaaatagtgaatttgtaacacttacagatatcttaggtgcggaagatgcattgggagatatggactttaaagttgcaggaacaaggggagtgattactgctcttcaattagatatgaaaattgagggcttgccgtcagatattttaagaaaagctttggaacaagcaaaagatgcaagacatcatatcttagacataatggaagataccatttcagaaccagctgattcattatcaggcaatgcaccaaggttagagtcaatagaattaccaaaagataaaattggtgaagttattggacctaaaggtaaaaatattagaaagattgaagaagaaactggagctagcgtagaaattgatgatgatggaattcttactttaggctctactgaacaggaatctttagatactgctaaagagatggtaatggcaattattgatccagaagagccagaattaaatcaagaatatgaaggtgaagttgtaagtcttgctaaatatggagctttcatcaatatactccctggtagagaaggattaatgcatatttctaaatcccatactgaattacgagtgaataacc

SEQ ID NO: 257276 - DNA, 1081 bp, Unknown
  Bacterial polypeptide expressing nucleotide sequence isolated from the Sargasso Sea
tttgccaagagcacatggttctgcattgtttacaagaggtgaaactcaagcaattgttgttgcaactctaggaacttcagatgatgaacaaagaattgaaagtttagatgggcttcagagagaacgatttatgcttcattataattttcctcctttttcagttggagaaactggaagaattggaactggtagaagagaaatcggacatggtaaattagcctggagagcaatcaattcttcattaccaactaaagaggcatttccatatacttttagagtagtttcagagattactgagtctaatggttcttcttcaatggctactgtttgtggaacttctttagcattaatggatgcaggagtaccaattaaagagccagttgcaggtattgcaatgggtttaattaaagaaggtgatgattttagtgtcttatcagatattttaggtgatgaagatcacctaggtgatatggactttaaagttgctggaactaaagatggaattacttctcttcaaatggatatcaaaattacgggtattacatttgaaatcatggagcaggcattgagccaagctaaagatggaagagttcatatcttaggagaaatgaataaagcattatcagcttcaagatctgatgttggaaaacatactccaaaaatggaacaacttaatgttgataaaaaagacattgcagctgtaattggaaaaggtggtgcaacaatcagagagatagttgaaaaatcaggtgcaaaagtagatgtaaatgatgaaggtgtagtaactgttgctgctcctgatgaagagtctagaaatatcgcaatgcaaatgattaaagatataactgcaaaagctgaactaaataaaatttattcaggtaaagtaatgaagattatggagtttggtgcatttgttaatttcttaggaaaacaagatggactggttcatatttcagaacttgcagataaaagagttgctaaagttacagatgttgtcaaagaaggcgacgaagtaaaagttaaagtgattggtttcgatagaggtaaagttaaactttctatgaaacaagctactgaataa

SEQ ID NO: 257277 - DNA, 1235 bp, Unknown
  Bacterial polypeptide expressing nucleotide sequence isolated from the Sargasso Sea
aagttttagaaatgaagttcattttttaccaaccgttctatcttatgacaatgaaaatgaagcagatattttatcaataattgcatcatctgcggcactgtcaatttcaggattaccatttaaaggacccgttggcgcatcaagagtcggcttcattgatggtaaatgtgttcttaatccaacaaaaaaagaattagaaaattcaaaacttgatttagttgtagcaggaacaaaagatgcggttttaatggttgagtcagaagcatctgggctgacagagaaggaaatgttggatgcagtcaaatttggtcacgaaggttttatttcagttataaaaggtatagaaaaattatccaaaaagtcttcaaaagaaaagtggaaggtagaggaaaaagactttagtaaagtattaaaaaaaattgaaaaagagcttacaaaagatttagaaaaagcgttttcagaaaaaaataaaaaaaccagatcagaattaataagtcaggctggagagaaatgtaaaagtttgtttgaaggagatgaagctcttttagaacatgaaataatgttacaacttaaaaaacttgaaaaaaatattgttagaacaaaaattttaaaaaataaaaaaagaatcgatggtagaggtttatctgatgtaagacctattaaatgtgaagttggagtattaccaaggacacatgggtcagcgttatttacaagaggagaaactcaagccctggtaactacaactttaggaactacagatgacgaacaaagaatagaaagtttggaaggtctaaagagacaaagatttatgcttcattataattttcctcccttctcagttggtgaaactggtagaattggaactggcagaagagaagtcggacacggaaaattagcctggagagctctaaattcctctcttcccaaaaaagaaaactttccatacacacttagaattgtttcagaaattaccgagtcaaatggatcttcttcaatggctacagtttgtggatcttcacttgcattaatggatgcagcagttccaatagcagagccagtagctggaatagcaatgggattaataaaagaaaaagatgacttttcaattttatcagacatcttaggtgacgaagatcatctcggtgatatggattttaaagttgcaggtacaaaagatggaattacatcactacaaatggatatcaagattacaggcattacattgaaattatgaa

SEQ ID NO: 257278 - DNA, 1107 bp, Unknown
  Bacterial polypeptide expressing nucleotide sequence isolated from the Sargasso Sea
ccgatgttagggacatatctatcgaaacaaattttctaccctcagtgcatggctctgcattgtttactagaggggaaacacaagcaattgtaactacaactctaggttcctctagagatgtacaaactgtagatgcgttgagtggagaggtaaaagataattttatgttgcattataactttccgagttatagtgtcggagaacttggatttccaatgggccctaaaagaagggaaattggacacggagctcttgcaaaaagatcgctaaaattctctgttccaagtttagaggagttcccgtatgccattcgagtagtaagtgaaattacagaatcaaatggttcaagttctatggcttcagtctgtggtggcagcctttcattaatggcagctggagttccattaaaagataatgttgctggagtagcaatggggctagttaaagatggagatagatatgaagtccttacagatattttgggtgatgaagatcatttaggtgacatggattttaaagtagcaggaacaaaaaatggagtatctggtcttcagatggacataaaaatagagggcataaatgaagaaatattagaaaaagctttagctcaagcaaaagatgctcgaatgcacattatcaaggtcatggatgatgccttagcaaaacccaatgagttgacaagtcttgcgccatatttttgtaaattcaaagtccacaaagataaagttaaagttgtcattggaaaagggggagcaactattaaaggcttgcaagaagaatttggcgtaactattgagcttcaagactcaggagaggtgaatgtctttggtgagaataaagagattgctgaacgggctaaagaaaaaattgaacttctttgtgcagagcctgaggaaggaaaaatttatgatggtgtcgttgcaaaagtcgttgattttggagcctttataacatttatgccaggtaaagatgggcttctacatatttctcagtttaagcaggattttgaacatttaaccgatattgttaaagaaggtgatcaaatgaaagtaaggttagttgagattggcagacaagggagactgaaattggagcaagtagattaaa

SEQ ID NO: 257279 - DNA, 1183 bp, Unknown
  Bacterial polypeptide expressing nucleotide sequence isolated from the Sargasso Sea
tctagaaaaatcaattgtcagaactgaaattctaaaaaacaaaaatagaattgatggtagaggtttatctgatgtaagacctatcgaatgtgaagtgggtgttttacctagagcacatggttctgcattgtttactagaggtgaaactcaagcaatagtggttgcaactttaggaacatctgatgatgaacagagaattgaaagcttagatgggcttcaaagagaacgatttatgcttcactataattttcctcctttttcagttggagaaactggaagaattggaacaggtagaagagaaattggtcatggtaaattagcttggagggcaattaactcttccttacctacaaaagaagcatttccatatacttttagagtagtttcggagattacagagtctaatggctcttcttcaatggcgactgtttgtggaacttctttagcattaatggatgcaggagtaccgattaaagaaccagttgcaggtattgcaatgggattaattaaagaaggtgatgatttcagtgtcctttcagacattctaggtgatgaagatcaccttggtgacatggactttaaagttgctggaactaaagatggaattacctctcttcaaatggatatcaaaattacaggtattacatttgaaattatggagcaggcattaagccaagctaaagatggaagagttcatatcttaggtgaaatgaataaagcattgtcagcctcaagatctgatgtaggaaaacacactccaaaaatggaacaagttaatgttgataaaaaagacattgctgctgtcattggaaaaggtggtgcaacaatcagagagatagtcgaaaaatcaggtgctaaagtagatgtaaatgacgagggtgtggtaacagttgctgctccagatgaagagtctagaaacattgctttgcaaatgatcaaagacatcactgcaaaagctgaattaaacaaaatttattcaggtaaagtaatgaagattatggagtttggtgcatttgttaatttcttgggaaaacaagatggacttgttcatatttcagaacttgcagataaaagggtagctaaagtaactgatgttgtaaaagaaggcgacgaggtaaaagttaaagtgattggattcgatagaggtaaagttaaactttctatgaaacaagctgctgaataa

SEQ ID NO: 257280 - DNA, 2013 bp, Unknown
  Bacterial polypeptide expressing nucleotide sequence isolated from the Sargasso Sea
aagatattgactttttcccgttgcaagtagagtatagagaaaaacattacgctggaggaaaaattcccggcggtttttttaaaagggaagcacggcccgctgaacatgaagtattaacaagtcgagtaaccgataggccaataaggcctctttttccaaaaggctttaaaaatgagacgcaggtcatgattacagttttacaaagtgatggcgaaaatatggcagatgtactagcaggtgttggtgcttctgctgcattaatgctatcatctataccttggaatggaccaatagcatctgtaagagtaggaagggtcaatggtgaattcattatgaacccaactcgtacagagttggatgagtcagatatggaaatggttgtttctggaaatagagaaaccgttgttatggttgagggagaagctgactgtgtcgtagaagcagaaatgttggatgcattaaaagcagctcatgaggtcatagtagaaattatagaattgcaagatgagttagtagcagcatgcgatgtccaaaaggatgaggttagcatacctaaaccagatgaaggcttagtttctagggtagaaaaagaaataggcacacaggtagatgacattgtgaatatttcagataaaaaagagcgttcagatgcgaaagatgacatggtatctaaaattcttgattccatggaaagtgaatttccagatgaagaaaaaaatataaaatctttgattgatgagcgttttaagaatgcattccgcgaacaggtgttatcaacaggaactaggagtgatggtagatctacgacagatataagagagattactgtagagccaaatattttaccaaggacacatggttcggtactctttactagaggtgaaacgcaagctctggtggttacaacccttggctctaagagtgatgagatgattgttgatagtatggatgaagattataaaaaatcctattacatgcattataactttccaccatactgtgttggagaggtggggaggattggttttaccgggaggcgcgagataggacatggaaacctagctcaaagagccataaagcctgtcctaccggattatgatgattttccatatacaatgcgcatagtatcagaaataatggaatctaatggttcttcatcaatggcatcagtttgtggcggcagtcttgctctcatgagcgctggtgcaccactaaaagctcctgttgcagggattgctatgggacttattacagatggggaaaggcatgccatcttaagtgatattttaggaatggaagatcatctaggtgatatggatttcaaaattgctggtacagctgacggaattactgcaattcaattagatctcaaaattgaaggattatctttcgagttaatggaaaaagcactccagcaggcaaaagatggaagaaattatattctcgataaaatgaacgcagttttatctgagccaaaagaaatctctccttatgcaccgcgtataatgtctctttcaattaatcctgaaaagattggggccttaatcggacctggaggtaaaaacatcaaaaagatcattgaagatacagaatgtgaagtaaacgttgatgatgatggacttgtaacaatagccggtgctaatacagaaaaatgcaatgaagcagttgaattagtaaaagcaataacttttgaaccggaagtaggtatggaatttgatgcaacggttaccaggcttatgtcatttggtgcttttgttgaatttgcaccaggaagagaaggaatggttcatatctctgaattagaatggcatagagtcgaaaaggtcgaagatgttttaagcacaggtgacccggttcgtgttaaactgattaaagtggatgatcagggcagacttgatttcagtagaaaagcattattggaaaagcctgaaggatatgtcgaaagaccaaaacgtccaagaagagatggagggcgtggaggaaaaaaaccatttaaaaagagaaggttctaga

SEQ ID NO: 257281 - DNA, 1262 bp, Unknown
  Bacterial polypeptide expressing nucleotide sequence isolated from the Sargasso Sea
aattactgataaagctaaaaagctttatgaggaagatgaaaattatactgatttagatgttaatagtcagttaaaaaatcttgaaaaatctattgttagaactgacattctgaaaaataaaaatagaattgatggtcgaggtttatcagatgtaagaccaatttcatgtgaagttggtgttttacctagagctcatggttctgcattatttactagaggagaaactcaagcgattgttgttgcaacactaggtacttcagacgatgaacaaagaattgaaagcttagatggattgcaaagagaaagatttatgctccactacaattttcctcctttttcagttggagaaactggaagaattggaactggaagaagagaaattggtcatggtaaattagcttggagagcaattaattcttcattaccaacaaaagaggcattcccatatacttttagggtcgtttcagagattacagagtctaatggttcttcttcaatggctaccgtttgcggaacatcattagcattaatggatgctggagtacctattaaagagcctgttgcaggtattgcaatgggattaattaaagaaggtgatgattttagtgttctatcagatatattaggtgatgaggatcacttaggtgatatggacttcaaagttgctggaactaaagatggaattacctctcttcaaatggatatcaaaattacaggtattacatttgaaatcatggaacaggcattaagccaagctaaagacggaagagttcatattttaggtgaaatgaataaagctttatcagcttcaagatctgatgttggaaaacatactccaaaaatggaacaagttaatgttgataaaaaagatattgctgctgtgattggaaaaggtggtgcaacgatcagagagatcgttgaaaaatcaggtgcaaaagtagatgtaaatgatgaaggtgtagtaacagtagctgctccagatgaagagtctagaaatattgcaatgcaaatgattaaagatatcactgcaaaagctgaattaaataaaatttattcaggtaaagtaatgaagattatggaatttggtgcatttgttaatttcttaggaaaacaagatggactagttcatatttcagaacttgcagataaaagagtggctaaagtaacagatgttgttaaagaaggcgatgaagtaaaagttaaagtgattggcttcgatagaggtaaagttaaactttctatgaaacaagctgtagaataat

SEQ ID NO: 257282 - DNA, 2095 bp, Unknown
  Bacterial polypeptide expressing nucleotide sequence isolated from the Sargasso Sea
atgtttgatgtaaaaaatgtagaaattgaatgggcaggtagaaaacttaaactagaaactggaaaaatagcaagacaagctgatgcaacggtattagccacttatggaggaactatagttatggcaaacgtagtggcagcaaaagaagcaaaaccagatattgatttttttccattaacagtaaactatcaggaaaaatattactcagtaggtaaaattccaggtggtttttttaaaagagaagctagacctactgaaaaagaaactttagtctctcgtctaattgatagacctgttagaccattatttcacaaagatttcaaaaatgaaactcaagttacatgtacagttttatcacatgatcaagaaaatgactcagatgtagtagcgctagttgctgcaagtgcagcattgacattatctggattaccatttttagggccattaggtgctataaaaattggttttattgataatgagtttgttgttaacccaacaaaaagtcaattagctaatacaaaactagagttagtgttagcaggaacaaaagagggtgtcttaatgattgagtctgaagcacatgagctctcagaaaaacagatgttagatgccgttgttcttggccaagatagttacaaagcagtaattgatgcaattatagctctagcaaaaaaagcagcaaaagatccatgggaattaaaagaaaaagaagatgagattaaaaatctaccaacaaatattagtagtgagtttggtaatgattttatagatgcatataaaataatagaaaaacaaaagagatcagatcaattatcttctattagaaattcaatttctgaaaaatatacatctgaaacactatcagcagtaataatagctgatgctatcaaaaatgttgagaaagatattgttagaggtgagctaatcaatactggtaaaagaattgatggaagagatacaaaaactgttcgaccaattgtatgtgaaacaggtattctagaacgtacacatggatcagcattattcaccagaggagaaacgcaagcaattgttgtatcaactttaggcactggtcaagatgagcaaagaattgatgctattgatggagaatatactgaaaattttatgcttcactataattttccaccatactcagttggagaagtcggtagagtcggttcaactagcagaagagaaattggtcatggaaaactagcatggagagcaatacatccaatgttgccttcaaacgaaaaattcccatacacttatagagttgtctctgagattacagaatcaaacggatctagctcaatggcaactgtgtgtggcacatctatgtctttaatggatgcaggtgtaccactagaaagaccagtagctggaattgcgatggggctaattaaagaagatgataagtatgtaattttgtcagatatattaggagatgaagatcatttgggagatatggattttaaagtagccggaacttcagaaggtatcacatctcttcaaatggatattaagataacaagcataacgcctgaaataatggaagaagctttagctcaagctaaagatggacgtttccatatattaggggaaatggctaaggcaattgataaaccaaaaaaatcaatttcacaatacgcaccaacaataactaatcttcaaataaacaaggataaaattagagaagttattggtaaaggaggagcagttattagagaaatatctgaaacaactggagctaaaattgaaattaatgatgaaggtttagtgagtattgcagctgtagatcaaaaatctggaaatgatgcattagaatggatcaaaggtattgtcgaagagccagagattggtaaaatttatgatggtaaagttataaagataatggactttggtgcttttgttaatttcatgggatctacagatggtcttgttcatattagtcaattaaaaaatgaaagagtagagaaagttgaagatgttattagtgaaggagatatcgttaaagtaaaagtattggatatcgactcaagaggaaaaataaaactttctatgaaagcagttgacgcagaagaaaacgcttaaa

SEQ ID NO: 257283 - DNA, 1617 bp, Unknown
  Bacterial polypeptide expressing nucleotide sequence isolated from the Sargasso Sea
aatgaaaaaagtagaaatgaacctcaatgggagtacgctctcaattgagacagggcatgttgccagacaatcagctggatcagtgatcgtaacacatggtgaaacatcagtgttggtagcggttaattcagctaaagaaatgcgagaagatatagattttttcccattacaagtagaatacagagagcgtcattacgcaggtggtaaaataccaggtggcttcttcaagcgcgaagcaagaccatctgaacatgaaatattaacgagcagattaaccgaccgaccgattcgacctttgtttccaaagtcatttaaatatgaaacgcaggtaattataactgcaatgtctagcgatggacaaaatatggctgatgtattagccggtgttggcgcttctgccgcactaacaatatctgatattccattcaatggacctatcgccacagttagagttggcagggttgatggtgactttgtagttaacccaactcgcgaacaaatggaagaatcagatatggaaattgtagtttctggaaatgatcaaacaattgtaatggttgaaggagaagctgaattaatatctgaaaaagaatttttagatgcaatgaagtttgcgcatggaccaatcaaagaaatgatagcgcttcaaaaagaactagcaagtcaattagatgttaataaaagacctgttccagaagatagcgaagatgaagagcttaaaaataaagttttagagcttgtatcggataaaatagataaagcaatcaagattgctgataaaacggaaagacaagaagcaatttctaaactgcatgaagaagctcaagttccatttgttgatagtcatccagattcagaaaaggatataaaatcatttattgatgataagttgaaatcggcatttcgcgaacagatattaacggataaagttagatcagatggtagatctactaccgatattagacctatttctatagatacaggtgtttttgctaggactcacggttcagctttatttaccagaggagaaactcaggcgattgctgtattaactatgggcaccccaaaagatgagcaaattatagatagtatggatgatgattataaaaaaagattcatgttacactataattttccgccttactgcgtaggtgaagtaggaagaataggttttacaagtagacgagaagttggtcatggaaatcttgcagaaagagcaattaagcaaatcttacctgattatgaagattttccttatacaatcagaattgtatctgagataacggaatccaatggatcatcttcaatggcatcagtttgtggtggatctttagcattgatgaatgcaggagcaccttctaaaggtcatgtcgctggtatagctatgggcctaattaaagatggagatcgctatgcagttctaagtgatattttaggagctgaagatcacctgggagatatggatttcaaagttgcaggtacaaaagatggtatatcagcgattcaattagatttgaaaattgatggaatttcatttgaattaatggaagaagcgctcgagcaagctcgcgttggtagaaaccatattttagatataatgtatgaagccgttcctga

SEQ ID NO: 257284 - DNA, 886 bp, Unknown
  Bacterial polypeptide expressing nucleotide sequence isolated from the Sargasso Sea
ggccatggtaacttagcaaaaagagcaattaaggctgtcctaccagatgtcgacgattttggatataccatgagagttgtctctgaaatcacagaatcaaatggttcaagttcaatggcttcggtgtgtgggacttctttatcattgatggatgctggcgtacctctctctagtccagttgcaggcattgcaatgggtttaataaaagaaggcgatgaatttgcagttcttactgatattttgggtgatgaagatcacttgggtgatatggactttaaagttgctggaacagaatctggcattactgcacttcaaatggatattaagattaaaggtattaatgaatccataatggagacagccttggctaaggctaaaaatgcaagaaatcatatcttaagcattatgaataatgaaatttcatcagcaaaagaagtatctgaaaatgctccagcaatgaaaacatttatggtggataaagataagattaaagaaattattggtaagggcggggcagtcataaaaggaatgcaagaaaagactggcgctactgttgatgttaatgatgatggcgttgtttcagtttttggtcaaaatcagtcctcaatgaaagaatgtttagctatcattgaagaaattcttgaagaaccagaactaaataaagtatataaaggaaaagtagtcaaaattgtagaattcggtgcatttgtaaatattcttccaggtaaagatggactcttgcatatttcagagatttcaaatgaaaggactgaaaatgttgctgatgtattagaagaagatcaagaaatagaagtcaaactaataggttttgatagaggaaaaatcaagctttcaatgaaagctttgaaagaaaatacagaataag

SEQ ID NO: 257285 - DNA, 1090 bp, Unknown
  Bacterial polypeptide expressing nucleotide sequence isolated from the Sargasso Sea
gttggtgttttaccaagaactcatggatcagctctttttacaagaggagaaacccaagctcttgtcgtgaccacactaggaatgacagatgatgagcaaagactggaaagcttagagggaatgcaaagatctaattttatgttgcattataattttccacctttttcagttggagaatgtggtagaataggcactggaagaagagaaattggacacggcaaattagcatggagagcaataaattcatctttaccatctaaagaaagttttccttatacattaagagtagtttcagaaattactgagtcaaacggatcttcatcgatggcaacagtttgtggaacttcattatctctaatggatgcaggagttcctataaaggagccagttgctggaattgcaatgggtctgattaaagagggtgacgatttttctgtactttctgacattttaggggatgaagatcacttaggagacatggattttaaagtagccggtacaaaaaatggtattacctcacttcagatggatattaaaataacaggtattacttttgaaattatggaaaaagctttagatcaagcaaaaggtggaagagaacatattttaggtgaaatgaataaagctataaaaacatcaagaaaagaattttcaaaacatactccaaaaatggaaactattaaagttgataaaaaagatatagcaacagtaatcggaaaaggtggtgcaacaatacgagaaattgtcgagacttcaggagctaaagttgatgttaaagataccggagaagtaacagtggcggccccagatgaagcttcaagaaacaaagctatcgatttcattaaaaatttaattgctaaaccagaaatgggtaaaatttacaaaggtaaagtggttaagataatggaatttggagctttcgttaactttttaggaaaacaagacggtctagttcatatttccgaactagctgacaaacgtgttgccaaagtaggtgatgttgtaaaagaaggtgatgaagtgtctgtaaaagtagttggatttgatagagggaaagtaaaattatcaatgaaacaagcttccgcttaaa

SEQ ID NO: 257286 - DNA, 985 bp, Unknown
  Bacterial polypeptide expressing nucleotide sequence isolated from the Sargasso Sea
gaaacagttgttttagcaactgctgttggtgcaaaaaaagtaaatccagatatggattactttccattgtcagtgaactatcaagaaaaatattatgcagcaggaaaaattcctggtggttattttaaaagagaagcaagaccaactgaaagtgaaacactcatttcaagattaattgataggcctataagaccattgtttccagatgaatttaaaaatgaagtacaattacttccaacagtaatatcttatgataaagaaaatgaagcagatatattgtcgatcattgcttcatcagcagctctagcaatttcaggtatgccatttatgggtcctatcgcagcatctagagttggttttattgatggaaaatatgttcttaatccatcaaaaaaagaattagaaaattcaaaattagatcttgttgtagctggtacaaaagatgcagtcttaatggtcgagtcagaagcaggcggtttaaccgaagaagaaatgttagatgcagttaaatttggccatgaaagttttgctccggtaattaatatgatcgaagaacttgctaaagaatgtaaaaaacctgattgggttttagaaaaaaaagatctttccgaagtaaaaaaaaaaattgaggatgagttcacagatgaattaaaaaaagctttttcaatcaaagataagcaagaaagatcaaatttaatatctaaaataacagacaaagctaaaaaaatatttgaagaaaatgaaaattttacagatttagatgtaaactctgaacttaaaaatttagaaaaaagaatagtcagaacagatatactgaaaaataaaaatcgtattgatggaagagggctttcagatgtaaggcctataatgtgtgaagttggaattttaccacgaacacatggttcagcattatttactagaggtgaaactcaagcaattgtaacaactacacttggaacttcggatgatgaacaaagaattgaaa

SEQ ID NO: 257287 - DNA, 1423 bp, Unknown
  Bacterial polypeptide expressing nucleotide sequence isolated from the Sargasso Sea
ttaggtccagtaggagcatcaagagttggatttattgatggaaaatatgttctaaacccatctaaaaaagaattagaaaattctaaattggatcttgttgtagcaggaacaaaagatgcagttttaatggttgagtcagaagcaaatggtttaaccgaagaagaaatgcttaatgcagtaaaatttggtcatgaaaattttgttccaataattaaaacaattgaagagcttgctaaagaatgcagaaagcccgaatgggaagttgaaaaaaaagatctttcagaagttaagaaaaaaatggaaaaagaatttactaaagatttagaaaaagccttttcaattaaagataaaaaagaaagatcagatctgatttctgaagtaacagaaaaagcaaaaaaactatatgaagaagatgaaaatatttcagaattagatgttaactatgagcttaaaaacttagagaagagaatagtaaggaccaacatattaaaaaataaaagtcgtattgatggcaggggcctatctgatgtaagaccaataatgtgtgaagtaggtattctaccaagaactcatggttctgcattgtttaccagaggagagactcaagcaattgttacaacaactcttggaacttcagatgatgaacagagaattgagacattagatggattagttagagaaagattcatgcttcattataattttcctccattttcagttggagaaactggaagaataggaactgggagaagagaaataggacatggtaagttagcttggagagcaataaaatcctctttaccatcaaaagaaagttttccttatacatttagaatagtatcagaaattacagagtctaatggatcttcatctatggctactgtttgcggaacttcgctatcattaatggatgcaggtgttccaatgaaaacgccagtagctggtatagcaatgggtttaattaaagagggagatgattttagtgttctttcagatattttaggcgacgaagatcacttaggagatatggatttcaaagttgctggttcaaaagatggtattacttctttgcaaatggatattaaaataacaggaattacatttgaaataatggaaaaagcattaaaacaagctaaagatggtcgtcttcatattttgggcgaaatgaataaagctttagataaatcaagagccggtgttggtaagcatactccaaaaatggaaaaaatatcggtagataaaaaagatattgcgacagtaattggtaaaggtggcgctacaataagagaaattgttgaaaaatcaggagcaaaagttgatgtaaatgatgaaggagttgtaactgttgctgctccagatgaagagtctagaaatatagccttacaaataattaaagatttaactgctaaagctgaaatgaata

SEQ ID NO: 257288 - DNA, 896 bp, Unknown
  Bacterial polypeptide expressing nucleotide sequence isolated from the Sargasso Sea
tggaagacgtgaaattggacatggtaaactagcatggagagcaattaattcttctttaccatcaaaagatagttttccttacacatttagaatagtttcggaaattactgagtctaatggctcttcttctatggcgactgtttgtggaacatctcttgcactaatggatgctggtgttccaattaaagaaccagttgcaggtatcgcgatgggcttaattaaagaaggtgatgattttagtgtattatctgacatcttgggggatgaagatcatttaggtgatatggactttaaagttgctggaactaaagatggaattacgtctcttcaaatggatattaaaattacaggtattacttttgaaattatggaaaaagctttaaatcaagcaaaagatggaagaattcatattttgggcgaaatgaataaagcactaggaaagtctagagcagatgttggtaaacacactccaaaaatggaaaaaattacagttgataagaaagatattgctgccgttattggaaaaggtggagccacaataagagaaattgttgaactttcaggtgcaaaagttgatgttaatgatgaaggagttgtaacagtagcagcaccagatgaagagtctcgaaataaagcaatgcaaatgattaaagatataactgctaaagctgagttaaataagatttataacggaaaagttatgaaaattatggaatttggtgcatttgttaattttttaggtaagcaagatggacttgtgcacatttctgagcttgctgacaaaagagttgcaaaggtaactgatgtagtcaaagaaggagatcaagtgaaagttaaagtaataggatttgatagaggaaaagtaaaactatctattaaacaagcttcaatgtaaa

SEQ ID NO: 257289 - DNA, 1006 bp, Unknown
  Bacterial polypeptide expressing nucleotide sequence isolated from the Sargasso Sea
cctgcaccactacaacttccccccctactcggtgggtgaaacccggccgatgcgctcccctggccgccgcgaaatcggccacggtgccctcgcagaacgggccttgatccccgtgttgcctccgaaggaatccttcccttatgtcgttcgagtggtctccgaagttctgagctccaacggctccacctccatgggttcggtctgcggcagcaccctggccttgatggatgccggcgtcccgatcgccgctccggtggccggtgccgccatgggcttgatccgtgagggcagcgacatccgcgtgctcaccgacatccaaggcatcgaggatttcctcggtgatatggacttcaaggtggccggcaccgaaaagggcatcaccgccctgcagatggacatgaagatcaccggtctggccatgaagaccatcggtgaggccatcacccaagcgcgcccagcccggctgcacattctcgagaagatgctcgaggcgctcgacaagccgcgcgacaccatgtcaccgcatgcgccacgtctgctcagcttccgcattgatcctgagctgatcggcacggtgatcggccctggcggccgcaccatcaaggggatcaccgagcgcaccaataccaagatcgacatcgaggacaccggcatcgtcaccgtggctagccacgacggcgccgcggccgaagaggctcagaagatcatcgaaggcctcacccgccgcatcagcgaaggcgagtacttcgatggcaaggtcacccgcgtgatccccattggtgccttcgttgaaatcctccccggcaaggaggggatgatccacatctcccagctctccgatcaacgggtcgagaaggtggaagatgtcgtcaatgtcggcgatgaggtgcgtgttcgcgtccgcgagatcgacaaccgcggccgcatcaacctcaccctgcgcggtgtgccccaggacggctctgatcctcagcccaccgtgatcctgccgatcggcgaggcctaa

SEQ ID NO: 257290 - DNA, 1165 bp, Unknown
  Bacterial polypeptide expressing nucleotide sequence isolated from the Sargasso Sea
tgctaaaaaaataaatgagggccaagattattttccgctttcagtcaattatcaagaaaaatattatgcagctggtaaaattccaggagggtatttcaaaagagaagcaagaccaactgaagctgaaaccttaatctctcgactgatagatagaccgataagacctttgtttccctcaagttttatgaatgaagtgcagttgctacctacagtgttatcatatgatactgaaaaccaaccagatattttatcaataattgcatcttctgctgctcttgcaatttcaggattgccttttcaaggtccaattgcagcaagcagggtgggatataaagatggaaaatatttgttaaatccctctccagaagagcttaaatcttctgaacttgacctagtagttgcaggaactaaagaagctgttttaatggtagaatcagaaacatctggattatcagaaaagataatgcttgatgctgttaaatttggacacgaaaattttgtgccgattattaaagcgattgagaatctagaaaaaaaagctggtaagccaaaatgggaaatagaggaattagatcattcggatataaagaaaaaaattactaaagaatttgaaggagatttacgaaaagcatttaaagaaattgataaaaaaaagcgatcaacagctatttcagaaatagataaaaaatgtaaagaattatttaaagaaaatgaggatgtcacagaaaaccaagtaatgtcacaattaaaatctcttgagaaggatattgttagaacagctatactaaaagataaaaaaagaattgatggcagaggtttagctgatgtaagaaatattaaatgtgaagttggggttttaccaagaacacatggctctgctttatttacgagaggtgagacgcaagctttagtggtgacaactttaggaatgtcagatgatgaacaaaggctggaaagtcttgatggcatgcaaagatcaaactttatgcttcactataatttcccccctttttcagttggagagtgcgggagaataggaactggcagaagagaaataggccacggcaaactagcttggagagcgattaattcctcgctaccacttaaagaaaattttccttatacattaagagttgtctctgaaataacagaatctaacggtctc

SEQ ID NO: 257291 - DNA, 1573 bp, Unknown
  Bacterial polypeptide expressing nucleotide sequence isolated from the Sargasso Sea
caattcgaagcaattggattttggttatgaagcagttactgaacttattaagtctcaagaagatttacttaaagatttaggaataaagcaaattaagccatcggatcctgaagaggataaaacattaccaaactatttagaaaagaattgtacaaaatcgatagagctggttttgaagaattttgatcagtcaaaagaagaaagggatcttgaactggaaaaaataaagcttgatgctcaagaaaaaatcgaatctttgaaagatgacaatcaagttaaagtcctaacctcagaaaacgaaaaattaattcattcagactttaaaaaactaactaagaaattaatgaggtcgcaaatcattaatgatgggaaaagggttgatgggagagagcttgatgaggttagaaaaattactgcatctgctggaattcttcctaagagagttcatggatctgcattattccaaaggggattaactcaagttctatccacgactactctcggtactccgagcgatgcccaagaaatggatgatttaaatccaagtacagagaaaacatatctgcatcactataattttccaccatattcagttggcgaaacaagaccaatgaggacgccgggaagaagagaaataggtcatggagctttagcagaaagagccataatccctgtacttcctgggaaggagactttcccttatgtacttagagtggtaagtgaagtcttaagttctaatggatcaacttcaatggggtctgtatgtggaagtactatttcacttttagatgctggtgtaccacttaaagcacctgttagtggaactgctatgggacttataaaagaaggtaaagaagtaagaattcttactgacatccagggtatagaggattttctcggagatatggatttcaaagttgctggtactgaaaaaggcattacagctttacaaatggatatgaaaatcactggattaacagtgtctattatttcagatgcaatcaaaaaagctcgtcctgcgaggatacatattttagaaaaaatgcaagctgcaattgataagcctcaagaatcattatcccctcatgcaccaaggcttttgagttttagaattgacccagaacttataggaaccgtaattggacctggaggaaggactattaaaggtatcacagagagaacaaatacaaaaattgatattgaagatggtggtattgtgactattgcctcccatgatggagctgcagcggaagaagctcaaaaaatcatagaaggattaactagaaaagtgcatgaaggtgaaatcttttctggtgtagtaacaaggattatacccataggagccttcgtagaaatacttccaggtaaagagggaatggttcacatttcacaattgtcagaagcaagagttgaaagagtagaagatgttgtaaggcaaggagatgaggttactgttagggttcgtgaaattgatagcagagggaggataaatcttacattaaggggcgttgctcaaaatggtggcatgtcttatccagaaccaacaccaacccctgtggctcctcttaattaa

SEQ ID NO: 257292 - DNA, 1351 bp, Unknown
  Bacterial polypeptide expressing nucleotide sequence isolated from the Sargasso Sea
ggggtcttcaaaaggatattggcctcaaaaattgcagatccgattaaagaggcttatggtcttgttgataaacaagaaagaagtcagaagttagaagaaatcagatcttcaattatagataacgttgaagacgatcaagtattagccgccactactattattaaaaatattgaaaaagatgttgtacgtggtgacatcatcaaaaataaaaatcgaattgatggtagaaaacttgatgaggtcagaaaaattacttgcgaattagaccttctccctagagctcatggttcttgtttattcactagaggagaaacccaagcaatagttgttacaacccttggcacaggagacgatgaacaaatgattgactctcttgaccctatgcacaaacaacattttatgttgcattacaacttccccccatactcagttggagaggttggaagaatgggttcaacgggtagaagagagataggtcatggtaagctagcatggagagcagttcacccgatgttaccgacaaaagaggattttccttatacacttcgattggtctctgagataactgaatcaaatggctctagttctatggctactgtatgtggctcatctcttgctttaatggcagcaggtgttcccattaaaaaacatattggtggaattgccatgggactaatcaaagagggcgatgactttgttgtgttgagcgatatccttggtgatgaagatcacttaggtgatatggactttaaagtggcaggtaccatggacggtattacttcacttcaaatggatattaaaattacaagtataacaaaagaaatcatggagatagctttaaatcaagcatcaggtggaagaaaacacataataagaattatgtcagaagctttaccagaagctcgtactaagttctcaaggcatgcacctcaggtaatttctatttctatcgataaagctaagattaaagatgttattgggtctggtggaaaagtgatcagaaatattgtagaggtctcaggagcaaaacttgaagtcaacgatgacggtattgtcaaaattgcatctagtaatgaggagtctattaatactgcaaaacaaatggttgaggacatcgtcgctgagcctgaaataggcaaggtatacaatggtaaagttgtaaaaatcgttgagtttggtgcctttgttaactttatgggtgctcgtgatggtttactgcacgtctcacaaatctcacaaaaaagagttgagaatgtctcagatgttttgtcagaagggcaagaggttcaagtgaaagttttagatgttgatcgagcgggtaaagttaagctcagtatgaaagaactctaaa

SEQ ID NO: 257293 - DNA, 961 bp, Unknown
  Bacterial polypeptide expressing nucleotide sequence isolated from the Sargasso Sea
aatgtttaaagtagtaaagaaggaaattgaagtagcaggaaaaaaaataagtttagagacaggaaaaatagcaaggcaagcagatggtgcaattattgcgcagtgtggggaaacagttgttttggctactgccgtaggagcaaaaaaagtaaatccagatgtggattattttcctttatctgtaaattatcaagaaaagtattatgcagcaggaaaaattcctggtggatattttaaaagagaagcaaggccaacagagaacgaaacattaatctcaagattaatagatagacctataagacctttgtttccagatgaattcaaaaatgaagtacaggtacttccaacagtaatttcatacgataaagaaaatgaagcagatattttatctattattgcttcatcagcagctttagcaatctcaggaatgccttttatgggacctgtaggtgcttctagagttggttttattgaaggaaaatacgctcttaatccttcaaaggaagaaatgaaaaattcaaaattagatttagttgtggcaggaacaaaagatgctgttctcatggtagaatctgaagctaacggtttaaacgaagaagaaatgttaaatgctgttaaattcggtcacgaaggctttgtgcccataattcaaatgatagaagatttagcaaaagagtgtaaaaaacttgattggatagtagagaaaaaggatctctcagaagttaaaaaaaaacttgaggaaaaatttacaggtgatttaaaaaaagcttttgcaacaagagataaacaagatagatcaaatcaaatttcagaaatcacagacaaggctaaaatgctttatgcagaagatgaaaattattcagatttagatattaattctcaacttaaaaaccttgaaaaatctattgttagaactgatattttaaaaaataaaaatcgtatagatggaagaggcctttca

SEQ ID NO: 257294 - DNA, 1423 bp, Unknown
  Bacterial polypeptide expressing nucleotide sequence isolated from the Sargasso Sea
atgtttgaaataaataaagttgaaattaattgggcaggaaaaaaattaacattagagacaggtagaattgcaagacaagctgacgcttcagttttagctacatatggaggaactactgttatggcaaatgtagtagcagctaaaaaagaaaaacctgatatagatttttttcctttaactgttaactatcaagaaaaattttatgcagtaggaaaaatacctgggggtttttttaaaagagaggcaagaccaacagaaaaagaaaccttaatatgtaggctaattgatagacctatacgccctttatttcataaagattttaaaaatgaaacacaagttatgtgtacggtattatctcatgatcaagaaaatgactcagatattgtagcaatgattgctacaagtgctgcgcttactttatctggtttaccgtttatgggccctttaggagctgcaaaaataggaatggttgagggaaaatttatttctaccccaacattatcagaaatgaaaaattcaaatttagaattagttgtagctggtactaataagggtgtattaatggtagaatctgaggctcaacagttatctgaagatgaaatgttagaagccgttgaaataggtcaaaaaacttataatgaagttattgatgctattataaaactggcaaaaaaagctgctaaagatccttgggatattaaagaaaaggcagaagaaattaaaaatttgccttctgaaattgaaaaaaattacaaatcaaagtttattgatgcatataaaattcaagagaaacaaaaaagatctgaattattaaatgaattaagagctgaaataagtgaaaattatgaaactgatattctaacctcagttatagttagtgatgcaacaaaatcaatagagaaagatatagtcagaagcgaattgttgaaaactgggaatagaatagatgggcgtgataccaaaacagttagaccaatcaaatgtgaagttggtgttcttgaaagaacacatggctctgctttatttactagaggggaaactcaagcattagtagttactactttaggaactggtcaagatgaacaacgtattgatgcaatagaaggagaatataaagaaaactttatgcttcattataattttcctccttactcagttggtgaagtaggaagagcaggctctactagtcgtcgtgaaattggacatggtaaattagcttggagagcaattcaccctatgctaccttcagcagaaaaatttccttatacttatagagtagtgtctgaaatcactgaatcaaatggttcaagttcaatggcaacagtttgtggaacttctttatctctgatggatgctggtgttcctcttgaaaaatctattgctggaattgccatgggattaatcaaagaagatgagaattatt

SEQ ID NO: 257295 - DNA, 1087 bp, Unknown
  Bacterial polypeptide expressing nucleotide sequence isolated from the Sargasso Sea
ttattttcgttacgaaatgaaatttctgaaaaatttgtaagtgaaacactctcaccagtattggtttcagatgcaataaaaaatgtagaaaaagatatagttagaggagaattaattaatactggtaatagaattgatggaagagatacaaaaacagtgcgtccaattgtgtgtgaaactggagttttagaaagaactcacgggtctgcattatttacaagaggagaaacacaagctcttgtagtttcaactttgggaactggacaagatgagcaaagaatagatgcaattgatggtgaatatacagagaattttatgcttcattacaattttccaccttactctgttggagaagttggaagaataggttctaccagtagaagagaaataggacatggaaaattagcctggagagctattcacccaatgttaccttcaaaagaaaagtttccttacacttatagagttgtatctgaaattacagaatctaatggatctagctctatggcaactgtttgtggtacctcaatgtctttaatggatgcaggagtgcctttagaaagaccagtagcaggtatcgcgatgggcttaattaaagagaatgataaatatgtgatattatcagacatacttggtgatgaagatcatcttggtgatatggattttaaagttgcaggaacttctgaaggaataacttcattacaaatggatattaaaataactagtataacagctgaaattatggaagaagcattagcacaagctaaagatggacgcttccatatacttggtgaaatggctaaagcaattgataaacctaatcaatcgatttctcaatatgcgccaacaataactaatctacaaataaacaaagataaaattagagaagttattggtaaaggaggagcagttattagagaaatatctgaaacaactggagctaaaattgaaattaatgatgaaggtttagtgagtattgcagctgtagatcaaaaatctggaaatgatgcattagaatggatcaaagatattgtcgaagagccagagattggtaaaatttatgatggtaaagttataaagataatgg

SEQ ID NO: 257296 - DNA, 1070 bp, Unknown
  Bacterial polypeptide expressing nucleotide sequence isolated from the Sargasso Sea
gctgcgcccgctgttcccggaaggcttctacaacgaagttcaggtcgtgatccacgtcctgtcgttgaaccccgaaatccccgctgacatccccgcgctgatcggcgcgtcggcggcgctcgccgtgtccggcctgccgttcaacggcccggtcggcgcagcacgcgtggcctacatcaacaacgaatacgtgttgaacccgacgcgtccgcaaatgaaggaatcggcgctcgacctgatcgtcgccggtacggaacgcgcggtgctgatggtggaatcggaagcgcagcaactgagcgaagaagtgatgctcggcgccgtggtgtttggccacgatcaaatgcagatcgcgatcaacgcgatccacgaactggtcgccgaaggcggcaagccggaatgggattggcagccggcggcgaagaacgagccgctgatcgcccgcgtgacggaactggcgcaagccgacctgctcgccgcgtatcagattcgcgacaagcaggctcgctcggccaagctgaaggaagtctacgcggcgacgtcggccaagctggaagaagaagcggcggcagccggcacggttgcggcagacaaggctagcgtcggcaatgtgctgttcgacattgaagcgaagatcgtccgttcgcagatcctgaacggcgagccgcgtatcgacggccgcgatacgcgcaccgtgcgcccgatcgaaatccgtaccggcgtgctgccgcgtacgcacggctcggcgctgttcacgcgtggcgaaacgcaagccatggtggtcgcaacgctcggcacgaagggcgacgagcagaacatcgacgcgctcgaaggcgagtatcgcgaacgcttcatgctccactacaacatgcctccgttcgcaaccggcgaaacgggccgcgtcggttcgccgaagcgccgtgaaatcggtcacggccgtctggccaagcgcgcgctggccgcgtgcctgccgagcgccgacgaattcggctactcgatccgcgtcgtgtcggaaatcaccgaatcgaacggttcgtcgtcgatggcctcggtgtgcggcggctgcctcgcac

SEQ ID NO: 257297 - DNA, 1465 bp, Unknown
  Bacterial polypeptide expressing nucleotide sequence isolated from the Sargasso Sea
ccgttgggactggcatgcacctcaagctgatgccgaattggtagcggcggtggaggcggctgcttcaggcccgctgggtgaggcttaccgaattactgagaagacagagcgttatgagcgcgtgggtcaagtaaaagacgacgtcgtggcgcaattggcgacagacgatggccctgcggaagatgacatcaaggatatctttaaaagccttgagaagcagattgttcgtagtcgtattctggcgggagaaccccgcatcgacgggcgagataatcgcaccgttcgtgcgattgcctgcgaggtagatatcctgtccaaggcgcacggctctgcgttgttcacccgcggtgagacgcaggcgattggtgctgtgacactcggatcgacccgggatgcgcaaattattgacgcgctggaaggcgagcgccgagaccccttcatgcttcactacaacttccctccctactcggtaggggaagcgggacgtattggctttacgagccgtcgagagatcggtcacggtcgactcgcacgccgcggtttggctgccgtattgccgggtgaagaggaattcccttacaccgttcgtgtggtatcggagattactgagtccaacggctctagctctatggcatcggtgtgtgtgggttcactctctatgatggcggcgggcgtccccctgtctgccccagtggctggtattgccatgggtctggtcaaggaaggcaaccagttcgcggtgctgactgacattctgggtgatgaggatcacctcggtgatatggacttcaaggtagcgggtaccgccaaaggtgtgaccgccctgcaaatggacatcaagatcgaagggatcaatgaagaaatcatggagcgcgcccttgagcaggctctggaagcgcgcctgcacattctcgggcagatgaacacagtgctggatgcgccgcgtgagattacctctgagaacgcgcccagcatgacgacgctgaaggttgatcaggacaagattcgcgacatcatcggtaagggtggtgcgacaattcgccagatcacggaagaatccggtgctacggttgatatcgatgatgatggtaccgtgaaggtctttggtcagaacgcggccgcgcgcgacgctgccatcgagatgattcaggctattaccgctgaggccgagatcggtgagatctatacgggtaaggtcgcgcgcattgtcgacttcggtgcctttgtaacgatcctgcccggcaaggatggtttggtacacatttcgcagatcgccgaagagcgtgtcgagaatgtgaccgactacctctccgaaggcgaggaagtgcaggtgaaggtgctggacgtggatcagcgtggccgcatcaagctgtccatgcgtgaggtggccgccgatggagctgacgcccccgcggattcagtggattctgctgaggctgaggacgagtcactggctcaggagtaa

SEQ ID NO: 257298 - DNA, 1288 bp, Unknown
  Bacterial polypeptide expressing nucleotide sequence isolated from the Sargasso Sea
caagatagatcaaatcaaatttcagaaatcacagataaagccaaaaagctttatgaagaaaatgaaaattatactgatcttgatgtaaactctgagcttaaaaatcttgaaaaatctattgttagaactgatattcttaaaaacaaaaacagaattgatggtaggggtttatcagatgtaagacaaatttcctgcgaagttggagtattgccaagaactcatggatctgcattgttcactagaggagaaactcaagcaattgttactgctacattaggtacatcagatgatgaacaaagaatagagagcttagatggtttaagaagagagagatttatgcttcactataattttcctcctttttcagtcggtgaaactggcagaattggaactggtagaagagagataggtcatggtaaattagcatggagagcaattcattcttcattacctccaatagaatcttttccttatacttttagggtagtttcagagattacagagtctaatggctcttcttcaatggctacagtttgtgggacatcacttgcattaatggatgccggggtacctataaaagagccagttgcaggtatcgcaatgggattaattaaagaaggaaatgatttcagtgttttatctgacattttgggtgatgaagatcatctaggagatatggatttcaaagttgcaggtactaaagatggaattacttcacttcaaatggatattaaaattactggtattacttttgaaatcatggagcaggcattaaatcaagcaaaggaaggaagaattcatattttaggtgaaatgaataaagctttagctaagtctagagcaaatgttggaaaacatactccaaaaatggaaaaagttacagttgataaaaaagatatagcagctgttattggaaaaggtggagcaacaatcagagagatagttgaaaaatcaggtgctaaagttgatgttaacgatgaaggggttgtgacagtggctgctccagacgaagagtctagaaatattgctttgcaaatgattaaagatattactgcaaaggctgaattgaataaaatttattctggtaaagttatgaagattatggagtttggcgcatttgttaattttttaggaaaacaagatggacttgttcatatctctgagttagcagacaaaagagttgctaaagttactgacgttgtcaaagaaggtgatgaagtaaaagttaaagtgattggtttcgatagaggtaaggttaaactttcgatgaaacaagcctctgaataaa

SEQ ID NO: 257299 - DNA, 943 bp, Unknown
  Bacterial polypeptide expressing nucleotide sequence isolated from the Sargasso Sea
ctcggatgacgaacaaagaattgagacattagatggattggttagacaaagatttatgcttcattataattttcccccattttctgtaggtgaaactggtagaataggaacaggaagaagagaaataggacatggaaaattagcatggagagccattaaatcatctttacctccaaaagaaagttttccgtatacatttagaattgtatcagaaatcacagaatccaatggatcatcttcaatggcaacagtttgtggaacttcattagcattgatggatgcgggtgttccaataaaagaaccagtcgctggtattgcaatgggattaataaaagaaggaaaagattttagtgttttatcagatattttaggagatgaagatcacctaggtgatatggattttaaagttgcaggaacaaaaaatggaataacttcacttcaaatggatattaaaattacaggaattacatttgaaataatggaacaagctttaaatcaagctaaagatggaagaattcacatattaggtgaaatgaataaagctttagataaatctagggcagaggttggtaaacatactccaaaaatggaaaaaataactgtagataaaaaagatattgccactgtaattggaaaaggtggtgcaactataagagagatagtagaaaaatctggagccaaagttgatgtcaatgatgaaggcgttgtaacagttgctgcaccagatgaagaatctagaaatattgctctacaatttatcaaagatcttactgctaaagctgaattaaataaaatctataatggtaaagtcatgaaaattatggagttcggagcatttgttaattttcttggtaaacaagatggtcttgtacatatttctgagcttgcagaaaaaagagttgctaaggttactgatgtagttaaagaaggtgatgaaagttaa

SEQ ID NO: 257300 - DNA, 1216 bp, Unknown
  Bacterial polypeptide expressing nucleotide sequence isolated from the Sargasso Sea
atagtaaagattgttgataagcaggatcgtgatactcaaaaaacagtcctaactaatgatgttttatcttctttagaagaaagccatccagaaaaagaaaaagaaataaatggtattatcggtgatcggttcaaagaaaccatgcgagagatgattctagcagaaagcgtccgaagtgatggtcgtggaactaaggatattagggaaattacaattgacccagcaatcctcagcagagttcatggttcagctttgtttaccagaggtgagacacaagcattggtagtaacaacacttggttcaaagagtgatgaaatgattatagacagtatggatgaagattataaaaagaactattatctgcattataattttccaccatattgtgtgggtgaagtaggaagaattggttttaccagtcgacgtgagataggacatggtaatttggcgcagagagccataaagccagccttaccagattatgatgattttccctatacaatccgaattgtatcagagattatggagtcaaatggttcatcatctatggcatctgtgtgtggaggttctctatctctaatgtgtgctggcgcaccattaaaaggacatgttgcagggattgcgatgggtctaattacagatggtaaacggaatgcgatactaagtgatatcttaggtcttgaggatcatcttggggatatggactttaaggttgcgggaactcgagatggaatatctgccattcaacttgatttaaagattgaagggatttcgtttgaattgctaaccgaagctcttcagcaagcttatgatggaagaatgcatatactagataaaatgtatgatgctgtaccagagccatatgaactctctcaatatgcacctagaatactatctattcaaatcaatcctgaaaaaattggtggtttaattgggcctggtggtaaaaatattaaaaaaatcattgaggatacacaatgcgaggttaatgttgatgatgagggtgttgttacggtagctggaaaggatcctggtaaatgtgatgaagctataaaattaattgaggctatcacatttgatcctgaagttggtatggagtttgatgggaaggttacaaggcttatggcatttggagcatttgtagagtttgcacctggtcgtgagggacttgttcatatatcagagctggagtggcacagagtagataaggtgaaga

SEQ ID NO: 257301 - DNA, 1594 bp, Unknown
  Bacterial polypeptide expressing nucleotide sequence isolated from the Sargasso Sea
aaaatatgttcttaatccatcaaaagttgagttagaaaattctaagttagatcttgttgttgcaggaacaaaagatgcagttttaatggttgagtccgaggcgaatggtttaacagaggaagaaatgcttaatgcagtaaaatttggacatgaaaattttattccagtaattaaagcaattgaagaacttgcaaacgaatgtagaaaaactgcatgggaaattgaaaaaaaagatctttcagaagttaaaaaaaatttagagaaagaatttactaaagatttggaaaaagctttttcgataaaagataaaaaagaaagatcagatcttatttctgaaataacggataaagcaaaaaaactttatgaagaaagtgaagatatatcagagcttgatgttaattatgaactcaagaatttagaaaaaagaattgtaagaactaatatattaaagaacaaaagccgtatagatggtagagggttatcggatgtaagaccaataatgtgcgaagttggtattttacctagaactcatggatctgcattatttacaaggggagagacgcaagcaatcgtaacaacaactcttggaacttcagatgatgaacagagaattgaatcattagacgggttagttagagaaagatttatgcttcattataattttccaccattttctgtaggagaaactggtagaatagggactggtcgtagggaaataggacatggaaaattagcttggagagcaataaaatcttctttgccttcaaaagaaaaatttccttatacatttaggattgtttcagaaattacagagtctaacggttcttcatcaatggcaactgtatgtggaacctcattatctttaatggatgcaggtgtcccaatgaaaacgccagtagccggtattgctatgggattaataaaagaaggtgataattttagcgttctatcagatattttaggtgatgaagaccatttaggagatatggattttaaagtagctggcacaaaagatggtattacttcattacaaatggatatcaaaataacaggaattacatttgaaatcatggagcaggcattaaaacaagctaaagatggacgtattcatattcttggtgaaatgaataaagctttagataaatcgagagcaggggttggaaaacacacaccaaaaatggaaaaaataactgtagataaaaaggatattgcaactgtaattggaaaaggtggtgcaactataagagaaattgtagaaaaatcgggagctaaagttgatgtgaatgatgaaggcgtagtaacagttgctgctccagatgaagagtccagaaataaggcaatgcaaatgattaaagatcttaccgcaaaggctgagctaaataaaatttatagtggtaaagttatgaaaattatggagtttggtgcatttgttaatttcttaggaaaacaagacggtcttgttcatatatctgaacttgctaataaaagagttgccaaagtaactgatgtagtaaaagaaggtgatgaagttaaagttaaagtcattggttttgatagaggaaaagtaaaattatctattaaagcagcagtttaa

SEQ ID NO: 257302 - DNA, 1858 bp, Unknown
  Bacterial polypeptide expressing nucleotide sequence isolated from the Sargasso Sea
aaaaattcctggcggatactttaaaagagaaggaagaccaactgaagttgagactctgacctctagattaatagacagaccattaagaccacttttccctgatttctttaaagaagaagttcaggtaaattgcatgttgttgtctttagataaggataatccaccagatgtggttgcaatgttagctgcttcagctgcaatgtctattgctgatgttccattcatggggccaattgctggagcaagagtaggctttatcgatgacgaatatgttcttaatccttcttttgaaaaaatgggtcaatccgatttagatatgatcatagcaggatcagaaaatgctgttttgatggttgaatcagatgctaatgaattaagtgaagacctaatgatcggtggaattctttttgcacatcaagaaatgaaaccagttataaatgcaattaagggttttgcagatgaagtcttgcctgaaagaaccaagcatgaaaataaatatgcagatgaagaaaagcaagcattcgatgctattgactcaaaagttagaggagaccttgttgatgcctttactactactgataaaaaagagagaaatgagaaagtaagctctattaaagataatttaatgcaggacttagatgaggaactacacgatctttatacaaaacagtttaaggaagtagaaaaagatgttgtaagagggaatgtcttaaatgatcagaagagaatagatggaagaggaatgactgaagttagagacataactatagaaactaacttcttgccttcagttcatggttcagctctttttactagaggtgagacgcaagcaattgtcactactacattaggttcaggaagagatgtgcagactgttgatgctcttcaaggagaaataaaagataattttatgcttcactataattttcctagctatagtgttggtgaattaggcttcccaatggggccaaaaagacgagaaataggtcatggagctcttgcaaaaaggtctttaaaatttggagtacctagtttagaggatttcccgtatgccataagagttgtcagtgagatcactgaatcaaatggctccagttcaatggcttctgtttgtggtggaagtcttgcacttatggctgccggcgtgccaatcaaagaaaatgtcgctggagtagcaatgggattgataaaggaaggtgacaaatatgaggttctaacagatatcttgggcgatgaagaccatcttggagatatggactttaaagtagccggaacaaagaatggtgttacgggccttcaaatggatataaaaatagagggtatcaatgaagaaatacttgaaaaagctctaatgcaagccaaagatgccagaatgcatatcttagaaaaaatggatgcagtcctatctaagccactggagttaacaagccttgccccttcttttactaaattcaaagtccataaagacaaagtaaaagtagttattggtaaaggtggatcaacaattaaaggcttacaagaagaatttggcgtaacaattgaattgcaagattctggtgaagtgagtgtatttgctgaaaataaggaaatcgctaaccaagcgaaagaaaaaatagaattactgtgtgctgaacctgaagaaggtaaagtctatgatggtgtagtagctaaagtagtagaatttggcgcatttgtaactatcatgccaggcaaggatggtcttttacatatatctcaatttaaagaagattttgagcacctaacagacgtgatcaatgagggagacactattaaggtgaaacttgttgaagttggaaggcaagggagacttaaattagagtttgctgattcagaataa

SEQ ID NO: 257303 - DNA, 1269 bp, Unknown
  Bacterial polypeptide expressing nucleotide sequence isolated from the Sargasso Sea
tatgaatacaaaagtttataaaaaagaaattaaactgcctgatggcagaattatatcaatcgaaactggaaaattagcaaaacaagcagatggatcagctgttattcaaatgggaaatgccatgcttcttgctacagtggtttcatctagaacaccaagtccagtagattttttacccctaacagttgactatagagaaaaatttgctgcatctggaaaattcccgggtggattttttaagagagaagctagaccttctaatgatgaaatattaactatgagattggttgatagagtattaagacctctatttcccaaagattatcattatgaaacacaagttatgattcaacttatgtctcatgatgaaaatgtaatgcctgattcacttgctggattagcagcctcaaccgttattcaactctctgatattcccttcgaatatccaatttctgaggttcgtgttgccagaatagatggagaattcatagttaaccctagtcgtgaacaacttaatgattctgatattgacattatggttggagccagctacgaatctgtatctatggttgagggggagtttgatgaaatttcagaacaagaaatgaccgatgctataaaatttggacatgatgcaataaaagcacaaatagatgctcaaaatgatcttgtaaatgaagttggcaaaaaagaaaccagagaatacgaaaaagctgttgaaaatgaagatttattaaaaaaagttaatgatgattgttattccaaatgttatgaaattgctaaaaaaggattatccaaaaaagagagatctgaacaattttcagaagttaaagaacaactacttgaatcctttggtgaagaagacttagaagaaaatgaaaatctcattaaaaaatatttttccaaggttgaaaaagaagccatcagagaattagttttaagtgaaggaataaggttagatggtagaaaaacaactaacattagacctatttggtgtgaagttgcatatttaccttcaactcacggatcagcaatttttactagaggagaaactcaagcattagctactgttacgttgggaacatccagagatgcaaacattatagactcaccgacaaaccaaggtgaagaaaatttttatttacactataattttcctccattttccacaggagaagctcgtcctttaagaggaacatcaagaagagaaattggtcatggtaatttagctcaaagagctttaagcaaagttttcccaaatgactgtcc

SEQ ID NO: 257304 - DNA, 1075 bp, Unknown
  Bacterial polypeptide expressing nucleotide sequence isolated from the Sargasso Sea
agtcggtaaggtgctttcagcatttaagaagcttgaaaaagacattgtacggtcaaatattctaaatgatcgtcctcgaattgatggtcgagatttagatacagttagaccaatttttgttgaaactaatattttgccttcagcacatggatcagcactattcactagaggtgaaacgcaggcaatagttgttgctacacttgggtcatcaagagatgctcaaagaatagaatctattgagggcgaagattctgataattttatgcttcattataacttcccagcatatagtgtcggtgaaattggtatgcctatgggaccaaaaagacgtgaaattggtcacggaaatctagcaaaaagagctttgaaagcagtaatgcctgacaccgatgactttggttacacaatgagagtagtttcagagataacagaatcaaatggttctagctctatggcatctgtttgtggaacatctttatcattaatggatgcaggagttccaatatcaagtccagttgcaggcattgcgatgggattaataaaagaaggtgaggattttgcagtcctcacagatattttaggagacgaagatcatcttggtgatatggattttaaagtagctggcactgaatccggaataacagcattacagatggatataaaaattagtggtataaatgaatctattatggagacagcattagaaaaagcaaaaaatgctagaaatcatatattaggaataatgaatgaagttatttcatcaccgaaagatttatccgagaatgctcccgcaatgaaaacatttatggttgataaagataaaataaaagaaattattggtaagggtggatctgttattaaatcaatgcaagaaaagactggcgcaactgttgatatcaatgatgatggagtagtttcggtctttggacaaaatcaatcatcaatgaaagaatgtctggctattattgaagaaatactagaagagccagaattgaataaagtttataaaggtaaagttgtaaaaattgttgaatttggagcttttgttaacattcttcctggaaaggatggctta

SEQ ID NO: 257305 - DNA, 1015 bp, Unknown
  Bacterial polypeptide expressing nucleotide sequence isolated from the Sargasso Sea
agggatatcaatgttgatatcaatgttcttgagagaacacatggatctgcattgtttacccgaggtgaaacgcagtctattgtggtaactactctaggttcagaaagatcttctcaaattatcgatgcactcgaaggtgaatataaagataagtttatgcttcactataattttccaccatactcagttggtgaagttggattcatgggttcaccgaaaagaagagagatcggtcatggcaaattagccagaagagctttagaagctgtattaccaaacatggatgaatacccatatacgattagaattgtctctgaaataactgaatccaatggctcaagctctatggccacagtttgcggttcaagcctttcattgatgcatgctggtgttccaattaaatcacatgttgctggtattgcaatgggactggtcatggaaggtgataaatataaagtcttgactgatatactcggcgatgaagatcacctaggtgatatggactttaaagttgcaggaactgacaacggaataactgcacttcaaatggacataaagatagctggcatcactcaagaaatcatgaaagacgccctcagtcaggcaaaagatgcgaaagatcacattcttaagataatgaatgaagcaatatcatcaccatcagaggaatattcaccatatgcaccatctataattaccataacagttcctaaggataaaatacgtgatgtaataggaaaaggtggagcaacaatacgatcaatcaccgaagtgactggagcccaagttgatatcaatgatgatggaattgttacgattgcatcagtggatcaagagtcaggccttaaagcgaaagaaaaaatagaattactcaccgctgatgttgaagtcaataaagtctatgaaggaagagtagctaaaataatggatttcggagcatttgttacaatccttcctggcaaggatggcttggttcatatttctgagatttcagaagaacgagttgaatcagtga

SEQ ID NO: 257306 - DNA, 919 bp, Unknown
  Bacterial polypeptide expressing nucleotide sequence isolated from the Sargasso Sea
gtaaggcctctatttatagaaactggcgttctaaaaaatacacatggctcggctctttttactagaggcgagacacaagcaatagtgacatctacattaggctctccaagacaagctcagcttatagatgctttggaaggtgagttcaaagatcaattcatgcttcattataattttccaccttactcggtgggtgaggcaggcttcatgtccggtcctaaaagaagagagattggtcatggaaagcttgcaagaagggcgcttgaggcagtattaccatctccggatgattttccttatacaatcagggtagtttctgagattactgaatctaacggttcaagctctatggcaagtgtttgtggttcgagtcttgctttgatggatgctggtatacctttgaaagctgcagttgcaggaatcgccatgggccttgttaaggaaggtgaaggatttgctgtaataactgacatattgggtgacgaggatcatctaggagatatggactttaaggtagctggaacttcggaaggtattacagctctacagatggatataaaaatagatggtattaccgaagaaatatttgaagttgctttagagaaagcccacacagcaagaaatcatattttagctagtatgaacgaagttatttcgtcttctagggaacaattatctgaaaaagcacctcaagctgttgtgatacaaatcaatacaaaaaagataagggatgtaattggtaaaggtggtgaaacaataagaggtcttaccgaagaaactggtgcaataattgaagttgaagacaatggaaaagtaacaatttttggcgatactcctgaatctagagaatctgcacaaaaacgaattgaggaaataactgctgagccggaagtaataaaatctatactggaacagtagc

SEQ ID NO: 257307 - DNA, 820 bp, Unknown
  Bacterial polypeptide expressing nucleotide sequence isolated from the Sargasso Sea
ggtctggacgtacgcaccggcgttctgccgcgtactcacggttctgcgctgttcacccgtggtgaaacgcaggcgctggttaccgcgaccctgggtaccgcacgtgacgcgcaggttcttgatgaactgatgggcgagcgtactgacaacttcctgttccactataacttccctccgtactccgtaggcgaaaccggcatggtcggttctccgaagcgtcgtgaaattggtcacggtcgtctggcgaagcgcggcgtgctggcagtgatgccggaaggcgacaagttcccgtacaccgttcgtgtggtttctgaaatcaccgaatctaacggttcttcctctatggcttccgtatgtggcgcttccctggcgctgatggacgcaggcgtgccgatcaaagcagccgttgcgggcatcgcgatgggtctggtgaaagaaggcgacaactttgttgttctgtctgacatcctgggcgacgaagaccacctgggcgatatggacttcaaagtggcgggttcccgcgacggtatctctgcactgcagatggatatcaaaattgaaggtatcaccaaagagatcatgcaggttgcgctgaaccaggctaaaggtgcccgtctgcacatcctgggcgtgatggaacaggcgattaacgcgccgcgcggtgatatttctcagttcgctccgcgtatccacaccatcaagatcaatccggacaagatcaaagacgttatcggtaaaggcggttctgttatccgtgccctgaccgaagaaaccggcaccaccattgaaatcgaagatgacggtactggaagatcgcagc

SEQ ID NO: 257308 - DNA, 901 bp, Unknown
  Bacterial polypeptide expressing nucleotide sequence isolated from the Sargasso Sea
tttgttaaagcgtataaagaaaaagacaaatcaattagatcaaacacattatctgaaattagaaaaaagattatggatgaatttgttacagaagataatgaagaaattacagaaaatttagtttcctctgcaacaaaaaaagtagaaaaagaattagttagatctagcattttaaaaactggaaaaaggattgatggaagagatactaagactgtcagggatattaaagctgaggttggtttacttagtagagttcatgggagttctttatttacaagaggcgaaacccaagcattagtggtaactacattaggaacaagtttagatgaacaaataatagatgatttagaaggagagtttaaagagaggtttatgctacattataattttccaccatattctgttggtgaagccagtatgcttagaccacctggcagacgtgagattggtcatggtaagttagcatggagagcaattaaaccccttatgcctattaaagataaatttccttatacaattagagtggtttctgaaattacagaatccaatggatcttcatctatggcaactgtttgtggaacctcattatcattgatggatgcaggagttccattagaaaaacctatagcaggaattgctatgggtttaattaaagaaaaagaggattatgctattctttcagacatattaggagatgaagatcatttaggtgatatggattttaaggttgctggaacaaaagatggaatcactgcgcttcaaatggatataaaaattacaggtataactaaagaaattatggaaaaagcactagcccaagctttagatggaagaattaaaattttatcagaaatggacaaggcaattacttcatcgcgtaaagaattaaatagtaatgctc

SEQ ID NO: 257309 - DNA, 863 bp, Unknown
  Bacterial polypeptide expressing nucleotide sequence isolated from the Sargasso Sea
gatgaacaagttaagcggagaaattaaagaacttttccatgatcttgaaaaaaccgtagtgcggaatctcgttcttgaaaagcaatatcgagttgatgggagagggcttgcagatgtccgccccataaacattatgacaagttatttacctcgtgttcatggctctgcggtattcacccgaggggaaacccaggcattagtaacagcaactctaggaacctctgccgatgaacaaaaaatggacagtttagaatttaaaggcaataaatcctttttgctgcattacaatttccccgcattttgtactggagaagtaaaatttatttccggacccggacgaagagaaattggacatgggatgctcgccgagcgttctttgattcctattcttcccggtaaagatgaatttccctataccattcggattgtttccgagattctagagtcaaacggttcttcttccatggcctcagtgtgtggaggctccttatccatgatggatgcaggaattcccattaaagcaccggttgcaggaatcgctatggggctcattaaggaagatgaacggatagccatactatcggatatcctcggttccgaagatcatttgggggatatggactttaaagtggcaggaacagccaatggcattacagcattacaaatggatattaaaatcacaggacttgaccgcgatcttatgaaaacagccctccaacaggcaaaagaaggacgtttgcatattcttggtgaaatggataaagccttagccactccacggaaagaaatcaacaaacacgctccaagaattgtcactctcactgtcccaaaagacaaaattcgcgatgtcatagggccgggcg

SEQ ID NO: 257310 - DNA, 874 bp, Unknown
  Bacterial polypeptide expressing nucleotide sequence isolated from the Sargasso Sea
ggaagtggaagcacctgctgtggatgaagatttaaagaaaaaagtctataaagccgcgcccaagaaaatccagaaagcattgcagatcaaagaaaagcaggaacgatacgcaagtctggacgaagcctccgcagagatcgttactgaagtcggaggggaagaagcagatgaggccgtagtagcagagatcaaatcccatgtaggtgagatcaaaaagaaggaaatgcgtgaaaaactgatcaaggatcaggtccgcattgacggaaggactccgacagagatccgccccatcacctgcgaaacaaaagtgttgcccaggacccatggttcggcgatcttcacccgcggggaaacccaggctttggccgtaacgacacttggcacccgagaagatgagcaaatgatcgatgcgcttcccggagtttcatacaagcatttcatgctgcattacaattttcccagtttttcggtgggagaaacaagagcaccacgcggaccgggacgccgtgaaatcggtcatggcacccttgcagaaagagggctgaccccgatgctgccaaccaaagaggaatttccctacaccatccgcctggtttccgagattctcgaatctaacggttcttcctccatggccaccgtctgtgcaggctcgcttgcgatgatggacgcaggaatccccctgccaagggcaaccgccggcatcgccatggggctgatcagcgaaggagatgatacggtcattctctcagacatccttggggatgaagaccatctcggggatatggatttcaaagtcgtcggaaccactgaagggatcaccgccctgcagatggacatcaaaatccgcggactatcccgtgagatcgttgaaaag

SEQ ID NO: 257311 - DNA, 921 bp, Unknown
  Bacterial polypeptide expressing nucleotide sequence isolated from the Sargasso Sea
aagcaggatttatgtcggacctaaagagaagagagattggtcacggaaaattagctcgaagagcttttgaagcggttttgccttcgccggaggattttccttatactattagagtagtttcagagattactgaatcaaatggttcaagttccatggctagtgtctgtgggtcaagtttagctcttatggatgctggaatacctatgaaagctccagttgctggcatagctatgggtctggttaaggaagatgatggttttgctgttattacagatattcttggtgatgaagatcatcttggagatatggactttaaagtggcaggaactgaagaaggcatcactgctcttcagatggatattaagattgatggcattactgaagagatttttgatgttgctcttgaaaaggctcaaaaggctagaactcatattttaaatagtatgaatcaagttctttctgcatcaagagaagaattgtcagataaagctcctcaggccgttgttattcaaataaacactaaaaagatcagagatgttataggcaaagggggagagactatacgtggtttgacagaagagactggagctattattgaagtagaagatagcggtaaagttactatctacggagacactcctgaatctagagaaagtgctttaaaaaggatagaagaaataactgcagaaccagaagtaaataagatttataccggaaccgtggctaatattatggattttggtgcttttgtaacaataatgcctggaagggatggtttagtgcatgtatcagaaatttctgaagaaagggttgaaaacgtttctgattactttgtggaaggcgaagaggtaaaagtaaaagtacttgaagttgatagacaaggaaagatacgcctgacaatgaaaggcttggaagactaaa

SEQ ID NO: 257312 - DNA, 895 bp, Unknown
  Bacterial polypeptide expressing nucleotide sequence isolated from the Sargasso Sea
gttgaaaagaaaaaacgtatcgtcgagacacctgagacagatattgaactgagaaagaaaatcgaggtagttgcacctgaaagattacgcaaaacattgagcataaaagataagcaagagcgctatgagagtttggatacattgcatgatgaaataagtacagaaattcttggagatgagcccgaaagtgatacagttaaagagtttagtcaaattttttcagatatcaaaaaagaagaaatgcgatcacggttgattaatgaaaatattcgcatagatggacgtaaacctgaagatataagacctataacgtgtgaaacaaaagttctaccaaggacccatggttccgcgctattcactcgaggagagacacaagcactagctactacaacgttaggagcacgtgaagatgaaaaaatgattgataacctagatgggatttcatttaaaagatttatgctgcactacaacttccccagtttcagtgttggcgaaacaagtccccctcgaggacccggcaggagagaaataggtcacggcactcttgcagaaaggggattgagtactctaatacctggaaaaacagaatttccatatacaatcagactagtttcagaaatactagaatcaaacggttcatcttcaatggcaactgtttgcgcaggttcattagcattaatggatgctggggtaccactcaaagcagcttctgcaggaattgccatgggtctgatcagtgacggaaaaaaccatgtaattctttcagacattcttggtgatgaagaccaccttggagatatggacttcaaagtaattggcactgaaagtggtattactgccttgcagatggatattaagatcaaggggctgagtcgtgaagttgtggaaaaatcct

SEQ ID NO: 257313 - DNA, 995 bp, Unknown
  Bacterial polypeptide expressing nucleotide sequence isolated from the Sargasso Sea
tcagacgcagtcttgatggtagaatctgaagctaaagaactttcagaggaaattatgttgaatgcagtaaaattcggacacgaatcgatgcaagaagtcataaaaataattatcaatctcgctgaggagtgcgctaaagatccatgggattttgaacataacgttaatgacgagttgatgaatgagctcaaaagcaaattcgaagatcaaatcaaaaaaagttattcaattgttgataagatggaaagacaaaactctctaaacgaaatcaagtctgttttagaagaagaatatactgatgctgaagatcaaagtattaatgaagtaatgtcatatttcaaaaaaattgaaaaagatgtcgtcaggtctcaaattttgaatgataaatctagaattgatgggcgtaagcttgatgaagtaagaaatatttcttcagaagtatcatggttgcccagaacacatggatcatctttgtttactagaggtgaaacacaagcaatagttgttgcaactcttggttttggggaagatgagcaacgaattgaggcacttcaaggctcttataaagaaaatttcatgcttcattataattttcctccatattcagttggtgaggttggaagaatgggttcagctggtagaagagaaattgggcatggcaaattagcttggagagcccttaaagcggtattgcctaataaagaggattttgattatacaatccgtttagtatcagatattactgaatcaaacggttcatcatccatggcgactgtttgtggatcttcacttgccctaatggatgctggggttcctattaaaaattcagtttcaggtattgcaatgggattaatcaaagaaggtgatgatttcgctgtgttgtctgatattctaggtgatgaagatcatttaggtgatatggattttaaagtagcaggcacaaaagacggtgttacatcattacagatggatataaaaatcaccggaattacata

SEQ ID NO: 257314 - DNA, 896 bp, Unknown
  Bacterial polypeptide expressing nucleotide sequence isolated from the Sargasso Sea
ttcccagtttttcagtggggagaaacgagacctccaagaggacctggccgtcgtgaaattggacatggcaccttagctgaaagaggattagctccgatgcttccaacgaaagaggaatttccctacaccatccgactggtttcagaagttctcgaatccaatggctcttcctccatggccacggtctgtgcaggatctctttcaatgatggacgcaggcatccctctcaagcgtgccaccgccggcatcgccatgggactgatcagcgaaggagatgatatggtcattctctcggatattcttggagatgaggatcatctcggagatatggactttaaagttgtcggaacctctgaagggatcaccgctcttcaaatggacatcaaaatccgcggactgtcccgtgaaatcatagaaaagtccctcaatcaggcccgggatggaaggcttcatattctggacatcatgaatgcctcgatggaggaacctcgaaacgggctatccagttttgctccacgtttcatcacccacaagatcccacgtgacatgataggcaaggtgattggtcctggcggcaaagtgattaaggacatcgtcgaaaaaaccggagttaagatgaacatcgatgacgacggaatcgtatccattgcatccagagatcataaagcggtagatgttgccctggacatggtaagggacctcacacgcaccgtggaaatcggccagacttatactggacccgtcaaaaaagtgatggatttcggtgcttttgtggagctctttccgggaacggaagggcttgtgcatatctccaatctggcacctcagcgggtaaaatgcggttaccgacatctgccgcgaaggagacattgtcacggtcaaggcaatgggcatgg

SEQ ID NO: 257315 - DNA, 870 bp, Unknown
  Bacterial polypeptide expressing nucleotide sequence isolated from the Sargasso Sea
attgatgaagcttttaaaatatctaacaaatctaatcgaaatgaagcgttgaaagttatcagaaatgacattcaagaaaaatataatgagcttgatgagattgaaatggctaaattaatgggagattttaagaaattagaaaaagacatagtcagaaataatattttaaaaaacttacctagaattgatggcagagatcttgatactgtaagaccaatttttgtcgaaaccaatgttttaccagcagctcatggttctgcactttttacaagaggagaaacacaagcaattgtagtggcaactctgggatcctctagggatgctcaaagaattgaatcaattgaaggtgaaggtagtgataattttatgctgcattacaattttcctgcatatagtgttggtgaaattggaatgccaatgggtcctaaaagacgtgaaattggacatggcaacttagctaaaagagctatcaaagcagttttacccgatgtcgatgattttggttatacaatgcgtgttgtatctgaaataactgaatcaaatggttcaagttcaatggcttcagtttgtggtacttctttatcattaatggacgcaggcgtaccactttctagtcctgttgcaggtatagctatgggactcattaaagaaggagatgattttgcagttttaacagatatattaggtgacgaagatcatcttggtgatatggattttaaagttgcgggaactgaaactggaataacagccttacaaatggacataaaaatttctggtattaacgaatctattatggaaacagcattagtaaaggcaaaagtagctagagatcatattttaaaaataatgaacgaaactatatcaaaacaa

SEQ ID NO: 257316 - DNA, 930 bp, Unknown
  Bacterial polypeptide expressing nucleotide sequence isolated from the Sargasso Sea
atagctacggagacccgtttattgccgagagcacacggctctgcactattcactagaggtgaaactcaaggcctagtagttacaacgctaggagctggggattctgagcagataattgatgccttacacaaagagggtagactgaattttatgcttcattataacttcccgccttactcggttggtgaatgcggcagaatggctggccctggccgccgagaaataggccatggaaaacttgcctggagagccttacaagctgtattgccgtcgtctgatgaattcccctatacagtaagagttgtctcagaaattactgaatcaaatggatcatcttcaatggcaaccgtttgtggatcatccctatcaatgatggatgccggagtacctatcaaagctcctgtggctggcgtcgctatgggattaatactagaaggaaaaaagtacgcggtgcttacagacatattaggagatgaggaccatctcggagacatggactttaaggtagctggaacagaggccggtattacttctttgcaaatggatattaaagttgcaggtattactcctcaaattatggaaaaagctttagaccaagcaaaggaagctcgattacacatattaagcgaaatggctaaatctttgtcagcaccatctgaattttcaaaatacgcacctaaaattgagtcgttaaccgttccaaacgataaaattcgtgaagtgattggaagcggtgggaaagtgataaaagaaatcgttgaggtttcaggtgctaaggttgatataaatgatgatggaatggtaagaatagcatctcaaagtaaggaaagcttagaaactgcgagacaaatgataaaagaaatcgttgaagaccctattgttggccaaatttatgagggaaaagttagtaaaattgatggactttggagc

SEQ ID NO: 257317 - DNA, 816 bp, Unknown
  Bacterial polypeptide expressing nucleotide sequence isolated from the Sargasso Sea
agaagcaggctttatgtctggtcctaaaagaagagaaataggacatggtaagttagcaagaagagccttagaggcagtattaccatcacctgatgaatttccttatactattagagtagtttctgaaataactgagtctaatggctccagctcaatggcgagtgtttgtggttcaagtcttgcacttatggacgcaggtattcctcttaaggccgcggtggctggtatagctatgggattggttaaagaagaagaaggattcgcagttattactgatattttaggcgatgaagatcatcttggtgatatggacttcaaagttgcaggaacttcagaaggtataaccgctcttcaaatggatattaaaatagacggaattactgaagaaatattcgaagttgctttagagaaagcacatactgcgaggaatcatatactctcgagtatgaatgaagtaatttcctcgtctagagaacagttatctgaaaaagcaccccaagctgttgttctacagattaatactaaaaagataagagatgtaataggtaaaggtggcgaaactattagagggctaactgaagaaactggtgcaattattgaggtagaggatagtggtaaagtaaccatttatggggatactccacaatccagagagtctgctcaaaaaagaattgaggaaattactgctgaaccagaggtaaataagatctatacagggactgttgcgaatatcaaagactttggtgcttttgtgacaattatgcctggaagagatggactagtgcatgtgtcagaaatctcagaagaaagagtcga

SEQ ID NO: 257318 - DNA, 841 bp, Unknown
  Bacterial polypeptide expressing nucleotide sequence isolated from the Sargasso Sea
tctcgatgctgtaaaaaaagttgaaaagaagattgtgagaactaagttaatcaatggcgagcctagaattgatggtagagatctagacacagtaagaccactatttatagaaactggcgttctaaaaaatacacatggctcggctctatttaccagaggcgagacacaagcaatagtaacatctacattaggctctccaagacaagctcagcttatagatgctttagaaggtgagttcaaagatcaattcatgcttcattataattttccaccttactcggtgggtgaggcaggcttcatgtccgggcctaaaagaagagagattggtcacggaaagcttgctagaagagcgcttgaggcagtcttaccatctccggaagatttcccttatacaatcagggtagtttctgagattactgaatcaaacggatcaagctctatggccagtgtttgcggttcgagtcttgctttgatggatgctggtatacctctgaaagctgctgtggcaggaatcgccatgggccttgtcaaggaagatgaaggatttgctgtaatcactgacatattgggtgacgaggatcacctaggagatatggactttaaggtagctggaacatcggaaggtattacagctctacagatggatataaaaatagacggtattaccgaagaaatatttgaagttgctttagagaaagcccactcagcaagaaatcatattttagccagtatgaacgaagttatttcgtcttctagggaacaattatctgaaaaagcaccccaagctgttgtgatacaaatcaatactaagaagataagggatgtaattggtaaaggtggt

SEQ ID NO: 257319 - DNA, 940 bp, Unknown
  Bacterial polypeptide expressing nucleotide sequence isolated from the Sargasso Sea
aatctctagattaattgacagaccaatcagacctttgtttccagatgaatttaaaaatgaagttcagttattaccaacagtaatttcatacgataaagaaaatgaaccagacattttatcaatcactgcatcttcagcagctttagctatatcaggaatgccatttatgggtcctgtaggtgcttcaagagttggttttatagatggaaaatatgttttaaacccatctaaagcagacttagaaaaatcaaaattagatttagttgtagcaggtacaaaagatgctgtgcttatggttgaatctgaagctaatggtttaacagaagaagaaatgttaaatgcagttaaatttggtcatgagggatttgttccagtgattgaaatgatcgaggaacttgcaaaagaatgcagaaaacctgaatggactgttgaaaagaaagatttatcagaagttaagaagaaacttgaagaaacttttacagaagatcttaagaaagcttttgcaactagagataaacaagatagatcaaatcaaatttcagagattactgataaagctaaaaagctttatgaggaggatgaaaattatactgatctagatgttaatagtcagttaaaaaatcttgaaaaatcaattgttagaaccgatattcttaaaaacaaaaatagaattgatggtagaggcttatcagatgtaagaccaatttcctgtgaagttggtgttttaccaagagctcatggttctgcattgtttacaagaggagaaactcaagcaattgttgttgcaacattaggaacatctgatgatgagcaaagaattgaaagtttggatggattgcatagagaacgatttatgcttcactacaatttcccccctttttcagttggagaaacaggtagaattggaacaggtagaagagaaattggtcatggtaaatta

SEQ ID NO: 257320 - DNA, 1725 bp, Unknown
  Bacterial polypeptide expressing nucleotide sequence isolated from the Sargasso Sea
ccgcaggttaacccggacatcgtggcaatgattggtgcatctgctgcgctgactctgtctggtattccattcaacggcccgatcggtgctgcacgtgttggttacatcaatgaccagtacgtactgaacccgactcaggacgaactgaaagaaagcaagctggacctggttgttgcgggtactgaagcagccgtactgatggttgaatccgaagcagaactgctgagcgaagatcagatgctgggtgctgttgtgttcggtcacgaacagcagcaggttgtgattcaggctatcaacgagctggcgaaagaagctggcaaaccgcgttgggactggcagccagaagccgtcaacgaagcgctgaacgcacgcgttgccgcactggcagaagctcgcctgagcgatgcttaccgcatcactgacaaacaagagcgttatgctcaggttgacgtaatcaaatctgaaaccatcgcgactctggtggctgaagacgaaaccctggacgctaacgaactgggtgaaatcctgcacgctatcgagaaaaacgttgttcgtagccgcgtactggcaggcgagccgcgcatcgatggccgtgaaaaagacatgatccgtggtctggacgtgcgtactggcgttctgccgcgtacccacggttccgcactgttcacccgtggcgaaactcaggcgctggttactgcgaccctgggtaccactcgtgatgcgcagaaccttgacgaactgatgggcgagcgcactgacaacttcctgttccactacaacttccctccgtactgcgtaggtgaaaccggtatggtcggttctccgaagcgtcgtgagattggtcacggccgtctggcgaaacgtggcgtactggcagtaatgccggaactggataaattcccgtacaccgttcgtgtggtttctgaaatcaccgaatctaacggttcttcttccatggcttccgtatgtggtgcttccctggcgctgatggacgcaggcgtgccgatcaaagccgccgttgcgggtatcgcgatggggctggtgaaagaaggcgacaactttgttgttctgtctgacatcctgggcgacgaagaccacctgggcgatatggacttcaaagtggcgggttcccgcgacggtatctctgcactgcagatggatatcaaaattgaaggtatcaccaaagagatcatgcaggttgctctgaaccaggctaaaggtgcgcgtctgcacatcctgggtgtgatggaacaagcgatcaacgcaccgcgtggcgatatctctgaatttgctccgcgtatccacaccatcaagatcagcccggacaagatcaaagacgttatcggtaaaggcggttctgttatccgtgctctgaccgaagaaaccggcaccaccattgaaatcgaagatgatggtaccgtgaagattgctgcgaccgacggcgaaaaagcgaaatatgctatccgtcgtatcgaagagatcaccgcagagatcgaagtaggccgtatctacaatggtaaagtgacccgtatcgttgactttggcgcattcgttgccatcggtggcggtaaagaaggtctggtacacatctctcagatcgctgataagcgcgttgagaaagtgaccgactacctgcagatgggccaggaagtaccggtcaaagttctggaagttgatcgccagggccgtgtacgtctgagcattaaagaagcaactgagcagtct

SEQ ID NO: 257321 - DNA, 1574 bp, Unknown
  Bacterial polypeptide expressing nucleotide sequence isolated from the Sargasso Sea
agcagaattagaaaaatcaaaattagatctagttgtagcaggtacaaaaaatgctgtgcttatggttgagtctgaagcaagtggtttaacagaagaagaaatgttaaatgcagttaaatttggacatgaaggatttgttccagtaattgaaatgatagaggaacttgcaaaagaatgcagaaaacctgagtggatagttgagaaaaaagacttatctgaagttatgaaaaaactcgaggaaacttttacggaagatcttaagaaagcttttgcaacaagagataaacaggatagatcaaatcagatttcagagattactgataaagctaaaaagctttatgaagaagatgaaaactacacagatcttgatgttaacagtcagttaaaaaatcttgaaaaatcaattgttagaacagatattctaaaaaataaaaatagaattgatggcagaggattgtcagaagtaagacctattgaatgtgaagtgggtgttttaccaagagcacatggttctgctttatttactagaggagaaacccaagcaattgttgtagcaactttaggaacatctgatgacgagcaaagaattgaaagtttagatggattgcaaagagaacgatttatgcttcactataattttcctcctttttcagttggagaaactggaagaattggaactggtagaagagaaatcggacatggtaaattagcttggagagcaattaactcttcattacccacaaaagaagcatttccatatacttttagagtagtttcagagattactgagtctaatggttcttcttcaatggctaccgtttgcggaacatctttagcattaatggatgcaggggttccaattaaagagccagttgctggtattgcaatgggattaattaaagaaggtgatgattttagtgtcttatcagacattttaggtgatgaagatcacttgggtgatatggactttaaagttgctggaactaaagatggaattacttctcttcagatggatattaaaattacaggtattacatttgaaattatggagcaggcattgagccaagctaaagatggaagagttcacatcttaggagaaatgaataaagcattgtcagcttcaagatctgatgttggaaaacacactccaaaaatggaacaagttaatgtagataaaaaagacattgctgctgtcattggaaaaggtggtgcaacgatcagagagattgttgaaaaatcaggcgcaaaagtagatgtaaatgatgaaggtgtggtaacagttgctgctcctgatgaggagtctagaaacattgcaatgcaaatgattaaagacatcactgcaaaagctgaattaaacaaaatttattcaggtaaagtaatgaagattatggagtttggtgcatttgttaatttcttaggaaaacaagatggactagttcatatctcagaacttgcagataaaagagttgctaaagttactgacgttgtcaaagaaggtgacgaagtaaaagttaaagtgattggttttgatagaggtaaagttaaactatctattaaacaagctgctgagtaat

SEQ ID NO: 257322 - DNA, 1636 bp, Unknown
  Bacterial polypeptide expressing nucleotide sequence isolated from the Sargasso Sea
aagagaagcaaggccaacagagagtgaaacgttaatctcaagattaattgatagacctattcgacctttatttccagatgagttcaaaaatgaagtgcagatacttccaacagttatttcttatgataaggaaaatgaagcagatgttttatcaattattgcatcttcagcagctttagccatctcaggaatgccctttatgggtcccatcggagcttctagagttggttttattgaaggaaaatatgttctcaatccatcaaagaaagaattagaaaattcaaaattagatttagttgttgccggcacaaaggaagcagttttaatggttgagtcagaggcaaaaggattaactgaagaagaaatgttaaatgcagttaaatttggtcatgaaggttttgtaccaataattgaaactatagaacaacttgcaaaagaatgtaaaaaaactgattgggttatagaaaaaaaagatctttctgaaattaaaaaaaaacttgaaaaagaatttacatctgatttaaaaaaagcttttgcaacaaaagataaacaagacaggtcgaaccagatttcagaaattacagataaggcaataaaactttatgaagaaaatgaaaattattcagatttagatgttaattctcaacttaaaaatcttgaaaaatctattgtaagaactgatattttaaaaaataaaaatcgtatagatggaagaggcctttcagatgtaagaccaatacaatgcgaggttggaatattgcctagagcgcatggttctgcactatttactagaggtgagactcaagcgatagtaaccactacacttggaacttctgatgatgaacaaagaatagaaagtttagaaggattgcaaagagaaagatttatgctgcattataactttcctcctttttcagttggtgaaactggtagaataggaactggaagaagagaaatcggccatggaaaattagcttggagagcaattaattcatctttaccatcaaaagaaatctttccttatacatttagaatagtttcagaaataacagagtctaatggttcttcttcaatggcaacagtttgtggaacatcattagcattaatggatgctggtgttcctatcaaagaaccagtagccggtattgctatgggattaattaaagaaggagatgaatttagagtgctatctgatattttaggagacgaagatcacctaggtgatatggactttaaagttgctggtacaaaagatggtattacatcccttcaaatggacataaaaataacaggaattacatttgaaataatggagaaagctcttaaacaggcaaaagatggaagaattcatattttgggagaaatgaataaagctttagataaatcgagagatggtgttggaaagcatacacccaagatggaaaaaataactgtcgataaaaaagacattgcaactgtaattggtaaaggtggagcaactattagagagatagttgaaaaatcaggagctaaagttgatgtaaacgatgaaggagtagtgacagttgccgcgccagacgaagaatcgagaaataaagctatgaagttcataaaagaccttacagctaaagctgaaataaataaaatttataatggc

SEQ ID NO: 257323 - DNA, 1224 bp, Unknown
  Bacterial polypeptide expressing nucleotide sequence isolated from the Sargasso Sea
aatgttcaaagaatttaaaaaagagatagagttaaatggtaaaaaaataaaattagagacaggaaaaattgcacgacaggctgatggagcagttattgcaacatgcggagaaacagttgttttagcgactgttgttggagcaaaaaaagtaaatccagaagttgattattttccattatctgtaaattatcaggaaaaatattatgcagcaggaaaaattccagggggctacttcaagagagaagcaagacccactgaaagtgaaacattaatttctcgactaatagatagacctataagacctttatttccagatgaatttaaaaatgaagtacagttactaccaactgttatttcttacgataaagaaaatgaagcagatatattatcaattattgcctcttcagcggctctagcaatttctggaatgccatttcttgggcctgttggcgcctcaagagttggatttatagatggtaaatatgttttaaatccatctaaagtagatttagaaaaatcaaaattagatcttgtagtagcaggaacaaaagatgcagtgcttatggttgaatctgaagcaaaaggattatctgaagaagaaatgttaaatgcagtaaaatttggtcatgaaaattttattccagttattgaaatgatagaagaactagccaaagaatgtagaaaacctgaatggacagtcgaaaagaaagatttatcagaggtaaagaaaaagttggaagaagaatttacgaaagacttgaaaaaagcattctctacaaaagataaacaagatagatcaaatcaaatttctgaaatttctgaaaaagcaaaaaagctttatgaggaaaacgaaaattattctgaattagatgttaactcagagcttaaaaatcttgaaaagaaaatcgtcagaacagatattcttaaaaataaaaatagaatagatggaagaggcctcgctgatgtaagacaaatcaattgcgaagtaggtattttacctagagttcacggatctgctcttttcacaagaggtgaaacccaagctattgttactacaactttaggaacttctgatgatgagcaaagaattgaaagtttagatggtcttaaaagggaaagatttatgctccattataattttccaccattttctgtaggggaaactggtagaattggaactggtagaagagaaattggccatggcaaattggctggagagcgata

SEQ ID NO: 257324 - DNA, 1339 bp, Unknown
  Bacterial polypeptide expressing nucleotide sequence isolated from the Sargasso Sea
ttgtttccagatgaattcaaaaatgaagtacaattgcttccaactgtaatatcttatgataaagaaaatgaagcagatattttgtcaattatagcttcatcagctgctttagctatttcaggtatgccattcatgggtcctatagcagcttcaagagttggttatattgatggcaagtatgttcttaatccatctaaaaaagaactagaaaattcaaaattagatttagtagttgcaggaacaaaagatgcagttttaatggtagagtcagaggcaaaaggtctaacagaggagcaaatgttaaatgcagttaaatttggtcatgaaaaatttattcctataattaatataattgaagagcttgctaaagaatgtaaaaaatctgattgggttatagaaaaaaaagatctttcagaagtaaagaaaaaaatagaaactgaatttacctcagatctaacaaaagcattttcaataaaagacaaacaagatagatcaaatcttatttcagaaattactgaaaaagcaaaaaaactatttgaggagaatgaaaattatactgaattagatgttaattatgaattgaaaaatttagaaaaaaaaatagttagaacagatatattaaaaaataaaaaaagaatagatggtagaggattgtcagacataagacctattatgtgtgaagtgggtattttaccaagagctcatggatctgctttgtttactagaggtgaaacacaagcaatcgtaacgactacacttggaacatcagatgatgaacaaagaatagaaagtctagaggggttacaaagagagagatttatgcttcactataattttccaccattttcagttggagaagttggaagagttggcacaggtagaagagagattggacacggaaaactcgcttggaggtctattaattcttctttgccatcaaaagaaagctttccttacacatttagaattgtctctgatataactgagtctaatggctcatcttcaatggcaacagtgtgtggaacttctttagctttaatggatgcaggtgttccaatcaagcaaccggttgctggaatagccatgggattaattaaggaaggaaaagattttagtgttttatctgatattcttggagatgaagatcacttaggagatatggattttaaagttgctggaactaaagatggtataacatcacttcaaatggatatcaaaattactggcattacttttgaaataatggaacaagctttaaaacaagcccaatcgggtagaattcatatattgggtgaaatgaataaagctttaggtaaatccagagaaagtatgggtaaac

SEQ ID NO: 257325 - DNA, 1476 bp, Unknown
  Bacterial polypeptide expressing nucleotide sequence isolated from the Sargasso Sea
aatgtttaaagtaataaaaaaagaaataagctggaatggtaataaactctcaattgaaactggcaaaatagctaggcaagccaatggatcaataatattacgatgtggtgacactgtaattcttgcaacagccgtagcagcaaaaaaagcaaatcctgatactgatttttttccgcttacagtaaattatcaagaaaaatactatgcagctggtaaaataccaggtggctatttcaaaagagaggcaagaccaacagaaagtgaaactttaatttcaaggttaatagatagaccaataagaccattgtttccaagttcattcagaaatgaaacacaagttttagcaacagtattatcttatgacaaagagaacgatccagaagtcttatcagtaattgcaagttcagctgcattaagcgtatcaggcttaccatttatgggccctgttgctgcttctaaggtcggatttatcgaaaataaatttgtgcttaatccaacaaaagatcaattacaaaaatcctctctagaacttgtagtggcgggaacatcaaatgcagttttaatggtagagtctgaagcatcaggattatccgagtcacaaatgcttgaagctgttaagtttggacatgaaaactttaaaccagtaatagaaatgatttcagaaattaaaaagcaagttaaaaaagaagaaattgaaatagagaaaaaagactataaaaatttaaaaaaagatgtttcgcaagaggtagaaaaaaagcttaaaaaagcattttcagaaaaagataaaaaaactagatcaaatttgataaatgaatgtaaagagttgttacaaaaaaaatatgaaaatagcgaggaatatacaaatgttgaggttatggatcagtttaaatctttggaaaaagatatagtaagaaccaatattttaaaaaacaaagtcagaatagatggacgtaaacttgatgaggtgcgagatattgaatgtgaagtaggtattttaccaagatcccatggatctgctttattcacaagaggtgagacacaagcgatagtagcaactactttgtctacatcagaggacgaacaaaaaactgaaagcctagaaggtatgacaagatctagatttatgttgcactataattttccaccattttctgttggagaggtcgggaggatcggaaccggtagaagagaaattggccatggtaaacttgcttggagagcaattaatgcgtctctacccacaaaggaggatttcccatatacaattagaattgtttcagaaataacagagtctaacggttcgtcgtctatggctactgtttgcggttcatccatgtctttgatgcatgctggagtacctttagaaaaaccgatcgcaggtattggcatgggtttaattaaagaaggaagtgaattttcaatcttaagtgatattttaggtgatgaagatcacctaggtgatatggattttaaagt

SEQ ID NO: 257326 - DNA, 2110 bp, Unknown
  Bacterial polypeptide expressing nucleotide sequence isolated from the Sargasso Sea
aatgggtcacgtgaatccaattgtaaagagttttgagtatggtcaacatacagtcaccctggaaacaggtgttattgcacgtcaagcagacgctgccgttttagctagcatgggtgacacgacagtgttagtcactgttgttggtaaaaaagaagctgaagcaggccgtgacttctttcctctgactgttaactatcaagaaaagacctacgcagcaggtaaaattcctggtggtttctttaagcgtgaaggtcgtccttcagaagatgagacattaatcgctcgcctgatcgaccgtccaattcgtcctcttttccctaatggcttcacaaacgaagttcaagtgatcattactgttgtatctgtcgatccacaaatcgagccggatattatttcaatgatcggtacttcggctgcgcttgctatttcgggtatcccattcagcggcccattaggtgcagcgcgcgtgggttatatcaatggcgaatacgtactgaacccaactgttgaacagttagcgactagccaattaaacctagttgttgctggtactgaaagcgcagtactgatggttgagtcagaagctcaagccttaccggaagaagtgatgttaggctctgtggtttacggtcatgaccaacagcaagttgtggtcaaagccatcaacgaattcaaagcggaagcaggcaaaccagcgtggaactggactgcacctgtggcgaacgaagccttagttgctcaagttaaagaattagctgaagcaggttttgttgaagcgtatcaaattcaagttaaacaagagcgttatgctcaagttgctgtggttaaagccgctgctaaagaagcgctgctggctgcaaacccagaagtggatttacgtgaagttgacggtctgctcggtagcttagagaagaaagtagttcgtggtcgcatcatccgtggtgagccgcgcatcgacggtcgtgagccagacatggttcgcgcattaagcgtattagctggcgtattaccacgtactcacggtagtgcactgtttacccgtggcgaaactcaagcactggtaacttgtactttaggtactgagcgtgatgcacagaagattgatagtatcatgggcgagcgtactaaccgctttatgctgcactacaacttccctccttactctgtgggtgagactggtatggtgggttcacctaagcgccgcgaaatcggccacggtaaattagcatggcgcggtatcaacgcggttatgccaacggctgaagaattcccatacagcgttcgcgtggtttctgaaatcactgaatcaaacggttcaagctctatggcttcagtatgtggtacttctctggcgctgatggatgcgggtgtacccatcaagacttctgtagcgggtattgctatgggtctagttaaagaaggcgatgacttcgttgttctgtctgacatcttaggtgatgaagaccacttaggtgacatggacttcaaagtagccggtacccgtgatggtgtgactgcgctgcagatggacatcaagatcgaaggtatcaccaaagaaatcatggaaattgcactgcaacaagcctacggcgcacgtgtacatatcctgaacgtaatggaccaagcgattggttcacaccgtgatgatatctctgaccacgctccacgtatcacaactatcaagatcaaccctgagaagatccgtgatgttatcggtaaaggcggcgcggtaattcgtgctctgaccgaagaaactggcaccactatcgaactggaagatgacggtactgtgaagattgcttcgtcaaatggcgatgcaacccgtgaagccatccgtcgtatcgaagaaatcacttcagaagttgaagtaggtcgtatctacaacggtaaagttatccgtatcgttgacttcggtgccttcgtgaacattctgccaggtaaagatggtttagtgcacatttcgcaaatcagcgatgagcgtgttgctaacgtctctgaccaccttgaactgaaccaagaagtgactgttaaggtcatggaagtggatcgtcaaggccgtgtacgtctgtcaatcaaagaagcacaggctaaagaacctgctgctgaataa

SEQ ID NO: 257327 - DNA, 1471 bp, Unknown
  Bacterial polypeptide expressing nucleotide sequence isolated from the Sargasso Sea
atgtttaaaataataaaaaaagaaatagaaataggtggaaaaaaaatatcacttgaaacaggaaaaatagcaagacaagcagatggagcggtgattgctcagtgtggtgaaacagttgttatggctactgttgtaggagctaaaaaggtaaaccctgatgttgactactttcctttgtcagtaaattatcaagaaaaatattatgcagcaggtaaaattcctggaggatattttaaaagagaagctagaccaactgagaatgaaacattaatatctagattaattgatagaccaatcaggccattattccctgatgagtttaaaaatgaagttcaactgctaccaacggtaatttcttatgacaaagagaatgaagcagatattttatcaattatagcttcatcagctgctctcgccatttcaggaatgccatttatgggtccagtaggtgcatctagagtcggatttattgatggcaaatatatattaaacccttcaaaaattgatttagagaattcaaaattggatttagttgtagcaggcacaaaagatgcagttttaatggttgagtctgaagcaaaaggtttaacagaggaagaaatgctgaatgcagtaaagtttgggcatgatgcttttgttccaataattgaaatgattgaacaacttgcaaaagaatgcaaaaaacctgattggatagtagagaaaaaagatctttctgatgtgaaaaaaaagctagaagaagaatttacatctgatttaaaaaaagcttttgcaacaagagataaaaaagatagatcgaataaaatttctgaaattaccgataaagctaaaaaactttttgaggaaaatgaaaattattctgacttagatgtcaattctcagcttaaaaatcttgaaaagtctattgttagaactgatattttaaaaaataaaaaccggattgatggaagaggtctttcagatgtgagaccaattgaatgcgaagttggaatattacctagagttcatggatctgctttatttactagaggcgaaactcaagcgatagtaactactacattaggaacctcagatgatgaacaaagaattgaaagtttagatggattacaaagagaaaggtttatgcttcactataattttccaccattttcagttggcgagacaggtagaattggaactggaagaagagagattggacatgggaagttagcatggagagcaataaactcatctttaccatcaaaagagagttttccatatacctttagaatagtatcagagataaccgagtctaatggatcatcttctatggcaactgtttgtggaacctctttagctttaatggatgctggtgttccaattaaagaaccagtagcaggtattgcaatgggcttaattaaagagggaaatgattttagcgttctatctgatatcttaggagatgaagatcatttaggtgatatggatttta

SEQ ID NO: 257328 - DNA, 1432 bp, Unknown
  Bacterial polypeptide expressing nucleotide sequence isolated from the Sargasso Sea
ggttatttaggaatagagaatatgtttaatccagtaagtaaaagttttgagtttggtggacaaaaagtgactttggagaccggtaaggttgcaaggcaggcgactggggcagtaatcgttagtatgggtgcaacccaagtgctggcaactgtcgttggcaggaagcaagcaaatccgggccaagatttttttccgctcacggtaaattatcaggaaaagacttatgcagtggggaaaattcccggaggtttttttaagcgagagggaaggcctacagagaaggaaactttaacgtcacggttgatagatagacccattcgccctttgtttcccaaaggttttatgaatgaggtgcaagtcatctgcaccgttatatctggcggaaaggaagaggatccggatatccctgcattgataggtgcgtcagcggcgcttgccatttctgggattccgtttgctgagccgattggtgctgcccgcgttggatatgactcagagaaaggatatatattgaatccaaactacgaacagctagaagaatctatgcttgatatggtagtggctggaactcaatctgcagtcttgatggttgaatcagaagcaaaacaattaacagaagaccaaatgcttggagcggtgcttttcgcgcatcaagaaatgcaggtcgtaattaatgccattaatgagttgaaggctgaagccggcaaggaaccttgggtttgggaacccccagaaaaaaatactgtcttggcatcagttgttgccgacaaatttggctcaggagtaacagaggcctatcagatttcggaaaaaatgacccgttatgatgcaatctctaacttaaagcaacaggctatcgatgaaatagttgatgaagaggctggagtctctgagagtgaagtaggggagatcttcagtgctctagaaaaaagcacagtccgaaaccgcattttggatggagccccccgtattgatggacgagatactaagaccgttcgtaagattgaggtagaaactggcgtattggggaaagctcacggttcggcactttttacacgtggtgaaacacaagcattggttgtgacaactctgggtgcagttcgcgactctcaaataattgaagatcttagcggctcaagaaaagatccgtttatgctgcactacaactttccaccctattctgtgggcgaggctgggtttatgagcggcccaaaacgacgggaaattgggcatggacgtctcgcaagacggggtgttgcggcggtgatgccgaatgaagaagatttcccctatgccattagagtcgtatcagagataactgaatctaatggttcgagttccatggccagcgtgtgcgggagcagtctatctatgatggatgctggtgtcccactttcggcacctgttgctggtatcgcgatggggcttatca

SEQ ID NO: 257329 - DNA, 1363 bp, Unknown
  Bacterial polypeptide expressing nucleotide sequence isolated from the Sargasso Sea
agaaacattagtttcaagattaattgatagacctataagacccttatttgctgatggctttaaatgtgaaacgcaagtcattgctacagttataagttatgatactgaaaatgatgcagatatagttgcattgatagcatgttcagccgctctaaccttgtcaggcgttccttttatgggtccaattggtgcagctagggttggcttcaaagatggagaatatatattaaatcctacaaatgaagaaatggaaacttctgatcttgaccttgtagtcgctggaacaaaagatgctgttttaatggtagagtctgaagctaaagaattatctgaagaacaaatgttaggcgcggttacttttgggcaagaaaatttttctcaagtcattgattctataatcaatttagctgagaaagcagcaaaagagcctagagaatttcaaaaaaaagatacatctgatattgagaataaagtaagctcaattgttaaagatgatttatcaaaagcatataaggaagcggataaacaaaaaaggactgaaaaaattgctgagattaaaaaaagtcttatttctgaattagtttctgatgataatgaagatgaagaaaacaatgaatcaacagtatcatccgcttttaaaacaattgaaaaaaatattgttagaaatagtatcttagatactggtgaaagaattgatggtcgtgatctagaaacagtcaggcctattcaatccgatgtcagtgttttaccacttacacatggttcagcgctcttcacaagaggagaaactcaggctttagtagtcactactcttggaacaggagacgatgaaaaatttgttgatggtttagatgaaacctataaagaacgatttatgcttcattataattttcctccttattcagttggtgaaactggaagaactggttttactgggagaagagagataggtcatggtaaattagcttggagagctcttaaagcagtaatgcctgaatatgattcctttccttatacaatcagacttgtttctgaaataactgaatcaaatggatcttcatctatggctactgtttgtggatcttctttgtctatgatggatgctggtataccgttgtctaaaccagtggctggtatagccatgggtctaattaaagaagatgataaagttgctgttttatcagacattcttggagatgaagatcatcttggagatatggatttcaaagttgctggaacaaatgatgggatcacttctttgcaaatggatattaaaattactggcatcaccaaagatattatggaaactgctttatcgcaggcgaaaaatggaagaattcatattctagaagagatggctaag

SEQ ID NO: 257330 - DNA, 2074 bp, Unknown
  Bacterial polypeptide expressing nucleotide sequence isolated from the Sargasso Sea
atgtttaaagtatacaagaaggaaattgaagtagcgggaaagaagataagtttagaaacaggtaaagtagcaagacaggcagacggtgcagtaatcgcaacatgtggtgagacagtcgtactagcaacagtggtgggagcaaaaaaagtaaatcctgatatggattactttccattatctgtaaattaccaagaaaaatattatgcagctggaaaaattccaggtggatattttaaaagagaagcaagaccaactgagagtgaaacattaatctctagattaattgatagaccaatcagacctttgtttcctgatgaatttaaaaatgaagtacagttattaccaacagtaatttcatatgataaagaaaatgaaccagatattttatcaatcactgcttcatcagctgcattagccatatcaggaatgccattcatgggacctgtgggagcttcaagagttggttttatagatggaaaatatgttttaaacccatctaaaacagatctagaaaaatcaaaattagatttagttgtagcaggtacaaaagatgctgtgcttatggttgagtctgaagctaatggtttaacagaagaagaaatgttaaatgcagttaaatttggtcacgaaggttttgttccagtgattgaaatgatcgaagaacttgcaaaagaatgcagaaaacctgagtggactgttgaaaagaaagatctatcagaagttaagaaaaaacttgaagaaacttttacagaagatcttaagaaagcttttgcaactagagataagcaagatagatcaaatcaaatttcagagattactgataaagccaaaaagctctatgaggaagatgaaaattacactgatctggatgttaacagtcagttaaaaaatcttgaaaaatcaattgttagaactgatattctaaaaaacaaaaatagaattgatggtagaggcttatcagatgtaagacctatcgaatgtgaagttggtgttctaccaagagcacatggttctgcattgtttactagaggagaaacacaagcaattgttgttgcaactttaggaacatctgatgatgaacaaagaattgagagcttagatggattgcaaagagaacgatttatgcttcattataatttccctcctttttcagttggagaaacaggaagaattggaacaggtagaagggaaatcggacatggtaaattagcttggagagcaattaattcttcattacctacaaaagaagcatttccatatacttttagagtagtttcagagattactgaatctaatggttcttcttcaatggctactgtttgtggaacttctttagcattaatggatgctggagtaccaataaaagagccagttgcaggtattgcaatgggattaattaaagaaggagatgatttcagtgttctatcagatattttaggtgacgaagatcacctgggtgatatggactttaaagttgctggaactaaagatgggattacttctcttcaaatggatatcaaaattacaggtattacatttgaaattatggagcaggcattaagccaagctaaagatggaagggttcatatcttgggtgaaatgaataaagcattatcagcttcaagatctgatgttggaaaacacactccaaaaatggaacaagtcaatgtagataaaaaagacattgctgcagtaattggaaaaggtggtgcaacaatcagagagatagttgaaaaatcaggtgcgaaagtagatgtaaatgacgaaggtgtggtaacagttgctgctcctgatgaggagtctagaaacattgcaatgcaaatgattaaagacatcactgcaaaagctgaattaaacaaaatttattcaggtaaagtaatgaagattatggagtttggtgcatttgttaatttcttaggaaaacaagatggactagttcatatctcagaactagcagataaaagagtagctaaagttactgacgttgtcaaagaaggtgacgaagttaaagttaaagtgattggtttcgatagaggtaaagttaaactttctatgaaacaagctgctgaataat

SEQ ID NO: 257331 - DNA, 1314 bp, Unknown
  Bacterial polypeptide expressing nucleotide sequence isolated from the Sargasso Sea
ccgccctttatttcctgaaggatttgtaaacgaagttgcaattgtacttttgccgttggcagttgatttaacctgtcctttggattggttagctgttgtaggcgcaaatgcagcattgtcattgtctgatattccttttaatggccaagttgctgcttcaaatatagcttatgtagataatgaaatgattgttaatcccacatatgaacaactcgataatagtgattttgatcttttagtttcaggatcaaaggatggagtggtaatgattgaagctgaaggccaagaaatagatgaagatttaatgtataaagcgattgaaaaatcacaggaaattaatattgatataatgaataatcttgatagctttatcaataaacatggtaaagacaatgttgagtttaattacgaatttaatgaatcaatatattctgaactttctagtgctttgaaagatcaattaaaaggcgtatacaagaaagatagtacaaaatctgaaaaagaagatgaaataaaagaaataataaactcttatgtagaaagtaaaaactctgaagaaacatatgataatgagatagaccaattgaaagcagatgtttttagaagtattactttagatgaaaaaatcagagtggatggtagaaattttgatcaaatacgagatttgagtggatcagtagatttgattcctaaagtgcacggaagtggacttttcactagaggtgaaactcaagtgttatcattagtaacgttaggatcatcaagagattaccaaagattagataccttaaccccgctagaagaaaaaagatttatgcttcattataactttcctccgtattcagttggagaggctaggccaatgagatctccaggtagaagagaaataggtcatggacaattagctgaaaaagccttagctcaagtgcttccagatactgatgaatttccttatgcaataagaattgtggctgaatgtttacaatctaatggtagtacatcaatgggaactgtatgttctgctactttagctttgatggatgcaggtgttcctattaaaaaaccagttgctggaatttcagttggaatgatatctgataatgataaatatgatgttatgttagatattcaaggaatcgaagatcattatggtgatatggactttaaagtagctggaactgatacaggaattactgcgattcagttagatataaagaaaaaatttatatctatggaagtagttagaaaagcgttagacattgctcaaaaaggacgttcagatattcttcaaactattgactcagtttttgcaaa

SEQ ID NO: 257332 - DNA, 2074 bp, Unknown
  Bacterial polypeptide expressing nucleotide sequence isolated from the Sargasso Sea
atgtttaaagtacacaaaaaggaagttgaagtagcaggcaagaaaataagtttagaaacaggtaaagtagcaagacaggcagacggagcaattatagcaacatgtggagagacggtagttttagcgacagtcgttggagcaaaaaaagtgaatccagacatggattactttccattatctgtaaattatcaagaaaaatactatgcagcaggaaaaattcctggtggatattttaaaagagaggcaagaccaactgaaagtgaaacattaatctcaagattaattgatagaccgatcagaccattgtttcctgatgaatttaaaaatgaggtccagttgttaccaactgtaatttcttatgataaagaaaatgaggcagacattttatcaattattgcatcatctgcagccttagctatatcaggaatgccatttatgggccccgttggtgcttctagagttggatatattgatggtaaatatgttttaaatccatcaaaaactgaacttgaaaaatcaaaattagatttagttgttgctggtacaaaagatgctgtgcttatggttgagtctgaagcaagcgggttgacagaggaagaaatgttaaatgcagtaaaattcggtcatgaaggatttgttccgttgattaaaatgatagaggaattggctaaagaatgtagaaaacctgagtggactgttgaaaagaaagatttatctgaggtaaagaaaaaactcgaggaaacttttaccgcagatcttaaaaaagcattcgcgacaagagacaaacaagacagatcaaatcaaatttcagaaattactgataaagcaaaaaaactttatgaggaagacgaaaactatacagatcttgatgtaaattctgaactaaaaaatcttgaaaaaacaatagtcagaacagatattttaaaaaataaaaatagaattgatggtaggggtttgtctgatgtaaggccaatctcatgtgaggttggtgttttgccaagaacacatggctctgctttatttaccagaggcgaaacgcaagcaattgtaactgccacattaggtacatccgatgatgagcaaagaattgaaagcttagatggattacaaagagaaaggtttatgcttcattataatttcccacctttttctgttggtgagacaggcagaataggaactggtaggagagaaataggtcatggtaaattagcatggagagcaattcactcttcattgccttcaaaagagtcatttccttatacttttagagtcgtatcagaaataacagagtccaatggttcctcatcaatggctaccgtttgtggaacatcacttgcattaatggatgcgggagtaccaataaaagaacctgttgcaggtatcgcaatgggtttaattaaagagggtgatgattttagtgtgttatcagatattttgggtgatgaagatcatttaggtgatatggactttaaagttgctggaactaaagatggaattacttctcttcaaatggatattaaaattacaggtataacatttgaaatcatggagcaggcactgagccaagctaaggatggaaggattcatatcctaggagaaatgaataaagcattatcagcttcaagatctgatgttggaaaacacactccaaaaatggaacaagttaatgttgataaaaaagacattgccgctgtaattggaaaaggtggcgcaacaattagagagatcgttgaaaaatcaggtgcaaaagtagatgtaaatgatgaaggtgttgttacagttgctgctccagatgaagagtctagaaacattgcaatgcagatgatcaaagacatcactgcaaaagctgaattaaacaaaatttactcaggtaaagtaatgaaaattatggaatttggtgcatttgttaatttcttaggaaaacaagacggacttgttcatatctcagaacttgcagataaaagagtagctaaagttactgacgttgttaaagagggtgacgaagtaaaagttaaagtcatcggtttcgatagaggtaaagttaaactttctatgaaacaagctacagaataat

SEQ ID NO: 257333 - DNA, 1972 bp, Unknown
  Bacterial polypeptide expressing nucleotide sequence isolated from the Sargasso Sea
tgtggagaaacagttgttttggcgactgcagttggagcaaaaaaagttaatccagatatggattactttccgttgtcagtaaattatcaagaaaaatattacgcagctggtaaaattccaggtggatattttaagagagaagcaagaccaacggatagtgagactttaatttcaagattgattgacagacctatcagaccacttttcccagatgaatttaaaaacgaagttcaggtactaccaacagtaatatcttacgataaagagaatgaagcagatattttatcaattattgcctcatcagctgcgttagcaatttcaggaatgccatttttaggccctgtcggtgcgtctagagttggctttattaaaggggaatacattcttaatcctactaaagcagaacttaaagactcaaaacttgatcttgtagtagcaggaacaaaaaatgcagttttaatggttgagtccgaggcaagtggtttaactgaggaagaaatgttaaacgctgttaagtttggccatgaaggatttgttccagtaattgaaatgatagaggaactagccaaagaatgcaaaaaacccgattggacagttgagaaaaaagatctttcagaagtaaaaaataaattggaaagcgaatttacagaggaacttaaaaaagcattttcaataaaagataaacaggaaagatcgaatttaatctcagaaataactgataaagcaaaaaagctttatgaagaagatgagaattataccgatcttgacgtaaattctgagcttaaaaatttagaaaaaaggattgtcagaacagatattctaaaaaataaaaatagaattgatggtagaggtcttgcagatgttaggccaattatgtgtgaagttggaattcttccaagagttcatggttctgctttgtttactcgaggagaaactcaagcaatagttacaacaacacttggtacatctgatgatgagcaaaaaatagaaagtcttgaaggattacaaaaagaaaggtttatgcttcattataattttccacctttctctgttggagaaactggtagaataggcaccggaagaagagaaataggtcatggaaaattagcttggagagcaataaattcttctttgccttctaaagagagttttccctacacatttagaattgtatcagagataactgagtcaaacggttcttcttctatggcgactgtttgtggttcatctttagctttgatggatgcaggcgtgccaattaaagaaccagttgctggtattgcaatgggattaattaaagaaggagatgatttcagtgtactttcagatattcttggagatgaagatcacctaggtgatatggactttaaagttgccggaactaaagacggaataacatctcttcaaatggacattaaaattacaggaataacctttgaaattatggagcaagctttaaaacaagcaaaagatggaagaattcatattctaggcgaaatgaataaagctttatctaaatcaagagaagatgttggaaaacatactcctaagatggagaaaattactgtagataagaaagatattgctacagtcattggaaaaggtggagcaactataagagaaatagttgaggtatctggtgccaaagttgacatcaatgacgaaggtgaagttacagtagctgctccagatgaagagtctaggaataaagctatgcaaatgattaaagacttaactgctaaagctgaactcaataaaatttataatggaaaagtaatgaaaattatggagtttggtgcgtttgttaatttcctaggaaaacaagatggccttgttcacatatcagagcttgctgataaaagagtcggcaaagtaactgatgtagtaaaagaaggtgatgaagttaaagttaaagtaataggctttgatagaggaaaagttaagttatcaattaaacaagctgcaatataaa

SEQ ID NO: 257334 - DNA, 1174 bp, Unknown
  Bacterial polypeptide expressing nucleotide sequence isolated from the Sargasso Sea
tgtcagaaaaaatgttttagagggtaagccaagaattgatggtagagatagtaaaaccgttagaaatatttcaatagagacaggtttacttgaaagaactcatggaagcgccttatttacaaggggagaaactcaagctttagttgtaacaacgcttggaactgatagagattcacaaattattgacgcgttagaaggtgaatataaagatagattcatgcttcattataatttcccaccttactctgttggcgaatgtggttttgtaggttcccctaaaagaagagagattggtcatggaagattagcgaaaagagcagttgtcccagtaattcctgaagaaaaagatttcccatacgttttaagagtagtatctgaaattacagaatctaatggttcgagttcaatggcaagtgtttgtggagcaattttgtcgttaatggatgctggcgtgccaattaaatctcctgttgcgggtatagctatgggtcttgtaaaagagggtgataaatatacagttctttcagatattctaggcgacgaagatcaccttggagatatggactttaaagttgcgggcacagaaaacggtgttactgcattacagatggatattaaaatcgacggaataactcaagaaataatgcaagttgctctgaaacaagctagagatgggcgaatacatattttaaataaaatgagtgatgcaatatcaaaaccaaatgacgatgtatctaagtttgcacctagatttataacaattaaaattaatccttctaaagtaaaagatgtaattggtaaagggggcgctactataagatctcttacagaagaaaccggtgctgttatagatatttctgatgatggttcaataaaaatatcgtcatcaaatcttgaagccgcagaatctgcgaagaaaaaaattgaaactctgactgaggatgtagaagttgataaaatttatgaaggtaaagtagttaaaattatggactttggtgcttttgtaagtgtcttaccaggaaaagatggtttagtgcacatatctcagattagtagtgaaagagttgaaaatgttactgacaaagttaatgagggagatatagttaaagtaaaggttatagaaatagataaacaaggaagaataaaattatctatgaaagctgtcgataattaa

SEQ ID NO: 257335 - DNA, 2074 bp, Unknown
  Bacterial polypeptide expressing nucleotide sequence isolated from the Sargasso Sea
aatgtttaaagtacacaagaaggaaatagaagtagcaggaaagaaaataagtttagaaacaggtaaagtagcaagacaagcggacggagcaatcatcgcaacatgtggtgaaacagttattctagcaacagtcgttggagcaaagaaagtaaatccagatatggattatttccctttatcagtcaactaccaagaaaaatattatgcaggtggaaagatccctggtggatattttaaaagagaagcaagaccaactgaaagtgaaacattaatctctagattaattgatagaccaatcagacctttgtttcctgatgaatttaaaaatgaagtacagttgttgccaacggtaatttcttacgacaaagaaaaccaaccagatattctagcaatcactgcttcatcagcagcattagctatttcaggaatgccatttatgggtcctgtaggtgcctctagagtgggctatattgacggtaagtatattcttaacccatcaaaagaagagttggaaaattcaagtttagatctagttgtagcaggtactaaagatgcagtgcttatggttgagtctgaaacatcaggtctatctgaagaagtaatgttagcagcagttaaatttggtcacgaaggatttgttccagtaatcgaaatgattgaggaacttgcaaaagaatgtagaaaacctgagtggactgttgagaagaaagatttatctgaagttaaacaaaaacttgaggaaacttttacagaagatttaacaaaagcttttgcaaccagggacaaacaagatagatcaaatcagatttcagaaattactgataaagctaaaaagctttttgaagaaaatgaaaattattctgatcttgatgttaactcacagcttaaaaatctagagaagaaaattgttagaactgatattcttaaaaataaaaacagaattgatggtagaggattatctgatgtaagacctatcgaatgtgaagttggtgttttaccaagaactcacggttctgctttgtttactagaggagaaacacaagcaattgttgtaaccactttaggtacatctgatgatgaacaaaggattgaaagtttagatggtcttcaaagagaacgatttatgcttcactataattttcctcctttttcagtcggtgaaactggaagaattggaactggtagacgtgaaattggtcacggtaaacttgcttggagagcaatcaattcttcattaccttcaaaagaggcttttccatatacttttagaatagtatcagagattacagaatctaatggttcttcttcaatggctactgtttgtggagcatctctagcattaatggatgcaggtgttccgataaaagaaccagttgcaggtattgcaatgggtttaattaaagaaggagatgattttagtgtcttatcagatattttaggtgatgaagatcacttaggggatatggactttaaagttgctggaactaaagatggaattacttcacttcaaatggatatcaaaattaccggtatcacttttgaaatcatggagcaggctttaaagcaggctaaagatggaagaattcatattttaggtgagatgaataaagccttaggcgaatctagatctgatgttggaaagcacactccaaaaatggaacaagtaactgttgataaaaaagacattgctgctgtaattggaaaaggtggagcaactattagagagatcgttgaaaaatcaggtgcaaaagtagatgtaaatgatgaaggagttgtaacggttgctgctcctgatgaggagtctagaaacattgctatgcaaatgatcaaagatattactgcaaaagctgaaatgaataaaatttattcaggaaaagttatgaaaatcatggagtttggtgcatttgtaaattttttaggaaaacaagatggactagttcatatttcagaactagcagataaaagagttgctaaagttactgacgttgtcaaagaaggcgacgaagtaaaagttaaagtaattggtttcgatagaggtaaagttaagctttctatgaaacaagctgctgaataa

SEQ ID NO: 257336 - DNA, 1225 bp, Unknown
  Bacterial polypeptide expressing nucleotide sequence isolated from the Sargasso Sea
aatgtttaaagtatataaaaaagaaatagaagtagcaggaaagaaaataagtttagaaacaggcaaagtagcaagacaggcagatggagcagttattgcttcatgtggagaaacagttattttagcaacagtggtaggtgcaaagaaagtaaacgcagacatggattactttccattatcagtgaactaccaggaaaaatattatgctggtggaaaaataccaggtggttattttaaaagagaggcaaggccaactgagagtgaaacattaatctcaagattaattgacagaccaatcagacctttgtttcctgaagagtttaaaaatgaagttcaattattaccaactgtaatttcatatgacaaagaaaaccaaccagatattttagcaattaccgcttcatcagcagcactagctatctcaggaatgccttttatgggccctgtaggtgcatctagggtaggctttgttgatggcaaatatgttcttaatccatcaaaaactgaattagaaaattcaagtttagatttagttgtagcaggcacaaaagatgctgttcttatggttgagtcagaagcaaatggtttaactgaagaagaaatgttaaatgcagttaaatttggacatgaaggctttgttccagtaatcgaaatgattgaggaacttgcaaaagaatgtagaaaacccaagtggactgttgagaaaaaagatttatctgaagttaagcaaaaactagaagaaacttttacagaagacttgaagaaagcttttgccacaagagacaaacaagatagatcaaatcaaatttcagagattactgataaggctaaaaaactttatgaagaaaatgaaaatttcacagatctagatgtaaatacagaacttaaaaatcttgaaaaatctatagttagaacagacattcttaaaaataaaaacagaattgatggtagaggtttatcagatgtaaggcctatctcatgtgaagttggtattttaccaagaactcatggttctgctttatttactagaggagaaacccaagcaattgttgttaccacattaggtacatctgatgatgaacaaagattagaaagtttagatggacaacaaagagaaagatttatgcttcactacaattttccgccattctcagtcggtgaaactggtagaattggaactggaagacgtgaaattggacatggaaaacttgcttggagagcaatt

SEQ ID NO: 257337 - DNA, 1510 bp, Unknown
  Bacterial polypeptide expressing nucleotide sequence isolated from the Sargasso Sea
aatgtttaaaatagtaaaaaaagaattatcattaaatggtaagaaaatttcaatagagactggtaagattgcaagacaagcagatggtgcaataattgcaaagtgtggtgaaacagtagtattggcaactgtagttggtgcaaaaaaagttaaccctgaagtagattattttcctctatctgtaaattatcaagagaaatattactcagcagggaaaatcccaggtggatattttaaaagagaggcaagaccaactgaaagcgaaactttaatatcacgattaatagatagaccaattaggcctttattcccagacgaatttagaaacgaggtacaactattaccaacagtcatatcttatgataaagaaaatgaggcagatatactttcaataattgcatcttcggctgcacttgctatttcaggaatgcctttcatgggtccaattgctgcttctcgagtaggatttatcgatgggaaatatgttttaaatccatctaaaaaagaacttgagaattcaaaactagatttagtagtagctggtactaaggatgcagttttaatggtggagtccgaagcaaatggtctatctgaacaacaaatgttagatgctgtaaaatttggtcatgaaaattttattcctatcattgaaatgatagagaaatttactaaagaatgtaaaaaaccagattggactattgaaaaaaaggatctaactaaattaaagaaaaatttagaaaaagaatttactaaagatttaaaaaaagctttttcactaaaagataaacaagagagatcaaatttaatatctgatgtttcagagaaagctaaaaagctttatgaagaagatgagaatattacagatttagatgttatgtatgaactaaaaaatcttgaaaaagatattgtaagaacagacataattaaaaataagaatcgtattgatggaagaggtcttgctgacgttcgaccaattatgtgtgaagttggaattttgcctagagttcatggatctgctttatttacaagaggtgaaacgcaagcaattgttactactacactgggcacatctgatgacgaacagagaattgagaccttagatggactacaaagagaaagatttatgcttcactataattttcctcctttctcagttggagaaactggaagaattggcactggaagaagagagataggacatggaaaattagcttggagagctattaattcatctttgccatctaaagagagttttccatatacatttagaattgtctcagaaataactgaatcaaatggatcatcttcaatggcaactgtttgtggtgcttctttagctttgatggatgctggtgttccaataaaagaaccagtagctggaattgcgatgggacttataaaagaaggtgataattttagtgttctatcagacattttaggcgacgaggatcatttaggtgacatggactttaaagttgcaggtactaaagatggaataacttctcttcaa

SEQ ID NO: 257338 - DNA, 1861 bp, Unknown
  Bacterial polypeptide expressing nucleotide sequence isolated from the Sargasso Sea
gactactttccgttgtctgtaaattatcaagaaaaatattatgctgccggaaaaattccaggtggttactttaaaagagaggcaagaccaaccgaaagtgaaactttaatatcaagattaatagatagaccaatcagaccattgtttcctgatgaatttaaaaatgaagtacaactattaccaactgtaatatcttatgacaaagagaacgagcctgatattttatcaattattgcatcatcagctgctttggccatctcgggtatgccattcatgggtcctgtgggagcttctagagttggctttattaaaggagaatatgtgcttaacccatcaaagaaagaactagaggagtctaaattggatttagtggttgccggtactaaagatgcagttttaatggtcgagtcagaagcaaatggtttaacagaggaagaaatgttgaatgcagtaaaatttggtcacgaaggttttatcccaataattcaaatgattgaagatcttgcaaaagaatgcagaaaaccagaatgggttgttgaaaaaaaagatctttctgaaataaaaaagaaattagaggaagaatttacagaagatctgaaaaaagcattctctactagagataaacaggatagatcaaatcaaatttccgaaataacggaaaaagcaaaaaaactttatgaggaaaatgaaaattacacagatttagatgtcaactctcaacttaaaaatttagagaaatctatagtaagaactgacatactaaaaaataaaaatcgtattgatggaagaggtcttgcagatgtaagaccaattatgtgtgaagtaggtattttgcctagagttcatggatctgcattatttacaagaggtgaaactcaagcaattgttacaactactctaggtacttcagatgatgaacaaagaattgaaagtttagatggtcttcaaaaagaaagatttatgttgcattataattttccaccattctcagttggtgaaactggtagaattggaacaggtcgaagagagataggtcatggaaaattagcatggagagcaattaattcgtcactaccatcaaaagaaagtttcccttatacatttaggattgtatcagaaataactgagtcaaatggttcatcctcaatggcaactgtttgtggaacttctctagctcttatggatgcaggcgttccaattaaagaaccagttgcaggaattgcaatgggtttaattaaagaaggtgatgattttacagtattatcagatattcttggtgatgaagatcatcttggagatatggattttaaagttgctggaacaaaagatggaattacatcattacaaatggatattaagatcactggaattacatttgaaattatggaacaggcattaaatcaagctaaagatggaagaattcatattttaggagaaatgaataaagcgctttctaaggcaagagataatgttggtaaacacacaccaaaaatggaaaagattacagttgataaaaaagatattgctgctgtgataggaaaaggtggtgcaacaattagagaaatagttgagaaatctggagcaaaagttgatgtcaatgatcaaggtgaagtaacggttgctgcacctgacgaagaggctagaaatattgcaatgcaaatgatcaaagacataactgctaaggctgaattaaataaaatctataatggaaaagttatgaaaattatggaatttggtgcttttgtaaatttcttaggaaaacaagatggattagttcatatttcagaacttgcagacaaaagagttgctaaagtaacagatattgtcaaagaaggtgacgaagttaaagttaaagttattg

SEQ ID NO: 257339 - DNA, 1279 bp, Unknown
  Bacterial polypeptide expressing nucleotide sequence isolated from the Sargasso Sea
ctgcttaccttttgcatcgaatcaagtatacttgcacgcgaatttaaagcgccaaattgtaaaaaggaaattcacgtgaatcctattgtaaagtcattccagtacggtcaacacaccgtcactctggaaaccggagtgatggcccgtcaagccactgcggccgtcatggtcagcatggacgatacctgcgtatttgtgaccgtagttggcaagaaagaggccgatcacggccgtgatttcttcccgctgaccgtcaactaccaggagcgtacctatgctgctggtcgtatcccgggtggtttcttccgtcgtgaaggccgtccgagcgaaggcgagaccctgatctcccgtctgatcgaccgtcctattcgtccgctgttcccggaaggcttcctcaatgaggttcaggtggttgccaccgtcatgtccgtgaacccggccgtttctcccgacatcgttgccatgatcggtgcctccgcggcgctggccatctccggtatcccgttcggcggcccgatcggtgcagcccgcgtgggttacatgaacggtcagtacgtgctgaacccgaccactaccgaactgccgcagagcgatctggacctggtagtggccggtaccgccaacgccgtgctgatggttgaatccgaagcggccatcctctccgaagaggtgatgctgggtgccgtggtattcggtcacgagcagatgcaggccgttatcaacgccatcaacgaattcgctgccgacgtcggcaccaagccgtggaactggactgctcctgccgtcaacgaagcgctgaaagccaaggtggccgagctggcgacagccgagctgggtgaagcctaccgcatcaccgagaaagccgtgcgttacgaaaccatcggtgccatcaaggctcgcgtggttgagcaagtgatcgcttccggcgtggaagaagatgccaagaagatcggcgaagagttccacagcctggaaagccgcatcgtccgtggtcgcgtcgtccgtggcgagccgcgcatcgatggtcgcgatccggagatgatccgcgccctgtccgtcgccaccggcgtactgccgcgtgcccacggctccgccctgttcacccgtggtgagactcaggccatggtcgttgccaccctgggtaccgagcgtgacgcccagaacatcgacgagctgaccggcaaccgcgccgatcgcttcatgttgcactacaacttcccgccatactgcgtcggtgagaccggcatgatgggtagcccgaagcgtcgtgagatcggtc

SEQ ID NO: 257340 - DNA, 1273 bp, Unknown
  Bacterial polypeptide expressing nucleotide sequence isolated from the Sargasso Sea
aatgtttaaagtatataagaaggaaattgaagtagcaggaaagaaaataagtttagaaacaggtaaagtagcaagacaggcagacggtgcaataatcgcaacatgtggagaaacggtcgttttagcaacagtagtgggagcaaaaaaagtaaatcctgacgtagattattttccattatctgtaaattaccaagaaaaatattacgcagcaggaaaaattccaggtggatattttaaaagagaagcgaggccaacagaaagtgaaacactaatttctagattaattgatagaccaatacgacccttgtttcctgatgaatttaaaaatgaggttcaattgttaccaactgtaatttcttacgataaagaaaatgaagcagatattttatcaattacagcttcatcagcagcattggctatatcaggaatgccatttaagggccctgttggagcttctagagttggatatattgatggaaagtatgttttaaatccctctaaagtagaattagaaaaatcaaaactagatttagttgtagcaggcacaaaagatgctgtgcttatggttgagtctgaagcaagtggtttaacagaggaagaaatgctaaatgcagttaaatttggtcatgagggatttgttcctgtaattgaaatgattgaggaacttgcaaaagaatgtagaaaacctgagtggactgttgaaaagaaagatctttcagaagttaagaaaaaacttgaagaaacttttactgatgatcttaaaaaagcttttgcaacaagagataaacaagatagatcaaatcaaatttcagagataactgataaagctaaaaaactttatgaagaagatgaaaattattctgatctagatgttaactcagagcttaaaaatttagaaaaaacaattgtaaggaccgatattctaaaaaacaaaaatagaattgatggtcgaggattatcagatgtgagacctattttatgtgaagttggtattttgccaagaactcatggttcagcattatttactagaggagaaactcaagcaatagtagttgcaactttaggaacttcggatgatgaacaaagaattgaaaatctaaatggtctccaaagagaaagatttatgcttcactataactttcctcccttttcagtcggagaaactggaagaattggaacaggtagaagagaaatcggccatggtaaattagcatggagagcaattcactcttcattaccaacaaaagaggcatttccatacacttttagagta

SEQ ID NO: 257341 - DNA, 2173 bp, Unknown
  Bacterial polypeptide expressing nucleotide sequence isolated from the Sargasso Sea
aatgcatgaattcaaaggagcaaccatgtccatgttcaacaaggtcgtgaaggaattccagtggggccagcacaaggtgcgcctcgaaaccggtgaagtcgctcgccaggcaagcggcgccgtgatcgtcgacgtggaagacaccgtcgtgctggcaaccgtcgtcggcgcgaagtcggcgaagccgggtcaggatttcttcccgctgaccgtcgactacctcgagaagacctactcggccggcaagatcccgggcggcttcttccgtcgcgaaggccgtccgtcggagcacgagacgctgacgtcgcgcctgatcgaccgtccgctgcgcccgctgttcccggaaggcttctacaacgaagtccaggtcgtgatccacgtgctgtccgtgaacccggaaatcccggcggacatccccgcgctgatcggcgcatcggctgcgctcgccgtgtcgggcctgccgttcaacggcccggtcggtgccgcacgcgtggcctacatcgacaacgcgtacgtgctgaacccgacgcgtgaccagatcaaggcatcgagcctcgacctcgtcgtcgcaggtacggaacgtgccgtgctgatggtcgaatcggaggccgatcagctgtcggaagacgtgatgctgggcgccgtggtgttcggccacgagcaaatgcaggtcgcgatcgacgcgatccacgaactggtgcgcgaaggcggcaagcctgagtgggactggcagccggcgccgaagaacgaagcgctgatcgcgcgcgtgaccgagctggcacagaacgacctgctcgctgcttaccagctccgcgacaagcaggcgcgctcgacgaagctgaaggaagtctacgcagcaacctcggcgaagctcgaggaagacgcgctggcggccggtacggtcgcagccgacaaggcaacggtcggcaacgtgctgttcgacatcgaagccaagatcgtccgttcgcagatcctgaacggcgagccgcgcatcgacggccgcgacacgcgcaccgtgcgcccgatcgaaatccgcaccggcgtgctgccgcgtacccacggctcggcgctgttcacgcgcggcgagacgcaggcgctggtcgtcgcgacgctcggcacgaagggtgacgagcagatcatcgacgcgctcgaaggcgagtaccgcgagcgcttcatgctccactacaacatgcccccgttcgcgaccggcgaaacgggccgcgtcggctcgccgaagcgccgcgaaatcggccacggccgcctcgcgaagcgtgcactggtcaagtgcctgccgagcgccgacgaattcggctactcgatccgcgtcgtgtcggaaatcaccgaatcgaacggttcgtcgtcgatggcatcggtgtgcggcggctgcctcgcgctgatggacgccggcgtgccgatgaaggcgcacgtcgcgggtatcgcgatgggcctgatcctcgaaggcaacaagttcgcggtgctgaccgacatcctcggcgacgaagatcacctcggcgacatggacttcaaggtggccggcacggaacaaggcgtgacggcactgcagatggacatcaagatccagggcatcacgaaggaaatcatgcaggtcgcgctcgcgcaggcgaaggaaggccgcatgcacatcctcggcaagatgacgtcggcggtttcgggtgcgaacacgcaactgtcggaattcgcgccgcgcatgatcacgatcaagatcaacccggaaaagatccgcgacgtgatcggcaagggcggttcggtgatccgcgcgctgacggaagagaccggcacgaccatcgacatctccgacgacggcgtcgtgacgatcgcgagcacgagcagcgacggcatggccgaagcgaagaagcgtatcgagcagatcacggccgagatcgaagtgggtcaggtgtacgaaggcacggttctgaagctgctcgatttcggtgcgatcgtgaacctgctgccgggcaaggatggcctgctgcacatctcggaaatcgtcaatgagcgtgtgaaggacatcaacgactacctgaaggaaggccagcaagtgaaggtcaaggtcatccagacggacgaaaagggtcgtgtgcgtctgtcggcgaaggcgctgctgaacgaagcagcggcggcgtcgcagtcggacacgccgccgcagcagtaa

SEQ ID NO: 257342 - DNA, 1963 bp, Unknown
  Bacterial polypeptide expressing nucleotide sequence isolated from the Sargasso Sea
gttgttttagctacagttcgcgttggtgcaaaaaaggtaaatccagatatggactactttccattatctgtaaattaccaagaaaaatattatgcagctggtaaaatcccaggtggatattttaaaagagaagctagaccaactgaaagtgaaacacttatctcaagattaattgacagacctatcagaccgctgtttccagatgaatttaaaaacgaggtacaacttttaccaacagttatatcttatgataaagagaatgaagcagatattttatctatcattgcatcctcagcggctttagcaatctcaggaatgccttttatgggcccagttggagcatctagagttggcttcattaaaggaaagtacgttcttaatccttcaaaaaaagaattagaagaatctaaactagatttagttgtagcaggaactaaagatgcggttttaatggttgagtcagaggcaaatggtttaacagaggaagaaatgttgaatgctgttaaatttggacacgaaggtttcgttccaataatagaaatgattgaagatcttgcgaaagaatgtagaaagcctgaatggacagttgagaagaaagatttatctgaagtaaaaaagaaattagaggaagaatttactgaagatttgaagaaagctttctctacgagagataagcaagatagatcaaaccaaatttctgaaattactgaaaaagctaaaaaattatatgaggaaaatgaagcttacactgatttagatgtaaattctcagcttaaaaatttggaaaaatccattgtaagaactgatattcttagaaataaaaatcgtattgatggaagaggtctagcagatgtaaggccaattttgtgtgaagtaggtatattgccaagagttcatggctcagcactatttacaagaggagaaactcaagcaattgttacaactaccctaggtacatctgatgatgagcaaagaattgaaagtttagacggtcttcaaaaagaaagatttatgcttcactataacttccctccattttcagttggtgaaactggtagaattggaactggtagaagagagataggccatggtaagttagcttggagagcaataaattcttctttaccatcaaaagaaaactttccctatacttttagaattgtttcagagataactgagtctaatggctcgtcatcaatggccactgtttgtggaacttcgttagctcttatggatgcaggtgtaccaataaaagagccagttgctggaattgcaatgggtttgattaaagagggtgatgatttttcagtgctttcagatattttaggtgatgaagatcacttaggtgatatggattttaaagttgcaggtactaaagatggcataacatctttacaaatggacattaaaatcactggaattacatttgaaattatggagcaggcattaaatcaagcaaaagacggaagaattcatattttgggtgaaatgaataaagcattagataaatctagagatgatgttggaaagcataccccaaaaatggaaaaaattacggtcgataaaaaagatatagctgctgtgattggaaaaggtggtgcaacaattagagaaattgtagaaaaatcaggtgctaaagttgatgtcaatgacgaaggtgttgttacagttgctgctccagatgaagaatctagaaatactgccatgcaaatgatcaaagatataacagctaaagctgagttaaataaaatttataatggaaaagttatgaaaataatggagtttggtgcatttgttaatttccttggaaagcaagacggacttgtgcatatttctgagcttgcagataaaagagttgcaaaagtaacggatgttgtaaaagaaggtgatgaagttaaagtaaaagttattggatttgatagaggaaaagttaaattatctataaagcaggctgctatataga

SEQ ID NO: 257343 - DNA, 2074 bp, Unknown
  Bacterial polypeptide expressing nucleotide sequence isolated from the Sargasso Sea
atgtttaaagtagtaaagaaagaaatagaaatagcaggaaaaaaaataagtttagagacaggaaagatagcaagacaagcagatggagcaattgttgcacaatgcggtgaaacagttgtacttgccacagcagtaggagcaaaaaaagtaaatccagatgtagattactttcctttatcagtaaattatcaagagaaatattatgcagcaggtaaaattcctggtgggtattttaaaagagaagcaaggccaacagaaagtgaaacattaatctcaagattgatagatagacctataagacctttgtttccagatgaattcaaaaatgaagttcaagtacttccgaccgtaatttcatatgacaaagaaaatgaggcagatattttatctatcattgcttcttcagcagctttagcgatttcaggaatgccatttatgggacctgtaggtgcttctagagttggctttattgaaggaaaatacattcttaatccttctaaggaagaaatgaaaaattcaaaattagatttagttgtggcaggaacaaaagacgctgttctaatggtagaatctgaagctaatggtttaactgaagaagaaatgttaaatgctgtaaaatttggtcatgaaggttttgtgcctgtaattcaaatgatagaagatttagcaaaagagtgcaaaaaacctgattgggtagtagagaaaaaggatctttcagaagttaagaaaaaacttgaggaagaatttacaggtgatttaaaaaaagcttttgcaacaagagataaacaagatagatcaaatcaaatttcagaaatcacagacaaagccaaaaagctttatgaagaagatgaaaaatattcagatttagatgttaattcacaacttaaaaaccttgaaaaatctattgttagaactgatattttaaaaaataaaaatcgtatagatggtagaggtctttcagatgttagaccaattgagtgtgaagttgggatattgcctagaactcatggttctgcactatttactagaggtgaaactcaagcgatagtaactaccacgcttggaacttctgatgatgaacaaagaattgaaagtttagagggattacaaagagaaagatttatgcttcattataattttccaccattttcagttggtgaaacaggacgaattgggactggcagaagagaagttggacatggaaaacttgcttggagagctattaattcctctttaccatctaaagaaagttttccttacacttttagaattgtatctgagattactgaatctaatggttcatcttctatggcaacggtatgtggaacatcattagcattaatggatgcgggtgtaccaatgaaagagcctgtagcaggaattgcaatgggactaataaaagaaggagatgattttagtgtattgtctgacattcttggtgatgaagatcatttaggcgatatggattttaaagttgccggaacaaaagatggaattacatctcttcaaatggatatcaaaattacaggtattacttttgaaattatggagcaggctttaaatcaggccaaagatggtagaattcatatcttaggtgaaatgaacaaagcacttgataaatcaagagctgatgttggtaaacacactccaaaaatggaaaaaataactgttgataaaaaggatatagcagccgtaattggtaaaggtggcgcaacaataagagaaattgttgaaaattcaggtgctaaagtagatgttaatgatgaaggcgtagtaacagttgctgctccggacgaagagtctagaaataaagcaatgcaaatgatcaaagacatcacagctaaggctgaattaaataagatttataatggaaaagtcatgaaaattatggaatttggcgcatttgttaactttttaggtaaacaagatggtctagttcatatatcagagctagcagacaaaagagttgcaaaagtaaccgatgttgtaaaagaaggtgatgaagtaaaagttaaagtcattggatttgatagaggaaaagtaaaactttctattaagcaggctgcagtttaat

SEQ ID NO: 257344 - DNA, 1783 bp, Unknown
  Bacterial polypeptide expressing nucleotide sequence isolated from the Sargasso Sea
atgtttccagaaacttttaagaatgaggtccaaatatttagcacagtgatgtcttctgacaagacacaaaatccagatatcgctgcaatgataggagcatctgctgccttaactatttcaggagtaccttttgatggtccaatgggggcagctagggttgggtttatagatggagagtatattttaaacccatcatttgaacaattggataattcttatttagatatggttgtagctggaactgatgaagctgttcttatggtagagtctgaagcaaaagaattaaatgaagatcttatgctaggtgcagttctttttggtcaccaagaaatgaaagctgttatcaacgcatgcaatgaattaaaaaataaggctggaaaagaagagtgggttattgaagaagatgaaaatgttactaactattattctgatgttgaaagcaaatacaaagatgaaataactgaagcttttacaatatctaataagtcagatcgcaatgaagctctagctactattaaagctaaaatagtcgaaggatattcagatttagatgaatttgagctcggtaaagttttaagctcttttaaagaattagaaaaaaatattgttagaggcaatatattaaataatatgcctagaatagacggaagagatttggatacagtaagacctatttttgttgaaacagacgttcttccaagcgcacatgggtctgcattatttacaagaggagagactcaagctattgtagttgcaacacttggctcttctagagatgcgcaaagaattgaagcaatagaaggtgagggctcagataattttatgcttcattataatttcccggcatatagtgttggtgagattggtatgccaatgggtccaaaaaggcgtgagatcggacatggcaatttagcaaaaagagcaattaaagctgtattaccagatgtcgatgaatttggttataccatgagagttgtttcagaaatcacagagtctaatggttcaagctcaatggcttcagtctgcggcacatctttatcattaatggatgctggagttcctctttcaagtccagttgctggtatagctatgggactcattaaagaaggtgatgactttgcagttctaactgatatcttaggggatgaagatcatttaggggatatggacttcaaggttgctggaactgaatctggtataactgctcttcaaatggatattaaaattaagggtataaatgaatcaattatggaaaccgcattagcaaaagctaaaaatgcaagaaatcatatattgggcataatgaatgaagtaatttcatcagccaaagatttatctgaaaatgccccagcaatgaaaacatttatagttgataaagataaaattaaagagattattggtaaaggcggtgctgtaataaaaggaatgcaagaaaaaactggagcaacagttgatgtaaatgatgacggtgttgtttctgtatttggtcaaaatcagtcatcaatgaaagaatgcttggctattattgaagaaattttagaagaacctgaattaaataaggtatataaaggcagagttgttaaaattgtagaatttggcgcttttgtaaatatacttccaggaaaagatggccttttacacatttcagagatctctgatgaaagaactgagaacgttagcgatgtcttagaagaagatcaagagattgatgttaaattaattgggtttgataggggtaaaatgaaactttctatgaaagcattatctgataaaaacgattaat

SEQ ID NO: 257345 - DNA, 1453 bp, Unknown
  Bacterial polypeptide expressing nucleotide sequence isolated from the Sargasso Sea
aatgtttaaagtatataaaaaggaagtcgaagtagcaggaaagaagataagtttagaaacaggtaaagtagcaagacaggcagacggtgcaataatcgcaacatgtggagagacagtcgtactatcaacagtggtaggggcaaaaaaagtaaatcctgatatggattactttccactatctgtaaattaccaagaaaaatattacgcagctggaaaaattccaggtggatattttaaaagagaagcaagaccaactgaaagtgaaacattaatctctagattaattgatagaccaatcagacctttgtttcctgatgaatttaaaaatgaagttcagttattaccaactgtaatttcatatgataaagaaaatgaaccagatattttatcaatcatagcatcatcagccgcattagctatatcaggaatgccatttatgggtcctgtaggagcttcaagagttggttttattgatggtaagtatgttctaaatccatcaaaggcagatttagaaaaatcaaaattagatttagttgtagcgggtacaaaagacgctgtgcttatggttgagtctgaggcaagtggtttaacagaagaagaaatgttaaatgcagttaaatttggacatgaaggatttgttccagtaattgagatgatcgaggaacttgcaaaagaatgtagaaaacccgagtggactgttgaaaagaaagatctatcagaagttaagaaaaaacttgaagaaacttttacagcagatcttaagaaagcttttgcaacaagagataaacaagatagatctaatcaaatttcggagattactgataaagctaaaaagctttatgaggaagatgaaaactatactgatcttgatgtaaacagtcagttaaaaaatcttgaaaaatcaattgtcagaacagacattttaaaaaataaaaatagaattgatggcagaggtttatcagacgtaagacctatcgaatgtgaagtaggtgttttaccaagagcacatggttctgcattatttactagaggagaaacacaagcaattgttgtagcgactttaggaacatctgatgatgagcaaagaattgaaagtttagatggattacaaagagagagatttatgcttcactataattttcctcctttttcagttggagaaacaggaagaattggaaccggtagaagagaaataggacatggtaaattagcgtggagggcgatacattcttcattgccatcaaaagaagcatttccctatacttttagagtagtttctgaaattacagagtctaatggttcgtcttcaatggctactgtctgtggcacatcattagcattaatggatgcgggtgtgccgattaaagaaccagtcgctggtatagcaatgggtttaattaaagagggtgatgattttagtgttttgtcagatattttaggtgatgaagatcat

SEQ ID NO: 257346 - DNA, 1420 bp, Unknown
  Bacterial polypeptide expressing nucleotide sequence isolated from the Sargasso Sea
atgttcaaagtttttaagaaagaaattgaagtagcaggaaaaaaaataagtttagaaactggcaaaattgctagacaagcagatggagcaataatcgcaaaatgcggtgaaactgtagtaatggctacggtagttggtgcaaaaaaagttaacccggatgtagattattttcctttatcggtaaactatcaagaaaaatattatgcagcgggcaaaataccaggaggatacttcaaaagagaagcaagaccaactgagagcgaaacattaatttctagattgattgatagaccaatcaggcctctattccctgatgagttcaaaaatgaagttcaattactaccaactgtaatttcatatgacaaagaaaacgaagcagatattttatcaattattgcatcttcagcagctttagcgatttcaggaatgccgtttatgggtccggtaggagcatcaagagttggttttattgatggtaaatatgttttaaatccatcaaaaattgacttacaaaaatcaaaattagatttggttgttgccggcactaaagatgctgtgcttatggtcgagtctgaagcaaaaggcttaaccgaggaagagatgttaaatgcagttaagtttggtcatgaaaattttgtccctataattaaaatgatcgaggatcttgctaaagagtgtagaaaaccagactgggagattgaaaaaaaagatcttacagaaattagaaaaaaacttgaaagtgaatttacggatgatttaaaaaaagcattctctacaagagacaaacaagacagatcaaatcaaatttccgaaataacagagaaagctaaaaaattgtatgaggagaatgaaaatttcacagatttagacgtcaattacgaacttaaaaacttagaaaagagaattgttaggacagatattcttaaaaacaaaaataggattgatggaagaggtcttgcagacgtacggcctatcatgtgtgaagttggaattttacctagagttcatggatcagcattatttacaagaggagagactcaagcaatagtcacaacaacattaggaacttctgatgacgaacaaagaattgaaagtttagatggtctacaaagagaaaggttcatgctacattataattttccaccattctcagtaggagaaactggcagaattggcacaggaagaagagaaattggacacggtaaacttgcttggagagctataaattcttctttgccaccaaaagaaagttttccatacacttttaggattgtttcagaaataacagaatcaaatggttcatcttctatggctacagtttgtggatcatcacttgctctgatggatgcaggtgttccaataaaagagccagtagcaggtattgcaatgggactgattaaagaaggtgatggattttagt

SEQ ID NO: 257347 - DNA, 1309 bp, Unknown
  Bacterial polypeptide expressing nucleotide sequence isolated from the Sargasso Sea
ttgatagacctatcagaccattatttcccagaggaatttaaaaatgaggtccaggttctcccaacagtaatatcttatgataaagaaaatgaagcagatattttatcaattattgcctcgtcagctgccttagcaatttcaggaatgccatttttgggtcctgttggtgcttctagagttggctttattaaaggagaatacgtacttaatcccaccaaagcagaacttaaagactcaaaacttgatcttgtagtagcaggaacaaaagatgcagttttaatggttgagtccgaggcaagtggtttaactgaggaagaaatgttaaatgctgttaagtttggccatgaaggatttgttccagtaattgaaatgatagaggaactagccaaagaatgcaaaaaacctgattggatagttgagaaaaaagatctttcagaagtaaaaaataaattggaaaatgagtttactgaggaacttaaaaaagcattttcaataaaagataaacaagaaagatcgaatttaatctcagaaataactgataaagcaaaaaagctttatgaagaagatgagaattatactgatcttgatgtaaattctgagcttaaaaatttagaaaaaagaattgtcagaacagatattctaaaaaataaaaatagaattgacggaagaggtcttgcagatgttagaccaattatgtgtgaagttggaattcttccaagagttcatggttctgctttgtttactcgaggagaaacacaagcgatagttacaactacacttggaacatctgatgatgaacaaaaaatagaaagcttggagggtctacaaaaagagagatttatgcttcattataattttccacctttctcagtaggagaaactggtagaataggtactggtagaagagaaataggtcatggaaaattagcttggagagcaataaattcttctttgccttccaaagagagttttccctacacctttagaattgtatcagagataactgagtcaaacggttcttcttctatggcgactgtttgtggttcatccttagctttgatggatgcaggtgtaccaattaaagaaccagttgctggtattgcaatgggattaattaaagaaggagatgacttcagtgttctttcagatattcttggagatgaagatcacctaggtgatatggactttaaagttgctggaactaaagacggaataacatctcttcaaatggacattaaaattacaggaataacatttgaaattatggaacaagccttaaaacaagcaaaagatggaagaattcacattc

SEQ ID NO: 257348 - DNA, 1489 bp, Unknown
  Bacterial polypeptide expressing nucleotide sequence isolated from the Sargasso Sea
cgagcaacttcaaactgtggttagcgcagttaatgaatttgctgctgaagttggcactgagaagtgggactgggcaccagaagcagaaaacactgcgcttaaagacaaagttaaagcactagctgaagcagaaatgactgcggcttaccagatttctgacaagttagagcgtaaagacgcagtaactgcagcaactgaaaaagcactagaagctatccttgctgaagacgaagaacaagataagaaagaagtactagaccttcttcacgatcttgagtctgacgttgtacgttcacgcattctatctggcgcgccacgtatcgatggtcgtgacccagcaatgatccgtgcactagacgtagcaactggtattcttcctcgtactcacggttctgcactatttactcgtggtgaaacgcaggcacttgtagctgctacgcttggtacagagcgtgacgcacagatgattgacgagcttcaaggtaagcgcgacagccgtttcatgcttcactacaacttccctccatactgtgttggtgaaaccggtatgattggttcgcctaagcgtcgtgaaattggtcacggtcgtctagcgaagcgtggtattcaagcagtaatgccaagtgaagaagaattcccgtacgtagtacgtgtggtttctgaaatcacagaatcaaacggttcatcttcaatggcgtcggtatgtggtacttcactagcgcttatggatgcaggtgttccaattaaagcgtctgttgcgggtatcgcaatgggcctagttaagagtgacgacaactttgttgtactttcagacatccttggtgacgaagatcaccttggcgacatggactttaaagtagcgggtactaccgaaggtattactgcacttcaaatggacattaagattgaaggtattactaaagaaatcatgcaaattgcgcttaaacaagcaaaagaagcacgtttgcacattcttaacgtaatggacgaagcgattggcggtcaccgtgaagagctaagtgaatttgctccacgcatttacacaatgaagattgaccaagacaagatccgtgacgttatcggtaaaggcggcgcaatgatccgtcaaattactgaagagtctgacactaacatcgagattgaagacgacggtactatcaaaatcttcgcgacagagcgtgcgaaagcagacatcgctattagcaagattgagcaagtaacggctgaaattgaagttggtaagacttacaacggtaagattacacgtattgtagacttcggtgcgtttgtagaagtacttccaggtaaagaaggtcttgttcacatttcacaaatcgctcacgagcgtgtgaacaaagtaactgactacctagaagaaggccaaatggttgacgttaaggttatggaaatcgatcgtcaaaaccgtgtacgcctaagcattaaagagcttctagaaaagcctgcgcctaagtctgacgacgcagagtaa

SEQ ID NO: 257349 - DNA, 1209 bp, Unknown
  Bacterial polypeptide expressing nucleotide sequence isolated from the Sargasso Sea
agataccttttagtggtccagttgcaggatgtcgtattggttatgtagattcagaatttattgtaaaccccacttatgatcaaattaatgaaggttcgttagatttgactatttcgagtacaaatgaggcagttgttatggttgaagcgggtgcatcagaattacctgaagatattatgcttgatgctttggaaaaaggcaggcaagtaaattcggaaataattgaatttattgaagaaattaaaaatacttgcggtaaagaaaaaatcgaatttatacctgctgcagaaatcgaaggtctcgaaggtgatattaaagaattggttggggatagagttaaagccatttttgatgaaggcgcagctaagggcgagagaaacgaagttttggatgatatgcaagatgaattaaaggaaaagcttgctgagaaatatgaatcgtcagacataaacgaaggattcgaaaagatcttaaaaaagacaatgagaaacaaaatcctagatgatggcaaaaggccagacggtagaggcgtagatgaaatacgaccattgtctattgaagttggaattttgcccagaacacacggtactggtttatttcaacgaggtcagactcaagttttatcagtagcaacacttgctggcttgagtatggttcaaaatttggataatttaagtcctgaggaaacaaaacgctatatgcaccattataactttatgccttattcaactggcgaagtgcgaagaataggtacaggtcgtagagaaattggccatggggctttagctgaacgtgctttagaacctgtgataccttcagaagaagattttccctatgctattagaatagtatcagaaattttaagctcaaatggaagcacatctatgggtagcgtttgtggtagtactctttcattaatggatgcaggtgtaccaattaaaagcccagttgcaggaatagcaatgggattaattttatctgatgattcaagtagttatgcagttttgaccgatattcaaggcatagaagattttcagggagatatggatttcaaggttgctggatcgagagaaggaattactgctttgcaaatggacgtaaaagttcaaggaatcaattttgaaataatgaaagatgctttagggaaagctaaagatgcacgctatcgaatattagatgctatgttagaagtcattgatactccctaga

SEQ ID NO: 257350 - DNA, 1942 bp, Unknown
  Bacterial polypeptide expressing nucleotide sequence isolated from the Sargasso Sea
tatgaggagagaaggtcgcccaccagaaagagcaactttaattgcaagattaattgataggccaatgaggccactttttccttcatggatgagggatgagattcaaatagtcgcatcatgcctttctctagatgaaagagttccagctgatgttttagctgttactggggcttcaatagcaaccttagttggagagattccattttatgggccaatggctgcggtaagagttggtcttataggggatgatttcatcttaaatcctagctatagagagattgaaaaaggagatttagacattgttgttgcaggttcacctgaaggcattgtcatgattgaggcaggtgctaaccagttatcagagcaagatactatcgaagctatagattttggttatgaagctgttactgaacttattaagtcacaggaagatttattaaaagatttaggaataaaacagattaagccatcagaacctgaagaagataaaacattgccctcttatttagagaaaaattgcacaaaaccgattgagttagttttaaagaaatttgatcattcaaaggaagagagagatcttgaactcgaaaaaataaaagttgagactcaagataaaattgattcttcaaaaggtgataaccaattaaaagttcttctttcagaaaatgataagttattaagtgttgactttaaaaaactcaccaagaaattaatgaggtctcaaatcattaatgatgggaaaagagttgatggaagagatctcgacgaagttagaaaaatatctgcttcagcaggaattcttccaaaaagagtccatggatcggctttatttcaaagaggtttaacccaagttttatctacaaccacattaggtactcctagtgatgcgcaagaaatggatgacctcaatccaagtacagaaaaaacttatctccatcactataatttccctccatattcagtaggagaaacaagaccgatgagaactcctgggagacgagaaattggccatggagcattagctgagagagcaataatcccggtgctcccagggaaagaaacatttccttatgtgcttagagtggttagcgaagttttgagctccaacggatcaacttcaatgggttctgtatgtggaagcactctttcattattggatgcaggggttcctctcaaagctcttgtaagtggtactgccatgggcttaatcaaggaaggtaaagaagtacggattcttacagatattcaaggcattgaagactttcttggagacatggactttaaagttgcaggaactgacaaaggtataactgcgttacaaatggatatgaaaattacaggtttgccagtatctatcatttctgatgcaattaaaaaagctcgtcctgcaaggttacatattttagaaaagatgcaagcagcaattgacaagcctcaagaatccctttctcctcatgctccccgactactaagctttaggattgaccctgagcttattggaacagttataggaccgggcggaagaacaattaaagggatcactgaaagaaccaatacaaagatagatatagaagatggagggattgtaactattgcctctcatgatggagctgctgcagaagaagctcaaaagataattgaaggtttaacccgtaaagttcatgaaggtgaaatcttctctggagttgtaacaagaataattcctataggtgctttcgtagaaatattacctggcaaagaagggatggttcacatttctcagttatcagaagcaagggttgagagagtagaagatgtggttagacaaggagatgaggtaactgtaagagttagagaaattgatagcagaggaagaattaaccttacattgaggggagttggacaaaataatggaatgtcctatccagaaccaacccctactccggttgctccacttaattaa

SEQ ID NO: 257351 - DNA, 2074 bp, Unknown
  Bacterial polypeptide expressing nucleotide sequence isolated from the Sargasso Sea
aatgtttaaagtatataagaaggaaattgaagtagcaggtaagaagataagtttagaaacaggaaaagtagcaagacaggcagatggtgcaataatcgcaacatgtggagagacagtcgtactagcaacagtagtgggagcaaaaaaagtaaatcctgatatggattactttcctttatctgtaaattatcaagaaaaatattatgcagctggaaaaatcccaggtggatattttaaaagagaagcaagaccaactgaaagtgaaacattaatctctagattaattgatagaccaatcagacctttgtttcctgatgaatttaaaaatgaggtacagttattaccaactgtaatttcatacgacaaagaaaacgaaccagatattttatcaatcactgcttcatcagcagcattagctatatcaggaatgccatttatgggtcctgtaggagcttcaagggttgggtttattgatggaaaatatgttttaaacccatctaaagcagagttagaaaaatcgaaattagatttagttgtagcaggtacaaaagatgctgtgcttatggttgaatcagaagcaaggggtttaacagaggaagaaatgttaaacgcagttaaatttggacatgaaggatttgttccagtaatcgagatgatcgaggaacttgcaaaagaatgtagaaaacccgagtggattgttgaaaagaaagatctatcagaagttaagaaaaaattagaagaaacttttacagaggatcttaaaaaagcttttgcaacaagagacaaacaagatagatcaaatcaaatttcagagatcactgataaagctaaaaaactttatgaggaagatgaaaattatactgatctagatgttaacagtcagttaaaaaatcttgaaaaatcaattgttagaacagacattctaaaaaataaaaatagaattgatggaagaggtttgtcagatgtaagaccaattgagtgtgaagttggtgttcttccaagagcacatggttctgcattgtttactagaggagaaacacaagcaattgttgttgcaactttaggaacatctgatgatgaacaaagaattgaaagtttagatggattacaaagagagcgatttatgcttcattataactttccacctttttcagttggagaaactggaagaattggaacaggtagaagagaaattggtcatggtaaattagcttggagagcaattaactcttcattaccaaaaaaagaagcatttccatacacttttagagtagtttcagagattacagagtccaatggttcttcttcaatggctactgtttgtggaacttctttagcattaatggatgcgggagtgccgattaaagagccagttgcaggtattgcaatgggattaattaaagaaggagatgatttcagtgttctatcagacattttgggtgacgaagatcacttaggtgatatggactttaaagttgctggaactaaagatggaattacttctcttcaaatggatatcaaaattacaggtattacatttgaaattatggagcaggcattgagccaagctaaagatggaagagttcacatcttaggtgaaatgaataaagcattatcagcttcaagatctgatgttggaaaacacactccaaaaatggaacaagttaatgtagataaaaaagacattgctgctgtcattggaaaaggtggtgcaacgatcagagagattgttgaaaaatcaggcgcaaaagtagatgtaaatgatgaaggagtggtaacagttgccgctcctgatgaggagtctagacacattgcaatgcaaatgattaaagacatcactgcaaaagctgaattaaacaaaatttattcaggtaaagtaatgaagattatggagtttggtgcatttgttaatttcttgggaaaacaagatggactagttcatatctcagaacttgcagataaaagagttgctaaagttactgatgttgtaaaagaaggcgacgaggtaaaggttaaagtaattggtttcgatagaggcaaagttaaactttctataaaacaagtaaaagattag

SEQ ID NO: 257352 - DNA, 1978 bp, Unknown
  Bacterial polypeptide expressing nucleotide sequence isolated from the Sargasso Sea
attgctactttggggagaaacagttgtaattgcgactgttgttggagccaaaaaagtaaatccagaaacagattattttcctctttcagtaaattatcaagaaaaatattatgctgcaggtaaaattcccggtggttattttaaaagagaagcaagaccaactgaagctgaaactttaatatcgagattaattgatagaccaattagaccactgttccctgaaagttttagaaatgaagtccaacttttaccaactgttctatcttatgataatgaaaatgaagcagatattttatcaatcattgcatcatcagcagctttatcaatatccggactaccgtttaaaggtcctgtaggtgcatcacgagtaggatttattgatggaaaatgtgttcttaatccaacaaagaaagaattagaaaattcaaaattagatttggttgtagcaggaactaaagatgcagttttaatggttgaatcagaagcatcaggacttaccgaaaaagaaatgttggacgcagtcaaatttggtcatgaaggatttgtttcagtaattaaaggtatagaaaaactatctaaaaagtgttcaaaagaaaagtggaaaattgaagaaaaagattttagcaaagtatcaaaaaaaattgaaaaagaacttaagaaggatttagaaaaagctttttcagaaaaagataaaaaaactagatcagatttaattagtcaagctggagagaaatgtaaaagtttgtttgaaggagatgaagatcttttagaacatgaaataatgttgcaacttaaaaaacttgaaaaaaacatcgttagaacaagaattttaaaaaacaaaaaaagaatcgacggtagaggtttatctgatgtaagacctattaaatgtgaagttggagttttaccaagaacgcatggatcagctttatttacaagaggagaaactcaagctttagttactacaactttaggtaccacagatgacgagcaaagaattgaaagtttggaaggtttaaagagacaaagatttatgcttcattataattttcctcctttctcagtcggtgaaactggaagaattggaacaggaagaagggaagttgggcacggaaaattagcttggagagcgttaaattcctctcttccaaaaaaagaaaactttccatacacacttagaatagtttcagaaattactgagtctaacggatcgtcctcaatggcaacagtttgtggatcttcacttgcactaatggatgcagcagtcccaatagccaaaccagttgctggaatagcaatgggattaataaaggaaaaagatgacttttcgatcttatcagatattttaggtgatgaagatcatcttggtgatatggattttaaagttgcaggtaccaaagatggaatcacatcgttgcagatggatattaagattactggtatcacatttgaaattatggaaagagcacttgcccaagccaaagatggaagagttcatattttaaatgaaatgaacaaaactattaagtcttcaagaaaagaagttggaaaacacacaccaaaaatggaaactattaaagttgataaaaaagatatcgcaactgttattggcaaaggtggcgcaaccataagagaaattgttgaaaaatctggagcaaaagtagacgttaaagatacaggtgaagttacagtagcagctgctaatgaagaaactagaaagatagcagtgcaaatgattaacgatcttgttgcaaaaccagagatgggtaaaacatacaagggtaaagtagtaaaaatcatggaattcggagctttcgtaaactttctaggaaaacaagacggtcttgttcatatttctcaacttgcagctaaaagagttcaaaaagtaacagatgtagttaaagaaggtgacgaggtttctgtaaaagtaattggatttgacagaggtaaagttaaactttcaataaaagaagcttcttaa

SEQ ID NO: 257353 - DNA, 2074 bp, Unknown
  Bacterial polypeptide expressing nucleotide sequence isolated from the Sargasso Sea
atgtttaagtctcacaaagaagaagtcgaaataaatggaaaaaaaataactttagaaacaggaaaaattgcaagacaagcagatggtgcgatcatagcaacttgcggtgaaacaatgataatagcaactgcagtgggtgctaaaaatctaaaggatggacaagattattttccattatctgtaaattaccaagaaaaatattatgctgctggtaaaatacctggaggatactttaaaagagaagcaagacctactgaagctgaaactttaatttctagattaatcgacagaccaattagaccattatttccgtcaagctttatgaatgaagtacaattactacctaccgtgctgtcttatgatggagaaaatcagccagatattttatctataattgcttcttctgcagctttagctatatcaggacttccttttcaaggcccaatcgcagcaagtagagttgggtataaagatggaaaatttttattaaatccttcacccgcagaattgcaagattccgaattagatttagttgttgctggaacaaaagaggcagttttaatggtagagtcagaaacatctggtctaacagaaaaagtaatgctggatgctgtaaagtttggacatgaaaattttattccaattatcaaagcaattgaaaccttagctaaaaaagcaggaaaacctaaatgggaagtcgaagagatagatcactctgatgttaaaaagaaaatcgttattgcttttgaaaaggatttaagaaaagcatttaaagaagttgataaaaagaaaagatcaactgctatttccgagatagatgctaaatgtaaagagatgttcgtagaagatgaaaatgtaacagaaaatcaagcaatggctcaacttaagttgctagaaaaagatattgttagaacagcaattttaaaagataaaaaaagaattgatggtagaggcctcgcagatgtgagacaaattaaatgtgaagtgggtgtattaccaagagcacatggttcagctctattcacaagaggtgagacccaagctttagtagttaccactttagggatgtctgatgacgagcaaagattagaaagcctggatggaatgcaaagatctaattttatgcttcactataatttccctccattttcagtaggtgagtgcggaagaataggaactggtagaagagaaattggacatggcaaattagcttggcgagctataagatcatcattgccaaaaaaagaggattttccttatactttaagagttgtttctgaaattactgagtcgaatggttcatcctcgatggcaacagtttgtggcacttctttatctttaatggacgctgcagtccctataaaggaaccagtagccggtatagccatgggtttaattaaggaaggtgataaattttctgtactatccgatattttaggagatgaagaccatttaggtgatatggatttcaaagtagctggaactaaagatggtataacttcccttcaaatggatattaagattacaggcattacatttgaaattatggaaaaggctttagaacaagctaaatctggaagagaacatattttattggagatgaacaaaactataaaatcatcaagaaaagaattttcaagacatacacctaaaatggaaacaataaaagtagataaaaaggatattgctacagttataggaaaaggcggtgcaacgattagagaaatagttgaaatgtcaggtgcgaaagtagatgtgaaagatacaggggaagtcaccgttgcagctcctgatcaaaactcaagaaataaagcaatagaatttattaaaagtcttatagctaaacctgaaatgggaaaaatttacaaaggaaaagtggttaagattatggagttcggagcttttgtaaactttttaggaaaacaggatggtttagtgcatatttcagaacttgctaccaaaagggttgcaaaagttggtgatgtcgtaaaagaaggtgatgaagtttcagtaaaagttgtaggttttgatagaggtaaagtgaagttatctattaagcaagccgtagcttaga

SEQ ID NO: 257354 - DNA, 1468 bp, Unknown
  Bacterial polypeptide expressing nucleotide sequence isolated from the Sargasso Sea
tggaaaatatgttttaaatccatcaaaaatagaattagaaaaatctaaactggaccttgttgttgcgggaactaaagatgcggttttaatggttgagtcagaagcaaatgaattatcagaagaagaaatgctgaatgctgttaaatttggccatgaaaattttgttccagtgattaaaattatagaggagcttgcaaaagaatgtagaaaaccagattggatagtagaaaaaaaagatctatcagatgtaaagaaaaaattagaaaaagaatttaccgaagatctcaaaaaagctttttctacaagagataagcaggatagatcaaatcaaatatctgaaattactgaaaaagccaaaaaactttatgaagaggatgaaaattatactgagctagatgtaaagtatgagcttaaaaatttagaaaaaagaattgtacgaacagatattcttaaaaataaaaatagaattgatggtcgaggcttagcagatgttagaccgataatgtgcgaagttggaatattaccgagggttcatgggtctgctctttttactagaggagaaactcaagcaattgtaactaccactttaggaacttcagatgacgaacagagaattgaaagtttagatggtcttcaaagagaaagatttatgcttcactataactttccaccattttcagttggtgaaactggaaggattgggacaggtagaagagaaattggtcatggtaaacttgcttggagagcaattaattcatctttgccaccaaaagaaagttttccttatacatttagaatagtatctgaaatcacggagtccaatggatcatcttcaatggcaaccgtttgtggttcatcattagcattaatggatgctggagttccaataaaagagccagtggcaggtattgcaatgggattaatcaaagaaggtgacgattttagtgttctatcagatatccttggagatgaggatcatttaggcgatatggatttcaaagtagctggcactaaagacggaatcacatcccttcaaatggatattaaaattacaggtataacatttgaaattatggagcaggctctaaaacaagcaaaagatggaagaattcatattcttggtgagatgaataaagctttagctaaatcaagagataatgttggaaaacatacacctaagatggaaaaaattactgttgataaaaaagatatcgcaacagtgattggtaaaggtggcgcaacaataagagaaattgttgaaaaatcaggagcaaaagtggatgttaatgatgaaggcgttgtaacagttgctgctccagatgaagactccagaaacaaagctatgcaaatgattaaagatttaactgcaaaagctgaattaaataaaatttataacggaaaagttatgaaaataatggaatttggtgcattcgtaaacttcttgggtaaacaagacggacttgttcac

SEQ ID NO: 257355 - DNA, 1916 bp, Unknown
  Bacterial polypeptide expressing nucleotide sequence isolated from the Sargasso Sea
tatggattattttcctttatcagtaaattaccaagaaaagtattatgcagcgggtaaaattccaggaggatattttaaaagagaagcaagaccaactgaaagtgaaactctaatttcaagattaattgatagacctatcagaccattgtttcctgatgaatttaaaaacgaagtgcaactattaccaactgtaatttcttatgataaagagaatgaagcagatattttatctatcattgcatcttcagcagctctagcaatctcaggaatgccgtttatgggtcctgttggagcctctagagttggctttattgaaggaaaatacgtcctaaatccatcaaagactgacttagagaaatctaaactagatttagtagtagcaggaaccaaggatgctgttttaatggttgagtctgaagcaaacggtttaacagaggaagaaatgttgaatgctgttaaatttggacacgaaggtttcgttccaataatagaaatgatcgaagaccttgcgaaagaatgtagaaaaccagagtggattgttgagaaaaaagatctttctgagataaaaaagaaattagaagatgaatttactgaagatttgaaaaaagctttttctacaagagacaagcaagatagatcaaatcaaatttctgaaattacagaaaaagctaaaaagctatatgaggaaaatgaagcatacagtgatttagatgtaaattctcaacttaagaatttggaaaaatctattgtaagaactgatattctaaaaaataaaaatcgtattgatggaagaggtctagcagatgtaagaccaattatgtgtgaagttggaattttacctagagttcatggttctgctttatttacaagaggcgaaacacaagccattgtaaccactacacttggaacttcagatgatgagcaaagaattgaaagtttagatggtttgcaaaaagagagatttatgttgcactataactttcctccattctcagttggtgaaactggtagaattggaactggtagaagagagataggccacggaaagttagcatggagagcaattaactcgtcactaccatcaaaagaaagtttcccctatacttttaggattgtatcagaaattactgagtctaacggttcttcatcaatggcaactgtttgtggaacttcacttgctcttatggatgcaggtgtaccaataaaagagccagttgctggaattgcaatgggtttaatcaaagaaggtgatgatttctcagtattatcagatattcttggtgatgaagaccaccttggagatatggattttaaagttgcaggcactaaagatggaattacatctttgcaaatggatatcaaaataaccggaattacatttgagataatggagcaagctttaaatcaagctaaagatggaagaattcatatcttaggtgaaatgaataaagcactttctaaatcaagagataatgttagtaaacacacaccaaaaatggaaaaaattacagttgataaaaaagatattgcagcagtaattggtaaaggtggtgcaacaattagagaaatagttgagaaatctggagcaaaagttgatgtgaatgacgagggtgaagtgacagttgctgcacctgatgaagagtctagaaatattgcaatgcaaatgattaaggacattactgctaaagctgaattaaataaaatttataatggaaaagttatgaaaattatggaatttggagcatttgtcaatttcttaggaaaacaagatggattagttcatatttcagaacttgcagacaaaagggttgctaaagttactgatgtggtcaaagaaggtgacgaagttaaagttaaagttattggatttgatcgaggaaaagtaaaattatctattaagcaagcggctatttagt

SEQ ID NO: 257356 - DNA, 1168 bp, Unknown
  Bacterial polypeptide expressing nucleotide sequence isolated from the Sargasso Sea
ttttatagcagcgtcggcagctattggtatatcaggattaccttttaatggtccattaggagctgtaagggtcggttttatagaaggacaatattgtttgaatcctaatagaagtgacatggataactcgttattggatatggttatagcaggaagtgattctgcagtaataatggttgaatctgaagctaaggaactctctgaagaccagatgcttggtggcattctctttgctcatcaggaaatgcaagtgataatagatgctatcaaagagatgtctttagaagtaggcaaaccagcatttgagtatgagccaaaaaccttagatgtagatttagtaaattctgttaaagattcatattcagagttgatatctaatgcttatcagattcaagataaacaagaaagggttcaaactctcaatcaactaaaagaaaaattagttgaagatttagttagtgaagaagagaattcaccaaaaagcacagacttactagatgctttcaaaaaaatagaaaaaacaatagtccgatcaaatttaattaaaggtgaaccaagaatagatggtagagatttagatacagttagaccgctttttattgaaacaggcgtcttaaaaaatactcatggatctgctttatttaccagaggagagactcaagctctcgttacttctaccctaggttcccctaggcaggcgcagttgattgatgcacttgagggtgaatttaaagatcaatttatgcttcattataattttcctccttattctgttggtgaagcagggtttatgtcaggtccaaaaagaagagaaataggacacggaaaattagccaggagagcattggaggcggtcttaccttctccagaagaattcccatatacaattagagtggtttcagagataactgaatctaatggttcaagctctatggctagtgtttgtggatcaagcttagccttaatggatgcaggaatacctgttaaggctcctgttgcaggcatagccatgggtctagtcaaagaagataatggttttgctgtaatcacggacatcttgggtgatgaagaccatctgggagatatggactttaaagtagctggaacagaagagggaattacagctctgcaaatggatataaagattgatggtataacggaagaaata

SEQ ID NO: 257357 - DNA, 1366 bp, Unknown
  Bacterial polypeptide expressing nucleotide sequence isolated from the Sargasso Sea
acagaagcagaaacattaatttcacgattaatagatagaccaataagacctttatttcctgatgaatttaaaaatgaggttcaattattaccaacagtaatttcatatgataaagaaaatgaagcagatattttatcaattacagcgtcatctgctgctctggcaatttcagggatgccgtttatgggaccggttggtgcatcaagagttggatttattgaaggtaaatatgttcttaatccttcaaaatcagaaatggaaaaatcaaagttagatttagttgttgctggaactaaggatgcagttttaatggtagaatctgaagctaatggtttatctgaggaagaaatgttaaatgcagtaaaattcggtcatgagggatttgtgcctgtaattacgatgattgaggaattagctaaggaatgcaaaaagccagattggactgttgagaaaaaagatttatcagagattaagaaaaaactcgaagatgaatttactgaagatctaaaaaaagcttttgctacaagagataagcaagatagatctaaccaaatatctgaaattactgataaagctaaaaagctttatgaggagaacgaaaattataccgatttagatgttaatagccaacttaagaaccttgaaaaaacaattgtaagaacagatattcttaaaaataaaaatagaattgatggtagaggattagcagatgtaagaccaataatgtgtgaagttggaattttgccaagaactcatggatctgcattatttactagaggtgaaactcaggcgatagtcacaacaactttaggaacgtcagatgatgagcaaagaattgaaagcttggaaggattaaaaagggaaagatttatgcttcattataattttccaccattttctgttggtgagactggaagaattggaaccggaagaagagagattggtcatggtaaattagcatggagagctttacactcatctttaccttctcaagagagttttccatatacttttaggattgtatctgaaataacagagtctaacggatcatcttctatggctacggtttgtggaacatctttagcattaatggatgcaggtgtaccgattaaagaacctgtagcaggtattgcaatgggacttattaaagaaggtgacgattttagtgttttatctgatattcttggagatgaagatcacttaggtgatatggattttaaagtcgctggaactaagagtggaattacatcattacaaatggatataaagatcacaggaataactttcgaaattatggaacaagctttaaagcaagccaaagatggaagaatacatatcttaggagaaatgaataaagcaatagaaa

SEQ ID NO: 257358 - DNA, 1536 bp, Unknown
  Bacterial polypeptide expressing nucleotide sequence isolated from the Sargasso Sea
tgatttcctcaatgaagtacaagtcgttataaccgtgatgagccttaaccctgaggtgcaaaccgatgtaatatctatgattgcagcttcagcagcactatctatttcagatataccgtttaatggaccaattgcaggggtaagggttggatatatcaataataagcctgtcataaacccgaaggtatcagaaatggaaaactctgaacttgacttgatggtagcaggaacaacagatgctattcttatggttgaatctgaagcaaaggaactttctgaagaggtcatgcttgattgtgtaatgaaagggcatgatgagataaaaaaagttattgatggcatcaatgatctagttaaggaagctggcaaggaaaaatggattcttgatgaaattgaaaaagatgaaactttaaaaaataaagtcatagagattgctggcggtgatattgaaagcgcttactcaatcgttgaaaaatcagaaagatctactcgtctcgcagaaattaagcaaagtacaattgatcagatcatcgaatcagatgaagaaatctctaaagacgatgttgcatctgaaatcaagaaaattgaaaaagaaactgttcgatcaaaaatacttaatggtgaaccaagaattgacggacgagatactaagactgttagggatatcaatgttgatatcaatattctcgaaaggactcatggatctgcgttatttacacgtggtgaaactcaatctattgttgtcacaactttgggttcagagcgatcatcacaaatcattgatgccttagaaggtgagtataaagataaattcatgttgcactataattttcctccttactctgtgggtgaagtaggttttatgggatctccaaagagaagagagattggacacggtaaacttgctcgtagagcattagaagcagttttacctaacatggctgaatatccatacactatcaggattgtttcggagataactgaatcaaatggttctagttcaatggctactgtatgtggttctagcctttctttgatgcatgccggtgttcctatcaaatctcatgttgcaggtattgcaatggggctagttatggaaggcgataaatataaagttctgaccgatattcttggtgacgaagatcatcttggcgatatggattttaaagtagctggaactgataacggaatcactgcacttcaaatggacattaaaattgccggcattactgaagaaattatgaaagacgctctcagtcaagcaaaggatgcaaaggatcatattcttaaaataatgaatgaagcaatatcatcaccatctgaggaatattctccttatgctccatccatcattagcataaccgttcctaaagataaaatcagagatgtcataggtaaaggaggcgcaacgattaggtcaatcacagaggtaaccggtgctcaggttgatattaatgatgacggcattgtaactattgcatctgtagatcaagaatctggccttaaagcaaaagaaaaaattgaattactaacagc

SEQ ID NO: 257359 - DNA, 1246 bp, Unknown
  Bacterial polypeptide expressing nucleotide sequence isolated from the Sargasso Sea
aatgtttaaaattgtaaaaaaagaaatagaagtaagtggaaaaaaattaagtttagagactggaaagatagcaagacaagcagatggagcaattatagctcaatgtggagagacagttgttttatcaacagttgtgggtgcaaagaaagtaaatccagatatggattatttcccattgtcagtaaattaccaggaaaaatattatgcagctggaaagataccaggtggatattttaaaagagaagctagacctacagaaagtgaaactttaatttcaagattaattgatagacccatcagaccattgtttccagatgaattcaaaaacgaagtacaactattaccaacagtaatatcttatgataaagagaatgaagcagatattttatctatcattgcatcttcagcagctcttgcaatctcaggaatgccttttatgggtcctgtgggagcctctagagttggctttattgaaggaaaatacgtccttaatccatctaaaaaggatttagagaaatctaaattagatttagttgtagcaggaactaaagatgcagttttaatggttgagtctgaagcaaatggattgactgaagaagaaatgttgaatgctgttaaatttggtcatgaaggattcgttccaattatagaaatgattgaagaacttgcaaaagaatgtagaaagcctgaatggacagttgagaagaaagatttatctgaagtaaaaaagaaattagaagaggaatttactgaagatttgaaaaaagctttctctacaagagataagcaagatagatcaaatcaaatttctcaaattaccgaaaaagccaaaaaattatatgaggaaaatgaagcctacactgatttagatgtaaattctcaacttaaaaatttagaaaaatcgattgtaagaactgatattcttaaaaataaaaatcgtattgatggaagaggtcaagcagatgtaagaccaattgtgtgtgaagtcggaatattacctagagttcatggttcagctctgtttacaagaggtgaaacacaagccattgtaacaactacacttggaacttcagatgatgagcaaagaattgagagtctagatggcctactaaaggaaagatttatgctgcactataattttcctccattttcagttggtgaaactggtagaattggaacaggaagaagagaaataggacatggtaagttagcatggagagcaattaactcttcacttccatcaaag

SEQ ID NO: 257360 - DNA, 1792 bp, Unknown
  Bacterial polypeptide expressing nucleotide sequence isolated from the Sargasso Sea
catatggaggaacgagtgtattatgtactgccggttgcttcaaaaagtaaaaatgatgcagatttttttcctttaacagtcaattatcaggaaaaggcatttgccgcagggaaaataccaggtggtttttttaaaagagaaggaaggccaacagagaaagagactttagtatgtaggttaatagacagaccaataagacccctttttcacaaaaatttcaagaatgaaactcaaataatagcaacagtattagaatatgattttgaaaatgatcctgatattgtagcaattatagctgcttctgcagccctaactatatctggattgccatttatgggtccactaggtgcttgtagagttggatgggatggtaaaaaatatcaacttaacccaaaaatagatgaatatgacaatcaaaaattagatttagtggttgcaggcacaactgaaggtgttttgatggtagaatctgaagcacaggaattgaatgaaaaaattatgttaggtgctgttgattttggtcataaagagatgaaagttgtcattaatgcaataattgaacttgctgaggttgcagcaaaagaaccaatagaaattgaagataatattcccgaagaaaaagaatataataaaatagttaaaaaatttagtggtgaatttgaaaaagcttataaaataaaagagaaatcagaaagagttgatgctatcgatttgattaaagaagatatattgaataagtttgacgaagatgtaaacacaaatttattatcatcagttatcaaaaaaaccgagtcagatgtagttagaacatctgtaattaaaacaaaaaaaagaatagatggacgagacaataaaacagttagaaaaattgttgcggaagtaggtaccttacctagatctcacggttctgcattattcacaagaggagaaacacaagctctagttgttacaacattaggttcttctcaagatacgcaaataattgatggtcttaatggtgactctaaggagcattttatgcttcattacaattttcctccatattcagtaggtgaagctggcagagttggttcaccagggagaagagaaattggtcatggaaaattagcatggcgagcaattcatccgctgcttccaacagttgaagagtttccctatacagtaaggattgtctcagaaataacagagtcaaatggttcatcttcaatggcaacagtatgtggaacttcattagctctcatggacgcgggcgtacctataaaaaagcctattgctggaatagcaatgggtctaattaaagaaaaagataagtttgttgttttatcagatatccttggtgatgaagatcatcttggtgatatggattttaaagttgctggaactaaagatggtattacaagtcttcaaatggatataaaaattacatccataactagtgaaattatgaaaattgctttagaccaagcattagaaggaagaaaatacatattagcggaaatgaaaaaagctatttctaaaaccaggacaaatctagcagaaaatgctccaaaaattaaagtaatgaaaattaaaacagaaaagatcaaagagattattggaccatctggtaaggtgataaaaggaatttgtgaaaacacaaattctaaaattgatattgatgactcaggagttttaaaagttgcatctccaaacgatgagtccttagacaaggctcttaaaatgataaatgacatcattgttgaacctgaaatgggtgtaatatataatggtaaagttgtaaaaacagttgatt

SEQ ID NO: 257361 - DNA, 1529 bp, Unknown
  Bacterial polypeptide expressing nucleotide sequence isolated from the Sargasso Sea
cgacgctgtactaatggttgaatctgaagcgaagcagctctcagaggaaataatgttaggagcggtaaagtttggccatgagtcaatgcaagaagttataaaaatcataatcaatcttgctgaggaatgcgcaaatgacccttgggagttcagtcatacaattaatgagtcattgttagatgaaattaaaaaaacttgtgaagataaaattgcgaagagttactcaattgttgataagatggaaagacaaagctcgctttctgaaattaagtcaagtttagaggatcaatataaagaaaacgaggaatacagcattaacgaggtgatgggatattttaaaaaaatcgaaaaaaatgttgttagatctcaaatattaaataatcaatctagaattgacggtcggaagttagatgaagtaagaaatatttcgtcggaagtatcgtggctaccaagaacgcatggatctgctttatttacaagaggagagacccaagcaattgttgtggcaactttaggatttggagaagatgaacaaagaattgaggcattgcaaggatcatacaaagaaaatttcatgcttcattataattttccaccatattcagttggtgaagtaggaagactaggagcaacaggtagacgtgaaattggtcatggaaaacttgcatggagagctctaaaggcagttttaccatcaaaagatgattttgattataccattagattagtctcagatattactgaatcaaatggatcatcttctatggcaactgtgtgtggttcatcacttgcattaatggatgcaggggttcctatcaaaaactctgtttcaggaatagcaatgggcttaataaaagaaggtgatgattttgcagttctgtcagatattttgggagatgaagaccaccttggtgatatggactttaaggtggctggaaccaaggaaggtgtaacctctcttcaaatggacattaagatcacaggcatcacctatgaaattatggagaaagcccttgaacaagcaaagggtgggagagactatattcttaatgaaatgaacaaagaaatttctgaagccagaacagaactaggtccttacacccctcgtagtgagataataaaagtcaaaagggacaatattggagaaataattggtaaaggtggttctacaattaaggatattatagaaaaatctggagcaaagattgacataagtgataatggaaatgttaaaattgctggaactaataacgaaagtattgaggcggctaaagaactaatcaattctataattgaagagccagaggtgggacaggtttatgaaggtaaagttgttaagattatggaatttggtgcttttgttaacttctttggaaaaagggacggccttgttcatatttctcaactctcaaaagaaagagttgaaaaagttactgacgtagtaaatgagggtgatatagtcaaggtaaaggtgcttggttttgataaaggtaaagttaaattatcaattaaggatactgaagaataat

SEQ ID NO: 257362 - DNA, 1102 bp, Unknown
  Bacterial polypeptide expressing nucleotide sequence isolated from the Sargasso Sea
atagagactggtgtattaaagaacactcatggctcagccttatttacagggggtgaaacgcaagcacttgtaacctcaactttagggtcaccaagacaagctcagctaattgatgccttggaaggagaattcaaagatcaattcatgctgcattataattttcctccttattctgtaggagaggctggttttatgtcaggtcctaaaagaagggaaattggacatggaaagctagcaagaagagcgttagaggcagtactgccttctccagatgatttcccttacaccattcgagtagtatctgaaataacagaatcaaatggctctagctccatggcaagtgtttgtggttctagcttagctctcatggatgctggtatacctctcaaagcagcggttgctggaattgctatgggtttagttaaagaagaccaagggtttgctgttattacagacatcctcggtgatgaagatcatctaggtgatatggatttcaaagttgcaggaacatctgaaggtataactgcattgcaaatggatataaaaattgacggtattactgaagagatatttgaagttgctttggaaaaagcacaagtggctagggcgcatattttatctagtatgaatgaagtaatatcggaatctagagaaaagttatctgataaagctcctcaagcagtcgtgattcaaattaacactaagaaaattcgtgatgttataggaaagggaggagaaactatccgtgcacttaccgaagagacaggagcgataatagaagtagaagatagtggaaaggttaccatttacggagatactccagaatcaagagaaagtgctcaaaagagaattgaagaaataactgctgaacctgaagttaataaggtttacacaggtacggtagcaaatattaaggactttggagcttttgtaaccatcatgcctggtagagatggcttagtgcatgtatctgaaatctcagaagaaagagtggaaaatgtttcagattattttgttgaaggcgaagaagttaaagttaaagttctcgaagtagataagcaaggtaaaatcagacttaccatgaaaggactagaagattaat

SEQ ID NO: 257363 - DNA, 1325 bp, Unknown
  Bacterial polypeptide expressing nucleotide sequence isolated from the Sargasso Sea
aatgtttaaaatagtaaagaaagaaatagaagtagcaggaaaaaagataagtttagaaactggaaaaatagcaagacaagcagatggtgcaataattgctcaatgtggagagacagtagttttagcaactgcagtaggagcaaaaaaagtaaatccagatattgattactttcctttatcagtaaattatcaagaaaaatattatgctgcaggaaaaattccaggtggatattttaaaagagaagcaagaccaacagaaagtgaaacattaatttcaaggttaattgatagaccaataagaccattgtttccggatgaatttaaaaatgaagtgcaagtacttccgactgtaatttcttatgataaagaaaatgaagccgatatattatcaattattgcatcctcagcagcattagctatatcaggaatgcctttcttgggtccagttggagcttctagagttggatttattgaaggaaaatatgttcttaatccatcaaagaaagaaatggaaaattcaaaactagatttagtagttgctggtactaaagaagcagtattaatggttgagtcagaagcaaatgttttaacagaagaagaaatgttaaatgcagttaaatttggtcacgaaggatttgttccagtaattgaaactatagaacaacttgcaaaagaatgtaaaaaaccagattgggttatagaaaaaaaagatctttctgaagttaagaaaaaacttgaagaagaatttacagctgacctaaaaaaagcttttgcaacaaaagataagcaagatagatcgaatcaaatttcagaaattactgataaagcaataaagctttatgaagaaaatgaaaattattcagatttagatgttaattctcaactaaaaaatttggaaaaatctattgttagaactgatatcttaaaaaataaaaatcgtatagatggaagaggtcttgcagacgtaagaccaatagaatgtgaagttggaatactacctagagcgcatggttctgcattatttactagaggtgagacccaagcaattgtaactactacgctaggaacttctgatgatgaacaaagaattgaaagtttagaaggattacaaagagaaagatttatgcttcattataactttcctccattttcagttggtgaaactggcagaataggaactggaagaagagaaattggtcatggaaaattagcttggagagcaattaattcatctttgccatcaaaagaaagcttcccttatacatttagaatagtttcagatataacagagtctaatggctcttcttcaatggcaactgtttgtg

SEQ ID NO: 257364 - DNA, 1768 bp, Unknown
  Bacterial polypeptide expressing nucleotide sequence isolated from the Sargasso Sea
tttccagatgaattcaaaaacgaagtacagctattaccaaccgtaatatcttatgataaagaaaatgaagcagatattttatctatcattgcatcttcagcagctcttgcaatctctggaatgccttttatgggtcctgtgggagcctctagagttggctttattgaaggaaaatacgtccttaacccatctaaaaaagaattagagaaatctaaattagatttagttgtagcaggaactaaagatgcagttttaatggttgaatctgaagcaaatggtttgactgaagaagaaatgttgaatgctgttaaatttggtcatgaaggtttcgttccaataatagaaatgatcgaggaacttgcaaaagaatgtaaaaagcccgaatggacagttgagaagaaagaattatctgaagtaaaaaagaaattagaagaggaatttacagaagatttgaaaaaagctttctctacaagagataagcaagatagatcaaatcaaatttctcaaattactgaaaaagccaaaaatttatatgaggagaatgaagcttacaccgatttagatgtaaattctcaacttaaaaatttagaaaaatctattgtaagaactgatattcttaaaaataaaaatcgtattgatggaaggggtctagcagatgtaagaccaattatgtgcgaagttggaatattacctagagttcatggctcagctttgtttacaagaggtgaaacacaagccattgtaacaactacacttggaacctcagatgatgaacaaagaatagagagtttagatggtcttcaaaaagagagatttatgttacattataattttcctccattttcagttggtgaaacaggaaggattggaacaggtagaagagagataggtcatggtaagttagcgtggagagcaattaactcttcacttccatcaaaggaaagttttccctatacatttaggattgtatcagaaatcacagagtctaatggttcatcttcaatggcaactgtttgtggaacttcacttgctcttatggatgcaggtgttccgattaaagagccagttgctggaatagcaatgggtttaatcaaagagggtgaagatttctctgtactatcagatatacttggtgatgaagaccacctaggagatatggattttaaagttgcaggtactaaagacggcattacatctttacaaatggatattaaaattacaggaattacttttgaaatcatggagcaggctttaaatcaagcaaaagatggcagaattcatattttgggtgaaatgaataaagcattagacaaatccagagacgatgttggaaaacatactccaaaaatggaaaagattactgtagataaaaaagatattgcagcagtaattggaaaaggtggagcaacaattagagaaatcgtcgaaaaatctggtgctaaagttgatgtaaatgatgaaggtatagttacagttgccgctcctgatgaagagtctagaaatatagcaatgcagatgatcaaagacataacagcaaaagctgaattaaataaaatttataatggaaaagtaatgaaaattatggaatttggtgcttttgttaacttcttaggaaaacaagatggacttgttcatatttctgagcttgcagataaaagagttgctaaagtaactgatgtagttaaggaaggtgacgaagttaaagtaaaagttattggatttgatagaggaaaagtaaaactttctataaagcaggctgctatataga

SEQ ID NO: 257365 - DNA, 1356 bp, Unknown
  Bacterial polypeptide expressing nucleotide sequence isolated from the Sargasso Sea
gttggaaaaaagcaaggtgatcctgagcgagatttttttccactaacagttaattatcaggaaaaagcttatgcatcaggaaaaatacccggtggtttctttaaacgcgaaggtagaccttctgaaaaagaaacgcttgtatccagattaatagataggcctgtaagaccactatttccgaagggttacaccaacgaggtacaagtaattgcaacagtgatgtctcttgatccagaaattgatcctgatataccatcacttatcggctcttcagctgcccttacactttcagggttaccatttgcaggaccaattggagcagctaaaattggttatatagatggtgattttgtgttaaatccagacaaaagccaacttttggaatccgatcttgatctcgtggttgcaggaacatctgaggctgtcttgatggttgaatctgaagctaatattctctccgaagacattatgctaaaagcagttattttcgggcacgagcaaatgcaacttgctatttcagctatcaatgatctcgcacaagaagcatccaagcctaaaattgaatggagccctcctgaggaagacaatgagctttccgatgctatgatgcaatcttgcagtgaatcaataaaagctgcctatcttattaagaataagcaggaacgtcgtgaaaaaatgtcatcaataaaagatcagtcaattcaggagctccttgataaacatcaagataaatggccatccgatgatttaggtaaagcgttttcagctttggaaaaaagaattgtaagatccaatgttgtaaaagaaaaaataagaattgatgggcgagactccacaacagttaggccaattgatgtaaaaataggcgttcttgagagaacacatggttctgcattattcacaagaggtgaaacacaagcgatagtagtaacgacacttgggacagatagagatgcacaaattattgatgcgttagaaggtgagtataaggatacatttatgcttcattataatttccctccgtattgtgtcggtgaaaccggatttgtcggctctccgaagagaagagagatagggcatggtaaacttgcgaaacgtggtatccaagctgtaatgcctgatcaagaggaatttccctatgtaatccgtgttgtatctgaaataacagagtccaatggatcaagttcaatggcttctgtatgtggcacaagcttatctttaatggatgcaggagtgcctataaaatcacctgttgctggtgtagcaatgggattagttaaagaggatgaggattacacggtactgactgatattcttggcgatgaagatcaccttggagatatggattttaaagta

SEQ ID NO: 257366 - DNA, 1384 bp, Unknown
  Bacterial polypeptide expressing nucleotide sequence isolated from the Sargasso Sea
accaactgaaagtgagactttaatatcaaggctaattgatagacctattcgacctttgtttcctgatgaatttaaaaatgaagtacaactattaccaacagtaatatcttatgataaagaaaatgaggctgatattttatcaataattgcctcctcagcagcattggctatatcaggtatgccttttatgggtccagtaggagcttctagagttggctttattaaaggcgaatatgtgcttaacccttcaaagaaagaattagaggagtctaaattagatttagtagttgcgggaactaaagatgcagttttaatggtcgagtcagaagcaaacggtttaacagaggaagaaatgttaaacgcagtaaaatttggtcatcaaggttttattcctgtaatccaaatgattgaagatcttgcaaaagaatgtagaaaaccagagtgggttgttgaaaaaaaagatctttcagaaataaaaaagaaattagaggaagaatttaccgaagatctgaaaaaagcattctctactagagataaacaggatagatcaaatcaaatttctgaaataactgaaaaagcaaaaaaactttatgaagaaaatgaagattacacagatttagatgttaactctcaacttaaaaatttagagaaatctatagtaagaactgacatactaaaaaataaaaatcgtattgatgggagaggtcttgcagatgtcagaccaataatgtgtgaagtaggtattttgcctagagttcatggttctgcattatttacaagaggtgaaactcaagcaattgttacaactactttaggtacttcagatgatgaacaaagaattgaaagtttagatggtcttctaaaagagagatttatgttgcattataattttcctccattctcagttggtgaaactggtagaattggaacaggtcgaagagagataggtcatggaaaattagcatggagagcaattaactcctcactaccatcaaaagaaagttttccttatacatttaggattgtatcagaaataactgagtcaaatggttcatcttcaatggcaactgtttgtggaacttctctagctcttatggatgcaggtgttcctataaaagaaccagttgcaggaattgcaatgggtttaataaaagaaggtgatgattttacagtattatctgatattcttggtgatgaagatcatcttggagatatggactttaaagttgctggaaccaaagatgggatcacatcattacaaatggatattaaaatcactggaattacatttgagatcatggagcaggcattgaaacaagctaaagatgggagagtccatatcctaagtgagatgaataaagcactttctaaatcaagagataat

SEQ ID NO: 257367 - DNA, 1270 bp, Unknown
  Bacterial polypeptide expressing nucleotide sequence isolated from the Sargasso Sea
aatgtttaaagtacacaaaaaggaaattgaagtagcaggaaagaagttaagtttagaaacaggtaaagtagcaagacaggcagacggtgcaataatcgcaacatgtggtgagacagtcgtattagcaacagtggtgggtgcaaaaaaagtaaatcctgatatggattactttccattatctgtaaactaccaggaaaaatattatgcagctggaaaaatcccaggtggatactttaagagagaagcaagaccaactgagagtgaaacattaatctctagattaattgatagaccaatcagacctttgtttcctgacgaatttaaaaatgaagttcagttgttgccaactgtgatttcatatgacaaagaaaatgaaccagatattctatcaatcactgcttcatcagcagcattagcaatttcaggcatgccatttatggggccggtaggagcttctagagttggttatattgatggtaaatatgttttaaacccatcaaagactgatttggaaaaatcaaaattagatttagtcgtagcaggcacaaaagatgctgtgttaatggttgaatctgaagcaagcggtttaacagaggaagaaatgttaaatgcagttaaatttggtcatgaaggttttgttcctgtgattgaaatgattgaggaactcgcaaaagaatgcagaaaacctgaatggactgttgaaaagaaagatttatcagaggttaagaaaaaacttgaggaaacatttactgaagatcttaaaaaagcttttgcgaccagagataaacaagatagatcaaaccaaatttcagagatcactgataaagcaaaaaaactttatgaggaggatgaaaattatactgatcttgatgtaaattctgagcttaaaaatcttgaaaaatcaatagtaaggactgacattcttaaaaataaaaacagaattgatggtagaggattatctgatgttagacctatttcttgtgaggtaggaattttaccaagaactcatggctcggctttattcacaaggggagaaacacaggcaattgtgactgcaactttaggaacctctgatgatgaacaaagaattgaaagcttagatggattacaaagagaaaggtttatgcttcactataattttccaccgttctcagttggtgaaacaggtagaataggaactggtagaagagaaataggacatggtaaattagcttggagagctatccactcttcattaccatcaagtgagtcatttccttatacatttaga

SEQ ID NO: 257368 - DNA, 1780 bp, Unknown
  Bacterial polypeptide expressing nucleotide sequence isolated from the Sargasso Sea
atacgacctttgtttcctgaagactttaaaaatgaggtacaattacttccaacagtcatatcttatgataaagaaaatgaagcagatattttatctataattgcatcttctgcagctttagctatatcaggaatgccatttgggggtcctgttgctgcttctagagtaggatttattgacggtaaatatattttaaacccatcgaaaaaagaattagaaaattcaaaattagatttagtggttgctggtaccaaagatgccgttttgatggttgagtcggaagcaaaaggattaaccgaagaggaaatgttaagtgcagttaaatttggacacaaaggttttgttccagcaattaatgcaatagaagaacttgcaaaagagtgcaagaaacccaattgggttatcgagaaaaaagatctgtctgaagttaagaaaaaactagaagaagaatttacagctgatttaaaaaaagcttttgcaactaaagataagcaagatagatcaaatcaaatttcagaaattactgataaggctaaaaagctttatgaagaaaatgaaaattattcagatttagatgtcaattctcaacttaagagccttgaaaaatctatagttagaactgatattttgaagaaaaaaaatcgtattgatggtagaggtcttgcagatgtaagaccgattgaatgtgaagttggaatattgcctagagtgcatggctctgctttgtttacaagaggagagacccaagctatagtaaccactacattaggaacatctgacgatgagcaaagaattgagagtctcgaagggttacaaagagaaagatttatgcttcactataattttcctccattctcagttggtgagaccggaagaattggaactggtagaagagaaattggacacggaaaacttgcttggagagcaataaattcatccttaccttcaaaggaaagttttccttacaccttcaggatagtatcagaaataacagagtctaatggttcatcttcaatggcaacagtttgtggatcctcacttgcattaatggatgcaggagttccaattaaagaaccagttgctggtattgcaatgggtttgattaaagaaggtgacgattttagcgtattatctgatattcttggagatgaagatcatttaggtgatatggattttaaagttgctggaacaaaagatggcataacatctctacaaatggatattaagattactggaattacttttgaaataatggatcaagctttgaaacaagccaaagatggccgaatacatatcctaaaagaaatgaataaagctttaaacaaatcaagagaaagcgttggaaagcatactccaaaaatggaaaaaattactgtagataaaaaagatattgcagcagtaattggcaaaggaggcgcaacaataagagagattgttgaaaaatctggagctaaagttgatgtaaatgatgaaggagttgtgacagttgctgccccagatgaagagtcccgaaacattgcgttacagctaataaaagacataactgctaaagcagaactaaacaaaatatataatggcaaagtgatgaagattatggagtttggtgcatttgtaaattttttaggtaaacaagatggtcttgttcatatttcagagctagcagataaaagagttgcgaaagttactgatgttgtaaaagaaggcgatgaggtaaaagtaaaagtaattgggtttgatagaggtaaagtaaaattgtctattaaacaagcaactgtttaat

SEQ ID NO: 257369 - DNA, 1717 bp, Unknown
  Bacterial polypeptide expressing nucleotide sequence isolated from the Sargasso Sea
atgtttaaaattattaaaaaagaaatagaaataggtggaaaaaagataacattggagactggcaaaattgcaagacaggctgatggtgcaataattgctacttgtggtgaaacggtagtgatggcaacggttgttggagcaaaaaaagttaatccagaagttgactattttcctttacaagtaaattatcaagaaaaatattatgctgcaggaaaaattcctggtggatattttaaaagagaagcaagacctactgagagtgaaacattaatatcaagactaattgatagaccaatccgacctttatttcctgatgagtttagaaatgaagttcaactattgccaactgtcatttcatatgacaaagaaaatgaagcagacattttgtcaattattgcttcttctgctgctttggcaatatctggcatgccttttttagggccaattggagcatctagagttggttatatagatgaaaaatatgttcttaatccatcaaaggctgaattaaaaaattcaaaattagatcttgtagttgcaggtactaaggatgcagttttaatggttgaatctgaagcaaaaggcttaagtgaagaagcaatgttaaaggctgtaaaatttggtcatgagaactttatttcagttatcaaaatgatagaagatttagcaaaagattgtagaaaacctgattgggaaatagacaaaaaagacctttccgaagtgaaagaaaaattagaaaaagagcttacatctgatttaacaaaagcttttacaattaaagataaacaggaaagatcaaatcttattgctgaaataacagaaaaagcaaaaaaattgtttgaggaaaatgaaaattatacagagctagatgttaactacgaacttaaaaatttagaaaaaagaatagttagaactgatatcttaaaaaacaaaaatcgtattgatggaagaggtctttctgatgtgaggccaattatgtgcgaggttggaatcctaccaagagttcatggatctgcattatttactagaggagaaactcaagcaattgtaacaactacacttggtacatcagatgatgaacagagaattgaaagtttagaaggtctacaaagagaaagatttatgcttcactataattttccaccattttcagtcggcgaagtaggaagaatcggaacaggaagaagagaaattgggcatggaaaacttgcatggagagcgattaattcatctttgccttcaaaagaaaacttcccttatacatttagaattgtgtctgaaatcactgagtcgaatggatcatcctcaatggcaacagtttgtggaacatcattagcattaatggatgctggagttccaataaaagagcctgttgctggtattgctatgggattaattaaagaaggtgatgattttagtgttctatcggatattttaggtgatgaagatcatttaggagatatggattttaaagttgcaggtactaaagatggaatcacttcacttcaaatggatattaaaattacaggcattacatttgaaatcatggaacaagctttaaaacaggcaaaagatggccgaattcatattctaggcgaaatgaataaagctttagataaatcaagggcaggtgttggcaaacatactccaaaaatggaaaaaattactgttgataaaaaagatatagcaactgtaattggaaaaggtggggcaacaa

SEQ ID NO: 257370 - DNA, 1754 bp, Unknown
  Bacterial polypeptide expressing nucleotide sequence isolated from the Sargasso Sea
acgcagccgggaaaattccaggtggatttttaaaagagaagggaggccttcggaaaaggaaacgctgatctcaagattaattgataggcctttaagaccatcatttagagatgatttccttaatgaggttcaagtcattataactgttatgagtcttaatcctgaggtgcaaacagacgtaatctccatgattgcagcatcagcagcattatcaatttcagacatcccattcaatggccctattgctggcgtaagagtcgggtatatagataacaagtcagtcataaatccgacggtatcagaaatggagaattctgctcttgacttaatagttgcaggatcaacagatgccattcttatggttgaatctgaagcaaaagagctttctgaagaagtcatgcttgattgcgtaatgaatggacacagtgaaataaagaaaattatcgatggcattaatgatctagttaagaaagcaggtaaagaaaaatggattcttgatgagattgaaaaagatgaaacattaaataataaagtcaaagagatcgctggtgctgatatcgaaagcgcttatgcaattgttgaaaagtcagaaagatctagccgtctaacagaaattaagaaaagtacaatcgatcaacttactgagtcagatgaagaaatctctaaagatgatattgcatctgagatcaaaaaaattgagaaagagactgtacgatcaaaaatacttaatggtgagccaagaattgacggcagagacaccaaaacagtcagggatatcaatgttgatctcaatgttcttgaaagaacacatggatctgcattgtttactcgaggtgaaacccagtccattgttgtaactactttaggctcagaaagatcatcacaaatcattgatgcacttgaaggcgaatacaaggataagttcatgcttcactataactttccaccatactcagtcggagaggttggatttatgggctcaccaaaaagaagagagattggtcatggcaaattggctagaagagctctagaagctgtcttaccaaatatggatgaatatccatatacaattagaattgtatctgaaataactgaatccaatggttcaagctctatggccacagtatgcggatcaagcctttcattgatgaatgccggtgttccaattaagactcatgttgcaggtatcgctatgggactggtcatggatggtgataaatataaagtcttgaccgatatccttggcgatgaagatcatcttggtgatatggactttaaagtagcaggaactgacaatggaatcactgcgcttcaaatggacataaaaatagctggaatcactgaagagatcatgaaagatgctctaagtcaggcaaaggatgcaaaagaccacattcttaaaataatgaatgatgcgatatcatcaccagcagatgattattcaccatatgcaccatctattattagcatgacagttcctaaggataaaatacgagatgtaattggaaaaggtggagcaacaattagatcaatcacagaagttactggagcccaagttgatatcaatgatgatggtattgttacgattgcatctgtggatcaagaatcaggactgaaagcaaaagaaaaaatagaattactcactgctgatgtagaagtagataaaatctatgaaggaagagtggctaaaataatggattttggagcatttgtaacaatcctaccaggtaaagatggtttggttcatatatctg

SEQ ID NO: 257371 - DNA, 1261 bp, Unknown
  Bacterial polypeptide expressing nucleotide sequence isolated from the Sargasso Sea
tgaagataattcagatttagatgagtttgagcttggtaaagttttaagttccttcaaagaattagaaaaaaatattgttcgaggaaatatattaaataataaactaagaattgatggaagagaccttgatacagtgagacctatttttgttgaaacagacgtccttcctagcgctcatggctctgcattatttacaagaggtgaaactcaagctgttgtagttgcaactcttggttcttcaagagatgctcaaagaattgaagcaatagaaggtgagggttctgataattttatgcttcattacaactttccagcatatagtgttggcgagataggaatgccaatgggtccaaaaagacgggaaatcggacatggaaatttagcaaaaagagctatcaaagcagtattacctgatactgatgaatttggttatactatgagagttgtttcagaaattactgagtctaatggctcaagctcaatggcttctgtttgtggaacttcattatcattaatggatgctggtgtgcctctttcaagtccagttgcaggaatagccatgggtcttattaaagaaggcgatgattttgctgttctgactgatatcttaggagatgaagatcatttaggtgatatggactttaaagttgccggaactgaatctggtatcaccgctcttcaaatggatatcaagattaaaggtatcaatgaatcgattatggaaactgcattagcaaaagctaaaaatgcaagaaatcatatattaggcattatgaatgaagtaatttcatctgctaaagatttatctgaaaatgctccagccatgaaaacatttatggttgataaagataagataaaagaaattattggaaaaggtggagcagtaataaaaggtatgcaagaaaaaacaggagcaacagttgacgtaaacgatgatgggactgtctcagtttttggtcaaaatcaatcatcaatgaaagaatgtttagcaattattgaagaaattcttgaagaacctgagttaaataaaatatataagggtaaagtagttaagattgttgaatttggagcttttgttaatattttacctggcaaggatggtcttcttcatatctctgaaatatctgaagaaagaactgaaaatgtagaagatgttcttaaagaagatcaagaaattgaagtaaagcttattggctttgatagaggtaagatgaaattatcaatgaaggcaataactaacaaaaaagaagaatctgactaa

SEQ ID NO: 257372 - DNA, 1864 bp, Unknown
  Bacterial polypeptide expressing nucleotide sequence isolated from the Sargasso Sea
ggtggattctttaaaagagaagggaggccatcggaaaaggagacactcatctcaagattaattgataggcctttaagaccgtcattcagagatgatttcctgaatgaagttcaagtcgtcataactgttatgagtcttaatcctgaagtacaaacagacgtaatctccatgattgctgcatcagcagcattatctatttctgacatcccattcaatggccctattgctggcgtaagagtcgggtatatagacaagaagtcagtcataaatccaacagtatcagaaatggaaaattctgcacttgacctagtagttgcaggatcaacagatgccattcttatggttgaatctgaagcaaaagagctttctgaagaagtcatgcttgattgcgtaataaatggacacaatgagataaagaaaattattgatggcattaatgaactggttaagaaagcgggcaaagaaaaatgggttcttgatgaaattgaaaaggatgaaacattaaaaaatacagtcaaagagattgccggtccagatattgagagcgcgtactcaattgttgaaaagtctgaaagatctaatcgtcttgcagatattaagaaaaacacaattgaacgaattgctgattcagatgaagaaatctctaaagatgatattgcatctgaaattaaaaaaatcgaaaaagagactgttcgatcaaaaatactcaatggcgaaccaagaattgatggacgagatactaaaacagtcagggatatcaatgttgatatcaatgttcttgagagaacacatggatctgctttatttactcgaggtgaaacgcagtctattgttgtaacaactttgggttcagaaagatcctctcaaatcattgatgcacttgaaggtgaatacaaggataagttcatgcttcattacaatttcccaccatactctgttggcgaagttggattcatgggttcaccgaaaagaagggagattggtcacggcaaattagctagaagggccttagaagctgtattaccaaatatggatgaatacccatatacaatcagaattgtctctgaaataactgaatccaatggctcaagctctatggccacagtttgtggttcaagcctctcattgatgcatgccggtgttccaatcaaatcacatgttgcaggcattgcaatggggctcgtcatggaaggtgataagtataaagtcttgactgatattttgggcgatgaagatcaccttggtgatatggactttaaggttgcaggaactgacaatggaattactgctcttcaaatggacataaagatagctggtatcactgaagaaatcatgaaagatgcactcagtcaggcaaaagacgcaaaagaccatattcttaagataatgaatgatgcgatatcatcaccatcagagcagtactcaccttatgcgccgtctattattagcatgacggtacctaaggataaaataagagacgtaataggaaaaggcggagcaacaataagatcaatcactgaagtaactggagctcaagtcgatatcaatgatgatggaattgttacgattgcatccgtagatcaagaatcaggccttaaagcaaaagagaaaatagaattactcactgctgatgttgaggtcgataaaatctatgaaggaagagtagctaaaattatggattttggagcatttgttacaatccttccaggtaaagatggtctggttcatatttccgagatctctgaagagcgagtagagtcagtcgatgatgtgctcagcgaaggacaagtaattaatgtcaaggtgattgaagttgatcgccaaaataggatcaggctttcaatgaaagcaattaaagattaat

SEQ ID NO: 257373 - DNA, 1954 bp, Unknown
  Bacterial polypeptide expressing nucleotide sequence isolated from the Sargasso Sea
atggcaactgtagtaggtgctaaaaaagtaaatccagaagtagattactttccgttatctgtcaattatcaagagaaatattatgcagctggaaaaattccaggcggatattttaaaagagaggcaagacccacagaaagtgaaactttaatttcaagattaatagacagacccataagaccactttttccagatgaatttaaaaatgaagtacaattacttccaactgtaatttcctatgataaagaaaatgaagcagacatattatcaattattgcttcatcagcagcattgtcaatatcaggaatgccttttatgggaccagttggagcctcaagagtaggatttattgatggcaaatatgttcttaatccatcaaaaaaagaacttgaaaaatcaaaattagatttagtagttgcaggaacaaaagatgcagttttgatggttgaatctgaggctaaaggtttaactgaggaggaaatgcttaatgcagttaagtttggccatgaaaattttattccaataattaaaatgatcgaagaattggcaaaagaatgtaaaaaaaccggctgggttgttgagaaaaaagatctttcagaggtaaagaaaaaactatcagatgaatttacagacgatctaaagaaggcattttctacaagagataaacaagaaagatcaaatatgatttctgaaattacagataaggcaaaaaaactttttgaggaaaatgaaactatcacagatttagatgtaaattctgagcttaaaaatttagaaaaaagcatagtaagaacagatattttaaaaaacaaaaatagaattgatggtaggggactatcagatgtgaggcctataatgtgtgaggttgggattttgccaagagtgcacggttctgccctatttacacggggagaaacacaagcaattgtcacgactacattaggaacttcggatgatgagcaaagaatcgagagtttagagggtcttcaaagagagagatttatgcttcattataactttcctccattctcagttggagaaactggaaggataggaacaggtagaagagaaattggacatggtaaacttgcatggagagcaattaattcttctttaccttcaaaagaaagttttccatatacatttaggatagtttcagaaattacagagtctaatggatcatcttcaatggcaacagtttgtggaacatctttggcgttaatggatgcaggagttccaataaaagaaccagtagcaggtattgcgatgggtttaattaaggagggtgatgattttagtgtattatcagatattcttggagatgaagatcatcttggtgacatggattttaaagttgctggaactaaagatggaattacatctcttcaaatggacataaaaattactggtattactttcgaaattatggaacaggcattaaatcaagctaaagatggcagagttcatatattaggtgaaatgaataaagcattaggtaagtcgagagacgaagttggaaaacataccccaaaaatggaaaaaattactgtagataaaaaagatattgctactgttatcggcaaaggtggagcaaccatcagagagatagttgaaaaatcaggtgccaaagttgatgtaaatgacgaaggagttgttacagttgcagcaccagacgatgagtctagaaataaagcaatgcagttcattaaggatcttactgctaaagctgaaatgaataagatttataatggcaaagtaataaaaataatggaatttggggctttcgttaattttttaggaaaacaagatggacttgtacatatttcagaacttgcaaataaaagagttgcaaaagtaacagatgttttaaaggaaggcgatgcagttaaggtgaaagttattggatttgacaggggtaaagttaaattatcaattaagcaagctgcggtctgat

SEQ ID NO: 257374 - DNA, 2068 bp, Unknown
  Bacterial polypeptide expressing nucleotide sequence isolated from the Sargasso Sea
aatgcaaacaaaaacttttgatctaggtggtcaatcagtaaaaatcgaaactggtttattagcaaaacaatcaactgcatcagtcactgtagatatagagggtactgtaatccttgccacattagttgctgataaaaatgatagtgatagagacttttttccactaactgtcgattacattgaaaaaacatatgcagcgggaaaaattccaggtggtttttttaaacgagaaggtcgtccaagcgaaaaagagaccttaataagccgcttagttgatagacctctgagaccactttttgattcaagtttcacacgcgaggttcaattaatacttactttactatcatataatcctgatgttgatgcagaaataccagcattgatagcggcatcagcttgcgttaaattatctggcttaccttttaacgggactttaggtgcagttaaagttggttacgatggcaatgattatatattgaatcctagtaacagcgctttaaaagagtcgcttttagatttaacagttgcaggcacgaaaaatgccgtaatgatggttgagtctgaagcaaaagaattgacagaagatgttatgcttggtgctgtcaattttggtcatgaaaaaatgcaggttataataactgcaattgaagaactagttgctgatgctaacgtcagccaaattgattggacacctcctgtctcagataatcaagcatatgaagaattttttgataaatataaagaacgaataacagatgcatattcgattacaaaaaaacaagagagaaatactaaactgtctaacatcaagacagaaataatagaatcagattcaaatgaagatgaggatattgaagataaaatatcttgtatgtttgaaaaagcccagaaaaatattgtcagaaagagaattattgatggcgagagaagaatagatggcagagacactgttactgtaagacctattgatgtaaaagttggcattcttcctaggacgcatggttcggcactatttactagaggagaaactcaggcattggtagttacagcattagggactgagaaagatgcacaaatgatagattcgcttgatggcagaattgatgatacatttatttttcattacaatttcccaccatattctgttggagaaattggaagaactggttcgcctaaacgtcgtgaaattggtcatggtaagttagctagaagaggaatacaatctgttgtcccaactgttgatgaatttccatatacaattagagttgtttctgaaatactcgagtcaaatggctctagttcgatggcgtcagtttgtggatcgagtctatcgatgatggatgctggcgttcctatcaaaagacctgttgcaggtatagccatggggcttgttaaagaaggagataagcatgtcgtgctaactgatatattaggtgatgaagatcatctaggagatatggattttaaagttgctggaacatcagtaggaattaatgcactacaaatggatattaaagtagatggcataacatcagagattatgtctaaagctctagcacaagcacgtgatgcgagattacatatattatcggagatgggaaaagtcatctctgaagccaggaaagaaccgtcgccgtttgcacctcgttatacacatgtaaaaattgatcagtctaagatcgctgcagtcataggtaaaggaggagcaacaattaaatctattattgagaaaactggagcacaaattgatatagatgatagcggtcttatcaaaattgcatctaacgatcaatccattggtgataaggcaaaagagatgatagaagaaatcaccgtgggcccacaagtagataagatttatgagggtagagttgttaaaattatggattttggtgcatttgtaagtattacacctagtcaagatggtttagtgcatatctctcagataagcgaagagagagtaaacaatgtaagtgatgtattgactgaaggcgatgttgtcaaagttaaagtccttgaagttgataagcaaggccgcgttaaattaacgatgaaaaatttggattag

SEQ ID NO: 257375 - DNA, 2074 bp, Unknown
  Bacterial polypeptide expressing nucleotide sequence isolated from the Sargasso Sea
atgtttaaagtgtttaaaaaagaaatagatttcgggggaaaaaaaatcacccttgaaactggaaaagttgctcgtcaagcagatggagcaataatagcaacttgtggtgagactgtagttttggcgacagctgtaggtgcaaaaaaaattaacccagatgtagattactttccattatcggtaaactaccaagaaaaatattacgctgcgggtaaaatacctggaggatatttcaaaagagaagcgaggccaacagaaagtgaaacccttatctctagattaattgatagacctataagacccttgtttccagacgaattcaaaaatgaagtgcaagtattaccaactgtaatatcgtatgataaagagaatgaagctgacattttatcaatcattgcctcttcagctgctttagctatttcaggtatgccctttctgggaccggttggagcatcaagagttggttttattgatggaaaatatgttttaaatccatcaaaaatagatttagaaaattcaaaattagatttagtcgtagcaggcacaaaagatgctgttttaatggtagaatcagaggcaagtggtttgaccgagaaacaaatgttggatgctgtgaaatttggtcacgaagggtttgtgccagtgataaaaatgatcgaagacttagctaaggaatgtaaaaaacctaactgggttgttgagaaaaaagacttatcctcaataaagaaaaagttagagaaagaattcactgaggacttaaaaaaagcattctcaataaaagataaacaagaaagatcaaatttaatatctgaggtaactgaaaaagcaaaaaaactttatgaagaagatgagaattttacagaattagacgttatgcatgaactcaaagatattgaaaaaggtattgtaagaactgatatcttaaaaaataagaacagaatcgatggaagaggacttgctgacgtaaggccaattatgtgtgaagtgggaatattgcccagagttcatggatcagcactattcactagaggagaaacgcaagcaattgtcacaactactctcggcacttcagatgatgaacaaagaattgaaagtttggatggccttcaaagagaaagatttatgcttcattacaacttccctccgttttctgttggggagactggaagaattggaactggaagaagagaaatagggcacggaaaattagcttggagagctatcaaatcttcattaccttccaaagagagctttccatatacttttagaatagtttctgaaattactgagtcgaatggatcctcttcaatggcaacagtttgtggatcatctctatctttaatggatgcaggagttccaattaaagagcctgtagcgggtattgcaatgggattaataaaagagggagaagactttagcgtactctcggatatacttggagatgaagaccatcttggagatatggattttaaagtagccggaaccaaagatggaattacttctctccaaatggatataaagataaccggcattacttttgaaattatggagcaagcattaaaacaagcaaaagatggaagagttcatatcttaggtgagatgaataaagctctagctaaatcaagaagtggtgttggcaaacacactccaaaaatggaaaaaataacagttgataaaaaagatattgctactgttataggtaaaggcggagccactataagagaaatagttgaaaagtcaggagccaaagtagatgtgaatgatgaaggagtagtcactgtagcagcaccagatgaagactctagaaacaaagctatgcaaatgatcaaagatttaacagcaaaagctgaactaaataaaatttataacggtaaagttatgaagattatggagtttggagcttttgtaaatttcttaggaaaacaagatggtcttgtacatatttcagaacttgcagataagagagtagctaaagtgacggatgttgtaaaagaaggtgatgaagtaaaagtaaaagttatcggtttcgacagaggaaaagtaaaactatcaataaagcaggcagctgtttaaa

SEQ ID NO: 257376 - DNA, 1497 bp, Unknown
  Bacterial polypeptide expressing nucleotide sequence isolated from the Sargasso Sea
aatgtttaaaatatttaaaaaagaaatcgaattaaacggaaaaaaaataagtttagagacaggtaaaattgcaagacaagctgatggtgcaataattgcaaaatgtggagaaacagttgttttagcaactgttgttggtgcaaaaaaagtcaatccagatatggattattttccattgtcagtcaactatcaagaaaaatattatgcagcaggaaaaattcctggtggttattttaaaagagaagcaagaccaactgaaagtgaaacattaatatcaagattaatcgacagacctataagaccattgtttccagatgaatttaaaaatgaagtacaattgctaccaacagtcatatcctatgataaagaaaatgaagcagatatattatcaatcattgcttcatcagcagctttagctatttcaggcatgccatttatgggtcctatcgcggcatctagagttggttttattgacgggaaatatgttcttaatccatcaaaaaaagaattagaaaattcaaaattggatcttgttgtagctggtacaaaagatgcagtcttaatggttgagtcagaaacaagcggtttaaccgaaggagaaatgttagatgcagttaaatttggacatgaaaattttgttccagtaattaatatgattgaagagctcgctaaagaatgtaaaaaacctgattgggttgtagaaaaaaaagatctttcagaagttaagaaaaaaattgaagatgagtttacagatgaattaaaaaaagctttttcaatcaaagataaacaagaaagatcaaatttaatctctgaaataacagataaagccaaaaaactatttgaagaaaatgaaagttttacagatttagatgtcaattctgaacttaaaaatttagaaaaaagaatagttagaacagatatattaaaaaataaaaatcgtattgatgggaggggactttcagatgtaagacccatttcgtgtgaagttggaattttgccacgaactcatggttcagcactatttactagaggtgaaactcaagcgattgtaacaactacgcttggaacttcagatgatgagcaaagaattgaaagtttagaaggccttcaaagagaaaggtttatgcttcattataattttcctccattctcagttggtgaaactggaagaattggaacaggtagaagagaaattgggcatgggaagcttgcttggagagcaataaaatcatctttaccatcaaaggagagttttccttatacatttagaattgtatcagaaattacagagtctaatggttcatcatcaatggcaacagtttgcggaacgtctctagcattaatggatgcaggagttccaataaaagaacctgttgcaggtattgctatgggaataattaaagaaggtgatgattttagcgtattatcagacattctaggggatgaagatcatcttggtgatatggattttaagggtgctggaactaaagatggaat

SEQ ID NO: 257377 - DNA, 2074 bp, Unknown
  Bacterial polypeptide expressing nucleotide sequence isolated from the Sargasso Sea
aatgtttaaagtatttaaaaaagaaattgaattaaatggaaaaaaaataattttagagacaggtaaaattgcaagacaagctgatggatcaataattgcaaaatgtggagaaacagttgttttggcaactgttgtaggtgcaaaaaaagtaaatccagacatggattactttccattatcagtaaattatcaagaaaaatattatgcagcaggaaaaattcctggtggttattttaaaagagaagcaagaccaactgaaagtgaaacactaatctcaaggttaattgatagacctataagaccattgtttccagatgaatttaaaaatgaagtacaattacttccaacagtaatatcttatgataaagaaaatgaagcagatatattatcaattattgcttcatcagcagctttagcaatatcaggcatgccattcatggggcctgtaggagcttctagagttggttttattgatggtaaatatgttcttaatccatcaaaaaaagagttagaaaattcaaaattagatcttgttgttgcaggtactaaagatgcagttttaatggttgaatctgaaacaagcggtttaacagaagaagaaatgttaaatgcagttaaatttggtcatgaaaattttatcccagtaattaatatgattgaagaacttgcttcagaatgcaaaaaacctgattgggttgtagagaagaaagatctttctgaagtaaagaaaaaaattgaagaagaatttacagacgaattgaaaaaagctttttcaattagagataagaaagaaagatcaaatttaatatctgaaataaccgaaaaagcaaaaaaactatttgaagaaaatgaaaattttacagatttagatgttaattctgaacttaaaaatttagaaaaaagaatagttagaacagatatcttaaaaaataaaaatagaattgatggaagaggactttcagatgtaagaccaattatgtgtgaagttggaattttaccaagaacacatggttctgctttgtttacacgaggtgaaactcaagcaatagttacaactactcttggaacttcagatgacgaacagagaatcgaaagcttagaaggtcttcaaagagaaagatttatgcttcattataattttcccccattttcagttggtgaaactggtagaattggaacaggaagaagagaaattgggcatggaaaacttgcttggagagcgattaattcgtctttaccttcaaaagaaagttttccttacacgtttaggattgtatcagaaataacagagtctaatggttcatcatcaatggcaacagtttgtggaacttcattagcattaatggatgcaggcgttccaataaaagaaccggttgcaggtattgctatgggattaattaaagaaggcgaagattttagtgtattatcagacattcttggagatgaagatcatttgggcgatatggactttaaagttgccggtacgaaagatggaattacatctcttcaaatggatattaagataacaggaattacatttgaaataatggaacaagctttaaaacaagctaaggatgggagaattcacatcctaggtgaaatgaataaagctctaaataaatcaagagatggtgttggtaaacacactccgaagatggaaaaaatcactgtagataaaaaagatattgctacagttattggaaaaggaggcgcaacaataagagaaatagttgaaaaatcaggtgctaaagtagatgttaatgatgaaggagttgtaacagttgcagcaccagatgaagaatctagaaatattgcacttcaatttatcaaagatcttactgctaaagctgaattaaataaaatttataacggaaaagttatgaaaattatggaatttggagcatttgttaactttcttggaaaacaagatggtctggttcacatatcagagttagctgataaaagagttgctaaagtaactgatgttgtaaaagaaggtgatgaggtaaaagttaaagttataggttttgatagaggaaaagttaaactatctattaaacaagcagaaatttaa

SEQ ID NO: 257378 - DNA, 1900 bp, Unknown
  Bacterial polypeptide expressing nucleotide sequence isolated from the Sargasso Sea
aatgtttaaagtatttaaaaaagaaattgaattaaatggaaaaaaaataagtttagaaactggtaaaattgctagacaagcagatggagcaataattgctaaatgtggagaaacagttgttttagcaacagttgttggtgcaaaaaaaataaatccagatgtagattactttccattatcagttaattatcaagaaaagtattatgcggcaggaaaaattcctggcggttattttaaaagagaagctagaccaaccgagagtgaaacactaatttcaaggttaattgatagacctataagaccattgttttcagacgaatttaaaaatgaggtacaattacttccaacagtaatatcatatgataaagaaaatgaagcagatatactatctattattgcttcatcagcagctttagctatatcaggcatgccattcatgggaccagttggagcttctagagttggttttattgatgataaatatgttcttaatccatcaaaaaaagagttagaaaattcaaagttggatcttgtagttgcaggtactaaagatgcagttttaatggttgagtctgaaacaagtggtttaactgaagaagaaatgcttaatgcggttaaatttggccatgaaagttttattccagtaatcaaaatgatagaggaacttgctgctgaatgtaaaaagccagattggactatagagaaaaaagatctttcagaagttaagaataaaattgaaaaagaatttacggaagaattaaaaaaggctttttcaatcaaggataagcaagaaagatcaaatttaatatctgaaataaccgacaaagcaaaaaaattatttgaagaaaatgaaaattttacagatctagatgttaattctgaacttaaaaatttagaaaaaagaatagttagaacagatatcttaaaaaataagaatagaattgatggaagaggactttcagatgtaagaccaattatgtgtgaagttggaattttgccaagaacacatggttctgcattgtttacaaggggtgaaactcaagcgatagttacaactacgcttggaacttcagatgatgagcaaagaattgaaagtttggaaggtcttcaaagagaaagatttatgcttcattataattttccgccattttcggttggagaaactggaagaattggtactggaagaagagaaattggacatggaaaacttgcatggagagctataaattcgtcactaccatcaaaagaaaattttccttatacatttagaatagtatcagaaattactgagtctaatggctcatcatcaatggcaacagtctgtggaacttcattagcattaatggatgctggtgttccaattaaagagcctgttgcaggtattgcaatgggtttaattaaagaaggtgatgactttagtgtattatcagacattcttggagacgaagatcatttaggagatatggattttaaagttgctggaaccaaagatggaattacatcacttcaaatggatattaagattactggaattacatttgaaataatggaacaagctttaaaacaagccaaagatggaagaattcatatcttaggagaaatgaataaagctttagataaatctagagatggcgttggcaaacatactcctaagatggaaaaaataactgtagataaaaaagatattgcaacagttattggaaaaggtggcgcaaccataagagaaatagttgaaaaatcaggagcaaaagttgatgtaaatgatgaaggtgtagttactgttgctgcaccagatgaagaatctagaaatattgctctgcaatttatcaaagacctaactgccaaagctgaactaaataaaatttataacggtaaagttatgaaaattatggaatttgga

SEQ ID NO: 257379 - DNA, 1415 bp, Unknown
  Bacterial polypeptide expressing nucleotide sequence isolated from the Sargasso Sea
attgtttccagatgcatttaaaaatgaagtacaagtacttccaactgtaatttcttatgacaaagaaaacgaagcagatattttatcaataattgcttcatcagcagctttatcaatatcaggaatgccttttttaggacctgttggagcatctagagttggctttgttgatggaaaatacgttttaaatccttcaaaaacagaacttaaaaattcaaaattagatctagttgttgctggaaccaaagatgcggtcttaatggttgagtctgaagcaagtgttttaacagaagaagaaatgttaaatgcagttaaatttggtcatgaaggttttgtgccagtgatcgaaatgattgaagagttaaccaaagaatgtaaaaaacctgattgggttcttgagaaaaaggatctttccgaagttaagaaaaaacttgagggagaatttacgaaagagttaaaaaaagctttttctattaaagacaaacaagaaagatcaaatatgatttcagaaattacggataaagctaaaaaaatatatgaagaagatgaaaattatacagatttagatataaattctgaacttaaaaatttggaaaaaagcatagttagaactgacattttaaaaaataaaaatcgaattgatggaagaagtttgtcagatgttaggcctataatgtgtgaagttggaattcttccaagagttcatggctcagcattatttacaagaggagaaacgcaagcaattgttacaactacacttggcacatcagatgatgaacaaaaaattgaaagtttagatggacttcaaaaagaaagattcatgctccattataactttccaccattttcagtgggtgaaactggaagaattggaactggcagaagagaaataggacatggaaaacttgcatggagagcaataaactcatctttgccaccaaaagaaacttttccatatacatttagaatagtttcagaaataacagaatctaatggttcatcttctatggcaactgtttgtggaacttctttagcattaatggatgctggtgttccaattaaagagccagttgcaggtattgcaatgggactaattaaagagggtaatgattttagtgttttatctgacattctaggtgatgaagatcatttaggtgatatggattttaaagttgctggaactaaagatggaataacctctcttcaaatggatattaaaataacaggtattacatttgaaattatggaacaagctttaaaacaagctaaagatggaagaattcacatcttgggtgaaatgaataaagctcttactaaatcaagagatgacgtcggtaaacataccccaaaaatggaaaaaatatcagtagataaaaaagatatagcaactgttattggaaaaggcggcgcaacaa

SEQ ID NO: 257380 - DNA, 1320 bp, Unknown
  Bacterial polypeptide expressing nucleotide sequence isolated from the Sargasso Sea
tagaaacaggcaaaatcgcaagacaagccgatggagcgataatagcaacgtgtggagaaacagttgttttagcaactgttgtggagcaaaaaaaataaatccagatatagattactttccattatcagttaattaccaagaaaagtattatgcagctggaaaaatacctggtggatattttaaaagagaagccagaccaactgaaagtgaaacattaatttcaagattaatagatagacctataagaccattatttccagatgagtttaaaaatgaagtacaattattaccaacagtaatatcttacgataaagaaaatgaagctgatatattatcaattattgcttcatccgcagctttagctatatcaggcatgccatttatgggacctgttggagcttctagagttggttttatagatggcaattatgtccttaatccatcaaaaaaagaattagaaaattcaaaattggatctcgttgttgcaggcacaaaagatgcagttttaatggttgagtctgaaacaagcggattaactgaagaggaaatgttaaatgcagttaaatttggtcatgaaaattttataccagtaattgaaatgattgaagaacttgctgcagaatgtaaaaaacctgattggatagtagaaaaaaaagatgtatctgaagttaagaaaaaacttgaagatgaatttactgatgaattaaaaaaagctttttctataaaagacaaacaagaaagatcaaatttaatttctgaaataacggacaaagcaaaaaaattgtttgaagaaaatgagaattttacagacttagatgtgaactctgagctcaaaaatttagaaaaaagaatagttagaacggatatattaaagaacaaaaaaagaatagatggaagaggtctttcagatgtaagaccaattatgtgtgaagtaggaattttaccaagaacacacggatcagcactttttacaagaggcgaaacacaagcaattgtaacaactacacttggaacttctgatgatgaacaaagaatagaaagtttagagggtcttcaaagagaaagatttatgttgcactataattttcctcctttttcagttggtgaaactggaagaattggaacaggaagaagagaaattggacatggaaaacttgcttggagagctatcaactcatctttacctccaaaagaaggtttcccatatacatttagaattgtatcagaaataactgagtcaaatggttcatcatctatggcaacagtttgtggaacttctcttgcgttaatggacgctggtgtgccaataaaagaaccagt

SEQ ID NO: 257381 - DNA, 2110 bp, Unknown
  Bacterial polypeptide expressing nucleotide sequence isolated from the Sargasso Sea
atgggtcacgtgaatccaattgtaaagagttttgagtatggtcaacatacagtcaccctggaaacaggcgttatagcgcgtcaagctgatgcagccgtgttagcgagtatgggtgacacgacagtgttagtcactgttgtaggtaaaaaagaagctgaagcaggccgtgacttctttcctctgactgttaactatcaagaaaagagctacgcagcgggtaaaattcctggtggtttctttaagcgtgaaggccgtccttcagaagatgagacattaatcgctcgcctgatcgaccgtccaattcgtcctcttttccccaatggtttcaccaacgaagttcaagttatcatcactgtggtatctgtcgatccacaaatcgagccggatattatttcgatgatcggtacttcggcggcgcttgccatttcgggtattccattcagcggtccattaggtgcggcgcgtgtgggttacatcaatggcgaatacgtactgaacccaacagtgactcagttagaaagcagccaactaaacttggttgttgcaggtactgagagcgcggtattgatggttgagtcagaagctcaagccttaccagaagaagtgatgttaggctcagtggtttatggtcacgaccaacaacaagtggttatcaaagcgattgctgaattcaaagcagaagccggtaaaccagcttggaattggactgctccagtgcaagatgaaacgctggttgctcaaatcaaagcgcttgctgaagcgggtttaggcgatgcgtataaaatccaagtaaagcaagatcgttatgctcaagttgctgtagttaaagctgcaacgaaagaagcgttattagcaagcaatcctaatattgatttacgtgaagttgatggtctgctcggtagcttagagaagaaagtagttcgtggtcgcatcatccgtggtgagccgcgtatcgatggtcgtgagccagatatgattcgcgcattaagcgtattggcaggcgtattaccacgtacccacggtagtgcactgtttacccgtggcgaaacccaagcgctggtgacttgtactttaggtactgagcgtgacgcacagaagattgatagcattatgggcgagcgcactagccgcttcatgctgcactacaacttccctccttattctgttggtgagacaggtatggtgggttcacctaagcgtcgtgaaatcggccacggcaagttagcatggcgcggtatcaacgcagtaatgccatctgctgaagagttcccatacagtgtgcgtgtggtttctgaaatcactgaatctaacggttcaagctctatggcatcagtctgtggtacgtctcttgcgctgatggatgcgggtgtacctatcaagacttctgtagcgggtatcgctatgggtctagtgaaagaaggcgatgactttgtggttctgtctgacatcttaggtgatgaagaccacttaggtgacatggacttcaaagtagccggtacccgtgacggtgtgactgcactgcagatggatatcaagatcgaaggtattaccaaagaaatcatggaaattgcactgcaacaagcctatggcgcacgtgtacatatcctaaacgtgatggatcaagcgattggttcgcaccgtgatgatatctctgaccatgctccacgtatcacaactatcaagatcaacccagagaagatccgtgatgttatcggtaaaggcggcgcggtaattcgtgcactgaccgaagaaactggcacgactatcgagcttgaagatgacggtacagtaagaattgcttcttctaatggcgaagccaccaaagaagctattcgtcgtatcgaagaaatcacttcagaagttgaagtgggtcgtatctacaacggtaaagttatccgtatcgttgacttcggtgccttcgttaacattctgccaggtaaagatggtttagtgcacatttcgcaaatcagcgatgagcgtgttgctaatgtctcagaccaccttgaactgaaccaagaagtcaccgttaaagtgatggaagtggatcgtcaaggccgtgtaagactgtcaatcaaagaagcacagactaaagagtctgctgctgaataat

SEQ ID NO: 257382 - DNA, 1318 bp, Unknown
  Bacterial polypeptide expressing nucleotide sequence isolated from the Sargasso Sea
aatgtttaaagtatacaagaaggaaattgaagtagcaggaaagaagataattttagaaacaggtaaagtagccagacaggcagacggtgcaataatcgcaacatgtggagagacggtcgtactagcaacagtggtgggagcaaaaaaagtaaatcctgacatggattactttcctttatctgtaaattaccaagaaaaatattatgcagctggaaaaattccagggggatattttaaaagagaagcaagaccaactgagagtgaaacattaatctctagattaattgatagaccaattagacctttgtttccagatgaatttaaaaatgaagtacagttgttgccgacagtaatttcatatgataaagaaaatgaaccagatattttatcaatcactgcgtcttcagcagctttagctatatcaggaatgccatttatgggtcctgtcggtgcttcaagagttggccttgtagatggaaaatatgttttaaacccatctaaagcagaattagaaaaatcaaaattagatttagtagtagcaggtacaaaagatgctgtgcttatggttgagtctgaagcaaatggtttaacagaagaagaaatgttaaatgcggttaaatttggtcatgaaggttttgttccagtaattgagatgatagaggaacttgcaaaagaatgtagaaaacctgagtggatagttgagaagaaagatttatctgaagttaagaaaaaacttgaggaaacttttacggaagatcttaagaaagcttttgcaacaagagataaacaagatagatcaaatcagatttcagagattactgataaagctaaaaagctttatgaggaagatgaaaactacacagatcttgatgttaacagtcagttaaaaaatctagaaaaatcaattgttagaacaaacattctaaaaaataaaaatagaattgatggtcgaggtttgtcagatgtaagacctattgaatgtgaagtgggcgttttacctagagctcatggttctgcattgtttactagaggtgaaactcaagcaattgttgttgcaactttaggaacatctgatgacgagcaaagaattgaaagtttagatggattacaaagagagcgatttatgcttcactataattttcctcctttttcagttggagaaactggaagaattggaactggtagaagagaaatcggacatggtaaactagcttggagagcaattaattcttcattaccaacaaaagaagcgtttccatatacttttagaatagtttcagagattacggaatctaatggttcttcttcaatggctact

SEQ ID NO: 257383 - DNA, 1376 bp, Unknown
  Bacterial polypeptide expressing nucleotide sequence isolated from the Sargasso Sea
aatgtttaaaatagtaaaaaaagaaattgaagtagcaggaaaaaaggtaagtttagaaacgggaaaaatagcaaggcaagcagatggtgcaatcattgcaaaatgtggagaaacagttgtattggctactgctgtaggagcaaaaaaaattaatccagaagtagattactttccattatctgtaaattatcaagaaaaatattatgcagcaggaaaaattcctggtggatattttaaaagggaagcaagaccaacagaaagtgaaacattaatctcaagattaattgatcgtcctataagacctttgtttccagatgaatttaaaaatgaagtacaagtacttccaactgtaatatcttatgataaggaaaatgaggcagatattttatcaattattgcatcctctgctgctttagcaatttcaggaatgccatttatgggtcctgtaggtgcttcaagagttggatttatagaaggaaagtatattcttaatccttcaaaagcagatcttaaaaattctaaattagatttagtggtggcaggaacaaaagatgccgttttaatggtagagtctgaagccagaggtctaactgaagaagaaatgctaaaagcagttaaatttggacatgaaggatttgtacctgtaattaaaatgatagaggatctagctaaagaatgtaaaaagccagattggattgtagaaagtaaagatctttctgaagttaagaaaaaaattgagaaagaatttacaactgatttaacaaaagcttttgcaacaagagataaacaggatagatcaagccaaatttcagagatcacagacaaagctattaagctatttgaggataatgaaaattatacagatcttgatgtgaattatgaacttaaaaatttggaaaaaagaatagttagaacagatattcttaagaaaaaaaatcgtattgatggtagaggtttagctgatgtaagacctattatgtgcgaagttggtatcttaccaagaacacatggatctgctctttttactagaggtgaaacccaggcaattgttacagcaactttaggaacatctgatgatgaacaaagaattgaaagtttagatggattacaaaaagaaagatttatgctccattacaattttccacctttttcagttggagaaactggaagaattggaactggaagaagagaaataggacacggaaaacttgcttggagagcaattaattcatctttaccaacaaaagaaagttttccttatacatttagaatcgtatcagagattactgagtctaatggttcttcatctatggccactgtatgtggaacttctttggcattaatggatgcaggtgttccattaaagagcctgttgc

SEQ ID NO: 257384 - DNA, 2074 bp, Unknown
  Bacterial polypeptide expressing nucleotide sequence isolated from the Sargasso Sea
atgtttaaaatttataaaaaagaagtagaagtagatggaaagaaaataacattagaaactggaaagatagctagacaagctgatggctcaatcattgctcaatgtggagaaacggttgttatggcaacagtggttggagcaaaaaaagtaaatccagaagtagattattttcctttgtcagtaaactatcaagaaaaatactatgcggctggaaaaattcctggaggttattttaagagagaagcacgacctactgaaagtgaaactttaatatcaagattaattgatagaccaattagacctttgtttccagatgaatttcgaaacgaagttcaactattaccaactgtaatttcatatgacaaagaaaatgaaccagatgtactttcaataattgcatcatcagcagccttagctgtatcaggaatgccgtttatgggacctgtgggggcatctagagttggttttattgatggtaaatatgtacttaatcctacaaaaaaagaattagagaattctaaattagatcttgttgttgcaggaacaaaagatgctgtcctaatggttgagtctgaagcaaatggtttaaccgaggaagaaatgcttaatgcagttaaatttggtcatgaaaattttgttcctataattaatatgattgaagaactcgcaaaagaatgcaaaaaacctgactgggttatagaaaaaagagatctttcagaaattaagaaaaaactcgaaaaggaatttaaaaccgatttaatcaaagctttttcaattagagataaaaaagaaagatcaaatcttatttccgaaataacagataaagcaaaaaaaatatatgaagaaaatgaaaattacacagatttagatgttaattatgaacttaaaaatttagaaaaaagaatagttagaaatgatattttaaaaaataaaaaacgtattgatggtagaggacttgcagatgtaaggcaaattatgtgtgaagttggaatattgccaagaactcatggctcagcattatttacaagaggcgaaactcaagcaattgtaactactacacttggaacctcagatgatgaacaaagaattgaaagtttagaaggtttacaaagacaaaggtttatgcttcactataattttcccccgttctcagttggagaaacaggaagaattggaacaggaagaagagagattggacatggaaaacttgcttggagagcaattaattcgtctttaccgtctaaggaaagttttccttacacatttcgaatagtatcagaaattacagaatcaaatggttcctcttcaatggcaacagtttgtggaacttcactggcattaatggatgctggagttccaataaaagaaccagttgctggaattgctatgggattaataaaagaaggtgatgattttagtgtattgtctgacattttaggagacgaggatcacctcggtgatatggattttaaagttgctggcaccaaagacggcattacatcacttcaaatggatattaaaattacaggaattacttttgaaataatggagcaagctttaaaacaagctaaagatggaagaattcatatcttaggagaaatgaataaagctttaggtaaatcaagagatggagttggaaaacatactccaaaaatggaaaaaataactgtagataaaaaagacattgcaactgtaattggaaaaggtggagcaacaataagagagattgttgaaaaatctggagcaaaagttgatgtaaatgacgaaggcgttgtaaccgtagctgctccagatgaagattctagaaataaagctatgcaatttattaaggatcttacggcaaaagcagagatgaataaaatttataatggaaaagtaataaaaattatggaatttggtgcttttgttaattttttaggaaaacaagatggtcttgttcatatatcggaacttgcaaataaaagggttgccaaagtaacagatgttgtaaaagaaggcgatcaagtaaaagttaaagttattggttttgataggggaaaagtaaaattatcaatcaaacaagctgtagcttaaa

SEQ ID NO: 257385 - DNA, 1675 bp, Unknown
  Bacterial polypeptide expressing nucleotide sequence isolated from the Sargasso Sea
agctgcttcaagtgctttgacattatctggcataccattcatgggaccaattggaggatgtagagttggttatgacggtaaagattatatattaaatccaaaaattaatgaagaaactcaattagaccttgtagtgtctggaactcaagacgcagtcttgatggtagaatctgaagctaaagaactttctgaggaaatcatgttggatgcagttaaattcgggcacgagtcaatgcaagaagtcataaaaataattatcaatcttgctgaggagtgtgctaaagatccatgggattttgaacataatgttaacgatgagttgatgaatgagctcaaaagtgaattcgaagatcaaatcaaaaaaagttattcaattattgataagatggaaagacaaagctctctaagcgaaatcaagtctgttttagaagaaaaatacgctgacattgaagatcaaaatattaatgaagtaatgtcatatttcaaaaaaattgaaaaagatgtcgttaggtctcaaattttgaacgataaatctagaattgatgggcgtaagcttgatgaagtaagggatatttcttcagaagtatcatggttgcccagaacacatggatcttctctatttactagaggcgaaacacaagcaatagttgttgcaactcttggatttggggaagatgagcaacgaattgaggcgcttcaaggctcttataaagaaaatttcatgcttcattataattttcctccatattcagttggtgaggttggaagaatgggttcagcaggtagaagagaaattggtcatggcaaattagcttggagagcccttaaagcggtattgcctaataaagaggattttgattatacaatccgcttagtatcagatattactgaatcaaatggttcatcatcgatggcgactgtttgtggatcttcacttgctctaatggatgctggggttcccatcaaaaattcagtttcaggtattgcaatgggattaattaaagagggcgatgatttcgctgtattatctgatattctaggtgatgaagatcatttaggtgatatggattttaaagtagcaggtaccaaagacggtgttacatctttgcagatggatattaaaatcactggaatcacatatgagattatggaaaaagctctcgaccaagctaaaggcggaagagaatatatcttaaatgaaatgaataaagcgttagactctccaagaactgaacttggaccttacacaccaagagttgaaatgatgaaagtcaaaagagataatattggtgaaattattggaaaaggtggtgcaaccataaaagatataattgaaaaatctggagcaagaatcgatattagtgatagtggcaatgtaaaaatagctggaaccaataatgaatcaattcaagccgcaattgaattaataaactcaattattgaagagcctgaagttggtcaggtttatgagggtaaggttgttaaaattatggaatttggcgcatttgttaatttctttggaaaaagggacgggcttgttcatatttcacaactatctgaagagagagttgagaaagttactgacgttgtaagtgaaggtgatatagttaaagtcaaagtaatcggttttgataaaggcaaggttaaattatcaataaaggatgctgaaatctaa

SEQ ID NO: 257386 - DNA, 1234 bp, Unknown
  Bacterial polypeptide expressing nucleotide sequence isolated from the Sargasso Sea
aaaaccagatttagatttttttccgcttacagtaagttatcaggaaaaattttatgctgctggtaaaattccaggtggtttttttaaaagagagggaagaccaacagagtttgaaactcttacctcaagattaattgatcgtccaatcaggcctctctttccagaaggctttaaaaatgaaactcaagttatattaactgtactttcgcatgacggagaaaccaatcctgatattgttgcaatgatagcggcctcaagtgcattaacattgtctggagttccttttatgggcccaattggtggatgtagagtgggttatgatggatcaaattatacattgaatccaaaaataaatgacgatggagatcttgatcttgtcgttgctggcactagcgacgctgtactaatggttgaatctgaagcaaagcagctttcagaggaaattatgttaggagcggtaaagtttggtcatgagtcaatgcaagaagttataaaaatcataatcaatcttgctgaggaatgcgcaaatgacccttgggagttcagccatacaattaatgagtcattgttagatgaaattaaaaaaacttgtgaagataaaattgcgaagagttactcaattgttgataagatggaaagacaaagttcactttctgaaattaagtcaagtttagaggatcaatataaagaaaacgaggaatacagcatcaacgaggtaatgggatattttaaaaaaatcgaaaaaaatgttgtgagatctcaaatattaaataatcaatctagaattgacggtcggaagttagatgaagtaagaaatatttcgtcggaagtatcgtggctgccaagaactcatggatctgctttatttacaagaggtgagactcaagcaattgttgtggcaactttaggatttggcgaagatgaacaaagaattgaagcattgcaaggatcatacaaagaaaatttcatgcttcattataattttccaccatattcagttggtgaagtaggaagactaggagcaacaggtagacgtgaaattggccatggaaaacttgcatggagagctctaaaggcagttttaccatcaaaagatgactttgattataccattagactagtctcagatattacggagtcaaatggatcatcatctatggcaactgtgtgtggttcatcacttgcattaatggatgcaggagttcctattaaaaattctgtttcaggaaatagc

SEQ ID NO: 257387 - DNA, 691 bp, Unknown
  Bacterial polypeptide expressing nucleotide sequence isolated from the Sargasso Sea
atgaaaattaaaacagcattgattttatgtgccggtttgggcacaaggttaaaccctctaactttaaaaacacccaagccattactcgaattaaaaaatataactatgctggaaagatgtataaagatggttatagaattaggtataagaaaaattttattgaatacttatcacttagaaaatcaaattattaaatttataaatattaaaaaatttccaattgaaattcaaataattgaagatggacaaaaaattttagatactggtggtgggattttgaatatgattgagcaatcaaatgaaaatgattttataattttcaaccctgacacattgtggagcaaaggttatattgttgaaattaataaaatgcaggatctttatttttctaaaaatcttaataatattcttttattaacaaaaaaagaaaacagttttgataaaaatcttaaaggcgattttaatttaattaataattcaataaataaagatgatttaaatgatttcatttatattggttgtcaaattttaagtaaaaatttatttaaaaaatttgaaataagtaatttttctattacaaaaatatggaatagattacttgaaaaaaataaattaaatggttttcaaagttacaataaattttatcatttaactaatttagaaacatttaaaaaactaaaagacttttagc

SEQ ID NO: 257388 - DNA, 680 bp, Unknown
  Bacterial polypeptide expressing nucleotide sequence isolated from the Sargasso Sea
attgataaaaaaagcagtaataccagttgcaggctttggaacaagatttttaccagcatcaaaagcaactcccaaagagatgctcccaattattgataagcctttagtccaatatgctgttgaagaggcaattgatagcggcattaatgaaattatttttattaccagtcctgaaaagcactcaataaaaaaacatttcaaaaccaataaagatcttgagcttagattacaaaatactaataaagaggaaatgattgaaaagctaaatcctaaaaaatttagcaagactaagttttattatataaatcaatatgaacagaatggattaggccatgctgttcttcaagcagaaagtgtaattgggaataattcctttgcggtgttgctcccagatgacttatttatatctaaaaagtcttgcttggatcagttaatagatatatttgtagaaaaaaaatcttgtgttattgctgttaacaaaatagatgaaaataatattcataaatacggagttattaaaccaggtcaacaaagtcaaggatctatcaaaatcgatgatattgttgaaaaaccaactgcagaggatgcaccctctgatatggcagtatgtgggagatatatacttaatcctgcaatttttaagcatttaaaattaacaaaatctgataaatctggagaaa

SEQ ID NO: 257389 - DNA, 715 bp, Unknown
  Bacterial polypeptide expressing nucleotide sequence isolated from the Sargasso Sea
catgacggccgcgggcgaaaccaaggttttcctgcgcggtggcgacggcggtcgcggcaacgcccggttcaagtcatctaccaaccaggcgccgcgccgctatgatcccggctggccaggagaggaactttgggtctggctccgcttgaaacttatcgcggaggcgggccttgtcggcctgcccaatgcgggcaagtcgacattcctgtccgccgtgacccgggcacatccaaagatcggcgactaccctttcacgacgcttcacccaaacctgggcgtagtccgtcgcggcaacgacgagttcgtcctggccgacatccccggcatcatcgaaggcgccagccaaggcgccggcttgggcactcgcttcctcggccacgtagaacgctgccgggtattgttgcatctgatcgacgcgaccggcgacgacccggtgcatagctacgaaacggttcgaaaggagatcgaggcctatggcggcggtttgtcggacaagctggagatcatcgcgctcaacaagtgtgacgccatcgacgacgaagaggccaaatggctagccaatgaactgaaggcggccaccggacgcgatgtcatgcacctctccgccgtggcgggcgccggcgtcgacgatgtgatcaggcgcctgttctatgttattggaatggtgatggaagccaaagctgaggacgagccctgggaggcgcaccccttatga

SEQ ID NO: 257390 - DNA, 811 bp, Unknown
  Bacterial polypeptide expressing nucleotide sequence isolated from the Sargasso Sea
aatgtgtggttttgtaggatatataaatagaaatttggatcaaatagatccttttatgattaagaaaatgatgcaactacaacaacacagggggcctgacgatagtggtttagcattattttcttctaaagaaaaattctcacttacatataatcaaaatgatttagaaaaattaaatattaaagatgacatatccaaattaaatggaggactaggatttaatagattaagcgttatcgatattacaaaaaatggacatcaaccaatggctaacgaggacaaaacagtttatatctcgtttaatggtgaaatatataatgcttttcagttaaaaaatgaattaattgactctaattataattttaaaagtaagactgatactgaaattattttagttttatatgaaaaatacgggttagaatttactttaaaaaaacttaatggaatgtttgcaatttgcattctagatttaaacaaaaatcaaatttttttagcaagagatagatttggaattaaacctctttattatatttttaatgaagattttttttctttttcatctgagataaaatcatttttagctattaataatttcaagtttaaattaaataaaaaacatatctcagaatattttatttttaaatatctcgccccacccaatacacttattagtgaaataaatttaatgttacctggtgaattgatagtatttgagaaaaataaaataaaaaaagagatttatttcgatttccaaaattataatgaaaaaattgataccaaagataacaagttagaaacattaaaagaaaaa

SEQ ID NO: 257391 - DNA, 763 bp, Unknown
  Bacterial polypeptide expressing nucleotide sequence isolated from the Sargasso Sea
atgatcaataaagttgttatacctgctgcaggattaggtacaaggtttcgccctgccactcaattcatccctaaagagctaatacccgtccttaacgtccctgctcttacacacacagctaacgaagcaatacaatccggcatccgggaaataatcatcatcaattcgaagaccaaaccactattgagtgaatggatttctcgattcaatacagaacatcaatctgaaggagtatcggcaatagaattgacccaagaatttccgttaggattagggcatgctatcctacaggccaaacaagccgtgggaatggaagcatttggaatcatgttaccagatgacattatattttctaagcctcctgcacttaagagaatgattgagctccactaccagttaagaggctcaatattatgcgttaaagaaaaccctattaatttaattaaaaattatggagtgatcgaaccacatggaaacaaagttgcaggaataattgaaaaacctgatccccacgacgctccaagccaattttgcgctttaggcaggtacatactggaaccggaaatattcaactatctagaaaaagcgaagccgtccgtaaacaacgaaattcaattaactgatagccttaatgctatgatgggagaccaggattttttccattacatagtagaaggacaccattttgacatcgggacacctccaggattaatatctgcttcaatattcgcatctcaaaaccctaacctaattataggataat

SEQ ID NO: 257392 - DNA, 667 bp, Unknown
  Bacterial polypeptide expressing nucleotide sequence isolated from the Sargasso Sea
attgaaagtatcggctattatacccgctgccggtcttggaaatcggtttggagaggcaaagcaattcaaattgttagcaggcacccctctattcatccactcaataaaagctttcttgaattcttctaaaattcatgagattgtagtggtcgtgcctaaagataaaaaagatagtattcataaagcgatcatgtctatatccggtgataagaaaataacaatcacgcctggcggagaaagaagacaagactccgtaaaaaatggagttctagtttcagatattaccagtgatttgatttgtatacatgatgctgcccgcccttttattacagaaacgcttatagatgattctattaattcttgtgaatcctttgacggtgcagtaattgcgattccatctgtagatacagtaaaatattctgaaaacaatatcataatgaaaacaatagatcgaaatagcatttggctcgctcagaccccacaagttttctggagagacaaactattaaaagcttatgatagcatagatgattccattgtaataacagacgaggctgcaataatggaaaaaatgggatataaaatatgtttagtccccggtgatataaaaaataataaaatcaccacatttgaagattggaagtatgcagagtcgcgactaaaatga

SEQ ID NO: 257393 - DNA, 862 bp, Unknown
  Bacterial polypeptide expressing nucleotide sequence isolated from the Sargasso Sea
ttgataaaaaaagcagtaataccagttgcaggctttggaacaagatttttaccagcatcaaaagcaactcccaaagagatgctcccaattattgataagcctttagtccaatatgctgttgaagaggcaattgatagcggcattaatgaaattatttttattaccagtcctgaaaagcactcaataaaaaaacatttcaaaaccaataaagatcttgagcttagattacaaaatactaataaagaggaaatgattgaaaagctaaatcctaaaaaatttagcaagactaagttttattatataaatcaatatgaacagaatggattaggcgatgctgttcttcaagcagaaagtgtaattgggaataattcctttgcggtgttgctcccagatgacttatttatatctaaaaagtcttgcttggatcagttaatagatatatttgtagaaaaaaaatcttgtgttattgctgttaacaaaatagatgaaaataatattcataaatacggagttattaaaccaggtcaacaaagtcaaggatctatcaaaatcgatgatattgttgaaaaaccaactgcagaggatgcaccctctgatatggcagtatgtgggagatatatacttaatcctgcaatttttaagcatttaaaattaacaaaatctgataaatctggagaaattcagttaactgatgcaatacgatctctcctgaaagaagaaggcatttatgcaactatttataatggagaaaaatttgattgtggtagcaaggaaggctatgttcatgctaccatttcgctcgccctaagagatgaatcgataaacaaaaaaataaaaaagataatacaggatattgtttgaa

SEQ ID NO: 257394 - DNA, 232 bp, Unknown
  Bacterial polypeptide expressing nucleotide sequence isolated from the Sargasso Sea
ttgaaatcgaaccagaataataaaaaaatttcattgatccttgcagctgctggtctaggaacaagatttagttctgaaattccaaaacaatactacaagattgataatcaaactattcttgaaaagacacttaatatttttacaaatatttctgcaattaaaaaaattgttattccactacataaaaatgacaaggaatttaaaaaattagatttaccagatggttcttaat

SEQ ID NO: 257395 - DNA, 892 bp, Unknown
  Bacterial polypeptide expressing nucleotide sequence isolated from the Sargasso Sea
aatggataaatatatggattcttcaaatgaaattaaaacggttatttttccagttgctggattaggctctagatttttacctgcaacaaaagtagtagcaaaagagctcttacctattttaaataaaccattaatagattacgcaatgactgaagcaattaaagcaggaattgaaaagtttatatttgttacttctcccgagaaacaatctattattaattatttcaagaaaaatataaaattagaaaatgagttaaaagataaaaatgctgattatttaaagctaataaataataaattaattttagaagataatttaattgaagttattcaagataagcctcttggtttaggtcatgcaatttggtgtgctaaggattatatttctgggccttttgcagttattctgcctgatgatctgattgtgtctgaattaccttgtattaaacaattaatagatacacatagggagtataaatgtaacgtagtggctgtccaagaagtagatgaaaataatatagaaaaatatggtgtgattgattattataaaaatataagtaatgctttttatgttaaggacatgattgaaaaaccatctaaagaaattgctccatcaaacctagctataataggtagatatgtcttacaaccaagtataatgaaagaattatccaatcaagagttaggttttggaggagaaattcaattaacagatgcaattaaaaacctaataaataaagaaaatgttattggttataaatttaaaggaaagagatttgattgtggtaatgtaatgggtgctcttgaagctcaaatatcaattgcaatgaatgatagtaaatataaagaccaagttaaagaaataatgaataaaaacttaagcaaggattaa

SEQ ID NO: 257396 - DNA, 262 bp, Unknown
  Bacterial polypeptide expressing nucleotide sequence isolated from the Sargasso Sea
tatgtcggtattaaaagtggtaattccggtagctggattgggcactcgaatgttgcctgctactaaagctataccgaaagaaatgctgccactggttgataaacctttgatccaatacgtggtgaatgaatgtatcgctgctggtgttaagcaaatagtgttggtgacgcattcgtcaaaaaactccattgaaaaccattttgataaaagctttgaactggaatctatgctggaaaagcgggtgaaacgccagttactgcag

SEQ ID NO: 257397 - DNA, 764 bp, Unknown
  Bacterial polypeptide expressing nucleotide sequence isolated from the Sargasso Sea
catggtgaaattaaaaaaagcagtgatcccagttgcaggtttaggcacgagaatgttgcctgcaactaaagctattccaaaagaaatgttgccggtcgtcgataaacctttgatccaatatgtagtagaggaagctgctgccgctggtattactgaaatagtactggtcacccactccagtaaaaattcaatagaaaaccattttgataccagttttgaactggaaaaccagctggaaaaacgcgtcaagcgctcattactggatgatgttcgttctattaacccaaaaaatgtcactgtgatttcagtgcgccagcctgtggctttgggtttaggtcatgcggtgttgtgtgcagctcctgtggtaggcaatgagccttttgcggtgattttgcccgatgtattgattgataagtaccatgctgacgcccgtattcataatttaaaagctatgattgagcgctttgaaacaactggcgcaagccagattatggttgagccagtgcctgcacttgaagtgaataaatacggtattgtggatattgctggtgagactctggttcagggacaatccgctttaattcgtactatggtggaaaaaccagagattgaggatgctccttctaatctggctattaccggacgttatgtattgtctgccaaagtatgggatttgttacgccatacagcaccgggcgcaggtggcgaaattcagctgacagatgctttacatcatttattattaattgaaaaaattgaggcct

SEQ ID NO: 257398 - DNA, 253 bp, Unknown
  Bacterial polypeptide expressing nucleotide sequence isolated from the Sargasso Sea
atgagtaattccaaagctataaaaaaagcagtactgcctgttgcaggcctaggtacaagatttcttcctgcatcaaaggcaatacccaaggaaatgctcccaattgtggatactcccctagttgagtttgctgttagagaagcggtagaagcaggaatagaagaaataattttcattacaagtcatacaaaaaggccaattgaggatcactttaaaagaaatgaggagctgaaaaccaacttcatagcttaga

SEQ ID NO: 257399 - DNA, 427 bp, Unknown
  Bacterial polypeptide expressing nucleotide sequence isolated from the Sargasso Sea
atgattaaaaaagcagtattaccagttgcaggattaggaacaagatttttaccagcatcaaaagcaacaccaaaagagatgttaccaattattgataagcctctggttcaatatgcagtcgaagaagcgattaatgttggaataaatgaaattatttttattaccagcccagagaaaaattcaattaaaaaccattttaataaaaacgaagagatagaatcaagacttataaaatcaggaaaaaaagatatggttaagaaattaaatcctgaaattttttctgatataaccttctattatattaatcaagaaacacaaaatggtttaggtgatgcagttctccatgcagaaagcataataaaaaatgaagattttgcagttttattacctgatgatttatttttttcaaaatcgatcttgccttagt

SEQ ID NO: 257400 - DNA, 241 bp, Unknown
  Bacterial polypeptide expressing nucleotide sequence isolated from the Sargasso Sea
atgaaaaaaagtctaaataaagtagttattccggttgctggcttaggaaccagaatgctgccagcaacaaaagcgattcctaaagaaatgttacctattctagataagcctataattcaatatgtggttgaggaatgtatactcgcaggattcaaagagataattctcattactcattcaagtaaaaattctaaagaaaatcattttgatacaagtttcgagcttgagtcaacttggaaaa

SEQ ID NO: 257401 - DNA, 298 bp, Unknown
  Bacterial polypeptide expressing nucleotide sequence isolated from the Sargasso Sea
tatgcaagctccagacaaccgcaaagtaaccagagccgttatacctgtagcaggccttggcacccgcatgttacccgcaaccaaagctattccaaaagaaatgctgcctgtggtagacaaacctcttatccagtatgtgattgaagaagctgccgcagctgggattactgaagttattttggtaagccacagcagtaaaaattcgattgaaaaccactttgatacctcgtttgaactggaaacccagttagaaaaacgagtgaaacgttccttgctggacgaagtgcgcagcatcaac

SEQ ID NO: 257402 - DNA, 682 bp, Unknown
  Bacterial polypeptide expressing nucleotide sequence isolated from the Sargasso Sea
aatgagtgttaaaaaagcagtttttccagtagcagggtttgggacaagatttttgccagccaccaaagccacaccaaaagaaatgcttccaatagtcgataaaccaattgttcaatatgcagttgaggaagcttatgaggccggaataagagaattcatatttataacacatcatgctaaaagagctatagaagatcatttcgaccaaaacaaagagttgcatgaaaagttaatcaacgataaaaagttagaactagctaaatctattgaaaaaataggtggcacagaaacaaaatttacgtatataagacaagatgaaccaaaaggcttggggcatgcaattggatgcgcacaacacgtcattcaaaagggagagcattttgcggtaattcttgcagatgatttaatgatggttgaaaggaaaaacgtgatgcaacaaatgataagtgttaatgaaaaatacaataaacaggtaattggtctagaaaaaattgatggtgaagatatttccaaatttggagtagttgcagtcgagaaaagcgaagaaaaagtcaattttttaagcgatattgtcgaaaaaccaaactataatgatgctccttcaaatttagcggtagttggaagatacatttttaaagactcaatttttaaattcatagacaacgaaaatccaggaaaaaat

SEQ ID NO: 257403 - DNA, 553 bp, Unknown
  Bacterial polypeptide expressing nucleotide sequence isolated from the Sargasso Sea
catgaatgttaagaaagcaatattcccagtaggtggactaggcacgagatttctacctgccaccaaatctatgcctaaagaaatgctccctatagttgataaacctcttattcaatacgctgttgaagaagcagcgaatgcaggaattgaacaatttatatttgttacaagtagagggaaatcagctatagaaaaccattttgatcattcatttgaattagaaaataatcttcttgcaaaaggaaaaagagatactttagcgtctgctcaagaaatgctcaaaatacctggcagttatgcctatgttcgtcaacaagaacctgctggattgggtcatgcaatctggtgcgcaagacatctaattcaaaatgaatcctttgccgttatacttgctgatgatttaatttttggacaatcaacaacaaaagaaatgattaaaaattatacgtcaggaaacatggttgctattatggaagttgataaacaaaaagtttcatcttatggcattgtcaaagtagataaaagcgataaagatttaatgcagataaatcaa

SEQ ID NO: 257404 - DNA, 211 bp, Unknown
  Bacterial polypeptide expressing nucleotide sequence isolated from the Sargasso Sea
atggttaaaatagccgtacttccagttgcagggcttggaacaagatttttgcctgcttcaaaagcaattccaaaagagatgctcccaattatagacaagcctctgattcaatatgctgttgaggaagcaataaatattggagttgatgaaataatctttattactagcccagaaaaatattctataaagaagcattttgataaaaatataa

SEQ ID NO: 257405 - DNA, 280 bp, Unknown
  Bacterial polypeptide expressing nucleotide sequence isolated from the Sargasso Sea
aatgagaggaatcaaaaaagcgatttttcccgttgcgggattcgggtcacgttttttgcctgcaaccaagtcaattcctaaagaaatgttgccgatagttgataaaccattaattcaatatgcggtagaggaagcggttgaggctggcatcacagaaataatttttatcaccggacggaacaagagggcaatcgaagatcattttgataaggcatttgaacttgaaacagaccttgaaagaagagggaaagatgatttgctaaaccgcattcagaattca

SEQ ID NO: 257406 - DNA, 905 bp, Unknown
  Bacterial polypeptide expressing nucleotide sequence isolated from the Sargasso Sea
gatgatccccgaggcatccatcaagccggtcagctcgctgcctgactacaacagcctcaaagcagaggaccccgccctcctcaagtccaccgtgatggtcaagctcaacggcggcctcggtaccggcatgggcctcgagaaggccaagtcgctcctcgacctcaaggacggcatgactttcctcgacttcatcgcgtcgcaggtcaccgagatgcgcacgcgcttcggtgtgccgctcgccttcatgctgatgaactcgttcgccacgtccgccgacacgctcaagtatctcgccaagtacaaggacctcaagagcgacggcctgccgctggagtttgtgcaaaacaaggcgcccaaggtcaccgagtccgacctctcccccgcgtcgtggccgagtaagccagactgcgaatggtgcccacctggccacggtgacctgtacccggcgatgctcggcaccgacagcctcgactcactgctcaaaaagggcttcaagtacatgttcgtctccaactccgacaacctcggtgcgacgatggacctcaagctgctcacgtggtttgccagcagcggcaagccgttcgccatggagtgcgccgagcgcaccgacgccgataagaagggtggacacctcgcccaggacgccgcaacgggcggtttgttgctgcgtgagtcggctcagtgccccgacgaggacgaaaaggagttccagaacgtgggcaagtacaagtactttaatacgaacaacttgtgggtaaacctggaggcgctcaaggccaccatcgacaagaacaacggtgtgctgccgctgcccgtaattaagaacagcaagacggccgatccgcgcgataagaagtcgaccaaggtgctgcagcttgagaccgccatgggcgccgcgatcgcgt

SEQ ID NO: 257407 - DNA, 289 bp, Unknown
  Bacterial polypeptide expressing nucleotide sequence isolated from the Sargasso Sea
atggtattaaaagataatagagttaaaaaagcagtttttcctgtagcaggcttaggaacacgatttttacctgccactaaggctagccctaaagaaatgttgaatgtagttgataaaccacttatccaatatgcagcagaagaggcagtatcagctggcattgatactttaatttttgtaacaggaagaaataaagtatctattccaaatcattttgacagagcatatgagttagagagtgaactacttcaaaaaaataaaaattctgaattggagcttgttcaaaata

SEQ ID NO: 257408 - DNA, 148 bp, Unknown
  Bacterial polypeptide expressing nucleotide sequence isolated from the Sargasso Sea
atgagtagtaatccaaaaaaactcaaaatagcagtattccctgtagccggaatgggtactaggttcttgccagcaacaaaagcaagcccaaaagaaatgctgccaatagtagataaaccattaatccaatatgctgccgaagaagctg

SEQ ID NO: 257409 - DNA, 358 bp, Unknown
  Bacterial polypeptide expressing nucleotide sequence isolated from the Sargasso Sea
atgaaagtattaaaagctgttattccggttgctgggcttggcacccgtatgctgccggcaacgaaggccattccgaaagagatgttgccggtggttgacaaaccgcttatccagtatgttgtcagcgagtgcatagcggctggtatcaaacagattgtgctggtgacgcattcatcaaagaacagtatagagaaccatttcgacaaaagctttgagctggagtctatgctcgaaaagcgggtaaaacgacagttattggaagaagttcaggctatctgccctaaagatgtcaccattatgcatgtgcgacaaaacgaggccaaaggtcttggccacgccgtattgtgtgcactgccgt

SEQ ID NO: 257410 - DNA, 234 bp, Unknown
  Bacterial polypeptide expressing nucleotide sequence isolated from the Sargasso Sea
aatgaaagttaaaaaagcaatatttccagtaggtggattaggtacaagatttcttcctgcaacgaagtcaatgcctaaagaaatgcttccaattgttgataagcccctcatacagtatgctgtagaagaagcagctaatgcaggtattgaacaatttatttttgtaacaagtagagggaaatcagcaatagaaaatcattttgatcactcatttgagctagagaataacttact

SEQ ID NO: 257411 - DNA, 127 bp, Unknown
  Bacterial polypeptide expressing nucleotide sequence isolated from the Sargasso Sea
atgatcaagaaagctgttttacctgtagcaggtcttggtacaagatttcttccagcgtcaaaagctacccctaaagaaatgctaccaataattgataaacctcttgtgcagtatgcggtagaagagg

SEQ ID NO: 257412 - DNA, 685 bp, Unknown
  Bacterial polypeptide expressing nucleotide sequence isolated from the Sargasso Sea
tatgttaataaaaaaagtggtaattccagttgctggcctgggtacaagattcttgcccgcaactaaatcaacaccaaaagagatgctccctgtagttgataagccattaatacagtatgcagttgaagaggcttcaaaagctggtatagaagagtttatttttattacacatcactcaaaatcaagcataaaaaaacattttgaggaaaataatgatctttttaaaaagttgatagaagatggcaaagaagatctggcatcaacaataaaaaatataggcggatcaggagctaaatttacatatatagaacagggtgagccaaaagggctaggtcacgcaattagttgcgcaaaagatgttatagatgaaggtgaatggttttttgtaatacttcctgatgacttatttatgactaagggagcaaatgtaacggaacaaatgattgatattgctaagtctgagaatagacaagtcttagctctacaaaaaattgaaaatgaagaaatctctaaatatggtgttatctcacctgaatcaacggatggaaaaatatcaactattaatggtattgttgaaaaaccagattatgttgatgcaccatctaacttagcatcaattggaaggtatctatttaatcaaactatctttaatcatattgataatgataatcctggaaaaaatggg

SEQ ID NO: 257413 - DNA, 117 bp, Unknown
  Bacterial polypeptide expressing nucleotide sequence isolated from the Sargasso Sea
tctgtataatccaagcactatgttaataaaaaaagtggtaattccagttgctggccttggcacaagattcttgcccgcaactaaatcaacaccaaaagagatgctgcctgtagttga

SEQ ID NO: 257414 - DNA, 727 bp, Unknown
  Bacterial polypeptide expressing nucleotide sequence isolated from the Sargasso Sea
aatgaaaagcaaggtgacgaaggcgatcttcccggtggccggcctcggaacccgcttcctccccgcgacgaagtcgatcccgaaagagatcctcacgttggtggaccgcccgcttatccaatacgccatcgacgaggcgcgtgcggccggtatcgaggaattcatcttcgtcacctcgcgcggcaaatcggcacttgaggattatttcgacaacgcccccgaactggaaagcgcattggcgcaaaagggcaagaccgaaatcctcgacgagctgcagcagaccaatatggacagcggcgcgattgcctatgtccgtcagaaccagccgctgggtctgggccatgcggtctggtgtgcgcgtcgcctggttcatgacgaagccttcgcggtgatcctgaccgacgacgtcattgccgccgacaagccctgtctgcagcagatgatggaagcctataacgagaccggcgggaactatgtcgcggcgatggaagtgcccgccgacaagaccgcgtcctacggggttctggatgtcgccccgggcgacggcccgcgcctgcaggtcaacggcatggtcgaaaagcccaagcccgaggatgccccctcgaacctcgctgtgatcggtcgctacatcctcaccccgcgcatcatgtggaacctcgatgcgcgcaaggcgggtgctggcggtgaaatccagctgaccgacgcgatcgcgcaagaaatccatggc

SEQ ID NO: 257415 - DNA, 217 bp, Unknown
  Bacterial polypeptide expressing nucleotide sequence isolated from the Sargasso Sea
aatgaaaattaagaaagcaatatttccagttggtggattaggtaccagatttcttcctgcaacaaagtcaatgcctaaagaaatgcttccaattgttgataagcccctgattcagtatgcagtagaagaagcagctatggcaggtattgaccagtttatttttgtaactagtcgaagcaaatcagcaatagaaaatcattttgatcactcatttgaa

SEQ ID NO: 257416 - DNA, 715 bp, Unknown
  Bacterial polypeptide expressing nucleotide sequence isolated from the Sargasso Sea
aatgagtgttaaaaaagcagtttttccagtagcgggctttgggacaagatttttgccagccaccaaagctacaccaaaagaaatgcttccaatagttgataaaccaattgttcaatatgcagttgaggaagcttatgaggccggaataagagaattcatatttataacacaccatgctaaaagagctatagaagatcatttcgaccaaaacaaagagttacatgaaaaattgatcaacgataaaaagttagaactagctaaatctattgaaaaaataggtggctcagaaacaaaattcacgtatataagacaagatgaaccaaaaggcttagggcacgcaattggatgcgcacaacacatcattcaaaagggagagcattttgcggtaattcttgcagatgatttaatgatggttgaaggagaaaacgttatacaacaaatgataagtgttaatgaaaagtacaataaacaggtaattggtctagaaaaaattgatggtgaagatatttccaaatttggagtagttgcagttgagaaaagcgaagaaaaagtcaatttcttaagcgatattgtcgaaaaaccaaactacaatgaagctccttcaaatttagcggtagttggaagatacatttttaaagactcaatttttaaattcattgaaaacgaaaatccaggaaaaaataatgaaattcaaataactgatgctatccaaaaa

SEQ ID NO: 257417 - DNA, 820 bp, Unknown
  Bacterial polypeptide expressing nucleotide sequence isolated from the Sargasso Sea
catgatcaggaagtgcctgttccctgttgccggctacggcacccgctttcttccggccaccaaggccatgcccaaggaaatcctgccggttgttaacaaaccgctggtgcagtacggcgtagaagaagcagccgatgccggaatccatgaattcggatttgtaaccggccggggcaagcgtgcgatcgaagaccatttcgatatcagctacgagctggagcaccagattgccggctccggcaaagaaggcctgcttacttcaatccgggatctgatcgacaacaacacctttgcctttacccgccagaacgagatgaaggggttgggccacgccatcctcaccggccgcaacctggtgggcgacaacccgttcgccgtggtgctggccgatgacttctgcgtgggcccggaagacggcgacggcgtgctgacccagatggtgaaactgtacaaccagttccgctgctccatcgtggcgatcgaagaagtgccgcaggacgagactcacaaatacggcgtgattgccggtgagtccatgaaagacggcctgtaccgcatcaccgacatggtggaaaagccggccccggaagatgcgcccagcaacctggcgatcattggccgttacatcctgactccggacattttcgacatcctggagcgcacgcctccaggcaagaacggcgaagtccagattaccgatgccctgctggagcaggcgaagaatggctgtgtgctggcgtaccagttcaagggccagcgttttgactgcggcagcattgatggctttgtagaggccaccaactacgtttacgagaacatc

SEQ ID NO: 257418 - DNA, 153 bp, Unknown
  Bacterial polypeptide expressing nucleotide sequence isolated from the Sargasso Sea
tatgaaaacagtaccagcacatagtgatacccgtcgcagcaagatcaccaaggcggtcattcccgttgcgggcttaggcacgagaatgttgccggcaacaaaagccattccgaaagaaatgttaccggtgctggataaacctttgatccagca

SEQ ID NO: 257419 - DNA, 862 bp, Unknown
  Bacterial polypeptide expressing nucleotide sequence isolated from the Sargasso Sea
aatgatcaaaaaagctgttttaccagtagcaggccttggtacgagatttcttccagcgtcaaaagctactccaaaagaaatgctaccaataattgataaacctcttgttcagtatgctgtagaagaagcggtagatattggaattgatgaaattgtatttattattagtgaagataagtattctattgaacgacattttcagaagaacactaatattgaaaaaagactaatcgaaaatggtaaaacagagtttattgaaaagttaaatcctaaaatcttttcaaatgtaaaatttcattatgtcaaccaagatgaacaaaatggacttggtcatgctgttcttttggcagaaccaataatagctggagatccatttgctttactccttccagatgaattattttttgcacgagaatcatgccttaatcaaattagtgagatattcaataagacaaactcatcaacaatagccgtgaccaaggttgatgaaaaaaacatacataagtatggtgttataaaaccaggaaaagtagaaaataatgcaatccttttagaagatatagttgaaaagcctttaaaagaagacgcgccatcagatattgctgtatcaggtaggtatatcttaactcctacaatttttaatcatcttaaaaagattggacctgggaagtctggtgaaattcaaattactgatgccattaaaactttaataaatgaagaaaatgtttacgcaaaaatttatgaaggagaaaaatttgattgtggcagtaaattaggatttgttcatgctactatagctcttgctttgaaagatccatcaattagtgaaaatattaaaaaaataataaaggaaattgtttga

SEQ ID NO: 257420 - DNA, 886 bp, Unknown
  Bacterial polypeptide expressing nucleotide sequence isolated from the Sargasso Sea
catgttgaaagtgacgaaagccgtatttccggttgccggtctcggcacgcgatttctgcctgcaaccaaggccagcccgaaggagatgctgcctgtcgtggacaagccgctcattcaatatgcggtcgaagaagccatcgatgccggtatcaccgaaatgatcttcgtgacgggccgcagcaaacgggcgatcgaagaccacttcgacaaatcctatgagatcgaggccgagctcgaggcgcgcggcaaggaaaaactgctgtcgctcgtgcgcagcatcaaaccgagccacgtcgactgcttctacgttcgccaggccgaagcactggggctcggccatgccgtgctgtgcgcggaaaagctcgtcggcgaccagccgttcgcggtgatcctcgccgacgacttgctggacggcccgacgcccgtgttgcgccagatgatcgacgtgttcgatcactatcacgcgtcggtgatcggcgtggaggagatcgcgcccgaggcgtcgaaatcctatggcgtcatcgacggcaagcgctgggaggacaacctcttcaagctatccgggatcgtcgagaaaccggagcccgcgaaagcgccgtcgaatttcggcgtcgtcggccgctacgtgctgaagccgaaggtgttcgaacatctgcgtgcgctgcgtccgggcgccggtggcgaactgcaactgacggacgcgatccagtcgctgctgaccgacgagcaggtgctcgcgcatcgctacgacggcacgcgtttcgattgcggcagcaagctcggctatctgaaggcgacggtcgagttcgcgttgcgccaccctgaagtggccgcggatttcgagagttttctgaccgcgcgcatgtcggcgctgcaggccgcctga

SEQ ID NO: 257421 - DNA, 862 bp, Unknown
  Bacterial polypeptide expressing nucleotide sequence isolated from the Sargasso Sea
ttgatcaaaaaagcagttttaccagctgctggcttaggaacaagatttctaccagcatccaaggcaaccccaaaagagatgctgcctgtaattgataagccattaattcaatatgctgttgaagaagcagtaagtattggaattaaggagataatatttataactagctcagaaaaatattcaattaagaaacattttgataaaaatattaaattagaatctaaattaaaaaaaatagttaatgaagatatccttcaaaaagtaaatccaaataaatttgcagatgttcaatttcattatgtaaatcaagctgaacaaaatggtcttggacatgcaatattagaggctgaagatttaattaataatgaaccatttgctgtacttcttcctgatgatttgtttttttcagaaaaatcttgtttacagcagctattagatgtttatatggaaacaaaatcttctgtgattgctgtcaataagattgataaagataatattcataaatatggagtaattaaaccaggaactgaagattcacaaaaaatattgattgatgacatagttgaaaaaccaaaatcagaagaagctccgtcagatattgcagtttgtggtcgatatatttttaactcatctatatttgaacatttaaagaaagtaacatttgataatagcggcgaaattcaacttactgatggaataaggaatttattattaagtgaagatgtttttgcatgcttatataatggagaaaagtttgattgtggtagtaaaaaaggtttcgttcatgctactatctctctcgctttaagagattcctcaataagcgaagatataaaacaattaatcagagaaattatttgag

SEQ ID NO: 257422 - DNA, 280 bp, Unknown
  Bacterial polypeptide expressing nucleotide sequence isolated from the Sargasso Sea
catgaaacactcaatttcaaaagctatatttccaattgctgggcttggaacaaggtttttacctgcaacaaagtctctgcctaaagaaatgttaactattcttgatagaccggtaattgaatgggctgtaattgaagccgccaaatctggtataaaagaaatgatatttgtaacctcttcaagaaaaaacatagttcttgaacattttgaaaaatctgaattactggagatgaatttaaaaaaaaaaaaaaaaatagataaaattgaccttattgaatca

SEQ ID NO: 257423 - DNA, 889 bp, Unknown
  Bacterial polypeptide expressing nucleotide sequence isolated from the Sargasso Sea
atgttgaaagtcaccaaggccgtgttccccgtcgccggtctcggcacgcggttccttccggcaacgaaggcgagcccgaaggaaatgttgcccgtcgtcgacaagccgctgatccagtacgcggtcgaggaagcgatcaacgcaggtatcaccgagatgattttcgtcaccgggcgcagcaagcgcgcgatcgaggatcacttcgacaagtcctacgagatcgaggccgaactcgaggcgcgcggcaaggaaaagctgctcgaactggtgcgcggcatcaagccgagccacgtgaactgcttctacgtgcgccagccggaagcgctcggcctcggccacgcggtgctgtgtgccgagaagctggtgcatggcgagccgttcgcggtgatcctcgccgacgacctgctgcacggcgaacaaccggtgctcaagcagctcgtcgacgtgttcgaccactatcacagctcggtgatcggggtcgagacgatcgcgcgcgacgacagccgctcgtacggcgtcgtcgaaggccgcgaatgggaagaggacatcatcaagctgtcgggcatcatcgagaagcccgcgccggaagacgcgccgtcgaatctcggcgtggtcggccgctacgtgttcatgccgacgatcttcgatcacctgcgcaagctcaagccgggcgccggcggcgagctgcagctgaccgatgcggtccagtcgctgctcgcgaacgagcaggtgctcgcgtatcgctactacggcacgcgcttcgattgcggcagcaagatcggctatctcaaggccaccgtcgaactcgcgctccagcatccggaagtgagccgcgaattcgaggcctacctgcgtacctgcttgcccgcgctggctgctgtcgcctaag

SEQ ID NO: 257424 - DNA, 469 bp, Unknown
  Bacterial polypeptide expressing nucleotide sequence isolated from the Sargasso Sea
atggtgaagttaaaaaaagcagtgatccctgtggcaggtttaggcaccagaatgttgccagcgactaaagctatcccaaaagaaatgttgcctgtagtggacaagccgttaattcagtatgtggtggaagaagctgcagctgctggtattaccgagattgtgctggtgactcattccagtaaaaactcgatagaaaaccactttgataccagttttgagttggagaaccagctggaaaagcgggtaaagcgctccttgctggaggacgtgcgttctattaacccaaaaaatgttactgttatttcagtgcgtcagcctgtggctctggggttgggtcatgcggtactttgtgctgctcctgtggttggcaatgaaccttttgcggtgatactgccggatgttttgattgataagtatcatgcagacgcccgtattcataacttaaaagccatgatccaacgtttttgaa

SEQ ID NO: 257425 - DNA, 332 bp, Unknown
  Bacterial polypeptide expressing nucleotide sequence isolated from the Sargasso Sea
catgaaaaatatccctcttgtggtccgcaaagccgttcttcccgtcgccggtctgggcacccgcatgctgccagccaccaaggccatccccaaggagatgctgcccgtcgtcgacaaaccgctgatccagtatgtagtgcgcgaagccatcgccgccggcatcaaggagatcattctggtcacccactcgagcaagaactccatcgaaaaccacttcgataagagcttcgagctggaagcgaccctcgagaaacgggtcaagcggcaactgctggaagaagtgcaacacatctgcccgaaagacgtcaccatcatgcacgtccgccaggggg

SEQ ID NO: 257426 - DNA, 889 bp, Unknown
  Bacterial polypeptide expressing nucleotide sequence isolated from the Sargasso Sea
catgactgttgccaccaccgttcgcaaagccgttttccccgttgccggactgggcacacgctttctgcccgccaccaaggccagccccaaggagatgctgcccgtggtggacaagccgctgatccagtacgccgtcgaagaggcctacgccgcgggcatccgccacatgatcttcgtgacaggccgcagcaagcgcgccattgaagaccacttcgacaccgcctacgaactggaggccgagctggaagcggccggcaagaaggaattgctggagctggtgcgctccatccagcccagcgacatggactgcgcctttgtacgccagccccgctcgctgggcctgggccacgccgtgctgtgcgccgagccgctggtgggcaaggagccgtttgccgtgctgctggccgacgatttgatggtcggcccccagggcggtcagccggtactggcgcagatggcaaccgccttccgccagcaaggccgctcggtgatcgccgtgcaagaggtgcccgaggaccaggtgcacaagtacggcatcgtggcgggcgagcccgccggtggcccgctgatccgcatccagcgcattgtggaaaagcccaaggccgccgaggccccctcgcgcatgggcgtggcgggtcgctacatcctcacgcccggtgtgtttgacgaaatccgcaaccagccacggggcgtgggcggcgagatccagctcaccgacggcattgcgcgcctgatgaataacgaggccgtgtacgccttccagtacgaaggcaagcgctacgactgcggcagcaaggaaggatttctggaagcgacggtggaactggccctgcaacacccgcaggtgggggcgcacttccgggactacctgaagaacctggcgctgtaa

SEQ ID NO: 257427 - DNA, 871 bp, Unknown
  Bacterial polypeptide expressing nucleotide sequence isolated from the Sargasso Sea
tatgttaataaaaaaagtggtaattccagttgctggcctgggtacaagattcttgcccgcaactaaatcaacaccaaaagagatgctccctgtagttgataagccattaatacagtatgcagttgaagaggcttcaaaagctggtatagaagagtttatttttattacacatcactcaaaatcaagcataaaaaaacattttgaggaaaataatgatctttttaaaaagttgatagaagatggcaaagaagatctggcatcaacaataaaaaatataggcggatcaggagctaaatttacatatatagaacagggtgagccaaaagggctaggtcacgcaattagttgcgcaaaagatgttatagatgaaggtgaatggttttttgtaatacttcctgatgacttatttatgactaagggagcaaatgtaacggaacaaatgattgatattgctaagtctgagaatagacaagtcttagctctacaaaaaattgaaaatgaagaaatctctaaatatggtgttatctcacctgaatcaacggatggaaaaatatcaactattaatggtattgttgaaaaaccagattatgttgatgcaccatctaacttagcatcaattggaaggtatctatttaatcaaactatctttaatcatattgataatgataatcctggaaaaaatggggaagtgcagataacagacgccatattaagtgatattgaaaattttattggatatgaatttgacggtttgcgctttgattgtggaagcaaatctggctacttaaaagccaatattgaatttggtttagctgatgaagaattaaattctgaattagaatcattcatagaggaaaagaaaaatttataa

SEQ ID NO: 257428 - DNA, 880 bp, Unknown
  Bacterial polypeptide expressing nucleotide sequence isolated from the Sargasso Sea
atgcctggtactgttcgaaaggcgatctttcccgtgggtggtcttgggactagatttctgcccgccacaaaatcgatgcccaaagagatgctgcctgtggttgacaaacctcttatacaatacgcggtagaagaggccgctaatgccggtatagaagaatttatttttgtaactggccgagggaaaagtgcaattgaggaccactttgaccatgcatacgaactacaagcattgttggaaacccgtggcaaaaagttaccattgaaactcgttaaggcgagtataccaaaccccgggcaaattgcttacattaggcaacaagaacccttaggacttggccatgccgtttggtgcgcgcgtaattttgtagggtcggaacctgtagccatattgcttgccgatgacttaattcacgcagagccaggttgtttaaaacaaatgatagatacttataaaatagtaggtggcaatatgcttgctctcgctgaagtgtcttcagaagatgtgtcttcctatggaataatagaaccagaagaagaggacggcgataatttagtcaaagttaaggggctagttgaaaaacccaacatatctgatgcgccatcaaacttagcgattattggacgttatatattgcagcccaaaattttcgaaacattaaatagtttcgaattaggtgccgggggtgaaattcaattaactgacgctatagcaagacaaattggtgatgagccactatatggttttcgttttaaaggacagcgctttgattgtggtagtcaagttggtttcttagaggcaaacatttcgctagcgttagataggccagaattgaaaacatcaattttagattttttacaaaagattagcaggacttaat

SEQ ID NO: 257429 - DNA, 202 bp, Unknown
  Bacterial polypeptide expressing nucleotide sequence isolated from the Sargasso Sea
ttgattaaaaaagcagtactaccagttgcaggccttggaacaagatttttacctgcatcgaaagcgattccaaaagagatgttaccaattattgataagccattagttcaatatgcggttgaagaggcggtaaatgttggaataaatgaaatagtttttattacaagtcctgaaaagttttcaatcaaaaatcatttaaaaa

SEQ ID NO: 257430 - DNA, 394 bp, Unknown
  Bacterial polypeptide expressing nucleotide sequence isolated from the Sargasso Sea
atgagtgttaaaaaagcagtttttccagtagcggggtttggaacaagatttttgccagccaccaaagctacaccaaaagaaatgcttccaatagtcgataaaccaattgttcaatatgcagttgaggaagcttatgaggccggaataagagaattcatatttataacacatcatgctaaaagagctatagaagatcatttcgaccaaaataaagagttgcatgaaaaattaatcaacgataaaaagttagaactagctaaatctattgaaaaaataggtggcacagaaacaaaatttacgtatataagacaagatgaaccaaaaggcttggggcatgcaattggatgcgcacaacacatcattcaaaagggagagcattttgcggtaattcttg

SEQ ID NO: 257431 - DNA, 862 bp, Unknown
  Bacterial polypeptide expressing nucleotide sequence isolated from the Sargasso Sea
gttgataaaaaaagcagttttaccagctgctggtttaggaacaagatttctaccagcatctaaggcgaccccaaaagagatgctacctataattgataagccattaattcagtatgctgttgaagaggcagtcaatgttggtattgatgagataatatttattacaagttcagagaaatactccataaaaaaacattttgataataatgttgaattagaatataaattaaaaaaaataggtaaagaagagataattcaaaaagtaaatccaaataaatttttcgatattcaatttcattatgtcaatcaatctgaacaaaatggtcttggacatgcaatattagaggctgaagatttaattaacaatgaaccatttgctgttctccttcctgatgatttatttttttcagaaaaatcatgtttatatcaattactagaaatttatattgaaacaaaatcctctgttattgctgtcaataagattgataaggaaaacattcataaatatggagtaattaaaccaggaaatgatgatttacaaaaaatattgattgatgacatagttgagaaaccaaaggccgaagaagccccatcagatatagcagtttgtggtagatatatttttaatccatctatatttgaatatttaaagaaagtgacttttgacaatagtggcgagattcaacttaccgatggaataaaaaatatgctggaaagtgaagatgtttttgcgtgcttatataatggtgaaaagtttgactgtggtagcaaaaaaggttttgttcatgctactatctctctcgctttaagagacccctcaataagcgaagatataaaacaattaatcagagaaattatttga

SEQ ID NO: 257432 - DNA, 769 bp, Unknown
  Bacterial polypeptide expressing nucleotide sequence isolated from the Sargasso Sea
atgattaaaaaagcagtattaccagttgcaggattaggaacaagatttttaccagcatcaaaagcaacaccaaaagaaatgttaccaattattgataaacctctggttcaatatgcggtcgaagaggcaattaatgctggaataaatgaaattatttttattaccagtccagagaaaaattcaattaaaaagcattttaataaaaacgaagagattgaatcaaaacttataaaatcaggaaaaaaagatatggttaagaaattaaatcctgaaattttttctgatataaccttctattatattaatcaagaaatgcaaaatggtttaggtgatgcagttcttcatgcagaaagcataataaaaaatgaagattttgcagttttattacctgatgatttatttttttcaaaacgatcttgccttagtcaactaatagatatttatgataataaaaaatcttcggtgatagcagtaaataaaattgataaagaaaatattcataagtatggtgttattaaaccaggtaatatttcagataaatttattaatattcaagatattgtagagaaaccatcttttgaagatgccccctcagatatagcagtttgcggaagatatattttaacctcatcaatatttaatcatttgaaatgtacagatttagataagaacgaagaaatccaactcacagacgctattagatctttaataaaagaagaagaagttttagcttgcctatatgagggcgagaaatttgattgtggtagta

SEQ ID NO: 257433 - DNA, 871 bp, Unknown
  Bacterial polypeptide expressing nucleotide sequence isolated from the Sargasso Sea
tatgttaataaaaaaagtggtaattccagttgctggtcttggcacaagattcttgcccgcaactaaatcaacaccaaaagagatgctacctgtagttgataagccattaatacagtatgcagttgaagaggcttcaaaagctggtatagaagagtttatttttattacacatcactcaaaatcaagcataaaaaaacattttgaggaagataatgatctttttaacaagttgatggaagacggcaaagaagatctggcatcaacaataaaaaacataggcggatcaggagctaaatttacatatatagaacagggtgagccaaaagggctaggtcatgcaattagttgcgcaaaagatgttatagatgaaggtgaatggttttttgtaatacttcctgatgacttatttatgactaagggagcaaatgtaacggaacaaatgattgatattgccaaatctgagaatagacaagtcttagctctacaaaaaattgaaaatgaagaaatctctaaatatggtgttatctcacctgaatcaacggatggaaaaatatcaactattaatggtattgttgaaaaaccagattatgttgatgcaccatctaatttagcatcaattggaaggtatctatttaatcaaactatctttaatcatattgataatgataatcctggaaaaaatggagaagtgcagataacagacgctatattaagtgatattaaaaattttattggatatgaatttgacggtttacgctttgattgtggaagcaaatctggctacttaaaagccaatattgaatttggtttagctgatgaagaattaaattctgaattagaatcattcatagaggaaaagaaaaatttataa

SEQ ID NO: 257434 - DNA, 328 bp, Unknown
  Bacterial polypeptide expressing nucleotide sequence isolated from the Sargasso Sea
aatgagtgttaaaaaagcagtttttccagtagcggggtttgggacaagatttttgccagccactaaagccacaccaaaagaaatgcttccaatagttgataagccaattgttcaatatgcagttgaggaggcttatgaggccggaataagagaattcatatttataacacaccatgctaaaagagctatagaagatcatttcgaccaaaacaaagagctacatgaaaaattgataaacgataaaaagttagaactagctaaatctattgaaaaaataggtggtgcagaaacaaaatttacatatataagacaagatgagccaaaaggc

SEQ ID NO: 257435 - DNA, 590 bp, Unknown
  Bacterial polypeptide expressing nucleotide sequence isolated from the Sargasso Sea
gttgattaaaaaagcagtcttaccagctgcaggtctgggaacaagatttttacctgcttctaaagcaacacctaaagaaatgcttccaattattgataaacctttaattcaatatgcagttgaggaagcaattgatgttggaattaatgaaatagtatttatcacaagctctgaaaagtactcaattaaaaagcattttgatcacaatgatgatattcaaactcaacttctaaatactggaaaaaaagatatgattgagaaagtaaatcctagtatattttcaggtataaaatttcattatataaatcaagttaatcaaaatggattaggtgatgcaatcctccatgctaaagatgtcattggtgaagatccatttgctgttttattgccagatgacttatttttttcaaaaaaatcctgcttaagccaattaatagaaatttacgaagaaaaaaaatctactgtccttgccgtaaatcaaataagtaaaagtaatatacataaatatggagtaatcaagccagaagatataaattcagcaccaataaaagtagaagatatcgttgagaaaccttcagctgatgaagcgc

SEQ ID NO: 257436 - DNA, 886 bp, Unknown
  Bacterial polypeptide expressing nucleotide sequence isolated from the Sargasso Sea
catgttgaaagttaccaaggcagtgttccccgttgccggtctcggcacgcggttccttccggctacgaaagcaagcccgaaggaaatgctgccggtcgtcgacaagccgttgatccagtacgcagtcgaggaagcgatcgccgccggcattaccgagatgatcttcgtgaccgggcgcagcaagcgcgcgatcgaggatcacttcgacaagtcgtacgaagtcgaggccgaactcgaggcgcgcggcaaggaaaagctgctcgaactcgtgcgcagcatcaagccgagccatgtcgactgcttctacgtgcgccagccggaagcgctcggcctcggccatgcggtgctgtgcgcggaaaagctcgtggccgacaacccgttcgcggtgatcctcgcggacgacctgctcgacggcaacccgcccgtgatgaagcagatggtcgacgtgttcgaccactatcacagctcggtgatcggcgtggaagagatcccgccgtcggagacgaagtcgtacgggatcgtcgacggcaaggagtgggaagagtcgatcgtcaagatgtcggcgatcatcgagaagccggcgccggaagtcgcgccgtcgaacctcggcgtggtcggccgctacatcctgaagccgcggatcttcgagcacctgcgcgcgctgaagcccggcgcgggcggcgagctgcagctcaccgacgcgatccaggcgctgctcgccgacgagcaagtgctggcctacaagtaccagggcacgcgctacgactgcggcagcaagctcggctacctgaaggcgacggtcgaattcgcgctgcgccacgcggaagtcggcgcggaattcgacgcgtatctgcgcgcgcgttcgggcgcacacccggccgcctga

SEQ ID NO: 257437 - DNA, 606 bp, Unknown
  Bacterial polypeptide expressing nucleotide sequence isolated from the Sargasso Sea
catgaaagcagtgatcccagtagcgggacttggtacgcgcatgctaccagccacaaaagcaatccctaaagagatgcttcctgtcgtagaccgacctttaatacaatacgtagtaaacgaagcggttgccgcaggcataaaagaaatagtacttgtcacgcactcaagtaaaaactctatcgaaaaccactttgataccagctttgagttagaagcaacgcttgaaaagcgtgttaagcggcaattgcttgccgaagtgcaagctatatgccctaaagacgtaacaataattcacgttcgccaaggcgaagcaaaagggctaggccatgctattaattgcgccgcgccaattattggtaacgaaccgtttgtcgttattttacccgatgtgattatagacgacgttgaaagcgatcttaaaaaagacaaccttgcagagatgatcgctcactttgaacaaactaagcacagccaaattatggtagagcctgtaccaatgcaggaagtagataagtttggtgtggtggacttaggtggcaccgaaatagcacagggtgaaagctcaccaattgttagcatggtagaaaaacaccggttgacgaggca

SEQ ID NO: 257438 - DNA, 715 bp, Unknown
  Bacterial polypeptide expressing nucleotide sequence isolated from the Sargasso Sea
atgcagatacgtaaagcagtcatacctgccgcaggattaggaacccgctttttgccggtaaccaaatcagttcctaaagaattgcttcccataatcgaccgacctctactccaatatgttgttgctgaggccgccgaagcaggagtggaagaaattatcatcgtcacttcaccggaaaaagaatcttttggcgattattttcaggcgcagcctattttagaacgacacctagcggatagcaaagaagatatactgttggccaaggtttccgaagcccgaaacctcgccaatgtcacgtttgtcatccaacatgaacccctggggttgggacacgccgttctaatggccaaagatatggttggcgatgagcctttcgcggtgatactccccgacgatatcatcgctcattcaccaggagccatcagccagctggttcaggtatcgaaagaactgaatgcgggcgttatcgctgttgaagcgttaccttgggatgttgtccataattatggtgtggtcgacgctaaaaaaaactctgacagaatccataagattcagggcttagttgaaaaaccgaaaaaaggaactgctccatcgaatttgagcatcgttggccgctacattttaccgccacagatattccagtacctcgagacaattaaacccggtgctaagggagaaattcaattgactgatggcctactatctatgctcaaca

SEQ ID NO: 257439 - DNA, 327 bp, Unknown
  Bacterial polypeptide expressing nucleotide sequence isolated from the Sargasso Sea
catgaaaattttaaaaaaagtaatttttcccgtcgcagggcttggaacaagatttttaccagctacaaaggctataccaaaagagatgctcccgatagttgataaacctattattcagtatgctgttgaagaagctataaaagctggtgtaacggatatgatttttgtaattggtagaactaaaaatgctattatagatcattttgatagttcaccagacttagagaatgagcttatcaaagctaacaaaaaaaaccttttaaaattattaaaagatgtctctaaatcaaatgttaattattattttgttcggcaaaaatcaccaaa

SEQ ID NO: 257440 - DNA, 253 bp, Unknown
  Bacterial polypeptide expressing nucleotide sequence isolated from the Sargasso Sea
atgaaagctgtaattcctgttgctgggcttggcacacgtatgctgcctatgactaaagcaattccaaaagaaatgctccccattgtagataaaccgcttattcaatatattgttgctgaatgtatcgccgcgggtattaaagagattgtactggtcacgcatagctctaaaaatgcaattgaaaatcactttgatacaagttatgagcttgaagccacgcttgaaaagcgtgttaaacgtgccttgcttgaag

SEQ ID NO: 257441 - DNA, 300 bp, Unknown
  Bacterial polypeptide expressing nucleotide sequence isolated from the Sargasso Sea
catgaaagcagtgatcccagtagcgggacttggtacgcgcatgctaccagccacaaaagcaatccctaaagagatgcttcctgtcgtagaccgacctttaatacaatacgtagtaaacgaagcggttgccgcaggcataaaagaaatagtacttgtcacgcactcaagtaaaaactctatcgaaaaccactttgataccagctttgagttagaagcaacgcttgaaaagcgtgttaagcggcaattgcttgccgaagtgcaagctatatgccctaaagacgtaacaataattcacgttcg

SEQ ID NO: 257442 - DNA, 835 bp, Unknown
  Bacterial polypeptide expressing nucleotide sequence isolated from the Sargasso Sea
aatgaaaaaaatttctaaagcagtattcccagttgctggtcttggaacaagatttttgcctgcaactaaggctattccaaaagaaatgcttccgattatagataagcccttgattgaatatgcagttgaggaggctgtgatggcaggaatcgaagaaataatctttattaccagtcacacaaaaagatcgatagagaatcattttgaaaaaaacgaagaacttgaagaaaaattacttaattctgggaacaaagatgtaataaaaaagatcaatagagatatttttcaagatgttaaattcacatatattagacaagaatttcaaaaaggattaggtgatgcaattttgcaagctagccatctcatagaagatgaatactttgctatattgctagcagatgatctgattgttaataatccttctgctactcagcaattaattaatgttgctaaggaaactaatacatctgtaattggcttaaacagagttccagaagagcatattaataggtatggagttatttcctttgctgattcgtccaaaaatgaaaaactattccatttgaatgggataattgaaaaacctaaatcaaatcctccctcagatatggtagtgtttggcaggtatgttttatctcatcacatttttgattatttagagcatttagaacctggatttgctggtgaaattcagcttacagatgcaatcaagctcatgttaaaagatcataatatcaatggatatctttatgatggtattaaatttgactgcggatctaaggagggatatgtccaagcaattgcccacctagcatctgatatgatttcaaaatga

SEQ ID NO: 257443 - DNA, 883 bp, Unknown
  Bacterial polypeptide expressing nucleotide sequence isolated from the Sargasso Sea
catgctaaaagttacaaaggcagtatttccggtagcaggtcttggcacccggttcctccctgccacgaaggcaagcccgaaggagatgctgccgatcgtcgacaagccgctgattcaatacgcggtggaagaggcaatggcggccggcatcactgaaatgatcttcgtcacgggccgcagcaagcgcgcgatcgaggaccatttcgataagtcatacgaaatcgaggcggaactcgaagcgcgcggcaaggccaagctgctggaattggtgcgcagcatcaagccgagccatgtggactgcttctacgtgcgtcagccggaagcgctcggccttggccatgcggtgatgtgcgccgaaaagctggtgggcgataacccgttcgccgtcattctggcggacgacttgctgtacggcacgccgcctgtgatgacgcagatgatcgaagtgttcgatcactatcacagctcggtgatcggcgtcgaagagatccccgctgcggagacgaagtcgtacggtatcgtcgacggcaaggagtgggaagactcgatcatcaagatgtcgggtattgtcgaaaaaccggagccgagcgtggcgccatcgaatctcggcgtggtgggccgctatgtgctgaagccgcggatttttgagcatctgcgcgcgctgaagccgggcgctgggggcgaattgcaactgactgacgcgattcaatccctgctggccgatgaacaggtgctggcgtacaagtaccacggcacccgtttcgattgcggcagcaagctgggttatctgaaggcgacggtcgagttcgctctgcgtcacccggaagtggcagccgatttcgaagagtatttgcgtacccgttcgccggtgctggaaggctga

SEQ ID NO: 257444 - DNA, 910 bp, Unknown
  Bacterial polypeptide expressing nucleotide sequence isolated from the Sargasso Sea
aatgaaacaacatcaaattcgtaaagccgttattcccgtcgctggacttggcactcgtatgcttcctgcgaccaaggcaattcctaaggaaatgctacccgttgttgataaacccttgatccaatatgtggttagtgaagccattgatgcggggatcaaagaaatcgtcctcgtgacccacgccagtaaaaactctatcgaaaaccatttcgacaccagttttgaattagaagcgcaattagagcgccgcgtgaagcgtcaattactcgaagcggtacaatccatttgcccgaaagacgtaacagtgatcagcgtgcgtcaatcccaagctaaaggcttaggtcatgcgattttatgtgcgaaatccgtcgtcggtgatgcgccgtttgccgtgttgttgccggatgtgattatcgatgatgccagctgcaacctgaaaaccgacaacttggccgccatggtgagcctgtttgatgaaagccaagtgggccaaatcatggttgaaggcgtgccacatcatctagtgaaccaatacggtattgccgatgtgaatggccacgatctacaacctggtgagtcagagccattggtcgaactcgttgaaaagccaccagttgacgaagcaccatctaacttagccgttgtgggtcgttacgtgttgcccgctgcaatttggccactgctggctaaaaccccagcaggcgcgggtgatgaaatccagttaactgacgccattgcgatgttgatgaaggaagaaaccgtaaacgcttactacatgcaaggtaagagtcatgactgcggtaacaagcaaggctatatgcgcgctaacgtggagtacgccctgcgccacagcgaaatcggtgaggattttgcgcaatatttaaaaactgtcgtaaaaggaattaaataa

SEQ ID NO: 257445 - DNA, 910 bp, Unknown
  Bacterial polypeptide expressing nucleotide sequence isolated from the Sargasso Sea
atgaaacaacatcaaattcgtaaagccgttattcctgtcgccggacttggcactcgtatgcttcctgcgaccaaagctatccctaaggaaatgctccctgttgttgataagccactgatccaatatgtcgttagtgaagctattgctgcgggtatcaaagaaattgtgctcgtaacccacgccagtaaaaactctatcgaaaaccatttcgacaccagttttgaattagaagcgcaattagagcgccgcgtaaaacgtcaattactcgaagcggtgcaatccatttgcccgaaagacgtgacggtgatcagcgtacgtcaatcccaagctaaaggcttaggtcacgctattttatgcgctaaatccgtagtaggtgatgcaccttttgccgtattgctgccggatgtgattatcgatgacgccagttgcgacttaaaaaccgataaccttgccgcaatggtaagcctgtttgatgaaacccaagtgggtcaaatcatggttgaaggcgtaccacatcatttagtcaatcaatatggtattgccgatgtgaacggccacgatttgcagcctggtgaatcagagccattagtcgaactcgttgaaaaacctccagttgatgaagcgccatctaacttagccgttgttggccgttacgtgttacccgcagcaatttggccattgctggccaaaacgcctgcgggcgcaggtgatgaaatccaattaacagacgccattgcgatgttaatgaagcaagaaaccgtaaacgcttactatatgcaaggtaagagtcacgactgcggtaacaaacaaggctatatgcgcgctaacgtagaatacgctctgcgccacagcgaaatcggtgaagattttgcccactacttaaaaacagttgtaaagggaattaaataat

SEQ ID NO: 257446 - DNA, 832 bp, Unknown
  Bacterial polypeptide expressing nucleotide sequence isolated from the Sargasso Sea
atgaaattgaataaagcaattcttcccgttgctggcttaggcaccagatttctacccgcaacaaaatcaataccaaaagaaatgttgcctatagtagatactccattagttgaatttgctgtagatgaagcggtggatgcaggaattgaagaaattatcttcataacaagccataccaaaatagcaatccaagaacatttcagaagaaatattgaattagagcaaaaactccttgatgtaaaaaaagattaccaggtcgagagaattaatcttgaaaaatataaagacattaagttttcttttgtaaaccaagagatacaacttggtttgggggatgccatttatcaagcaaaatcattgatcagaagtgatgaattcttttgtgtgcttcttgcagatgaccttttttacagcaaggttggagttattagtcagttggtagaaaaattcaaagaattaggtaaaagcatcatcgctttaaacaaagttgatagttctgagacaaaaaaatatggcgttattgacccagaaaaattagagaatggtatatataagataaatgatattatcgagaaaccgcaaagtgacccaccttcaaatcttgcagttactggtagatatatattaagtggtgaaataatgagtattttaaaagatacaaaagctggatttggaggagaaatacagttgactgatgcaattaagcacatgataagttctgagggtgtttttggactagagtatgatggaaaaaaatttgattgtggttccaaagaaggttttatcgatgcaaatatattttttgcaaaaaaacaaaatttaatatcttgat

SEQ ID NO: 257447 - DNA, 231 bp, Unknown
  Bacterial polypeptide expressing nucleotide sequence isolated from the Sargasso Sea
tatgttaataaaaaaagtggtaattccagttgctggccttggcacgagattcttgcctgcaactaaatcaataccaaaagagatgctgcctgtagttgataagccattaatacagtatgcagttgaagaggcttcaaaagctggtatagaagaatttatttttattacacatcactcaaaatcaagcataaaaaaacattttgaagaagataatgatctttttaacaagtt

SEQ ID NO: 257448 - DNA, 877 bp, Unknown
  Bacterial polypeptide expressing nucleotide sequence isolated from the Sargasso Sea
tatgaaaaaaattacaaaagctgtatttccagtagctggtttaggcacacgttttttacctgcaacaaaggctaatccgaaggagatgcttcctattgttgataaacctctgattcaatatgctgtagaagaagctataactgctggaataactgaacttatttttataacaggtaaaacaaaaaagtctattaccaatcattttgataaagcatatgagttagaaattgagcttgaaaagcaaggtaagactaaagaattagagattgtaagaaacattataccggataatgttacctgtaattatattaaacaatcagaacctttaggattaggacatgctgtattatgtgcagagcatgtagtgggagatgagcctttcgttgtaattttaccagatgatttaattgataatgacaatgatgttgcaacagctcaacttatacatcaatacaataaaatggagagtagtgttgttgctgttcagaatatcgcaaaagaggagacattaaagtacggagtaatagaaaaagcctctgattcgcatgataaaacatacaaaattaaaaatattatagaaaaaccagatcctgagaaatcaccatcaacacttggcgttgtaggacgctatgctctttctccaaaaatttttaagtatctaaaagaaactgaaaaagggactggaaatgaaatacaacttacagacgcaattaaagctttaataaaaaatgaatctgtttatgcatgtgaatttgaaggcgtgagatatgattgtggatcaaagtttggatatatgcatgcttctgtaaaatacgcacttaaagataaagatatcaatcaggatttttttgaacttatcaaattgattattaagtag

SEQ ID NO: 257449 - DNA, 871 bp, Unknown
  Bacterial polypeptide expressing nucleotide sequence isolated from the Sargasso Sea
atgttaataaaaaaagtggtaattccagttgctggccttggcacgagattcttgcctgcaactaaatcaataccaaaagagatgctgcctgtagttgataagccattaatacagtatgcagttgaagaggcttcaaaagctggtatagaagaatttatttttattacacatcactcaaaatcaagcataaaaaaacattttgaagaagataatgatctttttaacaagttgatggaagatagcaaagaagatttagcatcaacaataaaaaatataggcgggtcaggaactaaatttacatatatcgagcagggtgagccaaaagggttaggtcatgcaattagttgcgcaaaagatgttatagatgaagatgaatggttttttgtaatacttcctgatgatttatttatgactaagggagcaaatgtaacagaacaaatgattgatattgctaaatctgagaataaacaagtcttagctctacagaaaattgaaaatgaagaaatctctaaatatggtgttatctcgcctgaatcaacggatggaaaaatatcaaccattaatggtattgttgaaaagccagattatgttgatgcaccatctaatttagcatcaattggaaggtacctatttaatcaaactatctttaatcatattgacaatgataatcctggaaaaaatggagaagtgcagataacagatgccatattaagtgatattaaaaattttattggatatgaatttgacggtttgcgctttgattgtggaagcaagtctggttatttaaaagccaatattaaatttggtttagctgatgaagaattaaattctgaattagaatcattcatagaggaaaagaaaaatttataag

SEQ ID NO: 257450 - DNA, 895 bp, Unknown
  Bacterial polypeptide expressing nucleotide sequence isolated from the Sargasso Sea
atgagtcaggttaaaaaagcggtaatccctgtagcgggccttgggacgagaatgctcccagcaacgaaagctattccaaaagagatgttgccagtggttgataagccattgatccaatacgtggtaagcgaatgtgttgctgcaggactaaaagaaattatcctagtaacgcacgcgagtaaaaacagtattgaaaaccactttgatacctcttttgagctagaagccacactagaaaagcgtgtaaaacgccaactgttagaagaagttcagtcaatctgtccaaaagatgtaactatcatgcatattcgccaaggcgttgcgaatggacttggtcacgcagtactttgcgctcgacctctgattggcgacgcgccatttgctgtagtactacctgacgttatcattgatgatgcagcaagtaatcctaagaaggataaccttgcagatatggttgccaaatttaacaccagccgagtaagtcaggttatggttgagcaggtaccagacgaagatatctctaaatttggtatcgcagacctagacggcgcggcaattgcgccaggtgagtcagcgaagattcacaaaatggtagagaagccgcctcgcgacgaagcaccgtctgaccttgctgttgtaggccgatacgttctgtcagaaaaaatctgggatctgttagagttcacgcctccaggagcaggtggtgaagttcagcttactgatgctattgatgcattgatgaaacttgaacaagttgatgcctactacatgaaaggtaagagccacgattgcggtagtaagttgggttatatgaaagctaacgttgaatatgcgttacgtcacccatcgttaggcgacgaatttaaagaatacttagcttctgttgttaaatagt

SEQ ID NO: 257451 - DNA, 790 bp, Unknown
  Bacterial polypeptide expressing nucleotide sequence isolated from the Sargasso Sea
aatggtatcaaaagataataaagttaaaaaagcagtttttcctgtagcaggcttaggaacacgatttttacctgccactaaggctagccctaaagaaatgttgaatgtagttgataaaccacttattcaatatgcagcagaagaggcagtatcagctggcattgacactttaatttttgtaacaggaaggaataaagtatctattccaaatcattttgacagagcatatgagttagagagtgaactacttcaaaaaaataaaaattctgaattggagcttgttcaaaatattcttccaagtagcgtgaactgtatatacataagacaaaaagaagctttgggattagggcatgcagttttatgcgctgagcctgcagttggaaatgatcccttcgcagtaattcttgcagatgatcttattttaagtaggcaaaaatcctgtatatgtcaaatgtctgacaaatttaaacagcatgagggaagtataatatcagttcaaaatgttgataaaaataacattcataaatacggagttattgatggagaaaaaattaataattctgattggcttttatctaagatagtagaaaagcctaaagctagcgaggccccaagtaatatgggcgtagttggaagatatatttttaatccattaatttttgaatatattagaaagacctctaaaggaagcggcggcgagattcaattaactgacgctattgatttaatgcttaaaaaagaaaaagtttatgcatacgagttcgaaggtaaaagatatgattgtggcagt

SEQ ID NO: 257452 - DNA, 688 bp, Unknown
  Bacterial polypeptide expressing nucleotide sequence isolated from the Sargasso Sea
atgacaaaaattactaaagcagtatttcctgtggcaggtctgggaaccagatttttacctgcaactaaggcaataccaaaagaaatgcttccaataatagacaagcctttaatagagtatgcagttgaagaagcggtaaattcaggtattactgagattattttcattactagccatactaaaagagctattgaggatcattttgatcaaaactttgaactcgaggaaaaattgatcaattcaggtaaaaaagattttgtcgataagattaatagagatatttttcagaacataaaatttacttatgtaaggcaaaaatcacaaaagggacttggcgatgctattttacattctgagcatttaattcaggatgaatcatttgcaattattcttgccgatgatttgataattaataatccgtcatgcattagtcagttaatttctgcttatgatgaaaatcaatgttcaatcataggtttgaatgaggtcccagaacatgaaacagataaatacggcatggttgctattgaggaaccttcctcacctaccaactcgtttgtattaaaagatattgtcgagaaaccaaaaaataattcgccatcaaatctagcagtagttggaagatatgttctgtctagtaaaatatttaaatatcttaaaaatcttaagccgactgttgggtggtgaa

SEQ ID NO: 257453 - DNA, 484 bp, Unknown
  Bacterial polypeptide expressing nucleotide sequence isolated from the Sargasso Sea
aatggttgaatatattttaaatctaatttccgaaaagtctggggcattaaatgttttaacctacttgtcatcaagaacaatcagctcaactcttacaggattattaatagtcttgctgttcggagataagttcatccaaataattaagaagtttcagtttaatcaaaattttgatggccgtgctccagaatcccataaaaaaaaggatggaactcccacaatgggaggaattcttattattggaagcgtagttctttctggattaatttggggcgatctttctaataagtatttattattgggcttagcttgtttggtgggctttgcaattataggttttattgatgactataaaaaaatattctcattagattctacaggcctatcttcaacaacaaaaatattctatcaggccatggtagctcttgtagtttcagtaatacttttcgcctcctctacatctcctcaagaacttgaatacatt

SEQ ID NO: 257454 - DNA, 487 bp, Unknown
  Bacterial polypeptide expressing nucleotide sequence isolated from the Sargasso Sea
cctggctcagcagcctatgcagctggacgccatgcaagtcagcggcgcaccgctgagcgaaatcgaggccgcgcaggaagagctgaaacgggtccccggcgccaccaacctggtagacatggacaaggtcgagcagggccgcgtggccggcgtcgccgacgtgctggcctaccagcctggagtctatgcgcagtcgcccggcaacgagggcgtgaagatcagcgtgcgcggctcgggtatcaaccgtggccccggctcgcacgcttccggcacccatatcctgctcgacggcctgcctctgaccggctccggcggcacgccctacgaactgctggagcccctgtggataagtcgcgccgaggtgctgcgcggcgccaatggcttcgaccgcggctcgctggctctgggcggcgccatcgactacatcacccacactggctacaccgcgcccaagctgcaactgcgctatgaaaccggcagctacggt

SEQ ID NO: 257455 - DNA, 340 bp, Unknown
  Bacterial polypeptide expressing nucleotide sequence isolated from the Sargasso Sea
agcagcaacttttggtttattaggtgcttatgatgattatcaaaaaataaaaaaaaataactctagtggtgtatcttcaaaatttaaaatcttaattcaaattttattagctctaatcggtatattaatattatatatctttagtgattctagtgagttaaaaaatttatattttcctttttttaaaaattttattattaatttaggttggttttttattcctttttatttatttgtaattgtagggtcatctaatgcagtaaatcttactgatggattagatggattagcaacagtgcctgttatattggtcgctgcttgctttgcattcattagttac

SEQ ID NO: 257456 - DNA, 277 bp, Unknown
  Bacterial polypeptide expressing nucleotide sequence isolated from the Sargasso Sea
ttgccaatttcttatttagtacttgttggaataagtaattccgtaaatttgacagatggactagatggattagcagctggttgcagtggggttatcttttatggcttaggaacagaaatattaatgaaaggacagcaagagcttcttgtttttagtattttatgttattcaatgtccggcatatgcttaggatttttgaaatacaatagttatcctgcaagaatatttatgggtgacacaggatctttgactattggtgcaattcttagttctatag

SEQ ID NO: 257457 - DNA, 346 bp, Unknown
  Bacterial polypeptide expressing nucleotide sequence isolated from the Sargasso Sea
gatgtttgaatatttaggtacagttttagtgtccgttgatcctggttttgatgttctaagatacctaactgtcagaacaattggtggtacggtaacagcacttttgctttcaattttgatgggcccacttatcattaattctctcaaatcaatgcaatttgagcagtttgttagaaaagatggaccagaatcccacttcaaaaaaacgggtacgcccacaatgggaggattactaatattatcttctttagtaatttcaactcttttatgggctgatcttggaaatagatatatttgggttgtactaggagtaaccataggtttttcaataattggttttttttga

SEQ ID NO: 257458 - DNA, 171 bp, Unknown
  Bacterial polypeptide expressing nucleotide sequence isolated from the Sargasso Sea
tgcaagtttctttttttaaaatttcaaaaggtaaacggttatttttaatggcaccacttcatcatcattatgaaaaaaaggggctctctgaacaaaaaattgtaattagattttggatattaagcttcttattttgtttattagctctatcacttctaaagattagataat

SEQ ID NO: 257459 - DNA, 478 bp, Unknown
  Bacterial polypeptide expressing nucleotide sequence isolated from the Sargasso Sea
tttgtttaaaataatagcccagcattttgttgaacagtatagtttttttaacttattcaattttataacttttagagtcggcgcctcaatattaactgcactttttttttcattaatatttgggcaatacataattaataaaatttcaaaaattcagccaataggtcaacctataagaaatgacggaccagaaaatcatataattcaaaaagctggcactcctacaatgggtggtcttctaattattttaagtgttgtaatttctttaatcttgtggtcagatttacaaaatacttttgtatggattggatttttatctttattggtttttggttttataggttttgttgatgattataataaaattaaatcacactcaagtaatggattaaaagcaagtacaagaatagttttgcaaatattttttgcattcataatatccgtaataattattaatcaccttaatgatcaatttgat

SEQ ID NO: 257460 - DNA, 580 bp, Unknown
  Bacterial polypeptide expressing nucleotide sequence isolated from the Sargasso Sea
atgctttatcaatttttacttaactttgtagacacatttggttttttgaatgttttcaaatacattacttttagaactggattatctctatttacatcattagctatcgttctaattattggaggaccttttattaagtatttttccaaccaaaaaattttgaatcctattcgagatgatgggcctgaagagcatattgtaaaaaaaataggaacaccaacaatgggcggtgtaattattttaataggtttattagtttcagttttgttttggggagacttaacaaatataaatatacttttttgcatttatattgctatttcgtttggtgttttaggtgcttttgatgattttaaaaaaattaaacatagcaattcttctggtgtatcatcaaaatttaaaataatttctcagattattttagcaattataggagtttgtttttttgtttattatgtggataatcagaacataacaaacttatattttccattctttaaaaacttaattattaatttgggatggttctttataccatttgctgtgtttgttttaattggctcctcccaatgcagttaat

SEQ ID NO: 257461 - DNA, 358 bp, Unknown
  Bacterial polypeptide expressing nucleotide sequence isolated from the Sargasso Sea
atgctctatagtttattttcatatttaacagactcctattcctttttaaacgtttttaaataccttaccgtcagaaccggattatctatgtttacgtcgatgataatagttttttttatagggccaattataataagatatttttctaataaaaaaatacataacccaattagatctgatggccctactgaacatataataaaaaaaataggtaccccaacaatgggtggagtaatgattttaataggtatattttcaggtactttgctttggggggatcttaacagtcactataattggtttttaatttttattgtaggtagtttaggtgttttaggtgcatatgatgattataaaa

SEQ ID NO: 257462 - DNA, 421 bp, Unknown
  Bacterial polypeptide expressing nucleotide sequence isolated from the Sargasso Sea
atgctattccacttttttacttctttgatagatcaatattctttttttaacgtatttaaatatttaacatttagaactggtttgtcagttataacctcactcgttattgttttcataattggttcccctttaataaaaattttttcagaaaaaatgattactggtccaataagacaagatggacctatagatcatataatcaaaaaatctggcactcctacaatgggaggagtaataattataatagggataatctcaagtacattattatgggcagatttatcaaatatatatgtttggaccttgatatttgtatctttaagtcttggagggcttggctttttagatgatatgttaaaaattaaatttaaaaactcaagtggtttaaagtctaaatataaattttctggtcaattgatta

SEQ ID NO: 257463 - DNA, 625 bp, Unknown
  Bacterial polypeptide expressing nucleotide sequence isolated from the Sargasso Sea
gatgattgggaggattaaaaagtttaactttaaatcgttattaatattaaatactcttgctttaatagcaacctcatatatttttgataattttatttttataggagtttttacactatttttttttatttctatatttgcaaccaaaaacggtctagaaataatcagaaaattaaatttacttcaaaatataagaactgaaggtccatctaatcaccataaaaaaagtgatactccaacaatgggcggggtttttttgataatcccttttttaatttttcttttgataataactataaatttaggttccctaaaattatttcttttattactaactatttttggtttttttattacaggttttttagatgattatttaagtataaaaaacaaagaaaatacagggttaaaaccaaaagagaaatttttcttacaaagtgtcatctcaataatttttatattgttagcctatgaaaaaaatttaatcaatccattaataatgatatctgactcctggggaataaatatgaatattttcatattgccaatttcttttttagtactagtgggcataagtaattcagtaaatttgactgatggattagatggattagcagctggatgc

SEQ ID NO: 257464 - DNA, 127 bp, Unknown
  Bacterial polypeptide expressing nucleotide sequence isolated from the Sargasso Sea
cttatggctcctctttcaccatcattttgaaaaaagaggatggaaagagtcaacaatagttatcagattctggataattgcagttattttggctcttattggcttatcaactctgaaattgagataa

SEQ ID NO: 257465 - DNA, 424 bp, Unknown
  Bacterial polypeptide expressing nucleotide sequence isolated from the Sargasso Sea
tatgctatatgaatttctatatccattatcagaaagtattcaaatattaaatgtttttaagtatataacattcagaacaggtggagcaattctaacttcccttattctcagttttatttttggtccgttactaatacaaacattaaagaattttcaaaagcaagggcagccaataagaattgacgggccatcagaccatattataaaaaagaagggtacccctactatggggggcattttaatacttttttcatcggtagggtcaactattatatggatgcaattggacaatcaatttgtttggtcaattttgttaattatgataggatttggggctattggtataatagatgattggatgaaaatttcaaaaaattcatcatcaggtttaaatggaaaactaaaaaattgctttacaaatatt

SEQ ID NO: 257466 - DNA, 325 bp, Unknown
  Bacterial polypeptide expressing nucleotide sequence isolated from the Sargasso Sea
ttgtttaaattattagctcaagaatacgttagtcaatatagctttctaaatttatttaattttattacatttcgtgttggagcttcaatattaacgtcattatttttttcattaatatttggacaatttataattaataagttgtctaagattcaacctaacggacagccaataagaaacgatggacctcaaacccatataatcaaaaaagcaggtactccaactatgggtggtgttttaataattttaagtgtttttttttcatcagttttgtggtcagatttacaaaattattttgtatggataggattgttatccttaataa

SEQ ID NO: 257467 - DNA, 493 bp, Unknown
  Bacterial polypeptide expressing nucleotide sequence isolated from the Sargasso Sea
atgctttatagtttacttattaaccttatagatactttttcatttcttaatgtatttaaatatttgactgtaagaactggattggcagtttttacatctatgtttgtagtttttttaattggcacaccttttattaattttttttcagcaagacaaattttagacccaataagagaagacggtcctagtgatcatattgtcaaaaaaattggaaccccaaccatgggtggagttttaattttattaggtcttttttcaggtatttttctctggggagatttatcaaattattttatatggtttttaatttttatagtaggaggatatggtttattgggcgcctatgatgattatagaaaaataaaacataaaaattcttcaggagtttcatttaaatttaagttaattgtacaagttttgattgctgttataggaattatgtttttaacctatttttcagatcattccgagcttgagtatttatattttcctt

SEQ ID NO: 257468 - DNA, 271 bp, Unknown
  Bacterial polypeptide expressing nucleotide sequence isolated from the Sargasso Sea
atctattgcattattaacgaatagcgtttttatcttatctattttctcaggaatcttcattattgaatctttatcggtaatgattcaagtagggtttttcaaaattacaaaaaaattattgaacactgggaaacgcatttttttaatggcgccattacatcaccattttgaactcaagggaattaaggaacaaaaaatagttgaaaatttttggaaattcaacattttacttgtgatattaggtatagttttaaatgatcaacactttaaa

SEQ ID NO: 257469 - DNA, 281 bp, Unknown
  Bacterial polypeptide expressing nucleotide sequence isolated from the Sargasso Sea
aatgtttgaatatctagggacagttcttgtttcagttgatcctggttttgatgtacttcgatacttaactgtcagaaccattggagggactataacagccctagtaatttcaattttattaggtcctgtaattataaattttttaaaatcaattcaatttgagcagtatgttagagaagatggtccaaaatcgcactataaaaaaacaggaacacctacaatgggtggcttattaatattgtcatctttaattatttcaactcttttatgggcagatcttg

SEQ ID NO: 257470 - DNA, 517 bp, Unknown
  Bacterial polypeptide expressing nucleotide sequence isolated from the Sargasso Sea
ttgtttaaatatgtagctgaacaatatgttgaacaatatagttttttaaatttgtttaattttataacttttagagttggagcttcaattttaacttcactatttttttctttaatttttggtcaatatataattaacaaaatttcacaaattcaacccattggacaaccaataagagatgatggaccgaaaactcatattattaaaaaagcaggaacccctacaatgggaggagtacttataattttaagtgttataatttcgatatcactttggtctgacttaaagaatatttttgtatggattgggttactgactttatttctatttggatttattggcttcattgatgattataataagattaggtcaagttccagcaatggaataaaagcaaaaacaagaataatatcacaattaatttttgctatttttatttcaatattaattttaaataacattgatgatcaaatagataccacaattgcttttcccttttttaaaaatttaattataa

SEQ ID NO: 257471 - DNA, 118 bp, Unknown
  Bacterial polypeptide expressing nucleotide sequence isolated from the Sargasso Sea
tatggcgccgttgcaccaccacttcgaattgggcggctggagtgaacgacgcgttgtggtgagcttctggggcatcagcttgctgctggtggcgctcggactcgtcctcgttccctga

SEQ ID NO: 257472 - DNA, 130 bp, Unknown
  Bacterial polypeptide expressing nucleotide sequence isolated from the Sargasso Sea
tttcggatggcaccatttacaccatcattttgagcaaaaaggatgggcagagtctactatagttataaggttctggataattgctgtaattttagcgttagtcggtatttcttcacttaaactaaggtaa

SEQ ID NO: 257473 - DNA, 220 bp, Unknown
  Bacterial polypeptide expressing nucleotide sequence isolated from the Sargasso Sea
taaaattacaaaaaaattatttcatagaggtaaacgcatatttttaagggctccactacaccaccactttgaacttaaaggagtgaaggaacaaaaaatagttgaaaatccagggaaaatcaacattttacttgtaatcggaggtatagtcttaaaaatcaatcttggaaaaatccgtgatgaatgtttttacatggaaagaaaatggataaaccagtga

SEQ ID NO: 257474 - DNA, 645 bp, Unknown
  Bacterial polypeptide expressing nucleotide sequence isolated from the Sargasso Sea
ctgccacttttgctatcagcaatgcagtgaatgcaatcagaggtggtacggcccgggtagtgttggtggtgaaccctgagtttgcatcacctcaagtgaattatcgtagccgcgatagccactttatttttggcgatgtatgcactgcaactattatcgaggcagaagatacatgcagcagtgacaatgcctggcgtattaacggtatgcggttgaaaacggaattctctaacaatatccgctgcgatgtcggctacaccgagcattgcctgacaccagacccgttagtgccgtttttcaaacagcagggccgcaaggtgtttaaggaactgctgccgatcgttgccgatgtgattttaactgagatggcggtgcagcaggttgcgcccgagcaactgaagcggttgtggctgcatcaggcaaacatcaatatgaatatctttgctgcgaagaaaatacttggccgcgaccctttaccgcaagaagcaccgttggtgctggattcttatgcgaataccgcctccgcaggttctgtcattgcatttcataaatataagcaagggttgcaatctggcgaccatgcaattttatgctcattcggagccggttattcagtgggttgtttagtgctgcaaaaatgctaaa

SEQ ID NO: 257475 - DNA, 937 bp, Unknown
  Bacterial polypeptide expressing nucleotide sequence isolated from the Sargasso Sea
cttgctttaggcttaactatggggttaggtactggtgtaacttcttccatagcaaggttcattggtaaaaatgataaatcaggtgcagataattgcgctgagcatgcaattgccattgcattattaatcagtttattattatcaatagttataattatttttggaaaaaaaatattattcttttttggagcatcaggtacaatactttctttggcatgggattatcttcaagtaatgtgtattgggcttccatttatggtgttttcggggttttttcgatcaatcctagctggggaaggagatatgaaatttccaatgatggttgctggattaggaacagttttaaatataattcttgacccaatatttatttttgatttagataattttggtggcataggttttggattaggtataaaaggtgcagcaattgcaacagtaattagtcaatgtattgttttctctgtatttatttatatgctatttgttaaagaacatgcatatataacttttcgtattaaagatttttccccttctagagccataacatgggatattattaaagtaggtttgcctgcatctctttccatgattgtaatggcggtaggtcagggtgtttttaatagaatattaatttatttttcagctgacacagttgccgcataccaggttgccggtagaatagatatgttggtatttttacccatattttcaatagctggagctttgactacgctagttggaatgttctatggttcaaagaaatatgaaatcttacgatatactgtaaaatatggtattatttctgcattctcaatcactgtgataatgtctatcttactttatgtatttgctcataatattgtagggttttttacttcagaagatacaataataaatgtggcggttacttttttaagattatttgcattcgttt

SEQ ID NO: 257476 - DNA, 523 bp, Unknown
  Bacterial polypeptide expressing nucleotide sequence isolated from the Sargasso Sea
aatgagaattgagaaaattcttaatgaaaatgaagatatagaggggttaatatcttgtgctgctgtgggttacttcggaaacctagagaatttttctattgatcaaattttaagttctattaataccaaccttttatctcacgtaattttaactaaatatttagttcccttttttaaaaagaagaataaaggtaaattagtatatataggttctgaatctgcattggatggtggaaagaaaggaagtttatattcagctgcaaaatttggtttaagaggttttactcaaagtattagagctgaagtagctagtagaaatataactgttactcttataaatccaggcatggtaaaaactaatttctttaataatttagattttcagccgggtttaagtaaaaaaaattcaattatagtatatgatattgcgaaaatagttataagcattcttcaaatggataccaatactagcgttgatgaagtagttatgaatcctataattaaatctgtaataaaaaaataa

SEQ ID NO: 257477 - DNA, 521 bp, Unknown
  Bacterial polypeptide expressing nucleotide sequence isolated from the Sargasso Sea
atttttcttagatggtcaaaatgatttatgcatactatcattcgtagtatcaggctcgactataggtttcctatattataattttaaaccagcaaagatatttatgggagattctggaagtctaacattgggattcattttatccgttatttcattaatgggcactttccatactaaatcacatgtaatgttctcacttggtatacctttactattgatgttaattcctatttttgacactacactagtaactataaatagaaaatatcttaatcgtccagttagtcaaggagggaaagatcatctttctcaccgcttgatagcacttggttatagtgagcgtaaatcattattgcttatgttttttatttcatcattaggtggtatgattgctttgggtttaaaatatttagatttatctatatctttattatttattgtattaaccctgattttatttattggttttggagcagtgctctcaagagtaaaagtttatagtcaaaaggagtatgattcaa

SEQ ID NO: 257478 - DNA, 916 bp, Unknown
  Bacterial polypeptide expressing nucleotide sequence isolated from the Sargasso Sea
aacatttgtatcgatctgcgagcagagggtgcgcgcgagctagtttttgccctggttgagcaagctgacattctgattgaaaattatcgacctgatgtcatgccaagattgggattgggctacgattctctaaaagaaatcaatcccaagctcatcatgctctctatttctggatttggacatgatggtccggaatcccaccgccctgcctatgctcctataattcacgctgagaccggccttatggcacgccagtcgaaaaggggtgatatcccatataccgatcttcccttgtcggttgccgatacaaacgcgtcgttgcacggattagtgggtctgttgtctgcagttattcaccgcgatcggattggtgttggccaacacatcgatatcgcgatgatggatacagttctggtgactgatgaccaactacactatgacatcgagagctcggaggatagtggccctcttagaaacgacacctgggaaacgggtgtcgggcccatattagtgtctgctgattttaggtggttgtggaaaaaccttgttaggcatttcgaatcctttcgcgattcgggtacggacaatatggaattggaacaaaagatccgaactcgaagggagatagtcggaaggtacatggccaagctagaaacttggggtgaagttgagtctgttttcgcaacgatgaatatcgcttggggcaaagttagagatcctcgcaagatgcgagaacaagagaccgttatatcccggggttcgattaccgaaattgacgacagggcgggcggtgtgaggccaatcccgcaatctccataccgcttttccaatgctcgctccgaggtgaaaggatctgccaagcatcgaggtgaagacaacttttcggtgttgtcctccggatcggtagatctcagag

SEQ ID NO: 257479 - DNA, 183 bp, Unknown
  Bacterial polypeptide expressing nucleotide sequence isolated from the Sargasso Sea
catgttattggcattggcgcaatggttgcagaacgactacggcttcctgcgcgtcttcaattatctgacgttccgcgccgtgatggcatcgctcacggcgctggtgatcggcctcgggttcgggccgtgggtgatccgtcgcctgaccgagctgaaggtcggccaggccgtgcgcagctacgg

SEQ ID NO: 257480 - DNA, 337 bp, Unknown
  Bacterial polypeptide expressing nucleotide sequence isolated from the Sargasso Sea
tatgctttataaatttattttagattacgttgaaattttttcttttctcaatgtttttaaatacttaacagtcagaactggtttggcaatgtttacatcatttcttgttgtgtttattgtaggaacaccatttataaattttttttcagcaaggcaaataaccgatccaattagagaagatggacccgatgaccatattgttaaaaaaatcggaacaccaactatgggtggcgttttaattctcttgggattatttttgagtgtgttattttggtgtgatttatcaaatccatttatttggactttaatattttttgctggaagtttggaattttag

SEQ ID NO: 257481 - DNA, 739 bp, Unknown
  Bacterial polypeptide expressing nucleotide sequence isolated from the Sargasso Sea
aatgttataccacctatttgaaatattagaaagtgaatttaatttacctggggcaagtttatttggctatttgtcttttagagcagcggttactgtaataatggcactactaatatcaattgtttttggtaaaaaaataatcaattatttaaaagtaaaacaggtaggcgaaaatataagggaacttggtttacaaggtgaaaagaaaaaagcaggtaccccaactatgggaggtataataataataattggcactttagtcccggtgattttgatgtcaaatctcgaaaatatttatatacaaattcttattatatctagcttaattttaggaaccattggattaattgatgattacattaaagtatttaaaaaagacaaaaaaggacttcatggaaaatttaaaattgcaggtcagtcactattaggaatttttgttgggatagttttattgaccaataataatataactattgttgaatttgacaaaaacttaaattctaataatatagaattatctcaaatagaggaaattaaatcatataagacaacaataccattttttaaaaataatgagttagactataatgaagtgtcaaaagctatttttggagatcaatcaaattatttgtggttgacaataatcccaattataattcttattatagcatcagtttcaaattctaataatctaactgacggtttagatggactctctgcaggactttctgctataatt

SEQ ID NO: 257482 - DNA, 481 bp, Unknown
  Bacterial polypeptide expressing nucleotide sequence isolated from the Sargasso Sea
atgctttattatttatccttatttttcataaatgactattcttttttaaatgtatttaaatatttaacttttagatcaggcggagccttattaaccagtctgacatttagctttattctagcaccatttattattgagtggttaagaaatcatcaaagaaacaaaaaaactataagagaagacctgccaaataagcatttaataaaaaaaagaggcacaccaacaatgggagggttattaatattaataacttttgtatttagtactctactttggacagatgttaaaaacccatatatttggattgttttatcaattacttttggttttggggctattgggtttatagatgattacttaaagttaatgtctaaagaaagaaagggtcttagagcaggaacaaaattaatatttcaatttttaattagctctataacgttattttttttatataacttgtttgaatatcaatttatcaaca

SEQ ID NO: 257483 - DNA, 409 bp, Unknown
  Bacterial polypeptide expressing nucleotide sequence isolated from the Sargasso Sea
catgtttttgtatttttctgaaaatttgatcgagtggttttcgccattgaatgctttcacttatattacaaccagaggcattcttgctgcactaacagctcttattatttctttcctttttggccccaagatcatcagtgtgcttcaggggaaaaaaatcggtgagacaatcagaaccgatggcccatccagtcactctttaaaaggcggcactccaacgatgggtggaatcatgattattctctcaattgttgtcagcgttcttatttggtcagacttaagcaatgtttataatttggttctcattgcatcaatcatttcttttggactcattggatttactgatgatttcacaaaacttaaaaaaaagcaaaaaaaggcatgtctgcaaaaaacaaagtttgctttt

SEQ ID NO: 257484 - DNA, 301 bp, Unknown
  Bacterial polypeptide expressing nucleotide sequence isolated from the Sargasso Sea
acaggaagtctaactgttggtggcttaattgcggtaatttcaatactcattagaaaagaattattaattccaattctatgtggagtatttctcttagaagcactctctgtaatcattcaagttagttatttcaaattaactaaaaaaaagacaggagttggaaagcgtattttcttaatgtcgcccatccatcatcattttcaaaaagccggttatcatgaaagtaaaatagtttcaagactatggattataggaatttttttagcagttataacgatactaacacttaaaattagataga

SEQ ID NO: 257485 - DNA, 526 bp, Unknown
  Bacterial polypeptide expressing nucleotide sequence isolated from the Sargasso Sea
attgattggaatcatagtttctggtggaattagttttcttgtagttatattttctacattgattggcgtcaattttttcagagcgagaaatataggtcaagaaattcaagaagaggtaaattttcacgaccataaaaaaggaactcctacgatgggtggattatttatcgtttttggtactattgctggttactcactgtctcatataaatttttggactattggagaaggattcaaagttgaattaacttctatgaatttaaatgtaattttaatttttgtactggcttttctgatggcaatggtaggttttattgacgattatttaaaagtgaaagctggaagaaatctaggattaaaacctacacaaaaatttgctttacaatttttgattggttgtattagtgcttattattttatatttttaaattacgattcaaacttctacttttttagcggtttaggttttgatataggcatcgttaaatggttagtaattatattttttattataggcattacgaat

SEQ ID NO: 257486 - DNA, 490 bp, Unknown
  Bacterial polypeptide expressing nucleotide sequence isolated from the Sargasso Sea
tttgacggatggtttagatggtttattgagtggctgtagcgtattaattttcacaggactagctatcagtattttaattgaaaatccaagcgataattttacactcgctcctctctgcatagcaatggctggagcttgtatgggatttctttttctaaacaaatatcctgcaaaattatttatgggagattcaggttccttagctataggagcatccctaggtggtattgctttaatatcaaatcatctttggtctcttttaattatggggggaatacttgccgcagaatctatctcagtaataattcaagtaagtatttttaaaatttctaaacgagcaaagggaaagggtcataaattatttttaatgactccgttacatcaccattttgaacttaaaggtaacaatgaaagtttaattgtaagtagcttttggttaattacattattcttagtcgtaattaatctaatttttttgattaagtcctaa

SEQ ID NO: 257487 - DNA, 505 bp, Unknown
  Bacterial polypeptide expressing nucleotide sequence isolated from the Sargasso Sea
catgtttttgtatttttctgaaaatttgattgagtggttttcgccattgaatgctttcacttatattacaaccagaggcattctcgctgcactaacagctcttattatttctttcctttttggccccaagatcatcactgtgcttcaggggaaaaaaatcggtgagacaatcagaaccgatggcccatccagtcactctttaaaaggtggcactccaacgatgggaggaatcatgattattctctcaattgttgtcagcgttcttatgtggtcagacttaagcaatgtttataatttggttctcattgcatcaatcatttcttttggacttattggatttattgatgatttcacaaaacttaaaaaaagcaaaaaaggcatgtctgcaaaaacaaagtttgctttgcagcttatcgtcgctgcttcatcgacttattatctattggggcaagggagcgaagtattgagttcagaggtccttatccctttcacaaataatattcga

SEQ ID NO: 257488 - DNA, 796 bp, Unknown
  Bacterial polypeptide expressing nucleotide sequence isolated from the Sargasso Sea
ttgctagcaatacctatcttttatttatttgggttatataggtctcttattcgttatgcaaattatcagagcgttatcacaataatttttgctgttactacatatatggcaacttggtatacgctaatctatttattagatcttcaggtcaagccatatgattttttaattattaattggttaatatcgataggattgataggtgcctcaagatttttagcaagatggttcttgattattaactttacaaactatagtaatgttctaatttatggagctggaagtgctggcagacagttagaatctgctatgaagtataatcctgaaattaatgtcattggctttttagatgacgattcaagatatcatggcaaatatattcaaggtcttaaagtattcaatcctgaaaaaataaggaatttaattagtaaagaaaatatcaatcagattcttattgcaataccttcacttgcaaaaaatgatctgagacgaatcattgattcactcaaggacctcccactagtaataagagcccttcctagccttggtgagatggtacagggtagagttgaggtttctgatcttaagaaaattaaaattgaagatttacttagacgcccaataagaaaaccagacgaagacttactcaagaaagatatagagagcaaaaatattctggtaactggtgctggtggctcgataggctctgagctctgcatgcagataattcagttaaatccaaaattagttgttctctatgaggtaactgagtttgctctttaccaaatcgagcaga

SEQ ID NO: 257489 - DNA, 115 bp, Unknown
  Bacterial polypeptide expressing nucleotide sequence isolated from the Sargasso Sea
aatacatcaccattatgaattaaaaggaattcctgaatccaagattgtgattagattttggattgttggtcttttatttgcgttgctaacaataacaacttttaagatcagataa

SEQ ID NO: 257490 - DNA, 441 bp, Unknown
  Bacterial polypeptide expressing nucleotide sequence isolated from the Sargasso Sea
aatgtttgagtatttaggatcagtacttgtatcggttgatccaggttttgatgttttgagatacctaacagtaagaacaatcggtggaactattactgcactaataatttcaatcttgttaggaccattaataataaatttcttaaaatctatgcagtttgaacaatacgttagagaagacggaccaaagtcacattttaaaaaaactggaaccccaacaatgggaggtttgttgatcttatcttctttagtcatttctacacttctttgggcagatcttggaaatagatatatatgggtagttttaggtgtaacagttagctttgcactaataggtttttttgatgattatctaaagatcaaaaataaaagctctgatggcctttcttcaaaacaaaaaatcatctttcaatctgttattgcattaatatctatgcttta

SEQ ID NO: 257491 - DNA, 363 bp, Unknown
  Bacterial polypeptide expressing nucleotide sequence isolated from the Sargasso Sea
catgtttttgtatttttctgaaaatttgattgagtggttttcgccattgaatgctttcacttatattacaaccagaggcattctcgctgcactaacagctcttattatttctttcctttttggccccaagattatcactgtgcttcaggggaaaaaaatcggtgagacaatcagaaccgatggcccatccagtcactctttaaaaggtggcactccaacgatgggaggaatcatgattattctctcaattgttgtcagcgttcttatgtggtcagacctaagcaatgtttataatttggttctcattgcatcaatcatttcttttggactcattggatttattgatgatttcacaaaacttaa

SEQ ID NO: 257492 - DNA, 850 bp, Unknown
  Bacterial polypeptide expressing nucleotide sequence isolated from the Sargasso Sea
tcggcacggcatctcgcagccctcgccgactggatgcgtctttcgatggccgaagtctgggaggttgccagcttctatgaccatttcgaccttgtccgcgagggtgaaacggcgccggccgcctgcacagtcagggtctgcacatcgctctcctgcatgatagcaggtagcgaggaaatgcttgaaaaacttcaggaaactgcatcggacgatgttaggttcattgccgcaccctgtatcggcgcctgtcacaaagcaccggccgcggccatcggccaccagctggtcgagcatgccgacctcgaaacactgtcgggtgtgaccaaggccgggcatgccgaaatcccgtcggcagcacgccagtttgacgactattgcgccgatggcggctatgccgtgcttcgcgagctgctagacggcagccgcagcgccgatgatgtgctggccacgcttgatgaaaccgcgctgcgcggccttggcggcgccggcttcccgaccgggcgcaaatggcgcatagtcggcagccagcccgggccgcggctgatggccgtcaatggtgacgagggcgagcccggcacgttcaaggaccggctgtatctctcgacggacccgcatcgcatgatcgagggcatcctgatcgcggcgcatgttgtcgacgtcgagacctgctttatctatatgcgcgacgaatatcccgaaatcatcgtcctgcttcgacaagagctggacaaggttcgtgctgccgggcttgccgatcatgtgaagctcgagctgcgccgcggggccggcgcctatatctgcggtgaagagtcggcgatgatcgaatccatcgagggcaagcgggctcccc

SEQ ID NO: 257493 - DNA, 237 bp, Unknown
  Bacterial polypeptide expressing nucleotide sequence isolated from the Sargasso Sea
tttggggacaattttagtttctgttgatcctggttttgatgttcttagatatcttacggtaagaacaattggaggaacagtaactgcacttttactatctattttgatgggcccagtaataataaattttcttaaatcaatgcaatttgaacagtttgttagaaaagatggaccagaatctcattataaaaaaacaggcacacccacaatggggggattgctaatattgtcatcttt

SEQ ID NO: 257494 - DNA, 406 bp, Unknown
  Bacterial polypeptide expressing nucleotide sequence isolated from the Sargasso Sea
gttgcattaatttcagctatctttatttcttctatttctggatttttaatttggaattggccgccagcaaagatctttatgggtgatgttggtagtagctttatcggattcgttctgggtgtgcttgctttgatttcaatgcacaacgataccacgacagtgtggacttggttcatcttattaggagtattcgtggtagattttacgtggactcttgctgtcagagtagcaaaaggtgaaagctggtacgaaggacactcgagccatgcttatcaaatcgccggaagaaggtggggaagtcacgaaagtgttatattagcggtgcttgtcataaactgcacctggttagctcccttgggttggctatctttccacttcccaaatgctgcgttatatatttgtctgg

SEQ ID NO: 257495 - DNA, 225 bp, Unknown
  Bacterial polypeptide expressing nucleotide sequence isolated from the Sargasso Sea
aatgctctatcaatttttattaaactttgtagatagttttggtttcttaaatgtatttagatatataacttttcgcacaggattatcattatttacttcattgattattgtcctattaattggaggtccttttattaattttttttcaaacaaaaaaatattaaatcccattcgacacgatggtccagaaaatcatattattaaaaaaatcggaactcctaccat

SEQ ID NO: 257496 - DNA, 232 bp, Unknown
  Bacterial polypeptide expressing nucleotide sequence isolated from the Sargasso Sea
atgctttttagtctattttctaacttaattgagatctttagttttctaaacgtttttaaatacttgactgtaagaactggtctatcaatgtttacatcaatgatagtagtttttttagttggggggccactcatcaattatttttcttcacatcaaattcatgacccaattagagaagatggacctagtgaacatattgtcaaaaaaataggaactcccacaatgggaggtc

SEQ ID NO: 257497 - DNA, 98 bp, Unknown
  Bacterial polypeptide expressing nucleotide sequence isolated from the Sargasso Sea
aaaaaaaggttggcctgaatccacagttgtagttagattttggatagtagcaataattttagctatgattggattagcaacgctgaaatttagataat

SEQ ID NO: 257498 - DNA, 229 bp, Unknown
  Bacterial polypeptide expressing nucleotide sequence isolated from the Sargasso Sea
atgatttattattttcttgagccactaaaattagcattctcaccccttaatgtttttcaatatattacttttagaagcgctgcggcagctattctggcgctttttattagcttcatcctcggaccggtcataatccgaaaacttcgtcaaaatcaaattggtgaagaaattcgagaacatggcccggagagccatataaaaaagagaggcactccaacaatgggggggt

SEQ ID NO: 257499 - DNA, 832 bp, Unknown
  Bacterial polypeptide expressing nucleotide sequence isolated from the Sargasso Sea
aatgcaggggagtgccctacacagcggccaattggacgcactcctaagcgagctctatcgcgatgagtcttcagagttcatccaagagttgtcgtcgcaattgctgcaatctctgcaaaccagcacaaagcagggagcacaacaaccccgctgggatgccagcaccgccgttctgatcacctacgccaacaccttgcagcgggaaggcgaaagcggcctggcaactctcaaaggcattctcaatcgccacttcagcgctctcgatgcggtggtgcatgtgttgcccttcctcaaggccagcagcgatggcggctttgccgtagccagccacagcgaactagagccaggctttggcgaatgggccgatctcgctgaacttgccgcagggcgaacggtgatggccgatctggtcttgaaccacgtctctgcctcccacccctgggtgctgcaattcctgcagcgcagcgagcctggaagccgctgcatcctggcccccgatccagaagccggctgggccaacgtgatccgcccgcgcagcaccagcctgttcaccaccttggccaccgatgagggaccgaggccggtgtggagcacctttggcccagatcaactggatctcgattggagtgagccgcaggtcttgcagggcttcagcgaactgttggggcggctgagccgtcatggggtgagctggctacgcctcgatgccgttggatttgtttggaaagaggccggcaccacatgcctgcatcgtccagaggcctacacggtggtgcgcatcctgcggcaactgctggagacagtcagtagccgcggcgttgtggtcaccgaa

SEQ ID NO: 257500 - DNA, 777 bp, Unknown
  Bacterial polypeptide expressing nucleotide sequence isolated from the Sargasso Sea
attgtttaaattcatagctcaagaatttgtaaatcaatatagttttttaaacttatttaattttattacttttcgtgtcggagcttcaattttaacatctttatttttctcattaatttttggccaatttataataaataaactatcaagaattcaaccaaaaggacaaccaattaggcaggatggtcctgaaaatcatataattcaaaaagctggaacaccaacaatgggaggagtattaataatattaagtattttaatttcatcagttttatggacagatttgcaaaatagttttgtatggataggtttactgactttaatttcatttggatcaattggaatattagatgattacaaaaagattaaaacaaattctagtaatggtttaagagctattacaagaataatttttcaattaattttatccttaatagtttctttaattatattaaaaattttagatgatcagattgacacatcaatagcatttcctttttttaaaaatttaataataaattttggctatttttatttaattatttctatgtttattcttgttggttctgcaaatgctgttaacttaacagatggtttagatggtttagcaatagtaccaatcatgatagtagctatgacttttgcatttatagcttatgtttcaggaaatattgttttttctgactatttattaattaattacatttcgggaacaggtgaattgtcagtattatgtggtgcaatcataggttcggctcttggctttctttggttaat

SEQ ID NO: 257501 - DNA, 997 bp, Unknown
  Bacterial polypeptide expressing nucleotide sequence isolated from the Sargasso Sea
atgagtttagatcagaaaattactcaatacatttggtatagtaaaagtaaattaagttattttgtaatatttatttttttcccattatcaattatttattatctattgtttttacttaaaaaaattcatagtaatgaaaaatcatttcaaactaaaattgtatgtattggaaattgttctgtaggaggtgatggaaaaacatcaacagtgttgtccctgataaacctatataaatcaagaaatattaaggttgctgttctcttaaaaggatataaggggaaaattaaagtacccacacaagtaaatatcgtaaatcattctgcggtcgatgttggagatgaggccttgctatatgttgagcacgctagaaccttcataagtaacgatagattaaaaggaattaatttcataattactcaattttcacctgatgtaattttaatagatgatgggttacaagactttagaataaaaaaagataaaagtattttagttattaatggagagagaggttttggaaatggatttttacttccggtaggtccattgagacagtcaccatcttccgctatgaaacttgcagacataattatcattgttggggatgacaaaggtaatagtttaaatgcttataaaagtaaatttaaaaataaattattcttaaaggctgaaattacttgtgaaaaaaatcaaatagataaaaattattttgcatttagtggcattggaaacaatcctggcttcattaatactcttgatacaaataattataatctaactaagataagattatttccagatcattattactatacagatactgatattaaaaatataaaaaaatatgctactgataatgatttagaaattattacaaccgaaaaagactggaaaagattaaatacgaaacaaagattaggtattaattttttaagaatatcattagaattttctaatgacgaagctttaagtaaatttctaatgaaaaatgattaaa

SEQ ID NO: 257502 - DNA, 1435 bp, Unknown
  Bacterial polypeptide expressing nucleotide sequence isolated from the Sargasso Sea
gggattcatgtgcaatgttctacgcagcatccaacagaagtgcagcacttagttgccaaaattttaaaaaagccatttaactttgttaacgtagaaacccgccgtatgggcggtgcttttggtggtaaggaaacccaaggcgcaccgtgggcttgccttgcagcgcttgcggtttatcaccttggctgcgccgttaaaatgcgcctagcgcgcagcgacgactttaaacttaccggtaagcgtcacccattttataaccaataccatgtagggtttgacgaaaatggcctaattgaaggcgctgatgtaactgtaaatgggttttgtggttattcgcctgacttatccgatgccattgtagaccgtgcaatgtttcatgccgataacgcgtattactatccagctgccaccattaaagggaatcgctgtaaagttaataccgtaagccacaccgcgtttagaggatttggtggcccgcaaggcatgatcatgggcgagctgataatggacgatatagccgctaaattgggtaaagatccgcttgagatccgaaaacttaatttatacaaaaaaggccgcgacaccacgccgtaccatcaaacagtagagcagcatattttaaaagatatgataacccagctggaagagtcgggtgattactgggcgcgaaaaaaggcgattaaagcctttaacgcatcatcccctattataaaaaaaggccttgcgatgacgccggttaaatacggtatatcgtttaccgtacagcacttaaaccaagcgggtgcactcgtgcatgtatatagcgatggatcaattcatttaaaccatggcggcaccgaaatgggccaaggattaaacactaaaatagcgcaaattgtcgcccatgggtttggcgttgattttgacgcagtaagcataagcgcgacccgtaccgacaaagtaccaaacacctcgccaaccgccgcatcaagcgggactgacttaaacggcatggcggcgctaaacgcggtaaatactataaaagagcgcttaattaactttatcagcgagcactttgaagtagacagccaaagtattgtatttaaagataaccttattacctttagtaaaggcgaaattagctttagcgaacttgcaaaccttgcttacatgaatcgtatatcgctttcatcaaccggttattacgccacccctaaaattcattacgatagagcgaaaggcgaaggtcggccatttttttactacgcgcacggcgtagcactgagtgaagtagaaatcgatacgctaacaggcgaaaacaccgtaacccgcgtggatatactgcacgatgtgggcagttcaataaaccctgcacttgatataggccaaattgaaggggcttttgtgcaaggtatgggctggctcaccaccgaagacttacaatggaagataaagg

SEQ ID NO: 257503 - DNA, 781 bp, Unknown
  Bacterial polypeptide expressing nucleotide sequence isolated from the Sargasso Sea
tatggaaaataaatgggctattatattaggatgttcaacaggacatggagcagcaatcgctaaacagttagcgacagaagggtatggtataatcggttttcatttagatagagggtctataaaaaaagacgccgcccgcctacaagaagaaatagcctctttaaacaataacagagtaaagttttggaatgaaaatgccgctgataaagaggttatgttttcgaaaatggaagaaatcaaaaccatccttgaaaacggaaaagtaaagctacttatgcattccattgcatttggaagtacaactaatttctttaatccaaccccagtaagacaaaggcaaatggacatgacccaacatgtcatggctcattgtttaatatattggacacaagctttattggaaaataatcttctaacatcaggttcaagaatcctaggcttaaccagtgaaggaagctataaagctatggaggggtacggccccgtaggggttgccaaagcttctttggaggctgtagttcgacaaattggatgggagcttggaagccaaggaattacggcaaacactattcaagctggtattacaccaaccagagcattaacaaaaatatcaacagattgggaagattgggttgaaagaacgaaagaaagaaacccgatgaaaagagttactacgcctgaagacgtagcaggattagtttcattattattaaatgataaagcagactttgtgaattgttctactattttttgtgatggtggagagcaccgttccctttag

SEQ ID NO: 257504 - DNA, 256 bp, Unknown
  Bacterial polypeptide expressing nucleotide sequence isolated from the Sargasso Sea
aatgttttataattttttattagaatttgtagagatttttagttttttaaatgtttttaaatacatcacttttagaacaggtttagcagtttttacttctttattaatagtattaataatcggaggaccgtttattaagatggtttctgaaaaaaaaattgtaaatccaattagagatgatggtccaggagatcacataattaaaaagattggaactcctacaatgggaggtttagtaatattaattggtattatt

SEQ ID NO: 257505 - DNA, 198 bp, Unknown
  Bacterial polypeptide expressing nucleotide sequence isolated from the Sargasso Sea
tttcagttattacgcaagtaagttattttaaaatgacaaagaagaaaacaggtattggacaaagaatctttttaatgtctcctatccatcatcattttcaaaagaaaggatttcatgaaagtaaaattgtctctagattttggattataggaattttactggcccttttaacaatactaacactaaaaatcagatgaa

SEQ ID NO: 257506 - DNA, 577 bp, Unknown
  Bacterial polypeptide expressing nucleotide sequence isolated from the Sargasso Sea
atgctttatcaatttctactaaactttgttgacacatttgggtttttgaatgtttttaaatacattacttttagaactgggttatctctatttacatcattagctattgttctaattattggaggaccttttattaagtatttttccagccaaaaaattttgaatcctattcgagatgatgggcctgaagagcatattgtaaaaaaaataggaacaccaacaatgggtggtgtaattattttaataggtttattagtttcagttttttgttggggagacttaacaaatataaatataattttttgcatttatattgctatttcgtttggtgttttaggtgcttttgatgattttaaaaaaattaaacatagcaattcttctggtgtatcatcaaaatttaaaataatttctcagattattttagcaattataggagtttatttttttgtttattatgtggataatcagaacataacaaacttatattttccattctttaaaaacttaattattaatttgggatggttctttataccatttgctgtgtttgttttaattggttcatctaatgcagtta

SEQ ID NO: 257507 - DNA, 580 bp, Unknown
  Bacterial polypeptide expressing nucleotide sequence isolated from the Sargasso Sea
atgctatttagtttattttcatatttaactgaaacatactctttttttaatgttttcaaataccttacagtaaggactggactttccatgtttacgtctatggttatagttttcttaattggaccattaataataaaatttttttcaagcaaaaaaatccataacccaataagatcagatgggccaactgatcatataattaaaaaaataggtactccaacaatgggtggggtaatgattttaattggtattttttctggcactttactttggggggatttaaataattcttataattggtttttaatttttattgttggaagtttaggtattttaggtgcatatgatgattataaaaaaattaaaagtgaaaattcagcaggaatatcatttaaatttaaaataatatcacagattattattgctttaattggtatatttattttaacatattatgtaaattcacctgagaccaaaaatctgtactttcctttttttaaaaatctaataattaatttaggctggttttttatacctttttatatttttataattttgttggatcatctaatgcagtaaa

SEQ ID NO: 257508 - DNA, 649 bp, Unknown
  Bacterial polypeptide expressing nucleotide sequence isolated from the Sargasso Sea
aatgttttattatttatttgaatatttagaaaaaaattatcaactaactggtgcaagtctattccaatatttatcctttagatcagcaatcacatttatacttgctataattatatctacaatttttggaaaaaaaattattcaatttttaaagtcaaaacaaattgatgaaaacataagaaagttagatttacctggcgaaaatgaaaaagaaggaactccaacaatgggtggaattataatcattttgtcaactttaattccaattttcttatttgcagattttaaaaacatttacattttaattttaataattacaacaatttggttaggtgcttttggttttgctgatgattatataaaagtatttaagaaaaataaaaaaggtcttaagggaagaattaaaatatttgctcaagtaatattaggactttttattggtttaacagtatacttccaccctgagataacaacaagagatagtaagctgccttcggaaaataaaattcaaatcaatgtcgaaacaaaaaatgataaaaatttaaaaactacagtacctttttttaaagataatgagcttgattatgttgaggtttttaaaatgaactcaaataattacaattggattttttatgtaaattatagtaac

SEQ ID NO: 257509 - DNA, 727 bp, Unknown
  Bacterial polypeptide expressing nucleotide sequence isolated from the Sargasso Sea
atgattccattaaaggatgataatccaaccagttcaagaccaattgtgagctatggtataattggtttttgtgttcttatttttttagcccaaattggactgagtgagaatgaattaagagacttcacatattcatatggattaatcccatccgttctaatgggcatagaccaattacctagtgatttaaacagaatatcgccaataggtacaatttttacctcaatgtttatgcacggaggctggatgcatctgataggtaatatgttgtatttgtggatttttgcagacaatatagaagatgatttaggaacattaaattttgtaattttttattttgtttgtgggattggagcagccatgtcccaggttttaatagatgtaaattctcaaattccgatgataggtgctagtggagctattggcggagttctaggagcttatttaataaattatcctaatgccagagttttagttttaataccatttggttttttcagccagcttcttaaaataagagctttatatgttctcggattttggttcatattacagtttataaattcttttctttcatcttcatcagtagggggggtcgcctatgccgcacatattggaggttttatctctggagttattttgatattattttttaataaatccacaaaacgtaattttaaaaagacaactaaaaatataaagaaaaaaggaccttgggaacaatgaa

SEQ ID NO: 257510 - DNA, 349 bp, Unknown
  Bacterial polypeptide expressing nucleotide sequence isolated from the Sargasso Sea
atgttatattggttaactcaactttcagatggaggcgactttttcaacctatttcgttatattactttccgggctggaggtgctttttttacagctttattgtttgggtttttatttggaagacctttgattaatgttcttcgaaaaaaacaaggcaaaggccagcctattagagatgatgggccatcatcgcattttgaaaaagccggaacccctactatgggaggtttactgatcttgatctccttactctttgcaacctgtttatgggccaggcttgacaatgtttttatttggattgttattttagttacacttagttttggaatgataggttttgctgacgatt

SEQ ID NO: 257511 - DNA, 568 bp, Unknown
  Bacterial polypeptide expressing nucleotide sequence isolated from the Sargasso Sea
ttgattggaattattgtcgcaggagcaatttcatttatttgtgtaattctttcaacttatattggagttaattattttaaaactcgaaatattggacaaccgatacaaaaagaagtcgtttttcatgatcataaaaaaggaactccaactatggggggagttttcataatttttggtacctactctgggtatatcctttcacatatcaatttttggacgatcggtgcgggttttaaagttgaatttatagatataaatcctgtgattttgatatcactttctttaggaactctgatggcttgcgtaggtttaattgatgatttattaaaagttcgaaagaataggaatttggggctaagagctagaaacaaaatatttttacaaattcttgtcgcatctattacaagtttttatttttactatcttgactactcatcaacattttatttttttagtggatttggtttcgaagtaggttatcttaaatggataatcattacttttttaatagttggaattactaattctgtaaatctaacagatggacttgatgggttagtagctggat

SEQ ID NO: 257512 - DNA, 265 bp, Unknown
  Bacterial polypeptide expressing nucleotide sequence isolated from the Sargasso Sea
atgtttgaatatttaggaacggttcttacggcagttgacccaggttttgatgttttaagatacttaacagttaggaccattgggggcactttgactgcactagtaatttcgattttattaggccctgcaattataaattttttaaaatcaatgcaatttgagcaatttgtaagagaagatggtccaaaatctcattataaaaaaacaggaacaccaacaatgggaggccttttaatattgtcatctttgactatttcaactctat

SEQ ID NO: 257513 - DNA, 538 bp, Unknown
  Bacterial polypeptide expressing nucleotide sequence isolated from the Sargasso Sea
aatgttactacctttatttgaatacttatctgaattttttggaccttttcgagttgtagaatttctttctacaagagcaattctagccacattaacttctctcttattttctctggtattaggacctaaattcattaataagatgaaagatatacaggttagacaagttataagagaggaaggccctgatagtcatctatcaaaacagggcacacctacaatgggtggtactttgatcctaagttctatatttttaagtgtagtcttatggggagacctagaaaaccgatatttatgggttgcctttttaacggctatatcttttggaattctaggatggattgacgatcgctcaaaaataaaacatcaatccagtgacggcttgtcgcctttaaataaaattttttggcagtctgttataactattttggcatgttcttatctttatattactcaagaaaatatttctgaaaccagtttgatagttccattctttaaagatatttctatacctttaggtactggttttattgttttg

SEQ ID NO: 257514 - DNA, 268 bp, Unknown
  Bacterial polypeptide expressing nucleotide sequence isolated from the Sargasso Sea
tatgatattatatattttagaatacttaaatatcccaggcttatataatttcttcaattatctgactgtaagaactggcttcgctctttttacttctttcttcttcatattgttatttggccctgcattaattcttaagataagttcttatcagtctatcggacagcctattagggatgacggcccagagtctcatataatagctaaaaagggaacgcctaccatgggtggaatcatcatattgctttccattgttggatctatttta

SEQ ID NO: 257515 - DNA, 895 bp, Unknown
  Bacterial polypeptide expressing nucleotide sequence isolated from the Sargasso Sea
tatggacttactaatttttcaggcgccaatattaatggtgcaagcatccttggatggaattcttttaggaattctatttgcattgattgcttatggaatggcactccaatggggtgttatgaatataattaatattgctcagggagaacttgtgattatgggtgggtatgttgcctattttatgtatatgatgggaattcatccaggttttggaataatcatttctccaataattatgtattttgttggatggggtttatacaagttagtaattaataaagttgtcgacagagatttatttatttcaattctagcaacatttggaattagtattttaactcaacaactaatgaattttatttttggttcagatgtggttgtggctcaatcaaattttggaacaacaatgttttttgatggaatggtaactcttcctaatgcaaaaatatttgctgcagttgttagcgttatttttgcaattggattagtgatgtatatgcgtaaatcaaaattaggtagagcgataagagcaaccgctcaaaatgcgagagcagcaaaaattttgggtgtagatacagaaaaagtttacgcagcaacttttggaataaatgcagcactttgtggtgttgcaggttcattaattgcaataacttttaccttacacccttatgttggtctcccatacacagtcagatctttcatgatagttattgttgcagggcttggtaatttaccaggtgttgctttatctggtatgggactaggagtttttgaagaatttgctgattatatactaggaacagaatttagaattggctcagtatttttacttttagttttaattcttgtttataggagatttaaattatctaaaaaaagagagtatttaaaatga

SEQ ID NO: 257516 - DNA, 747 bp, Unknown
  Bacterial polypeptide expressing nucleotide sequence isolated from the Sargasso Sea
aatgctttatcaatttttattaaattttgtagatacatttaattttttgaatgtttttaaatatttaacctttagaaccggtttatctttttttacttcttttgttatagttttgtttatcggaggccctttcattaaatttttttcaagtcagaaaattttaaatcctatccgtgatgatggaccagaggatcatatagtaaaaaaaattggcacaccaacaatgggtggagtaatcatattatttggtttattagtatcagtattattttgggcagacttatcaaatattaatattttattctgtatatatatagcaatttcttttgggttacttggagcctttgacgattataaaaaaataaaatttagtaactcatcgggtatttcatcaaagtttaaaataatttcacaattaatattagcaataattggtgtaagtctttttgtttatttaaatgattatcaagatttaaataatttatattttccattttttaaaaatttgattgtaaatcttggatggttttttataccatttgcaatatttgtaattataggctcatctaatgccgttaatttaacagatggattagatggtttagcaactgtacctgttatattggttgcggcttgctttgcttttataagttatgtaacaggaaatattgtattctcaaattatttgcagatcccttatattgagggaacaggggaaatttccattttttgtggagcaattattgg

SEQ ID NO: 257517 - DNA, 760 bp, Unknown
  Bacterial polypeptide expressing nucleotide sequence isolated from the Sargasso Sea
atgttttattggttaactcaactttcagatggaggcgactttttcaacttgttccgttacattactttccgagctggaggcgctttttttacagccttactttttggatttttatttggaagacctttgattaatgttcttcgaaagaaacaaggcaaaggccaacctattagagatgatggcccggcaacacattttgagaaagctggaactcccaccatgggaggtttgctaatcttaatttccttgctctttgcaacctgtttatgggctaggctcgacaacgtttttatttggattgttgttttagttacgcttagttttggattgattggttttgctgatgattactccaaagtagccaaacaaaatacaaaaggcgttcctggccgaatacgcttgcttttaggttttattatatcagccattgcagcctattttgctgctactaatcatccagaagctttacaatataaactagcgttaccagtttttaaggatactttaatgcatcttggagtgttattcattccattctccatgattgttattgttggtgctgcaaatgcagtaaatttaactgatggtttagatggtctagcaataatgcctgttatgatagccgcattagcattaggtgtgattgcttacgccgtaggtcgcgtggactttaccaattatttagatgtgcattatgtacctggtacaggagaattattgatattttgttctgctctttttggcggtggtttgggtttcc

SEQ ID NO: 257518 - DNA, 331 bp, Unknown
  Bacterial polypeptide expressing nucleotide sequence isolated from the Sargasso Sea
agatatcccgcaaaaatatttatgggtgacacaggatctcttagtattggcgcgattctgggttctatagcgttattaaccgatagcatttttaccttatctattttctcaggaatatttattattgaatcattatcagtaatgattcaggtagggttttttaaaattacaaaaaaattatttcacagaggcaaacgcatattcttaatggctccactgcaccaccattttgaacttcaaggagttaaagaacaaaaaatagttgaaaatttttggaaaatcaacactttacttgtaattttaggtatagttttaaaaatcaatctttaaa

SEQ ID NO: 257519 - DNA, 544 bp, Unknown
  Bacterial polypeptide expressing nucleotide sequence isolated from the Sargasso Sea
aatgctatatcattttctatttcccctagctgatgaatacaccatttttaatttgtttaaatatctgacatttcgaactggaggtgccgttttaacggcgttagttatcagttttgtaattggccccagtatgatccaatggctcaaaggacagcaagctagtggtcaaccaatccgaaatgatggacctgaaacacatctggcgaagcgcggaaccccgactatgggtggattaatgatcctagtcgctctcattatttctacgcttctttgggctgatattaataacccttatatttggcttgtgctcggagtaactgcgagttttggtttgatagggtttgttgatgattttcttaagctaaagaccgccagctctaatggtatgtcatccagactcaaaatagtgctccaaatcattgtcgcggcaatagtcgctttcctaatttcttcacttgggccaccagaaacaaaggaaagtctgagtgtcccatttttcaaagatatttttattgaattaggttggttttttttaccttttagt

SEQ ID NO: 257520 - DNA, 565 bp, Unknown
  Bacterial polypeptide expressing nucleotide sequence isolated from the Sargasso Sea
atgctttttagtctattttctaacttaattgagatctttagttttctaaacgtttttaaatatttgactgtaagaactggtctatcaatgtttacatcaatgatagtagtttttttagttggggggccactcatcaattatttttcttcacatcaaattcatgacccaattagagaagatggacctagtgaacatattgtcaaaaaaataggaactcccacaatgggaggtctaatgattttactgggtattttctcaggtgttctattatggggtgatttttcaaacccctacaattggttcttactttatatagcaggatcttttggattacttggaggctatgatgactatcaaaaaataaaaaaaaataattcaaatggcataagttctaaattaaagattataatacaaataatattagctttaggaggaattttaattctctatttttatagtggatctaatgaacttgaaaatttgtattttccattttttaaaaatttaattattaatttaggttggttttttattccattttatctatttggttatggagggtcat

SEQ ID NO: 257521 - DNA, 491 bp, Unknown
  Bacterial polypeptide expressing nucleotide sequence isolated from the Sargasso Sea
tagttatacatttttaaatgtttttaaatatttaactgttagaactggtttagctgtgtttacctccttgctagttgtatttttgattggaaatccttttattaattttttttcgataaaacaaattttagatcccatcagagaggatggcccggatcaacatattattaaaaaaataggaactccaactatgggtggtgtacttatccttattggattattttcgggtatactactttggggagatctaacaaatatttatatatggtttcttatctatatagttggtggctatggacttctaggtgcttttgatgattacaaaaaagttaaatataaaaattcatcaggtatatctttaaggtttaaattattatctcaaatacttatagctttagtcggagttctattcttaacttatttttcagaaaaccaagatttaaaaaatttatatttcccattttttaaaaatttaattttaaatttaggtt

SEQ ID NO: 257522 - DNA, 508 bp, Unknown
  Bacterial polypeptide expressing nucleotide sequence isolated from the Sargasso Sea
aatgctttataattttttattagaatatgttgagatttttagttttctaaatgtttttagatatattacctctagaactggtttagcagtttttacatcattaattattgttttaatgattgggggaccgtttatacaaatggtttccaagaaaaaaattgttgatccaattagagatgatggccctggtgaccacataatcaaaaaaattggaacaccaacaatgggaggtttagttatactaattggaattattttgtctgtccttatgtggtcagatctcagtaatatttatattctattttcgctttatattttaatttcttttggattattaggtgctttagatgattacaaaaaaattaaaaataatgactcatctggtgtctcgtttaggtttaaattattttcacaagttattttatctattattggagttagttttttaacatattatttagaatatcaagaacttacaaacctatattttcctttttttaaagatcta

SEQ ID NO: 257523 - DNA, 488 bp, Unknown
  Bacterial polypeptide expressing nucleotide sequence isolated from the Sargasso Sea
aatgttgtattggcttacggctctgtcagatggaggagatttctttaatcttttccgttatattacctttcgagctgggggagccttttttacggctctaatctttggttttgtttttggcaggccattaattaatgtgctacggcgtagacaggggaagggacaacctattcgtgacgatggtcctgaagcgcatgtggcaaagtcagggactcctactatgggaggcttacttgttttatcggcattagttttttcaacagttatgtgggccaggcttgataataattatgtaattatagtcctttttgtaacaatttgttttggtgggatagggtttatcgatgactatcttaaggtaagtcgtcagaatccaaagggtgtatcaagtaaaatacgtttgttatctggtttcttgatagccgccgtggcagcatattttattgctactaatcatccagacgcattgcaaaatcggttggccctcc

SEQ ID NO: 257524 - DNA, 649 bp, Unknown
  Bacterial polypeptide expressing nucleotide sequence isolated from the Sargasso Sea
atgctttttagtttactgacttcttttattgaacaatattcctttttaaacgtgttcaaatatttaacatttagaacaggtttggctttaatgacctctttattaattgttttcttaattggtggcccattgataagaattttctcacgtaaagatataactggcccaataagacaagatggtccgatagaccacatagttaaaaagtcaggaactccaactatgggaggaataattataattataggaatgttagcaagcactttgttttgggcagatttatcgaatatttacatttggactttaatatttatttccctatctttaggtcttttaggttttctagatgatctactcaaaataaaacataaaaattcgattggattgaattcaaagcttaaatttatgggtcaactcattataggatttattacattgttaataataattattttctcagatcacgagtttatcaacaatttgtattttccatttttcaaaaatttaattattgatctaggtctgttttttattccatttggattattcgtgattataggttcatcaaatgcggtaaatttaacagacggtttagatggattagctacggttccaatcatgttggttgcgttgtctttcactttaataa

SEQ ID NO: 257525 - DNA, 511 bp, Unknown
  Bacterial polypeptide expressing nucleotide sequence isolated from the Sargasso Sea
atgctttatagtcttctcgcatctcttgtagataccttttcttttttaaatgtctttaaatacatcacatttaggattgggttatcagttgttacatcattaataataattttcatgattggcaatcctttaataagttatttttccaaaaaacaaattaccgggccaataagacaggatggtccaattgaccacataattaaaaaaagtggtactccaactatgggggggttaatgatattaattggtataatagtaagtacactgttatgggctgatctaaaaaatatttatatttggatagttctttttgtttgtactagcttaggcctcctagggttcatagacgactatcttaaaattaaatttaagaattcgtctggaataaatgcaaaattaaagtttttctggcaatttattatatctttgattgcagttatttcattagtatactttacagatcacgaaacaatttctaatctttattttcctttttttaaaaaatattatt

SEQ ID NO: 257526 - DNA, 298 bp, Unknown
  Bacterial polypeptide expressing nucleotide sequence isolated from the Sargasso Sea
aatgttatatagtttattttctagtttagtagaaatttttagtttttttaatgtatttaagtatttaacagtacgaactggtttgtctatgttcacttctatgattgtggtttttctagttggaaatcccctgattgattacttttcatcaaaaaaaatgcatgaccccattcgagaagatggacctagtgagcatattattaaaaaaattggcacacctaccatgggtggattaatgatattattaggtgttttttcagggggtgttattgtggggagatctatcaaatccatataa

SEQ ID NO: 257527 - DNA, 769 bp, Unknown
  Bacterial polypeptide expressing nucleotide sequence isolated from the Sargasso Sea
aatgttaaatgaattattattaccactaagagaatattttggtttcttaaatctttttgaatacatcacttttagagctggtgcaagtgcgattcttgctctattaattagctttatatttggacctttcgttgtaaaaaaattaatatatcttcagataggtgaatccataagagatcatggtccagattcccataaagaaaaacagggtactcctactatgggaggagtattgattattctttctacaattatccctaccgtcctactagctgatttaaataatttattcattcaaataatatgtatttcaatggtgtggatggggctagttggtttttatgatgattatttgaaagttgttaagaaaagaaaagacggtttgagcggaagatataaattgctagctcaaactattctcggagtattcatttcatatataattataagttcaaatgtttatggggactatactcttttaacttttgttcctttcttaaaaaatgtttctattaacttcttttatcctattatttatgccgtctttattattttagttgtttcagctacatcaaatgcagtaaatcttactgatggtctcgatgggctagctgctggactattagctatttctgtaagtgtatttggtgttattgcatatatttctggaagagttgattttaccgactacctatatattgaatatttaccattagctagtgaactaacaatatttgccactgcgttttttggtggttgtcttggtttc

SEQ ID NO: 257528 - DNA, 802 bp, Unknown
  Bacterial polypeptide expressing nucleotide sequence isolated from the Sargasso Sea
attgtttttatatttagctgaaaatttcactaattatttttctgccttaaatatatttaattatattacttttagaactggagcagcaattttaacatctttatttttctctctaatatttggtcaaatgatcataaattatctatcttctcttcaaccaattggccagcctataagaattgatggtccagaggatcatatatttaaaaaatctggcacgcctacaatgggtggagtcttaattattttgagcatcactgtatcttttcttttatgggcaaatttaaataatacttttgtttggattagttttttgggatgtatcttatttggagcaataggcttttttgatgattacaagaaaattaatttaaataatagtaaagggcttaaagcatcaactagaattttttttcaaatatcttttggtttattaattgtatggttaatatatatccaatttccagaaaatataaatagtacaataaattttcctttttttaaaaaattaattattgattttggaatatttttttttgtatttggtatttttataatagttggttcagcaaacgcagttaaccttacagatggattagatggtcttgcaattgtgcctgtaatgatagttgctctttcttttgctttcatcgcatatgtttcaggcaatatttttttttcaaattatttacaaattacatatattgaaaatagtggtgaactagcagtcttctgcggatctatagtaggtgctgcattgggatttctctggtttaacgcaccccctgcaaaggtttttatg

SEQ ID NO: 257529 - DNA, 514 bp, Unknown
  Bacterial polypeptide expressing nucleotide sequence isolated from the Sargasso Sea
gatgcttttgtggttgacagattatttatcggattttgttagagcattttcggttttccaatacttaactctacgttcgatggtgagcgcgatgacagcgctgcttttgtctctgattattgggcctatatttatagaaaaattgtctcgtcagcagatcggtcaaagggtgcgtttggatggtcctgagtctcatcttgccaaagatgggactcctactatgggaggtggtctgattatagtagtgattacaatagcaaccttattttggggggatttgagtaatcgatacatatggttagtcttgtccgtcacatgtgcctttggtttgattggttggttggatgattatctaaagattcgcagacaaaacagcgatggcctctcggcgagatggaaaatattttggcaaacaattgttgcggtattcgcttcatcttatttatacactactgccgatatgcccattcaaaccgatttaatagtaccgttttttaaggaagtagctttgcct

SEQ ID NO: 257530 - DNA, 880 bp, Unknown
  Bacterial polypeptide expressing nucleotide sequence isolated from the Sargasso Sea
ccgggctatttcatatctatcatttagagcctctgtatcagttatactttcattaggaatttccattatctatggtaaaaaaattatacaatatctaagaaaaaatcaaataggtgagaatattagaagccttggtttaaagggagaagataagaaaaaaggcacaccaactatgggaggactaattataattataagcactttaatcccagtaatattgatgtcacgtctagataacatatatatacaaattttaatttttactactatatggatgtgtataattggtttagtggatgactacatcaaagtttttagaaaaaataaaaagggattaaaagcaaaatttaagttgtttggacaatatattctaggtataatagtcgggctaattatactttttcatccagagataactattagtgaaagtattaatgagaatatccagattgaagtaagtcaggagagtgaggttttagaagaagtaaaatcattcaaaactactgttcccttttttaaagataatgaactcgactatcaggaaatatctaatttaatatttaatggaaatactggtctaatatggataatttttattcctatcattatattaataatatcttctgtctcaaactctaataatcttacagatggtttagatggactttccgctggattatccgctataattgtatttacacttgggatttttgcatggacatctggaaatatagttttttcagattatttaaatattatgtatatcccaagagttggagaaattacaatatttatttctgcattatttggtgctttagtaggcttcctttggtataatacctacccagcttcatttttatgggtgatactggaagtttaa

SEQ ID NO: 257531 - DNA, 705 bp, Unknown
  Bacterial polypeptide expressing nucleotide sequence isolated from the Sargasso Sea
aatgttatatcaatttttattaaattttgtagatatttttggtttcttgaatgtttttaaatacttaacatttagaactggtttatcagtttttacatctttattaatagttttaataattggaggcccatttataaagtttttttctaatcaaaaaattttaaatcctattcgtgatgatggaccagaagatcatattgtaaaaaaaattggcactcccacaatgggtggagtaattattttactcggcttattaatatcagtattattttggggagatttatcaaatattaatattttattttgtttatatattgctatttcttttggtttgcttggagcatttgatgattacaaaaaaattaagcaaagtaattcctctggaatttcttcaaaacttaaaatagtaatacaaataatattagcaatcataggaataagtttatttgtctattttacggattatcaggatgtagctaatttatattttcctttttttaaaaatttaataattaatcttgggtggttttttattccttttgcagtatttgtaattgttggttcttctaacgcagtaaatcttacagatggcttagatggtttagctacagtcccagtaatattggttgctgtatgttttgcttttataagttacgtgactggaaatgtattattctcagactatttacaaataccctatattga

SEQ ID NO: 257532 - DNA, 502 bp, Unknown
  Bacterial polypeptide expressing nucleotide sequence isolated from the Sargasso Sea
atgtttgaatatttaggctcggcgctagtttcaattgatcctggattcgatgttctaagatatttaacagttagaactattggtggaaccgtaaccgctcttcttatttctatcttcttaggccctattattattaattttttaaaatccatgcaatttgaacaatacgtcagagatgatggacccaaatctcatttaaaaaaaacaggaactccaacaatgggcggattgataattctttcttcactaataatctcaactcttctatgggctgatctaggaaatagatatatctgggtggttctttttgtcacagtcggattttcaattattgggttctttgatgattatttaaaaataaaattcaaaaacccaaaaggactttcatctatacaaaaaatattgtttcagtcatttatagcatttttagcagttacctatctatattattctgctgaaatagctcccgaaacttcttttatagttccattttttaaggatg

SEQ ID NO: 257533 - DNA, 88 bp, Unknown
  Bacterial polypeptide expressing nucleotide sequence isolated from the Sargasso Sea
ttggccagagtcgactgttgtaatcagattttggattatttctattattttagcaatggtaggcttagctacacttaaattaagataa

SEQ ID NO: 257534 - DNA, 491 bp, Unknown
  Bacterial polypeptide expressing nucleotide sequence isolated from the Sargasso Sea
aatgctctatagtttgttctctagtttagttgatttttttagtttttttaatgtttttaaatacttaactgtaagaacaggattatcaatgtttacttcaatgattgttgtttttattgttgggagtcctcttattaaatatttttcatctaaacaaattcatgatcctataagagaagatggaccaagtgagcatattataaaaaaaataggcactcctacaatgggtggcttgatgatattattaggagttttctcaggggtattattatggggtgatttaaccaatccttacaattggtttttgatctatatagctgcaacatttggattattaggtgcttatgacgattataaaaaaatcaaaaaaaataattctaatggtgtatcttcaaagtttaaaatattaattcaaattttattagcttcaataggaatatttatattatactttttcagcgactctaatgaactaaaaaatttatatttcc

SEQ ID NO: 257535 - DNA, 772 bp, Unknown
  Bacterial polypeptide expressing nucleotide sequence isolated from the Sargasso Sea
aaattttgtagatacttttagttttttaaatgtttttaaatatttaacttttagaacaggtttatcttttttcacctcattggttattgtactaattattggaggtccttttattaaatttttttcacaacaaaaaattttaaatccaatcagggacgatggacctgaagatcatatagttaaaaaaattggtacaccaacaatgggaggtttaataattttatttggcttactggtgtcagtaatattttgggcagatttatcaaatattaatattttattttgtatctacatagcaattacttttggtttattgggagcatatgatgactttaagaagattaaatatagcaactcatcaggaatttcttcaaagtttaaaataatttcacaaataattatagcaattattggtgtaagtttttttgtttactttaatgattatcaagatttaaataatttatactttccattctttaaaaatttaatcataaacctcggatggttttttataccatttgcaatattcgtaattattggttcgtctaatgctgttaaccttacggatggattagatggtctagcaacagtgcctgtaatattagttgcggcatgttttgcttttataagttatgttactggaaacatcgtattttctaattatttacaaattccctacatagaaggaactggtgaagtatcaattttttgtggggcaattattggctcttgtttaggatttttatggtttaatgctccacctgctaaaatt

SEQ ID NO: 257536 - DNA, 535 bp, Unknown
  Bacterial polypeptide expressing nucleotide sequence isolated from the Sargasso Sea
catgctctataaaatttttctatctttctcaacttctataagcggtctaagcgttgcaaagtatattacctttagagcacttatgtctttgcttacggctttgctgatatcgtttgttttttctccttggtttataaaaaaactaaaaaacaaacaactaggacaaacaattcgtgaagatggaccccaaacccatctttcaaaaaaagggaccccaactatgggaggagggttaattatttttgcagttctaacctcttctttactttgggtgaattataacaaccctttactgtggctagttttatttgtagtaactgcttacactcttttaggactcagtgatgactatttaaaaataatgaaaaaaaattcagatggagtatctggccgcaaaaagctactctggcaaacgactataagcataattgcttgtagctacgcatacttttatatcaaaggaaccactattgttacctttccttttctaaaagacttcagtgttgatttaggtatctggtatatattaatttgc

SEQ ID NO: 257537 - DNA, 697 bp, Unknown
  Bacterial polypeptide expressing nucleotide sequence isolated from the Sargasso Sea
aatgctttatagttttctgacatctttagtagaccaattttcttttttaaatgtttttaaatacataactttcagaactggtttagctttaatgacatcgctagttacagtttttcttattggtggtcctttaattaaaattttttcaacaatgcatattacaggtccgattaggcaagatggacctattgatcatattataaaaaaatcaggtactcctacgatggggggaataattattataattggtatgctattaagtacaattttatgggctaatcttagtaatctttttatttggagtctaatttttatatcttttagtttgggacttcttggtttcattgatgatttattaaaaatcaaatataagaactcaataggccttaattctaaactaaagttttttggtcaattaataattggtttaacagctctaatatttttaatttattttactgatcatgaatatattaatttaatttattttcccttttttaaaaatttagtaatagatttaggattattttatttaatttttggcctttttgtaatcactgggtcatcaaacgcagtaaatttaactgatggtttagatggattagcaactgtaccaataatgctagtggctctttcttatactttaataagttatatcgtcggtaatgccattttctcagagtacttaacaaataca

SEQ ID NO: 257538 - DNA, 151 bp, Unknown
  Bacterial polypeptide expressing nucleotide sequence isolated from the Sargasso Sea
cttgataccttatattaaagattcaggtgaaattacaatttttatcggagcgctggtaggttctggtttaggttttttatggtttaattcctaccctgcacaagtatttatgggagatgttggagcattatccctaggagcagctcttcca

SEQ ID NO: 257539 - DNA, 355 bp, Unknown
  Bacterial polypeptide expressing nucleotide sequence isolated from the Sargasso Sea
atgttatacgaacttttattgcccctcaaaacctattattctccattaaatttatttcagtacataacttttcgttcagcttcagctgcaatcttagccttatttataagcttcctcatcgggccatggattatccacaaactgcgttttcaccaaataggtgaagaaatacgctcatccggacccgaatcgcacctcgtgaagaagggcacgccaactatggggggggtcattattctaggatctgtgatcctcccaacccttctatttgctgatttatcaaatacatttattcaaataattctactatcaaaaatatggatgggagttatagggtttttagacgactatcaaa

SEQ ID NO: 257540 - DNA, 739 bp, Unknown
  Bacterial polypeptide expressing nucleotide sequence isolated from the Sargasso Sea
gaaaagaacattaaatctatacagattgtttcgaatgaggttttttcagaagaaaaaaaatctacaatcaccactattccaatggtaaggggtaatgaatttgattatgtcagtttaataagctggatctctcctgaacttgaaaaatatggttggataatttttattgcagttgttgtttttattataactgctgtttcaaatggttcgaacttaactgatggtatagatggtttagctgcaggtacatcagttattatagttatggccttagggatttttacttgggtttcaggaaacttaattttctcagattatttaaacattatgtatatcccaagagtaggtgaggttactgtttttatagctgcttttataggatctttgattggatttttatggtataacacttttcctgcaagtgtttttatgggagatactggaagcctaactattggagcaattatttctgttttgtgttttattaccagaaaagaattattaatacctattctttgtggagtattttttattgagactttatcagtgcttattcaagttggttacttcaagtactcaaagaaaaaatcaggagttgggaaaaggatctttagaatgtctcctcttcatcatcattatcaaaaaatgggttttcatgaaagcaagatagctacaaggttttggattataacagttcttttggcagtaatttcaattgtaacgcttaagataagataat

SEQ ID NO: 257541 - DNA, 556 bp, Unknown
  Bacterial polypeptide expressing nucleotide sequence isolated from the Sargasso Sea
atgctctttagtcttttttcaaacttagttgatatcttcagtttttttaatgtctttaagtatttaactgttagaaccggtttatcaacatttacatcaatgctagtagtttttattgttggaaatccattaataaattatttttcatcaagacaattacataacccaattagagaagatggtccctcagaacatatcgtaaaaaaaataggaactccaacaatgggaggactaatgatactgctcggagttttttctggagtattattatggggagatctttcaaatccttacaattggttcttaatttatattgcaggttcttttggattattgggagcttacgacgactataaaaaaattaaaaaaaatcattcttcgggattatcttctaaattaaaattttttattcaattaattttagcattaattggtatatttattatttatttttttaccgattctaatgaaataaaaaatctttattttccgttctttaaaaatttagtaataaatataggatggttctttattcctttttacttatttattatag

SEQ ID NO: 257542 - DNA, 221 bp, Unknown
  Bacterial polypeptide expressing nucleotide sequence isolated from the Sargasso Sea
tgctctcttcgtcatcgaaacggtctcggttatgtgcagggtcagtgtgtttaagatcactggcggaaaacgtgtctttaaaatggccccgttgcaccaccactttgagctgaaggggtgggctgaggtgacggtggtcatcaggttctggattatttgcggccttgctgtttcggctggcctaggaatcttctacgcagaatgggtggcagggcaatgac

SEQ ID NO: 257543 - DNA, 358 bp, Unknown
  Bacterial polypeptide expressing nucleotide sequence isolated from the Sargasso Sea
aatgctttttagtttattttctaatctagttgaaatttttagttttctaaatgtttttaaatatttaactgtaagaactggtctatcaatgtttacatcgatgatagtagtctttttagttggaggcccacttattaattacttttcttctcatcaaattcatgacccaatcagagaagatggacctagtgagcatatagttaaaaaaataggaactcctaccatgggaggtctaatgattttattaggaattttctcaggtgtagttctgtggggtgatttttcgaatccttacaattggttcttgctttacataacaggctcttttggattacttggaacttatgatgattatcaa

SEQ ID NO: 257544 - DNA, 890 bp, Unknown
  Bacterial polypeptide expressing nucleotide sequence isolated from the Sargasso Sea
attggggaagattaaaaagtttaactttgaatctttatttatattaaatacttttgctttaatagttacatcctatttttttaataattatatttttataggagtttatatattattcttctttatttctatttttacaacgaaaaatggtctaaagattatcaaaaaatttaatttacttcagaatattagggatgaaggcccagctaatcactttaaaaaaagtgatactccaacaatgggcgggatttttatgataatcccttttttaattttgcttttaataataactataaatttaggttctctaaaaataattcttttattacttactatttttggtttctttattactggatttttagatgattatttaagcattaaaaaaaaagagaacacaggtttgaaaacaaaagaaaaattaatcttacaaagtgtcatctcaataatttttatattgttagcctacgaaaaaaatttaatcagtccattaataacaatttctgactcctggggaataaatatgaatattttcatattgccagtttcttttttagtacttgtcggcataagtaattcagtaaatttgactgatggactagatggattagcagctgggtgcagtgggattgtcttttatggattaggaacagaaatattactgaaagaacagcaagaacttattgtttttagcattttatgtttttcgatgtcaggcatatgcttaggttttctcaagtacaatagttatcctgcaaaaatatttatgggtgacaccggatctctaagtataggagcaattctgggttctatagcgttgttaaccaatagcatttttaccttatctattttctcaggaatatttattattgaatcgttatcagtaatga

SEQ ID NO: 257545 - DNA, 283 bp, Unknown
  Bacterial polypeptide expressing nucleotide sequence isolated from the Sargasso Sea
actggatcgttgtcattaggaggtgcgctcggggcgataagcgtaataacaaagcatgaattagtactagccataataggtggattattcgtgttggagaccgcatcggtaatagtgcaagtgctctcttttaagttaactgggaaaagaattttccggatggccccattacatcatcattttgaaaagaagggttgggcggagccaacggttgttattcgcttttggataattgctgttgttttagcccttataggcctttccacattgaagttgaggtaga

SEQ ID NO: 257546 - DNA, 535 bp, Unknown
  Bacterial polypeptide expressing nucleotide sequence isolated from the Sargasso Sea
tttgattaaatattttgcctttgaataccaatctttatttagttttctaaatatttttagttatataacatttagaactggcgcctctattcttactggattatttttttctctcatatttggaaattacattattaataaattatcaaatattcaaccaattggtcagccaattagagatgacggtccggagtcacatataattgcaaaaaaaggaacacctactatgggaggattattgattattctaagtgtttttatttccacctttatatgggctgatttacaaaatatttttatatggattttacttttaactattttaatttttggatctattggttttgcagatgattataaaaaaataaaatcaagtacaagtgagggtatttcatcaaaaataagaattatatttcaaattattttttcgtttttcattacatacttaatcattatcaatttagatccaagtataagcaaatctatgacatttcctttctttaaaaatttaattatagattttggaatattttat

SEQ ID NO: 257547 - DNA, 670 bp, Unknown
  Bacterial polypeptide expressing nucleotide sequence isolated from the Sargasso Sea
ttgtttaaaataatagcccaacattatgtcgaacaatatagttttttaaacttatttaattttattacttttagagttggtgcttcaattttaaccgcactgtttttttctttaatatttggacaatacataattaataaaatttcaaacattcaaccaatcggtcagcctatcagaaatgatggtcctgaaaatcatataattcaaaaggcaggcacccctacaatgggaggacttcttattattttaagtgttgtgatttctttagtcttgtggtctgatttacaaaacacttttgtatggattggttttttaaccttatttgtttttggttttataggttttgttgatgattataataagattaagtcaaactcaagtaatggactaaaagcaagaacaagaatagttttacaaatattttttgctttaatgatatcaattttagttattaataatcttaatgatcaaattaatacgacaatatctttccctttttttaaaaatctaattgtaaattttggatatttttatttcattatttcattatttatcattgttggttcagctaatgctgtaaatttaacagatggacttgatggtcttgcaatagtgccagtaatgagagttgcaatgactttcgcttttatagcttacgtttcaggaaata

SEQ ID NO: 257548 - DNA, 652 bp, Unknown
  Bacterial polypeptide expressing nucleotide sequence isolated from the Sargasso Sea
atgctttatcaatttttacttaattttgttgatacctttagttttttgaatgtatttaaatacctgacatttaggactggtttatctttttttacctcattggttattgttttaattataggagggtcttttataaaatttttttcaaaacaaaagattttaaatcctatccgtgatgatggtccagaagatcatatagttaaaaaaattggaactccgacaatgggcggagtaattattttgttcggtttgctgatatcagtaatattttgggctgatttatcgaacttaaatgttttattttgtttgtatatcgcaatctcttttggtctacttggagcattcgatgattataaaaaaataaaatacagtaactcctcaggtatctcattaaagataaaattaacctttcaaataatactagcaataattggtgtaagtttttatgtttactttaatgattatcaagatttaacaaatctatactttcctttttttaaaaatcttatcattaatcttggatggttttttatacctttttcaatatttgtaattattggttcatcgaatgctgtaaatctcactgatggattagatgggttagcgacagtgcctgtgatacttgttgcagcttgttttgcatttataagtt

SEQ ID NO: 257549 - DNA, 718 bp, Unknown
  Bacterial polypeptide expressing nucleotide sequence isolated from the Sargasso Sea
atgctttaccaatttttattaaattttgtagatacatttggatttttaaatgtttttaagtatttaacatttcgaactggcttgtcagtttttacatctttgttaatagttttaataattggaggtccatttataaaatttttttctaatcaaaaaatttataacccaatccgtgatgatggaccagaagatcatattataaaaaaaattggtactccaacaatggggggagtaattattttattaggattacttgtatcagttttatgttgggcagatttatctaacattaatattttattttgtatatatattgcaatctcttttggattattaggtgcctatgatgattacaaaaagattaaatttacaaactcttcaggtatctcatcgaaattaaaaattgttttacaaataatattagcaattataggagtcattttttatctacaatttgtggactatcaagatgtaacgaatttatattttccattttttaaagatttaatcataaaccttggatggttctttattcctttttcagtatttgtaattattggatcatcaaatgctgttaatcttactgatggtttagatggtctagccacagtaccagtaatactagttgcagcttgttttgcttttattagttacgtaactggtaatatagtattttcagactatttaaatattccttatattgaaggaaccaggtgaa

SEQ ID NO: 257550 - DNA, 368 bp, Unknown
  Bacterial polypeptide expressing nucleotide sequence isolated from the Sargasso Sea
aatgctatttagttttttttcaaatttagtagagatttttagtttttttaatgtttttaagtaccttactgtaagaacgggcttatcaatgtttacttctatgattgtagtttttattgttggaaatcctctaataaagtatttttcttcaaagcaaatacataatcccataagagatgatggacccaccgaacatattgtaaaaaaaataggaactccaacaatgggagggcttatgattttaatgggagttttttctggcgtcttattatggggtgatctttcaaatccatataattggtttctaatttatatagctggctcttttggtttactgggagcatatgatgattataaaaaaatcaaga

SEQ ID NO: 257551 - DNA, 880 bp, Unknown
  Bacterial polypeptide expressing nucleotide sequence isolated from the Sargasso Sea
ttgattggaatcattgtatctggtggaataagttttcttgtagttattttttcaacattaattggtgtcaattttttcagatctagaaatataggacaagaaattcaagaagaggtaaattttcacgatcataaaaaaggaactccaacaatgggtggattatttatcgttttcggaactattgctggctactcactttctcatataaatttctggactatcggagaagggttcaaagttgaattaacttctatgaatataaatgttattttactttttgtaattgcttttcttatggcaatggtaggttttattgatgattatttaaaggtaaaagctggaagaaatctaggattaaaacctacacaaaaatttattttgcaatttttgattggctgtattagcgcctattattttatatttttaaattatgattcaaacttctacttttttagtggtttaggttttgatataggaatttttaaatggttagtaattatattttttattataggtattacaaattcggtaaattttacagatggcctggatgggttagttgccggaagtagtgcaattagttttggagggattttaattatctctttttggatatatcgtcatccaacatattattcaaattttattggtgatgatttcttaacagttgaactttcactattaatttctgctgtggctggtgcttgtttagggtttttatggtggaatactaatcctgcaaaaattataatgggagatgtagggtcacattttgtaggttctttatttccattaattttgtttgctttgggtgcagatgggttaatatttttcttttgttttctttttattcttgagggagtttctgtagtgtacaaat

SEQ ID NO: 257552 - DNA, 468 bp, Unknown
  Bacterial polypeptide expressing nucleotide sequence isolated from the Sargasso Sea
tttggcctttgaataccaatctttatttagttttctaaatatatttagttatataacatttagggctggcgcctctattcttactggattatttttttctctcatatttggaaattatattattaataaattatctaatattcaaccaactggccagccaataagaaatgacggtccggagtctcatatcattgcaaaaaaaggtacccctacaatgggtggattattaattatccttagtgtttttgtttccactattatttgggctgatttacaaaatatttttatatggattttacttctaactatattaatttttggatctattggttttgcagatgatttcaaaaagataaaatcaaatactagtgacggtatttcatcaaaaataagaattatatttcaaattattttttcattttttattacatatttaattcttatcaatttagatcaaagtataagcaa

SEQ ID NO: 257553 - DNA, 574 bp, Unknown
  Bacterial polypeptide expressing nucleotide sequence isolated from the Sargasso Sea
tttgtttgtttatattgctgaaacctatacaaattacttttcttttttaaatttatttaattatattacatttagaactggcggtgcaattttaacatctcttttcttttcgttaatatttggcgaagtaataattaaatatctttcctcattacagccaattggtcaaccaattagagaagacgggcctgtgagtcatattcttcaaaaatcaggcactccgacaatgggaggaattttaattttaacaagtatactaatatcatttcttttatggtccagattaactaatttatatgtttggataagtttatttgcctgtttatcatttggtttagtaggttttttagatgattataaaaaaatatattcaaaatctagtcgagggctcaaagcatcaactcgtatcatattacaaatcaccataagtttagttattatctttttaattcacagtcaattaccagataacttaaggaatactatcaacattcctttttttaaaaatctaatatttgattttggtatattttttttcatttttgcaattataataatagttggatctgcaaat

SEQ ID NO: 257554 - DNA, 101 bp, Unknown
  Bacterial polypeptide expressing nucleotide sequence isolated from the Sargasso Sea
tgagttaaaaggttggcctgaaccaagagtgatagttagattttggatcattacttttatgcttgttttactcggtttagctctattgagacttagataaa

SEQ ID NO: 257555 - DNA, 220 bp, Unknown
  Bacterial polypeptide expressing nucleotide sequence isolated from the Sargasso Sea
tgtgttttttattatggccggggtatttgttgcagagacggtgtcggttgtcttgcaggtggcgtcttttcgtttgacgggcaaacggatatttagaatggctccattgcaccatcacttcgaattaaaggggtgggctgaacccaaagtgattgtgcgcttttggattgttactgtgctattggttctagttggattagcttcattgaaattaaggtaa

SEQ ID NO: 257556 - DNA, 759 bp, Unknown
  Bacterial polypeptide expressing nucleotide sequence isolated from the Sargasso Sea
taaataatttttggttacctatactctctttaccattatctttaattggctttcttgatgacttaagaggcttaaatccaatattaagatacttaactcaagctttaacttgtttggtctttatcttaaacagtaaaatttatgaatctgggattcagagtttaacaatctttccacaaatattttttattcttctattgattttagtaggtaccgcgattattaactttttaaattttatggatggaattgatggaatattagcttcatgtatggtgataatttttggagtactagctatcagatcatttccttatttagtaccttttattgcttcaattattggctttctaaaatttaattggcatcctgctaaaatatttatgggcgatgtagggagcacatttattggagctgtttttgtaggttgtatttttcaaatatcaggcaataaaaatgatttactaatgattttcatcgcaactcctttattatttgattcttttatttgcgttataagaagattttttaatggggataatatttttaagcctcataaattacatttatatcaaagattaaatcaggctgggttctctcatcaaaaagtttcaggaatttatttattaacaacaatatttttagctttattttacttatttggtaacttaaatatgtatattatatcgattgtatctacattgatttttggtattttcttagaaaagaaatacgcctttccttttagaaattattaaa

SEQ ID NO: 257557 - DNA, 742 bp, Unknown
  Bacterial polypeptide expressing nucleotide sequence isolated from the Sargasso Sea
aatgctttatagtttatttttaaatcttattgacaattattcttttttaaatgtctttaaatatttaactgttagaacaggtttggcaatgtttacatccatgctagttgtttttttagtaggaacgccatttataaattttttttctgctcgaaaaattcatgatcctattagatcagatggaccagaagatcatataataaaaaaaattggaacaccaacaatgggaggtctgttaattttattaggtttattttctggaatattattatggggggatttatcgagcccgtatatttggtttttaatgtttatagttggatcttttggatttattggagcttatgatgattacaaaaaaattaagcagaaaaattcctcaggcatttcattaaaaattaaattatttttacaaatatttttagcatttttgggaatttatattttaatgaattttgttgatacaccagaattaaaaaatttatattttcccttttttaaaaatttaattattaatctaggatggttttttattcctttttatatatttataatagttggttcttctaatgctgttaatttaacagatggtttagatgggttagcgactgtaccagttatattagtagctggttgttttgcatttataagttatgtatcaggtaacatagttttttctgaatatttgcaaataccttacatcgaaggaactggcgaagtaacagttttttgtggatctata

SEQ ID NO: 257558 - DNA, 583 bp, Unknown
  Bacterial polypeptide expressing nucleotide sequence isolated from the Sargasso Sea
atgctttatagcttatcaacaaattttgtagaaatatttacatttcttaatgtctttcaatatttgactgttagaacaggtcttgcagtttttacatctatgtttgtagtttttattataggcacaccctttataaattttttttcaactaaacaaattttggatcccataagagaagatgggcctagtgaacatattgtaaaaaaaattggcaccccaaccatgggaggagtattaattttactaggacttatttctagtattttgctatggggagatttatctaattattttatttggtttttaatttttatagttagctcatttggtatcctaggtgcatatgatgattatagaaaaataaaatataaaaattcttctggagtttcatttacatttaagattgtagtacaaattttaatagctgttgtaggtatagtttttttaacttatttttcagatcattctaaacttgaatatttatattttccattttttaaaaacttaattattaatttaggatggttttttattcctttttcagtgtttataatagttggttcatctaatgcggtaaacctaa

SEQ ID NO: 257559 - DNA, 756 bp, Unknown
  Bacterial polypeptide expressing nucleotide sequence isolated from the Sargasso Sea
aatgctttatagtttcttaatttcattagtagatcagttttctgcactaaatgtatttcgctatttaacatttagaacagggctttcagttatgtcatctatggttatagtttttttaataggaggaccctttataaaatttattgagtctcataaatttactggccccatacgagatgatggaccactggagcatattattaaaaaggttggaacaccaaccatgggtggtgtccttattttaattggaattctttttggaactttgttatgggcagatttatcaaattcttatatttgggcgctactgatggtagctacaagttttggagtactaggtgcaatagatgattatttaaaaataaagcaaaaaaattcaagaggaatatcttccggaaagaaaattatttgtcaaattatcctagcattaattgccatttttttattaatggaatatacagacaacgatcatcttaaaaatctttactttccttttttcaaatacttaacagttcacctaggtttattttttattccatttagcatttttataatagttggttcttcaaatgctgtaaatttaactgatgggctagatggtttagctactgttccggtaatgttagtagcattatcttttactttaatttgttatgttgttgggaacacggtcttttcagaatatttacaaattccatatatagctaatgtaggagaggcttcaattttttgtggatctatagttggttcatgttt

SEQ ID NO: 257560 - DNA, 805 bp, Unknown
  Bacterial polypeptide expressing nucleotide sequence isolated from the Sargasso Sea
actgatcgtgacagtactcaccaatcttttcgatgtcgaaaacagtcggcttttgattaatcgcgaatcaatgattttgcctatatcagtaatcaccgggatgttagtacttggagtatgggatgattttggaactttcgtcaatcgcccgatgactggtctcacatggaggttaaaatttgcctctatcggccttgttgcaggtattgttgcgtattgcatgttcttcttgctcgaggctgaaagtgtcaatatcccttggataggtaaatacggattaggatacagctacttagccatcgcttttgtgactgtttttacaactaccacggctgtatcagtgaccgacgggttggatggactgcttggtggtaccgcagcctttgcatttggagcatacgcagttattgccttcatacaaggccaagtcttcctagctatattttgtttcaccgtatctggagcgcttctgggattcctctggtataacgctcatcccgcatcggtatttatgggtgacgccggcgcattgccactcggagccgcactcgccacggtggcactaatgacggggcattggttgatacttcctattgtcggaattgtgtatgtattggaggcaggttctgcgcttgttcaagtaatctatttcaaagtgactggcgggaaaagaatattcctgcaaactcctttccatcaccacttagaactactgggatggagtgaaccacagattgtgatgaggctctatttacttgcaatcgctggagccatgttgggcgttgcgcttgctttaaaggtgtga

SEQ ID NO: 257561 - DNA, 610 bp, Unknown
  Bacterial polypeptide expressing nucleotide sequence isolated from the Sargasso Sea
aaaaataaatcccaaactccatcaatggggggtttgataattattgcatctatattaataagtacattactctgggcagatatacataatgataatatttggatcttgatttttgtcttgattacttttggattagtgggtttttatgatgactataaaaaatttaaatattctacgagtgatggtattaaaggcaaaacgaaattattgctgcaaatattattctctggtattgtagttttttatatttttcaaacatcagatcatactgtcgacttaagtttaacaattccttttataaaagattatgcactatttatgggagcattttttataccctggagtatttttgtaatagtaggctctagtaatgcagtaaacctgactgatggacttgatggtcttgcaatactaccatgcattctaattgctgcagcttttgttgtattttcatatgttcagggtaacttcaacattgcaaattacctattgataccatatctacctgatgtttctgagacagctatttttgctagtgctgtagtagggtcaggactgggcttcttatggtacaattcatatccagcacagatcttcatgggtgatgtag

SEQ ID NO: 257562 - DNA, 632 bp, Unknown
  Bacterial polypeptide expressing nucleotide sequence isolated from the Sargasso Sea
catgctctactatttatttgattttttagatagagagtttgacctgatcggtgcgggtgtattccaatacatctcatttagagcaggtatggctgcgcttgtttcgctgttaatcacaataatctttgggcagaacctgatttggatgctgcagaagaagcaagtgggtgagacaattagagatttgggcttagcaggtcagcttgagaaaaaaggcacaccaactatgggaggcctaatcataatcgcgggtattgttgtgccgacattactgtttgcaagacttgagaatatctacatcatcattcttttgattactattctgttcttaggcgcgattggcttcctagatgattacatcaaggtgtttaagaaagataaaaagggtcttgcgggcaagtttaaggtgttcggacaaattggagtaggccttattgtaggtctaatgctctatttcaacgataatgttgtggttagggagttcgaggaaacacccgtcaacacagaaatagaagagactcgtaggtatcatgatgttaagagcactagaactaccattccttttgtaaaggataatgagcttgattatagcgaactgaatcctacagagaatgattacataacggccgcaa

SEQ ID NO: 257563 - DNA, 124 bp, Unknown
  Bacterial polypeptide expressing nucleotide sequence isolated from the Sargasso Sea
tatggctccgttacatcatcacttccctttaaaaggatgggctgagcccaaagtgattgtgaggttctggatcatcaccgtttttcttgtgctcataggcttatcaagtctaaagataaggtaa

SEQ ID NO: 257564 - DNA, 661 bp, Unknown
  Bacterial polypeptide expressing nucleotide sequence isolated from the Sargasso Sea
aatgctatatcaatttttattaaattttgtagatacttttagttttttaaatgtatttaaatatttaacttttagaacaggtttatcttttttcacctccttggttattgtactgattattggaggtccttttattaaatatttttcaaaacaaaaaattttaaatccaatccgggacgatgggcctgaagatcatatagttaaaaaaattggtacaccaacaatgggaggtttaataattttatttggcttattggtatcagtaatattttgggcagatttatcaaatattaatattttattttgtatctacatagcaattacttttggtttgttgggagcatatgatgactttaaaaagattaaatatagcaactcatcaggaatttcctcaaagttcaaaataacttcacaaataatattagcaattattggagtaagtttttttgtttatttaaatgattatcaaaatttaaataatttatattttccattttttaaaaatctgattgtaaatcttggatggttttttataccatttgcaatatttgtaattataggatcttctaacgctgttaatcttacagatggattagatggattagcaactgtacctgtaatattatttgcagcatgttttgctttcattagttacgtcact

SEQ ID NO: 257565 - DNA, 922 bp, Unknown
  Bacterial polypeptide expressing nucleotide sequence isolated from the Sargasso Sea
agtgcgtcccttctgatcggggttgttctggccgccagcgtcgccaccgacaagtggatcgcgaacgctcagctgagcctgccgctgctgatcagcatgaccactgccgcactggtggcagctgcaggcattccacggctgcgggcactgaagatggggcaggtgatccgggaggagggcccaaaggcccacctcagcaaatccggcacacccacgatgggcggcttgctggttgtgcccgtgggagtgatcatcggcggcctgatcagtccggaaggagaggcttcccaacagctgctggccgtggctgccgtgacactcgcctacatggcgatcggcggattcgacgactggcgcagcctcacacgacgcaccaacacgggtctgacgccacgtggaaaactgtttctgcagatggtggcggcggtcgccttcctcagcgtcgctgcatggcacggctggatcgacagcacgatctccctgccccttggcgtgacacttccgctgggactgctgatctggccgctggggctgttcgtgttcctggctgagagcaacgcgaccaacctgaccgatggcctcgatggactggccagtggctgtggtgccctggtgttcgccggtctggccatccagttgatgctccgaggtcacagcggagatcccgccatggcgggtttctgcatggcgatggccggggcctggctcggttttctgatgcacaaccgcaacccggcccgggctttcatgggcgacaccggttcccttgccatgggagccgctctcagcgccgttgccctgctcaccgacagtctctggccactgctggtgatgggaggagtctttctcgccgagtccgtgtccgtgatcgtgcaggtctgggtgttcaaagccaccaagggacccgatggccaggggcgtc

SEQ ID NO: 257566 - DNA, 475 bp, Unknown
  Bacterial polypeptide expressing nucleotide sequence isolated from the Sargasso Sea
aatgttaaataactattttttatctttgaaagaatcaattactgttttcaacctatttgagtacatcacattccgtgcagctctagcagcaataactgcacttatattatcttttataattggtccgtttataataagaaaattaaaaaataatcaaattggtgaagaaatacgtaataatggtccaatgacacactatgtaaaaaggggcacgcctactatgggaggagtgattataattttagcagcactcctccctacccttatgttctctaatctagataatacaatgataagaatagttatcatatctacaatatggatgggtgttattggctttattgacgactacttaaaagttattaaaaaaattgaaaagggaatgattgcccgttataaaatgattggtcagattaccttaggaatattaattagttattggataataagcagtaatgattttatggcttttaat

SEQ ID NO: 257567 - DNA, 421 bp, Unknown
  Bacterial polypeptide expressing nucleotide sequence isolated from the Sargasso Sea
cttgaacattatgtacattccgaattctggagaaatgaccgtgtttatttctgcatttgttggagcattaatcggatttctttggtacaattcctatccagcttcagtattcatgggcgatacaggaagtttaaccatcggcggaattattgccgttttagcaatttctgttcgaaaagaaatgcttttaccagtattgtgcgccatattttttgctgaaaatctttctgtaattattcaagtgagttattttaaatacactaaaaaacgttttggtgaaggacgaagggttttcttgatgtcgccattgcaccatcattatcagaaaaaaggatatcacgaaagtaaaattgtaacccgtttttggattgttgccataatgcttgccatcgtttctattgtaaccttgaaattgagataa

SEQ ID NO: 257568 - DNA, 328 bp, Unknown
  Bacterial polypeptide expressing nucleotide sequence isolated from the Sargasso Sea
tatgatttattatttttcactatttttactagaaaattatagttttttaaatatttttaaatatctaacttttagagctggtggggcatttattacttctatcgttattagttttatatttggtccttatttaataaattattttaaacagaagcaaaagttaggacaaccaattagagaagatgggccgaggtggcaaatagatgcaaaaagaggaacacctactatgggagggactttaatactgtttgctttgactatatccactatatgtggatgggatttctcaattaaaattatggcttttatatttaatactttagtttcg

SEQ ID NO: 257569 - DNA, 271 bp, Unknown
  Bacterial polypeptide expressing nucleotide sequence isolated from the Sargasso Sea
aatgctttatagttttcttacatcacttattgaaactttttcttttttaaacgttttcaaatatattacttttagaattggtctttcggtagttacatctttaataataatctttttaattggtaatccactaataaattacttttcgaaaaaacaaattactggcccaataagacaggatggaccaatcgatcatataattaaaaaaagtggaactcctacaatgggagggttaatgatacttattggaattatagttagtacactttta

SEQ ID NO: 257570 - DNA, 561 bp, Unknown
  Bacterial polypeptide expressing nucleotide sequence isolated from the Sargasso Sea
ttagttgttgtctttattattggaggtccacttataaagatattttctgaaaacatgatttcaggtcctataagacaagacggaccaattgatcatattataaaaaaatctgggacacctacaatgggtggtgtgattattattattggtatgttaacaagcactttattgtgggctgatttaactaacatttatatatggactctaatttttgtatctttaagtttaggattattaggtttcacagatgatttgcttaagataagattaaaaaactcaagaggacttaattcaaaattaaaattttttggtcaattaattatcgcatctattgctctactaatcataattaaattttctaatcatgaatatttgtacaatctttactttcctttctttaaaaatttaatttggcaaatgggtcttttttttattccattcggattattcgttataattggatcatctaatgcagtaaatttaacagatggactcgatgggttagccactgtgccagtaatgttagttgctctttcttttacattaatttcttatgttgta

SEQ ID NO: 257571 - DNA, 754 bp, Unknown
  Bacterial polypeptide expressing nucleotide sequence isolated from the Sargasso Sea
tatgttatattatctatttgaatttcttgaaactcaatataacctccctggagcaagtctatttgattatttgtcatttagggcagctgtctcggtaattatttcactaataatatctgttgtctttggtaaaagaatcattgagtatttaagaaagagacaaataggtgagaatgtaagaaaactaggtttagaaggagaagaagaaaaatctggtacaccaacaatgggtggattaataataattattgcaactattattccagtattattaatgtccaatcttgaaaatatctatataaaaatattactgatatcaacaattatacttggaattataggttttattgatgattacataaaggtctttaggaaagacaaaaaaggtctcaaaggaaaattcaaaattgctggacaaactattctaggaatttttgttggaattatgttattaacaagtaacgatgtaactatagttgagtcttcttcaataagtgatattaacagcattgaaaacttacaatccaatgagataaaatcatttaagacaactattccattttttaaaaataatgagctagactatgcccttatttctaatgctatttttaataatgaaaatatgttatggttaattcttattccaataataatatttatcgtaactgcagtttcaaattcaaacaacttaacagatggtcttgatggactttcagctggatcttctgcaattatagtttttactcttggaagt

SEQ ID NO: 257572 - DNA, 289 bp, Unknown
  Bacterial polypeptide expressing nucleotide sequence isolated from the Sargasso Sea
gacacaggatctcagtcattaggagcatcgctagcagttacctcaattcttttaaaacaagaaatagttttggctgtggcaggtggtctttttgtaattgaaacgttatcagtaatgttacaagtattttattacaaatctacaaaaggaaagagattatttttaatggcaccccttcatcaccactatgaaaaaaaaggtttatcagaacaaaaaatagttatcagattttggatattaagttttcttttttgcttgttagctctatcacttttaaaaataagataat

SEQ ID NO: 257573 - DNA, 303 bp, Unknown
  Bacterial polypeptide expressing nucleotide sequence isolated from the Sargasso Sea
catgctgtatgaattattactaaaatatattgaaacttttagttttttaaatgtttttaaatatattacttttaggactggattagcattttttacatctttaatgattgctcttattattggtggacctttcataagattattttctaataagcaaatttttgacccaattagggaagatggcccaactgatcatattataaaaaaaataggtacaccgaccatgggaggtgtgattattttaattgctttgattatttcagttttattttgggctgatctgacaaacatttatattttgtt

SEQ ID NO: 257574 - DNA, 894 bp, Unknown
  Bacterial polypeptide expressing nucleotide sequence isolated from the Sargasso Sea
tttgattgcaataattgtatctggtgcactttctttcttattcgtgattttgtcaacatccataggagttaactattttaaatctagaaatattggtcaaccaattcaagaggaagtggtttttcatgaccataaaaaaggtacgccaacaatgggaggtgtatttataattttaggaacttatgccggctatgttctatcacatattaatttttggacaattggtcagggatttaagattgaattgatatcaattaatccagtaattttaaatctacttttattcggtactctcatggcttcagttggattaattgatgatcttttaaaagttagaaaaaatagaaatttaggccttagagctagaaataaaatatttttacaaatattggtaggttctttcataagtttatatttttacaatctagattactcatcaacattttattttttcagcggttttggttttgaagttggatttttaaagtggatccttatagtctttctaattgtaggtattactaattcaacaaatcttacagatggtttagatggtcttgtagcaggttcatcctcagtttcttttggaggaattttaattattgctttttggatttttaggcatccagattattacataaattttatgaataatgaaatggttggtcttgagctttctacacttatatctgctttagctggttccactcttggttttttatggtggaatacaaatcctgcaaaaataatcatgggagacatagggtctcattttattggtgctatgtttccgataattttaatatcgctaggtgccgatggcctaattttctttttttgcttcctttatatatttgaggccttatctgtcatccttccagtatcttcttataa

SEQ ID NO: 257575 - DNA, 382 bp, Unknown
  Bacterial polypeptide expressing nucleotide sequence isolated from the Sargasso Sea
aatgttgtattggcttacggctctgtcagatggaggagatttcttcaatcttttccgttatataacctttcgagctgggggagctttttttacggctttaatatttggttttgtttttggcaggccattaattaatgtgctacgacgtagacagggcaagggacaacctattcgtgacgatggtcctgaagcgcatgcggcaaagtcaggaactcctacaatgggaggcttacttgttttatcagcattagttttttcaacagttatgtgggccaggcttgataataactatataattatagtactttttgtaacaatttgttttggcgggatagggtttatcgatgactatcttaaggtaagccgtcagaatccaaagggt

SEQ ID NO: 257576 - DNA, 656 bp, Unknown
  Bacterial polypeptide expressing nucleotide sequence isolated from the Sargasso Sea
catgctttataatttattaatttcattaattgataattactcatttttaaacgtttttaaatatcttactttccggacaggtttatcagtaggaacttcgttagtaatagtattcttaattggcggacctcttattaaattattttcaaaacatcaaattagtgggccaataagacaagatggacccatagatcatattattacaaaaactggaacaccgactatgggaggacttatcataattattggtatgatagggagcaccttgctctgggctgacttaaacaacatttatgtctggactttaatttttgtctctttgagcttaggcctccttggttttgctgacgatatgctaaaaattaaattaaataattctagagggatgagttcgaaaatgaaatttttgggccaactacttgttggggtagttaccttattaattttgatttacttttctgaacaccaacatctgaataaattatattttccttttttcaaaaacctaatattagatatgggtttattatttattccttttgcattatttattttaatcggttcatctaatgcagtaaatttaactgacggtcttgatggattagcaaccgttccagtgatgttggttgctttatcttttacattaattagttaca

SEQ ID NO: 257577 - DNA, 910 bp, Unknown
  Bacterial polypeptide expressing nucleotide sequence isolated from the Sargasso Sea
gattaaaaagtttaactttaaatcgttatttatattaaatacttttgctttaatagtaacttcttatttttttaataatttttatcttataggagtttttacattatttttttttatttctttattcacaacaaagaatggtctagaaatgataaaaaaattaaatttactccaaaatattaaaattggagcccctgttaatcactataaaaagagtgatacgccaacaatgggtgggatttttatgataatcccttttttaatttttcttttgataataactataaatttaggttctctaaaatttttccttttattcctgactattttgggtttcttttttacagggtttttggatgattatttaagtattaaaaacaaagaaaatacagggttaaaaacaatagagaaattcatactacaaagtatcatctcaatatcttttatattgttagcctatgaaaaaaatttaatagatccattaataacaatatctgactcctgggaaataaatatgaatattttcatatttccaattgcttttttagtactagttggcataagtaattcagtaaatttgactgatggattagatgggttagcagctggatgcagtgggattgtcttttatggattaggaacagaaatattaatgaaagaacagcaagaatttttagtttttagtatcttatgttatgcaatgtccgggctatgtttaggatttctcaaatacaatagttatcctgcaaaaatttttatgggtgatacaggatctctaagtattggcgctattttaggttctatagcgttattaaccaatagcgtttttaccctatctattttctcaggagtatttattattgaagcactttcagtgataattcaagtaggtttttttaaaatacaaaaa

SEQ ID NO: 257578 - DNA, 271 bp, Unknown
  Bacterial polypeptide expressing nucleotide sequence isolated from the Sargasso Sea
gccctcagcgccattgccctattgagcaacagcctttggcctctgctgctgatgggcggcctgctgctggccgaatcgctgtcggtgatccttcaggtgtgggtgttcaaagccaccaaaggagctgatgggcaaggcaggcgcctgttgcgcatggctcctctgcaccaccactttgagttgagcggctggagtgaacgacaggtcgtggtgagcttctggggagtcagcttgctgctggtcgggcttgggctggtattgcttccctgaa

SEQ ID NO: 257579 - DNA, 770 bp, Unknown
  Bacterial polypeptide expressing nucleotide sequence isolated from the Sargasso Sea
tttggcctatgaataccaatctttatttagctttctaaatatctttagttatataacatttagagctggagcctctattcttactggattatttttttctctcatatttggaaattatattattaataaattatctaatattcaaccaattggtcagccaataagagatgatggtccagagtcacatataatagctaaaaaaggcactcccacaatgggtggattattgattattctaagtgttttaatctcatccattatttgggctgatttacaaaatatttttatatggattttacttttaactattattatttttggatctattggttttgctgatgattacaaaaaaataaaatcaaatacaagtgatggcatttcatcaaaaataagaattttatttcaaattattttttcatttcttattacatacttaattcttatcaatttagatccaagtataagcaaatctatgacatttcctttctttaaaaatttaattatagattttggaatattttattttctcatttctatatttataattattggatcggctaatgcagtaaatctaactgatggacttgatggtttagcaattgtccctgtaatgatagttgctatatcttttgctttcatagcttatatttcaggcaatatagttttttctaattatttacttattcaatatattcctgggactggtgaattatcagttttttgtggttctttaattggagctgctttaggttttctatggtttaaacgcg

SEQ ID NO: 257580 - DNA, 613 bp, Unknown
  Bacterial polypeptide expressing nucleotide sequence isolated from the Sargasso Sea
ttgataccactaagagactattttggtttcttaaatctttttgagtatatcacttttagagctggggctagtgcaattttagcactattaattagttttatatttggaccatttgtagtaagaaaactaattaatcttcaaattggtgaatcaataagggatcatggccctgattctcacaaagaaaagcagggtacacctacaatgggtggtgttataattattttatcaacaattattccaacaattctattagcagatttaaataatttatttattcaaataatttgcctatcaatggtttggatgggtttagttggtttttatgacgattatttaaaagtagttaagaaaagtaaagatggtttaagtggaaggtataaattgcttgctcaaactattcttggagtttttatatcatatttattaattaattcaaatgtatatggagactacactcttttaacttttgttccttttttaaaaaatgtttccattaatttcttttatcctatcatttatgctgtttttattattttagttgtttcagctacttcaaatgcagtaaatcttactgatggtctggatggcttagctgccgggttattagcta

SEQ ID NO: 257581 - DNA, 673 bp, Unknown
  Bacterial polypeptide expressing nucleotide sequence isolated from the Sargasso Sea
tatgctttatattttattttcaaatttagttgatacttttagtttttttaatgtctttaaatatctgaccgtccgaacaggattatcaatgtttacagctatgatagttgtatttatagctggtggaccatttataagatatttctcatcaaaaaaaatacacaatccaatccgagatgatggaccagatgaacatataataaaaaaaattggaacacctacaatgggggggttattaatattgtttggtgttttttcgggtgtccttttgtggggagatttatcaaatccttataattggtttcttatttatattgctggtacttttggactgttaggtgcctatgatgattataaaaaaataaaatttaacaattcaagtggcgtttcttctaaatttaaaattttaattcaaatatttttagcaattgttgggatattaattttatattattcaggtgtatcagatgaaatagaaaatctatattttccatttttaaaaaatttagttattaatttaggttggttttttataccattttatatttttgtacttgtaggctcatctaatgctgtgaacttgactgatggtttagatggtttagcaacagttccagtgatactcgtagcctcatgctttgcattgataagctatgtttcggaaacatggttt

SEQ ID NO: 257582 - DNA, 481 bp, Unknown
  Bacterial polypeptide expressing nucleotide sequence isolated from the Sargasso Sea
atgctttatagtttcttaacatcattagttgatacttttacttttttaaatgtatttaaatacattactttcagaataggactttcagtaatcacctctctgacgataatttttttaattggaaatcctttaattaaatatttttcaaaaaaacaaattacaggacccattagacaggatggtccaattgaccatattgtaaagaagagtggaacacccaccatgggagggctaatgattttaattggaattatttcgagtactcttttgtgggctgatttaaataatgtttatatatggatagttctttttgtatgcacaagtcttggtttgctaggatttatagatgattatcttaaaattaaatttaaaaattcttcgggaattaatgctaaattaaaatttttaggacaattctttgtttcactggttacaattttagtattaatatattttacggatcatgaaactatttcaaatc

SEQ ID NO: 257583 - DNA, 793 bp, Unknown
  Bacterial polypeptide expressing nucleotide sequence isolated from the Sargasso Sea
gatgttatttaatttacttacatcctttatagaacattattctttccttaacgtttttaaatatcttactttcagaacaggactttcagtagttacatctctgattgtagtttttatcattggcggaccacttattaagattttttctgaaaatatgattactggccccataagacaagatggacctatagatcatattataaagaaatcaggaacgcctaccatgggaggagtaattatcataattggtatgcttactagcactttactatgggctgatttaaataatatttatatttggactttagtttttgtatctttaagtttagcattattaggttttagtgatgatttactaaaaataaaatataaaaattccagaggacttaacccaaaattaaaatttcttggtcaattaattattagtgttgtggctttatttattctaataaaattttcagaccacgaatacttgtataatctttactttcctttctttaaaaatttaatttggcagatgggtcttttttttattccatttgggttatttgtaatcattggatcatccaatgcagtgaatctaactgatggtttggatggattagctactgttccagttatgttagttgcactttcatttactttaatctcctatgtagttggaaatacaattttttcagaatatcttcagttacaatatattcctgacgtaggagagctttcaatattttgtggctcaatagttggatcttgtctaggttttctttggtacaatgctcctcctgctaaaatt

SEQ ID NO: 257584 - DNA, 178 bp, Unknown
  Bacterial polypeptide expressing nucleotide sequence isolated from the Sargasso Sea
tttatggtttaatgcaccaccagcaaaaatatttatgggtgatacaggttcacttgcattaggtggatctcttggaggaataggaataataacaaaacacgaaatagttcttgcaataacagagaggactatttgttttagaggcagtttcagtaatagtacaagtaatttcttataa

SEQ ID NO: 257585 - DNA, 475 bp, Unknown
  Bacterial polypeptide expressing nucleotide sequence isolated from the Sargasso Sea
gatggattagcagctggatgcagtgggattgtcttttatggattaggaacagaaatattaataaaagaacagcaagaactttttgtttttagtattttgtgttattcaatgtcaggcatatgcttaggatttctcaagtacaatggttatcctgcaaaaatatttatgggtgacacaggatctctaagtattggagcaattctgggttctatagcattattaactgatagcatttttacattatctattttctcaggtgtatttattattgaatcgttatcagtaatgattcaagtgggcttttttaaaattacaaaaaaattatttcacagaggtaaacgcatatttttaatggctccactgcaccaccattttgaacttcagggagttagggaagaaaaaatagttgaaaatttttggaaaatcaacattttacttataattttaggtatagttttaaaaatcagtctttaaa

SEQ ID NO: 257586 - DNA, 684 bp, Unknown
  Bacterial polypeptide expressing nucleotide sequence isolated from the Sargasso Sea
ggtcaggtttctcttggtttacttgttggttttattctttatttccacccagatgttgtcatgcgtgagcaaattagtactattgataaatcagctcaagtggtagttgttcagaaagatttaaagtcttcgatgacaaccattccttttgttaaagataatgagtttgattattcagatctcttgtcatggcttggagatactgctcaagattgggcctggttgatttttattccaatggttatttttattgtaactgccgtttcaaatggagctaatttaaccgatggaatagatggtttggcaacgggcacttctgccataattggattggtcttagccatttttgcttatgtgtctggtaatatcatttttgcagattatctgaatattatgtacatcccaaattcgggtgagcttgtaatatttattgctgcttttattggtgcttgtgtaggttttttatggtacaattcatatccagctcaagtatttatgggtgatacaggtagtttggcaattggaggtattatagctgtttttgccattgccattcgtaaagaattattgattcctattatctgtggaatctttttaatcgaaaatctatcggtcttaattcaagtctcgtatttcaaatacacaaagaaaaaatttggtgaaggcaaacgcatctttttgatg

SEQ ID NO: 257587 - DNA, 502 bp, Unknown
  Bacterial polypeptide expressing nucleotide sequence isolated from the Sargasso Sea
atgctttttagtctattttctaacttagttgaaatttttagtttccttaacgtttttaaatatttgactgtaagaacgggtctctcaatgtttacatcaatgatagtagtttttttagttggaggaccacttattaattatttttcttctaaacaaattcatgacccaattagagaagatggaccaagtgatcatatagtcaaaaaaattggaacacccacaatgggaggtctaatgattttactaggtattttctcaggtgttcttttgtggggtgacttttcaaatccctataattggtttttactttatatagctggatcttttggattactaggagcttacgatgattatcaaaaaataaaaaaaaataattcaaatggtataacatcaaagctaaagatcgtaattcaaatcattttagcattaggtggaatcttcatgctttatttttacagtgggtctaatgagattgagaatttgtattttcccattttttaaa

SEQ ID NO: 257588 - DNA, 772 bp, Unknown
  Bacterial polypeptide expressing nucleotide sequence isolated from the Sargasso Sea
catgctatattattttctttttcccctcgcagacgattttagccttttaaatctatttcggtacctctccttcaggacgggggcggcaatcatcaccgcattgattattagctttatacttggaggtcctctgatcaaatggctgaagagccagcagggcgaaggccagcccattcgagaggatggacctgaaggtcatccactgactaaaaaaggcacgccgacaatgggagggcttttaattttgattgccgtgagtgcggcaacaattctttgggctgacatcagcaatcgttatgtttgggctgttctcatagtcaccctgggctttgggagcatcggtttctttgacgactatctcaagcttactaagaggtcttcgaatggtatgtcaggaaaaataaaaataatcgctgagattgccattgcgggggctgcagcgtggtggatttctgatattttacccgacccacttgctaccggcctcactattccttttttcaaaagtttaataatcgaccttggctggttcttcattcccttcgctactttcgtcattgtgggggcatctaatgccgttaacctaactgatggattagacggcctagcgattgtcccagctatgattgttgcgggctgcctcgcgctaattacatatattgttggaaatcaaatattttccttatacctgcaggttgaaaatgttccgggtgcgggcgagctaacagttttctgtggcgccctcgtgggggccagcctcggtttcctctgg

SEQ ID NO: 257589 - DNA, 554 bp, Unknown
  Bacterial polypeptide expressing nucleotide sequence isolated from the Sargasso Sea
aatggttgaactaatagtaagtttcctcttcgatgagataagtttctttaatcttttttcttatctttccacaagaacaatcttatcgaccctaacaagtcttctgctggtcttaatttttggggaaggctttataagattaataagctcttttcagttcaaccaaacttttgatggtagagctcctaatagacacatggtgaaacatggcactccaacgatgggtggtattttgatagtttccagcgtacttatttctggcattttatggggaaacttatttgataaatatctaatattggggctaatctgcatagttggatttgcaataatcggttttattgatgactacaaaaaagtaaagatagagagttcaaaaggcctatcatcaattgaaaaaattttttttcaatcaatattggctgggattatatcaatttcattatttatgctggcagagagtaaaaatgaattaatttacattgttccttttttcaaaaatattgctttggatttaggtatctttttcatatttatttcgatatttattattg

SEQ ID NO: 257590 - DNA, 697 bp, Unknown
  Bacterial polypeptide expressing nucleotide sequence isolated from the Sargasso Sea
gcccgcaatctcatcaaaagaaaaacaaaaacaccttcaatgggtgggattgggattttagttgggataggcattggggttatgatgttttcactttcacttgatgtgttatgggttttttttgcgatggtgatgtttgggtgtattggtttttatgacgatcttaaatcgtttttgaaaggaagaaatcaaggattgagtgcggctcaaaaatttatgcttcaagcatgtgtttcatttgtgttgttgtttttattttcgtatttaattagaggtttaagtttttttgagtatgttttttatagttttgtcatgattggcacgtctaatgctaccaatttaacggatggtttggatgggttattggcagggtgttcgttaattacattgttagggtttacatttttatttcaattgtcaggggatttatcagctcagatattatgtaatattgttatgttttcagttgcggctttttttctttttaatcgaaatccagcgtctatttttatgggagataccgggtctttgttgttgggggcagggtttgcggcttttgctattgtgttaaataatgtgtgggtgttgttgccattaggggctgtttatattattgaaacattgtcggtgatgattcaggtagtttattataaatggacaaaaaaacgggtgtttttaatggcgcctttacatcatc

SEQ ID NO: 257591 - DNA, 448 bp, Unknown
  Bacterial polypeptide expressing nucleotide sequence isolated from the Sargasso Sea
atgctttttagtctattttctaatcttgttgaaatttttagttttcttaatgtttttaaatatttaactgtaagaactggtctatctatgtttacatcgatgatagtagtctttttagttggaggaccccttatcaattatttttcttcacatcaaattcatgatccaattagagaagatggacctagtgaccatatagttaaaaaaataggaacacctaccatgggaggtctaatgattttactaggcattttttcaggtgtagttttatggggcgatttttcaaatccctacaattggttcttgctttatataacaggctcctttggattacttggagcttatgatgactaccaaaaaataaaaaaaaataattcaaatggcataagttcaaaaaaaaagattataattcaaattattttagcattatgtggagtcttgatactat

SEQ ID NO: 257592 - DNA, 145 bp, Unknown
  Bacterial polypeptide expressing nucleotide sequence isolated from the Sargasso Sea
caagggcgacgcgtattccggatggcccccctgcaccatcacttcgaactggggggcaccagcgaacgcacagtggtgccatgcttctggctcgccacggccggcttcgtgctgctggggctactgcttcgaccgaccatctgag

SEQ ID NO: 257593 - DNA, 839 bp, Unknown
  Bacterial polypeptide expressing nucleotide sequence isolated from the Sargasso Sea
actttcagatggaggcgactttttcacttattccgttacatcaccttccgggctggaggtgcattttttacagctttactgtttggttttatatttggaaggcctttgattaatgttcttcgaaaaaaacaaggcaaaggccaacctattagagatgatggtccgtcatcgcattttgaaaaagccggaacccccacaatgggaggtttgctcatcttgatttccttactctttgcaacctgtttgtgggccaggcttgataatatttttatttggattgttattttagtcacgcttagttttggaatgataggttttgccgatgattattccaaagtatccaaacaaaatacaaaaggagttcccggtcgaatacgcttgcttctcggttttattatatcagcgattgcagcctattttgctgccattaatcatccagaagctttgcagtataaactggctctaccggtttttaaggatactttgctgcatcttggggtattattcatcccattctcgatgatcgttgttgttggtgctgcaaatgcggtaaatttaactgacggattagatggtcttgccataatgcctgtgatgatcgctgcattagcattaggtgttattgcgtacgccgtaggacgcgtagacttcacaaattatttagatgtacactatgtgcctggtacaggagaattattgatattttgttctgctctttttggcggaggtttaggatttctttggtacaatgcccccccagcagcagttttcatgggcgacacaggtgctctttctctaggaggtgcattagggtcaattgcagtggtaacaaagcatga

SEQ ID NO: 257594 - DNA, 703 bp, Unknown
  Bacterial polypeptide expressing nucleotide sequence isolated from the Sargasso Sea
aatgcttctgagtttgtttgaatatctttctcaatataattcaggctttaacgtctttcaatatttgacattgaggacagtaatgggagcagggacatctctagtaatttctcttattcttggtccttatattattacttacctcaagaataaacaattctatcaatctatacgtgcagatggccctaaaagtcatctagatgaaaaaaatacaactccaacaatgggcgggattataattatatcttctgtagttatatccactactttatggtccgatttatccaataattatatacttatactattatttggaatacttggatttggcgctattggtttttatgatgactataagaaacttataaaaagaaatagcgatggcataaaggggagattgaaatttctcctgcaaataatatttgcttcaatcataacgctatttttatacttttttatggatactggaagtattgaatcagtcttcccttttttaaaagaaaatagtttttatttaggcatacttttcataccatggtcaatttttatattggttggatcatcaaatgcagtgaacttaactgatggattagatggacttgctatattgccttgtatactaattgcatcagcttttgtaattttttcttatgttcatgggaatacaaatatttcatcatatttattgataccgtatattgaa

SEQ ID NO: 257595 - DNA, 922 bp, Unknown
  Bacterial polypeptide expressing nucleotide sequence isolated from the Sargasso Sea
gatgattgggaagattaaaaattttaactttgaatctttatttatattaaatacttttgctttaatagtcacatcctatttttttaataattttatttttacaggagtttacatattatttttctttatttctatttttacaactaaaaatggtctaaagattatcaaaaaatttaatttacttcaaaatatcaaaaaagaaggcccagctaatcactttaaaaaaagtgatactccaacaatgggtgggatttttatgataatcccttttttaattttgcttttgataataactatcagcttaggttctctaaaattatttcttttattactaactatttttggtttctttattacaggatttttagatgattttttaagtattaaaagaaaagagaacacaggtttaaaaacaaaagagaaatttttcttacaaagtgtcatctcaataatttttatattgttagcctatgaaaaaaatttaatcagtcccttaataacagtttctgactcctggggaataaatatgaatattttcatattgccagtttcttttttagtgcttgtgggcataagtaattcagtaaatttgactgatggactagatggattagcagctggatgcagtgggattgtcttttatggattaggaacagagatattactgaaagaacagcaagaactttttgtttttagcatcttatgtttttcgatgtccggcatatgcttaggatttctcaaatataatagttatcctgcaaaaatatttatgggtgacacaggatctctaagtattggagcaattttgggttctatagcgttattaaccaatagcgtttttaccttatctattttctcaggaatatttattattgaatcgttatcagtaatttttcaagtaggattttttaaaattacaaaa

SEQ ID NO: 257596 - DNA, 628 bp, Unknown
  Bacterial polypeptide expressing nucleotide sequence isolated from the Sargasso Sea
aatgctttatcaatttctactaaacttcgttgatacatttggttttttgaatgttttcaaatacattactttcagaactggattatctctatttacatcattagctattgttctaattattggtggaccttttataaagtatttttcaagccaaaaaattttgaatcctattcgagatgatgggcctgaagagcacattgtaaaaaaaataggaaccccaacaatgggcggtttaattattttaataggtttattagtttcagttttgtgttggggagacttaacaaatataaatattcttttttgtatttatattgctgtttcatttggtgttttaggtgcctttgatgattataaaaaaattaaacacagcaattccttcggtgtatcatcaaaatttaaaataatctctcagattattttagcagttataggtgtttgtttttttgtttattatgtggataaccagaacatagtaaacttatattttccgttctttaaaaacttaattattaatttgggatggttctttataccatttgctgtgtttgtattaattggctcctctaatgcagttaatctaactgatggtttagatgggttagcgaccgttccagtcattttggtt

SEQ ID NO: 257597 - DNA, 753 bp, Unknown
  Bacterial polypeptide expressing nucleotide sequence isolated from the Sargasso Sea
tatgttatattatctatttgaatttctggaaactaattataaaatccctggtgcaggtctatttagttttttatcatttagggcagcattttctgttgttttatcattaataatatcaattgtttttggtaaaaaaataattaattatttgagaaaaaaacaaataggagaaaatataagaaaattaggtttggaaggggaagaaaacaaatctggcacaccaacaatgggtggtttaataataattatcgcaactataatacctgtattgttaatgtctaatctagaaaatatttatataagaatattaataatatcaacaattatattaggaattattggttttattgatgattacataaaggtatttaggaaagataaaaagggactgaaaggaaaattcaaaattacaggtcaagctattttaggaatttttgtcggaattatgttactaacaagtagtgatataactatagttgatttttcctctataaatgatatcaatagtattgaaaattttcaatctaatgagataaaatcatttaagacaacaaccccattctttaaaaataatgagttagactatgcccttatatctaatgctatttttaaaaatgaaaatatgttatggttaattcttataccaataatcatatttatagtaactgcagtttcaaattctaataatctgacagatggtttagatggactttcagctggaacttctgcaattattgtattcactcttgggag

SEQ ID NO: 257598 - DNA, 488 bp, Unknown
  Bacterial polypeptide expressing nucleotide sequence isolated from the Sargasso Sea
aatgctttttagtctattttctaacttagttgaaatttttagttttcttaatgtttttaaatatttaactgtaagaactggtctgtcaatgtttacatcgatggtagtagtttttttagttggaggtccgctaattaattatttttcttcaaatcaaattcacaacccaattagagaagatggaccgagtgatcatataatcaaaaaaataggaactcccacaatgggtggtcttatgattttattaggtattttttcaggtgttcttttgtggggtgatttttcaaacccttataattggctcttactgtatatagctggatcttttgggttattaggagcttatgatgattatcaaaaaataaaaagaaataattcaaatggtataacttcaagactaaagattataattcaaataattttagcattaggtggaatttttattttttatttttacagtgggtctaatgagattgagaatttgtatt

SEQ ID NO: 257599 - DNA, 103 bp, Unknown
  Bacterial polypeptide expressing nucleotide sequence isolated from the Sargasso Sea
tttgagaaaaaaggttggccagaatcgactgttgtaataagattttggatcatttctataattcttgcaatgataggattagctactttaaaactgagatgaa

SEQ ID NO: 257600 - DNA, 331 bp, Unknown
  Bacterial polypeptide expressing nucleotide sequence isolated from the Sargasso Sea
tagttacccagcaaaaatatttatgggtgacacaggatctttaagtattggtgcaattctaggttctatagctttattaacagatagcatatttaccttatctattttctcaggaatatttattattgaatcattatcagtaatgattcaagtaagtttttttaaaattacaaaaacattatttcacagaggtaaacgcatatttttaatggctcctttgcaccaccattttgaacttaaaggtgttaaggaacaaaaaatagttgaaaatttttggaaaatcaacattttacttgtaattttaggtatagttttaaaagtcaatttctag

SEQ ID NO: 257601 - DNA, 293 bp, Unknown
  Bacterial polypeptide expressing nucleotide sequence isolated from the Sargasso Sea
tatgatattatatattttagaatacttaaatatcccaggcttatataatttcttcaattatcttactgtaagaactggcttcgctctttttacttcttttttcttcatattgttatttggtcctgcattaattaataagataagttcttatcagtctgtcggacagcctattagggaagacggaccagagtctcatataattgctaaaaagggaacgcctaccatgggggggatcatcatattgctttcccattgttggatctattttgctttgggtaaaccccaggaagttt

SEQ ID NO: 257602 - DNA, 736 bp, Unknown
  Bacterial polypeptide expressing nucleotide sequence isolated from the Sargasso Sea
atgctttatcaatttatactaaactttgttgatacatttggttttttgaatgttttcaaatacattacttttagaactggtttatctttatttacatcattagctattgttctaattattggtggaccttttattaagtatttttcaagccaaaaaattttgaatcctattcgagatgatgggcctgaagagcacattgtaaaaaaaataggaacaccaacaatgggtggtgtaattattttaattggtttattagtttcagttttgtgttggggtgacttaacaaatataaatattcttttttgtatttatattgctatttcgtttggtgttttaggtgcttttgatgattataaaaaaattaaacacagcaattcttctggcgtatcatcaaaatttaaattaatttctcaaattattttagcaattataggtgtttgttattttgtttattatgttgagagtcagaacataacaaacttatattttccattctttaaaaacttaattattaatttgggatggttttttataccatttgctgtgtttgttttaattggttcatctaatgcagttaatctaaccgatggtttggatgggttagcgactgttccagtcattttggttgcaggatgctttgcatttataagttatgtaactggaaatattgttttttctgattacttacaaataccatacataaagggcacaggtgaaatctcaattttctgtggag

SEQ ID NO: 257603 - DNA, 751 bp, Unknown
  Bacterial polypeptide expressing nucleotide sequence isolated from the Sargasso Sea
aatgatattatatctagttcaaatattaaactttgattttccaggaataaacttatttacatatctctcatttagagctggttgtgcgataataacatcactgctaattgttttacttatagggccaaattttataaagagcatgcttatcaaacaaggcaatggtcagcctataagggaagatggcccaaaaagtcatttagattcaaaaaaaggaacaccctctatgggagggttattaattctctctagttttttaattagcacactaatctggggagatatttttaatagctttttgtggatagttattttatcttcaattttattcggtttagttgggtacattgacgacagaaaaaaaattaaggatcaaaatccaaaaggaatttcatcaaaaaataagtttttattacaaatcttatcttcttttattataatttttttaatttctttgcagtcgtcttcagaattagtttacagtatatcaatcccatttgtgaatggagtttttttcttaggattgattctttattattgctttacaagtttcgttattgttggaacatcaaacgcagttaatttaacggatggattagatggattagctatagtcccaataatgattgcaatagctagttttggtttaattacatatctatctggtaattcagtattttcggaatatttaggaataaattatataacatattcaggagagttaagtattctatgctgtgcgcttttgggt

SEQ ID NO: 257604 - DNA, 716 bp, Unknown
  Bacterial polypeptide expressing nucleotide sequence isolated from the Sargasso Sea
tttagatgactacttaagtattaaaaacaaagaaaatacagggttaaaagcaaaagaaaaattcatcttacaaagtttcatctcgataacttttatatattttgcatatgaaaaaaatttaataaatccaataatggaagtctctgaatcatggggaataaatacacatattctaatatttcctattgcttttttagtattagttggcatgagtaattcagtaaatttatctgatggactagatgggctagcggctggatgtagtgcaattgttttttatggattgggaacagaaatattaataaaaaaccagcatgaacttattatttttagtatcttatgttattcaatgtctggcatatgtttaggatttcttaaatacaatagttatcccgcaaaaatatttatgggtgatacaggatctcttagtcttggtgcaattctaggctctatagcgttattaacaaatagcattttcaccttatctattttctcaggaatatttattatagaatctttatcagtaatgattcaagtagggttttttaaaattacaaaaaaattatttcataatgggcaacgcatttttttaatggcacctctgcatcatcattttgaacttaaaggggttaaagaacaaaaaatagttgaaaatttttggaaaactaacatattacttgtgattttaggtatagttttaaaaatcaatctataaa

SEQ ID NO: 257605 - DNA, 571 bp, Unknown
  Bacterial polypeptide expressing nucleotide sequence isolated from the Sargasso Sea
atgtttttatatttttctgaaaatttgatcgagtggttttctccactaaacgcttttacatatattacaaccagaggcattcttgctgcattaacagcactcattatttccttcctatttggtcccaaaatcattttagcactcgagggcaataagattggtgaaacaatcagaaccgatgggccatccagtcactcttcaaaggatgggactccgacgatgggaggacttatgattatcctctcaatcattgtcagcgttcttatatggtcagacttgagtaatgtttataatttagttctcattgcatcgatcatttcctttgggctgattggatttattgatgatttcacaaagcttaaaaaaagcaagaaaggcatgtctgcgaaaacaaaattaattttgcagtttattgtcgcagcttcatctacttactatcttctggggcaagggagtagtgtactcagctcagaagtactaatcccttttacaaataatattcgccttgatctaggttggttctttctgccttttgcaatttttgtgattgttggctcaagcaatgcagtta

SEQ ID NO: 257606 - DNA, 594 bp, Unknown
  Bacterial polypeptide expressing nucleotide sequence isolated from the Sargasso Sea
atatgttatggctaattctaattccaataataatatttatcgtaactgcagtttcaaattcaaataacctgacagatggtcttgatggactttcagctggaacttctgcaattatagtttttactcttggagtttttgcatggacttcaggtaatataattttttcagattatttaaatattatgtatataccaagagtaggagaaattacaatctttattgcttcccttttaggatctttagttggatttctttggtataatacatatccagcttcaatttttatgggggatacaggaagtcttactattggtggattaattgcagtcatttcaatattgataagaaaggaattaatgattccccttctttgcggtgtattcttaattgaagctctttcagtcatttttcaagtaggatattttaaaataaccaaaaaaagattaggcataggtaagagaatttttcttatgtccccaattcatcatcattatcaaaaggtaggatatcatgaaagtaaaattgtttcaagattttggataattggaattttcctagccatattaacaatattaacacttaagatcagatgat

SEQ ID NO: 257607 - DNA, 853 bp, Unknown
  Bacterial polypeptide expressing nucleotide sequence isolated from the Sargasso Sea
atgattgggaagattaaaaagtttaactttgaatctttatttatattaaatacttttgctttaatagttacctcctatttttttaataattttatttttacaggagtttacatattattcttctttatttctatttttacaacgaaaaatggtctaaagattatcaaaaaatttaatttacttcaaaatattaggaatgaaggcccagctaatcactttaaaaaaagtgatactccaacaatgggtgggatttttatgataatcccttttttaattttgcttttgataataactatcaatttaggttctctaaaattattgcttttattacttactatttttggtttttttattacaggatttttagatgattttttaagcattaaaaaaaaagagaacacaggtttaaaaacaaaagagaaatttatcttacaaagtgtcatttcaataatttttatattgttagcctatgaaaaaaatttaatcagtccattaataataatttctgactcctggggaataaatatgaatgttttcatattgcctgtttcttttttagtacttgtgggcataagtaattcggtaaatttgactgatggactagatggattagcagctggatgcagtggaattgtcttttatggattaggaacagaaatattactgaaagaacagcaagaactttttgtttttagcatcttatgtttttcgatgtccggcatatgcttaggatttctcaaatataatagttatcctgcaaaaatatttatgggtgacacaggatctctaagtattggagcaattctgggatctattgcgttattaactaatagcgtttttaccttatctattt

SEQ ID NO: 257608 - DNA, 139 bp, Unknown
  Bacterial polypeptide expressing nucleotide sequence isolated from the Sargasso Sea
gcagcgcatcttcctgatggccccgctgcaccatcatttcgagcgcaagggctgggccgaatccaccatcgtcatccgtttctggatcatcgccgtcgtgctggcacttgccggcctgtcgtcgctgaaacttcgctag

SEQ ID NO: 257609 - DNA, 649 bp, Unknown
  Bacterial polypeptide expressing nucleotide sequence isolated from the Sargasso Sea
tatgttattgccagtatttgaatatctcagtgaattttttggaccatttagagttgtggagttcttatctacaagagcaatattggcaactttaacctcattgcttttttcattgattttaggtccaagattcataaataaaatgaaagatatccaggttagacaagttatcagagaagagggacctaaaacccatctatctaagcaaggaaccccaactatgggaggcactttaatattaagttctattttcttaagtgtcattttatggggagatttagaaaaccgatatttatgggtagcttttttgacaactatctcttttggtattttagggtggatagacgatagattaaaaataaaacatcagtccagtgaaggactaagagcttcatataaaatactgtggcaatctataatagctattactgcttgttcttatttattttttagccatcaaaatcttcaagaagtaagcctaattgttccattcttcaaagatatttctattcctttaggagtaagtttcatagttctttcatattttgtagtcataggtacaagtaatgcagtaaatctaacagatggtctagatggtttagcaattctgcctttgtgtgatggttgctgctggactttggtatcatag

SEQ ID NO: 257610 - DNA, 608 bp, Unknown
  Bacterial polypeptide expressing nucleotide sequence isolated from the Sargasso Sea
aatgctttatcaatttttattaaatttcgttgatacttttagttttttaaatgtatttaaatatttaacttttagaacaggtttgtcttttttcacctcgctggttattgtgctgattattggaagtccttttattaaatttttttcaaaacaaaaaattttaaatccaatccgcgacgatggacctgaagatcatatagttaaaaaaattggcacaccaacaatgggaggtttgataattttatttggcttattaatatcggtattattttgggcagatttatcaaatattaatattttattttgtatctacatagcaattacttttggtttattaggagcatatgatgactttaaaaagatcaaatatagcaactcatcaggaacttctttaaagtttaaaataacttcacaaataatatttgcaattattggtgtaagtttttttgcttattttaacgattatcaggatttaaataatttatattttccattctttaaaaatttaatcttaaaccttggatggttttttataccttttgcaatattcgtaatcataggttcatctaatgctgttaatcttacggatggattagatggtctagcaa

SEQ ID NO: 257611 - DNA, 214 bp, Unknown
  Bacterial polypeptide expressing nucleotide sequence isolated from the Sargasso Sea
tgggattataggaggcttgtttgttctagaaacagtttcagttattattcaggtagtttcgtttaaacttaccgggaaaagagtatttatgatggcacctttacaccatcattttgaaaagaagggatgggcagagtctaccgttgttattagattttggataatatctataattttagcattgataggtttggctacattaaaattacgttaa

SEQ ID NO: 257612 - DNA, 121 bp, Unknown
  Bacterial polypeptide expressing nucleotide sequence isolated from the Sargasso Sea
gcgccaatacaccatcattttgaaaaaaaagggtgggcagagtccacaatagttataaggttctggatcatagccataattttagctttagtaggactagcaacacttaaattaagataat

SEQ ID NO: 257613 - DNA, 940 bp, Unknown
  Bacterial polypeptide expressing nucleotide sequence isolated from the Sargasso Sea
tgtagatatattttcatttttaaatgtatttaaatatattacttttagaactggtttggctatgtttacatctctaattattgttttattaattggtaatccttttattagatattttgcaaataaagatataacaaatccaattagagatgatggcccttcagatcatataatcaaaaaaattggtacaccaacaatgggtggtcttattatcttaacgggtttattgatttccgtattaatgtggggtgatttaaaaaatatttatataatttttgctttgtatatagctatatcatttggattactgggtgcatatgatgattatagaaaaataaaatttaaaaattcttcaggcatctcttcaaaactaaaaataatgattcagataataatagcatttataggaatagtctttttgacaaaatttacagataatgaacaattattaaatctcttttttccattttttaaaaatttaattattaatttaggatggttttttattccgttcgctatttttgttattgtaggttcatctaatgccgtaaatttaactgatggtcttgatggtttggctacggttcctgttattttagtcgcttcatgttttgcttttattagctacataactggaaatatagttttttctgattatttacaaattccatatattcaaggaactggagaagtttcaatattttgtggagctataattggagcttgtttaggttttttatggtttaatgctcctcctgcaaaaatatttatgggggataccggatcattatctttaggcggatctcttggagcagtaggaataattacaaagcatgaaattgttttagctatcactggaggcttattcgttttggaagctgtatcagttatggttcaagttatttcctacaagcttactggcaaaagaatttttaaaatg

SEQ ID NO: 257614 - DNA, 650 bp, Unknown
  Bacterial polypeptide expressing nucleotide sequence isolated from the Sargasso Sea
atttattctaacttactacgtaaatccagctgagttaaaaaatttatattttccattttttaagaatctagtacttaatcttggctggttttttattccgttttatttatttataattgttggatcttctaatgctgtaaatttaactgatggtttagatggtttagcaacagttccagtaatactagttgcttcatgctttgcatttattagctatgtaactggcaatatagttttttcagaatacttgcacattccctatattgaaggagttggtgaagtcgcagtgttttgtggatctattattggagcttgcattggttttttgtggtttaatgctccaccagcaaaaatatttatgggagatacggggtcacttgctttaggaggatctctaggagctgtaggaataataactaaacatgaaattgtactagctattactggtggattgtttgttttagaggcggtttcagtgattgtacaagttgtttcatacaagttaactggaaaaagaatttttaaaatggctccaattcatcatcactttgagaaaaaaggttggccagagtcaactgttgtagttaggttttggattatatcaattattttagcaatgataggattagcaacactcaaattaagataat

SEQ ID NO: 257615 - DNA, 859 bp, Unknown
  Bacterial polypeptide expressing nucleotide sequence isolated from the Sargasso Sea
tattttaaagttaaacaaaaattaggacaaccaataagaaatgatggtccaaaatggcagatagaagcaaaaaaaggtactccaacgatgggaggcgctttaattttatttgcattaactgtatccgtaatactgtggacagacttatttaatatttatttatggctagtattattcattacgctgagctttggtttaattgggttcatagatgattatttaaagcttaagaaattttcattcaaaggtttatctggtaaaattaagataattatacaaatttttatagccttaatattttgttacttattgttattgttttcagaacagaacaacacgcagcttttatttccaatatttaaaaacctttatatagacttaggatatttttggttcatttttggtatgttggtaatagtaggttcatctaactctgtaaatttaactgatgggttagatgggcttgcaattgtgccaataatgatagttttatcaactttttcaataattgcatatctagtgggaaatgcaatttattcagattatttaaatttaacttatatcagtggagtaggtgaaatagctgtattttgcgcagcctttattggagcaggattaggttttttatggtttaatgctccacctgcaaagatatttatgggagatactggttcattatcagctggggcagctattggggcaataagtgtaataacaaaaaatgagttgatattactagtagcaggtggattatttgttttggaagcaatttcagtaattgttcaagtggcttcatttaaattaactggaaaaagagtttttagaatggctcctcttcatcatcatttgagcaaaaagg

SEQ ID NO: 257616 - DNA, 445 bp, Unknown
  Bacterial polypeptide expressing nucleotide sequence isolated from the Sargasso Sea
gcttatttgttatgtagttggaaatacaattttctctgattatctccaaattcaatatattcctgacgttggagagctctcaatcttttgcggatcaatcgtaggctcttgtctcggattcctttggtataatgcgcctccagccaaaatttttatgggagatactggttctctatctttaggagggtcacttgcagctatagcgattattgttaaacatgaaattgtattagctataattggtggtctgtttgttctagagactgtttctgtaattattcaggttatttcttttaaattaacaggaaagagaatttttaaaatggcgccaatacaccaccattttgagcaaaaaggttgggctgaatcaacaatagtaatccgtttctggattattgctattattttagctttagtagggttggctactttaaaactcaggtag

SEQ ID NO: 257617 - DNA, 588 bp, Unknown
  Bacterial polypeptide expressing nucleotide sequence isolated from the Sargasso Sea
aaaatctaataattaatttaggatggtttttccttccattttatttatttgttattgtaggttcctcaaatgctgttaatttgactgatggattggatggtttggcgacagtgcccgtaatattggttgcagcatgttttgcttttattagttatgtaacaggaaatattgttttttcaggatatttacaaatcacatatatcgaaggagtaggagaagcatccattttttgtggagcaataataggttcttgtttaggtttcttatggtttaatgcgccaccggcaaagatatttatgggtgatactgggtctttagcattaggtggatcattaggagcagttggtataattactaaacacgaaattgttcttgcaattacaggtggactatttgtactagaagcagtttcagtaatcgcacaagtgatatcatttaaacttactggtaagagaatatttaaaatggcaccaatacatcatcattttgaaaaaaaaggctggcctgagtctactgtagttattagattttggattatatcaattatcttggcaatgataggtttggcaacattaaaactaagataat

SEQ ID NO: 257618 - DNA, 595 bp, Unknown
  Bacterial polypeptide expressing nucleotide sequence isolated from the Sargasso Sea
ttcttttatcctatcatttatgctatttttattattttagttgtttcagcaacctcaaatgcagtaaatcttactgacggtcttgatggtttagctgccggattgttagctatttcagtaagtgtatttggaataatagcatacatatcaggaagagttgattttaccgattatttatatattgcttatttgccactagcaagtgaactgacaatctttgctactgcattttttggtggttgtcttggcttcttatggtttaatgcaaagcctgccgagatttttatgggagatgtaggatcattgtctactggagctgcgttgggaacattagcaattcttcttaaaaaagaagtcttattattaattgtcggaggagtctttgttattgaaaccttatctgttatcattcaggttttatattttagatatacgaaaaacaaatacggtactggtaaaaaattctttctaatggcaccaattcatcatcattttgagctaaaaggatggcctgaatcaagagtcgttacaagattttggataataggcatactgtttgctctaatgtctttgactactttcaaagttagataac

SEQ ID NO: 257619 - DNA, 927 bp, Unknown
  Bacterial polypeptide expressing nucleotide sequence isolated from the Sargasso Sea
aatggagaggtttatagaagaatgatagaaattttaggtgcatatttactaaatttcgatccaggttttaatattttgcgatatttaacttttagaacactcggcggtacaatcacagctctgacattatcaattttacttggtccgatttttataaattttttaaaaaatattcaattctctcaagtcattagaaaggagggacctcaatctcatcagaaaaagtctggtactcctactatgggtggtttgattattattgcttcagtaataatctcaacacttatctgggctgatttatccaatgcttatgtatggacacttatcattgtgacaattttattttcaatagttggtttaatcgatgattatttaaagatttctaataaaaattcaaaaggattatctggcaaaatgaagcttcttcttcaaactggctttgcactgattactctcataatttacttgtattattcaaccgatagccaactatatttcattctaccatttaacaaaaactttatatttgatatatctattccattatttttattaattagcacttttgtgattgttggatcttcaaatgctgtcaatttaactgatggccttgatgggctagctattttaccaacagttttgataatgggtggtttgggattagttgcatatgcaatgggtaacatcattattgctgattacctttacattcctcatttacctcaagcaggtgaattaattgtggttgcaggatcatttatcggagcaggcattggctttttatggtacaacacatatccagctcaagtatttatgggtgatgttggatcgttaactcttggagctatacttggaactttttctgtagtgctcagacaagaaataatctttgcatttatggcaggtgttttcataatggaaacgtta

SEQ ID NO: 257620 - DNA, 564 bp, Unknown
  Bacterial polypeptide expressing nucleotide sequence isolated from the Sargasso Sea
ttatttttatttttactgggatgtttgtattaataggatcttctaatgcggtcaacttgactgatggattggatgggcttgccattcttccaacagttttaattggcggcgccttgggattaattgcttatgctatgggtaatcaacttattgctgattatttatatctacctcatcttcctctgtctggagagttaatagttttttgtggtgctttaattggatcgggaataggctttctatggtacaacacctatccagcccaagtttttatgggtgatattggttccttaactcttggagcaattttagggataattgcaataatattgcgacatgaattggtcttcgctattatggctggcgtttttgttgtagaaacacttagcgttgcgattcaggtaatttcatacaagacaagaggcaaaagagtatttttgatggccccaattcaccaccattatgaattaaaaggctgggcagagcctaaaataatagttagattctggatagtaactttagttttaattttaattgccttggcaactttaaagcttagataac

SEQ ID NO: 257621 - DNA, 508 bp, Unknown
  Bacterial polypeptide expressing nucleotide sequence isolated from the Sargasso Sea
cggattggccgtcggagcatcggtgatgagcttcctggcgtatgtcctgctcgcaatttggcagtacggacagaactgttcgttcgttgattccgaattctgttacaccacacagaatcccctggacctcgggatccttgcggcgtctgccgcgggagcgtgcttcggattcctatggtggaacacaacgccagcgcggatctttatgggcgataccggatctctcgccctcggcggaggcatcgccgggctagccattctcagtcgtaccgagttgctcctgcccttcatcgccgggcttttcttgatcaccacggtgtcggtcatcttgcaggtgggttccttccgcctcaccgggcgccgggtatttcacatggccccgttgcaccaccacttcgagatgatcggctggcccgagattcaaatcgtggtgaggttgtggatcgttcagggattgtgcatcggagcgggattgacgctcttctacgccgagtgggtacgtgcgtga

SEQ ID NO: 257622 - DNA, 814 bp, Unknown
  Bacterial polypeptide expressing nucleotide sequence isolated from the Sargasso Sea
gatgctttatttgacaaattatttagctcaattcgaatctagtttttatgttttcgattacataactatccgagcgattttgggagcattaacatcattgatcatttcaatggttttgggtccaaggatgatagcaaagtttcaatcaattcagctcaatcagcctgttagagatgatggacctgaaagtcataaagaaaaaattggcacaccaacaatgggtggcgctctgattattatgtcagtttcactggcaacgttaatgtgggcagaaataaataacccatttatatggataatacttttcgtgactatttcatttggtacccttggatatattgatgactatcagaaaattatcaaaaacaattctgacggaatttcagcatcaaaaaaactattttggcaatctcttattgcaatcatagtaataacgcttctgataaaatttaatacagattcgaattcaacgtctttattaatcccctacttgaaaaatacaatgattgagcttggtgttttgcatctgattatttcatttttctttattattggtttcagcaatgctgtaaatctaactgatgggttggatggattagcaattatgccaacagttcttgttgccggcgctttaggtattttttcatatgtcactggaaatataaatttttcaacctatcttgaaattccatatgtcgccggcgctggagagatctttgttttttgtgcagcactggttggtgctgggttgggattcttatggttcaatacatacccagctcaagtctttatgggagacgttgggtcattatct

SEQ ID NO: 257623 - DNA, 1033 bp, Unknown
  Bacterial polypeptide expressing nucleotide sequence isolated from the Sargasso Sea
atttaaatacttaacatttagaacaggtctttcagttattacctcgttgatagtagtttttattattggaggaccgttaataaaattattttcagaaaagatgattacggggccaataagacaagatggaccaattgaccatataataaaaaaatctggaacaccaactatgggtggagtgatcatcataattggaattttatccagcactttattgtgggcagatttgaataatgtttatgtttggacattaatttttgtttcactgtctttaggagcattaggatttttagatgatatgcttaaaattaaatttaaaaattcaaggggacttaaatctagttacaaattttttggtcaaattttaatcggtgttattactttattgattttaattaagtattctaatcacggatatttgtataatttgtattttccattttttaaaaatttaatatggaacatgggtttgttttttatcccttttggtttgattgtaattatcggcgcttctaatgctgtaaacttaacagacggtttagacggtttagcgacagtgcctgtaatgttggtagcgttatcatttacattaatttcatacgttgttggaaatacaattttttcagaatatttgcagatacaatatatcccagatgtaggcgaattatccattttttgtggatcagtagttggatcttgtttaggatttctttggtacaatgcacctccagcaaaaatttttatgggagatacaggatcactctctctaggtggttcactcgctgctatagcaataattgtaaaacatgagatcgttttggctataataggtggcctgtttgttttggaaactgtctcagtcataatacaagtcgcttcctttaaattgactggcaaaagaatctttaaaatggcgccgatacaccaccattttgaaaaaaaaggatgggctgagtcaacaattgtaattcgattttggataatcgctattattttagcattaattggacttgctacattaaagttgaggtaa

SEQ ID NO: 257624 - DNA, 865 bp, Unknown
  Bacterial polypeptide expressing nucleotide sequence isolated from the Sargasso Sea
tatgatattatatttaattgagtatttaaatcttggagcactaaataattttttaaattatttaacagttagaacaggtttggcattgtttacttcatttttttttattctattttttggtccatttttaattaaaagaattggatcataccaatcaattggtcagcctattagagaagacggtcctgagtctcacttagtagctaaaaaagggactccaacaatgggaggaattataattttgatttctatagtcggatcaatgattctgtgggtcaatcctgaaagctatatatcttggccaattatattccttctgatatcttttggattggttggttttgcagatgattttagcaaagttaagaaaaaatcgagtaatggaatttctgcgaaaataagaattttttttcaaataataatatcgttgatatttatttactggataacaacttataatgaaattgatattcggttattatccttaccctttcttaaggatatatttctcaatttgggtttattttcaattccattcgttatattggtaattctaggatcagcaaatgcagttaatctcacagacggtctcgatgggctagcaattgtccctattatgattgtctccgcgacttttgctgtaatctgctatttggcaggaaatatgattttttcgaattatctttacattaattatttacctggagcgggtgaattaactgtactttgtgcagccataattggatccgctcttggctttttatggtacaacgcgcctcctgcaatggtctttatgggcgatacaggctctctatcgctaggcgcttcattgggaggtataagtgttctaactaagcaagaaatt

SEQ ID NO: 257625 - DNA, 862 bp, Unknown
  Bacterial polypeptide expressing nucleotide sequence isolated from the Sargasso Sea
tgggaggtgtttaatattaattggattgtttgcaggagtattcttatggggcgacctttacaacccatataattggttattaatttttataactctttcttttggaattttaggagcattcgatgactttaaaaaaataaagaataataattcaaaaggtatttcctcaaaaataaaattagtaattcaaatattacttgctcttctttctttatttattttttataattttatagaaaccgatttaaaaactaatctttatttcccattttttaaaaatttaatagtaaatttaggttggttttttatacctttttatttatttgtaattgtaggttcttctaatgctgttaatttaacagacggtctggatggtcttgcaactgtacctgttattttagttgcaggatgctttgctttcataagttatgtatctggcaatgtaatttttgcagattatttattgataccttatattgaaggcgttggagaagtgtcagtattttgtggagctataattggagcatcaataggatttttatggtttaatgctccaccagcaaaaatctttatgggcgatactggctcactagctttgggaggatctttaggagcggttggagtagttacgaaacacgaaatagtgttagctattacaggaggattgtttgtgttagaagcagtatcagtcatcgtgcaggttatttcatttaaattaacaggcaaaagaatttttatgatggctcctctacaccaccattttgaaaaaaaagggtgggctgagtccactgttgttatcagattttggataatttcactaattctagcaatgataggactcgcaacattaaaactaagataa

SEQ ID NO: 257626 - DNA, 892 bp, Unknown
  Bacterial polypeptide expressing nucleotide sequence isolated from the Sargasso Sea
aatgctttatcaatttttattaaattttgttgatacttttgggttcttgaatgtttttaaatatttaacatttagaacaggtttagctctttttacttctctgattatagttctattaattggtggtcctttcatcaaattcttctctcaacaaaaaatattaaacccaataagagacgatgggcccgaagaccacattatcaaaaaaataggcacccccacaatgggcggtgtgatcattttatttggtttattaatctcagttttgttttggggtgatttatcaaatattaatattctgttttgtatatatatagctatttcctttggcttacttggtgcatttgatgattataaaaaaattaaatataataattcttcaggtatttcatcaaaatttaaatttataactcaaattttcattactgttgttggtgttagtttttttgtttactttgtagattatcaagaaattacaaacttatattttcctttttttaaaaatttaatcataaatttagggtggttctttattcctttttcagtatttgtaataattggatcctcaaatgccgtaaatttaaccgatggacttgatgggttagctacagtgccagtgatattagttgcaggttgtttcgcttttattagttatgtaactggaaatgttgttttttctaactacttacaaataccttatattgaaaatacaggagaaatttcaattttttgtggggcgattattggttcatgtttaggatttctttggtttaatgctcctcctgcaaaaatctttatgggagatacaggatcattatctttaggaggatccttaggagctgtaggaataattactaaacatgaaattgttttagctatcactggaggcctt

SEQ ID NO: 257627 - DNA, 921 bp, Unknown
  Bacterial polypeptide expressing nucleotide sequence isolated from the Sargasso Sea
gaactccaacaatgggaggtttatttatcgtttttggcactattgctggctactcattatctcatataaatttctggactataggagaagggttcaaagttgaattaacttctatgaatgtaaatgttattttactttttttacttgcttttctgatggcaatggtaggttttattgacgattatttaaaggtaaaagctggaagaaatctaggattaaaacctactcaaaaatttgctttacaatttttgattggttgtattagtgcttattattttttatttttaaattatgattcaaacttctacttttttagtggtttaggttttgatataggcattgttaaatggttgataattatattttttattattggtattacaaattcggtaaattttacagacggcttagatggattggttgccggaagtagcgcaattagttttggagggatattaattatctccttctggatctatcgtcatccaacatattattcaaattttataggtgatgatttcttaacagttgaactttcactactaatttctgcagtagctggcgcttgtttaggatttttatggtggaataccaatcctgcaaaaattataatgggagatgtaggatcgcatttcttaggctctctattcccattaattttgtttgctctgggtgcagatggattaatatttttcttttgttttctttttattctcgagggagtttctgtagttgttcaaatactttcattcaaatatagacaaaaaagagttttcaaaatggcaccaattcaccatcattttgaaatgagtaattgggcggaaacaacaattattgtgaggttttggataattaatggtattgctgtagttatcggcttgggtttgttctatgcagattatgtattatttgggcaatgaa

SEQ ID NO: 257628 - DNA, 445 bp, Unknown
  Bacterial polypeptide expressing nucleotide sequence isolated from the Sargasso Sea
atttttaaaaatcggttggccctcccgatttttaaaaatttgttagttgatcttgggtttttatttgttccttttgcaatgattgtaattgttgggtcggcgaatgccgtaaatttaactgatggcttggacggattagccataatgccagtgatgattgcagccggcgctctgggggtaattgcgtatgctgtgggaagagtagattttaccgaatatttggatgttcattatgtcaatggtacgggggaaatcttaattctctgttctgggatttttggtgccggattaggttttctctggtataatgcaccaccagccgccgtttttatgggtgataccgggtctttggcactcgggggggctcttggtgcagttgccgttgccacgaaacatgaaatagttctggcaattgttggtgggctttttgttgttgaggcgctct

SEQ ID NO: 257629 - DNA, 658 bp, Unknown
  Bacterial polypeptide expressing nucleotide sequence isolated from the Sargasso Sea
attgtttaattatttatcaactgaatatataagtttattttcctatttaaatttatttaattatattacttttagaactggagcggctatattaacatctttatttttttctttaatatttggcgagctaataattacaaaactaaaaaaaattcaaccgataggtcagccaataagagaagatggacctgaaaatcatataataaaaaaatccggaactccaactatgggtggagttttaattttaagcagtattactatttctatttttttgtgggctgatctttctaataaatttatttggatatgttttttttcatcaattatatttgggttgataggatttgttgatgattatcaaaaggttaaatatagaaatcacaaaggtattaaggcttctactagaataatatttcaggttttcataagtttaattattatttattttacgcaacaattgctttctgaaaattataaaggctctttaagcttaccattttttaaagatcttatattaaatttaggaatattttattatattgtgggagtaattgtaattgttggatcagcaaatgcagtaaatttgacagatggacttgatggcttagctatagttcctgttatgatagtggctttatcatttgcattttattcttat

SEQ ID NO: 257630 - DNA, 789 bp, Unknown
  Bacterial polypeptide expressing nucleotide sequence isolated from the Sargasso Sea
gcactcctacaatgggggtggagtaataattttaatcggaattatttctagcacacttctttgggctgatttaaaaaatatttatgtttggacattgatttttgtatctgtaagtctaggtagtctaggtcttttagatgatattttgaaaataaaatataaaaattcaagtggtctaaaatctaggtacaaattttttggacaacttattattagttctttagctcttcttatattaataaaatttactaatcatcaatatttatttgatctttattttcctttttttaaaaatttaatttggcatatgggcttattctttgtaccgtttggcttattcgtcattattggagcatcaaacgcagttaatcttactgatggattagatgggttggctacagtaccagttatgttggttgctttatcatttacacttatatcttacgtagtaggcaacacaattttttctgagtatcttcaaatacaatacatacctgacacaggagaattatccatattttgtggctcaatagttggatcttgtcttggctttctttggtacaacgcgccaccagcaaaaatttttatgggggacacaggttcactttctttaggaggctcattggctgcaattgctattattgttaagcacgaaattgttctcgcaattattggaggcttatttgtcttagagacagtatcagtaattatacaggttatatcatttaaattgactggaaaaagaattttcaaaatggcccctatccaccatcactttgaaaaaaaagg

SEQ ID NO: 257631 - DNA, 331 bp, Unknown
  Bacterial polypeptide expressing nucleotide sequence isolated from the Sargasso Sea
ggttttctttggtacaatgcacctcccgctaaaattttcatgggagacacaggctcattatctttaggaggttcattagctgcagttgctataattgcaaaacatgaaattgtgcttgcaatagttggagggttatttgttcttgaaactgtatcagtgattattcaagttatttcatttaaacttactggtaaaagaatttttaaaatggcgccaatccatcatcattttgaacaaaagggttgggctgaatcaacaattgtaattcgattttggattatagcaataatactagcattggttgggctagcgacattaaaattacgttagt

SEQ ID NO: 257632 - DNA, 634 bp, Unknown
  Bacterial polypeptide expressing nucleotide sequence isolated from the Sargasso Sea
tttaaatgattatcaagatttaaataatttatattttccattctttaaaaatttaatcgtaaaccttggatggttttttataccatttgcaatattagtaattattggttcgtcaaatgcggttaaccttacggatggattagatggtctagcgacagtgcctgtaatattagttgcagcatgttttgcttttataagttatgttactggaaacatagtattttcaaattatttacaaattccctatatagaaggaactggtgaagtatcaattttttgtggtgcaattattggctcttgtttaggcttcttatggtttaatgctccacctgctaaaatttttatgggtgacactggctcattgtctcttggaggatctttaggtgcagtaggaattatcacaaagcatgaaattgttttagctattactggtggactttttgtactggaggcagtttcagtaatggttcaggtgatctcgttcaaactcactggaaaaagaatttttagaatggcgcctattcatcatcattttgagaaaaagggatggccagagtctacagttgtaattaggttttggattatctctattattctagcaatgattggtttagctaccttaaaattaagataa

SEQ ID NO: 257633 - DNA, 841 bp, Unknown
  Bacterial polypeptide expressing nucleotide sequence isolated from the Sargasso Sea
tggtgattacaatagcaactttgttttggggggattgagcaatcgatacatatggttggtcttgtctgtcacatgtgccttcggcttgattggctggttggatgattatctaaagattcttagacaaaatagtgatggcctttcggcgaaatggaagatattttggcaaacaattgttgcattgtccgcgtcatcttatttatacacgacggccgatatggccattcaaaccgatctaatagtaccgttttttaaggaagtagctttgcctctgggtattgggtttattgtctttagctctttaatgttggtagggatgagtaatgcggtaaacctgacggatggcttagatggactagctatcttaccaacagtcatggttggtggaggcttaggtttaatcgcttatttggttgggaacagcgaatatgcaacttatttgcaaattccatatatccctggaacaggggagcttagcgtattttgtggcgccttgattggcgctggccttggatttttgtggttcaatacttacccagctcaagtgtttatgggggatgtcggctctttggcgcttggcgctgcattagcaattgttgcgattgtaacgaggcatgaaatcgttttgctgataatgggaggattattcgttctcgaaacagcgagcgtcattgtccaggttatatcctaccgcgttacaggaagacgtgtttttcgcatggctcctattcatcatcactttgaacttaaaggctgggctgaacccaaggtaatagttaggttttggatcattactgtggttttggtgaccattggcatctccagtttgaaattacgctaa

SEQ ID NO: 257634 - DNA, 296 bp, Unknown
  Bacterial polypeptide expressing nucleotide sequence isolated from the Sargasso Sea
ttttatgggtgacaccggatcactttcgcttggtggatcgcttggggctgtatcaattataacgaaacacgaaattgttttagcaattacaggaggtttatttgttttcgaggctatatcggtaatcgtacaagtattatcttataaattaactggaaaaagaatttttaaaatggcaccaatacaccaccattttgagaaaaagggatgggaagagtcaacggtcgttataagattttggataatttcaataattctagcaatgataggacttgcaacacttaaacttagataat

SEQ ID NO: 257635 - DNA, 336 bp, Unknown
  Bacterial polypeptide expressing nucleotide sequence isolated from the Sargasso Sea
ggttaggttttctgtggtttaacgctccaccagctgaaatctttatgggtgatactggctcattatctctaggaggtgttataggtgtatctagtgtagctactagacatgaactagtattagttataattggtggtctttttgttgtggaaacaatttctgtaatcttacaagttggttattttaagttaactggaaaaagaatctttcttatggctcctcttcaccatcattttgaaaaaagaggatgggaagagtcaacaatagttatcagattttggataattgcagttattttggctcttattggcttatcaactctgaaattgagataat

SEQ ID NO: 257636 - DNA, 562 bp, Unknown
  Bacterial polypeptide expressing nucleotide sequence isolated from the Sargasso Sea
ctttataccatggtcaatttttattcttgttggctcatcaaatgcagtgaatctaacagatggtttagatgggttggctatactaccatgtatattaattgcatctgcgtttgtgatatttgcttatgttcatgggaatatgaatatatcagaatatttgctaataccttacgtggagggttccggagaggttgctatatttgctgcatctctggttggagcaggactaggttttctatggtttaattcatatccagcagagatatttatgggtgattgcggatcattatctctaggaagctcactcggattgcttgctgttatccttaagcaagaacttgcctttgcaattatgagtggaatatttatagctgaagtattgtctgtaattattcaagttatgtcatttaaattaaggaaaggtaaaagagttttcaagatggctccactccatcatcattacgagctttcaggattatcagagcctaagatcatcatgagattttggataattacatttatcttagttctcatagctttatcaacacttaaaataagatga

SEQ ID NO: 257637 - DNA, 361 bp, Unknown
  Bacterial polypeptide expressing nucleotide sequence isolated from the Sargasso Sea
tttttgtggagcaatcattggagcttgcttaggatttttatggtttaatgctcctccagctaaaatatttatgggagacacaggctctttatccttaggtggttctttaggagcaataggtattataacaaaacatgagattgttttagcaataacaggaggtctttttgttttagaagcagtctctgtaatggttcaggtaatttcatttaaacttacaggaaagagaatttttagaatggcacccatacaccatcattttgaaaaaaaaggttggcctgagtctactgtagttattagattttggattatctcaataattttagcaatgataggacttgctacattaaaattaagataa

SEQ ID NO: 257638 - DNA, 166 bp, Unknown
  Bacterial polypeptide expressing nucleotide sequence isolated from the Sargasso Sea
atacaaaaaacaaataccggtactgggtaaaaaattctttctaatggcaccaattcatcatcattttgagctgaaaggatggcctgaatcaagagtcgttacaagattttggataataggcatactttttgctctaatgtctttgactactttcaaagtaagataa

SEQ ID NO: 257639 - DNA, 841 bp, Unknown
  Bacterial polypeptide expressing nucleotide sequence isolated from the Sargasso Sea
aatgctttatagtttgttctctagtttagtagaattttttagtttttttaatgtttttaaatatttaactgtaagaactggtctatcgatgtttacatccatgatagtagtctttttaatcggcaacccattcatcaactatttttcaataaaaaaaatccatgacccaattcgagcagatggtccaagcgaacatataattaaaaaaatcggtacacctacaatgggtggtcttatgatattattaggagttttttctggagttttattatggggagatctttcaaatccttataattggtttttaatttatatagcaggaacttttggattattaggtgcatacgatgattatcaaaaaattaaaaacaataattctaatggcgtatctttaaaatttaaaattattttacaaataacgctggcattaattggaattttgattctttattatttttctgggtctaatgaattaaaaaatctttattttccattttttaaaaatctagttctaaatttgggctggttctttattcctttttatctatttataatagttgggtcatcaaatgcagtaaatttaactgatggactagatggattagcaactgttccagtaattttagtagccgcttgctttgcatttataagttatgtttcaggtaacatagtattttcagattatcttcaaataccttatatacaaggtgttggagaagcatcaatcttttgtgggtcaattattggagcttgccttggttttttatggtttaatgctccacctgcaaaaattttcatgggagatacaggatcacttgcactaggagggtctttaggtgca

SEQ ID NO: 257640 - DNA, 325 bp, Unknown
  Bacterial polypeptide expressing nucleotide sequence isolated from the Sargasso Sea
tctttggtacaactcatatccagcacaggtatttatgggagatgtaggttctttatcgttaggtgcaatacttgcaactatagccgtgcttcttaggttagagatagtttatgcaattatgggtggagtatttgttatggaggcactctcagtgatgattcaagtagcatcgtacaaaatttttaaaaaaagggtattcaaaatgtctccaatacatcatcactttgaattaaaagggtggccagagcctaaaattatagttcgattttggataattacttttatacttgttttgattgcacttgcgtcactgaaaatcagataa

SEQ ID NO: 257641 - DNA, 640 bp, Unknown
  Bacterial polypeptide expressing nucleotide sequence isolated from the Sargasso Sea
tattttttacagtgggtctaatgaacttcaaaacctctattttccattttttaaaaacttaataatcaatataggttggtttttcatcccattttatttatttgttattgtaggatcatctaatgcagttaacttgacagatggattagatggtttagctactgtgccagtaattttagttgcagcatgttttgcctttattagttatgtcacaggaaatatagttttttcagggtatttacaaattacatatattgagggtgtaggagaagcatcaattttttgtggagcaataataggatcttgtttaggtttcttatggtttaatgcaccaccagctaaaatatttatgggggatacaggctccttagctttaggaggatcattgggggcagttggtattattacgaaacacgaaattgttcttgcaattacaggagggctctttgttttagaagccgtttcagtaattgctcaagtgatatcattcaaacttactggcaaaagaatatttaaaatggcaccgatacaccatcactttgaaaaaaaaggatggccagaatctacagtggttattagattttggatcatatcaattatactagctatgattggtctagcaacattaaaactaagataa

SEQ ID NO: 257642 - DNA, 853 bp, Unknown
  Bacterial polypeptide expressing nucleotide sequence isolated from the Sargasso Sea
agttttcttaacgttttcaaatatttaactgttaggactggattatcaatgttcacttctatggtagttgtcttcttagttgggggtccacttatcaattatttttcaacacatcaaattcatgaccccattagagaagatggaccaagtgaacatatagttaaaaaaataggcactcctacgatgggaggtctaatgattttgcttggtatattttcaggagtacttttatggggtgacttttcaaacccatatatttggtttttactctatatagcaggatcttttggattacttggagtttacgatgattatcaaaaaataaaaaaaaataattcaaatggtattagttcaaaagttaaaattataatacaaatttttttggcatcaattggaatattaatttattatttttacactgggtctaatgaaattacaaatttatatttcccgttttttaaaaatctagtaataaatttaggttggttttttataccattttacttatttgtcattgttggttcttccaatgcagttaatttaacagatggtttagatggtttagccacagtaccagttatattagttgcaggatgttttgcatttattagttacgtaacgggaaatatagtattttcaggatatttacaaattacttacatagatggagtaggagaagcatcaatattttgtggggcaataataggttcttgtttgggttttctatggtttaatgcacctcctgctaagatatttatgggagatacgggatcattagcattaggaggatctctaggggctgttggaattattactaaacatgaaattgttctagcaatcaccggaggcctat

SEQ ID NO: 257643 - DNA, 517 bp, Unknown
  Bacterial polypeptide expressing nucleotide sequence isolated from the Sargasso Sea
attctgtaatttcacagatgggctagatggtctggctacaggaagtctcataatatccttttctgctattacaatttttacatatattgcaggaaatagtgtttattcgtcttatttgtatctcccatttatatctaatgtaggagagatagttgtctttatttcagccttaataggaagtcttctgggctttttgtggtataactcaaatcctgcacaaatttttatgggagacacaggctcaataccaatgggtgcgaccttaggattagtagccattttaataaagcaagaatttctcttacttataattggtggaatctttgtaatagaagcattatcagttattactcaaatcttttccttcagaatatttaacaaaaggatatttctaatcgcaccaatacaccatcattttgagaaattagggattaaagaatcaaaaattgttattagattttggattataggaataattttctcattaatagcaattgcaacattaaaaataagataa

SEQ ID NO: 257644 - DNA, 466 bp, Unknown
  Bacterial polypeptide expressing nucleotide sequence isolated from the Sargasso Sea
gattgcggcgggcagcttcggtttaatttcttatttggtaggcaatgcagtatttgcaaactatttattaatttttgccgtcccagggtcaggtgaattagcagtattttgtggtgccttagttggtgcagctttgggttttttatggttcaacgcacccccggcaatggttttcatgggagacactggatcgctatctattggcggtgctttgggaggtatatctattgttaccaaacacgaactagtactggcaattattggcggcttattcgttttagaaacagtatcagtaatagttcaagtgacatcttttaaacttacaggacgaagggtttttcgtatggcccccctccatcaccatttcgaacaaaaaggatgggctgagccaactattgtcatacgtttctggatcattgcaaccgttctagcccttgcaggactcgctacacttaaactgcgataa

SEQ ID NO: 257645 - DNA, 852 bp, Unknown
  Bacterial polypeptide expressing nucleotide sequence isolated from the Sargasso Sea
ttattctggcggccgtcgtgctttccacactactctgggcagaccttgagaaccgctttatctggattacgctgctgacgtccttggcatttggtctgattggcggactggacgactaccagaaaattcttcgcaaaaactctcggggaatgggatcagggcagaagtttctttggcagagtgttgcggccttcgctgcggcgttggcgctctacctgacagcccaatccccggctgagacgtcgttgatcgtcccgctgtttaaagatgtcgcggtcgagatgggcgttggcttcattcttctcacctggtttgttattgccggcagcagcaatgccgtaaacctgaccgatggcctggacggtttggcaattttgccaagcgtcttagtggccggtgggctgggcgttttcgcctatctcaccggccacgctcttttttccgggtacctcggtattccttttattgccggcgccggtgaggtgttggttctttgtgctgcactggttggggcgggattggggtttttgtggtttaacacctatcctgcccagatcttcatgggcgatatcggcgcgctttctctgggagctgcgttaggcacgattgcagtggtggtccgtcaggaaatcgtactcgccattatgggaggtcttttcgttatcgagaccgtctcagtcatgctgcaggtcgcctcgttccgtcttatcgggcgacggatcttccgcatggcgcctttgcatcatcactttgagcagaaaggctggcgcgagcctcaagtgacggtgcggttttggattatcagcctgatcctggtgttgatcggtttggcaacactcaaggtcaggtaaa

SEQ ID NO: 257646 - DNA, 160 bp, Unknown
  Bacterial polypeptide expressing nucleotide sequence isolated from the Sargasso Sea
catttcttataaattaacgggcaaaagaatttttagaatggccccaattcatcaccactttgagttgaagggttggccagagccaaaagtgatagtgcgtttttggattgtatccttagtgcttgtcgtagtcggtctctcgactttgaagttgagataa

SEQ ID NO: 257647 - DNA, 199 bp, Unknown
  Bacterial polypeptide expressing nucleotide sequence isolated from the Sargasso Sea
ttgtttgttttagaggcagtttcagtaattgttcaagttgtttcatacaagataacaggaaaaagaatttttaaaatggctccaatacatcatcattttgaaaaaaaaggatgggccgagtcaactgttgtagttagattttggattatatcaattattttagcgatgataggacttgctactcttaaattaagataat

SEQ ID NO: 257648 - DNA, 663 bp, Unknown
  Bacterial polypeptide expressing nucleotide sequence isolated from the Sargasso Sea
caaataatagcaataacgcttctgataaaattaatacagattcgaattcaacgtctttattaatcccctacttgaaaaatacaatgattgagcttggtgttttgcatctgattatttcatttttctttattattggttttagcaatgctgtaaatctaactgatgggttggatggattagcaattatgccaacagttcttgttgccggcgctttaggtattttttcatatgtcactggaaatataaatttttcaacctatcttgaaattccatatgtagccggcgctggagagatctttgttttctgtgcagcactggttggtgctgggttgggattcttatggttcaatacatacccagctcaagtctttatgggagacgttgggtcattatctattggtgcatctctgggtgtcatagctgtaataataaaacaagaaattgtcctggtaattatgggtggagtatttgttgctgaaacattatcagtaatgattcaagtcacttcttttaagttaactggaaaaagaattttcaggatggcgccattgcatcatcactatgagctaaaaggatggaaagagccaaaaatcattgtaaggttttggattattactgtgatattagtattaattggtctagcaagcctaaaaataagataga

SEQ ID NO: 257649 - DNA, 732 bp, Unknown
  Bacterial polypeptide expressing nucleotide sequence isolated from the Sargasso Sea
aaaaaattaaaaacaataactcaaatgggatttcttcaaaattaaagatattaattcaaatttttctttgtctaatttcactagttattttttataaatttatagactctgatattaaaacaaatttatattttccattttttaaaaatttagtaattaacttagggtggttttttatccctttttatttatttgttattgttggatcatctaatgctgtaaatctaacagatggtttggatggattagcgacagtgcctgttatattagttgcgggttgttttggttttataagctatgtatcaggaaatattatttttgcggactatttattaatcccttatatcgaggatgttggtgaagtagcagttttttgcggagcaatcataggagcttcgattggttttttatggtttaacgcgccacctgctaaaatatttatgggagatacaggttcattggcattaggtggttctctgggtgcagttggagtagtaacaaaacatgagatagtgttggctataacaggaggattgtttgtattagaggcaatttcagtaattgttcaagttgtttcgtttaaactaacaggtaaaagaatttttatgatggcaccaattcaccatcattttgaaaaaaaaggttgggctgagtctacaatagtcataagattttggatcatatctcttattttagcgatgattggtttagctactttaaaactaagatgaa

SEQ ID NO: 257650 - DNA, 685 bp, Unknown
  Bacterial polypeptide expressing nucleotide sequence isolated from the Sargasso Sea
aatgctttatagtttattttcaagttatgttgaaattttttcatttttaaatgtatttaagtttcttactgttagaacaggattagcaatgtttacatcaatgctagtagtatttttagttggaaatccattcataaattatttttcatctaggcaaatgttagatcctataagagaagatggacctgaagaacatataataaaaaaaattggaactccaacaatgggtggtctattaatattattaggtttattttcaggtgtattattatggggtgatttaaaaaattcctatatatggcttttaatatttattgttggctcttttggtattttgggagcttttgatgattataaaaaaataaaaagtaaaaattcttcaggcatttcatttaaaattaaaataatttggcagataattttagctttagttggagttggaattttaacttttttttcagatactcctgaattaaaaaatttatatttaccattttttaaaaatttagttataaatcttggttggttctttattccactttatgtttttataataataggttcttcaaatgcagttaatcttacagatggattagatggattagcaacagttccagtaatactagttgctgcttgttttgcctttattagttatgttactggaaatattgttttttcagaatat

SEQ ID NO: 257651 - DNA, 619 bp, Unknown
  Bacterial polypeptide expressing nucleotide sequence isolated from the Sargasso Sea
ttagtaaatatagtttttattccattcacgaagggattttttattgatctaggtaatttttactatatttttgctgctttagtaattgttggtagtgcaaatgcagtcaacttaactgatggtttagatggtttggctattggaccaataatgataacaactttatctttcgcattcatcgcttattttacaggtaacttaatttactcagaatatttaaagattccttatgtaagtgacactggagagttagtaattatttgtgcctcattaataggcgcaggcttagggtttctttggtttaatgctcccccagcaatggtgtttatgggagacactggttccttatcaataggcggaactattggggcaattgccgttgcaacaaaacatgaagtaattctctcattaatcggaggaatatttgtactggaggcattatcagtatttgctcaagtaatctcctttaaacttacaggtaaaagaattttcagaatggcaccaatacaccatcattttgaacaaaaaggatggtctgaggcaacgatagttataagattctggattatttcaattattttagcactgcttggtctcgctagcttgaagttgagatgat

SEQ ID NO: 257652 - DNA, 216 bp, Unknown
  Bacterial polypeptide expressing nucleotide sequence isolated from the Sargasso Sea
ttgcaattacaggtggactgtttgtcttagaagctatttcagtaattgcacaagtgatatcgttcaaactaactggcaaaagaatatttaaaatggcaccaatccatcatcatttcgaaaaaaaaggttggcctgagtcaactgtggttattagattttggattatatcaattgtcttagcaatgataggtcttgcaacattaaaactaagataat

SEQ ID NO: 257653 - DNA, 335 bp, Unknown
  Bacterial polypeptide expressing nucleotide sequence isolated from the Sargasso Sea
tttagggttcttatggtttaatgcaccaccagctaagatatttatgggagatacaggctctttagcattaggagggtcattgggggcagttggtattataactaaacatgaaattgttcttgcgattactggaggactatttgtattagaagctgtttctgtgattgctcaagtcatatcatttaaacttaccggaaaaaggatatttaaaatggcaccgatacatcaccattttgaaaaaaaaggctggccagagtctactgtagttattagattttggatcatctcaattatcttagcaatgataggtctagcaacattaaaactaagataat

SEQ ID NO: 257654 - DNA, 889 bp, Unknown
  Bacterial polypeptide expressing nucleotide sequence isolated from the Sargasso Sea
atgctttacagttttttagtttcattagttgatactttttcttttttaaatgtatttaaatacataacttttagaataggtttatcagttatcacttcactaaccattatttttttgattggcgatcctttaataaagtatttttcaaaaaaacaaattactgggccaataagacatgatggaccgatcgatcacataataaaaaaaagcggaacaccaactatgggcggattaatgatattaattggaattattgtgagcaccattatgtgggcagatcttaaaaatgtttatatatggatagttctttttgtttgtacaagtcttggtttattaggctttgtagatgattatttgaaaataaaatttaaaaattcttcaggaatcaatgctaaattcaaatttctggggcaatttctaatttctttatttgctattttaattttagtttattttacagatcatcaaattatttcaaatttatattttcctttttttaaaaatcttgttttgcatatgggtttatttttcattccttttggtattttcgtaattatcggatcatcaaatgcagtaaatttaacagacggactagacggtttggccaccgtaccggtaatgctagttgctttatctttttctttaatttgttatttggttggaaatacaattttttcaaactatctccaaattcagtacattcctaatgttggagaattatcaattttttgtggttcaatagtgggatcatgtcttggtttcctctggtataatgcaccaccagctaaaatatttatgggcgataccggctcgttatctttaggtggttctatagcctcagtggcaataatagttaaacatgaaatcgttcttgcaattgttggaggtc

SEQ ID NO: 257655 - DNA, 196 bp, Unknown
  Bacterial polypeptide expressing nucleotide sequence isolated from the Sargasso Sea
tttgttctagaaacagtttcggtaattattcaggtactttcttttaaaatttttggcaaaagagtattcagaatggctcctctccaccatcattttgaaaaaaaaggatggccagaatcaacagtggttattagattctggattatatctatagtattggcgttaataggattggctactctaaagctcaggtagc

SEQ ID NO: 257656 - DNA, 166 bp, Unknown
  Bacterial polypeptide expressing nucleotide sequence isolated from the Sargasso Sea
ttcagttgtatcattcaaattgaccggcaaaagaatatttaagatggcccctattcatcaccactttgaaaaaaaaggatggccagagtctacagttgttattaggttttggattattgcgattattttagcattaataggccttgcaactttgaaattaagataa

SEQ ID NO: 257657 - DNA, 379 bp, Unknown
  Bacterial polypeptide expressing nucleotide sequence isolated from the Sargasso Sea
gttggtgaaactgcaattttttgtggagccatagtaggatcttgcttaggttttctttggtataatgcaccacctgcaaaaatttttatgggagatactgggtctttatctttaggaggctctttagcagcagttgcgataatcgttaaacatgaaatagttcttgcaataattggagggctgtttgttttagaaactatttctgtaattatacaagtaatttcttttaaactgacaggtaaaagagtttttatgatggcacctattcatcatcattttgaaaaaaaggggtgggcagagtctacaatagttattagattttggattattgctattattctcgctttagtcggactagcaacacttaaattaagataat

SEQ ID NO: 257658 - DNA, 652 bp, Unknown
  Bacterial polypeptide expressing nucleotide sequence isolated from the Sargasso Sea
tttgttaccagaaatattaatcaattatgttgaatattttaatgctttaaatgtttttaaatatattacttttagaactggtggttctattcttacagcacttttgataagtttcatctttggtccatatttaatcaaaaaattaaaaatgaaccaaatagaaggacagccaataagaatagacgggcctaaaagtcatttaataaagaaaaaaggcactccaacaatgggtggtatattaatattatttgctttttctttttctacccttttgtgggcaaaattagataatatttatgtttggacagttttttcgattgtatcaagttttggaataataggtctgatagatgattggcttaaattaaccaaaagatcaagtcaaggtctcaatggcaaaataaaattgttattacaagtaatattagcaacactagttgtatacattattaatcaacaatttgaacaagatttaagatttacgatatcattacctttttttaaagatatgaatatctatttaggatacttctatattctatttggagttttagtaatagtaggttcttcaaatgctgttaatttaactgatggtttagatggtttagcaattgtaccagtgatgattgcttctatgttcttttgctctaat

SEQ ID NO: 257659 - DNA, 805 bp, Unknown
  Bacterial polypeptide expressing nucleotide sequence isolated from the Sargasso Sea
aatgggtggagtactaatattgattggaattttttcaggagtatttttatggtctgatttatcaaatccttacaattggtttttaatatttattgttggtggcttaggtattctaggagcatacgatgactataaaaaaattaagagtggaaattctggtggagtttcatttaaatttaaattaatttcacaagttataatagctttaattggaatttacatattaacttatcatgcaaattcagctgaattaaaaaatctttatttccctttttttaaaaatttagtaattaatcttggttggttttttattccattttatttatttataattgttgggtcatcaaatgctgttaatttaacagatggtttagatggattagctactgttccaattatattggttgcatcttgttttgcatttataagttatgtcactggaaatatagtattttcagaatacttgcatattccttatattaaagatgttggggaagtggctgtattttgtggcgcaattataggttcatgtattggctttctttggtttaatgctccacctgcaaaaatatttatgggagacacaggctctctcgcattaggtggttctttaggagcggtaggtataataactaagcatgagattgttctagcaataacaggaggcttgtttgttttagaggcagtatcagtaatagttcaagttatttcatttaagttaacaggaaaacgaatttttaaaatggctccaattcatcatcattttgaaaaaaaaggatgggcagaatcaacggtcgtagttaga

SEQ ID NO: 257660 - DNA, 751 bp, Unknown
  Bacterial polypeptide expressing nucleotide sequence isolated from the Sargasso Sea
ggggggactttgacagctcttatgttatcgatccttctcggccctgctttaataagatttcttacaagaatgcagtttgctcaatctataagaactgatggacctgaatcgcatcttttaaaatctgggaccccaacaatgggtggtttaattatcattttttcattaattatttcaactttattatggtcagattttaacaacccttacatttggattctgatattcataactatctcttttggtattttaggtttttttgatgactggctaaaaattagagagaaaaattcaaaaggcttgagtggaaaatataagttaattctacaatcaatttttgcaactatggcaatttccttaatgttgaaagtttctccatatggagatcagcaaatttatattatgccttttaacaaagaatttatttttactgtttcgccagttatttttctttgtattagtatttttataattgttggatcttcaaatgctgtaaatttgacagacggattagatggtctagcaattttgccatcagttttaattgctggaggccttggtctgattgcgtacgcctcaggaaatatattgatttcggattacttatttataccatttaatcctttaagcggagagctcattgttttttgcggggcttttattggtgcaggaattggcttcctctggtataacacctatccagcacagatttttatgggcgatcttggatcacttactcttggtggaattt

SEQ ID NO: 257661 - DNA, 727 bp, Unknown
  Bacterial polypeptide expressing nucleotide sequence isolated from the Sargasso Sea
ttgtttcctgaaatttttttaaattatgtagatatttttcaaccatttaatgtttttcgatatataacctttaggactggcggtgcaattttgacatctttgctaatcagcctttttttaggacctttcctaattaaaagacttaaggctttccaaactgaaggtcagcctattagagaagatggaccaaaagaacacttaattagaaaaaagggaactccaactatgggggggttattaattttatttgccttttctctctcaacattaatgtggtcaaaattagataatccatatgtttggatagtatttattattgctaccacttttggcttaataggccttttagatgattggttaaaattaaaaaaaagatctagtgaagggcttaatggtaaaaaaaagcttttaatacaaatattactgtctgctcttgctgtttactctattaacttacaatttgaccaacatttgcaaaatagcttgtcattacccttttttaaagacaccatattatatttaggttatttgtacatacctttcggtattttggttattgtaggttcctcaaatgctgttaaccttactgatggtttagatggtctagcaatagtccccgtcatgattgcatcaatgtcattcgccttaatagcttacataattggaaatttaaatttttctaattatcttcaagtatcatatgtctctggtgtaggagaattagaaa

SEQ ID NO: 257662 - DNA, 446 bp, Unknown
  Bacterial polypeptide expressing nucleotide sequence isolated from the Sargasso Sea
catttatcagctatgtatcaggcaacatatttttgctgaataccttctcataccttatattgagggagtaggcgagattgctgttttttgtggagcgatcatcggagcatcaataggttttctttggtttaacgcaccaccggcaaaaatattcatgggcgatactggttccttagcattgggaggttctctaggtgctgtaggggttgctacaaaacatgaaattgttttagcaataacgggagggctttttgttttagaggccatttctgtaattgttcaagtcatttcctttaaactaaccggaaaaagaatatttatgatggctccgatacaccatcatttcgagaaaaaaggatgggcagagtctacggttgttataagattttggatcatttctctaattttggcaatgattggactcgcaacattaaaattaaggtaat

SEQ ID NO: 257663 - DNA, 529 bp, Unknown
  Bacterial polypeptide expressing nucleotide sequence isolated from the Sargasso Sea
tggaactagtaatgcggttaatttaactgatggtctagatggattggctattcttccttgcgttatggttgcagcaggtcttggaattattggttatttggctggaaatgccatatattcagattttttaaatattccttatttaccaggtacaggtgaaatgattgtattttgcggtgctttagtaggttctgggattgggttcctttggtttaatacttatcctgctcaagtatttatgggagatgtagggtctttatcgcttggggctgcattaggaatagttaccgttattataaggcacgaatatgttttgcttgtcatgggtggactttttgttattgaggcgctatcagttatcgttcaagttacttcttttaagttaactggtaagagagtttttaatatggcacctttacatcaccactatgagctaaaaggttggcccgagccacgagtaattgttaggttctggattattacatttatgcttgtcttactaggtttagctttacttagactaagataa

SEQ ID NO: 257664 - DNA, 604 bp, Unknown
  Bacterial polypeptide expressing nucleotide sequence isolated from the Sargasso Sea
atgctatataatctcctattgccatttaaagattcattttcaattattaatctatttgaatacataacatttcgtgctggaatagcagcaatagccgcacttttcataagcttcataatcggaccctgggttatccacatactacataaaaaccagattggcgaagaaattcgttcaacaggtcccaaatcacatatgaagaaagagggcacgcccacaatgggaggagtcatcatattaatggcagtactcctcccaaccctccttttttcaaaaatcaacagtgttttagtacagattataatatttgcgacaatatggatgggagttattggttttttggatgactatttaaaagttataaaaaagatgaaacgaggtctaattgctcgttataaactagctggccaaataagcctaggatgtattgtgagtttctggatattaaacacaccagaattcatcgatttcaatagtaaaacaactatgccattctttaaaaatgttgaaatagatctaggcatgctttatccattgatggtaattctagtaattaccggaacttctaatgcagtgaatctaactgatgggcttgatggattat

SEQ ID NO: 257665 - DNA, 862 bp, Unknown
  Bacterial polypeptide expressing nucleotide sequence isolated from the Sargasso Sea
atgttatttaatttacttacatcatttatagaacattactctttccttaacgtttttaaatatcttactttcagaacaggactttcagtagttacatctctgattgtagtttttatcattggcggaccacttattaggatcttttctgaaaatatgattactggccccataagacaagatggacccatagatcatattataaaaaaatcaggaacgcctaccatgggaggagtaattatcataattggtatgcttactagcactttactatgggctgatttaaataatatttatatttggactttagtttttgtatctttaagtttagcattattaggttttagtgatgatttactaaaaataaaatataaaaattccagaggacttaacccaaaattaaaatttcttggtcaattaattattagtgttgtagctttacttattctaataaaattttcagatcatgaatacctgtataatctttactttcctttctttaaaaatttaatttggcagatgggtctgttttttattccatttgggttatttgtaattattggttcatccaatgcagtaaatctaactgatggtttggatggattagctactgttccagttatgttagttgcactttcatttactttaatttcctatgtagtcggaaatacaattttttcagaatatctccagttacaatatattcctgacgtaggagagctttcaatattttgtggatcaatagttggatcttgtctaggttttctttggtacaatgctcctcccgctaaaatttttatgggagatacaggctcattatctttaggaggttcgttagctgcagttgccataatgcaaaacacga

SEQ ID NO: 257666 - DNA, 280 bp, Unknown
  Bacterial polypeptide expressing nucleotide sequence isolated from the Sargasso Sea
ggttcactaactcttggtgcaattcttggagtctttgctgtaattctgagacatgaaatagtttatgcaattatggcaggagttttcatagctgaaactctaagcgtcatgattcaagttacttcttacagattaagacaaaaacgagtttttttaatggcaccaatccatcatcactttgagttaaaagggtggccagagccaaaaattattgtcagattctggattgtcacacttgttttaattttagttgctcttgcaacattaaaattaaggtaat

SEQ ID NO: 257667 - DNA, 564 bp, Unknown
  Bacterial polypeptide expressing nucleotide sequence isolated from the Sargasso Sea
atcaatttcatataaacaatatgtcggaagttattagagaagatggaccaagttcacacatgagtaagtctggcacaccaactatgggcggtttattaattttatcatcattattgatatcaactatattttgggcaaatcttgaaaataaatatattttatatctaatctttacaactatatcctttgctcttataggatttttagacgattataaaaaattaactaaaagtaaaaacggaatgcccccaagaaataaaataatgcttcagcttattctggcaggaataattgcttacacaatgtttactttcatggaaacaactcaagaacaacaattaattattcctttttttaaagatataattattgatcttggcatttttttcattccttttgtaatgttagttataatatcaacaagtaatgctgtaaatttgaccgatggtctggatggtttagcaattatgccagtagttctagtaagtggagctttaggcatatttgcatacttaagtggaaatataaatttttccgaatattctcttgataccttatattaaa

SEQ ID NO: 257668 - DNA, 262 bp, Unknown
  Bacterial polypeptide expressing nucleotide sequence isolated from the Sargasso Sea
cgggtccttaggggctgttggaataataacaaaacatgaaattgttttagctattacgggtggtttgtttgttctggaggctatatcagtaattgtgcaggttatttcatttaaattgactggaaaaagaatttttagaatggctccaatacatcatcattttgagaaaaaaggatggccagagtcaactgttgtaattagattttggattatatctataattttagcattaataggaattgcaactctaaaattgagataa

SEQ ID NO: 257669 - DNA, 252 bp, Unknown
  Bacterial polypeptide expressing nucleotide sequence isolated from the Sargasso Sea
gagcggttggaattataacaaagcatgaaattgtcttagcaatcacaggtggattatttgttttagaagcagtttcagtaattgcacaagttgtgtcatttaaattaacaggaaaaagaatttttaaaatggcaccaatacatcatcattttgaaaaaaaaggatggccagagtcaacagtggtaataagattttggataatatcaataattctagctatgataggtttggcaactttaaaactaagataat

SEQ ID NO: 257670 - DNA, 250 bp, Unknown
  Bacterial polypeptide expressing nucleotide sequence isolated from the Sargasso Sea
gtcgcttgctattattgtgaagcatgaaattgttttagctattataggaggcttgtttgttcttgaaactttatcagtaattattcaagttttaagttttaagttaacaggaaaaagaatttttcgtatggcaccattacatcatcattttgaaaaaaaaggatgggcagagccaactatagtaataagattttggattattactattgttttagctttgatagggttagcaactttaaaaataaggtaa

SEQ ID NO: 257671 - DNA, 205 bp, Unknown
  Bacterial polypeptide expressing nucleotide sequence isolated from the Sargasso Sea
ggaggactatttgttttagaaacagtatcagtaattattcaagttatctcttttaaacttacaggaaaaagaatttttaaaatggcgcctattcatcatcattttgagcaaaaaggttgggctgagtcaacaattgtaattagattttggataattgcaattatactagctttggttggattagcgacattaaaattacgttagt

SEQ ID NO: 257672 - DNA, 514 bp, Unknown
  Bacterial polypeptide expressing nucleotide sequence isolated from the Sargasso Sea
agtaacctaactgatggacttgatggtttagcaattgtccccgtaatgatagttgctatgtcttttgctttcatagcttatgtttcaggtaatatagttttttctaattatttacttatccaatatattcctggaactggtgaattagcagttttttgtggttctttaattggagctgcgttaggttttctatggtttaacgcaccacccgctaaagtttttatgggtgatactggatctttagcattaggcggctctttaggctcaatagcaataatatgcaaacatgaaattcttctcgcaataattggaggtttatttgttctagaaaccttgtctgtagtaatccaagtatttatttttaaaatgacaggaaaaagagtttttttaatggctcctctacatcatcattttgaaaagaagggatggcccgagtcaacaatagttattcgtttttggataattactattgtattagctttgataggtcttgcaactttaagaattagataat

SEQ ID NO: 257673 - DNA, 712 bp, Unknown
  Bacterial polypeptide expressing nucleotide sequence isolated from the Sargasso Sea
ttcaagcggattaaaatcaaaatacaaattttctggtcaattactaataggagttttagctttatttattttaatcaaattctctaatcatgaatatttatttaatctttattttcctttttttaaaaatcttatttgggaaatgggtccttttttcattctatttggcttatttgtaattattggagcatcaaatgcagtaaatctaactgatggtcttgatggtttagccacagtcccagttatgttggtagctttatcatttacgctcatttcatatgttgtaggaaatacaattttttctgaatatttaaacattcaatatatacaagacgttggcgagctctctattttctgtggttcaatagttggatcttgtcttggttttctttggtacaatgcaccacctgctaaaattttcatgggagacaccggctcgctatctttaggaggttcattagccgctatagcaattatcgtaaaacatgaaattgttctcgcaataattggagggttatttgtattagaaactgtctcagtgataatccaagtggtttctttcaaactcacaggaagaagaatttttaaaatggcgcctattcatcatcactttgaaaaaaaaggatgggcagagtcaacaatagttattagattttggataatagcaataattttagcattggtaggattagcgacactaaaattaaggtag

SEQ ID NO: 257674 - DNA, 809 bp, Unknown
  Bacterial polypeptide expressing nucleotide sequence isolated from the Sargasso Sea
tggcccatttttaattaaaagaattggatcataccaatcaattggtcaacctattagagaagacggcccagagtctcacttagtagctaaaaaagggacgccaacaatgggaggaattataattttgatttctatagttggatcaatgctactatgggtcaatcctgaaagctatatatcttggccaattatattccttctaatatcttttggattggttggttttgcagatgattttagcaaagttaagaaaaaatcaagtaatggaatttctgcaaaaataagaatcttttttcaaataataatatcgttggtatttatttactggacaacaacttataatgaaattgatattcagttattatccttaccttttcttaaggatatatttctaaatttaggtttattttcaattccattcgttatattggtaattttaggatcagcaaatgcagttaatcttacagacggtcttgatgggctagcaattgttcccattatgattgtttctgcgacttttgctgtaatctgctatttggcaggaaatatgattttttcgaattatctttacattaattatttacctggagcaggtgaattaaccgtgctttgtgcagccataattggatccgctcttggctttttatggtacaacgcgcctcctgcaatggtctttatgggcgatacaggctctttatcattaggtgctgcattggggggtataagtgttctaaccaagcaagaaattgtattagcaatagttggaggaatattcgtggcagaagcggtgtcagtaattcttcaagttg

SEQ ID NO: 257675 - DNA, 809 bp, Unknown
  Bacterial polypeptide expressing nucleotide sequence isolated from the Sargasso Sea
aatgattggtggcccattcataagattcttttcaaatcaaaaaattttaaatccaataagagatgacgggccagaggagcatattattaaaaaaattggaacaccaacaatgggcggaataattattttaattggcttacttatttctgttttatgttgggcagatttatcaaatataaatattttattttgtatttatattgctgtttcttttggattgcttggtgctttcgatgattttaaaaaaattaagcatagaaattcctcaggaatttcgtcaaaattaaaaatagttttacaaattttattagcagtaatcggggtaagtttatttatttattatatagattatcaagatattacaaatttatatttcccattttttaaaaatttaataataaatcttggatggttttttatacctttttcagtatttgtgattattggatcatcaaatgcggtaaatcttacagatggtctagatggtttggccactgtgcctgtaatattagttgcagtttgcttttcttttataagttatgtaactggaaacatagtattttcagattatttacaaataccttacatagaagggacaggagaaatttcaattttttgtggagcaattatcggatcatgtttaggttttttatggtttaatgctccaccagctaaaatttttatgggagatacaggctcgttatctttaggtggatctttaggagcggttggaataataacaaaacatgagattgtactagctataattggaggtctttttgttttggaggctgtttcagtaatggttc

SEQ ID NO: 257676 - DNA, 277 bp, Unknown
  Bacterial polypeptide expressing nucleotide sequence isolated from the Sargasso Sea
ttcttgtctttgggcggatcattgggtgcagttggaattattactaagcatgaaatagttttagcaattactggaggtctttttgttttggaagctgtatcagtaatggtccaagttatttcatttaaattgactggaaaaagagtttttaaaatggcaccaattcatcatcactttgaaaaaaaaggctggccagaatcaactgttgttatcaggttttggataatttcaataatcttagccatgattggtttagcaactcttaaattaagatgaa

SEQ ID NO: 257677 - DNA, 145 bp, Unknown
  Bacterial polypeptide expressing nucleotide sequence isolated from the Sargasso Sea
actgggcaaaagaatatttaagatggcgccaattcatcatcattttgaaaaaaaagggtgggctgagtctacgattgtaattcggttttggattatagctattattttagcacttgtagggctagctactttaaaacttaggtag

SEQ ID NO: 257678 - DNA, 508 bp, Unknown
  Bacterial polypeptide expressing nucleotide sequence isolated from the Sargasso Sea
atggtttgcagcaggaagttcagcaattattgtttttgtttaggaatttttgcatgggtttcgggtaattttatttttgcagattatttaaatattatttatatacctcatataggagaaataactgtttttattgcttcttttttaggtgcattaattggttttttatggtttaacacttttccagctcttgtttttatgggggatacaggtagtttaacaattggagctttaatttcagtcattgccttaattgtaagaaaagagttattaattcctttactgtgtgggatattcttcgttgagactttatctgttataattcaggtagggtattttaaatatactagaaaaaattttggagttggaaaaagaatttttttaatggctcctattcatcaccattttcaaaagaaagggttcaatgaaagtaaaattgttacaagattttggataattgggattttattagcaattctctctattgtaacattaaagataagataaa

SEQ ID NO: 257679 - DNA, 844 bp, Unknown
  Bacterial polypeptide expressing nucleotide sequence isolated from the Sargasso Sea
ccttctgtttgctgatttatcaaatacatttattcaaataattctattatcattagtatggatgggagctataggttttttggatgattatctaaaagtagtaaaaaaattcgaaaaagggttgattggtaaatataaactaattggtcaaatatctcttggtatggtaattagttattggatatacaatacccctgaatatgcaaatatagtttcatctacgagtatcccatttctaaagaattacactatagattttggattattttacccactaattattattcttgttataacaggtacatcaaatgctgtcaacctaacagacggattagatgggttagctgctggtctattagctatttcttttgctgttttttccgcaattgcttatataagtggcagagttgatttttcagagtatttaaatataatgtatttacctggtgctggagaattaactgttttcactgcagctatcacaggtgcatgtattggatatctttggtttaatacaagtccagctgaagtatttatgggcgatattggatcattatcaactggagctgcattaggtgctttagcggtcctacttaagaaagaactattattagcaatcattggtggtgtttttgtctgggaagctttaagcgtaatgattcaagttgcttatttccgatggacaaaatataaatttggagaaggagaaagatttttcaaaatggcccctattcaccatcatttcgaactaaaaggttggccggaatcacgaatagttgttcggttttggataattggaatcctatttgcccttttctcacttacaacatttaagataagataa

SEQ ID NO: 257680 - DNA, 158 bp, Unknown
  Bacterial polypeptide expressing nucleotide sequence isolated from the Sargasso Sea
atcatttaaacttactggcaaaaggatatttaaaatggcaccaatacatcaccattttgaaaaaaaaggttggccagaatcgactgtggttattagattttggattatctcaattatcttagcaatgataggtctagcaacgttaaaactaagataat

SEQ ID NO: 257681 - DNA, 577 bp, Unknown
  Bacterial polypeptide expressing nucleotide sequence isolated from the Sargasso Sea
tacacattattcattattcttgttgtgtctgctacatctaatgctgtgaatctaacagacggacttgatgggttggctacaggattgcttgctatatctgtgagtgtgtttggagtgttgtcttatatatctggcagagttgatttttctgactatctaaatattacctatataccaatggcaggtgaattaacaatttttgcagctgctctttttggagggtgtcttggatttttatggtttaatgcaaggccagcattaatttttatgggagatgttggttctttgtctatgggtgctgcgttaggaacattagcaatactactgaaaaaggaacttttgttgattattgttggtggagtttttgttttggaagctttgtcagtaatattgcaggtagtatatcataggtggaccaaaaagaaatatggaaaaccaaaaaaattattcttaatggcgccacttcatcaccattttgaattaaaaggctggcctgaatcaagagtgatagtacgtttctggttgcttggaattttctttgcgttattatctcttacaacctttaaaattttataga

SEQ ID NO: 257682 - DNA, 697 bp, Unknown
  Bacterial polypeptide expressing nucleotide sequence isolated from the Sargasso Sea
cctttaaataaaattttttggcagtctgttataactattttggcatgttcctatctttatattactcaagaaagtatttctgaaacaagcttgatagtaccgttctttaaggatatctccattcctctaggtgtaggttttattgttttgtcatattttgtagtaatagggactagtaatgcggttaatttaactgatggtctagatggattggccattcttccttgcgtcatggtcgcagcaggacttggaattattggttatttagctggaaatgccatatattcagattttttaaatattccttatttaccaggtacaggtgaaatgattgtattttgcggtgctttagtaggttctgggattggattcctttggtttaatacttatcctgctcaagtatttatgggagatgtagggtcattatcgcttggagctgcattaggaatagttaccgttattattaggcatgaatatgtcttgttagtcatgggcggactttttgttattgaggcactatcagttatcgttcaagttacttcgttcaggttaactggtaagagagtttttaatatggcacctttacatcaccactatgagctaaaaggttggcctgagccacgagtaattgttaggttctggatcatcacgtttatgcttgtcttactagggttagctttacttagactaagataaa

SEQ ID NO: 257683 - DNA, 704 bp, Unknown
  Bacterial polypeptide expressing nucleotide sequence isolated from the Sargasso Sea
aatgttatttagtttattttcaaacttagtagatatttttagtttttttaatgtttttaagtacttaacagtaagaacaggtttatctatgtttacttcgatgctcgtagtttttatcgttggaaatcctctaataaattatttttcagctaagcaaatacataatccaataagagatgatggaccttcagaacatattgtaaaaaaaataggaactcctaccatgggtggtttaatgattttgctgggagttttttctggtgtattattatggggagatctctcaaatcaatacaattggtttttaatttatattgctggttcttttggagtattaggtgcttatgatgattacaaaaaaatacggaaaaataactcttctggaatatcttcaaaatttaaaataattttacaaattattttagccttaattggtatatttattatatatttttttagcgactctactgaaattaagaacttgtattttccgttctttaaaaatcttgtaataaatctaggttggttctttattcctttttatttatttgtattagtcgggtcctcaaacgcagtaaatttaacagatggattagatggtttggcaacagtcccagttatactagttgcggcttgttttgcatttattagttatgttacaggaaatatagttttttcagattatttacaaattccttatattg

SEQ ID NO: 257684 - DNA, 494 bp, Unknown
  Bacterial polypeptide expressing nucleotide sequence isolated from the Sargasso Sea
ggatggtctagcaacagtaccagttattctagttgctgtttgctttgcttttataagttacgtaactggaaatatagttttttcagattatttacaaattccatatattgaaggcacaggagaaatttcaattttttgtggagctattataggagcttgtttaggttttttatggttcaatgcaccacctgcaaaaatatttatgggtgacacaggatctctttctcttggaggttccttaggagctgtaggaattataacaaaacacgaaatagttttagcaataaccggtggactatttgttttagaggccgtttcagttatggtacaagttatttctttcaaattaaccggaaaaagaatatttaaaatggcgcctatacaccatcattttgaaaaaaaaggttggcctgaatccactgttgtaattaggttttggataatctcaattattttagcaatggttggcttagctacactaaaacttagataaa

SEQ ID NO: 257685 - DNA, 211 bp, Unknown
  Bacterial polypeptide expressing nucleotide sequence isolated from the Sargasso Sea
ataacaggaggtttatttgtattagaagcagtttctgtaatagttcaagtattatcatacaaattaacaggcaagagagtttttaaaatggcccctatacatcatcattttgaaaaaaaaggctggccagagtcgacagtagttattagattttggatcatatcaattattttagcaatgataggtcttgctactttaaaattaagataaa

SEQ ID NO: 257686 - DNA, 361 bp, Unknown
  Bacterial polypeptide expressing nucleotide sequence isolated from the Sargasso Sea
tttttgtggggcaataataggatcttgtttagggtttttatggtttaatgcaccaccagctaagatatttatgggtgatacaggttccttagcattaggagggtcattgggagcagtgggtattataactaaacatgaaattgttcttgctattactggaggactatttgtattagaagctgtttcggtgattgctcaagttatatcattcaaactaactggtaaaaggatatttaaaatggcaccaatacatcaccattttgaaaaaaagggctggccagagtctactgtggttattagattttggattatctcaattatcttagcaatgataggtctagcaacattaaaactaagataa

SEQ ID NO: 257687 - DNA, 745 bp, Unknown
  Bacterial polypeptide expressing nucleotide sequence isolated from the Sargasso Sea
catggtttcttattttgttttaggcttttttgatgactattttaaagtcttaaaaaagaatactgatgggatttcagcaaaaggtaaattagtttggcagtttgtaacagcgttgattgccgcatattgtcttgtttatagtaatgtgattgataccaagctttatgttccttttatgaaggggccacttttagatatgggctttctataccctctcttcgcgggaattgttgttgtcgcatgtagtaacgctgtcaatttgacagatggtttggatggccttgcgattgggccaataattacgagtgccgcctctttagggattttagcttacgttgccgggcataaagagatagcctcatacctctacattccctatgtagaaaatgtcggtgaattaacagttattgctgcagcgattataggtgctggagttggctttttatggtacaactcatacccagctcagattttcatgggtgatgtaggctctttatctttaggaggaattcttgggataatagctgtacttactaaaaatgagattttgtttattttgataggaggtgtttttgttgttgagacactttctgtaattattcaggttttttcatttaaaactaggaaaaaaagagtttttaaaatggcgcctattcatcatcattttgagttaaaagggtggcctgagccgaaggttattgttaggttttggataataagtatatttttggccattctttctgtt

SEQ ID NO: 257688 - DNA, 788 bp, Unknown
  Bacterial polypeptide expressing nucleotide sequence isolated from the Sargasso Sea
ttatattgtcggaaatccactaataaattatttttctgctaaacaaatacacaatccaataagggacgatggaccttcagaacatattataaagaaaataggaactccaacgatgggagggttaatgatattgttgggagttttttctggagtattattatggggagatctttcaaatccatataattggtttttaatttatatagctggctcttttggattattgggagcgtacgatgattataaaaaaataaaaaaaaataattcttatggaatatcctcaaaacttaaaatttctattcaaattattttagctttaattggtatactcataatttattttttcagtgattctggtgaaattaagaatttatattttccattctttaaaaatttagttattaacttaggttggttctttgttcccttttacttatttatattagttggatcctcgaacgcggtaaatttaacggatggactagatggcttagcaacagttccagtaatacttgtagctgcttgttttgcatttattagttatgttacaggaaatattgttttttctgattatttacaaattccttatatagaaggagtaggagaagtatcaattttttgcgggtctatcattggagcttgcttaggttttttatggtttaatgcacctccagcaaaaatattcatgggcgatactggctctctatccttaggaggatctttaggagcaattggaataataactaaacatgaaattgttttagcaataacgggtggattatttgttt

SEQ ID NO: 257689 - DNA, 319 bp, Unknown
  Bacterial polypeptide expressing nucleotide sequence isolated from the Sargasso Sea
gaagtttttatgggtgatattggatcattgtccactggttcagccttaggaactttggcaatattgctaaaaaaagagtttttattaataattataggtggactatttgtagctgaagctatatcagttattctacaagttggatatttccgttatacaaaaaataaatatggtgaaggaaaaaaaatatttttgatggctccgattcaccatcattttgagctaaaagggttgcctgagtccaaagtagtaatacgcttttggatcgttggtctactgctcgctctactaacaattactacttttaaaattcgttaat

SEQ ID NO: 257690 - DNA, 732 bp, Unknown
  Bacterial polypeptide expressing nucleotide sequence isolated from the Sargasso Sea
tctttattacaggatttttagatgattacataagtattaaaaacaaagaaaatacaggattaaaaacaaaagaaaaatttactctacaaagtattatcgcgataatttttatattgatagcctatgaaaaaaatttaataaatccattaataacagtatctgactcctggggaatagacatgaatatttttatattgccaatttcttttatagtacttgttggcataagtaattcagttaatttgactgatggactagatggattagcagctggatgcagtgggattgtcttttatggattaggaacagaaatattaatgaaagaacagcaagaactttttgtttttagtattttatgttattcaatgtcgggcatatgcttaggatttctaaggtacaatagttatcctgcaaaaatatttatgggagacacaggatctttaagtattggcgcaattctgggttctattgcgttattaacagatagtatttttaccttatctattttctcaggaatattcattattgaatcattatcagtaataattcaagtagggttttttaaaattacaaaaaaattatttcataaaggtaaacgtgtatttttaatggccccactacaccaccattttgaacttaaaggagttaaagaacaaaaaatagtagaaaatttttggaaaatcaacattttactcataattttaggtatagttttaaaaatcaatctttaaa

SEQ ID NO: 257691 - DNA, 586 bp, Unknown
  Bacterial polypeptide expressing nucleotide sequence isolated from the Sargasso Sea
tatgctttatagtttattgacttcatatgttgaaattttttcttttcttaatgtattcaaatatattacttttcgtattggtcttgcagtaataacctcacttactattatatttttaattggaaatccattaattcaatatttttcaaaaaaacaaattactggcccgattagacaagatggtccaattgatcatatagttaaaaaaagcggtacacccaccatggggggactaatgatattaattggtattatcataagtactttactttgggcagatttatcaaatatatatatttggatcgttatttttgtttgtgctagtcttggattattaggatttgcagatgattttctaaagataaaatacaaaaactcatctggcataaatgctaagttcaaatttttttggcaattattaattgcattgatagcagttttagctctagtttattttactgatcatgagagtatattaaatttatattttcctttttttaaaaatataattattaatatgggtttattttttataccttttggaattttcgtaattataggatcctcaaacgctgtaaacctaaca

SEQ ID NO: 257692 - DNA, 220 bp, Unknown
  Bacterial polypeptide expressing nucleotide sequence isolated from the Sargasso Sea
gttttagcgataacgggaggtcttttcgttttagaagcagtctccgtaatggttcaagtaatatcatttatacttacaggaaaaagaatttttagaatggcacccatacaccatcattttgagaaaaaaggctggcctgaatctaccgtagttattagattttggattatctcaataattttagcaatgataggacttgctacgttaaaattaagataat

SEQ ID NO: 257693 - DNA, 652 bp, Unknown
  Bacterial polypeptide expressing nucleotide sequence isolated from the Sargasso Sea
catagtctttctaacttatttttcagatcattccgagctagaatatttatattttcctttttttaaaaatttaataattaacttaggttggttctttataccttttgctgttttcataatagttggttcatcaaatgcggtaaacttaacagatggtcttgatggacttgctacagttccagttatattggttgctagttgctttgcatttattagttatgttactggaaatatagttttttctgaatacctacaaataccatacattaaggggatcggagaagtttctgttttttgtggttctataattggtgcatgtataggttttttatggtttaacgcaccacctgcaaaaatttttatgggtgatactggttcgttggcgctaggaggctctttaggagcggtaggaattattaccaagcatgaaatagttttagcaataactggaggtctttttgtattagaggctatttcagtaattattcaggttggatcctataaacttacaggaaaaagggtttttaaaatggcacctatccatcatcattttgagaaaaagggttggccagagtcgactgttgttgtcagattttggataatatcaataattttagcaatgataggtttggctactttaaaattcagataa

SEQ ID NO: 257694 - DNA, 573 bp, Unknown
  Bacterial polypeptide expressing nucleotide sequence isolated from the Sargasso Sea
acctaggctggttttttattccgttttatttatttgttattgtaggttcatctaatgctgttaacttgactgatggattagatggtttagctacagttcctgttatattggttgcagcatgttttgccttcattagttatgtcacaggaaacatagttttttcagaatatttacaaattgtgtatattgatggagtaggagaggcatctattttctgcggagcgataataggatcctgtctaggtttcttatggtttaatgcacctccggcaaagatttttatgggtgacacagggtctttagctttaggtggatcactaggagccgttggaattattactaaacacgaaattgttcttgcaattactggaggtctattcgtcttagaagcagtttcggtaattgcgcaagttatatcatttaaactcacaggtaaaaggatatttaaaatggctccaattcaccatcattttgaaaaaaaaggttggcctgagtcaactgtagtaattagattttggataatttcaattatcttggcgatgataggtcttgcaactctaaaattaagataat

SEQ ID NO: 257695 - DNA, 403 bp, Unknown
  Bacterial polypeptide expressing nucleotide sequence isolated from the Sargasso Sea
cttcagctacaatatatcccggatgtaggtgagctctcaatattttgtggttcgatcgttgggtcttgcttaggttttctttggtataatgcaccgcccgctaaaatttttatgggagatacaggttcattatctttaggaggttcattagctgcagttgctataattgctaaacacgaaattgtgctagcaatagttggaggattatttgttcttgaaactgcatcagttattatccaagtcatctcatttaaacttacaggaaaaagaatttttaaaatggcaccaattcatcatcatttcgaacaaaaaggttgggctgaatcaacaattgtaattcgattttggatcattgcaataatattggctctagttggattagcgacattaaaactacgttagt

SEQ ID NO: 257696 - DNA, 536 bp, Unknown
  Bacterial polypeptide expressing nucleotide sequence isolated from the Sargasso Sea
gatctggcctttggggttgtttgtcgttctggcagagagcaatgccaccaacctcaccgacggcctggatggtctggccagcggctgcggagcactcgtctttacgggtctggcgcttcagctaatgctgcgaggtgacaacggcgatccagccctagctggattttgcatgaccatggctggggcatggctggggtttctcatgcacaacaggaacccggctcgcgccttcatgggcgacacgggatccctggcgatgggtgcagccctcagtggtgttgccctgttgtccaacagtctgtggcccctgctggtgatgggaggcgtgttcttggcggaatcactctctgtgattatccaggtgtgggtgttcaaggccacgaagggcgctgatggacagggccggcgcgtgttccgcatggcgccactccatcaccattttgagctgggaggcaccgacgaaagaagtgtggtgcctgcgttctggctggtcacggcagggcttgtcctgctgggactcgttctacgtccctgag

SEQ ID NO: 257697 - DNA, 497 bp, Unknown
  Bacterial polypeptide expressing nucleotide sequence isolated from the Sargasso Sea
tttagatggtttggctactgttccagttattctagttgctgcttgttttgcatttattagttatgttacaggaaatatagttttttctgagtatttacaaattccatatattgaaggtacaggagaaatctcaattttttgtggagcaataattggggcttgtctaggttttttatggtttaatgctccacctgcaaaaatatttatgggtgacacaggatctttatccttaggtggttctttaggagctgtaggaataattactaaacacgagatagttttagcaattacagggggattatttgttttagaagctgtttcagttatggtccaagttatttcgtttaaattgactggtaaaagaatattcaaaatggctcctatacatcatcattttgaaaaaaaaggttggccagaatctactgtagtaataagattttggattatctcgattattttagcaatgattggtttagctacgctaaaacttagataaa

SEQ ID NO: 257698 - DNA, 835 bp, Unknown
  Bacterial polypeptide expressing nucleotide sequence isolated from the Sargasso Sea
tattgatacattttcctttttaaatgtatttaaatatctaacagttagaactggtctttctatgttcacggccatgctagttgtttttattgtcggaacaccatttattaattatttttcgagaaagcaaatacataatcccataagggaagacgggcccaaggatcatattataaaaaaaatcggcactcctacaatgggaggactattaattttgcttggattgttttctggaatattattatggggtgatttatcaaatcctttcaactggtttttgatatttatagtattttcttttggagctttaggggcatttgatgacttgaaaaaaattaaaagcaaaagttcgcatggcttatcatcaaaattaaaattaattttacaaattattttaggattatttggaatagcaatattaacttaccttgccgagccttccgatctaaaaaatttgtatattcctttctttaaaaatgttgtcataaatcttagttggttttttgttcccttttatttgtttgtaattgttggctcttcaaatgctgtaaatctaacggatggtttagatggtttagctactgtaccggtaatattagtagcttcgtgctttgcatttattagttacgtaacaggtaatattgtattctcagagtatttacaaattccttatattgagggtgtaggtgaagtagctgttttttgtggagcaataattggagcgtgcttaggttttttatggtttaacgcaccaccggcaaagatctttatgggtgacacgggatcccttgcacttggtggttcattaggtgctgtatcaataataccaagcacg

SEQ ID NO: 257699 - DNA, 337 bp, Unknown
  Bacterial polypeptide expressing nucleotide sequence isolated from the Sargasso Sea
gtacaattcctatccagctcaagtttttatgggcgacacaggtagcttagctttgggcggaattatagcggtgtttgctatttccatccgaaaagaattattaatccctgttttatgtggcgtattcttgattgaaaatttatcggtaattattcaggttggatattttaaatacaccaagaaaaaatttggagaaggtcgtcgggtttttcgaatggctccaattcatcatcactatcaaaaagttgggctacatgaagcaaaaattgttgctcgtttttggataattgcagttttgttggctgtagtagctatcgtaactctaaaagtcagataa

SEQ ID NO: 257700 - DNA, 340 bp, Unknown
  Bacterial polypeptide expressing nucleotide sequence isolated from the Sargasso Sea
gcctgtcttggttttctttggtataatgcaccaccagcaaaaatatttatgggtgacacaggatctttatctttaggaggatcgttggcaacagttgcaattatagtaaagcatgagatagttttagcaataattggaggactttttgttttagagactgtttcagtaataattcaagttgtttcgtttaaactaaccggaaaaagagtttttatgatggcaccgatacaccatcattttgaaaaaaagggctgggcagagtctacaattgtaatcagattttggataatagcaattattttagctttgataggattagctacgcttaaacttagataat

SEQ ID NO: 257701 - DNA, 784 bp, Unknown
  Bacterial polypeptide expressing nucleotide sequence isolated from the Sargasso Sea
atacgaaaagatgggcccgaaaatcatataataaaaaaaattggcactccaacaatgggaggcttactaatattattaggattattttccggagttttgctttggggtgatcttaaaaatccctatatttggtttttaatatttatagcagcttcttttggtttattaggtgcttacgatgattataaaaaaataaaaaataaaaattcgtcaggaatttcttttaaaataaaaattatttctcaaattattttatcaatattaggaatccttattttgttttatttttcaaattctacagaattaaaaaatctttactttccattttttaaaaatttaataataaatttaggttggttttttatacctttttatatttttattattgtaggatcttctaacgcagtaaatttgactgatggtttggatggtttggcaacagtaccagttatattagttgcaggatgttttggatttatcagttatgtaactggaaatgtcgtattttcagaatatcttttaataccttatataagagatgtaggagaagtagctgtcttttgtggagcggttattggatcatgtattggttttttatggtttaatgctcctcctgctaaaatatttatgggagacacaggttctcttgcattaggtggatctcttggaggaataggaataattactaaacacgagattgttttagcaatcataggtggtctatttgttttagaagctgtatcggtgatagttcaagttgtttcatataaattaactggaaaaa

SEQ ID NO: 257702 - DNA, 822 bp, Unknown
  Bacterial polypeptide expressing nucleotide sequence isolated from the Sargasso Sea
tgttgtggtcagatttatacaatccttataattggtttttattttttattgtaggagcctttggaactcttggtgcatttgacgattataaaaaaattaaaactggcaactctaatggtgtttcatttaaatttaaattaatttcacaaattttgatagctttaataggaatttatatattatacaattttacaaattcagatgaaattaccaatttatattttcctttttttaaaaatttggcaattaatcttggatggtttttcattccattttacttatttataattgttggttcatcaaatgctgtgaatttaacagatgggctagacggactagcaactgttccaattattttagttgcagcttgttttgcttttataagttacgtaacaggaaacatagtattttccgattatttacacataccatatattgaaggagtaggagaagttgcagtattctgcggatctattattggagcatgtattggttttttatggtttaacgcaccaccagcaaaaatttttatgggagacacaggctctttggctttaggaggatctcttggtgcagtaggtataattactaagcatgaaattgttctagctataactggtggactatttgttttagaggctgtttcagtgattgttcaagttatttcatttaaattaacaggaaaaagaatttttaaaatggcacccattcaccatcattttgaaaaaaaaggatggccagaatcaacagtggtaattagattttggattatctctatagtgcttgctatgattggtttagccacattaaaacttagataat

SEQ ID NO: 257703 - DNA, 889 bp, Unknown
  Bacterial polypeptide expressing nucleotide sequence isolated from the Sargasso Sea
tttctcatatttggaaattatattattaataaattatctaatattcaaccaactggtcagccaataagagatgacggtccagagtcacatataattgcaaaaaaaggtactcctacaatgggtggtttattgattattctaagtgtttttgtttctacaattatttgggctgatttaaaaaatatttttatatggatcttgcttttaactatttttatttttggatctattggtttcgcagatgattataaaaaaattaaatcaaatacaagtgagggtatttcatcaaaaataagaattatatttcaaatcattttttcatttttcataacatatttgattcttatcaatttagatccaagtataagcaaatctatgacatttcctttcttcaaaaatttaattatagattttggaatattttattttctaatttccatatttataattattggatcggctaatgcggtaaatctaactgatggacttgatggtttagcaattgtccctgtaatgatcgttgctatgtcttttgcattcatagcttatgtttcaggtaatatagttttttctaattatttacttatccaatatattcctggaactggtgaattagcagttttttgtggttctttaattggagctgctttaggttttctatggtttaacgcgccacccgctaaagtatttatgggtgatactggatctttagcattaggaggctctttaggctcaatagcaataatatgcaaacatgaaattcttcttgcaataataggaggtttatttgttctagaaaccttttctgtagtaatccaagtattcatttttaaaatgacaggaaaaagagtttttttaatggcaccactacatcatcatttgaaaaaaa

SEQ ID NO: 257704 - DNA, 658 bp, Unknown
  Bacterial polypeptide expressing nucleotide sequence isolated from the Sargasso Sea
cgtggcagcatattttattgctactactcatccagaggcattgcaaaatctgttggccctcccaatttttaaaaatttgctggttgatcttgggtttttatttgttccttttgcaatgattgtaattgttgggtcggcgaatgccgtaaacttgactgatggcttggacggattagccataatgccagtgatgattgcggccggcgctcttggagtaattgcgtatgctgtgggaagagtagattttacagaatatttggatgttcattatgtcaatggtacgggggaaattctaattctctgttctgggatttttggagccggattaggttttctctggtataatgcaccaccagctgccgtttttatgggtgatacagggtctctggctctcgggggggctctcggtgccgtggccgttgctacgaaacatgaaatagtccttgcaattgttgggggactttttgttgttgaggcgctctctgtaattatacaagtactttacttcaaaatgacaggtaaaagagtattcttgatggccccaatccatcatcactttgagaaaaaaggatgggcggaacctcaaatagtcattcgtttttggataatttcactcattcttgcaatggtgggcttggcgactttgaaagtaagataa

SEQ ID NO: 257705 - DNA, 442 bp, Unknown
  Bacterial polypeptide expressing nucleotide sequence isolated from the Sargasso Sea
attagctacgttacaggaaatattgttttttctgattatttacaaattccttatatagaaggagtaggagaagtatcgattttttgtggatctataattggagcttgtttaggttttttatggttcaatgcaccaccagcaaaaatatttatgggcgacactggttctctttctttaggaggatctttaggagcaattggaataataactaaacatgaaattgttttagcaataacgggtggattatttgttttagaagcaatatctgttattgcacaggtaatttctttcaagctcacaggcaagagaatatttaagatggcaccaatacatcaccattttgaaaaaaaaggatggcccgagtcaactgttgttattagattttggattatttctattattctagcaatgattggactggcaactttaaaattaagataat

SEQ ID NO: 257706 - DNA, 562 bp, Unknown
  Bacterial polypeptide expressing nucleotide sequence isolated from the Sargasso Sea
tatttataccggtatcgatatttataatttggttggaagttcaaatgcagtaaatttaacagatggtcttgatggtttggcgattcttccagtaattcttattacttcagcacttggcttaattgcctgggcagcaggaaatacaattgtctcagactatttatatataccttacgtacaaggtacaggagaattattagttatttgtggagctttaattggggctggaattggttttttgtggtttaatgcttatcctgcacagattttcatgggtgacgtaggctcactttcaatgggggcattcattgcactggtagcaataattgtaagacatgaaatagtctttgccgtaatgtcgatggtttttataatggaagctttgagcgtaatccttcaagtttcatctttcaaaataagaaaaaaaagaatctttaaaatggctcctattcatcatcattttgagttatcaggctggaaagaaccaaaaataattgtcagattttggatcttaacttttatatttgttttggttggtctgtctctcttaaaaattagataa

SEQ ID NO: 257707 - DNA, 721 bp, Unknown
  Bacterial polypeptide expressing nucleotide sequence isolated from the Sargasso Sea
atatagcaactcatcaggtatttcttcaaagtttaaaataacttcacaaataattttagcaattattggtgtaagtttttttgtttattttaatgattatcaagatttaaataatttatactttccattctttaaaaatttaatcataaaccttggatggttttttataccatttgcaatattcgtaattattggttcgtcaaatgctgttaaccttacggatggattagatggtctagcaacagtgcctgtaatattagttgcggcatgttttgcctttataagttatgttacaggaaacatcgtattttctaattatttacaaattccctacattgaaggaactggtgaagtatcaattttttgtggtgcaattattggctcttgtttaggatttttatggtttaatgctccacctgctaaaatttttatgggcgacacaggctctttatctcttggaggatctttaggtgcagtaggaattattacaaagcatgaaattgttttagctattactggtggtctttttgtactagaggcagtttcagttatggttcaggtaatctcttttaaacttacaggaaaaagaatttttaaaatggcacctattcatcatcattttgagaaaaaaggatggccagagtctacagttgtgattaggttttggattatctctatcattctagcaatgattggtttagctaccttaaaattaagataa

SEQ ID NO: 257708 - DNA, 196 bp, Unknown
  Bacterial polypeptide expressing nucleotide sequence isolated from the Sargasso Sea
gtttgttttagaggcagtttcggtaatagtacaagttatttcatttaagttaactggaaagcgaatttttaaaatggctccgatacaccaccattttgaaaaaaaaggatgggcagaatcaactgtggttgttagattttggattatatcaattattttagctatgattggactggccactcttaaattaagataa

SEQ ID NO: 257709 - DNA, 588 bp, Unknown
  Bacterial polypeptide expressing nucleotide sequence isolated from the Sargasso Sea
aatgctgctgctgctggcggagtacctgcaacagttccacaagggcttcgcggtctttcagtacctgaccctgcgcggcatcctcggcgtgctcaccgccctggcgctgtcgctgtggctcggcccgtggatgatccgtaccctgcaggtgcggcagatcggccaggcggtgcgccacgatggcccgcaatcgcacctgtcgaagaaaggcacgccgaccatgggcggtgcgctgatcctcagcgccatcaccgtgagcaccttgctctgggccgacctgtccaatcgctacgtctgggtggtgctggccgtgacgctgctgttcggcgccatcggttgggtcgatgactaccgcaaggtgatcgagaagaactcgcgcggcctgccgagccgctggaagtatttctggcagtcggtgttcggcctcgctgccgccgtcttcctttatatgactgcgcagagcccggtggagaccaccctgatcctgccgttgctgaaggacgtcgccattcctctgggcgccggcttcgtggtgctgacctacttcgtcatcgtcggcaccagcaatgcggtgaacctcaccgacgg

SEQ ID NO: 257710 - DNA, 506 bp, Unknown
  Bacterial polypeptide expressing nucleotide sequence isolated from the Sargasso Sea
aaccgatggattagatgggttagcaacagtgccagtaattttagttgcaggatgttttgctttcattagttacataacgggtaatatttttttttctgaatatcttcaaatattatatattgaaggtacgggtgaaatatctattttttgtggttctataataggtgcgtgtttaggttttttgtggtttaacgcccccccagcaaaaattttcatgggagatacaggatcgctctctttaggaggttcgttaggagcgataggcattataactaaacatgaaatagtattagcaataaccgggggcttatttgttcttgaagctctttctgtagtggttcaagtagtttcatttaaattgactgggaaaagaatatttaaaatggctccaatacatcaccattttgagaagaagggctggccagagtcgacagtagtaataaggttttggattatttcaataatattggctgtaattggtttggctacattgaaattaaggtgat

SEQ ID NO: 257711 - DNA, 780 bp, Unknown
  Bacterial polypeptide expressing nucleotide sequence isolated from the Sargasso Sea
aatgctatataattttttaatttcattaattgatgaattttcctttcttaatgtatttcgttatttaacatttagaacaggactttcagttatgtcttctatgataattgtttttgttattggaggtccatttattaaatttatacaatctcataaaattacaggacctataagagaagatggaccaattgaccatatagttaaaaaagttggtactcctacaatgggaggtcttttaattttaataggaattctttttggcactttattgtgggcagatcttaccaattcttacatttgggttttgttaatggttgcaacaagttttggtctactcggttttgttgatgattatcttaaaatcaaaagaaataattcaacgggagtatcatcaaagatgaaaataatttgccaagtaatactttctttaattgcagtatttttgttattaaactacggaaataatgatcatctcgaaaacctttattttcctttctttaaaaatttgtcattacatctcggtctatttttcattcctttcgctatatttattatagttggttcttctaatgcagttaatcttacagatggtttggatggtttagctactgttcctgtaatgttggtagctctttcttttacattaatatgttatgttgtaggtaatattgttttttctgattatttgcaaataccctatatagccaatgttggagaggcttcaattttttgcggatctatagttggatcttgtttgggttttttatggtataacgcacc

SEQ ID NO: 257712 - DNA, 826 bp, Unknown
  Bacterial polypeptide expressing nucleotide sequence isolated from the Sargasso Sea
gagggcacgcccacaatgggaggagtcatcattttaatggcagtactcctcccaaccctcctttttgcaaaagtcaacagtgtcttaattcagattatagtttttgcaacaatttggatgggtattattggctttatagatgattacctaaaagtagtaaaaaaaatcaaacgtggtttaatagcccgatacaaacttgcaggacaaatcctactaggttgcattgtgagcttttggatatttaatacaccagatttcattgacttcaatactaagactacggttccttttttcaaaaatgttgaaattgattttggattgctttatccattaatggtaatccttgtcatcacagggacatcaaatgcagttaatttaacagatggattagatggtttattagctgggcttttggctatatgttttacggtcttttcagcaatagcctatatttcaggaagaattgatttctctgactatttaaatattctctatatccctggtgctggtgagctcactatcttcacagctgcaatggctggagcttgcattggatacttgtggtttaactcatatcctgctgaagtatttatgggcgatactggatcactttcgactggtgctgctttgggtacacttgcaatcttattaaaaaaagaattacttcttttaattattggtggtgtcttcgtttgggaggctctatcagtgattattcaagttttatattttagatatacaaaagaattttctggtactgggaaaaagttttttatgatggctccaattcatcatcattttgaactcaaaggttggcctgagtcaa

SEQ ID NO: 257713 - DNA, 310 bp, Unknown
  Bacterial polypeptide expressing nucleotide sequence isolated from the Sargasso Sea
tatgggagatgttggctctcatttcatcggttcaatgtttccaattatattgatttcaatcggtgctgatggcctaattttgttcttctgttttctgtatattttcgaggccttgtctgtaataatccaagtttcttcttttaaattaaatcaaaaaagaatttttagaatgacaccaatccatcatcattttgagatgagtggatgggctgaaaccacaataattgtaagattttggatcatcaatggaatatttattgtaatagggcttggtctgttttatggagactgggtattgtttggaaattaa

SEQ ID NO: 257714 - DNA, 796 bp, Unknown
  Bacterial polypeptide expressing nucleotide sequence isolated from the Sargasso Sea
gatactaggtccatatataatcaaatttttgagaacaaagcagttttatcaatctattagacaagatgggccgaagagtcacttggatgacaaaaacacgacaccaactatgggagggttaattatcatttcttcaatcgtgatttctacaatactttggtctgatttaggtaatgattatatattattattattgtttggcattcttagttttggtgtaattggtttttatgatgattataaaaaacttgttgaaggacgaagcgatggcatcaaaggaagagtgaaactttttttacagattctctctgcatcacttataacaatatatttattttcatatatgaatacaggtgagataggttcagttatgccatttttaaaagataatagtttttacctgggtgtgttatttataccttggtctatattcattcttgtaggatcgtcaaacgcagtaaacttaactgacggtttagatggtcttgctattcttccatgcatactcattgcatcagcatttgttatttttgggtatgtacatggtaacgtcaatatttccgagtacttactcattccatacattgaaggctccggtgaggttgcaatatttgccgcatctctagtgggtgcaggattgggttttctatggtttaattcatatcctgcagagatattcatgggagattgtggatccttgtcattaggaagttctcttggtttactagcaataattctaaaacaagagttagcatttgctattatgagtggaatattcatagccgaggtattatca

SEQ ID NO: 257715 - DNA, 181 bp, Unknown
  Bacterial polypeptide expressing nucleotide sequence isolated from the Sargasso Sea
tcttagcgttgctattcaggtaatttcatttaaaacaaggggaaaaagagtatttttgatggctccaattcaccatcattacgaattaaagggttgggcggaacccaaaataattgttagattttggatagtaactttagttttaattctaattgcattggcaactttgaaacttagataa

SEQ ID NO: 257716 - DNA, 614 bp, Unknown
  Bacterial polypeptide expressing nucleotide sequence isolated from the Sargasso Sea
tcacattgtaaaaaagataggcacgcctacaatgggtgggttaatgattttgttaggagttttttcaggtgtattattatggggagatctttcaaatccatataattggtttttaatttatatagctggatcatttggattattaggagcctatgatgattataaaaaaataaaaaaaaataattcatcaggagtatcttcaaaatttaaaattattattcagatttttttagctttaattggaatattaattttatatttttatagtgaatctaatgagataaaaaatttatattttcctttttttaaaaattttgtaattaatttgggttggttttttattcctttctatttatttgtattagttgggtcttcaaatgcagtaaatttaacagatggtctagatggcttggcgactgttcctgtaatacttgtagctggatgctttgcttttataagttatgttgttggaaatgttgttttttcagaatatttacatattccatatataaagggagtaggtgaagcatctgttttttgcggatctattataggagcttgtttaggatttctatggtttaatgctccacctgcaaaaatatttatgggagata

SEQ ID NO: 257717 - DNA, 269 bp, Unknown
  Bacterial polypeptide expressing nucleotide sequence isolated from the Sargasso Sea
attaggaggatccttgggagccgtaggaattattactaaacacgaaatagtcttagctatcactggaggattgtttgttcttgaggctctatcagtgatggttcaggtaatttcatttaaattaactggcaaaagaatattcaagatggcacctattcatcatcattttgagaagaaaggttggccagagtctacagtggttataagattttggataatttcaattattttggcaatgattggtctagctacacttaaattaagataaa

SEQ ID NO: 257718 - DNA, 774 bp, Unknown
  Bacterial polypeptide expressing nucleotide sequence isolated from the Sargasso Sea
aaatgtatttatctggactcttatttttgtatttttaagtcttggtgttttgggttttatagatgatctattaaaaataaatcttaaaaattcaagaggtttaaattcaaaattaaagtttttaggtcaattgattatagcgctaatagcattgtatattttaattcaattttctgatcatcaatatttatataatttatatttccctttttttaagaatttaattttacatatgggattattttttataccatttgcgctttttgttataattggatcatctaacgcggtaaatcttacagatggccttgacggtctagctactgttccagttatgttggttgctctttcattcactttcataagctatatagttggtaacactattttttctgaatatttacaacttcaatatattcctggggtcggagaaatatctattttttgcggttctattgttggctcttgtctaggttttctgtggtataacgcgcctccggcaaaaatatttatgggtgacactggctcactctctttaggaggttcgttagctgcagttgcaattattgttaaacatgaaattgtattagcgattattggaggattattcgttttagaaaccgtctcagtaataattcaagtagtttcattcaagttgacaggaaaaagagtatttaaaatggcacctattcatcatcattttgagaagaaagggtgggcagagtccacaatagtaatcagattttggataatcgcaataatattagcattggt

SEQ ID NO: 257719 - DNA, 233 bp, Unknown
  Bacterial polypeptide expressing nucleotide sequence isolated from the Sargasso Sea
aaaacatgaagttgttttagctataacaggtggtttatttgtattggaggcagtttcggtaattgttcaggtagtttcatttaaaattacaggaaaaagaatatttaagatggcaccaatacatcatcattttgagaaaaaaggatggccagagtccacagttgttattaggttttggataatctcaattattttagcaatgataggactggcaacactcaagttgagataat

SEQ ID NO: 257720 - DNA, 739 bp, Unknown
  Bacterial polypeptide expressing nucleotide sequence isolated from the Sargasso Sea
tgatgacttcacaaaacttaaaaaaagtaagaaaggcatgcctgcaaaaacaaagttcgttttgcagttcattgtcgcagctttgtccacttattatctccttggacaaggaagcgatgtactcagttcagaggtgctaataccttttacaaataatattcgtgtagatttaggttggctttttttaccttttgcgatatttgtgattgtcggttcaagcaatgcagttaatctaacagatggattagatggtcttgcaatcatgcctgtttcaatgattgcaattgctctcggaatttttgcttatgtaactggtaattttaactttgctgaatatttggatttgccttttcttcaagatgcaggtgaagtttttgttttttgttgtgccatctcaggcgctggattgggatttttgtggtttaacacttacccggctcagatctttatgggtgatgttggcgcagtatctcttgggggaattctcggaaccattgctgtaattgtcaagcaagagttgattttggctatcatgggtggagtttttattatggaaactttatcggttattcttcaggttggttcgttcaagctgagaggaaaaagaatctttaatatggctccaatacatcatcacttcgaattaaaaggatgggctgagcccaaagtgattgtgaggttctggatcatcaccgtttttctcgtacttataggcttatcaagtctaaagataaggtaa

SEQ ID NO: 257721 - DNA, 563 bp, Unknown
  Bacterial polypeptide expressing nucleotide sequence isolated from the Sargasso Sea
tttgattaaatattttgcttttgaataccagtcaatatttagctttctaaatatttttagttatataacctttagatcaggcgctgctattcttactgcattatttttttcattaatatttggtaattatttgataacaaaattatctaatattcaaccttctggtcaacccataagggaagatggtcctaagtcacatattattttaaaaaaaggaacccccactatgggtggtctaatgataatattaagtgttttagtagcaacaattttatgggctgatttgaataataattttatttggattgctttattaacaattataatttttggattaattggatttgcagatgattataaaaaaataaaaaataattctagtataggtatttcatctcaaattagaattttatttcaaatattttttggattattcataacttttttaataattaaaaatttagatccagctataagtaattctatgacattccctttttttaaaaacttaataatagattttggattattttattttatcatatctgtttttataataattg

SEQ ID NO: 257722 - DNA, 557 bp, Unknown
  Bacterial polypeptide expressing nucleotide sequence isolated from the Sargasso Sea
aatgttatataaatattttcttattttaagtaatgattatgcattcttgaatgttttcagatatataacttttaggacagcaatagcagttttcttaggttttttattttccttttttctagcacctccttttattcgttttttacaacgaagacaaattggagaggaaatcagagaagacggaccgcagtcacatttctctaaacgcggtactccgaccatgggtggatttattattcttctttctatcctaatatcaacagtacttttaaatgatttatctaataggtttgttcttctttcactttttgttttggtggcttttggttttttaggtttatttgacgattataaaaaagtagtaaagaaaaatacaaagggtcttaccgcgggaaaaaagtttatttttcaatttctaattggtctaattgtaggatttcttctctataagggatttatttctaaagaatttaaaacagtagttatgtttccatttttcaaggattttttgcctcagcttggagtattttttattccttatgctgctatcgttattg

SEQ ID NO: 257723 - DNA, 343 bp, Unknown
  Bacterial polypeptide expressing nucleotide sequence isolated from the Sargasso Sea
tttatggtggaataccaatcctgcaaaaataattatggtagatgttggttctcattttattggttcaatgtttccaattatattgatttcaatcggtgcagatggcttaattttgtttttctgcttcttatatattttcgaggctttgtctgtgattatccaagtttcttcatttaaattaaatcaaaaaagaatttttaaaatgacaccaattcatcatcattttgagatgagtggatgggctgaaacaacaataattgtaagattttggattattaatggaatatttatagtaatagggcttggtctattttatggagactgggtattgtttggaaattaa

SEQ ID NO: 257724 - DNA, 382 bp, Unknown
  Bacterial polypeptide expressing nucleotide sequence isolated from the Sargasso Sea
gggggtggtgaagcatctatattttgtggctctataataggtgcttgcttaggcttcttatggtttaatgctcctcctgcgaaaatatttatgggagatactggatctctggccctcggagggtctttaggtgctgtagggattataacaaaacacgaaattgtcttagcaattacaggaggattatttgttttagaagccgtatcagttattgctcaggtcatatcatttaaattaacaggaaaaagaattttcaaaatggccccaatacatcatcattttgaaaaaaaaggttggccagaatcaactgtggtagtaagattttggataatatcaattattttagcaatgataggtttggcaaccttaaaattaagataat

SEQ ID NO: 257725 - DNA, 771 bp, Unknown
  Bacterial polypeptide expressing nucleotide sequence isolated from the Sargasso Sea
atagttaaaaaaattggtacaccaacaatgggaggtttaataattttattcggcttattggtatcagtaatattttggtcagatttatcaaatattaatattttattttgtatctacatagcaattacttttggtttattgggagcatatgatgattttaagaagattaaatacagcaactcatcaggaatttcttcaaaatttaaaataatttcacaaataattttagcaattattggtgtaagtttttttgtttatttaaacgattatcaagatttaaataatttatattttccattctttaaaaatttaatcataaaccttgggtggttttttataccatttgcaatatttgtaattattggttcgtcaaatgctgtcaacctcacggatggattagatggtttagcaacagtgcctgtaatattagttgcagcatgttttgctttcataagttatgttactggaaacatcgtattttcaaattatttacaaataccctacatagaaggaactggtgaagtatcaattttttgtggcgcaattattggctcttgtttaggtttcttatggtttaatgctccacctgctaaaatttttatgggtgacacaggttcattatctcttggaggatctttaggtgctgtaggaattatcacaaagcatgaaattgttttagctattactggtggactttttgtactagaggcagtttcagtaatggttcaagtaatttcgtttaaactcactggaaaaagaatttttagaatg

SEQ ID NO: 257726 - DNA, 343 bp, Unknown
  Bacterial polypeptide expressing nucleotide sequence isolated from the Sargasso Sea
tggcgctgctttgggattctctggtttaatgcgccaccagcaaaagtttttatgggtgatactggctctttagctttaggagctacaataggatcaattgcaataatggttaagcatgaaatagttctggcaattgctggaggtttatttgttttagaaactttgtcagttattattcaagtaattagtttcaaattaactggcaaaagagtatttatgatggcacctttgcatcatcactttgaaaaaaagggatgggcagaatcaacaatcgtgattaggttttggattataacaatcgttcttgctttgctaagtttagccacattaaaaattcgataaa

SEQ ID NO: 257727 - DNA, 340 bp, Unknown
  Bacterial polypeptide expressing nucleotide sequence isolated from the Sargasso Sea
gctggattgggatttttgtggtttaacacctatccagctcagatctttatgggagatgttggcgcagtatctcttgggggaattctcggaaccattgctgtaatcgtcaagcaagagttgattttggctatcatgggtggagtttttatcatagaaactttatcggttattcttcaggttggttcatttaagctgagaggaaaaagaatctttaatatggctccaatacatcatcacttcgaattaaaagggtgggctgagcccaaagtgattgtgaggttctggatcatcaccgtttttctcgtgcttataggcttatcaagtctaaagataaggtaat

SEQ ID NO: 257728 - DNA, 307 bp, Unknown
  Bacterial polypeptide expressing nucleotide sequence isolated from the Sargasso Sea
cctgctaaaatattcatggggcgatacaggctctctatctctaggtggatctcttgctgcggtagctataattgtaaaacacgagatagtcctagcaataattggaggtttattcgtgttagaaacagtttcggtgattatacaagtaatttcatttaaacttacaggaaaaagagtattcatgatggcaccaatacaccatcattttgaaaaaaaagggtgggcagaatctactatcgttattagattttggataatagcaatcattttagctttgatagggctagcgacattaaaattacgttaa

SEQ ID NO: 257729 - DNA, 511 bp, Unknown
  Bacterial polypeptide expressing nucleotide sequence isolated from the Sargasso Sea
aacctaactgatggcctagatggacttgctactgttcctgttattttagttgcagcatgtttcggttttataagttatgttactggaaatatagtattttctgaataccttcaaataccttatataaaagatgtgggtgaagcatctattttttgtggttcaattattggagcttgtctaggttttttatggtttaatgcaccaccagcaaaaatttttatgggagacacagggtctcttgctttaggaggatcattaggagctgttggaattataactaaacatgaaatagtattagcaattacaggtggattatttgtactagaggcagcttccgtaattgttcaggtagtttcttataagcttactggaaaaagaatttttaaaatggcaccgatacatcaccattttgaaaaaaaaggttggcccgagtcaactgtagttgttagattttggattatatcaataattttagcaatgataggtttggcaactttaaaactaagataat

SEQ ID NO: 257730 - DNA, 392 bp, Unknown
  Bacterial polypeptide expressing nucleotide sequence isolated from the Sargasso Sea
tgaattgacaatatttacttctgctatggctggagcttgtttaggttatctttggtttaattcacatcctgctgaaatatttatgggagacacagggtctttatccactggggccgctttgggtacgcttgctatacttctaaaaaaggaattgcttctactgattattggtggagtattcgtttgggaggcaatttctgttattattcaactatcttatttccgatatacaaaatcattgaatggtgagggaaagcgttttttcaatatggcacctatccatcatcattatgaactaaaaggctggccagaaacaaaagtagtgattcgcttttggattataggactattactcgctcttttttcattgactacctttaaaataagatgat

SEQ ID NO: 257731 - DNA, 682 bp, Unknown
  Bacterial polypeptide expressing nucleotide sequence isolated from the Sargasso Sea
aatgctttttagtctattttccaacttagttgaattttttagttttctgaatgtttttaaatatttgactgtaagaaccggtctatcaatgtttacatctatgatagtagtttttttagttggaggtccacttataaattatttttcgtcacatcaaattcacgacccgattagagaagatggaccaagtgatcatatagttaaaaaaataggaacacctacaatgggaggtcttatgattttactaggtattttttcaggagttcttttgtggggtgacttttcaaacccatataattggtttttactttatatagcgggatcttttggattacttggggcttatgatgactatcaaaaaattaaaaaaaataattcgaacggtataagttcaaaattaaagatcatatttcaaattattttagcattggttggaatttttattctttatttttacagtggatctaatgagattgagaatttatattttcctttttttaaaaatttaataattaatttaggttggttctttattccattttatttattcgttattgtaggttcttcaaatgctgttaatttaactgatggtctagatggtttagctacagtgcctgtaatattagttgcagcatgttttgcttttattagttatgtgacaggaaatatagtttttttcgga

SEQ ID NO: 257732 - DNA, 280 bp, Unknown
  Bacterial polypeptide expressing nucleotide sequence isolated from the Sargasso Sea
gggtcactttctttaggtggatcattaggagcttttgggattataactaaacacgaaattgttctagctatcacaggcggattatttgttttggaggctatatctgtaattgtgcaggttgtttcatttaaattgactggaaaaagaatttttaaaatggctccaatacatcatcattttgagaaaaaaggatggccagagtcaactgtcgtaataagattttggattatatctataattttagcattaattggaattgcaactcttaaattaagataat

SEQ ID NO: 257733 - DNA, 367 bp, Unknown
  Bacterial polypeptide expressing nucleotide sequence isolated from the Sargasso Sea
aatggttggcgcttgcctagggtttctttggttcaatgcctctccagctgagattttcatgggcgatacaggatctctatcaactggagctgcccttgggacacttgctatagtcttaaaaaaggagcttttattatttattattggaggagtttttgtatttgaaacaatatcagttataattcaagttttatttttcagatataccaaatttagattaggaaaaggccagcgtttttttaacatggctcctatacaccatcattatgaactagctggaatcaaggaaagtaaaatcgtcgtgagattctggatagttgggattctcttggcacttttttcactaacaacttttaagataagatag

SEQ ID NO: 257734 - DNA, 806 bp, Unknown
  Bacterial polypeptide expressing nucleotide sequence isolated from the Sargasso Sea
aatgtttgaatatttaggcacagcactagtttcaattgatcctggatttgatgttttaagatatttaacagttagaactattggcggaaccataaccgctcttcttatttctatcttcttaggtcctattattattaattttttaaaatctatgcaatttgaacaatttgtcagagatgatgggcctaaatctcattacaaaaaaacaggaactccaacaatggggggattaataattctttcttcattaataatctcaactcttctttgggctgatctgggtaatagatatatttgggttgttctttttgtcacatttgggttttcaattattggattctttgatgattatttaaaaataaaattcaaaaactcaaaaggactttcatcaatacaaaaaatattgttccaatcattaatagcatttttagctgttacctatctatattattctgccgaaatacctccagaaacttcttttatagttccatttttcaaggatgcaattttgccgatgtcaccttttttgttcatttttataggaatgtttgttcttgtgggatcatctaatgctgttaatttaactgatggtttagatggtttggcaatattaccttcagttttgattggaggtgctttggggctcatagcatatgctatgggaaaccagcttctttcagattatttatatcttcctcacttacctttatctggagagttaattgtattttgtggagctcttattgggtctggaataggttttttgtggtacaacacatacccagctcaaatttttatgggtgata

SEQ ID NO: 257735 - DNA, 577 bp, Unknown
  Bacterial polypeptide expressing nucleotide sequence isolated from the Sargasso Sea
catcaacttagggtatttctttataccattctcaatttttgttgtggtaggctcttctaattcagtgaatttgactgatggattagatggattggcaattgtacctgtcatgattgctgcttcatgttttgctttaatagcttatcttgttggaaatataaatttttcttcttatttacaattaaattatgtgcctggggttggtgagattgcaattgttttaggtgcattatttggtgcaggattaggttttctatggtttaacgctccaccagctgaaatctttatgggtgataccggttcattatcgctaggaggtgttataggaatatctagtgtagctactagacatgagctcgtattagtcataattggaggcctttttgttgtagaaacaatttctgtgatcttacaagttggttattttaagttaacaggaaaaaggatctttctaatggcccctcttcaccatcattttgaaaaaagaggatgggaagagtcaacaatagttattagattttggataattgcagttattttggcccttgttggcttatcaacactaaaattgagataa

SEQ ID NO: 257736 - DNA, 353 bp, Unknown
  Bacterial polypeptide expressing nucleotide sequence isolated from the Sargasso Sea
agcactgataggttcagaaattggttttttgtggtataacacatatccagcacaagtattcatgggagatataggttcgctaagtttgggagctattttaggaattattgcgattattttaagacatgaattagtttttgcaatcatggctggagtatttgtaatggagactttaagtgtagcaatccaagtaatttcatacaaaacaagaggcaagagagttttcttaatggcaccgattcatcaccattttgaattgaaaggctgggctgagcctaaaattattgttcgattttggataataacacttgttttaattcttattgcattatctacattaaagttaaggtaag

SEQ ID NO: 257737 - DNA, 944 bp, Unknown
  Bacterial polypeptide expressing nucleotide sequence isolated from the Sargasso Sea
tttaacagcgttgttgatcagctttatttttggaccaagtattatatctattttgaaaaaaacacaaaaaaaggggcaaccaatacggtctgatggccccaaaaatcatattattttcaaaactggaacacctaccatgggcggtttacttattttgttggcctttactatctcaacaattttgtgggcgaaattagataatgtatatatatgggttgttttaagcgttgctatattttttggtataattggccttctggatgattggttgaaagtgtcaagaatgacaagtaatggcctcaaaagttatcagaagattattccccagattattgtagcattcttagcagcttggactattttagaaaacacacctgaaaattttcaaaatacattatcaattccttttttaaaagatagtatcttatttttaggaattatttatatcccatttactattttagttattgtgggctcgtctaatgctgtaaatttgaccgacggacttgatggattagcaattgtacctgtaatgattgctgctggttcattagcagtaatagtctatgtagttggacatgtaaatttctcaaattatctacaattaaattatattcctggagttggtgaaattacggttttgcttggcgctattattggttcagggttgggatttttatggtttaatgctccaccagcaatggtttttatgggtgatacaggttcattatcactcggaggagtgattggagtaactgcttcagcttcaagacacgaattagtgcttataattattggaggtctctttgtattagagactgtttcggtaatagttcaaattttatcatttaaattaacaggtaaacgaatatttaaaatggcgcctctacatcatcattttgaacaaaagggatgggcagaatctacaatagtcataaagttct

SEQ ID NO: 257738 - DNA, 262 bp, Unknown
  Bacterial polypeptide expressing nucleotide sequence isolated from the Sargasso Sea
ggttctcttggagcagtaggaattataactaaacatgaaattgttctagctatcataggaggcttatttgttcttgaggcagtatcagtaattgttcaagtcatatcttttaaattaactggaaagagaatatttaaaatggccccaattcatcatcattttgaaaaaaagggttggccagaatcaacagttgttattagattttggataatttcaataatattagcaatgataggtcttgctacattaaaacttagataat

SEQ ID NO: 257739 - DNA, 409 bp, Unknown
  Bacterial polypeptide expressing nucleotide sequence isolated from the Sargasso Sea
tatttgccattagcaagtgagcttacaatctttgctaccgcgttttttggaggctgtcttggtttcttatggtttaatacaaagcctgcagagatttttatgggagatgtaggatctttatcaactggagctgctttgggaacgttagcaattctactgaaaaaagaagtattactattaatagttggaggagtttttgttattgaaaccttatctgttatcattcaggtattgtattttagatatacaaaaaacaaatacggtactggtaagaaattctttctgatggcaccaattcatcatcattttgagttgaaaggttggcccgaatcaagagttgtaacaagattttggattataggtatactttttgctttaatgtctttgactactttcaaagtaagataac

SEQ ID NO: 257740 - DNA, 271 bp, Unknown
  Bacterial polypeptide expressing nucleotide sequence isolated from the Sargasso Sea
ttctttagggggatcactagctgctattgctataattgttaaacatgaaatagtattggcgataattggtggactgtttgtattggagactgtgtctgtgattattcaagtaatatcatttaaattgacaggaaaacgaatatttaaaatggcaccgattcaccatcattttgaaaagaaaggatgggctgagtcaactatcgtaattcgattttggataatagctataattctagctttaattggcttggcaacacttaaactaaggtag

SEQ ID NO: 257741 - DNA, 873 bp, Unknown
  Bacterial polypeptide expressing nucleotide sequence isolated from the Sargasso Sea
caccaacaaatgggaggtgtaataattttattggcttattagtatcggtaattttttgggcagatttatcaaatattaatatattattttgcatatatatcgcaattacttttggtttattgggagcatatgatgattttaagaagattaaatatagtaactcatcaggaatctcctcaagatttaaaataacttcacaaataatattaacaattattggagtaagtttttttatttatttaaacagttatcaagatttaaataatttatattttccattttttaaaaatttgatcgttaatcttggatggttttttataccatttgcaatatttgtaattgtaggttcatctaacgctgttaatcttacagatggattagatggtctagcaactgtacctgtaatattggttgcagcatgttttgcttttataagttatgttactggaaacatcgtattttcaaattatttacaaattccatatattgaaggaacaggtgaagtagcaattttttgtggggcaattataggctcatgtttaggttttttgtggtttaatgcaccacctgctaaaatttttatgggtgacacaggctctttatctcttggaggatctttgggcgctgtaggtattataactaagcatgagattgttttagcaattactggtggactttttgtattagaggcagtttcagtaatggttcaggtaatatcctttaagcttactggaaaaagaatttttagaatggcgcctattcatcatcattttgagaaaaagggatggcccgagtctacagttgtaattaggttttggattatctctatcatactagcaatgattggtttagctaccctaaaattaagataat

SEQ ID NO: 257742 - DNA, 757 bp, Unknown
  Bacterial polypeptide expressing nucleotide sequence isolated from the Sargasso Sea
actgttaggcgcttatgatgattaccgaaaaataaaatttaacaattcgaatggtgtttcctctaagttcaaaatttcaattcaaatattgttagcagttttcggaataatcattttatattattcaggagtttcaaatgaaatagaaaacctgtattttccatttttaaaaaatttagtaataaatttaggttggttttttataccattctatatatttgtacttgtaggatcatcaaatgcagtcaacttgaccgatggcttggatggtttagcaacagttccagtaatactcgtagcatcatgttttgcattgataagctatgtttctggaaatattgttttctcagggtatttacaaattccttatttagagggagttggagaggcttcaattttttgtggagctataataggggcatgcctaggttttctctggtttaatgcgcctcctgcaaaaatttttatgggtgacacaggatcactttctttaggcggatcattaggagctgttggaattataacaaaacatgaaattgttctagctattacagggggattatttgttttggaagctgtatctgtaatagtgcaggttatctcatttaaattaactggaaaaagaatttttagaatggctccaatacaccatcattttgagaaaaaaggttggccagagtctactgttgtaattagattttggattatatctataattttagcattaattggaattgcaactttaaaattaagataa

SEQ ID NO: 257743 - DNA, 847 bp, Unknown
  Bacterial polypeptide expressing nucleotide sequence isolated from the Sargasso Sea
tgttgatacttttagttttttaaatgtatttaaatatttaacttttagaacaggtttatctttttttacctcattggttatcgtgctgattattgggggtccttttattaaatttttttcaaaacaaaaaattttaaatcctattcgggatgatggaccagaagatcatataattaaaaaaattggtacaccaacaatgggaggtgtaataattttatttggtctattagtctcagtaatattttgggcagatttatcaaatattaatattttattttgtatatacatcgcaatatcttttggtttattaggagcttatgatgattttaagaagattaaaaatagtaactcatcaggaatttcctcaaagtttaaattaattttacaaataatattagcaattgttggagtaagtttttttgtttatttaaacgattatcaagatttaaataatttatattttccattttttaaaaatttgatcataaatcttgggtggttttttataccatttgcaatatttgtaatcataggttcatctaatgctgttaatctaaccgatggattagatggtcttgcaacagtgcctgtaatattagttgcagcatgttttgcctttataagttacgttactggaaacatcgtattttcaaattatttacaaattccctatattgaaggaacaggagaagtatcaattttttgtggagcaattataggctcatgtttaggttttttatggttcaatgcaccacctgctaaaatttttatgggtgatacgggctcattatctttgggtggatcattaggtgcagtaggaattattacaaagcatgaaattgttttg

SEQ ID NO: 257744 - DNA, 573 bp, Unknown
  Bacterial polypeptide expressing nucleotide sequence isolated from the Sargasso Sea
atttaggtctgttcgcagtaccgtttattctaatcgttatactgggatcagcaaatgcagtaaatttaaccgatggtctagacgggcttgcaattgtccctgtaatgattgttgcagcaacattcgctgtaatttgttatttggcaggcaatataatttttgctgaatatttatacataaattatttgccaggggcaggtgaacttactgtattgtgtgcagcaataataggatcagcgctaggctttttatggtataatgctcctcctgcaatggtgtttatgggagacacaggctcgctttcattgggagcagcattaggatcgattagtattttattaaaacaggaaatagttttagccattgttggaggtatttttgttgctgaagcaatatctgtaatattgcaagtctcatcctttaaattaactggaaaaagaatttttaaaatggcaccattacaccatcattttgaaaaaaatggtctaccagaatcaaaaatagttattcgtttttggatagttgcaataattttagcactaattgggctagcgacacttaaaatcagataaa

SEQ ID NO: 257745 - DNA, 838 bp, Unknown
  Bacterial polypeptide expressing nucleotide sequence isolated from the Sargasso Sea
catataattaaaaaaattggaaccccgactatgggcggagtaattatcttgtttggtttgttgatatcagtattattttgggctgatttatcaaatttaaatgttttattttgtttatatatcgcaatttcttttggtctacttggagcattcgatgattataaaaaaataaagtatagtaactcttccggtatctcatcaaagttaaaattaatctttcaaataatattagcaataattggtgtgagtttttatgtttactttaatgaatatcaagatttaacaaatctatactttcctttttttaaaaacctcatcattaatcttggatggttttttatacctttttcaatatttgtaattattggttcatcaaatgctgtaaatctaactgatggattagatgggttagcgacagtgcctgtaatacttgttgcagcttgttttgcatttataagttatgtcacaggtaatgttgtattttcaaattatttacaaattccttatatagaaggaactggagaagtttcaattttttgtggagcaataattggctcttgtttaggttttttatggttcaacgcacctccagcaaaaatttttatgggagatactggatctttgtctttgggtggctctcttggagcagttggaataattacaaaacatgaaatagttttagcaattacgggaggtttatttgttcttgaagctgtttcagttattgtgcaagtgatatcatttaaaattactggtaaaagagtttttaaaatggcaccaatacaccatcattttgagaagaaaggttggcctgaatcaaccgttgtaattagatttg

SEQ ID NO: 257746 - DNA, 129 bp, Unknown
  Bacterial polypeptide expressing nucleotide sequence isolated from the Sargasso Sea
ttttgatggcgccaattcatcaccattttgaattaaaaggctgggccgaaccaaaagttattgttcgattttggattataacttttgtacttgttttatttgcacttgcaaccttaaagttaagataat

SEQ ID NO: 257747 - DNA, 193 bp, Unknown
  Bacterial polypeptide expressing nucleotide sequence isolated from the Sargasso Sea
tgttcttgaagcagtttcagtgattgtgcaagtaatatcatttaaacttactggtaaaagagtttttaaaatggcaccaatccatcatcattttgagaagaaaggttggcccgaatcaacagttgtaattagattttggataatttctattattttagcaatgataggacttgccacattaaaactaagataa

SEQ ID NO: 257748 - DNA, 568 bp, Unknown
  Bacterial polypeptide expressing nucleotide sequence isolated from the Sargasso Sea
ggatggttttttataccatttgcaatatttgtaatcataggctcatctaccgctgttacccttacggatggattagatggtctagcaacggtgcccgtaatattagttgcagcatgttttgcttttatcagttatgttactggcaatatagtattttcaaattatttacagataccctacatagaagggactggagaagtatcaattttttgtggggcaattattggctcttgtttaggtttcttatggtttaatgctccacctgctaaaatttttatgggcgacacaggctcattatctctaggaggatctttaggtgcagtaggaattatcacaaagcatgaaattgttttagctattactggtggactttttgtactagaggcagtttcagtaatggttcaggtgatttcgtttaaacttactggaaaaagaatttttagaatggcgcctattcatcatcattttgagaaaaagggatggccagagtctactgttgtaattaggttttggattatctctatcattctagcaatgattggtttagctaccttaaaattaagataat

SEQ ID NO: 257749 - DNA, 772 bp, Unknown
  Bacterial polypeptide expressing nucleotide sequence isolated from the Sargasso Sea
attattcaaaaacttcgatcaagccaaatacttgagacaataggagaaagaggccctacaactcatcaatcgaaaaagggtacgccaacaatggggggaattattatccttaccgcggttattctccccacccttctttgggcaaatctaatgaatagctatattcatattatcttattttcaactttgtggatgggactttttggatttctagatgattaccttaaaactgtaaagaaaaccaagaaaggattagtagtaagatataaactttcaagccagattattcttggtttaattgttggtttttgggttttttttggttcagactttagtgaaatagggcccgtaacttctgtgccattttttaagaatcaagagattccatttggcatattttacattccttgggtaacacttgtactaacagcaagctccaatgctgtaaatctaactgatggtcttgatggtttagctgctggtcttttggctatctgtgctattggccttgcaattgtatcttatatatctggcagaattgattttagtgattacctcaatattatttacctcccgaaagctagtgaactaacagtttttgccgcagcgttaggtggcgcatgtttaggttttctttggtttaatgcgcctcctgcccaagtgttcatgggagatactggagctctttctactggagccgcgatagggacgctagcaatattgttaaaaaaagagctcttattgatcattcttgggggtgtatttgtctggg

SEQ ID NO: 257750 - DNA, 607 bp, Unknown
  Bacterial polypeptide expressing nucleotide sequence isolated from the Sargasso Sea
aatgttatatttattaattttagatttaatagaaagttattcatttttaaatgtttttaaatatttaacagtcagaactggtttagctgtatttacctctttgcttgtagtatttttaattggcaacccctttataaattttttttcaacaaatcaaattttggatcccattagagaagatggtccagatcaacacattgttaaaaaaattggaaccccaactatgggtggtgtacttatacttattggattattttcaggaatacttctttggggtgatctaacaaatatttatatatggtttcttatttatatagtcggtggatacggactacttggtgcctttgatgattataagaaggttaaatataaaaattcatcaggtatatcttttaagtttaaattaatatcccaaatatttatagcatttttaggagtattatttttaacttacttttcagaaaaccaggatttaaagaatttatattttcctttttttaaaaatcttattttaaatttaggttggttttttattccatttgcaatatttattatagtaggctcgtcaaacgcagttaatcttactgatggtcttgatggcctagct

SEQ ID NO: 257751 - DNA, 505 bp, Unknown
  Bacterial polypeptide expressing nucleotide sequence isolated from the Sargasso Sea
aactgacggtttagacggtttagccacagttccagtcatgttagttgctttatcttttactttaatttgttatgtagtcggcaatacagttttttcagaatatttacaaataccttatatacctaatgttggcgaagtctctattttttgtggttcaatggtaggttcttgcctaggttttttatggtggaatgccccgccagccaaaatttttatgggggatactggctcattatctttaggtggatcacttggggccgtaagtataatttcaaaacatgaaattgttttgggaatcataggaggtctttttgttctcgaaacagtttctgttattatccaagtaatttcatttaaattgactggaaaaagagtttttatgatggcgcctctgcatcaccattttgaaaaaaagggctgggctgaatctactgttgttattaggttttggataatatctataattttagcgctaataggtttagctactcttaaattaagataa

SEQ ID NO: 257752 - DNA, 624 bp, Unknown
  Bacterial polypeptide expressing nucleotide sequence isolated from the Sargasso Sea
aatatgcaacacgattatctgtaccattttttaaagattttcagccagagttgggtttttcatatctcctattcattgtcttcatcatggtcgggacctcaaatgcggttaatttaacggatggcctcgatggccttgctattggtccgatcatcatttcgattctcacttatacaggaatcgtatacatctgtggccatgtcaaatttgctgaatatctgcgcattcaatatataaaagatgcgggagaaatagcagttgcgagttcagctatcctaggcgcaagtctgggtttcctttggtacaactcctaccccgcacaagtttttatgggtgatgttggttccttgtctcttgggggattgataggaaccatagcggttattgttaagcacgaattacttttaattcttattggtggaatttttgttattgaagctttatcagtaattattcaagtgggttatttcaaatatacgagcggaaaacggttttttaaaatggcacccctccatcaccattttgaagaattaggctggtcagagccaaaggtaattgttcgattttggattattgctgtcattttagcaatgattggcttgagcactttaaaactccgatgaa

SEQ ID NO: 257753 - DNA, 676 bp, Unknown
  Bacterial polypeptide expressing nucleotide sequence isolated from the Sargasso Sea
caggtcctgattgccatcgttgcgacactctggattattagcctaacaagtccagatttggcgacttccctggcggtacctttctttaaaagtttactaatagatttgagttggtttttcgttgcattcgctgtctttgtgatggtgggggcatcgaactcggtcaacttaacggatgggttagatggtttggccatcggaccagtcatgattgcggcggcggtatttgcaattatttcgtatttgattggaaactcggtcttttccagctatctccaggtccattatgtgcccggagctggcgagctctccgtcttttgtggcgctctggtgggagcgggccttggtttcctgtggttcaacgcgccacccgcgatggtgtttatgggggatacgggctccttgtccatgggcggtgccctcggtgcggtgagtgtgattactaaacacgaactggttcttgcggttgtcggtgggctgttcgttttagagacggtctcggtcatcgtccaggtcacgtcttttaagctcaccggaaagcgtgtgtttcagatggcgcctctccatcatcattttgaaaagaagggttgggcggagccaaccatcgttattcgattttggatcatcgcaatgatactggcccttttaggtctggccactctgaagttgaggtgag

SEQ ID NO: 257754 - DNA, 292 bp, Unknown
  Bacterial polypeptide expressing nucleotide sequence isolated from the Sargasso Sea
tatgggcgatacaggttcattagctttttgtggatctttaggtgcagtaggaataataactaaacatgaaattgttctagcaattacaggaggattgtttgttttcgaagctgtatcagtaattgttcaagtagtttcatttaagttgacaggtaaaagaatttttaaaatggctcctatacatcatcattatgaaaaaaaaggttggccggaatctacggtcgttatcaggttttggatagtagctataattttagctatgataggattggcaacactgaaatttagataa

SEQ ID NO: 257755 - DNA, 181 bp, Unknown
  Bacterial polypeptide expressing nucleotide sequence isolated from the Sargasso Sea
agtttcagtaatggttcaagtaatatcttttaaacttactggaaaaagagtttttaaaatggctcccattcatcatcattttgagaaaaaaggatggccagagtctacagttgtaattaagttttggattatctctattatcttaacaatgattggtttatctaccttaaaattaagataa

SEQ ID NO: 257756 - DNA, 770 bp, Unknown
  Bacterial polypeptide expressing nucleotide sequence isolated from the Sargasso Sea
aattctaagcgtaattttttcctccattttgtggtctgatttacataataactttatatggataggattattagctttaattttatttggtactattggaattattgatgattataaaaaaataaaatcaaattctagcaatggattaaaagctttaacaagaattattttacaaattatttttggattaattatttctttaataatattaaaatttttagatgataaaatagacacaacaatagcatttcctttttttaaaaatttaattataaattttggatatttttatttatttatttctctatttattttagttggttctgccaatgctgttaatttaacagacggattagatggtttagcaattgttcctgttatgatagttgcttcgacatttgcttttatagcttatgtttctggtaatttcgttttttcagattatttgctgataaattatattcctgggacaggtgaattatcaattttatgtggtgctttaattggttccgcacttggttttttatggtttaatgcacctccagctaaagtatttatgggtgatactggatctttagcactaggagcaacgctaggatcaattgcattaatggttaaacatgaaatagtattagcaattgctggaggtttatttgttttagaaactatgtcagttgtaatacaagttataagttataaacttactggaaaaagagtttttaggatggctccattacaccatcattttgagaaaaaaggatgggcagagt

SEQ ID NO: 257757 - DNA, 511 bp, Unknown
  Bacterial polypeptide expressing nucleotide sequence isolated from the Sargasso Sea
aatcttacagatggcttagatggtttggctacagtaccagtaatattggttgcagcttgttttgcttttataagttacgtgactggaaatatagtattctcagactatctacaaataccttacattgaaggaacaggagaaatttcaattttttgtggggcaatcataggttcatgtttaggttttttatggtttaatgctcctccagcaaaaatttttatgggagatacaggttcattatccctaggaggatctttaggtgccgtaggtataataactaaacatgaaattgttttagcaattacaggaggcctttttgttttagaggcagtttcagtaatggttcaggtaatttcatttaaacttacaggaaaaagaatatttaaaatggctccgatacaccaccattttgaaaagaaaggttggccagaatcaactgtagtaattaggttttggattatttcaattattttagcaatgattggtttagctacacttaaattaagataat

SEQ ID NO: 257758 - DNA, 370 bp, Unknown
  Bacterial polypeptide expressing nucleotide sequence isolated from the Sargasso Sea
atgattgtattttgcggtgctttagtaggttctggaattggattcctttggttcaatacttatcctgctcaagtatttatgggagatgtcgggtctttgtcgcttggtgctgcattaggaatagttaccgttattataaggcatgaatatgtcttgctagttatgggtggactttttgttattgaggcgctttcggttatcgttcaagtctcttcattcaagttaactggtaagagagtttttaacatggcacctttacatcaccactatgagctaaaaggttggcccgagccacgagtaattgttaggttctggattattacgttcatgcttgtcttgctaggtttagctttacttagactaagataaa

SEQ ID NO: 257759 - DNA, 685 bp, Unknown
  Bacterial polypeptide expressing nucleotide sequence isolated from the Sargasso Sea
atgctttatagccttttaacttctttagttgatactttttcttttctaaatgtatttaagtatattacctttagaataggtttgtcagtgatcacatcacttataattattttcttaattggtaatcctcttataaggtatttttcaaaaaaacaaattactggaccaattagacaggatggaccgattgatcacattataaagaaaagtgggacaccaacgatgggcggattaatgattttgataggaattattgtaagcacccttatgtgggctgatttaaataatgtgtacatttggatagttctttttgtttgtgcaagtctcggcttactaggctttgtagatgattatttaaaaattaaattaaaaaactcttcaggaattaatgcaaaacttaaattctttggacaatttctaatttctttagttgctattgtaatacttatttattttacagatcatgaaagcatatcaaacttgtattttcctttttttaaaaatcttgttctaaatatgggtttattttttattccttttggaatttttgtaattattggttcttcaaatgccgtaaatctaactgacggattagacggtttagctacagttccggtcatgttagttgctttatcatttgctttaatttgttatttggtcggaaatacaattttgcaaattatta

SEQ ID NO: 257760 - DNA, 280 bp, Unknown
  Bacterial polypeptide expressing nucleotide sequence isolated from the Sargasso Sea
tggttctctagcactaggagcaatactcggcatattagcaataatacttagacatgaactagtttttgcaattatggcaggagttttcgttgtagaaacattaagcgtagccattcaagtcatctcatataaaactagaggtaaaagggtttttctaatggcaccaattcatcatcactttgaattaaaaggatggcctgagcctaaaattatcgttcgtttctggattataaccctggtactgattcttattgctctcgcaacattaaaattaaggtaa

SEQ ID NO: 257761 - DNA, 937 bp, Unknown
  Bacterial polypeptide expressing nucleotide sequence isolated from the Sargasso Sea
atgctctataatttattaacaaactactcagatacatacacctttttaaatttttttaattttctaacagtgagaacaggtttagccgtcattacggcaatggtcgttgtttttttaattggagataaatttataacatttttttctacaaacaaaattaccaatcctattcgttcagatggacctgaaggtcatcttatcaaaaaaataggaactccaactatggggggtgttttaatattaataggtttgttttccggtgtttttttatggggtgatttatccaatccctataattggctattaatttttattactttttcatttggaattttaggagcatttgatgattataaaaaaataaaaaataacaattcaaaaggaatttcttcaaaattaaaattaattattcaaattattcttggtttaatttctttagttattttatataactttatagattcagacttaacaacaaatctttattttcctttttttaaaaatttagttattaatttaggatggttctttataccattttatctatttgtaattgttggatcatctaatgctgttaacctcacagatggtctggatggtttagccacagtaccagtaattttagtagctggttgttttgctttcataagctatgtttctggaaatataatttttgctgaatatttattaataccttatattgaaggagtaggagaggtcacagttttttgtggatcaataattggagcatcgatagggtttctgtggtttaatgctccaccagcaaaaatatttatgggggacactggttcgttagctttaggtggatcattaggtgccgtgggcgttgtcaccaaacatgaaatagttttagcaataactggtgggctgtttgtattagaggcagtttcagtaatagttcaaagttatatcatac

SEQ ID NO: 257762 - DNA, 811 bp, Unknown
  Bacterial polypeptide expressing nucleotide sequence isolated from the Sargasso Sea
agatctaaacaatatttatatatggatagttcttttcgtttgtacaagtcttggtttactaggctttatagatgactatctaaaaatcaaatttaaaaactcctcaggaatcaatgcgaaagtgaaattttttggacaatttctaatttctttatttgctattttaatgctggtttactttacggatcaccaaattatatcaaacttatactttcctttttttaaaaatcttgttttgcatatgggtttatttttcattccttttggtatttttgtaattattggttcttctaatgcagtgaatttaacagatggactagacgggttagctaccgtgccggtaatgttggttgctttatccttttctttaatttgttatttagttggaaacacaattttttcaaactacctacaaattcagtatatccccgacgttggagagctatcaattttttgtggctccatcgtgggatcttgtctgggttttctttggtacaatgccccaccagctaaaatatttatgggtgacactggctcattatctttgggcggctctatagcctcagtggctataatagtaaaacatgaaattgttcttgcaattgtaggaggcttatttgttttagaaacggtttcggtaattgttcaggtaatttcatttaaattaacgggtaaaagagtattcatgatggcacccatacatcaccattttgaaaaaaaaggttgggcagagtcaacagtggtaattaggttttggataattgctattattttggccctggtaggtttagctacattaaaattacgttaa

SEQ ID NO: 257763 - DNA, 862 bp, Unknown
  Bacterial polypeptide expressing nucleotide sequence isolated from the Sargasso Sea
ttcttttttaatgtttttaaatatttaacttttagatctggaggagctttattaactagtttaacttttagttttatatttgcccctgtcattattaattggttaagaaataatcaaaaatataaaaaaactataagagaagacgtaccaaataaacatttaataaaaaaaagaggcactccaactatggggggtttgctaatcttagtatcatttatattaagtactttgctttgggcagatacaaaaaattattatatatggctcgttctagcaattacttttgggtttggtgcaattggttttattgatgattattttaaattaacttctaaagatagaaaaggacttaaagttggtacaaaattaatttttcagtttttaataacctctatcacaatattttttttatataatctatttgattatcaatatattgatactttagcagttccatttcttaaaaattatttatttgatttaggtgttttatttccaatttttgcttttttagtaattattggcacttcaaatagtgtaaatcttactgatgggttagatggtttagctgttgttccagttattataactgcgacttgtttaggtttaatatcttatttagttggaaataaaattttttcagaatatttaaatctattttttgttataggtgcaggagaacttgcagtactaagctcggctttagttggctcatgtttaggatttttgtggtataacgctcatccagcaaaaatttttatgggcgatactggctctttatcaattggagcagcattaggttcaattagtataattataaagcatgaacttgttttatttataataggttttttatttgtta

SEQ ID NO: 257764 - DNA, 739 bp, Unknown
  Bacterial polypeptide expressing nucleotide sequence isolated from the Sargasso Sea
tttgtttctttatttataggttttttagatgattatttaagcataaaaaataaaaaaaatactggactaaaatcaaaagaaaaattcatcttacaaagtgtcatctcaataacttttatatttttagcctatgaaaaagacttaataaatccattaattgcaatttctgacacctggggaataaatacaaatatttttatattccccatttcttttttagtattagcaggcctaagtaattcagtaaatttgtcagatggactagatggactagcagctggatgtagtgcaattgtcttttatggactaggaaccgaaatattaataaaagatcagaaagaacttattatatttagtatcttatgttattcaatgtcgggcatatgtttaggatttctcaaatacaatagttatcctgcaaaaatatttatgggagacacaggatctctgagtattggtgcaattttaggttccatagcgttattaacgaatagcgtctttaccttatctattttctcaggaatcttcattattgaatctttatcagtaatgattcaagtaagtttttttaaaattacaaaaaaattattgaataatggaaaacgcatatttttaatggcacccctacatcaccattttgaacttaaaggcattaaagaacagaaaatagttgaaaatttttggaaagtcaacattttatttgtgattttgggtatagttttaaaaattaatctataaa

SEQ ID NO: 257765 - DNA, 808 bp, Unknown
  Bacterial polypeptide expressing nucleotide sequence isolated from the Sargasso Sea
aatgattttactgggcattttctcaggcgtagttttatggggtgatttttcaaatgcatacaattggttcttactttatataacaggctcctttggattgcttggagcttatgatgactttcaaaaaataaaaaaaaataattcaaatggtataagttcaaaaaaaaagattataattcaaattattttagcattatgtggaattttgatactttatttttatagtggatctaacgaacttcaaaatctatattttccgttttttaaaaacttaataattaatttagggtggtttttcattccattctatttatttattattgtaggatcatccaatgcagttaacttaactgatggactagatggtttagctacagtcccggtaatattagttgcagcatgttttgcttttattagttatgtaacaggaaatacagttttttcgagttatttacaaattacatatattgagggagtaggagaagcatcaattttttgtggtgcgataataggatcttgtttagggttcttatggtttaatgcaccaccagcaaagatttttatgggtgatacaggttccttggctttaggagggtcattgggggcagttggcattataactaaacatgaaattgttcttgccattacaggaggactatttgtattagaagctgtttctgttattgctcaggtgatatcattcaaacttactggtaaaagaatatttaaaatggcaccaatacatcaccattttgaaaaaaaaggctggccagagtctactgtggttattagattttggattatctca

SEQ ID NO: 257766 - DNA, 697 bp, Unknown
  Bacterial polypeptide expressing nucleotide sequence isolated from the Sargasso Sea
catgctgctaatgctggctcaatggctgcaagggctttcgccggatttcggctttctgcgcgtctttcaatacctgacgctgcgtgccgtgctggccgccgtcaccgccttgttgatcggcctgatcgtcggccccagggcgattcgcatgctgaccgcactcaagatcggtcagcccgtgcgcggctacggcatggagacccatctggtcaaaagcggcacgcccaccatgggcggcgtgctgattctgttctcgattgccgtttccaccctgctgtggtttgacctgtccaaccgctttgtctggatcgtgctgctggtcacgctgggcttcggtgcgattggctgggtggacgattggcgcaaggtcgtcaacaaggaccccgagggcatgcgctcgggcgagaagtatttctggcagtccgtcatcggcctgctggccgctctgtatctggtgttctgcatttccgagaacaacaacgccgaggttttcggcctgttcatctcctgggtgcagtctggcttttccatggacctgccgcccaaggccggtctgatggtgcccttcttcaaggaggtcagctacccgctgggcgtgctgggcttcatcgtcatgacctatctggtcatcgtgggcgccagcaatgccgtgaacctgaccgacggcctcgatggcctggccatcatgcccgtcatc

SEQ ID NO: 257767 - DNA, 783 bp, Unknown
  Bacterial polypeptide expressing nucleotide sequence isolated from the Sargasso Sea
ttgtcagtaattacttccttagtggtgtctttcattattggaggtccacttatcagaattttttctgaaaacatgatttcaggtcccataagacaagatggaccaatagatcatatcataaaaaaaacagggacacctactatgggtggtgtgattataattattggaatgcttacaagtactttattgtgggcagatttaaataatatctacatatggactctcatttttgtatctttaagtttaggagtcttaggttttactgatgactggttaaaaataagatttaaaaattcaagaggactaaatccaaaactaaaattttttggtcaattaattattggatctatagccttatttatcctaattaaattctccaatcatgaatatctgtacaatctttactttcctttttttaaaaatttaatttggcaaatgggtcttttttttattccgtttggattattcgttataattgggtcatctaatgcagtaaatttaacagatggtcttgatggtctagcaactgtaccagtaatgttagttgcactttcatttacattgattgcttatgtagtaggaaacacaattttttctgaataccttaaactacagtatatccctgatgttggcgaactttcgattttttgtggctctattgtaggatcttgcctcggttttctttggtataacgcgcctcctgctaaaatttttatgggagacacaggatccttgtctttaggcggttcattagctgcggtagcaataattgcgaaaccatga

SEQ ID NO: 257768 - DNA, 863 bp, Unknown
  Bacterial polypeptide expressing nucleotide sequence isolated from the Sargasso Sea
tttaaatccaatccggaacgatggacccgaagatcatatagttaaaaaaattggtacaccaacaatgggaggtttaataattttattcggcttattggtatcagtaatattttgggcagatttatcaaatattaatatcttattttgtgtctacatagcaattacgtttggtttgttgggagcatatgatgactttaagaagattaaatttagcaactcatcaggaatctcttcaaagtttaaaataacttcacaaataatattagcaattattggtgtaagtttgtttgtttatttaaacgattatcaaggtttaaataatttatattttccattctttaaaaatttaatcataaaccttggatggttttttataccatttgcaatattcgtaattattggttcgtcaaacgctgttaaccttacagatggattagatggtctagctacagtgcctgtaatattagttgcagcatgctttgcatttataagttatgttactggaaacattgtattttcaaattatttacaaataccctacatagaaggaaccggtgaagtatcaattttttgtggtgcaattattggctcttgtttaggtttcttatggttcaatgctccaccagctaaaatttttatgggcgacacaggctcattatctcttggaggatctttaggtgcagtaggaattatcacaaagcatgaaattgttttagctattaccggtggactttttgtactagaggcagtttcagtaatggttcaggtaatttcgtttaaacttactggaaaaagaatttttagaatggcgcctattcatcatcattttgagaaaaagggtggccagagtctacggttgtaat

SEQ ID NO: 257769 - DNA, 876 bp, Unknown
  Bacterial polypeptide expressing nucleotide sequence isolated from the Sargasso Sea
taaaaaaatcaggaacacctactatgggtggattgttaattataatgtctataattgtatctttaattttgtgggcagatttaaaaaataattttatttggattagtgtgctttctcttttaagttttgggactattggtttttttgatgattttaaaaaaattaaatctaattctagttatggattaaatgcaaaaacaagaatttttgctcaaattatagtaagttttataatagtttatttaattcaaataaacttaccatcaagtgtaaacaattcaatgtcatttcctttttttaaaaatgtaattattgattttggtattttttatttatttataggaatatttataatcattggttctgctaatgctgtaaatttaactgatggattagatggtttagcaattgttcctataatgatagtggcaatgacatattcatttatttcttatgtaacaggaaatatgattttttctgactatcttcatataaattatattattggaacaggtgaattatcagttttttgtggaacaattataggttcagcattaggctttttatggtttaatgctccacccgcaaaagtttttatgggtgatacaggatctctagcattgggtagctctcttggatcaactgcaataattgtaaaacatgaaattgttttagctattgttggtggattatttgttttagaaacattatcagttataatacaagttttaagttttaaacttactggtaaaagaatttttatgatggcacctctccatcatcattttgaaaaaaaaggttggccagaatcaacgattgtgattaggttttggataataactatcgttttagctttaataggtttagcaacttaaa

SEQ ID NO: 257770 - DNA, 222 bp, Unknown
  Bacterial polypeptide expressing nucleotide sequence isolated from the Sargasso Sea
tagtttttgcaattatggcaggtgtttttgttatagaaactttgagtgttgcaattcaagttatttcatacaaaacaagaggtaaaagagtttttcttatggctccaattcatcatcattatgaattaaaagggcttgcagagcctaaaatcattgtgaggttttggataatcactttagtactgattcttattgctttagctactctcaagctaagataat

SEQ ID NO: 257771 - DNA, 290 bp, Unknown
  Bacterial polypeptide expressing nucleotide sequence isolated from the Sargasso Sea
gggggacacgggttcattatctttaggaggctcgttagctgctgtagcaataattgcaaaacatgaaatagttcttgctatagttgggggattatttgttcttgaaactgtatcagtaattattcaagtgatttcatttaaacttacaggaaaaagaatttttaaaatggcaccaattcatcatcattttgaaaaaaagggctgggcagagtcaacaattgtaattcgattttggataattgcaataattttggctttagttggattagcgacattaaaattacgttagt

SEQ ID NO: 257772 - DNA, 643 bp, Unknown
  Bacterial polypeptide expressing nucleotide sequence isolated from the Sargasso Sea
attgattaactattctaatcatgagtacttaaatgaactttattttccattttttaaaaatttgattttagatttaggaattctttttataccatttggattggttgtaataattggagcatccaacgcggtaaatttgactgatggtctagatggtttagcaacggttcctgtaatgttagtagcgctctcatttactctaatttcttatgtagttggcaacactattttttctgaatatcttcaaattcaatatattccagaggtaggagagctatctattttttgtggatcaatcgttggggcatgcttaggttttctttggtataacgctccgccagcaaaaatttttatgggggatactggatcactttctctaggcggatctttagctgccatagcaatcatagtaaagcatgaaatcgtgttagcaattatcgggggattattcgttttagagactgtatctgtgattattcaagtcatatctttcaagttaactggaaaacgaatttttaaaatggcacctattcatcatcattttgaaaaaaaaggctgggcagagtctacaattgtaatccgtttttggataatagcaataattttggctttaataggattagcgacactaaaactaaggtaa

SEQ ID NO: 257773 - DNA, 571 bp, Unknown
  Bacterial polypeptide expressing nucleotide sequence isolated from the Sargasso Sea
cctgccctttggccttgaactgcccttagggcttctgatgtggccactggggctgtttgtcgttctagcggagagcaacgccaccaacctcaccgatggcctggatggcttggccagcggctgcggagcactggtgtttaccggtctggcacttcaactgatgctccgaggagacaacggagatcccgccttggctggcttctgcatgaccatggccggggcatggcttggctttctggtgcacaaccgaaacccggctcgggccttcatgggcgacacgggatccctggcgatgggagccgccctcagcggtgtggctctgttgtccaacagcctctggcccctgctggtgatgggaggcgtcttcgtcgctgaatccctctccgtgatcatccaggtttgggtgttcaaggccacgaaaggagctgatggtcaggggcgacgcgtgttccgcatggcgccactgcatcaccactttgagctgggcggcaccgatgaacgaagcgtggtgcccgcgttctggctggttacagcagggctggtgattctcggactggtgctgcgtccctga

SEQ ID NO: 257774 - DNA, 318 bp, Unknown
  Bacterial polypeptide expressing nucleotide sequence isolated from the Sargasso Sea
aagtattcatgggtgatacaggatctttatcatctggagctgcactgggaacactggctgtattattaaaaaaagagttattgctttttataattggaggagtttttgttctggaagctgtaagtgtaattgtccaagtcacctattttcgttggacaaggtatttgacaggaaaaggggaacgctatttcaaaatggctcccatacaccatcatttcgaactcaaaggttggccagaaacaaaaatagttataagattttggataattggtctattgctcgctcttctttcattaacaacttttaaagttcgatgat

SEQ ID NO: 257775 - DNA, 205 bp, Unknown
  Bacterial polypeptide expressing nucleotide sequence isolated from the Sargasso Sea
cggtggcctttttgttgtagaaacaatttctgtaatcttacaagttggttactttaagttaacaggaaaaagaatctttcttatggctcctcttcaccaccattttgaaaaacgaggatgggaagagtctacaatagttatcagattttggataattgcagttattttggctcttattggcttatcaactctgaaattgagataa

SEQ ID NO: 257776 - DNA, 208 bp, Unknown
  Bacterial polypeptide expressing nucleotide sequence isolated from the Sargasso Sea
tactggaggacttttcgtattggaggcaatttcattaatggttcaagttatatcctttaaacttacaggaaaaagaatttttagaatggcacccattcatcatcattttgaaaaaaagggatggcctgaatctacagttgtaattaggttttggataatttcaataattctagcaatgattggtttagccaccctaaaactaagataa

SEQ ID NO: 257777 - DNA, 697 bp, Unknown
  Bacterial polypeptide expressing nucleotide sequence isolated from the Sargasso Sea
atgttgttccatatcctggtccccttggcggacgatttcggcgctctcaacgtgtttcgctatctgaccttccgcaccggcggtgcagtgatcacggcattgattgtcagcttcctatttgggccggtgctcatcgagttgttgaagtcccgccagcaaggcggccagccaatccgcgacgatgggcccgaaagtcatctgctgacgaagaagggcacgccgaccatgggcggcatcctgattcttattgcgctctccagcgcgacgctgctgtggtcggatttgagcaatggctttgtttgggcggggctgggcgtcaccttagcctttggcatgatcgggttcctggacgactatctgaaggtctctaaccgcgatagccgaggcctttcgggcaagttgaaaattcttctccaagtggtcatcgccgcggtcgccaccttctggattatgcgccacctgccgcctcatctggcgacttcattggcgatcccattcgtcaagaacctgcttttggacctgggatggatgttcattatcttggcggtgctagtcatggtgggggcgtcgaacgcggtcaatctgacggacggcctggacggtctggcgatcgtgccggtgatgatcgccgccggcgtattcgccttgatcgcctatctgagcggccacagcattttcgctaactatctgcaaattc

SEQ ID NO: 257778 - DNA, 592 bp, Unknown
  Bacterial polypeptide expressing nucleotide sequence isolated from the Sargasso Sea
ctttaaaaatatggtcgtaaatcttggatggttttttataccatttgcaatattcgtaattattggttcgtcaaatgctgttaaccttacggatggattagatggtctagcaacagtgcctgtaatattagttgcagcatgttttgcttttataagttatgttactggaaacatcgtattttcaaattatttacagataccttacatagagggaactggtgaagtatcaattttttgcggggctattatcggttcttgtttaggtttcttatggtttaatgctccacctgctaaaatttttatgggtgacacaggctcattatctcttggaggatctttaggtgcagtaggaattatcacaaaacatgaaattgttttagctattactggtggactttttgtactagaggcagtttcagtaatggttcaggtaatttcgtttaaacttactggaaaaagaatttttagaatggcccctatacatcatcattttgagaaaaagggttggccagagtctacagttgtaattaggttttggattatctctatcattctagcaatgattggtttagctaccttaaaattaagataa

SEQ ID NO: 257779 - DNA, 658 bp, Unknown
  Bacterial polypeptide expressing nucleotide sequence isolated from the Sargasso Sea
aatgctatataatctcctattaccatttaaagattcattttcaataattaatctatttgaatacataacatttcgtgctggaatagcagcaatagccgcacttttcataagcttcataatcgggccctgggttatccacatactacaaaaaaaccagattggcgaagaaattcgttcaacaggtcccaaatcacatatgaagaaagagggcacgcccacaatgggaggagtcatcatattaatggcagtactcctcccaaccctccttttttcaaaaatcaacagtgttttagtacagattataatatttgcgacaatatggatgggagttattggttttttggatgactatttaaaagttataaaaaagatgaaacgaggtctaattgctcgtcataaactagctggccaaataagcctaggatgtattgtgagtttctggatattaaacacaccagaattcatcgatttcaatagtaaaacaactatgccattttttaaaaacgttgaaatagatctaggcatgctttatccattgatggtaattctagtaattaccggaacttctaatgcagtgaatctaactgatgggcttgatggattattagctggactcttagctatttgtttcacagtattctctgcaattgcctatatc

SEQ ID NO: 257780 - DNA, 716 bp, Unknown
  Bacterial polypeptide expressing nucleotide sequence isolated from the Sargasso Sea
gactagcgatggactctctgctttaagtaaacttttctggcaatcattaataactttagtagcttgttcttacttattttatagccatgaaaaccttgcagaagtaagtctaatagtgcctttttttaaagacgtctctatacctttgggcataggttttatctttctttcttattttgtagtcttaggtactagcaatgcagtaaatttaacagatggtttggatggtttggcaattttaccttgcgttatggttgctgccggattaggcataatcggctatctttctggtaatataatttatgctgatttcctgaacatcccctatttacctggaactggtgagatgattgtattttgcggtgctctagtcgggtctggaatcggtttcttatggtttaatacttatccagctcaggtttttatgggtgatgtgggatctctttctttaggggctgctttaggaattgttacagtcatcattagacacgaatatgttttattagttatgggtgggttatttgtcgtcgaagctctatcagtaattgttcaagtaacatcttttagacttacgggtaaacgtatttttcaaatggcacctttacatcatcactatgagcttaaaggatggcctgaaccgagggttattgtaagattctggattattactttcatgttagttttactcggtttagccttactgaggttaaggtaga

SEQ ID NO: 257781 - DNA, 844 bp, Unknown
  Bacterial polypeptide expressing nucleotide sequence isolated from the Sargasso Sea
ataggcgttttttcaggtgtcttactttggtgcaatttatttaatccttatatttggactttaatatttattgttgctggttttggattattaggcgcatatgatgattataaaaaaatcaagtttaataattcatctggagtttcatttaaatttaaaataacaatacaaattataattgctattttaggcattttgatattaatcaatttttcagatcattctaatttagaatatttatattttccattttttaaaaatttgttaataaaccttggttggttttttattccttttggtgcctttataatagtaggatcttccaacgcagtaaatttaactgatggactagatggtttagctactgttccagttattttggtagcttcatgttttgcgtttataagctatgtcacaggtaacattgtattttcagactaccttcaaattccttatgttgaaggagttggagaagtaactgtttttttaggtgctatcattggagcttgtcttggatttttatggtttaatgcaccacctgcaaaaatatttatgggagacactggttcgttggccttgggagggtcattgggaacagtaggtattattactaagcatgaaatagttttggcaataacaggaggtttatttgtattagaagcagtttctgtaatagttcaggtattatcatacaaattaactggcaaaagagtttttaaaatggctcctatacaccatcattttgaaaaaaaagggtggccagagtcaacggtagttattagattttggatcatatcaatcattttagcaatgataggtcttgctactttaaaattaagataaa

SEQ ID NO: 257782 - DNA, 649 bp, Unknown
  Bacterial polypeptide expressing nucleotide sequence isolated from the Sargasso Sea
ttaactgtaagaacaattggcggtacagtaacagcgcttttgctttcaatcttaatgggcccattaatcattaattctctcaaatcaatgcaatttgagcagtttgtcagaaaagatggaccacaatcccactacaaaaaaacgggtacgcccacaatgggaggattacttatattatcttctttaataatttcgactcttttatgggctgatcttggaaatagatatatttgggttgtattaggagtaaccataggtttttcaataattggtttttttgatgattatttaaaaattaaaaataaaagccccgatggactatcttcaaaacaaaagattttttttcaatccataattgcccttatatcaataacatatctatattactcagctgagattattcctgaacagtcttttattgttcctttttttaaagatttaataatacccatgtctccctttgtttttatttttattggagtgtttgtattagttggctcttcgaatgctgtcaatttgactgatggactggacggtcttgcaattcttccctcagtattgattggaggagcacttggcttaattgcttatgctatggggaaccaaaatatagcagattatttgtatctaccgcatcttccattatctg

SEQ ID NO: 257783 - DNA, 619 bp, Unknown
  Bacterial polypeptide expressing nucleotide sequence isolated from the Sargasso Sea
catgttagtttggttagccgaatttcttacccaatatgtgaatgcgtttaacgtattcagttatctgaccttcagatcgattttaggcgtgctaaccgctttactgctgagtctgtattttggtcccaagctgattgccgctttgcaaaaactgcaaattggccagacagtgcgtgatgacggcccacaaagccacttctccaaaaaaggcacaccaacgatgggtggtttgctgattttaggatctattgccatcagtactttgctctgggctgatttatccaacaaatacgtgtgggtggtgctgtttgtgctggtcagctatggctggattggttttattgacgactaccgaaaagtcattcgtaaagaccccaaaggcctgatcgcgcgctggaaatacttctggcagtcggtgtttgccattatcacggcgtttttcctgtatgccacagcggaaagacctgccgaaaccagtctggtgctgccttttatcaaagatgtattgccacagctgggcctgttctttttagtgaccacgtatttcgtgatggtgggctttagtaacgcagtgaacctgaccgacggtttggatggccttgccatagtacctactatt

SEQ ID NO: 257784 - DNA, 292 bp, Unknown
  Bacterial polypeptide expressing nucleotide sequence isolated from the Sargasso Sea
tatgggagaattaggatctttaacactcgggggaattttaggcaccctggcagttttaataagacatgagaaagtatttgcaattatggcaggagtttttgtgaaggaaactttgagcgtaattattcaagtgggctcatataaattaagaggcaaaagagtctttttgatggcaccaattcatcaccattttgaattaaaaggctgggccgaaccaaaagttattgttagattttggataataacttttgtacttgtcttatttgcacttgcaaccttaaagctcagataa

SEQ ID NO: 257785 - DNA, 168 bp, Unknown
  Bacterial polypeptide expressing nucleotide sequence isolated from the Sargasso Sea
ttcaagtcattagttttaaattaactgggaaaagagtgtttatgatggcccctctacatcatcactttgaaaaaaaaggatgggcagagtcaactattgtaattagattttggattatcacaattgttcttgctttgttaagtttagctactttaaaaatacgttaaa

SEQ ID NO: 257786 - DNA, 918 bp, Unknown
  Bacterial polypeptide expressing nucleotide sequence isolated from the Sargasso Sea
taagagatgacggtccggagtcacatttaattgcaaaaaaaggtactcctacaatgggtggattattgattattctaagtgtttttgtctccaccattatttggggtgatttacaaaatatttttatatggattttacttttaactattttgatttttggatctattggttttgcagacgattacaaaaaaataaaatcaaatacaagtgagggtatttcatcaaaaataagaattatatttcaaattattttttcatttttcattacatatttaattctgattaatttagatccaagcataagcaaatctatgacatttcctttctttaaaaatttaattatagattttggaatattctattttctaatttccatatttataattattggatcggctaatgcagtaaacttaactgatgggcttgatggtttagcaattgtccctgtaatgattgttgctatgtcatttgcattcatagcttatgtttcaggtaatatagttttttctaattatttacttatccaatatattcctggaactggtgaattagcagttttttgtggctctttaattggagctgctttaggttttctatggtttaatgcaccgcctgctaaagtttttatgggtgatactggatctttagcattgggtggatctttaggctcaatagcgataatatgcaaacatgaaattcttcttgcaataataggagggttatttgttctagaaaccttgtctgttgtaatccaagtatttatttttaaaatgacaggaaaaagagtatttttaatggctccactacatcaccattttgaaaaaaagggatggcatgagtcaacaatagttattcgtttttggataattactattgtattagctttgataggcttagctactttaagaataagataat

SEQ ID NO: 257787 - DNA, 551 bp, Unknown
  Bacterial polypeptide expressing nucleotide sequence isolated from the Sargasso Sea
tttttctgtatttgtaattataggttcatctaatgctgtaaatttaactgatggacttgatggattagcaacggttccagtaattctagtcgcaggatgtttcgcttttatcagttatataactggaaatgttgtattctctgattatttacaaattccttacatagaaggaacaggagaagtttcaattttttgtggagctataataggatcatgtttaggatttttgtggtttaatgctccgcctgcaaaaatatttatgggagatacaggttcattagctctcggagggtctttaggtgtagtaggcataatcactaaacatgaaatagttcttgcaatcacaggcgggttatttgtacttgaggctgtttctgtaatggttcaagtaatttctttcaaacttacaggtaagagaatttttaagatggctccaattcatcatcattttgagaaaaaaggttggccagagtccacagtggtaattcgtttttggataatctcaataatattagcactgattggtttggctacacttaaattaagataat

SEQ ID NO: 257788 - DNA, 793 bp, Unknown
  Bacterial polypeptide expressing nucleotide sequence isolated from the Sargasso Sea
tttttatcttttactaataggcactcttatgggcttagtaggcttggttgatgattatttgaaagtcaaaaaaaatagaaatttaggactgaaagccagaaataaatttacacttcaaacactcgttgcattattagcaagttattatttttattttttagatgattcaactattttttatctatttagtggttttggtattgatgtaggtttgctcaaatggtttttaatagtatttattattgttggtattactaatgctgttaatttaactgatggtttagatggattagttgctggcagctcagctgtatcatttggtgctattttaataattgctttttggatatttagacacccagattattattctaattttataaatcctgtatttatttcagttgaattagcagttttgatttcatcaattgcaggctcttgtcttggtttcttatggtggaacactaatccagcaaaaataataatgggtgatgtgggttctcaatttataggttcaatgtttcctttaattttattttctataggagctgatacattaatattattcttttgttttctttatattggcgaagcgttatctgtaataattcaagtattatctttcaaatatagaggcaaaagagtatttaaaatgacccctatacatcatcattttgaaatgagtaattgggcagaaactacaattattgtaaggttttggattataaatggaatagttattgtaatagggctaggtcttttctacggtgattgggtcttgtttggtaattaa

SEQ ID NO: 257789 - DNA, 757 bp, Unknown
  Bacterial polypeptide expressing nucleotide sequence isolated from the Sargasso Sea
tggatttgcagatgatttcagtaaagttaaaaataattcaagcaaaggtatttctgccaaaataagaatacttcttcaaattattgtttcactaatttttatatattggataactaaacaccatcatattaatattaagcttttatcattaccttttttaaaagatatttttattaatttaggtctgtttgcagtaccgtttcttctaatcgttatcttgggatcagcaaatgcagtaaatttaactgatggtctagacgggcttgcaattgttcctgtaatgattgttgcagcaacattcgctgtaatttgttatttggctggcaatataatttttgctgaatatttatacataaattatttgcctggggcgggtgagcttactgtattgtgtgcggcaataataggatcagcgctaggttttttatggtataatgctcctcctgcaatggtgtttatgggagacacaggctcgctttcattaggagcagcattaggctcgattagtattttattaaaacaggaaatagttttagccattgttggaggtatttttgttgctgaagcaatatctgtaatattacaagtctcatcatttaaattaactggaaaaagaatttttaaaatggcaccattgcatcatcattttgaaaaaaatggtctaccagaatcaaaaatagttattcgtttttggattgttgcaataattttagcactaattgggctagcgacacttaaaaatcagataaatagatga

SEQ ID NO: 257790 - DNA, 562 bp, Unknown
  Bacterial polypeptide expressing nucleotide sequence isolated from the Sargasso Sea
tggtttttattccgttttcatttttgttattgtaggctcgtctaatgcagtcactttgactgatgggctagatggccttgcaacagtgccagtaatcttagttgcaggctgttttgcatttataagctatgttactggaaatattgttttttcagattaccttcaaattccttacattgaaggaacaggcgagatatcaattttttgtggagcaataattggagcatgcttaggttttttgtggtttaacgcccctcctgctaaaatatttatgggagataccggatcattatctttaggaggttctttaggagctatatcaataattactaaacacgaaattgtactagcaataacagggggattatttgtgttagaagccttatcagtaatggttcaggtaatttcttttaaacttactggtaaacgcatttttaagatggcaccaatccatcatcattttgaaaaaaaaggatggccagagtccactgtggtaattaggttttggataatttctattatcctagccatgatcggtttggctactttaaaactaaggtaa

SEQ ID NO: 257791 - DNA, 574 bp, Unknown
  Bacterial polypeptide expressing nucleotide sequence isolated from the Sargasso Sea
tctgactctttggggaataaatatgaatattttcattttgccaatttcttttttagtacttgttggcatgagtaattctgtaaatttgactgatgggctagatggattagctgctggttgcagtggagttgtcttttatggattaggaacagaaatattaatgaaaggacagcaagagctttttgtttttagtattttatgttattcaatgtccggtatatgcttaggatttctcaaatacaatagttatcctgcaaaaatttttatgggtgacacaggatctttaactattggtgcaattctgggttctatagcgttattaactaatagcgtttttaccctatttattttctcaggaatatttattattgaatcattatcagtaatgattcaagtagggttttttaaaattacaaaaaaattatttcataaaggtaaacgtatttttttaatggctccactgcaccaccattttgaacttaaaggagttaaggaacaaaaaatagttgaacatttttggaaaatcaacattttacttgtaattttaggtatagttttaaaaatcaatctttaa

SEQ ID NO: 257792 - DNA, 544 bp, Unknown
  Bacterial polypeptide expressing nucleotide sequence isolated from the Sargasso Sea
gagtgtttgtattagttggctcttcaatgctgtcaatttgactgatgggctggacggtcttgcaattcttccctcagtcttgattggaggagcacttggcttaattgcttatgctatggggaaccaaaatatagcagattatttgtatctacctcatcttccattatctggagagttaatagttttctgtggggcactaattggatcaggtattggttttctatggtataacacatatccagctcaaatattcatgggagatattggttcactaactcttggagctatattaggaataatcgcaattattttaagacacgaattagtttttgcaattatggctggagtattcgtaatggagactttaagtgtagcaattcaagtaatttcatttaaaacaagaggcaagagagtttttttaatggcaccaattcatcaccattttgaattaaagggctgggctgagcctaagattattgttagattttggataatcacacttgttttaattctaatagcgttatctacattaaagctaaggtaa

SEQ ID NO: 257793 - DNA, 226 bp, Unknown
  Bacterial polypeptide expressing nucleotide sequence isolated from the Sargasso Sea
aatagttttagctataactgggaggattatttttgttttggaagcaatatcagtgattgtgcaggttctttcttttaaaatgacaggaaaaagaatttttaaaatggcccctatacaccatcactatgaaaaaaaaggctggccagagtcaaccgtggtcataagattttggatagttgcaattattttagcaatggttggtttagcaacactaaaatttagataa

SEQ ID NO: 257794 - DNA, 370 bp, Unknown
  Bacterial polypeptide expressing nucleotide sequence isolated from the Sargasso Sea
gcgttttttggtggttgtcttggcttcttgtggtttaatgcaaaacccgccgagatttttatgggagatgtaggatctttatcaactggagctgctctgggaacattagcaattcttctaaagaaggaagtattattgttaattgttggaggagtctttgtaattgaaaccttatctgttatcattcaggttttattttttagatatacaaaaaacaaatacggtactggtaaaaaattctttctaatggcaccaattcatcatcattttgaactcaaaggatggcctgaatcaagagtcgttactagattttggataataggcatactgtttgctctaatgtctttgactactttcaaagttagatagc

SEQ ID NO: 257795 - DNA, 217 bp, Unknown
  Bacterial polypeptide expressing nucleotide sequence isolated from the Sargasso Sea
cttgctataacgggtggtttatttgttttagaagcagtttcggtaattgttcaggtcttatcctataaacttactgggaaaagagtttttaaaatggcgccaattcatcatcattttgaaaaaaaaggttgggccgagtcaactgttgttattagattttggattatatcaattatattagcgatgataggtcttgcaactttaaaattaagataat

SEQ ID NO: 257796 - DNA, 650 bp, Unknown
  Bacterial polypeptide expressing nucleotide sequence isolated from the Sargasso Sea
aagtttgtttgtctatttgaatgattatcaagatttaaataatttatattttcctttttttaaaaatttaataattaatcttggatggttttttataccttttgctgtatttgtaataataggttcttctaatgctgtaaatcttacagatggtttggatggtttagcaacagtaccagtaatattagttgcagcttgttttgcatttataagttatgtaactggaaatattgttttttcaaattatttgcaaattccttacattgaaggaacaggtgaagttgcaattttttgtggagcaattattggagctagcttaggatttttatggtttaatgctcctccagctaaaatttttatgggagacacaggctctttatctttaggtggttctttaggagctgtaggtattataacaaaacatgagattgttttagcgataacgggaggtcttttcgttttagaagcagtctcagtaatggttcaggttatttcatttaaacttacaggaaaaagaatttttagaatggcacccatacaccatcatttcgagaaaaaaggttggcctgaatctaccgtagttattagattttggattatctcaataattctagcaatgataggacttgctactttaaaattaagataat

SEQ ID NO: 257797 - DNA, 781 bp, Unknown
  Bacterial polypeptide expressing nucleotide sequence isolated from the Sargasso Sea
gcgataggatttcttgacgactacctcaaagtcgtccaaggtcagactcgaggtttaatagcccagtacaagatgatcggccaatggagcttcgggctagcgctcggcacctaccttatttggaatccgatctcgggacacccgaccacgtggaccgccgttccattttttgcggatgtggcagcagtcttctcagttcctgtattcatcgtgtttactggtgttgtagtatcaggatcgtcaaacgctgtgaatctgactgatgggctagacggtttagccgctggcctaatcgcgatcgcgtcagcgacgatcggcatttttgcttacgtcgcgggtcgggtagacacctcgcagtacctcggattcttctatctgcccggtgcgggagagttgaccatttttgccctcgcactatctggagcggcactgggcttcttgtggtttaatgctcctcccgcagaggtctttatgggggatactgggtctctcgcacttggaggagcactcggggttatggccattctcctaaaggccgaattcctactggtaatcgtcggtggcgtattcgtgctggagaccctgtcggtgattgtgcagagggggtggttcaagtacacgaagtggcggttcggttcgggtaggcgcgtgttcaggatggctcccgtccatcaccacttcgagaaacttggttggtctgaaaccacggttgttatccgtttttggatcgtaggcgtccttttcgcgatgcttgcgttcagcaccctgaagatccggtgag

SEQ ID NO: 257798 - DNA, 472 bp, Unknown
  Bacterial polypeptide expressing nucleotide sequence isolated from the Sargasso Sea
gtaatacttgtagcagcttgttttgcatttataagttatgttacaggaaacattgtattctcaaattatttacaaattccttacatagagggaactggggaagtttcaattttttgtggagcaatcattggctcttgcttaggctttttatggttcaacgcacctccagcaaaaatttttatgggagatactggatctttgtctttgggtggctctctaggagcagttggtataataacaaaacatgaaatagttttagcaattactggaggtttatttgttcttgaagcagtttcagtgattgtgcaagtaatatcatttaaacttactggtaaaagagtttttaaaatggcaccaatccatcatcattttgagaagaaaggttggcctgaatcaacagttgtaattagattttggataatttctatcattttagcgatgataggacttgctacgttaaaactaagataat

SEQ ID NO: 257799 - DNA, 316 bp, Unknown
  Bacterial polypeptide expressing nucleotide sequence isolated from the Sargasso Sea
aacgctcctccagccaaaatctttatgggagatacaggctcattatctttaggtggatcattagctgcagtagctataattgttaaacatgaaatcgttctagcaattatcggagggttatttgttcttgagaccgtatctgtaattattcaagttatctcattcaaacttactggaaaaagaatttttaaaatggcaccaatacaccatcatttcgagcaaaaaggttgggccgagtctactatagttattcgattttggataattgcaataatattggctttggttgggttagcaacattaaaattaagataat

SEQ ID NO: 257800 - DNA, 844 bp, Unknown
  Bacterial polypeptide expressing nucleotide sequence isolated from the Sargasso Sea
ttaaataattatttcttatccttgaaagaaacaataactgttttcaatttatttgagtatataacattccgctcagcactagcggcaatcactgcacttatattatcttttatcattggtccatttttaataaaaaaattgaaagaaaatcaaattggtgaagagataaatgataatggtccaatgacacaccttgttaaaaggggcacgcctactatgggaggagtgattataatttttgctgcactcctccctacccttatgttctctaatttagataatacaatgataaagatagttatcatatctacaatatggatgggctttattggttttattgacgactacctaaaagtaataaaaaaagttgaaaagggaatgatagcacgatataaaatgataggccagattaccttggggatattgattagctattggatagtaaacagtaatgagtttatggcctttaacacaaagaccactgtaccatttttaaaaaatatagaaatagacctagggtatatgtatccagttttggttattattgttattagtgcgacatctaatgctgttaatcttactgatggcttagatggtttagccatagggcttttagctatttccttttctgtatttgctgctgtttcttacataaccgggagaattgatttttctgattatttgaatattttatatctccctagtgctggcgaattgagtgttttttctagtgcgatggttggcgcttgcttagggtttctttggtttaattcatctccagctgaaatttttatgggtgacacaggatcgctatcaactggagctgcgttagggacacttgcca

SEQ ID NO: 257801 - DNA, 571 bp, Unknown
  Bacterial polypeptide expressing nucleotide sequence isolated from the Sargasso Sea
atgggtttattttttattccttttggtatttttataattatcgggtcatctaatgctgtaaatttaactgatggattagatggtttagctacagttcctgtgatgttagttgctttatctttttcactaatttgttatgtcgttggaaatacaattttttcaaattatttgcagatacaatatattcctgatgttggagaactttcaattttttgtggtgcaatcgtagggtcatgtctaggttttctttggtataatgctccaccggctaaaatatttatgggggacacgggttcattatctttaggtggatccatagcttcagttgcgattattgttaagcatgagatcgttcttgcaattgtgggtggcttatttgttttagagacggtttctgtaataattcaagtagtttcatttaaattaaccggcaagagagtattcatgatggcgccaatacaccatcattttgagaaaaaaggctggccagagtctactgttgtaattcgattttggattatagcaattattttagctttagtaggactagcaacacttaaattaagataat

SEQ ID NO: 257802 - DNA, 163 bp, Unknown
  Bacterial polypeptide expressing nucleotide sequence isolated from the Sargasso Sea
agtgatatcatttaaacttactggtaagagaatatttaaaatggcaccgatacaccatcattttgaaaaaaaaggctggcctgagtctactgtagttattagattttggattatatcaattattttagcaatgataggtttagcaacattaaaactaagataa

SEQ ID NO: 257803 - DNA, 360 bp, Unknown
  Bacterial polypeptide expressing nucleotide sequence isolated from the Sargasso Sea
tttgtggggcaattattggatcttgtttaggatttttatggtttaatgctccacctgctaaaatttttatgggcgacacaggctctttatctcttggaggatctttaggtgcagtaggaattatcacaaagcatgaaattgttttagctattactggaggtctttttgtactagaggcagtttcagtaatggttcaggtaatttcgtttaaacttacaggaaaaagaatttttaaaatggcacctattcatcatcattttgaaaaaaaaggatggccagagtctacagttgtgattaggttttggattatctctatcattctagcaatgattggtttagctaccttaaaattaagataat

SEQ ID NO: 257804 - DNA, 469 bp, Unknown
  Bacterial polypeptide expressing nucleotide sequence isolated from the Sargasso Sea
aatgttagtagctttatcatttactctaatttgttatgtagtaggcaacactgtttttgcagaatatttacaaattccttatattgcaaacgttggcgaaacttccattttttgtggatctatagttggatcttgcttaggatttttatggtataacgctccaccagccaaaatttttatgggcgatacaggctctttgtctctaggaggatctttgggagcagttagtattatatcaaaacatgaaatagtcttaggaattatcgggggtttatttgtgttagagacagtttcagtaattattcaagtaatttcatttaaacttactggtaaaagggtttttatgatggcgcctttacatcaccattttgaaaaaaaaggatgggctgaatccacagtagttattagattttggattatatcaataattttagcattaataggtttagctacattaaaattaagataa

SEQ ID NO: 257805 - DNA, 650 bp, Unknown
  Bacterial polypeptide expressing nucleotide sequence isolated from the Sargasso Sea
tttcttatatctcacgcagaaaaataaagccgaaatctcactcatcttattattcaacaaagactggatttttgagatgagcatggctgcttttattgtatttgggacttttgtcattgttggttcctcaaatgccgttaatcttacagatggcttggacggtctagcaattcttccaactgtgttaattggaggagggctaggtctgattgcttatgcaatgggtaatcaactaattgcggactatttgtttattccacatttaccaattgcaggagaactaatagtattttgtggtgctcttattggttctggaattggatttctttggtataacacatatccagctcaagtatttatgggggatgtaggctctttaactttaggggcgattttgggagtacttgcagttgtactgagacatgagatcgtttatgccattatggctggggtgtttattgttgaaactttgagtgtcatgattcaagtgacttcctatcgtcttttcaaaaaacgggtttttttaatggctcccatccaccatcactttgaattaaaaggttgggcagaaccaaaaattattgttcggttttggatcatcaccttggtgttaattttaattgcacttgcaactctaaaactcagataat

SEQ ID NO: 257806 - DNA, 381 bp, Unknown
  Bacterial polypeptide expressing nucleotide sequence isolated from the Sargasso Sea
gagctggtgaattggcagttttttgtggttctttaattggagctgctttaggttttttatggtttaacgcaccaccagctaaagtttttatgggtgatactggatcattagcgttgggtagctctttaggctcaatagcaataatatgcaaacatgaaattcttctagcagtaataggaggtttatttgttctagaaaccttgtctgtagtaatccaagtattaatttttaaaatgacaggaaaaagagtttttttaatggctccactacatcatcattttgaaaaaaaaggatggcctgagtcaacaatagttatacgtttttggataattactattgtattagctttgataggtcttgcaactttaagaattagataat

SEQ ID NO: 257807 - DNA, 739 bp, Unknown
  Bacterial polypeptide expressing nucleotide sequence isolated from the Sargasso Sea
gactacagaaaagtgatccgcaaagattcgaaggggcttatcgcccgttggaaatatttctggcaatctgtggttgcgttaggcgtcgcattctatctatacagcagtgcaacaataagcgctgaaacctcactactggtgcctttcttcaaagaagtgttcccgcagttgggtgcgttcttcatcattattacctactttgccattgtaggcacaagtaacgcggtaaaccttaccgatggattggatggacttgctattgtgcctactattttggtggcgggcgccttcgccatttttgcctatgtgacaggtaatgctaactttgctgaatacctgaatattcctcatattccgcttaccagcgagctggtaattgtgtgcactgccatggtcggtgcaggcttaggctttttatggtttaacacgtatccggcacaagtatttatgggcgacgttggctcactagcgttaggcggcacactaggcgtgcttgctgtattggtgcgccaagaattggtattaatcatcatgggtggcgtgtttgtaatggaaaccgtttcagtcattcttcaggtaggttcttacaaactgcgtggccagcgtattttccgtatggcacctattcaccatcactatgaattgaagggctggccagagccgcgcgtaatagtgcgtttttggatcatttcaatcattttggtgttggtgggtcttgctaccctcaaacttagataag

SEQ ID NO: 257808 - DNA, 574 bp, Unknown
  Bacterial polypeptide expressing nucleotide sequence isolated from the Sargasso Sea
aatgtcgccattcatttttatttttactggcatgtttgtattaataggatcgtctaatgcggtcaatttgactgatgggctggatgggcttgccatccttccaacagttttaattggaggcgcgttaggattaattgcttatgctatgggtaatcaacttattgcagactatttatttctacctcatcttccgctatcaggagagttaatagttttttgtggtgctttaattggatctggaataggctttctatggtacaacacctatccagcccaagtttttatgggtgatattggttccttaactcttggagctattttagggataattgcaataatattgcgacatgaattggtcttcgctattatggcaggtgtttttgttgtagaaactctaagcgttgcgattcaggtaatttcatacaagacaagaggcaaaagagtatttttgatggctccaattcaccatcattatgaattaaaaggctgggcagagcctaaaataatagtaagattctggatagtaactttagttttaattttaattgcgttggcaactctaaagctaagataa

SEQ ID NO: 257809 - DNA, 693 bp, Unknown
  Bacterial polypeptide expressing nucleotide sequence isolated from the Sargasso Sea
aaacaaaagaaaatacaggcttaaaaacaaaggaaaaatttttcatgcaaagtatcatctcaataatttttatattttttgcatatgaaaaggatttaataaatccattaatcacagtatctgaatcttgggaaataaatatgaatattttcatcttgcctatatcgtttattgtattagttggaataagtaattcagtaaatttaactgatggacttgatggattagcagctggatgtagtggaattgtcttttatggattaggaacagaaatattaatgaaaggacagcaagaacttattgtgtttagtattttatgttattcaatgtctggaatatgtttaggatttctcaaatacaatagttatcctgcaaaaatatttatgggcgatacaggatctttaagtattggtgcaattttaggctctatagcattactaaccaatagcgtttttacattgtctattttttctggaatcttcattattgaatctttatcggtaatggttcaagtagggttttttaaaatttcaaaaaaattatttcacagaggaaaacgcatatttttaatggcaccaatacaccatcattttgaacttaagggagttaaggaacaaacaatagttgaaaatttttggaaaatcaacgttttacttgtaattttaggtatagttttaaaaatccttctttaaa

SEQ ID NO: 257810 - DNA, 418 bp, Unknown
  Bacterial polypeptide expressing nucleotide sequence isolated from the Sargasso Sea
aatatttgcaaactatctacaaattcaacacatccctaacgctggagaactttcaatattttgtggctcaattgtcggatcgtgtttgggcttcctttggtacaatgcgcctccagccaaaatatttatgggagatactggatcattatctttaggcggatcaatagctgcagtagcaattattgttaaacacgaaattgtcctagcaattattggcggattatttgttttggagacagtctcagtaattattcaggtaatatcatttaaattgactggcaaaagagtgtttatgatggctcctatacatcatcattttgagaaaaaaggatgggcagagtcaactgttgtgattaggttttggataattgccatcatattagcattggtaggtctagcaacattaaaattaagataa

SEQ ID NO: 257811 - DNA, 542 bp, Unknown
  Bacterial polypeptide expressing nucleotide sequence isolated from the Sargasso Sea
attcgtgattattggagcatcaaatgcagtcaatttaacagatggactagatgggttagctacagtaccagttatgttggttgctttgtcttttacattaatttcttatatagtaggtaacacaattttttcagagtatcttcaattacagtatatacccgacactggagaattatcaatattttgtggctcaatagttggatcttgtcttggctttctttggtacaatgccccacctgcaaaaatttttatgggggacacaggttcactttctttaggaggctcattggctgcaatcgctataattgttaagcacgaaattgtactagcaatcattggaggtttatttgtcttggagactgtatcagtaattatacaggttatatcatttaaactgactggaaagagaattttcaaaatggctcctatacaccatcactttgaaaaaaaaggatgggccgagtcaacaattgttattcgtttttggataatagccataatattggctttagtcggattggctacattaaaactaagatagt

SEQ ID NO: 257812 - DNA, 694 bp, Unknown
  Bacterial polypeptide expressing nucleotide sequence isolated from the Sargasso Sea
ttatcaaaaaattattccccagctttttgtagctttttttgcggcttggataattttagaaaatacaccagaaaatttacaaaacacattatcaatcccttttttaaaagatagtattttatttttagggattttatatatcccatttacaatcgtagtaattgtgggctcatctaacgctgtaaatttaactgatggccttgatggtttggcaatagtgccagttatgattgcggcaggttcattagctgtaatagcttatttagtaggaaatataaatttctcaaattatctacaattaaactatattccaggtgttggtgaaataacagttttattaggtgcaattataggatcaggattaggttttttatggtttaatgcaccaccagcaatggtttttatgggtgatactggttctttgtcactcggaggggtaattggtgtcactgcatcagcatcgaggcatgaattagtattagttataattggaggtctttttgtattagaaacagtgtctgtaatagtacaaattttgtcttttaaacttacaggcaaaagaatatttaaaatggcacctttacaccatcattttgaacaaaaaggatgggcagaatctacaatagtaataagattttggattattgctgtaattttggctttagtcggcatttcttcacttaaactaaggtaa

SEQ ID NO: 257813 - DNA, 577 bp, Unknown
  Bacterial polypeptide expressing nucleotide sequence isolated from the Sargasso Sea
ttgaattttggatatttttactttgtaatttcattgtttataattgttgggtcagcaaatgctgtaaatttaactgatggtttagatggtcttgctatagtccccgtaatgatagtagctatgacttttgcttttatagcttatgtcacaggaaatatgtttttttctgattatttacttattacttatattcctggaacaggtgaattgtctgttttatgcggagcattaattggtgcagctttagggttcctttggtttaatgctcctcctgcaaaagtatttatgggtgatacaggttcattggctttaggagctacaataggatcaattgcaataatggttaaacatgagatagttttggcaatttcaggcggcttattcgttttagaaaccttttcagtaattattcaggtaattagttttaaattaactgggaaaagagtttttatgatggctcccttgcatcatcactttgagaaaaagggttgggcagagtcaactattgtaattagattttggattataacaatcgtacttgctttgttaagtttagccactttaaaaatacgttaaa

SEQ ID NO: 257814 - DNA, 370 bp, Unknown
  Bacterial polypeptide expressing nucleotide sequence isolated from the Sargasso Sea
agcatccattttttgtggagcaataataggttcttgtttaggttttttatggtttaatgcgccaccagcaaagatatttatgggtgatactgggtctttagcattaggtggatcattaggagcagttggtataattactaagcacgaaattgttcttgcaattacaggtggaatatttgtactagaagcagtttctgtaattgcacaagtgatatcatttaaacttactggtaagagaatatttaaaatggcgccaatacatcatcattttgaaaaaaaaggctggcctgaatctactgtagttattagattttggattatatcaattatcttagcaatgataggtttagcaacattaaaactaagataa

SEQ ID NO: 257815 - DNA, 641 bp, Unknown
  Bacterial polypeptide expressing nucleotide sequence isolated from the Sargasso Sea
taattcaaccattaatcaagagttagttaatgtagtttatattcccttcactaaaggttatttcataaatttacatattttttattatttttttggatcgttggtaatagtcggttgtgccaacgctgtaaatcttaccgatggactcgatggtctagctataggaccgattatgatctcagccctatcatttgcctttataacctactttacaggaaatcttatttactcggaatatctaaaaataccctacattagtgatactggtgaattagtaataatttgcgcagcattaattggagctggtttaggatttttgtggtacaatgctcccccagcaatggtttttatgggagacacgggttcattatcgatgggggggacgattggagcaattgcagtagcaaccaaacatgaaataattttagttattattggtggagtatttgtgttggaggctttatctgtttttgctcaagtaatttccttcaaactcacaggtaaaaggatctttagaatggcgcccattcatcatcactttgaacaaaaaggatggtcagaatcaacaatagttataagattctggattatcgcaataattcttgcattgcttggtcttgcaagcttaaaactaagatgag

SEQ ID NO: 257816 - DNA, 370 bp, Unknown
  Bacterial polypeptide expressing nucleotide sequence isolated from the Sargasso Sea
ctttcgatcttttgtggctcaatagttggggcttgtttaggtttcttgtggtacaacgctccgccagcaaagatttttatgggagacacaggttcgctttccttaggtggttctttagcagcaatagctataatcgtaaaacatgagatcgtacttgcaattattggaggactatttgttttagagacagtttcagtaataatacaagtcatatcctttaaattgacaggcaaaagaatatttaaaatggcacctatacatcatcattttgaaaaaaaaggctgggctgagtcaacaattgttatacgtttttggattattgcaataattcttgctttagtaggattagcaacattaaaactaagataaa

SEQ ID NO: 257817 - DNA, 747 bp, Unknown
  Bacterial polypeptide expressing nucleotide sequence isolated from the Sargasso Sea
tcactgggaattgtcggctttatcgatgattaccgaaaagttatccgtaaagatccaaaagggcttatagcgaaatggaagtacttttggcagtcagtaattgcacttgtggttgcaactgcattgtactttacaagtacgcaagctgcagaaacgtctttagttgtgccgttttttaaagatgttttaccgcagttaggcttgttttacattgttattacctattttgcattggttggaacatcaaatgctgtaaacctgactgatggtctagatggtctcgctattgtaccgactattttagttgcggcggcacttgccataattgcttacttaaccggtaatattaatttttctgcttatttacatattcctcatttgccattagccagtgagcttgtggttgtatgtactgccattgttggtgcagggcttgggtttttatggtttaacacctacccggcgcaagtattcatgggtgatgtaggctcattagcattaggtggagcgctggggattattgcagtgctggttcgtcaagaacttctacttattatcatgggcggtgtctttgtaatggaggcgttatcggtgattttacaagtcggctcgtataagttacgaggtcaacgaatttttagaatggcgcctattcaccatcattacgaattaaaaggttggccagagccgcgcgttattgtgcgtttttggattatatctattgtgttggttctcgccaggccctgc

SEQ ID NO: 257818 - DNA, 158 bp, Unknown
  Bacterial polypeptide expressing nucleotide sequence isolated from the Sargasso Sea
atcatttaaaataagaaggaaaagagtttttaaaatggcccctatacatcatcattttgagttaagtggatggaaagagccaaagataatagttaggttctggattttgacttttatttttgttcttctaggcttgtccctccttaaaatacgatgaa

SEQ ID NO: 257819 - DNA, 580 bp, Unknown
  Bacterial polypeptide expressing nucleotide sequence isolated from the Sargasso Sea
attgttaatctaggatggttctttataccatttgctgtgtttgttttatttggtgcatccaatgcagtaaatctcactgatggattagatggtttagcaacagttccagttattttggttgcaggatgttttgcgtttataagttatgttactggaaatattgttttttctgattacttacaaataccatatattgagggcacaggtgaaatctcaattttctgcggagctatcataggatcatgtttaggttttctgtggtttaatgctccacctgctaaaatttttatgggagatactggctctttgtccttaggaggatctctcggagcagtcggaataataactaaacatgaaattgttcttgcaattactggcggactttttgtgctcgaagcagtttctgtgatggttcaagttatttcttttaaattgactggaaaaagaatttttagaatggctccaattcatcaccactttgaaaagaagggttgggcagagtctacagttgttataagattttggattatctctatcattttagcaatgataggactagcgaccttaaagttaagataat

SEQ ID NO: 257820 - DNA, 653 bp, Unknown
  Bacterial polypeptide expressing nucleotide sequence isolated from the Sargasso Sea
catgtttttatatttttctgaaaatttgattgagtggttttctccactgaatgcttttacctatattacaactaggggcattctagctgcactaacagcactagttatttccttcctatttggacccaagatcattacagcacttgaaggcaataaaattggagagacaatcagaaccgatggtccatctactcactcctcaaagggtggaactcccacgatgggcggactcatgattatcctctcaatcgttgtcagtgttctcatatggtcagatttgagcaatgtttataatttagttctcattgcatcgattatctcttttggacttatcggatttattgatgattttacaaagcttaaaaaaagcaagaaaggtatgtccgcgagaacaaaattaattttgcagtttattgttgcagcttcatctacttactatctccttggacaggggggcagtgtacttagctcagaagtactgatcccttttacaaataatattcgccttgatttaggttggttctttttaccttttgcaatttttgttattgttggctcaagcaatgcggttaatctaaccgatggattggatggtttagcaatcatgcctgtttcaatgattgcaattgcccttggaatttttgcttatgtga

SEQ ID NO: 257821 - DNA, 625 bp, Unknown
  Bacterial polypeptide expressing nucleotide sequence isolated from the Sargasso Sea
attgtttgtttatattgcagaaacttatacaaataattttacttttttaaacttatttaactatataacatttagaactggaggggcgattttaacttctcttttcttttctttaatatttggaggaacaataataaaatatttatcttccttacaaccaattggacaacccattagagatgatggacctgaaaaccacatatttcaaaaagcaggtactcctactatgggaggattgttaatattaactagtatcactatatcattttttttatggtctagattaaccaatccatatgtttggataagtttatttgcatgtttatcttttggatttattggttttttagatgattataaaaaaatatattctaaatcaacaaagggcttgaaagcatctactcgtattattttgcaaatttttgttagcctactgattatttttttaattaatagtcaagtaccagatgatttaataaatacaataaatattcctttttttaaaaatttaataattgattttggtatattcttttttatttttgcaattttaataattgtcggttctgcaaatgcagtaaatctgacagatggtttggatggacttgcaattgttccggttatg

SEQ ID NO: 257822 - DNA, 319 bp, Unknown
  Bacterial polypeptide expressing nucleotide sequence isolated from the Sargasso Sea
tttaatgctccccctgctaaaatttttatgggtgatacaggctcattatctcttggaggatctttaggtgcagtaggaattatcacaaagcatgaaattgttttagctattactggtgggctttttgtactagaggcagtttcagtaatggttcaagtaatttcgttcaaacttacaggaaaaagaatttttagaatggcgcctatacatcatcattttgagaaaaagggatggccagaatctacagttgtaattcggttttggattatctccattatcctagcaatgattggtttagctaccttaaaattaagataat

SEQ ID NO: 257823 - DNA, 613 bp, Unknown
  Bacterial polypeptide expressing nucleotide sequence isolated from the Sargasso Sea
tttacaatagcttttcctttttttaagaatttaataattaattttggatatttttactttataatttcattgtttataattgttggctcagcgaatgctgtaaatttaacagatggtttagatggtctagctatagttccagtaatgatagttgccatgacctttgcttttatagcttatgtgacaggaaatattgttttctctgattatttgcttattagctacattccaggaacaggagaattatccgttttatgcggctcattgattggtgcagctttaggtttcctatggtttaatgctccacctgcaaaagtatttatgggtgatacaggttcattagctttaggtgctacaataggttcaatagcaataatggttaagcatgagatagttttggctattgctggtggcttatttgttttagagacattttcagtaattattcaggtaattagttttaaattaactggaaaaagagtttttatgatggcccccctgcatcatcactttgaaaaaaaaggatgggcagagtcaactattgtaattagattttggattataacaatagtacttgcattgttaagtttagccactttaaaaatacgttaaa

SEQ ID NO: 257824 - DNA, 631 bp, Unknown
  Bacterial polypeptide expressing nucleotide sequence isolated from the Sargasso Sea
tggaaacaacgatcatcttaaaaatctttattttccattttttaaaaatttaataattaatttaggattattttttattccatttgctatttttattatagttggttcttctaacgcagttaatttaacagatgggctagatggattggctactgtacccgtaatgttagtcgcactttcatttacacttatttgttatgttactggcaacatagtcttttctgagtatttacagattccttacattgctaatgtgggggaagcttcaattttttgtggagcgatggttggttcttgtttaggatttttatggtacaacgcaccaccagcaaaaatttttatgggagacactggctctctttctctaggaggctcgttgggagcagtaagcattatttctaagcatgaaatagttttgggtattataggagggttatttgttcttgaaacagtatccgtaattattcaggtaatttcttttaaattaacaggaaaaagagtttttatgatggcgccgctccatcaccattttgaaaaaaagggttgggcagaatccacagtagttattagattttggataattgctattattttggctttagtaggattggccacactaaaattacgttaa

SEQ ID NO: 257825 - DNA, 292 bp, Unknown
  Bacterial polypeptide expressing nucleotide sequence isolated from the Sargasso Sea
tatgggagacacaggctcactctctttggtaggttcgcttgcagctgtagcaataatagcaaagcacgaaattgttttagcaataattggggggttgtttgttctagaaactgtatcagtaattattcaggtagtatcatataaattaacaggtaaaagaattttcaaaatggcacctattcatcatcattttgaaaaaaaaggttgggcagagtccacaatagtaattagattttggataatcgctatcattttggcacttattgggctggcaacattaaaattgaggtaa

SEQ ID NO: 257826 - DNA, 929 bp, Unknown
  Bacterial polypeptide expressing nucleotide sequence isolated from the Sargasso Sea
ttttcaaagcataagagatgatggccctcagtctcacttaaagactaaatctcaaactccatcaatgagaggtttaattattattgtatctatattaataagtacattactctgggcagatataaataataaaaatatttggattttgatttttgtattgattacttttggattaataggcttttatgatgactataaaaaattgaaacattcaacaagcgatggtattaaaggcaagacaaaattattattacaaatattattttctggtgttgtggttttttatatatttcaaacatcagaccataccatagacttaagtttaacaattccttttataaaagattatgctttattcatgggagcgttttttataccctggagtatatttgtaatagtaggctctagtaatgcagtaaatctaaccgatggtcttgatgggcttgcaatattgccatgtattctaattgccgcagctttcgttgtattttcatatgtacaaggtaattttaatattgcaaattacctattaataccatatctaccccatgtctctgagacagctatttttgccagcgctatagtaggttcgggactgggtttcttatggtacaattcatatccagcgcagattttcatgggtgatgtaggctcattatctcttggagcaatacttgcgactcttgcgattattttaagacttgaaattatatatgcaatcatgggaggcatttttgttatagaagctttatcagtcataattcaggtaacctcatttaaattatttaaaaaacgcgtgtttaaaatgtctccaatacatcatcattttgaacttaatggatggcaagagcctaaaattattgtgaggttttggataattacttttgttcttgttcttatagcgttggcttctttgaagattagataat

SEQ ID NO: 257827 - DNA, 760 bp, Unknown
  Bacterial polypeptide expressing nucleotide sequence isolated from the Sargasso Sea
attggggttagcagtttattttcaccctgggattgaaatcaaggaagatcaggattacaacctttatgaaaatgtatcaacaaataaaaagtcattaaaaacaacaattccttttattaaaaataacgagttagattatgttaaaatatttaagatttcaaaaaataattataattggattttttatgttttagtcattgcatttataataattgcagtttcaaacggatccaatctaaccgacggtctcgatggtctagcagctggaacctcagcaattgttgtttttgttcttggaattctagcgtgggtttctggtaatattattttttctgactacttaaatataatgtatctaccaggaataggtgaaatacttgtttttgtttctgctcttctaggtgggctgattggttttttatggtataatacttttcctgctcaagtttttatgggtgatacaggaagtttatcagttggaggaataatagcagtgattgcaattcttgttaggaaagaattgatgttgccgatattatgtggtgtttttcttatggagacattgtcagttataatacaagtaagtttttttaaatatacaaagagaaaatatggaattggaaaaaggatttttttaatgagtcccattcaccaccactttcaaaaaaaaggattaagtgaaactaaaattgtttctagattttggattgtatcaattttacttgcaatactaactctaataacgttaaaactaagatga

SEQ ID NO: 257828 - DNA, 751 bp, Unknown
  Bacterial polypeptide expressing nucleotide sequence isolated from the Sargasso Sea
gctggttgatgactatttaaaggtaaaaggtaatagaaatctaggtcttacggtcaaacaaaaatttggtctacaatctttagcaggtttactagcagctgtatatatttacaatcttggttattcaacgcaattttatatttttagtggatttggcatcgatatcggtttttttaaatgggtattaatagttcttgtctttgtaggcataacaaatgcagttaatcttacagatggtctagatggtcttgtagcaggaagtagctcgattagctttgctggtatattggttatttcattttggatatatagacatccacaatattattcaaaatttgttagtgattcatttttaactgtagatatttcacttttaatctcatcaatttcaggtgcttgtttaggatttctatggtggaacacaaatccagctaaaataattatgggtgatgtgggatctcattttattggttcaatgtttccgttgatattgatatcactcggtgcagaaggattgcttgtatttttttgctttttgtttttagtagaagctgggtcagtcataattcaagttgtttcatttagatatagaaaaaaaagaatttttaagatggcaccattgcaccatcattttgaaatgaaaaactgggctgaaacaacaataattgttagattttggattattaatggaatttttgtcgtgctgggtcttggactcttttatgctgactgggttttgttcggaaattaa

SEQ ID NO: 257829 - DNA, 169 bp, Unknown
  Bacterial polypeptide expressing nucleotide sequence isolated from the Sargasso Sea
gttcaggttgcttcgtataagttaactggtaagagagtttttaatatggcacctttacatcatcactatgagctgaaaggttggcccgagccacgagtaattgttaggttctggattattacatttatgcttgtcttacttggtttagctctactcagactaagataaa

SEQ ID NO: 257830 - DNA, 358 bp, Unknown
  Bacterial polypeptide expressing nucleotide sequence isolated from the Sargasso Sea
ttgtggctcaattataggagcatgtataggtttcctttggtttaatgctccacctgcaaaaatatttatgggcgataccggctcgttagctttaggtggttcgctaggtgccgtaggtataattactaaacatgaaatagttttagctataaccggaggattgtttgttttagaggcggtttcagtaatagttcaagttctttcttataagataactggaaaaagaatttttaaaatggctccaattcatcatcattttgaaaaaaaaggatgggcggaatcaacagttgtaattagattttggattatatcaattattttagccatgattggactagctacacttaaattaagataa

SEQ ID NO: 257831 - DNA, 808 bp, Unknown
  Bacterial polypeptide expressing nucleotide sequence isolated from the Sargasso Sea
tattaaatttctatcgtcaatccaaccaaatggtcaaccaataagatcagatggtccagaaagacatatttttgaaaaatcagggacaccaactatgggtggtttattaattttggcaagtttttttatttcggtatttatttgggctaagttagataatatatatatttggatagttcttttttcctgtttatcatttggatctataggtttttttgatgattataataaaattaaatcaagatcaagtatcggattaaaagcttctactagaataatattacaaattttagttagttttattataatagtattagtttataatttcttacctagcaattataatacaattgtaaattttcctttttttaaaaatttattttttgatctaggtatattttttattccttttggaattattttacttattggttccgcaaatgcagttaatctaacagatggtttagatggcttagcaatagtgcctgttatgatagttgctctttcatttggatttattgcttatgttgtggggaatcaagtatttgcaaattatttacaaattaagcatattataggaacaggggaattagcaataatttgtggttcattagttggttcagcactaggttttttatggtttaatgctcctcctgcaaaagtttttatgggagatacaggatcattatctatgggaggcgttctaggaacccttgctcttattaccaaacatgagatagttttagccattattggcgggctttttgttttagaaactatgtcagtaattattcaagttatcagcttt

SEQ ID NO: 257832 - DNA, 764 bp, Unknown
  Bacterial polypeptide expressing nucleotide sequence isolated from the Sargasso Sea
ttttgggttgttgggagcctatgatgattataaaaaaattaaaaaaaaaaactcctctgggatatcttcaaaatttaagtttttgtggcaaattattttagcaataattggagtactaattttaatttattttgttgatacgccagatttgcaaaaactatattttccattttttaaaaatttgataattaatttaggttggttttttatacctttctatatttttgttattgttggatcttccaatgcagttaaccttacagatggacttgatggtttagcaacagttccagttattttagtagcaggtgtttttgcatttattagctatgttacaggtaatatagttttttctgaatatttattaataccgtacataaaaggcgttggagaagttagtgtattttgcggctcaatgattggagcgtgtataggttttttatggtttaacgctcctccagcaaaaatatttatgggtgatactggatccctcgctttaggagggtccctagggggaattggaataattaccaaacatgaaatagttttagcaattactggaggtttatttgttttagaggctgtttcagtaatagttcaggttgtctcatataaattaactggtaaaagaatttttaagatggcacccatacaccatcattttgaaaaaaaaggatggccagaatcaacagttgtgattagattttggataatatcaattattctggcaatgataggtttggcaactctcaaacttagataat

SEQ ID NO: 257833 - DNA, 593 bp, Unknown
  Bacterial polypeptide expressing nucleotide sequence isolated from the Sargasso Sea
tgatttaggttatttttatccacttttggttattatagttatcagtgcaacctctaatgctgttaacataaccgatggattggatggtttagctattgggcttttagcaatttgcttttctgtatttgctgcagtttcttacataactggaagaattgatttttctgattatttgaatattttatatctccctaatgccggtgaactgagtgttttctccagtgcaatggttggtgcttgcctaggatttctttggtttaatacctctcccgctgaaattttcatgggtgatacaggatctctatcagcaggagctgctctcggaacacttgcgatagtcctaaaaaaagaacttttattattcatcattggaggggtttttgtttttgaaaccatatccgtcatcattcaagtattattttttaggtatacaaaattaaaatatggaaaaggtgagcggttttttaacatggcacctatacatcatcattatgagctaatggggactaaagagagtaagattgtcgtgagattttggatcgcaggcattctttttgcacttttttcgctaacaactttcaagattagatagc

SEQ ID NO: 257834 - DNA, 586 bp, Unknown
  Bacterial polypeptide expressing nucleotide sequence isolated from the Sargasso Sea
aatttaattttacacatgggattatttttcattccgtttggattatttgttattattggagcctctaatgctgtaaatttaaccgatggtctagatggtttagcaactgtcccagtgatgttggttgctctatcatttactttaatttcctatgttgttggaaatacaattttttcagagtatttacaaattcagtacattcctaatgttggtgagctctcaattttttgtgggtcaatagttggagcttgcttaggttttctttggtataatgctccacctgctaaaatattcatgggagatactggctctctttcattaggcggatctttagctgccatagcaataattgtaaaacacgagatagtattggcaattattggaggactttttgtattggaaacagtttcagtaattattcaagtaatatcttttaaattaacaggtaaaagaatttttaaaatggcgcctattcatcatcatttcgaaaagaaaggttgggctgagtcaaccattgtaattcgtttctggataatagccattatattagctttagtagggttagcaacgcttaaactaaggtaat

SEQ ID NO: 257835 - DNA, 634 bp, Unknown
  Bacterial polypeptide expressing nucleotide sequence isolated from the Sargasso Sea
atgttatttgaacttttttcaatgttggtagatcaattcagttttttgaatgtttttaaatatttaacagtaagaactggactttctatgtttacagctatggttgttgtttttttagttggaaacccattgattagttttttttcatcgaaacaaatccataatccaataagagaagatggcccaagtgatcatataataagaaaaattggaacacctacaatgggaggactaataatattacttggtgttttttcaggggtattattatggggagacttatcaaatccttataattggtttttaatatatatcgctgcatcttttggattattgggagcttacgatgattataaaaaaataaagttaaaaagttcacatggaatttcttcaaaacttaaatttattttacaaatcattttagctttaataggtatttttattctgtatttttcaagtgatggagatcaaataaataatttatatctacctttttttaaaaatttagtaataaatcttgggtggttttttatacctttttatatattcatattagttggagcttcaaatgcagtaaatttaactgatggtttagatggattggcaacagttcctgtcatgctagttgctgcct

SEQ ID NO: 257836 - DNA, 886 bp, Unknown
  Bacterial polypeptide expressing nucleotide sequence isolated from the Sargasso Sea
gtagaaactggtctatcaatgtttacctcaatgttcatagtttttttggtaggagggccgttaattagatattttttatcaaaacaaatacacgatccaataagagaagatggtccaagtgaacatataatcaaaaaaattggaacaccaactatgggtggtttattaattcttttaggaatattttctggagtattactatggggtgatctgacaaacccttatagttggtttttaatttatatttctggatcttttggcttattgggagcatacgacgactatcaaaaaattaaatataacaattcatcaggtgtatcatcaagatttaaaattttattgcagattattttagcaataatcggtatagctatcttatatttctctaatcaatcaaatgaattggaaaatctatatttcccttttttcaaaaatttggttatcaacttaggttggttttttataccattttatatttttgtaattgttggttcatcaaatgcagtaaatcttactgatggactagatggattagcaacagttccggttatcttagttgccgcatgttttgcatttattagttacgtttctggaaacataatattttctgaatacttgcaaataccgtatattgaaagtgttggagaagcatcagttttttgcggttctattattggtgcttgtttaggatttttatggtttaacgcaccacctgcaaaaatatttatgggagatactggctccctttctttagggggatcactaggagcagtaagcattattacaaaacacgaaatagttttagcaattactggaggattatttgttcttgaagcagtttcagtcattgtgcaagtaatttcttataaactaactggtaaaaggg

SEQ ID NO: 257837 - DNA, 235 bp, Unknown
  Bacterial polypeptide expressing nucleotide sequence isolated from the Sargasso Sea
tgtaaaacatgaaattgttttagctattgtgggaggaatgtttgtattggagaccttatcagtgattgtacaagtaattagtttcaaattaactggaaaaagaatatttcaaatggcccctcttcatcatcattttgaaaaaaagggatgggctgaatctactatagttattagattttggataataacaattgttcttgccttaattggtttggcaacattaaaaattagataa

SEQ ID NO: 257838 - DNA, 212 bp, Unknown
  Bacterial polypeptide expressing nucleotide sequence isolated from the Sargasso Sea
tattactggtggactttttgtacttgaggcagtttcagtaatggttcaggtaatttcatttaaacttactggaaaaagaatttttagaatggccccaattcaccatcattttgagaaaaaaggatggccagagtctacagttgtaattagattctggattatctctattatcctagcaatgattggtttagctaccttaaaattaagataat

SEQ ID NO: 257839 - DNA, 808 bp, Unknown
  Bacterial polypeptide expressing nucleotide sequence isolated from the Sargasso Sea
atgctttatcaatttttattaaattttgttgatacttttagttttttaaatgtatttaaatatttaacttttagaacaggtttatcttttttcacctcattggttatagtgctgattatcggaggtccatttattaaatttttttcaaagcaaaaaattttaaatccaatccggaatgatggacctgaagatcatatagtaaaaaaaattggaacaccaacaatgggtggtttaataattttatttggcttactagtatcagtaatattttgggcagatttatcaaatattaatattttattttgtatctacatagcaattacttttggtttattgggagcatatgatgattttaagaagattaaatatagcaactcatcaggaatttcttcaaagtttaaaataatttcacaaataatattagcaattattggagtaagtatttttgtttatttaaatgattatcaggatttaaataatttatattttccattttttaaaaatttaataataaatcttggatggttttttataccatttgcaatattcgtaattataggctcatcaaatgctgttaatctcactgatggattagatggtctagcaacagtgcctgtaatattagttgcagcatgttttgcttttataagttatgttactggaaacattgtattttcaaattatttacaaattccatacattgaaggaactggtgaagtagcaattttttgtggagccattatcggttcttgtttaggtttcttatggtttaatgctccacctgctaaaatttttatgggtgatacag

SEQ ID NO: 257840 - DNA, 571 bp, Unknown
  Bacterial polypeptide expressing nucleotide sequence isolated from the Sargasso Sea
ccttggatggttttttataccatttgcaatattcgtaattattggttcgtcaaatgctgttaaccttacggatggattagatggcctagcaacagtgcctgtaatattagttgcagcatgttttgctttcataagttatgttactggaaacattgtattttcaaattatttacaaattccctacatagaaggaactggtgaagtatcaatcttttgtggagcaattattggctcttgtttaggtttcttatggtttaatgctccgcctgctaaaatttttatgggtgatacaggctcattatctcttggaggatctttaggtgcagtgggaattatcacaaagcatgaaattgttttagctattactggtggactttttgtactagaggcagtttcagtaatggttcaggtaatttcgtttaaacttactggaaaaagaatttttagaatggcacctattcatcatcattttgagaaaaaaggatggccagagtctacagttgtaattaggttttggattatatctatcatcctagcaatgattggtttagctaccttaaaattaagataa

SEQ ID NO: 257841 - DNA, 729 bp, Unknown
  Bacterial polypeptide expressing nucleotide sequence isolated from the Sargasso Sea
tccatataattggttattgatattcattacgttatcctttggaattctaggagcatttgatgattataaaaaaattaaaaataataattcgcgagggatttcttcaaaactaaaaatattgattcaaattgttttgtgtctagtttcattaattattttctataaatttatagactctgatattaaaactaatttatatttcccgttttttaaaaatctagtaattaatttagggtggttttttgtacctttttatttgtttgttattgttggatcttctaatgcagtaaatctaacagacggtttggatggattagctaccgttcctgttatacttgttgcaggctgttttggttttataagttatgtgtcaggaaatattatttttgcagactatttattgattccttacatcgagggtgttggagaagttgcagttttttgtggagcaatcatcggagcatcaattggttttttatggtttaacgcgccacctgcaaaaatatttatgggagatacaggttcattggctttaggtgggtctttaggcgcggttggagtaacaacgaagcacgaaatagtgttagccattaccggtggactttttgtattggaagcaatttcagtgattgtacaagttatttcatacaaactaacaggtaaaagaatttttatgatggcaccaattcatcaccattttgaaaaaaaaggttgggctgagtctacaat

SEQ ID NO: 257842 - DNA, 555 bp, Unknown
  Bacterial polypeptide expressing nucleotide sequence isolated from the Sargasso Sea
ttccttttggattatttgttataattggagcatcgaatgcagtgaatctaacagatggtctggacgggttagcaactgttccagtgatgcttgtagcactttcatttacattaatttgctatgtagttggaaacacgattttctctgaatatttacaaatacaatatattccagatgttggagaattatcaattttttgtggatctattgtcggagcatgtctaggttttctttggtataacgcgccgcccgcaaaaatttttatgggcgacacaggctcattatctttgggaggatctttagccgctatagcaattattgttaaacatgaaatcgttttagctattataggtggtttgttcgtcttagaaaccgtatctgtaattatacaagtagtctcttttaagttaacaggtaaaaggatttttaagatggcaccaatccaccaccattttgaaaaaaaaggttgggcggagtccacgatcgtaattagattttggataattgctattattttagcattagttggattagcgactttaaaattaaggtaaa

SEQ ID NO: 257843 - DNA, 923 bp, Unknown
  Bacterial polypeptide expressing nucleotide sequence isolated from the Sargasso Sea
agctcttactgcgttattagtttcattaatcatcggtcctattgttataaaatatttttctaatcgagaagtttttcaaagtataagagatgatggccctcagtctcacttaaaaaccaaatctcaaactccatcaatgggaggtttgattattattgtatctatattaataagtacattgctctgggcagatataaataataaaaatatttggattttgatttttgtattgattacttttggattaataggcttttatgatgactacaaaaaatttaaacattcaacaagcgatggtatcaaaggtaaaacaaaattattattacaaatattattttctggtgttgtggttttttatatattccaaacatcagttcataccatagacttaagtttaacaattccttttataaaagattatgctttatttatgggagcgttttttataccctggagtatatttgtaatagtaggctctagtaatgcagtaaatctaaccgatggtcttgatgggcttgcaatattgccatgtattctaattgccgcagctttcgttgtattttcatatgtacaaggtaattttaatattgcaaattacctattaataccatatctaccccacgtctctgagacagccatttttgccagcgctatagtaggttcgggactgggtttcttatggtataattcatatccagcacagattttcatgggtgatgtaggctcactatctcttggagcaatacttgcgactcttgcgattattttaagacttgaaattatatatgcaatcatgggaggcatttttgttatagaagctttatcagtcataattcaggtaacctcatttaaattatttaaaaaacgtgtgtttaaaatgtctccaatacatcatcattttgaacttaatggatggcaagagc

SEQ ID NO: 257844 - DNA, 405 bp, Unknown
  Bacterial polypeptide expressing nucleotide sequence isolated from the Sargasso Sea
atttacaaattacttatatcaaaggagtaggagaggcatctatcttttgtggagcaataataggttcatgtctaggttttttatggtttaatgcccctccagctaagatctttatgggagacacaggatctttagcattaggaggatctttaggagcagttggtattattactaaacatgaaattgtccttgcaattacaggtgggctatttgttttagaggcagtatcagtaattgcacaggttttgtcattcaaacttacaggcaaaagaatttttaaaatggcccctatacaccatcattttgaaaaaaagggttggcccgagtcaactgttgttattagattttggattatatcaattatcttagcaatgataggtttagcaacactaaaacttagataat

SEQ ID NO: 257845 - DNA, 565 bp, Unknown
  Bacterial polypeptide expressing nucleotide sequence isolated from the Sargasso Sea
atgttttttataccatttgcaattttcgtaatcataggttcatctaatgctgttaatcttactgatggattagatggtttagcaacagtgcctgtaatattagttgcagcatgttttgcttttataagttatgttactggaaacattgtattttcaaattatttacaaattccctacatagaaggaacaggtgaagtagcaattttttgtggtgcaattattggctcttgtttaggtttcttatggtttaatgctcctcctgctaaaatttttatgggtgacacaggctcattatctcttggaggatctttaggtgcagtaggaattatcactaagcatgaaattgttttagctataaccggtgggctttttgtactagaggcagtttcagtaatggttcaggtaatatcctttaaacttactggaaaaagaatttttagaatggctcctattcatcatcactttgagaaaaagggatggccagagtctacagttgtaattaggttttggattatttctatcattttagcaatgattggtttagctaccttaaaattaagataat

SEQ ID NO: 257846 - DNA, 657 bp, Unknown
  Bacterial polypeptide expressing nucleotide sequence isolated from the Sargasso Sea
cacccgttcatactcaagtttcctttacacgttttgattatccgggatgggagatcggagaagttttgtggactatttgggcggttcttcttatttcaggatcagcaaatgctgtcaacttgaccgatgggttggacggattggcagcgggagccggcgttttctgtttcggggcattcggggttatttcattttggcagtttcggtaccccgaattatatgatgtcccacacgctttggacttggcggtagtttcggcagctatggccggcgcttgcttaggtttcttgtggtggaactcagcaccggcacagatttttatgggtgacactggatctttagcgatcggaacaggattagcgaccttatctcttgcaacgaatacccaactacttttacctattgttgctggtttatttgttgtcgagacactttctgtgatcatccaagtggccggatttagacttttttctaagcgaagagtcttcaaaatggctcctcttcatcatcattttgaattatccggctggcctgaaaccactgtaatcgtgcgtttttggatgatgtccggtctatgtacagctcttggtataggtcttttctatggcgactcacttcgctctggaatagtcgggttgattgccggtgttcattgat

SEQ ID NO: 257847 - DNA, 811 bp, Unknown
  Bacterial polypeptide expressing nucleotide sequence isolated from the Sargasso Sea
ataattaaaaagataggaacacctacaatgggtggtctaatgattttattaggtattttctctggtgttgttctgtggggtgatttttcaaacccttataattggttcttgctttatatagctggttcttttggattacttggagcttacgatgactatcaaaaaattaaaaaaaataattcgaacggtgtaagttcaaaattaaaaatcataatccaaatttttttagcattaggtgggatttttatactttatttttacagtggatctaatgagattgggaatttgtattttccattttttaaaaatttaattattaatctaggatggttctttattccattttatttatttgttattgtaggttcatcaaatgcagttaatttaactgacggattagatggtttagcaacagtgcctgtaatgctagttgcggcttgttttgcttttataagctatgtaacaggaaatatagttttttcaggttatttgcaaatcacatatattgaaggagtaggtgaggcatctattttttgtggagcaataataggatcttgtttaggtttcctatggtttaatgctccacctgcaaagatatttatgggtgacactggatccttggcattaggtggatcgttaggggctgttggtataattaccaaacatgaaattgttctggcaattacaggtggactatttgtcttagaggcagtttcagtaattgcacaagtgatatcatttaaactaactggtaaaagaatatttaaaatggcaccaatacatcatcattttgaaaaaaaaggctggcccg

SEQ ID NO: 257848 - DNA, 665 bp, Unknown
  Bacterial polypeptide expressing nucleotide sequence isolated from the Sargasso Sea
acaaattccgttagttaaggataacgagtttgattattattttttaattgaatggtcttcaattcccaaatcaatgacatggataatttttattccaatgataattttcataataactgcagtttcaaatggtgcaaatttaactgacggtatagatggtttagctgctggaagttcttcaataatggcaataacacttgggatttttgcatgggtttctggaaatataattttttcagattatttaaatattatgtatatacccaatgctggggaaattgcggtttttgtcgcatcctttacaggtggattaatcggatttctatggtttaatacttatccagctgaagtttttatgggagatacaggaagcttgacagttggagctttaatttcagttatagctattatggttagaaaagagttattactgccaattatttgtggaatttatcttatagaagttttatctgtaataattcaagttttctactataaatacacaaaaaagagaaagggagtgggtgaaagaatctttttaatgtctccaatccatcatcattttcaaaaaaaagggattcatgagagcaaaattgtaagcagatttttaataatgggagttttattaagtgtattagcaattttaacattaaaaataagatgaa

SEQ ID NO: 257849 - DNA, 664 bp, Unknown
  Bacterial polypeptide expressing nucleotide sequence isolated from the Sargasso Sea
catgttaatttggctagccgactggctgacacaattcgattcagggtttaatgtattttcataccttacccttcgtgcaattttaagcacgctgaccgcattgcttattgccattcttattggccctaagatgattcgttacttgcagcgtatgcaaattggtcaaaccgtacgtgacgatggtccgcaaagccatttatccaaatcaggcacacccactatgggcgggttactcatactcgcagcaattgtagtaagcggcctgctttgggctgaccttactaaccgttatgtgttggtaacccttactgtggttgtggcctacggtattatcgggtttgtcgacgactacagaaaagtgatccgcaaagactcgaaggggctcatcgcccgttggaaatatttctggcaatcagtggtcgcgttaggcgtcgcattttatctatacagcagtgccactatgagcgctgaaacctcgctattggtgcccttcttcaaagaagtgtttccgcagttaggtgcattcttcattatcattacttacttcgccattgttggtacaagtaacgcggtaaaccttaccgatggattagacggtcttgctattgtgcctactattttggtggcgggcgcattcgccatttttgcctatgtgacaggtaat

SEQ ID NO: 257850 - DNA, 796 bp, Unknown
  Bacterial polypeptide expressing nucleotide sequence isolated from the Sargasso Sea
ttatgtaattatagtcctttttgtaacaatttgttttggtgggatagggtttatcgatgactatcttaaggtaagtcgtcagaatccaaagggtgtatcaagtaaaatacgtttgttatctggattcttggtagccgccttggcagcatattttattgctaccaatcatccagacgcattgcaaaatcggttggctctcccgatctttaaaaatttgctggttgatcttgggtttttatttgttccctttgcaatgattgtaattgttgggtcggctaatgccgtaaatttgaccgatggcttggacggattagccataatgccagtgatgattgcagccggtgctcttggggtaattgcttatgctgtgggaagagtagattttacagaatatttggatgttcattatgtcaatggtacgggggaaattctaattctttgctctgggatttttggtgcaggattaggttttctctggtataatgcaccaccagctgccgtttttatgggtgatacagggtctttggcgctcgggggcgctctcggtgcagttgccgttgctacgaaacatgaaatagttcttgcaattgttggggggctttttgtcgttgaggcgctctcagtaattatacaagtactttacttcaaaatgacaggaaaacgagtattcttgatggcgccaatccatcatcattttgagaaaaaaggatgggcagaacctcaaatagtcattcgtttttggataatttcacttattcttgcaatggtgggtttggcgactttgaaagtaagataa

SEQ ID NO: 257851 - DNA, 549 bp, Unknown
  Bacterial polypeptide expressing nucleotide sequence isolated from the Sargasso Sea
ttgctgcatttataattgttggttcttcaaatgcagtaaaccttacagatggtttagatggtttggcaacagtacctgtaattttagtagcaggctgttttgcttttataagttatgttactggtaatatagttttctctgattatcttcatatttcttacattaaaggtgttggtgaggttagtgttttttgtggatctgtaattggagcttgtttaggatttttgtggtttaatgcacctccagcaaaaatttttatgggtgatactggatccttggctttaggtggttcgcttggcggcgtaggaattattactaagcatgaaatagttcttgcaataacagggggactatttgtttttgaggcggtgtcagttattattcaggtagtatcatttaaattaactggtaaaagagtttttaagatggctccaattcaccatcattatgaaaaaaaaggatgggcagagtctacagtagtaataagattttggataatttctataattttagcaatgattggacttgcaacgcttaaattaagataat

SEQ ID NO: 257852 - DNA, 920 bp, Unknown
  Bacterial polypeptide expressing nucleotide sequence isolated from the Sargasso Sea
aatacgcaatgatggtcctaaaagtcatattatcaataaagcaggaacgcctacaatgggtggagtattaattatattaagtatatttatttcaataattttgtggtctgatttaagtaataaatttatatggattagttttttctcgtgtacaagttttggattaattggtttctatgatgattatttaaaagtaaaatctaattctagtattggattaaaagctaagacaagagtaattttgcaattattaatttgcttatttgttgtttattttattcaaataaccttagtaaccgactttgctacttcaatttcttttcctttttttaaaaatctaataattgattttggagttttttattattttatagcaatttttataataattggttcagcaaatgctgtaaatctcactgatggattagatggacttgcaattgtgccagtgatgatagtagctatggcttttgcttttatttcatatgtatcaggtaatttaatttttgcagactatttgaaaattaattacattgcagggtctggagaattagcagtattttgtggagcaattataggttcagcattaggatttttgtggtttaatgcaccaccagcaaaagtttttatgggggatactggatcacttgctctcggtggttcgattgcttcatgtgccttaattgtgaagcatgagattgttttagctatagtaggtggtttatttgtacttgaaactttatcagtaattattcaagtagtgagttttaaattaacaggaaaaagaatatttatgatggcaccattacaccatcattttgaaaaaaaaggatgggcagaatctacaattgtcataagattctggataataacaattatcttagcaattattggcttagcaactctgaaaattcgttaat

SEQ ID NO: 257853 - DNA, 784 bp, Unknown
  Bacterial polypeptide expressing nucleotide sequence isolated from the Sargasso Sea
atggcttgttctttttgttttaattgcttatacccttcttgggttagtagatgactacttaaaaatcagcaaaaaaaattctgcaggcgtgtctgctaaaaaaaaacttttttggcaaaccacaatagctcttttggtgaccacctatggatacctttacattcccggatttacatatctttattttccttttgcaaaaaacctatttcttgacctaggcccctggtacatattcttttcaacttttattatagtaggatgctgcaatgctgttaacttaacagatggtcttgatggcctcgctattggacctattatcatctcctttttttcatacgcaatactctgctacatttcaggaaaccttctcattgcaaaatacttacattttccctatgtaaccaacagcggagaacttacaatcatctgtgcagccatagttggtgctggtctagggtttctatggtataatagttatcctgctcaagtctttatgggagatgttggctcacttccccttgggggagttcttgggactattgccatattttcaaaacacgagcttcttctaagcatcattggtggaattttccttgtagaagccctatctgttatttcacaagttatttcctttaagcttattggaaaaagaatctttcgtatggccccccttcatcatcactttgagctaaaaggatggcctgaacctaaaattattgtccgattttggattatctcaattattttggcactaattgctcttctcagtcttaaaataagatga

SEQ ID NO: 257854 - DNA, 268 bp, Unknown
  Bacterial polypeptide expressing nucleotide sequence isolated from the Sargasso Sea
cttggcgcaattcttggagtccttgctgtaattctaagacatgaaatagtttatgcaattatggcaggagttttcatagctgaaacgctaagcgtcatgattcaagtcacttcttacaggttaagacaaaaaagagtttttttaatggcaccaatccatcatcactttgagctaaaagggtggccagagccaaaaattattgtaagattctggattatcactcttgttctaattttagttgcccttgcaacactcaaattaaggtaat

SEQ ID NO: 257855 - DNA, 544 bp, Unknown
  Bacterial polypeptide expressing nucleotide sequence isolated from the Sargasso Sea
ttttatatttcccattgcttttttattactagttggcataagtaattcagtaaatttgactgatggactagatggattagcagctggatgcagtgggattgtcttttatggattaggaacagagatattaatgaaagaacaaaaagagctatttgtttttagtgtcttatgttatgcaatgtcgggcatatgctttggatttctcaagtacaatagttatcctgcaaaaatatttatgggtgacacaggatcattaagcattggagctattctgggttctatagcgttattaactaatagcgtttttaccttatctattttctcaggaatatttattgttgaatctttatcagtgatgattcaggtcgtgatttttaaaattacaaaaaaattatttcatagaggtaaacgcatatttttaatggctccactgcaccaccattttgaacttaaaggagttaaggaacaaaaaatagttggaaatttttggaaaatcaacattttacttataattttaggtatagttttaaaaatcaatctttaa

SEQ ID NO: 257856 - DNA, 766 bp, Unknown
  Bacterial polypeptide expressing nucleotide sequence isolated from the Sargasso Sea
aatgctttttagtctattttctaatttaattgagatctttagttttctgaacgtttttaaatatttgactgtaagaactggtctatcaatgtttacatcaatgatagtagtctttttaattgggggcccacttatcaattatttttctacacatcaaattcatgacccaattagagaagatggacctagtgaacatattgtcaaaaaaataggaactcccacaatgggaggtctaatgattttactgggtattttctcaggtgttctattatggggtgatttttcaaacccctacaattggttcttactttatatagctggatcttttggattacttggaggctatgatgactatcaaaaaataaaaaaaaataattcaaatggcataagttctaaattaaagattataatacaaataatattagctttaggtggaattttaattctctatttttatattggatccaatgaacttgaaaacttgtattttccattttttaaaaatttaataattaatttaggatggttttttattccattttatctgtttgttattgtagggtcatctaatgcagtaaatttgactgacgggcttgatggtttagctactgtacctgtaatattggttgcagcttgttttgcatttattagttatgttacaggaaatatagttttttcagaatatttacaaattacatatattgaaggagtaggagaagcatctattttctgcggatcaataataggatcttgtctaggtttctta

SEQ ID NO: 257857 - DNA, 577 bp, Unknown
  Bacterial polypeptide expressing nucleotide sequence isolated from the Sargasso Sea
cttgatttaggtttcttctttatccctttctatgctttcataatagttggatcatcaaatgcagttaacttgaccgatggtttggatggactagctacagtaccagtaattcttgtagcggcatgttttgcatttattagttatgttactggtaatattgttttttcagattatttacacataccctacattgaagatgttggcgagataaccattttttgtggatcaataataggagcttgcttgggctttctttggtttaatgcaccaccggcaaaaatatttatgggagatacaggctctttatctcttggaggttctctaggagcggtaagcattataactaagcatgagattgtacttgccataacaggtggattgtttgttctagaagcaatttcagtaattgttcaagtagtttcatttaaattgacaggaaaaagagtttttataatggcaccaattcatcatcattttgaaaaaaaaggatgggcagaatctactgtagttataagattttggattatctcaataatattggcgatgatagggttagccacacttaaattaagataat

SEQ ID NO: 257858 - DNA, 394 bp, Unknown
  Bacterial polypeptide expressing nucleotide sequence isolated from the Sargasso Sea
acctatctgcccgggaccggcgagctgatggtgttctgcggcgcgatcgccggagctggcctaggatttctatggttcaacacctaccccgccatgatttttatgggcgacgtcggcgcgctggcactgggcgctgcactgggcattgtcgcggtcatgacccgccatgagatcgtacttttcattatgggcggcatctttgtgctcgaaactgtctcggtgatcattcaggtcggctccttcaagttgacgggcaagcgggtcttccgcatggcgcctattcatcatcattttgaactcaaaggttggcccgagcctcgggtgattgttcgtttctggattatcacagtgatgctcgtgctgtttgggctcgccacgttgaagctgcgatgac

SEQ ID NO: 257859 - DNA, 800 bp, Unknown
  Bacterial polypeptide expressing nucleotide sequence isolated from the Sargasso Sea
tggcaccccaaccatgggcggtgtaattatcattattggaataatatctagcactcttttatgggcggacttaactaatatttacgtttggactttaatttttgtttctttgtctttaggcgcgttaggattattagatgatgtacttaaaattagatttaaaaattcaagaggacttaaatctagatataaatttcttggtcaaatcattattggcttaattactcttttgattttgataaaatattctaatcatgagtatttatataatctctactttccgttttttaaaaatttaatatggcatatgggattattttttattttcttcggcttatttgtaatcatcggagcgtcaaatgctgtaaacttgaccgatggattagatgggttagcaacagtaccggttatgttagtggctctctcattcacattaatctcatacgtggtaggaaatacaattttttcggaatatttgcagatccaatacattcctgatgttggggaactatccattttttgtggatctgttgtaggggcttgtttaggttttctttggtacaacgcacctccagcaaaaatatttatgggtgataccggatcactttctcttggaggctctttggctgctgtagcaattattgtaaaacatgaaattgtcctagcaataattgggggattatttgttttagaaactgtatcagtgattatacaagtagtttcatttaaattaaccggtaaaagaatttttatgatggcacctattcaccaccattttgaaaaaaaagggtgggccgagt

SEQ ID NO: 257860 - DNA, 793 bp, Unknown
  Bacterial polypeptide expressing nucleotide sequence isolated from the Sargasso Sea
tccttacactggtttttaatatttattgtaggaggcctaggtattcttggcgcatatgacgattatcagaaaataaaaagtggtaactcagcaggagtttcatttagatttaaaataatttttcaaattattatagctttaattggaatttacatattaacatatcacacaaattctaatgaattaaaaaatttatattttccattctttaaaaatctagtagttaatcttggttggttttttattccattctatttatttattattgttggatcatcaaatgcagttaatttaaccgatggtttggatggattagctacggttcctattatactagttgcgtcttgttttgcattcatcagctatgttactggaaatattgtattttcagaatacttgcatattccttatattcaaggcgttggagaggttgctgtattttgtggatcgattataggagcgtgtattggttttctttggtttaatgcaccaccagcaaaaatatttatgggagatacaggttctttggctttaggaggctccttgggtgctgtcggcataattaccaaacatgaaattgttttagctataacaggaggtttatttgttttagaggcaatttcagtaatagttcaagttatttcctataagttaactggaaaaagaattttcaaaatggctccaattcatcatcattttgaaaaaaaaggatgggccgaatctacgattgtagtcaggttttggattatatcaattattttggcaatgataggtttggctactcttaattaag

SEQ ID NO: 257861 - DNA, 604 bp, Unknown
  Bacterial polypeptide expressing nucleotide sequence isolated from the Sargasso Sea
aacgatttattaaatccattaattaaaatttctgaatcttgggaaataaatacaagtatttttatatttcccatttcttttttagtactagttggcataagtaattcagtaaatttgactgatggactagatggattagcagctggatgcagtggaattgttttttatggattaggaacagagatattaatgaaagaacaaaaagagctttttgtttttagtctcttatgttattcaatgtctggcatatgtttaggatttctaaaacacaataactatcctgcaaaaatatttatgggtgacacaggatcattaagtattggggctatcttgggttctatagcgttattgactaatagcgtttttaccttatctatattctcaggaatatttattgttgaatctttatcagtaatgattcaagtagggatttttaaaattacaaaaaaattattttacaaaggtaaacgcatatttttaatggctccacttcaccaccattttgaacttaaaggtgttaaggaacaaaaaatagttgaaaatttttggaaaatcaacattttacttgtaattttaggtatagttttaaaaatcaatctctaaa

SEQ ID NO: 257862 - DNA, 650 bp, Unknown
  Bacterial polypeptide expressing nucleotide sequence isolated from the Sargasso Sea
tttgcttattcataactatttacccagcaatattaatacagcaattaatatccctttttttaaaaatatttttattgatttaggaatcttttttttcatatttggaatatttgttattgtaggttcagctaatgctgtgaaccttactgacggtttggatggtttggctattgttcctgtcatgattgtttctcttgcatttgcttttattgcttatgttgcaggtaatataaatttttcagagtatttacaaattagctatgtcgaaggtagtggtgaaattgctgttttttgcggagctattgttggcgctgcattaggttttttgtggtttaatgcacctccagctaaagtttttatgggagacacaggttctttatctttaggagccgctatgggatcagtttcaataataactaagcatgaaattgtattagctataattggaggactttttgttttagaaactttttcagttattattcaaataataagtttcaaattaacaggaaagagaatttttcaaatggcacctttgcatcatcattttgaaaaaaaaggatgggctgagtcaacaatagttattagattttggataataacaattgtattggccttgataggtttagcaaccttaaaaattagatgaa

SEQ ID NO: 257863 - DNA, 367 bp, Unknown
  Bacterial polypeptide expressing nucleotide sequence isolated from the Sargasso Sea
tctatattttgtggagctataataggatcttgtcttggcttcttatggtttaatgcaccaccggcaaaaatattcatgggtgacacagggtctttggctttaggagggtcattaggggcggttggtattattactaaacacgagattgttctggcaattacgggtggactatttgttttagaagcagtctcagtgatagcacaagtaatttctttcaaacttactggaaaaagaatattcaaaatggcaccaatacatcaccacttcgaaaaaaaaggatggccagagtcgactgtggttattagattttggatcatatcaattatcttagcaatgataggtcttgcaactttaaaacttagataat

SEQ ID NO: 257864 - DNA, 816 bp, Unknown
  Bacterial polypeptide expressing nucleotide sequence isolated from the Sargasso Sea
gtttttctctacccaaaaaattttaaatcctattagagatgatggtcctcaagatcatattgtaaaaaaaattggaaccccaacaatgggtggtgtgataattttaataggtttattaatttcagtcttatgttgggcggatttatcgaatataaacattcttttttgtatttatattgctatttcatttggtattttaggagctttcgatgattataaaaaaattaaacatagtaactcttcaggtatatcatctaaatttaaaataatttatcagatcattttagcaattataggaatttatttttatgtttactttgtagaatatgagaacattactaatttatattttccattctttaaaaacttaattattaatttaggatggttttttataccatttgctgtcttcgttttaattggttcatctaatgcagttaatttaacagatggtttagacggtttagcaacagtaccagttattttagttgcaggatgttttgcatttataagttatgtaactggcaatattgttttttcagattacttacaaataccttatattgaaggtacaggtgaaatttcaattttctgtggagctattatagggtcatgtttaggttttctttggtttaatgctccaccagctaaaatttttatgggagacactggatcattgtccttaggaggatctcttggagcagtaggaataataactaaacacgaaattgttcttgcaattacgggggggttatttgtgctcgaagcagtctctgtgatggttcaagtaatttcttttaaactcacaggtaaacg

SEQ ID NO: 257865 - DNA, 619 bp, Unknown
  Bacterial polypeptide expressing nucleotide sequence isolated from the Sargasso Sea
tttactaataatctatatctgcctttttttaaaaatatagtaattaatctaggatggttttttattcctttttatttatttgtaattgttggatcctctaatgctgtaaatttaacagacggtcttgatggattagctactgtgcctgtaattttagttgcaggatgtttcgcatttataagttatgtatcaggtaatattatttttgctgaatatcttttaataccctatatcgaaggagttggtgaggtagccgttttttgtggagcaataattggagcctcaataggttttctatggtttaacgcaccaccagcgaaaatattcatgggtgacactggttcactggcattgggaggttctttaggtgccgtaggtgttgctacaaaacatgaaatagttttagcaataacaggaggactttttgttttagaggccgtgtctgtaattgttcaagtaatttcttttaaattaactggaaaaaggatatttatgatggcgcctatacaccatcattttgagaaaaaaggttggccagaatctactgtggttataagattttggatcatctcattaattttagcaatgattggccttgcaacattaaaactaagataat

SEQ ID NO: 257866 - DNA, 832 bp, Unknown
  Bacterial polypeptide expressing nucleotide sequence isolated from the Sargasso Sea
aaacaaattactggaccaattagacaagacggacctattgaccacataattaaaaaaagtggaactcccactatgggcggtctaatgatattaattggtataattgttagtactcttttatgggcagacttaaataatatttatatttggatagttatttttgtttgtacaagtttaggacttttaggatttgttgatgattactataaaataaaattaaaaaattcttctggcataaatgcaaaattgaaatttgctggacaatttttaatttctattactgctatattagcgcttatttattttactgatcatgaaagtatatcaaatttatattttccattttttaaaaatttggtatttcatatgggtctactttttattccatttggtatttttgtcattattggttcatctaatgctgtgaatttaacagatggactagatggtttagcaactgtcccagttatgctagttgctttatctttttcattaatttgttatttagttggaaataagattttcgcaaactatttacaaattcaatacatatctaatgttggggagttgtcaattttttgtggttctattgtcggttcatgcttaggtttcctttggtataatgctccaccagcaaaaatctttatgggagatactggctcgttgtctttgggaggctctatagcctcagtagcaataatagtaaaacacgaaattgttcttgcaattattggcgggctatttgttttagaaacggtttctgtgatcattcaggtaatttcatttaaacttacaggtaaaagagtattcatgatggctcctattcatcatc

SEQ ID NO: 257867 - DNA, 696 bp, Unknown
  Bacterial polypeptide expressing nucleotide sequence isolated from the Sargasso Sea
atcgaaagctgggacacctacaatgggtgggtctttgatgttagtagctattgcgataagtaccgtgctatgggcagatgtatcgaatcgatttattattatcattttgttatcgactcttttgttcgggctaatcggctttgtagatgatttactaaagctaaccagaggaaattcagacggcctttcagctaaggtcaaatttttccttcagtggatggccgcgttacttttagcctttctattatttttttatgctgaaagtagtgtggagactacgctgattctcccattttttaaaaacatcaattacgaactcggtttgatataccttttaacaacgagtttagttattgtgagcactagtaatgcggtgaatttgagcgatggtttagatggtttagcaattatgcctactgtaatgatagggggcgctctaattgtattggcatacgtggctggcaacatcaatttttctaattatttggctttgccatacgttagaggtgttggtgagatatgtgttttttgtggagccttgattggtgctggacttggattcttatggtttaatacttatccggcagaaatattcatgggcgatgttggttcgctttctcttggggctgctttaggcacagcagctgtgatggttcgacaggaactacttcttttgattatgggaggtatttttgt

SEQ ID NO: 257868 - DNA, 822 bp, Unknown
  Bacterial polypeptide expressing nucleotide sequence isolated from the Sargasso Sea
aatgctttatagttttttaacttctctgatagatactttttcttttttaaacgtatttaaatacattacttttagaatgggtttatcggtcgtaacatctttaataataatttttttaattggaaatcctctaataaagtattttgcaaaaaaacagatcacaggtccaattagacgagacggtcccattgatcacatcgtcaagaagagcggtacacctaccatgggtggcttgatgattttaattggaattatattgagcactcttatgtgggcggatttaaaaaatatttatatatggatagttctttttatctgtacaagtcttggaatgctaggtttcattgacgattatttaaaaattaaatttgaaaattccacaggaattaaggcaaaaaccaagtttttttggcagctaataatatcattagtcgcaattttgtctttgatttactttactgatcacgagaccatttctaatttatactttcctttttttaaaaatcttgtttggaacatgggtttgttttttattccctttggtatttttgtaattatcggttcatctaatgcggtaaatttaacagatggattagatggattggcaaccgtaccagtaatgttagttgcgctctctttttctttgatttgctatttggttggaaatacaattttttctgactatcttcaaattcagtacataccaaatgtaggggaattatcaattttttgtggttctatagtaggatcttgtctaggttttctttggtacaacgcaccaccagcaaaaatatttatgggtgataccgggtctctgtctct

SEQ ID NO: 257869 - DNA, 292 bp, Unknown
  Bacterial polypeptide expressing nucleotide sequence isolated from the Sargasso Sea
tatgggtgacacagggtctttagctttaggtggatcactcggcgctgttggaattattacaaaacatgaaattgttctagctataacgggtggtttatttgttttagaggcagtttcggtcattgttcaggttttatcctataaacttactggtaaaagagtttttaaaatggcaccaattcatcaccattttgaaaaaaaaggttggcccgagtcaacagttgttattagattctggattatatcaattatactagcgatgataggtcttgcaactttaaaattaagataa

SEQ ID NO: 257870 - DNA, 677 bp, Unknown
  Bacterial polypeptide expressing nucleotide sequence isolated from the Sargasso Sea
aatgttatatcttattaatatttttagtgatggtggagatttttttaatttatttcgatacattactttcagagctggtggcgccttctttacagcattatttttcggctttatatttgggaatcccttaattaattttttaaaaaagaagcaggaaaatgggcatccaattcgtaaggatggtccagagcatcatattttagctaaggctggaaccccaactatgggtggggtccttataataggagctgccgtaatttcttcttttctgtgggctagattagacaatccttatgtctggttagttttatttgttacattgggatttggattaattggttttattgatgattataaaaaaatcattatgcagaactcggacggcttatcaaaattcataagactattctttggtttttttattgctcttgttgctgctatctttgctatgaatgttcagtctgaaagcttgtcaggttatgttgctgttccgttttttaaagaggctttatttaacattggatggtttttcattccatttgcaatgtttgtaatagtgggatcagcaaatgcagttaatttgactgatggattggatggtttggcagtaatgcctgttatgatagctagtggagccttaggaataatagcatatgctgtgggaagggtagactttt

SEQ ID NO: 257871 - DNA, 507 bp, Unknown
  Bacterial polypeptide expressing nucleotide sequence isolated from the Sargasso Sea
taacagatggtcttgatggtttagcaactgttccggttattttagttgcaggctgctttgcatttattagttatgtaactggaaatatagttttttcagaatatttgcaaattccatacattaagggtgttggagaagtatgtgtctttcttggcgctataattggatcatgtttaggatttttatggtttaacgctcccccggcaaaaatatttatgggagatactggatccttatctttaggaggatctttgggggcagtgggcatcataaccaaacatgaaatagttttggctataactggtggattatttgttttagaggcaatatcagtaattgttcaagtaatatcttttaaaattacaggtaaaagaatttttaaaatggctcccattcaccaccactacgaaaaaaagggttggccagaaccaactgttgtaatcaggttttggatagtagcaataattttagcaatgattggtttggcaacacttaaatttagataat

SEQ ID NO: 257872 - DNA, 441 bp, Unknown
  Bacterial polypeptide expressing nucleotide sequence isolated from the Sargasso Sea
ttagttatgtaacaggaaatgtagttttctcagaatatttacaaattacatatattgaaggagtaggagaagcatctattttctgtggatcaataataggatcttgtctaggtttcttatggtttaatgctccaccagccaaaatatttatgggtgatacaggatccttagccttaggaggatcattaggagcagttggtatcattaccaaacatgaaattgttttagcaattacaggtggattgtttgttttagaggcagtctctgtaattgtgcaagtgatatcattcaaactaactggaaaaagaatatttaaaatggccccgatccatcatcattttgaaaaaaaaggctggccagaatcgactgtggttataagattttggataatatcaattattttagcaatgataggattagcaacattaaaactaagataat

SEQ ID NO: 257873 - DNA, 613 bp, Unknown
  Bacterial polypeptide expressing nucleotide sequence isolated from the Sargasso Sea
catgtctttagctgtgcccatttttatagatgttttattaaatttaggatggttttatattccttttgctgtgtttgtaatagttggatcagctaattctgtgaatttaaccgatggtcttgatggtttagctattatgcctgttatgattgcaagtggttctcttggcattatagcatatgcagtaggtcgggttgatttttctaattatttagaagttcattacattgcaggttcaggagagattgccgtattttcggcagctcttattggtgctggtcttggctttttgtggtataatgctcctccagcagctgtatttatgggagatactggttcattagctcttggtggtgcattgggtgcaatctctgtttgtacaaagcatgagattgttttagcaattataggtggcttatttgttttagaagctctttcagttattattcaagtagctgcttatagattaactggaaaaagggtatttttaatggctcctatccatcaccattttgaaaaattaggatgggctgaaccccaaattgtaattcgattttggatcatatcagtcatattagcacttgtgggcttagccacacttaagctacggtaa

SEQ ID NO: 257874 - DNA, 868 bp, Unknown
  Bacterial polypeptide expressing nucleotide sequence isolated from the Sargasso Sea
aatgggtggattattaattttgttctctttaacaatttctactctactatgggcagatcttggaaatagatatatttgggtagttttagcagtaactattgggttttcaataattggcttccttgacgatttcttaaaaattaaaaaaaagagctcagatggattaacttcaatacaaaaaattatttctcaaagtataattgcatttataagtatgttttacttatattattctgcagaaattactccagagatttctttcattgttccattttttaaagattttattattccaatgtctccatttatttttatttcttttggaatgtttgttcttataggctcctcaaatgctgtaaatctaactgatggtttagatggacttgctattcttccttcagtcctaattggaggagcactaggcttgatagcatatgcgatgggtaatcagttaatagcagattatctatatcttcctcatcttcctttatctggtgaattgatagttttttgcggtgctttaataggatctggaataggatttttatggtataacacttaccctgcgcaacttttcatgggtgatattggttcattaacccttggtgcagttctagggataatggcaataattttaagacatgaacttgtttttgcaataatggcaggtgtttttgtaattgaaacgcttagcgttgctatccaagttatatcatttaaaacaagaggaaagagggtgttcttaatggcaccaattcatcatcattatgagcttaagggatatacagaacctaaaataattgttcgcttttggatagtaacccttgttttgatacttattgctcttgcaactcttaaactgagataa

SEQ ID NO: 257875 - DNA, 594 bp, Unknown
  Bacterial polypeptide expressing nucleotide sequence isolated from the Sargasso Sea
tttttaaaaactttattttacacatgggattgttttttattccttttgggatttttgtgattattggttcttcaaatgcagtaaacttaacggacggattagatggtttagctactgttccggttatgttagttgctttatccttttctttaatttgctatttggttggaaatacaatttttgcaaattatctacaaattcaatacatatctaatgttggagagctgtcgattttctgtggttccattgtaggatcatgtttaggttttctttggtataatgcaccaccagccaaaatatttatgggtgatacgggctcgttatctttaggaggttccatagcttctgtagcgataatagtaaaacacgaaatagttcttgcaattataggaggcttatttgttttggaaacagtttcggtaattatccaagtaatttcatttaaattaactggcaaaagagtatttatgatggcgcccatacaccatcactttgagaaaaaaggctgggcagagtcaacggtagtaattagattttggataattgctattattttggctttagtaggtctagctacattaaagctaagataat

SEQ ID NO: 257876 - DNA, 225 bp, Unknown
  Bacterial polypeptide expressing nucleotide sequence isolated from the Sargasso Sea
ttggcggcgttttcgtttgggaagccctaacagtgattattcaagtatcatattttagatatacaaaagcattttctggcactgggaaaaagttttttatgatggctccaattcatcatcattttgaactaaaaggttggcctgaatcaaaagtagtgatacgcttttggattattggactccttttggcacttttttctctaactacttttaaaataagatgat

SEQ ID NO: 257877 - DNA, 838 bp, Unknown
  Bacterial polypeptide expressing nucleotide sequence isolated from the Sargasso Sea
aatgctttattctttatttttgagtttggttgatactttttcttttttaaatgtttttaaatacctaacagtaagaactggtctagcaatgtttacttctatgataattgtttttattattggtaatccttttataaattttttctcatcaaaaaaaattcatgatccaattagaaaagatggccctgaggaccatatagttagaaagattggcacaccaactatgggtggagttttaattttattagggttatttttgagtgttttcctttggtgtgatttaacaaatcatttagtatggtttataatttttataactttttcttttggatcaattggcgccattgatgatattaaaaagattaaaacaaaaagttcagcgggcatatcattaaaaataaaaatcttatttcaaattctattcgcttttattggtatatttatgctttacattttaagtgattttagtgaaattaaaaatttgtattttcctttttttaaaaacttaataattaatttaggttggttttttgtaccattttacttatttgttatcgttggatcttctaatgcagtaaatttaaccgatggtttggatggtcttgcaactgtaccagtaatcttagttgctgcttgctttgcgtttatcagttatgtaacaggaaatattgtcttttctgattatttacacataccttatattgaaggagcgggtgaagttactattttttgtggagcaattattggatcctgcttaggatttctttggttcaatgctccaccagcaaaaatatttatgggagatacaggctctttagccttaggaggatctctaggt

SEQ ID NO: 257878 - DNA, 577 bp, Unknown
  Bacterial polypeptide expressing nucleotide sequence isolated from the Sargasso Sea
cttaaatttaggttatctttattcctttttttgcgcctttgttattgttggtgcagctaattcagtaaatctaactgacggacttgatggtttagcaattggtcctgtaatgatcacagctctatcttttgcattcatagcttattttacaggtaatattatatttgctgattatctgaaaatttcatatattcccggaactggagaacttgcaattatatgtgctgcgcttattggttcaggtctggggtttttatggtataatgctccacctgcaatggtttttatgggtgatacaggttctttatcagttggaggcacattgggtgcaattgcagtagctactaaacatgaaattattttatcaataattggagggctttttgttcttgagacaatttcagttattattcaagttttttcatttcgacttacaggaaaaagaatatttagaatggcaccacttcatcatcacttcgaacaaaaaggatggtcagaatcaacaatagtaataagattctggataatttctatagttttagcattaattggacttgctagcttaaaattaagatga

SEQ ID NO: 257879 - DNA, 674 bp, Unknown
  Bacterial polypeptide expressing nucleotide sequence isolated from the Sargasso Sea
gtaatatttatactagtttcttttggcttaattggatttacagacgatttcagtaaagttaaaaataattcaagcaaaggcatttcagccaaaataagaatatttcttcaaattattgtttcacttatttttatatattggataactaaataccatcacattgatattaagctcttatcattaccttttttaaaagatatttttattaatttaggtctgttcgcagtaccttttattctaatcgttatcctgggatcagcaaatgcagtaaatttaaccgatggtctagacgggcttgcaattgtccctgtaatgattgttgcagcaacattcgctgtaatttgttatttggcaggcaatataatttttgctgaatatttatacataaattatttgccaggggcgggtgaacttactgtattgtgtgcagcaataataggatcagcgctaggctttttatggtataatgctcctcctgcaatggtgtttatgggagacacaggctcgctttcattgggagcagcattaggatcgattagtattttattaaaacaggaaatagttttagccattgttggaggtatttttgttgctgaagcaatatctgtaatattgcaagtctcatcttttaaattaactggaaaaagaatttttaaaatggcaccattacacca

SEQ ID NO: 257880 - DNA, 549 bp, Unknown
  Bacterial polypeptide expressing nucleotide sequence isolated from the Sargasso Sea
tttcgatgattgtgttcgttggtgctgcaaatgcagtaaatttaactgatggattagatggccttgctataatgcctgtcatgatcgctgcattagccctaggtgttattgcttacgccgtaggacgtgtagactttacaaattatttagatgtgcattatgtgcctggtacgggagaattattgatattttgttctgctctttttggtggtggcttgggttttctttggtataatgctcccccagcagcagttttcatgggtgacacaggtgcgctttctttggggggagctttagggtcaattgcagtggtaacaaagcatgaaatagtcttagcaatagttggcggtttgtttgtggtagaggctttatctgtaatcattcaagttgcttattttaaggcaactggtcgaagagttttcttgatggcgcctattcatcaccattttgagaaaaaaggctgggctgaaccccaaattgttattcggttttggattatttctttgattttagctatgattggccttgcgacattaaaggttagataaa

SEQ ID NO: 257881 - DNA, 811 bp, Unknown
  Bacterial polypeptide expressing nucleotide sequence isolated from the Sargasso Sea
aatcccttaattaattattttgcaaaaaaacaaattactggccctataagacaagatggaccaatagaccatataattaaaaaaagtggtacacctaccatgggtggattaatgatacttattggaattattgtaagtacacttttatggtcagatttaaaaaatatttatatttggattgtactttttgtttgtactagtcttggtttattaggttttttagatgattatctaaaaattaaatttaaaaattcttctggtataaatgcaaaattaaaattttttggacaatttgtaatagctttaatagcaattttagttttagtttattttacagatcataggacaatatcaaatttatattttccttttttcaaaaaccttattttaaatatgggtttattttttattcctttcggaatttttgtaattattggatcttcaaacgctgtaaatttaacagatggtttagatggtttagcaactgtgccagttatgttagtagcactgtcattttcacttatttgctatttagtaggtaatactattttttcaaattatctacagattcaatacgtaccaaatgtaggtgaattatcagttttctgtgggtctatagtgggatcctgtcttggtttcctttggtataatgctcctcctgctaaaatttttatgggagacaccggttcattatcattaggtggatcaatagcttcagtagctataattgtaaaacatgaaatagttcttgcgatagttggaggtctttttgttttagagacagcatctgtaataattcaggtagtttctt

SEQ ID NO: 257882 - DNA, 274 bp, Unknown
  Bacterial polypeptide expressing nucleotide sequence isolated from the Sargasso Sea
attatctttaggcggatcaatagctgcagtagcaattattgttaaacacctttttgttttagcaattattggcggattattcgttttggagatagtctcggtaattattcaggtaatatcatttaaattgactggcaaaagggtgtttatgatggcccctatacatcatcattttgagaaaaaaggatgggcagagtcaactgttgtaattaggttttggataattgctattattttggctttagtaggattggccacactaaaattacgctaa

SEQ ID NO: 257883 - DNA, 817 bp, Unknown
  Bacterial polypeptide expressing nucleotide sequence isolated from the Sargasso Sea
atgctttatcaatttctattaccatttaaagattcaatatcagtattcaacctatttgagtatataacatttcgcgctgctatagctgcaataacagcattaataataagcttcattattgggccctgggttatccacatactacataaaaaccatattggcgaagaaattcggcaagcaggccctaaatcgcatatgaagaaagagggcacgcccacaatgggaggagtcatcattttaatggcagtactcctcccaaccctcctctttgcaaaagtaaacagtgtcttaatacagataataatatttgcaacaatttggatgggaattattggttttctagatgattacctaaaagtagtaaaaaaactcaaacgtggtttaatagctcgttataaacttgcaggacaaatcatactaggctgcattgtgagcttatggatatttaacacaccagaattcattgaattcaatactaagaccacagtgccttttttcaaaaatgttgaactagattttggaatattttatcccttgatggtaatcatagtcataacagggacgtctaatgcagttaacttaacagatgggctggatggtttattagccgggcttctggctatatgctttacggtcttttcagcaatagcttatatttcaggaagagtagatttctctgattatttgaatataatctatatacctggagccggtgagttagccatcttcacttcagcgatggctggagcatgtattggatacttatggtttaactcatatcctgctgatgtttttatgggtgacactggatctcttt

SEQ ID NO: 257884 - DNA, 559 bp, Unknown
  Bacterial polypeptide expressing nucleotide sequence isolated from the Sargasso Sea
ttggttattttctccttggtagtaatagttggttcgtcaaattctgtaaatttaactgatggattagatggtttagctatcgttcctataataatagttttatcaactttttctattatatcttatttagtaggtaatacaatttatgctgattatttaagtgtcagttatataaaaggtgtaggtgaaatttcagtattttgtgctgcatttgttggtgccggcttaggttttttatggtttaatgcgcccccagcaaaaatattcatgggtgatactggttctttagctgcgggtgcgtctataggctctataagtgttattacaaaaaatgaaatagtacttcttatagctggaggactttttgttttagaagcagtgtctgtaatagtacaggttttttcttataaatttaccggaaaaagagtatttaagatggctcctttacatcaccattttgagcaaaaaggttggtctgagtcaacaatagtaattaggttttggattatttcaataatattagcaatgataagtttggtaacatttaagattagataat

SEQ ID NO: 257885 - DNA, 961 bp, Unknown
  Bacterial polypeptide expressing nucleotide sequence isolated from the Sargasso Sea
cttatgtctccattgggttagaattcaaaaaagtgcttttcctagtggacaacctataagaaatgatggtccggatacacattactataaaaaaggaactccaacgttaggcggtgtgctcattcttttttcaataattttaagttcaattttgtggacttcgaatttctcaagttttaactatatattgatattgacattaattttatttggattgataggtttttttgatgacttacaaaaagttaaattaggtaagggaataacatctaaaattaaatttttatgtcaactatcagctacattaattatctattttactattaaatataatggatttgatttaaaccaatttagcattccttttttaaaaaatgtttcaattgaacttggctatttttactttgttctaattctatttattgtaattggttcaacaaatgcaaccaatttgactgatggattagatggattagtaacaatgcctttgatatttgtatttcttacatttgctgtatttgcatatgttttgggtaacatgaatttttctgattatcttttagttaattatataaacggatcaggagaaattgtaattttttgtacctcagcaattggagcattactgggtttcttatggtttaactcaagtcctgcatctatatttatgggagatacaggatcacaatctttaggcgcttcattagccgtaacgtccatccttctaaaacaagaaatagtattagctgttgctggaggtctatttgtaattgaaactttatctgtcatgatacaagttacatattttagattatcaaaaggaaaaagagtttttttgatggccccacttcatcatcattatgaaaaaaaaggactatcagaacaaaaaatagtaattagattttggatattaagtttcctattttgtttgttagctttatcacttttaaaaattagataa

SEQ ID NO: 257886 - DNA, 511 bp, Unknown
  Bacterial polypeptide expressing nucleotide sequence isolated from the Sargasso Sea
ttatttaccgatggattggatggactggcaacagtaccagttatgttagtggcattatcttttacactcatatcttatgttgtaggaaacacgattttttctgattaccttcaaattcaatatatccctgatgttggagagctctcaatattttgcgggtcgattgttggggcctgtttaggttttctttggtacaatgcgcctccagcaaagattttcatgggcgatacaggatcgctttctttaggtggttcattagccgctattgcaataattgttaaacatgaaattgtattagcaatcattggaggtttatttgttttagagacagtatcagttatcattcaagtaatatcttttaaactaactggaaaaagaatttttaaaatggcacctatacaccatcattttgaaaaaaaaggatgggcggagtcgacaatagttataagattttggattatagcaataattttggctttagttggacttgctactttgaaacttagataaa

SEQ ID NO: 257887 - DNA, 1060 bp, Unknown
  Bacterial polypeptide expressing nucleotide sequence isolated from the Sargasso Sea
atgattggaataatcgtatcaggaggattaagttttttatttgttcttgtatcaacatttttaggagtaaattatttcaagagtagaaatataggacaaaatattcaagaagaagttattcaccacgaacataaaaaagggacacctacaatgggaggaattttcttgattctcggtacttccttcggattcttagcttcacacataaacttttggactataggtagaggttttgaggttgttttaagaagaattaatgaagatgttttagctttattaattattgcgatagctatggctttagttggtttagttgatgattatttaaaagtaaaaggtaatagaaatttaggtcttacggtcaaacaaaaatttggactacagtttttagcaggtatattggcagctgtatatatttacaatttaggctactcaacacaactatatatatttagtggttttggtatagatattggatttttcaaatggatattaatagtttttgtctttgtaggtattactaatgcagtaaatcttacagatggtttggatgggctagtcgctggaagtagttcaattagttttgctggtattttagttatttcattttggatatataggcatccagaatattactcaaattttattagcgactcttttttaacagtagatatttcacttttgatatcatctttgtcaggtgcatgtttaggctttttgtggtggaatactaatccagcaaaaataatcatgggtgatgtcggcgcacattttattggtgcgatgtttccactaattttgatttcactaggtgcagaaggactacttctattcttttgtttcttatttttaatagaagctggatcagtaataattcaggtcatttcttttagatacaggaaaaaacgaatttttaaaatggcaccattacaccatcattttgaaatgaaaaactgggctgaaacaacagtaattgttagattttggattattaatggaatttttgtagtacttggtttagggctcttttatgctgactgggttttgtttggaaattaag

SEQ ID NO: 257888 - DNA, 1120 bp, Unknown
  Bacterial polypeptide expressing nucleotide sequence isolated from the Sargasso Sea
cttgttcacgtacctcacgttccgtgcggtgatggccaccatcaccgcgctcgggatcgggctcgtgtgcggaccgtgggtgatccgcaagctgacgcaaatgaaggtcggtcaggccgtgcgcaaggacggtccgcagacgcacctggtcaagtccggtacgccgacgatgggcggcgtgctgatcctgatcggcatcgcggtcgcgacgttgctgtggggcgacctgacgaaccgtttcatctggatcgtgatgctcgtcacgttcggtttcggcgtgatcggctgggtcgacgattaccgcaaggtcgtccacaaggacccacgcgggatgtcgtcgcgcgagaagtatttctggcaatcggtgatcgggctgttcgcggccgtctacctcgccttcagcgtgtcggaagcgaacaacgtgcgcgtgttcgacctgttcatggcgtgggtgaggagcggcctgtcgatggggctgccggcacgcgccgacctgatgctgccgttcctgaagtcgatcagctacccgctcggcgtgtggggcttcatcgtgctgacgtacttcgtgatcgtcggcgcgagcaacgcggtgaacctgaccgacggcctcgacggcctcgtgatcatgccggtcgtgctggtcggtgcgtcgctgggtgtgttcgcgtacgtgatgggcagcgcggtctattcaaaatacctgctgttcccgcacattccgggcgcgggcgaactgctgatcttctgttccgcgatgggtggggcagggctcgcgttcctctggtacaacacgcaccccgcgcaggtgttcatgggtgacgtcggcgcgctggcgctcggcggcgcgctcggcacggtcgcggtgatcgtgcgccaggaaatcgtgctgttcatcatgggcggcatcttcgtcgcggaaacgctgtcggtgatgctgcaggtttcgtggttcaagtacacgaagaagcgctacggcgaagggcggcgcctgctgaagatggcgccgctgcatcaccatttcgaattgtctggctggaaggaaacgcaggtggtcgtgcgtttctggatcatcacgctgatgctgtgcctgttcggtctgaccaccctcaagctgcggtaa

SEQ ID NO: 257889 - DNA, 1087 bp, Unknown
  Bacterial polypeptide expressing nucleotide sequence isolated from the Sargasso Sea
atgctttttagtctattttctaacttaattgagatctttagttttctaaatgtttttaaatatttgactgtaagaactggtctatccatgtttacatcaatgatagtagtttttttaattggggggccacttatcaattatttttcttcacatcaaattcatgacccaattagagaagatggacctagtgaacatattgtcaaaaaaataggaactcccacaatgggaggtctaatgattttaatgggtattttctcaggtgttctattatggggtgatttttcaaacccctacaattggttcttactttatatagctggatcttttggattacttggaggctatgatgactatcaaaaaataaaaaaaaataattcaaatggcataagctctaaattaaagattataatacaaataatattagctttaggtggaattttaattctctatttttatagtggatccaatgaacttgaaaacttgtattttccattttttaaaaatttaataattaatttaggttggttttttattccattttatctgtttgttattgtagggtcatctaatgcagtaaatttgactgacgggcttgatggtttagctactgtacctgtaatattggttgcagcttgttttgcatttattagttatgttacaggaaatatagttttttcagaatatttacaaattacatatattgaaggagtaggagaagcatctattttctgcggatcaataataggatcttgtctaggtttcttatggtttaatgctccaccagctaaaatatttatgggtgatacaggatccttagccttaggaggatcattaggagcagttggcattattaccaaacatgaaattgttttagcaattacaggtggattgtttgttttagaagcagtctctgtaattgtacaagtgatatcattcaaacttaccggaaaaagaatatttaaaatggccccaatccatcatcattttgaaaaaaaaggctggccagaatccactgtagttataagattttggataatatcaattattttagcaatgatagggttagcaacattaaaactaagataat

SEQ ID NO: 257890 - DNA, 1095 bp, Unknown
  Bacterial polypeptide expressing nucleotide sequence isolated from the Sargasso Sea
tctgacattccgtgcggtgatggccaccatcaccgcgctgctgatcgggctcgtctgcggcccggcggtgatccgcaagctgaccgcgatgaaggtcggccaggccgtccgtaaagacggcccgcaaacccacctcgtcaaatccggtacgccgaccatgggtggcgtactgattctgctgggtatcgcggtgtcgacgttgctgtgggccgatctgaccaatcgcttcatctggatcgtgatgttggtcacgttcggcttcggcgtgatcggctgggtcgacgactaccgcaaggtggtctacaaggacccgcgcgggatgtcgtcgcgcgaaaagtatttctggcagtcggtgatcggactgttcgcggcggtgtatctcgccttcagcgtgtctgaagcgagcaacgtgcgcgtgttcgacctgttcatggcgtgggtgcgcagcggtctgtcgatgggcttgccggcgcgtgccgacctgatgctgccgttcgtcaaatcgatcagctatccgctcggcgtatggggcttcattgtgctgacgtatctggtgattgtcggcgcgagcaatgcggtgaatctcacggacggtctcgacggtctcgtgatcatgccggtcgtgctggtcggcgcgtcgctcggtgtgttcgcctatgtgatgggtagctcggtttattcgaaatacctgctgtttccgcacatcgccggcgcgggcgaattgctgatcttctgttcggcaatgggcggggcagggctcgcgttcctctggttcaacacgcacccggcgcagatgttcatgggcgacgtcggtgctctcgccctgggtggcgcgctcggcacggtcgcggtgatcgtgcgtcaagaaatcgtgctcttcatcatgggcggcattttcgtcgcggaaacgctctccgtgatgttgcaggtgacgtggttcaaattcaccaaacgccgcttcggcgaagggcggcgcctcttcaagatggcgccgctgcatcaccattttgaattgtcgggctggaaagaaacgcaggtggtcgtgcgtttctggatcatcacgttgatgctgtgtctgttcggtttgtccacgct

SEQ ID NO: 257891 - DNA, 997 bp, Unknown
  Bacterial polypeptide expressing nucleotide sequence isolated from the Sargasso Sea
acagcgttattaatcagttttatgtttgtccaaaaaattattgctttattaaaaaaaatgcaaaagaaagggcaaccaataagatctgatggcccccaaagtcatataatatttaaaactggcactccaacaatgggtggtttgttaattgtattagcttttactacttcaacagttttatgggcaaagctagacaatgcatatatatggataattttgggagtagccatttcttttggatttatagggctcttagatgattggattaaggtgtctaaaatgacaagtaatggcctaaaaagttatcaaaaaattattccacagatttttattgctttcattgcagcttggtttatttctgaaaatactcctcaaaatttacaaaatactttatctatcccgtttcttaaagaaagcattttctttctaggaattttatatataccattcacaattttagtgattgtaggatcctctaacgcagtaaacttaactgacggtctagacggtttagcaatagttcccgtaatgatagcggcaagctcttttgctataatagtttatttaactgggcatttaaatttttctagttatttacaaattagttatgtacccggtgttggggaaatagcagtttttctaggagcaatcattggttcagggttaggtttcttgtggtttaatgctccaccagctatggtttttatgggagatactggatcattgtctctgggtggagttataggtgtcagtgcttcagcctcaagacatgagttagttttaatcattattggtggtctatttgtattagaaactatatctgtgattgtacaaatagtttctttcaagcttacaggcaaaagaatatttagaatggcaccattacatcatcattttgagcaaaaaggatgggctgagcccaccattgtaattagattttggataatagcattaattttggctttaataggtctttctacccttaaactaaggtaaa

SEQ ID NO: 257892 - DNA, 770 bp, Unknown
  Bacterial polypeptide expressing nucleotide sequence isolated from the Sargasso Sea
ttgggtttggggtccattgggtttttatgatgactataagaaacttataaaaaaaaatagtgatggtataaaaggcagatttaaactttttctacaaataatatttgcctcaatgatgacgttatttttatatttctttatggacactggaagtattgaatcagtttttccttttttaaaagaaaatagtttttatttaggaatacttttcattccatggtcaatttttattttggttggatcatcgaacgcggtgaacttaactgatgggctagacggacttgctatattaccttgtattttgattgcatcagcttttgtcattttttcttatgttcatgggaatataaatatttcatcatacttgttgataccatatattgaaggcaccggagaaactgctatatttgctgcatcacttgtcggagcaggattaggatttctctggtttaattcataccctgcggaaatatttatgggtgattgtggctccttatcattggggagctctcttggattattagcaatcattcttaagcaagaactagcgtttgcaatcatgagcggaatctttgtggctgaagcattgtctgtaattattcaagttgcatcatttaaattaagaaaaggtaagagaatttttaagatggcaccacttcatcatcattatgaattgtccggactatcagaaccaaaaataattatgaggttttggattattaccttcatcttagtattaatcgccttggctacacttaaaattagatgaa

SEQ ID NO: 257893 - DNA, 738 bp, Unknown
  Bacterial polypeptide expressing nucleotide sequence isolated from the Sargasso Sea
catgttagtgtggttagccgagtatttaactcaatatatcaatgcctttaacgtattcagttacctgaccttcaggtctattctgggtattttaacggctttaatgttaagcctgtacctggggcctaagctgatcgccaaactgcagctgctgcaaataggtcaaacggtacgggatgatggcccgcaaagtcacttctcgaaaaaaggcaccccaactatgggcggtttgctgattttaggttcggtactaaccagtattctgttatgggccgacctggcgaataaatatgtttgggtggtgatttttacgctggtcagctttggctggattggttttattgacgattaccgcaaagtagtgcgtaaagatccaaaaggcctgattgccaagtggaaatacttctggcaatccctgtttgctgtggctattgcatttttcctgtatgccacggcagaacgtccggctgaaaccagtttagtggtgccttttattaaagatgtgctgccacagttgggctttatctttattgctttgtgttacttcgtcattgtgggtaccagcaacgcggtgaatttaactgatggtttagacggtttagccatagtgccaaccattatggtggcttttgcctttgccatcattgcctatgccagcggtaacgtgaattttgccaattacctgaatattccttatctgccccatgccagtgagctggtagtggtttgtgctgcatt

SEQ ID NO: 257894 - DNA, 1087 bp, Unknown
  Bacterial polypeptide expressing nucleotide sequence isolated from the Sargasso Sea
tatgctgtatagcctatttacaaacctcgtagatagctaccctatctttaatgtttttagatatttgacagtaagaactggtttatcaatgtttacttcaatgttgatagtttttttaattggaaatccaataattaattatttttcaagtaaaaaaattcataatccaattagatctgacggtccatctgaccatattgtaaaaaaaattggaacaccaacaatgggaggtgtgctaatattgattggaattttttcaggtatattgttgtggtctgatttatcaaatccttacaattggtttttaatatttattgtaggaggccttggtattttaggagcatacgatgattataagaaaattaagagcggcaattctggtggagtttcatttagatttaaacttacttcacaaattataatagctttaattggaatttatatacttacttatcatgcaaatcctactgaattaaaaaatctttatttcccgttttttaaaaatttggtaattaatcttggttggttttttattccattttatttatttgtaattgttgggtcttcaaacgctgttaatttaactgatggtttagatggattggctacggttccaataatattagttgcagcttgctttgcatttataagttatgttactggaaatatagtattttcagaatatttgcatattccttacattgaagatgttggagaagtagctgtattttgtggttcaattataggtgcatgtattggttttctttggttcaacgcaccaccagcaaaaatatttatgggggatacaggttcattggctttaggtggttctttaggagcagtaggtataataaccaagcatgaaattgttcttgcgataacaggaggcttatttgttttagaggcagtttcagtaattgtacaagttatttcatttaagttaacaggaaaacgaatttttaaaatggcaccgatccaccaccatttcgaaaaaaaaggatgggcagaatcaactgtggttgtgagattttggatcatatcaatcattttagcaatgataggattggccactcttaaattaagataa

SEQ ID NO: 257895 - DNA, 316 bp, Unknown
  Bacterial polypeptide expressing nucleotide sequence isolated from the Sargasso Sea
aacgcgccgcccgcaatggtgtttatgggcgataccggatctttgtcactgggcggagcattgggcaccattagtgttatcaccaagcatgaattagttctagctataattggtggtttgttcgtgctagagaccgtctcagtaatcgtgcaggtggtttcattcaagttaacagggaaacgaattttccgaatggctccactacatcatcattttgaaaaaaagggttgggctgaaccaacagttgttattcggttttggataattgctgttgtcttagcgcttattggcctttcaacactaaaactgaggtaga

SEQ ID NO: 257896 - DNA, 1090 bp, Unknown
  Bacterial polypeptide expressing nucleotide sequence isolated from the Sargasso Sea
tatgctgtatgaatttctattcccatttgccgaaagttttcaatttttcaacgtttttaaatatataacttttagaactggcggcgcaattcttactgctttaattataagttttattttaggtcctttcttgattaaaacgctcagaaattttcagaaagaaggccagcccataagaatggatggcccatctgaccatataataaaaaagaaaggaacacctacgatgggaggcatcttaatacttttagcttccttaggttcttcaattttatggatgaaacttgataatcaatttgtttggactgtattacttataatggtaggttttggctctgttggaataattgatgattggatcaaactatccaagaattcctcttcaggcttaaatggaaaaataaaattatctttgcagatattaattacaataccagcaattatgtctataatagaaacttccccacctgacattttgagtggattagcaataccattccttaaagatacttttatcaacttaggttatttctttttaccattttcaatttttgttgttgtaggctcttcaaattcagtaaatttgactgatggactggatggactggcaattgtacctgtcatgatcgctgctgtatgttttgctttaatagcttatttagttggaaatataaatttttctgcatatttacaattaaactatgtgcctggggttggtgagatagcaattgttttaggtgcgttgtttggtgctggattaggttttctatggtttaacgctccaccagctgaaatctttatgggtgataccggctcattatctctaggaggtgttataggtatatctagtgtagctactagacatgaacttgtattagttataattggtggcctttttgttgtagaaacaatttctgtaatcttacaagttggttattttaagttaacaggaaaaagaatctttcttatggctcctcttcaccatcattttgaaaaacgaggatgggaagagtcaacaatagttatcagattttggataattgcagttattttggctcttattggcttatcaactctgaaattgagataa

SEQ ID NO: 257897 - DNA, 865 bp, Unknown
  Bacterial polypeptide expressing nucleotide sequence isolated from the Sargasso Sea
aatgggcggcataatgattctgattggtatattttctggcactttactttggggtaatttaaataattcttacaattggtttttgatttttattgtaggttctttaggtattttaggtgcatatgacgactataaaaaaattaaaagtaaaaattctgcaggcatttcgtttaaatttaaaataatatcacaaattactattgcattaattggaatttttattttaacatattatgtaaattcgccagaaataaaaaatttgtattttcctttctttaaaaatttaataataaatttaggttggttttttatacctttctatatttttataattgttggatcttctaatgcagtaaatttaactgatggattagatggacttgctacagttccagttattctagttgctggttgttttgcatttataagttacgtatcaggtaatgtagtattttccaattatttacatataccttatctagaaggagtaggagaagcatctgtattttgtggatcaattattggagcatgtataggttttttatggtttaacgcaccaccggctaaaatttttatgggtgatacaggctcacttgcccttggtggttctttaggagcggtaggaataatcacaaaacatgaaatagtgttagctatcaccggtggactttttgtattagaggccgtctcagttattgttcaagttgtttcttttaaaattactggaaaaagaatatttaaaatggcaccaatacatcatcattttgaaaaaaagggatgggcagaatcaacagttgtagttaggttttggataatttcattaatattggccatgataggtcttgctactctcaaattacgataa

SEQ ID NO: 257898 - DNA, 1084 bp, Unknown
  Bacterial polypeptide expressing nucleotide sequence isolated from the Sargasso Sea
atgttattacctttattcgaatatcttagtgaattttttggaccgtttcgggtagtagagttcttatctactagagcaatattagcaactttaacttcattgctcttctcactttttttagggccaagattcattaataagatgaaggatattcaggtgggtcaggttattagagaagagggacctaaaactcatctttccaaacaaggaactcctactatggggggtaccttaatattaagctctataatcttaagcgttattttatggggagatctagaaaatagatatttatgggtagctttcttgacaactatatctttcggagttttaggttggattgacgacagactgaagattaaacataagtctagtgatggactgtctgcttcaagcaaaatcttttggcaatcagttataactatcatagcttgctctttcttattttacagccatgaaaacgtcgaagaagttagcttaatagttccattctttaaagatatctctattccgttgggtgtgggttttattttcctttcttattttgttgtcttaggtactagcaatgcagtaaacctaacagatggtttggatggtttagcaattttgccttgcgtgatggttgcagccggattaggcgttataggttatctcgctggaaatatcatttatgctgatttcctaaatattccttatttacctggaacaggtgagatgattgtcttttgtggtgcattagttggctctggaataggtttcttatggttcaacacctatcctgctcaggtttttatgggcgatgtaggatctcttgctttaggggctgccttaggaatagttactgttattattagacatgaatatgttctgctagtcatgggaggcttgtttgttgttgaggccctttcggtgattgttcaagtatcttcttataaactaacaggtaaacgcatttttcaaatggcacctttgcatcatcattatgaacttaaaggatggcctgagccaagagtgatagtcagattttggataatcactttcatgttagtcttgctcggtctcgctttattgaggttaaggtaga

SEQ ID NO: 257899 - DNA, 701 bp, Unknown
  Bacterial polypeptide expressing nucleotide sequence isolated from the Sargasso Sea
aatgctatttagtttattctcaaatttagttgatattttcagtttttttaatgtttttaagtatttaactgtacgaactggactatcaatgtttacttcaatgattgtagtttttttagtgggaacacctttaataaattatttttcatctaagcaaatacataatccaattagagatgatggaccatcagaacatatagtgaaaaagattggtactccaactatgggtggattaatgatattgatgggtgttttctcaggagtattattatggggagatctttcaaatccatataattggtttttaatttatatagctggttcatttggtttattaggtgcttatgatgattatcaaaaagttaagaaaaataattcatctggagtatcttcaagatttaaaatcataattcagattattttagtattgattggaatattaatcttatacttttcaaatgtatctaatgaaatacaaaatttatatgttccattttttaaaaacgttgtaataaatttaggatggttttttatccctttttacttgtttgttttagttggttcttctaatgctgtaaatctgactgatggtttggatggtttggcgacagttccagtaattcttgtggcaggatgttttgctttcattagttatgttgctggaaatgtagttttttctgattacttacaaataccttata

SEQ ID NO: 257900 - DNA, 757 bp, Unknown
  Bacterial polypeptide expressing nucleotide sequence isolated from the Sargasso Sea
atgttatataatttatttgctccatttgcagaagattttattttttttaatctttttcgttttttaacttttagaactggtggcgctatattgactgctatggttctaagctttgttctagggcctagcatcataagatggttgaaaaaaagacagcattatggtcagccaataagaaatgatggtcccaaaagtcatattatatcaaaagctggaacgcctactatgggtggtatattaattcttctaagttttggtgtctcaacattattatgggctgatttaagcaacggatacgtttgggcaactttaacagtaactttgggctttggtttaataggttttcttgatgattttttgaaggtaagtaaaaatagtcatgaaggagtttctgcatacactaaacttttattacaaactattttatctattgtagcagttatttgggttgtaaatatatctccagattcaacttcattgggattagctgttcctttttttaaggaaactataattaatttaggttggttttttataccaatggcagtagttgtcattgttggttcgtccaatgcagttaacttaactgatggtttagatggtttggccattgttcctgtaatcattgctgcttcttcctatgctcttatagcctacttagttggtaatgttgttttttcttcatatctacaaatacatggagtgcctggagcaggtgagttagcagttttttgtggagctttagtgggagctggac

SEQ ID NO: 257901 - DNA, 1087 bp, Unknown
  Bacterial polypeptide expressing nucleotide sequence isolated from the Sargasso Sea
tatgctgtatagtctatttacaaatctcgtagatagctaccctatctttaatgtttttagatatttgacagtaagaactggtttatcaatgtttacctcaatgttgatagtttttttaattggaaatccaataattaattatttttctagtaaaaaaattcataatccaattagatctgacggtccgactgaccatattgtaaaaaaaattggaactccaacaatgggtggtattttaattttaattggtattttttctggagtattattatggtcagatttatcaaattcttataattggtttttaatatttattgttggtggtttaggagctcttggtgcatatgatgattacaaaaaaataaaaagtggaagttctgcaggtatttcatttaaatttaaattaatttctcaaataattatagctttaattggaatatatatattaacttattatgtaaattcggctgaattaaaaaatttatattttcctttttttaaaaatttagttattaatcttagttggtttttcattccattttatttatttataattgttggatcatcaaatgctgttaatttaaccgatggtttagatggattggcaacggttcctattatattggttgcatcttgttttgcatttataagttatgtgacaggaaatgttgtattttctgaatatttgcacatcccatatattcaaggagttggagaggttgcagtgttctgcggttcaattatcggtgcatgcataggttttctatggttcaatgcaccaccagcaaaaatatttatgggagataccggctcattagccttgggaggttctcttggagctgtgggaataataacaaaacatgaaattgtcttggctataacaggaggtctgtttgttttagaagcagtttcagtaattgttcaagtagtttcatataagctaacaggaaaaagaatttttaaaatggccccaatacatcatcattttgaaaaaaagggatggcccgagtcaactgttgtagttagattttggattatatcaattattttagcgatgataggacttgctactcttaaattaagataa

SEQ ID NO: 257902 - DNA, 1087 bp, Unknown
  Bacterial polypeptide expressing nucleotide sequence isolated from the Sargasso Sea
atgctttatcaatttttattaaattttgtagatacatttggatttttaaatgtttttaaatatttaacatttcgaactggcttgtcagtttttacatcttttttaatagctttaataattggaggtccatttataaaatttttttctaatcaaaaaatttataacccaatccgtgatgatggaccagaagatcatattataaaaaaaattggtactccaacaatgggaggggtaatcattttattaggattacttgtatcagttttgtgttgggcagatttatctaatattaatattttattttgtatatatattacaatctcttttggattactaggtgcctatgatgattacaaaaagattagatttacaaactcttcaggcatctcatcgaaattaaaaattgttttacaaataatattagcaattataggagttattttttatctacaatttgtggactatcaagatgtaacgaatttatattttccgttttttaaagatttaatcataaaccttggatggttctttattcctttttcagtatttgtaattattggatcatcaaatgctgttaatcttactgatggtttggatggtctagccacagtaccagtaatactagttgcagcttgttttgcttttattagttacgtaactggtaatatagtattttcagactatttaaatattccttatattgaaggaacaggtgaaatttcaattttttgtggagcgataataggttcttgtttaggttttttgtggttcaatgctccacctgccaaaatttttatgggtgacactggctcattatcccttggaggatctttaggtgcagtggggataattactaaacatgaaattgttttagcaattactggaggtctttttgtcttagaagcagtttcagtgatggttcaagtaatttcatttaaacttactggaaaaagaatttttaaaatggctccaatacaccatcactttgaaaagaaaggttggccagagtcaactattgtaatcagattttggattatttctataattttggcaatggtaggcttagctactctaaaattaagataat

SEQ ID NO: 257903 - DNA, 908 bp, Unknown
  Bacterial polypeptide expressing nucleotide sequence isolated from the Sargasso Sea
attaaatttacttcaaactattagagctgaaggtcccgctaatcattataaaaaaagtgataccccaacaatgggtgggatttttatgatggtcccttttttaatttttcttttgataataactataactacaagctctccaaaattatttcttttattactgactatttttggtttctttattacaggatttttagatgattttttaagtattaaaaataaaaaaaatactggtttaaaaacaaaagaaaaattttttctacaaagtatcatctcaataatttttatattgttagcctatgaaaaaaatttaatcaatccgttaataacagtatctgactcttggggaataaatatgaatattttcatattgcctatttcttttttagtactagttggcataagcaattcagtaaatttgactgatggactagatggattagcagctggatgcagtgggattgtcttttatggattaggaacagaaatattaatgaaagaacagcaagaactctttatatttagcatcctatgttattcaatgtctggaatatgtttaggatttcttaagtataatagttatcctgcaaaaatatttatgggtgacacaggatccctaagtattggtgcgattctgggttctatagcgttattaaccgatagcgtatttaccttatctattttttcaggagtatttattattgaatcactatcagtaatgattcaagtaggtttttttaagattacaaaaaaattatttcataaaggtaaacgcatatttttaatggctccactgcaccaccattttgaacttaaaggagttaaggaacaaaaaatagttgaaaatttttggaaaatcaacattttacttgtaattttaggtatagttttaaaaatcaatctttaaa

SEQ ID NO: 257904 - DNA, 1045 bp, Unknown
  Bacterial polypeptide expressing nucleotide sequence isolated from the Sargasso Sea
gatgctttatttgacaaattatttagctcaatttgagtctagtttttatgttttcgattacataactatccgagcgattttgggagcactaacatcattgatcatttcaatggttttgggtccaaggatgatagcaaagtttcactcaattcagcttaatcagcctgtcagagatgatggaccagaaactcataaagaaaaaattggcacaccaacaatgggtggcgctttgattattatgtcagtttcactggcaacgttaatgtgggcagaaataaataatccatttatatggataatacttttcgtgactatttcatttggtattcttgggtatattgatgactatcagaaaatcatcaaaaataattctgacggaatttcagcatcaaaaaaacttttttggcaatctcttattgcaataatagcaataacgcttttgataaaattcaatacagattcaaattcaacgtctttattaatcccctacttgaaaaatacaatgattgagcttggtgttttgcatctgattatttcatttttctttattattggttttagcaacgctgtaaatctaactgatgggttggatggattagcaattatgccaacagttcttgttgccggcgctttaggtattttttcatatgtcactggaaacataaatttttcaacctatcttgaaattccatatgtcgccggcgctggagagatctttgttttctgtgcagcactggttggtgctgggttgggattcttatggttcaatacatatccagctcaagtctttatgggagacgttgggtcattatctattggtgcatctctagggataatagctgtaataataaaacaagaaattgttctggtaattatgggcggagtatttgttgctgaaacattatcagtaatgattcaagtcacttcttttaagttaactggaaaaagaattttcaggatggcgccattgcatcatcactatgaactaaaaggatggaaagagccaaaaatcattgtaaggttttggattattactgtgatatta

SEQ ID NO: 257905 - DNA, 662 bp, Unknown
  Bacterial polypeptide expressing nucleotide sequence isolated from the Sargasso Sea
cggcttctcgctgccgctgcccgagaccaccgatttgcagattccgttcttcaaggaatggaacatcccgctgggtgtggccggcttcgtggcgctgacctatttcgtcatcgtcggcaccagcaacgccgtcaacctcacggacggggcggacggcctggccatcatgccggcggtgctggtgggtggtgcgctgggcatcttcgcctacgtcaccggcaacgcggtgttcgcgcgctacctgctcatttcctatgtgccgggcgctggcgagctgatcgtgctgtgcggcgccatcttcggggcagggctggccttcctgtggttcaacgcctatccggcccaggtcttcatgggcgatgtgggggcgctggcgctgggcgccgcgctgggctgcatcgccgtcatcgttcgccaggaaatcatgctgttcatcatgggtggggtcttcgtggccgaaaccgtctccgtgatgctgcaggtgtcctggttcaagtacaccaagcgccgttatggcactggccggcggatctttcgcatggcgccgctgcaccatcacttcgaggtgggcggcgtgaaggaatcgcaggtggtggtccgcttctggatcgtcaccatggtcctggtgctgtttggcctgtcttccctgaagctgcgttgac

SEQ ID NO: 257906 - DNA, 1084 bp, Unknown
  Bacterial polypeptide expressing nucleotide sequence isolated from the Sargasso Sea
tatgcttctatttttatttgattttttttctgaaagctttggtcctctaagggtttttgaatatttatcctttaggtcaattttagctactattacttctttgttattctctcttcttttggggcccttatttattaataaaatgaagcaggaccaacaaaatcagataatcagagaaagtggtccagagagtcatctaaacaagaaaggaactcctacaatgggaggggcattaattttgtcatcaatccttataagcagtatcttttggggtgatttagagaataaatacatatggactatattgtttattatgacttcttttgcctgtataggatgggttgatgacagactaaaaataaaacttaattctagtgatggaatgtctttttatggaaagattttctggcaaagtttagctactttaactgccatatcttatctatatatcagctcaaatgacattaatcaaactagtttgatagtcccttttttcaaagaaataactatacctttaggtttaggttttatagccctctcatactttgtagttgtaggtacaagtaatgctgttaatttaacagacggcttggatgggctcgccatacttccatctgtaatggtaatatcaggacttgcagtgattagttatgcttcaggtaatctattcttttctgattatttaaatataccttacctgccgggaactggtgaaatagtcgtaatttgtggtgcaataataggcgcaggcattggttttttgtggtacaacacttatccagctcaagtatttatgggagacgtcgggtcgctggctttaggttctgctattggtattattacggttattattagacatgagtatgtcttgttagttatgggaggtgtattcgtagtagaagctctttcagtaatgatacaagttacttcttttaaactcacaggtaaaagggtatttagaatggctccattacatcaccattatgagttaaaaggatggcctgaacctagagtgattgtaagattctggataattacttttgtattagttcttattgggttagctttgctaaaactaagatag

SEQ ID NO: 257907 - DNA, 856 bp, Unknown
  Bacterial polypeptide expressing nucleotide sequence isolated from the Sargasso Sea
atgattcgccttttatttgcagttacgatttcagttggaatatctctcttcggaacgcggtacttaattcgttggttgaccactagaaaaattggacaacctattcgcgaagatggtccagggggtcatattactaaagcaggaacacctaccatggggggtatagctgttgttttcggtgggacgatagcctatgtgatttcagacttgtataacggaatctatacgcgttcgggcctacttgtaatggctgcgattcttggtgcaagtattgttggtttcttagatgattggttgaaagtttcaaatgagcgaaaccttggcctaaagaaaggtacaaaagtcatcggtttgcttgtcgttgcctttggtttctcaatagcaatggttacaagcaccaacgtacataccgaagtttcctttacgcgttgggattcactttcgatcgatttaggcccggtcggttgggtcttttgggctgtgtttgtaattcttgctatgagtaatgcagtcaaccttacagatggccttgatgggctagctgctggatcggctaccttatgcttcagcgcgttaacagttatttcattttgggctttccgccatccggaaatctatgatcttgatcacgcattagatttagcagtcgtcgctgtgtcaatgctaggagcgtgcataggctttctctggtggaatgctgctccagcaaaaatcttcatgggcgatacagggtcgttagctatcggaactgcattagcttgcctagcgttagctacgaacactcatctacttcttccaataatcggaggaattttcgtgctcgaaactctttcagtcattattcaagtattgggtt

SEQ ID NO: 257908 - DNA, 1087 bp, Unknown
  Bacterial polypeptide expressing nucleotide sequence isolated from the Sargasso Sea
aatgctatttagtctattttcaaacttagtagatatttttagtttttttaatgtttttaagtacctgactgtaagaacgggtttatcaatgtttacttcgatgattgtagtttttgttgttggaaatcctttaataaattatttttcagctaagcaaattcataatccaataagagatgatggcccttcagaacacattgtaaaaaaaataggaactccaacgatgggtggactaatgatattgatgggagttttttcaggtgtattattgtggggcgatctttcaaatccatataattggtttttaatttatatagctggttcttttggtttattaggagcttatgacgattataaaaagataaaaaaaaataattcttcaggaatatcttctaaatttaaaatttttattcaaattattttagctttagttggaatatttataatttatttctatagcgaatccagcgaaatcaataaattatattttccattttttaaaaatcttgtaattaatttaggttggttttttgttcctttttatttgtttgtattggttggatcttcaaacgcagtaaatttaactgatggattagatggtttggctacagtgccagttatgctggtggcagcttgttttgcatttattagctatgttacgggaaatatagttttttcagattatttacaaattccttatatagaaggtgtaggagaagcttcgattttttgtggatcgatcattggagcttgcctaggatttttgtggtttaatgcacctccggcaaaaatatttatgggcgatacaggttcgctctctttaggaggttcgttgggagcggtaggaataataactaaacatgaaattgttttggcaataacaggaggcttatttgttttagaagcagtatcagttatagctcaagttgtttcattcaagcttacaggaaaaagaatatttaaaatggcaccaattcaccatcattttgaaaaaaaaggatggccagagtcaacagttgttattagattttggataatttctatcattctagcaatgatcggtttggcaactttaaaattaagataa

SEQ ID NO: 257909 - DNA, 979 bp, Unknown
  Bacterial polypeptide expressing nucleotide sequence isolated from the Sargasso Sea
agtttttattgttggaaatccattaataaattatttttcatctaaacaaatacataatccaatacgagatgatggtccttcggaacatattataaaaaagataggcacacccacaatgggagggttaatgattttgctaggggttttttcaggcgtattattatggggagatctttcaaatccatataattggtttttgatttatatagctggatcatttggattattaggagcctatgatgattataaaaaaataaaaaaaaataattcaacaggattatcttcaaaatttaaaattattattcagatttttttagctttaattggaatattaattttatatttttctagcgaatctaatgagataaaaaatttatattttcctttttttaaaaattttgtaattaatttgggttggttttttattcctttttatttatttgtattagttgggtcttcaaatgcagtaaatttaacagatggtctagatggtttggccactgttcctgtaatacttgtagcaggatgttttgcttttataagttatgtcgttggtaacattgttttttcagaatatttacatattccatatataaagggagtaggtgaagcatctgttttttgtggttcgattataggagcttgtttaggatttctatggtttaacgctccaccagcaaaaatatttatgggagatacgggctctctttctttgggaggttctcttggggccgtaggaataattacgaaacatgagattgttctagctataactggaggattatttgttttagaagctatatcagttatagctcaagttatatcttttaaacttactggtaaaagaatttttaaaatggctcctattcatcatcattttgagaaaaaaggatgggcagagtcaactgttgtaataagattttggataatttctataattcttgcgatgataggtttggcaactttaaaattaagataa

SEQ ID NO: 257910 - DNA, 1063 bp, Unknown
  Bacterial polypeptide expressing nucleotide sequence isolated from the Sargasso Sea
ttgattaaatatttagcctttgaataccaatctttatttagttttctaaatatttttagttatataacgtttagggctggcgcatctattcttactggattatttttttctctcatatttggaaattatattattaacaaattatcaaatgttcaaccaactggccaaccaataagagttgacggtccagagtcacatataattgcaaaaaaaggcacccctacaatgggtggcttgttgattattctaagtgtttttgtttcaacaattatttgggctgatttacaaaatgtttttgtatggattttacttttaactattttaatttttggatctattggttttgcagatgattacaaaaaaattaaatcaaatacaagtgagggtatttcatcaaaaataagaattatatttcaaatcattttttcatttttcattacatatttaattcttatcaatttagatccaagtataagcaaatctatgacatttcctttctttaaaaatttaattatagattttggaatattttattttctaatttccatatttataattattggatcagctaatgcagtaaacctaactgatggacttgatggtttagcaattgtccctgtaatgatagttgctatgtcttttgccttcatatcttatgtttcaggtaatatagttttttctaattatttacttatccaatatattcctggaactggtgaattagcagttttttgtggttctttaattggagctgctttaggttttctatggtttaacgcaccacccgctaaagtttttatgggtgatactggctctttagcattaggtggctctttaggctcaatagcgataatatgtaaacatgaaattcttcttgcaataataggaggtttatttgttctagaaaccttttctgtagtaatccaagtattgatttttaaaatgacaggaaaaagagtttttttaatggcaccactacatcatcattttgaaaaaaagggatggcctgagtcaacaaaaggtattcgtttttggataattactattgtattagctttgatag

SEQ ID NO: 257911 - DNA, 1072 bp, Unknown
  Bacterial polypeptide expressing nucleotide sequence isolated from the Sargasso Sea
aatgctcttacctttatttgaatatctatctgaattttttggaccttttcgtgtagttgagtttttatctacaagagcaatattggcaacattaacctctttattgttttcactcgttctaggtcctaaattcatcaataagatgaaagatatacaaattggtcaagttgtaagagaagaaggtcctaagactcacttatcaaagcaaggcacacccacaatgggaggcacacttatacttagctctgtattcctgagtgtaatactttggggcgacttggagaatcgatacttatgggtagcctttcttacatctatggcttttggtgtcctggggtggatagatgatcgtttgaagattaaacataaatctagcgatggactttctcctctcagtaaaattctatggcaatctgttatagctctgcttgcatgtacctatctttacttgagccaagagaatattgctgagaccagtctaattattcctttcttcaaagatatctcgataccacttggcttgggatttattctcttatcttattttgtggtaattggaactagcaacgcagtaaatctaactgatggacttgatggtttggcaatacttccttgcgtcatggtagcagcaggcttagggatcataggctatttagctggtaatgctatttattctgattttctaaatatcccttatcttccaggtactggtgaaatgatagttttttgtggcgcattagtaggatcaggcatagggtttctctggttcaatacctatcctgcacaagtttttatgggagatgtgggatcactttctctgggtgcagctttaggcatagtcactgtgattattaggcatgaatatgtattgcttgtaatgggaggcttgtttgtaatagaagcattatctgtaattgttcaagtagcttcatttaaattaacaggcaaaagagtttttaatatggctccacttcatcatcattatgaactcaaaggctggccagagcccagagtgattgttaggttttggattaatacgttcatgttagttctgctcgggttggccttactc

SEQ ID NO: 257912 - DNA, 794 bp, Unknown
  Bacterial polypeptide expressing nucleotide sequence isolated from the Sargasso Sea
taattggttcttactttacatagcaggatcctttggaatacttggaggttatgatgattttcaaaagattaaaaaaaataattcaaatggcataagttcaaaactaaagatcataattcaaataatattagctttaggtggaatttttattctctatttttatagtggatctaatgaaattgaaaatttatatttccctttttttaaaaatttaataattaatttagggtggttttttattccattttatctatttgttattgtaggatcatctaatgcagtaaacttgactgatgggctagatggtttagctactgtacctgtaatattggttgcagcttgttttgcttttattagttatgtaactggaaatatagttttttcagaatatttacaaattacatatatagtaggagtaggagaagcctcgattttctgcggagcaattataggatcttgtctgggtttcttgtggtttaatgctccaccagctaagatatttatgggtgatacaggatccttagctttaggaggatcactaggagccgttagtataattaccaaacatgaaattgttttagcaattacaggtggactgtttgttttagaagctgtttctgtaattgcacaagtgatatcattcaaacttaccggcaaaagaatttttaaaatggccccaattcatcatcattttgaaaaaaaaggctggccagagtcgactgtagttataagattttggatcatatcaatcattttagcaatgataggtttggcaacattaaaactaagataat

SEQ ID NO: 257913 - DNA, 874 bp, Unknown
  Bacterial polypeptide expressing nucleotide sequence isolated from the Sargasso Sea
aatgctttatcaatttttattaaattttgttgatacttttagttttttaaatgtatttaaatatttaacttttagaacaggtttatcttttttcacctctctggttattgtattgattattggaggtccttttatcaagtttttttcaaaacaaaaaattttaaatccaatacgggatgatggacctgaggatcatatagttaaaaaaattggtacaccaacaatgggaggtttaataattttattcggcttattgatatcagtaatattttgggcagatttatcaaatattaatattttattttgtatctatatagcaattacatttggtttgttgggagcatatgatgactttaagaagattaaatttagcaactcgtcaggaatttcttcaaagtttaaaataacttcacaaataatattagcaattattggtgtaagtttgtttgtttatttaaacgattatcaagatttaaataatttatattttccattctttaaaaatttaattgtaaaccttggatggttttttataccatttgcaatattcgtaattattggatcatcaaatgctgttaaccttacggatggattagatggtctagcaacagtgcctgtaatattagttgcagcatgttttgcttttataagctatgttactggaaacatcgtattttcaaattatttacaaataccctacatagagggaacgggtgaagtatcaattttttgtggggcaattattggctcttgtttaggtttcttatggtttaatgctccacctgctaaaatttttatgggcgacacaggctcattatctcttggaggatctttaggtgcagtaggaattattacaaagcatgaaattgtttta

SEQ ID NO: 257914 - DNA, 1087 bp, Unknown
  Bacterial polypeptide expressing nucleotide sequence isolated from the Sargasso Sea
atgttatataatatacttacaagctattcggatacatattctttcctcaattttttcaattttttaactgtgagaacaggtttggctgtgattactgcaatgatcatagtttttttaataggggataaatttataaattttttttcttcaaaacaaattacaaatcctattcgctctgatggaccagaggatcatttgatcaaaaaaattggaacacccactatgggtggagttttaatattaataggtttattcacaggtgtttttttgtgggctgatttattaaatccatataattggttgttaatattcatcactttatcctttggaattttaggagcatttgatgattataaaaaaattaaaaataataactcaaatgggatttcttcaaaattaaaaatattaattcaaatttttctttgtctaatttcgttaattattttttataaatttatagactctgatattaaaactaatttgtattttccattttttaaaaatttagtaattaacttaggatggttttttatacctttttatttgtttgttattgttggatcctctaatgcagtaaatctaacagatggtttggatggattagccactgttcctgttatacttgttgctgggtgttttggttttataagttatgtatcaggaaacgtaatttttgcagactatttattaattccttatatagagggtgttggagaagttgcggttttttgtggagcaatcattggagcatcaattggttttttatggtttaacgcgccacctgctaaaatatttatgggggatacaggttcattggctttgggcggttctttaggtgcaattggagtaacaacaaaacacgagatagtgttagctattaccggtggactatttgtattagaagcaatttctgtaattgtacaagttgtttcattcaaactaacaggtaaaagaatttttatgatggcaccaattcatcatcactttgaaaaaaaaggttgggctgagtctacaatagtcataagattttggattatatctcttattttggcaatgattggtttagccactttaaaactaagatgaa

SEQ ID NO: 257915 - DNA, 1044 bp, Unknown
  Bacterial polypeptide expressing nucleotide sequence isolated from the Sargasso Sea
ttctaaacgtttttaaatatttgactgtaagaactggtctatcaatgtttacatcaatgatagtagtttttttagttggggggccactcatcaattatttttcttcacatcaaattcatgacccaattagagaagatggacctagtgaacatattgtcaaaaaaataggaactcccacaatgggaggtctaatgattttactgggtattttctcaggtgttctattatggggtgatttttcaaacccctacaattggttcttactttatatagcaggatcttttggattacttggaggctatgatgactatcaaaaaataaaaaaaaataattcaaatggcataagttctaaattaaagattataatacaaataatattagctttaggaggaattttaattctctatttttatagtggatctaatgaaattgaaaatttgtattttccattttttaaaaatttaattattaatttaggttggttttttattccattttatctatttgttattgtagggtcatctaatgcagtaaatttgactgatgggcttgatggtttagctacagtacctgtaatattggttgcagcttgttttgcatttattagttatgtaacaggaaatatagttttttcagaatatttacaaattacatatattgagggagtaggagaagcatctattttctgcggatcaataataggatcttgtctaggttttttgtggtttaacgctccaccagctaaaatatttatgggtgatacaggatccttagccttaggaggatcactaggagcagttggtattattaccaaacatgaaattgttttagcaattacaggtggattgtttgttctagaagcagtctcagtaattgtacaagtgatatcattcaaacttaccggaaaaagaatatttaaaatggccccaatccatcatcattttgaaaaaaaaggctggccagaatcgactgtcgttataagattttggataatatcaattattttagcaatgataggattagcaacattaaaactaagataat

SEQ ID NO: 257916 - DNA, 1087 bp, Unknown
  Bacterial polypeptide expressing nucleotide sequence isolated from the Sargasso Sea
aatgctttatcaatttttactaaattttgttgatagttttagttttttaaatgtatttaaatatctaacatttaggactggtttatctttttttacttcattaattattgttttaattattggaggaacttttataaaatttttttcaaaacaaaaaattttaaatcctatccgtaatgatggtccagaagatcatatagttaagaaaataggaactccaactatgggtggagtaattattttgattggtttgttaatatcagtactattctgggctgatttatcgaatttaaatgttttattttgtttatatatcgcaatttcttttggtttgcttggggcattcgatgattataaaaaaataaagtatagtaactcttcgggtatctcatcaaagttaaaattaacctttcaaataatactagcaataattggtgttagtttttatgtttactttaatgactatcaagatttaactaatctatactttcctttttttaaaaacctaatcattaatcttggatggttttttatacctttttcaatatttgtaattattggttcatcgaatgctgtaaatctcactgatggattagatgggttagcaacagtgcctgttatacttgttgcagcttgttttgcatttataagttatgttacaggaaacattgtattctcaaattatttacaaattccttacatagagggaactggggaagtttcaattttttgtggagcaatcattggctcttgcttaggctttttatggttcaacgcacctccagcaaaaatttttatgggagacactggatctttgtctttgggtggctctttaggagcagttggtataataacaaaacatgaaatagttttagcaattactggaggtttatttgttcttgaagcagtttcagtgattgtgcaagtaatatcatttaaacttactggtaaaagagtttttaaaatggcaccaatccatcatcattttgagaagaaaggttggcctgaatcaacagttgtaattagattttggataatttctattattttagcaatgataggacttgctacattaaaactaagataa

SEQ ID NO: 257917 - DNA, 361 bp, Unknown
  Bacterial polypeptide expressing nucleotide sequence isolated from the Sargasso Sea
tttttgtgggtctatcattggagcctgcctaggttttttgtggttcaatgcacctccagcaaaaatattcatgggcgatactggctctctatccttaggaggatctttaggagcaattggaataataactaaacatgaaattgttttagcaataacgggtggattatttgttttagaagcaatatctgttattgcacaggtaatttctttcaagcttacaggaaaaagaatatttaagatggcaccaatacatcaccactttgaaaaaaaaggatggcccgagtcaactgttgttataagattttggatcatttccataattttagcaatgattggactggcaactttaaaattaagataa

SEQ ID NO: 257918 - DNA, 865 bp, Unknown
  Bacterial polypeptide expressing nucleotide sequence isolated from the Sargasso Sea
aatgctttatcaatttttattaaattttgtagatacttttagttttttaaatgtatttaaatatttaacttttagaacaggtttatcttttttcacctcattggttattgtgctgattattggaggtccttttattcaatttttttcaaaacaaaaatttttaaatccaattcgggacgatggacccgaagatcatatagttaaaaaaattggtacaccaacaatgggaggtttaataattttattcggcttattggtatcagtaatattttgggctgatttatcaaatattaatattttattttgtatctacatagcaattacttttggtttattaggagcatatgatgactttaagaagattagatttagcaactcatcaggaatttcttcaaagtttaaaataacttcacaaataatattagcaattattggtgtaagtttgtttgtttatttaaacgattatcaagatttaaataatttatattttccattctttaaaaatttaatcataaaccttggatggttttttataccatttgcaatattggtaattattggttcgtcaaatgctgttaaccttacagatggattagatggtcttgcaacagtgcctgtaatattagttgcagcatgttttgcttttataagttacgttactggaaacatcgtattttcaaattatttacaaataccctacatagaaggaactggtgaagtatcgattttttgtggtgcaattattggctcttgtttaggtttcttatggtttaatgctccacctgctaaaatttttatgggtgacacaggctcattatctcttggaggatctttaggtgcagtaggaattatcacaaagcatgaa

SEQ ID NO: 257919 - DNA, 913 bp, Unknown
  Bacterial polypeptide expressing nucleotide sequence isolated from the Sargasso Sea
gatgattgggaagattaaaacactaaatttttcttcattattctttttaattttattttcattaatactaaactctttcattttcaataatttatttatatctactatttttctgacatttttttttatatctttaatagctacaaaatacggtttaaacattattaaaaaattaagtttattacaaaatattagaagtgaagtaccatcaattcattttactaaaaagaacactcctacaatgggaggtttatttattattttgccttttttattgctacttttagtaataagcattaagtttgattctattggcatattattattatttttttgtaatttaggtttttttgttatagggtttttagacgattttttaagcattacaaacaaaaaaaatacaggtttaaaagctaatgaaaaatttttattacaatcaataatttcaatcttattcatctcattagcatctcaaaacaattatattagccctttaataacaatatctaacgattggaatataaatactaatataataatttttccaatttgtttcataactttagtaggtttaagcaatgcggtaaatttaactgatggcctagacggattagctgctggatgcagctcaatagcgttttttggacttggtacagaaatattgattaaaggacaaaaagaattaataatttatggtcttatttcctatgcaatgtctggattatgtatgggatttcttaaatttaacaaatatccagcaaagatatttatgggagataccggatcattaacaattggggcatcattgggatctatatcaatattaactaatagtttttttacgttatttattatctcgggaatatttattattgagactttatcagtaattattcaaagtagttttttttaa

SEQ ID NO: 257920 - DNA, 997 bp, Unknown
  Bacterial polypeptide expressing nucleotide sequence isolated from the Sargasso Sea
atgctttttagtctattttctaatctggttgatgtctttagtttttttaatgttttcaaatatttaactgtaagaactggtctatctatgtttacatctatgatagtagtttttttagttggaggtccacttattaattatttttcctctcatcaaattcatgacccaattagagaagatggaccaagtgaacatatcgtaaaaaaaattggaactcctacaatgggaggtctaatgattttactgggcatcttctctggagtacttttatggggtgatttttcaaattcttacaattggttcttactttatatagcaggatcttttggattactaggaggctatgatgactatcaaaaaataaaaaaaaataattcaaacggtataagttcaaaattaaagattgtaattcaaataatattagctttaggtggaatttctattctctatctttatagtggatctaatgaacttgaaaacttgtattttccattttttaaaaatttaataattaatttaggttggttttttattccattttatctatttgttattgtaggatcatctaacgcagttaacttaaccgatgggctagatggtttggctacagtacctgtaatattggttgcagcttgttttgcttttattagttatgttacagggaatatagttttttcggaatatttgcaaattacatacattaagggagtaggagaagcatcgattttctgtggcgcaataattggatcttgtcttggtttcttatggtttaatgctcctccagcaaaaatatttatgggtgatacaggatccttagctttaggcggatcattaggagcagttggcatcattactaaacatgaaattgttctggcaattacaggtggattgtttgttttagaagcagtctctgtaattgcgcaagtgatatcattcaaatttactggaaaaaggatatttaaaatggccccgatccatcatcatttgaaaaaaaagg

SEQ ID NO: 257921 - DNA, 1060 bp, Unknown
  Bacterial polypeptide expressing nucleotide sequence isolated from the Sargasso Sea
ttttgattttccgggtataaatttattctcatatctatcttttagagctggttgtgcaattcttacatcattagttatagttttaataattggtccaaaatttatagaaaccatgaatagcaaacaaggcaaaggtcagccaataagggtagatggaccaaaaagtcacttattcttaaaaaagggaacaccctcaatggggggaattttgatactttctagtttttttctaagtacattattatggggagatattaccaatcattttatatggatagttttactatcaggattgctatttggtttaattggatatgttgatgataggaaaaaaattaaagaacaaaaatcagacggtatttcttcaaaaaataagtttttatttcaagctttatcatcatttgttttgatttttttgattacagtgttctcttcttcagaattaatttatagcgtatccattccatttattaatggagtcttttttttgggtataattttatattattgtttcactagttttgttatcgttgggacatcaaatgcagttaatttaacagatggattagatggattagctattgttcctgtcatgattgctatagcaagttttggtatcattacctatcttgctggtaatttagttttttcagaatatttaggcataaatttcataccattttctggagagttaagtattttatgctgtgcactattaggaagttgtctcggttttctatggtttaacgctcctccagcaatgatttttatgggcgatactggctctctctcattaggcgctatcttagcctctatagcagttattacaaaacatgagttagttcttataataattggaggaatttttgttcttgaggcaatgtctgtcattattcaagttttctcatataaggtttttggaaagagagttttcaggatggcgccaattcatcatcattttgaaaaaaaaggttggtctgagtcaactatcgtaattagattttggattatatcttttgttttagcaatcataggtcttgcaacattaaaaataaggtaa

SEQ ID NO: 257922 - DNA, 1084 bp, Unknown
  Bacterial polypeptide expressing nucleotide sequence isolated from the Sargasso Sea
gatgattgatattttgttaaatttccttccagaaaaatcaaactttataaatctattctcctatctaacaactaggactattttggcaactttaactggactaatgatggtccttttacttggagaaacatttattaaacgaatcagatcacttcaatttcagcaatccattggcgatcgcggtccagatagccataagattaaagatggtacaccgactatggggggcttactaataattggaagtgtaattttatctggttttttatggggcgatttaacaaacaaatatcttttaatatctatcttctgtttatttatgtttgctttgataggttttgtagatgattacaataagataaaacaaaaaaaccaagaaggcatgtctggaatatctaaaattttctggcaatttatctgtgcatgcatcatatcagtcattttgtataccacggcagaaaataaatcagagatatcttatatagtgcctttttttaaggaggttgttctagattttggagtttggttcatatttatttctatttttataattatcggaagttctaatgcagttaatttaactgatggcttagatggtcttgctatattgccagtgataataataactgcagcacttggtgtaattgcttgggcttctggaaatataattgctgctgactatctctatattccacatattgttggaacaggagaactattggttctctgtggtgcaatgattggcgcaggaatagggtttctatggtttaacacttatcctgctcagatatttatgggtgatgttgggtctctttcaatgggagcattcatagcacttgttgcaataatcgttagacatgaaatagtctttgcggtaatggcaatggttttcgtaatggaagcaatgagtgttattttacaggtcacttcttttaagttaagaaagaaaagaatatttagaatggctcctattcatcatcatttcgaactcatgggctggaaagagcctaaaataattgtcaggttttggatcttaacctttatttttgttttaattggcctatctctattgaagattagataa

SEQ ID NO: 257923 - DNA, 1087 bp, Unknown
  Bacterial polypeptide expressing nucleotide sequence isolated from the Sargasso Sea
atgctttatagtctaatattaaatttaattgatacttattcatttcttaatgtatttaaatatttaacagtaagaaccggattagctgttttcacttctttgttggtagtttttttaatcggaaatcctttcataaattttttttcagcaaagcaaattttgaaccctataagagatgacggtccagatgaacatatagtaaaaaaaattggtaccccaacaatgggaggcgttttaatattaattggattattttttggaatatttttatggggtgatttaaataacttatatgtatggtttttaatttatatagtagctagttttggtattttaggagcttatgatgattataaaaaaataaaatttaaaaattcctctggcatatccttcaaatttaaaatcgtatcacaaattatagctgcaacttttggaataattgtactaagcatttattctgataacgccgatttagaaaatctttattttcccttttttaaaaaccttatttttaatttgggatggttttttattccatttgcagtttttgttatagttggttcatcaaacgctgtgaatttgacagatggcctagatgggctagcaaccgttccagttattttagtggctgcttgttttgcatttattagctatgtcacaggaaatattgttttttctgagtatttacaaataccttatatagctggattaggtgaagttgccgtatttttaggtgcagtaattggttcttgtttaggttttttatggtttaacgcaccacccgcaaaaatttttatgggtgatacaggatcactcgcattaggaggatccttaggtggtgttggaataataacgaaacatgaaatagttttagcgataacaggtggtctatttgttttggaggcaatatcagtaattgtacaagtaatctcgtttaaattgactggaaaaagaatttttaaaatggcacccatacatcatcattatgaaaaaaaaggctggcctgagtccactgtagtaattagattttggattgtagcaattattttagcaatgataggtcttgcaacactgaaatttagataat

SEQ ID NO: 257924 - DNA, 1042 bp, Unknown
  Bacterial polypeptide expressing nucleotide sequence isolated from the Sargasso Sea
ttttaacgtctttaagtatttgacttttagaacaggtttatcggttattacctctttagttgttgtctttattatcggcgctcctttaattaagattttttctgataagatgattaccggtccgataagacaggatggaccaattgatcatatagttaaaaaatcaggaactcctacaatgggaggagtaattataattattggaattatttttagcactatactatgggctgatttaacaaatatctatgtttggactttggttttcgtatctttaagtttaggtggtttaggtttattggatgatattttaaaaataagatttaaaaattccagaggtctaaaatcaaggtataaatttggtggtcaacttattattggatccatagctttatttattttgataaattattctggtcatgaatatttatatgatctttattttcctttttttaaaaatctaattctccatttgggactattttttattccttttggattatttgttattattggagcctcaaacgctgtaaacttgactgatggattagatggtcttgctactgttcctgttatgttagtggctttatcatttacattgatttcatatgttgtaggcaatactattttttcacaatatcttcaaattcaatacatccctgacgttggtgaaatatctattttttgtggatctattgttggagcatgcttaggatttctttggtataacgcgcctcctgctaaaatttttatgggagatacaggatctttatctttgggtggatcattagctgcggtagctattatagtaaagcatgaaatagttttagcaataattggaggattatttgttttagaaactgtatcagtaattattcaagttatatcttttaaattaaccggaaaaaggatttttaaaatggctccaattcatcatcattttgaaaaaaaaggttgggctgaacccacaattgtaattcgtttttggattatagcaattattttagcactagttggacttgcaacactaaaactcagatag

SEQ ID NO: 257925 - DNA, 1105 bp, Unknown
  Bacterial polypeptide expressing nucleotide sequence isolated from the Sargasso Sea
atgctgtatcattttttatattcattacgagattcattttcacctttaaatgtttttcaatatataacttttagaagcgcctctgctgcaattctagctcttataataagtttcatcctcggaccggccattatacgaaaacttcgtcattatcaaattggtgaagaaatacgtgaacatggcccggagagccacaaaaaaaagagaggcactccaactatgggggggataattatccttacagcaattatcctccctaccctcctactagctgacctcagaaattctttcattcaaataattctaatctcaacaatatggatgggattgatcggcttcctggatgattatttaaagaccataaaaaaaatcaaaagcggtcttgtagctaaatacaaattagctggtcaaatttcacttggtgtaatcataacgttttggatttataatactggtgcatgggataactttagaactgtaacctcagtgccatttttcaaagatactgtcattgattttggcctactttatccattaattataattttggtcgtaactggatcatctaatgctgtaaatcttactgatggattagatgggcttgcttccgggcttctagcaatatgcttcacggtctttgctgcgatcgcatatataagcggccgagttgacttttctgattatctaaacatcatctatcttccaggttcaggtgaacttacaattttcacagctgcttgtgtaggcgcatgcattggatatctgtggtttaatgctgctccagctgaagtgtttatgggtgatgtaggctccctttcaacaggagctgcacttggaacactttctatattattaaaaaaagaatttttacttgtgataattggtggcgtatttgtcgcagaagctctatcggtaatattgcaggttagctattataggtatacaaaaataaagtatggtgagccgaaaaaactttttttgatggcgcctttccatcatcattttgaactgaagggatatccagaatcaagaatagtaattagattttggatagttgggcttttgcttgctctattaacattagcaacatttaaaattagataat

SEQ ID NO: 257926 - DNA, 1081 bp, Unknown
  Bacterial polypeptide expressing nucleotide sequence isolated from the Sargasso Sea
aatgatttattatctaagcgaactttatttagaatattttccacaattaaatttatttcagtacatcactgttcgaattatatttgctgctataactggactcatctttacgcttttatttggcccaattgttatcaaaaaactagctgattatggtattggtgaaaaaattagcaaatacaatcctaatacgcatttaactaaaactggaactcctaccatggggggaataatgataatcttatctgtaattctttcctctgtcatctgggctgatttgtcaaataagtatataatttttggtatccttattatgttatctttcggagctttagggttttttgatgactacactaagttaaaaaaaaatagtaagggcattaaagctaaaacaaaatttttaaatcaggttttattaagtttaatatttgcaattcttatttttgtaaatatagaggatatcaacgaacaactacttttttttccattttttaaagaaatagtaataaatctatcctatttttatataccattatttattcttgtaatagttagttcttgtaattctgtgaatttaacggatggattagatggtcttgctattaccccagttatattagtttgtgttgggttgggaatatttacatatctttctgggcatattaattttgcaaattacctactaatacctcatttacctggagtaggcgaattaacaattttcattggagctatagttggctctggtcttggttttttatggtataactcatacccagcacaaatatttatgggagatgttggttcattatcactgggagcagttattggttacgtagcaatggcaacgcgacaagaaatagtattaattattatgggcggtatttttgttgcagaaacaatatcagttattattcagataacttcaataaaactctttaatagaaaagtatttttatggactcctttacatcatcattttgaaaagaaaggttggccagagccaaaagtcgtgtctagattttggattgtaacatttatattggttttagttggaattgctactttaaaaattaggtaa

SEQ ID NO: 257927 - DNA, 1087 bp, Unknown
  Bacterial polypeptide expressing nucleotide sequence isolated from the Sargasso Sea
aatgttgtttgaacttttttcaatactagtagatcaatttagttttttgaatgtttttaaatatttaacagtaagaactggtctttctatgtttacagctatggttgttgtttttttagttggaaacccattaattaattttttttcttcaaaacagattcataatccaatcagagaagatggacctagcgatcatataattagaaaaattggaacacctacaatgggaggactaataatattactaggtgttttttcaggagtattgctatggggtgacttatcaaatccttacaattggtttttaatatttattgcagcttcttttggattattgggagcttatgacgattataaaaaaataaagttaaaaagttcgaatggaatttcttctaaactaaagttctctctacaaattattttagctttgattggtatatttatactttatatcacaagtaattctgatcaaataaacaatctatattttccttttttcaaaaacttagtaatcaatcttggctggttttttatacctttttatatgttcatattagttggagcttcaaatgcagttaatttaacagatggtttagacggattagcaacagttcctgttatgttagttgccgcttgttttgcatttattagttacgtctctggtaacataattttttctgattatcttcagatcgcatatatagagggtgtaggagaagcttcgattttttgtggatcaataatcggggcttgtttaggttttttatggtttaatgcaccaccggcaaaaatttttatgggagacactggatctttatcattaggtggttcactgggagcggttggtataataactaagcacgaaattgtgttagcaataacaggcggattgtttgttttagaagctgtttctgtaatagttcaagttatttcctataaattaacaggtaaaagaatatttaaaatggctccaatacaccatcattttgaaaaaaaaggatggccagagtcaacggttgtaattagattttggataatttctattattctagcgatgattggattagcaactttgaaacttagataa

SEQ ID NO: 257928 - DNA, 834 bp, Unknown
  Bacterial polypeptide expressing nucleotide sequence isolated from the Sargasso Sea
tatgatcgaattatttggcacttggttaatgacatatgattctggcttcgatgttcttcgttatttaactgttagaactattggagggacccttacagcgctaatgctgtcaatttttcttggcccaaccttaattagatttttaacaaatattcagttctcgcaatccattaggggggatgggcctgagtcacatcttgcaaagactggaacacctactatgggaggcctaattattatcttctcattaattatttcaacattgctctggtcagattttcaaaatccatacatatggattcttctatttattactgtctcatttagttctatcggatttctagatgactggttaaaaataaaagagaaaaattcaaatggcttaaaaggaaaatataagcttattttgcaatttctttttgctttgctcgcgatgttatttatgttgcaggtttcccctaatggaaatgaacaaatttttattttgccttttaataaagaatatatttttgtaatttctccttttatttttctgttaattagcatttttgtaataattggttcgtctaatgcagttaatctaactgacggtctagatggacttgcaattttgccatcagtcttgatagcgggtggtcttggtctcattgcttatgcatctggaaacttgatcatctcagattatttattcatcccatttaatccgcttagtggagagttaattgtgttttgtggggccttgattggggctggcataggttttctctggtacaacacatatcctactcagatatttatgggcgatttaggatctttaacacttggaggaatttt

SEQ ID NO: 257929 - DNA, 1060 bp, Unknown
  Bacterial polypeptide expressing nucleotide sequence isolated from the Sargasso Sea
tttgattgcaataattgtatctggtgcgatatcatttttattcgtaattttgtcaacatcaataggtgttaactattttaaatctagaaatattggtcaaccaattcaagaggaagtggtttttcatgatcataaaaaaggtacaccaacaatgggaggtgtatttataattttaggaacttatgccgggtacgttctatcacatattaatttttggacaattggtcagggatttaagattgaattgatatcaattaatccagtaattttgaatctacttttattcggcacactaatggcttcagttggattaattgatgatcttttaaaagttagaaaaaatagaaatttaggacttagagctagaaataaaatatttttacaaatattggtaggttctttcgtaagtttatatttttacaatctagattactcatcaacattttattttttcagcggttttggttttgaagttggatttttaaagtggatccttatagtctttctaattgtaggtattactaattcaacaaatcttacagatggtttagatggtcttgtagcaggttcatcctcagtttcttttggaggaattttaattattgctttttggatttttaggcatccagattattacataaattttatgaataatgaaatggttggtcttgagctatctacacttatatctgctttagctggttctactcttggttttttatggtggaatacaaatcctgcaaaaataatcatgggcgacgtagggtctcattttattggtgctatgtttccgataattttaatatcgttaggtgcagatggactaattttctttttttgcttcctttatatatttgaggccttatctgtcatccttcaggtatcttcttataaattgaaacaaaaaagaatttttaaaatgacaccaattcatcatcattttgaaatgagtaattgggcagagacaactattattgttaggttttggataatcaacggaattttcatcgtaatggggcttggtctattttatggagactgggtattgtttggaaattaa

SEQ ID NO: 257930 - DNA, 862 bp, Unknown
  Bacterial polypeptide expressing nucleotide sequence isolated from the Sargasso Sea
gatgggaggacttatgattatcctctcaatcattgtcagcgttcttatatggtcagacttgagtaatgtttataatttagttctcattgcatcgatcatttcctttgggctgattggatttattgatgatttcacaaagcttaaaaaaagcaagaaaggcatgtctgcgaaaacaaaattaattttgcagtttattgtcgcagcttcatctacttactatcttctggggcaagggagtagtgtactcagctcagaagtactaatcccttttacaaataatattcgccttgatctaggttggttctttctgccttttgcaatttttgtgattgttggctcaagcaatgcagttaatctaaccgatggattggatggtttagcaatcatgcctgtttcaatgattgccatagcccttggaatttttgcttatgtcacaggtaattttaactttgctgattatttagatttgccgttccttcaagatgcgggtgaagtttttgttttttgttgtgccatctcaggtgctggattgggttttttgtggttcaacacctatccagctcagatctttatgggggatgttggcgccgtatctctcggtggaatacttgggacgattgctgtgatcgtcaaacaagagctgatattagctatcatgggaggtgtttttatcattgaaactttatctgtggtgcttcaggttggctcattcaaactgagaggaaagaggatttttaatatggctccgatccaccatcactttgaattaaaaggatgggctgaacctaaagtaattgtgaggttttggatcattaccgtttttcttgttctcattggcttatcaagtcttaaaataagataa

SEQ ID NO: 257931 - DNA, 158 bp, Unknown
  Bacterial polypeptide expressing nucleotide sequence isolated from the Sargasso Sea
tcgtttaaacttactgggaaaaagaatttttaaaatggcacctattcatcatcattttgagaaaaagggatggccagagtctacagttgtaattaggttttggattatctctatcattctagcaatgattggtttagctaccttaaaattaagataat

SEQ ID NO: 257932 - DNA, 985 bp, Unknown
  Bacterial polypeptide expressing nucleotide sequence isolated from the Sargasso Sea
atgttatattatatatttgaatttcttgaaacacaatataaccttcctggagcaggcctatttgattatttgtcatttagggcagccgtctcggtaattatttcactaataatatctgttgtctttggtaaaagaataattgaatatttaagaaaaagacaaataggcgagaatgttagaaaattaggtttagagggagaagaaaaaaaatctggtacaccaacaatgggtggactaataataattatagcaactataattcctgtattattaatgtccaaccttgaaaatatatatataaaaatattactgatatcaacaattatacttggaattataggttttattgatgattacataaaggtctttagaaaagacaaaaaaggtctcaaaggaaaattcaaaattgctggtcaaactattctaggaatttttgttggaattattttattgacaagtaacgatataactatagttgagttttcttccttaagtgacattgaaagtattgaaaattttcaatccaatgagattaaatcatttaaaacaactattccattttttaaaaataatgagctagactatgcccttatttctaatgctatttttaataatgaaaatatgttatggctaattcttattccaataataatatttatcgtaactgcagtttcaaattcaaacaatcttacagatggtcttgatggactttcagccggaacttctgcaattatagtttttactcttggagtttttgcatggacttcaggtaatataattttttcaaattatttgaatattatgtacatacctagagtaggagaaattacaatctttatagcttctcttctaggatctttagttggatttctctggtataatacatatcctgcttcgatttttatgggtgatacaggaagtcttactgttggcggtctaattgcagttattttcatattaattagaaaagaactaatgattcctc

SEQ ID NO: 257933 - DNA, 1087 bp, Unknown
  Bacterial polypeptide expressing nucleotide sequence isolated from the Sargasso Sea
atgctgtatagtctatttacaaacctcgtagatagctaccctatctttaatgtatttagatatttgacagtaagaactggtttatcaatgtttacttcaatgttaatagtttttttaattggaaatccaataataaattatttttcaagtaaaaaaattcataacccaattagatctgatggcccgacggaccatattgtaaaaaaaattggaacaccaacaatgggcggtattctaattttaattggtattttttctggagtattattatggtcagatttatcaaacccttataattggtttttaatattaattgttggtggcctaggagttcttggtgcatatgatgattacaaaaaaataaaaagtggaagttctggaggcgtttcatttaaatttaaaataatttttcaaattattatagctttaattggaatatatattttaacttattatgtaaattcggctgaattaaaaaatttgtattttcctttttttaaaaatttagttattaatcttggttggtttttcattccattttatctatttataattgttggatcatcaaatgctgttaatttaactgatggtttagatggactcgcaacagttcctgttatattggtcgcatcctgctttgcatttataagttatgtgacaggaaatcttgtattttctgaatacttacatattccatatattcaaggagttggagaagttgcagtgttctgtggttcaattataggtgcatgtattggttttctttggtttaacgcacccccagcaaaaatatttatgggagacaccggatcattagccttgggtggttctcttggagccgtaggcataataacaaaacatgaaattgttctagctataacaggaggtctgtttgttttagaagcagtttcagtaattgtccaagtagtttcatacaagattacaggaaaaagaatttttaaaatggctccaatacaccatcattttgaaaaaaagggatgggccgagtcaactgttgtagttagattttggattatatcaattattttagcgatgataggacttgctactcttaaattaagataat

SEQ ID NO: 257934 - DNA, 949 bp, Unknown
  Bacterial polypeptide expressing nucleotide sequence isolated from the Sargasso Sea
attgaaaaaaaaacaaaaagaaggtcaaccaataagagaagatggaccagaaacacataaaataaaaaaagcaggtacacctacaatgggaggagtgctcattattggctctttattattttcgactcttatttggtgtagatatgatatttcatatgtttggatagttatttttgttacattaggttttggattaattggttttatagatgacttctctaaacttcataataataacactcggggtatttcgggaaaaataagattgttattaggttttcttgtagcagcatgcgctacaatatgggttattagtatacaagacccttcactttctaaatctttagctgttccaatctttaaagatgttttattaaatttaggatggttttatatccctttttcaatgattgtaatagttggatcagcaaactcagtaaatttaacagacggtcttgatggattagctattatgccagtaatgatagctagtggttctctgggaattattgcatatgcagttggtcgggttgatttttcaaattatttagaagttcattatattgcaggatctggagaaattgctgttttttctgctgctcttattggggcaggacttggttttttatggtacaatgctcctccagctgctgtatttatgggagataccggttcattagcacttggtggagcgttgggtgcaatctctgtctgtacaaaacatgaaattgttttggctattattggaggtttattcgtattagaagctctgtcagtaattattcaagttgctgcatataaattaactggaaaaagagtctttttaatggcaccaatccatcatcattttgagaagttaggctgggcagaacctcaaatagttattagattttggataatttctgtcatattagctttagtaggattagcaactcttaaattgcgataa

SEQ ID NO: 257935 - DNA, 1087 bp, Unknown
  Bacterial polypeptide expressing nucleotide sequence isolated from the Sargasso Sea
atgctttatcaatttttattaaattttgttgatacttttagttttttaaatgtatttaaatatttaacttttagaacaggtttatcttttttcacttcattagttattgtgctgattatcggaggtccttttattaaatttttttcaaaacaaaaaattttaaatccaatccgggacgatggacctgaagatcatatagttaaaaaaattggtacaccaacaatgggggggttaataattttattcggcttattgatatcagtaatattttgggcagatttatcaaatattaatattttattttgtgtctacatagcaattacgtttggtttgttgggagcatatgatgactttaagaagattaaatttagcaactcatcaggaatttcttcaaagtttaaaataacttcacaaataatattagcaattataggagtgagtttatttgtttatttaaatgattatcaagatttaaataatttatattttccattctttaaaaatttaatcataaaccttggatggttttttataccatttgcaatatttgtaattataggttcatctaatgctgttaaccttacagatggattagatggtctagcaacagtacctgtaatattagttgcagcatgttttgcatttataagttatgttactggaaatatcgtattctcaaattatttacaaattccctacatcgaaggaacaggtgaagtagcaattttttgtggggcaattattggctcttgtctaggtttcttgtggttcaatgctccaccagctaaaatttttatgggtgatacaggttcattatctcttggaggatctttaggtgcagtaggaattatcacaaagcatgaaatagttttagctattactggtggactttttgtactagaggcagtttcagtaatggttcaggtaatttcatttaaacttactggaaaaagaatttttagaatggcgcctattcatcatcattttgagaaaaagggatggccagagtctacagttgtaattaggttttggattatctctatcatcctagcaatgattggtttagctaccttaaaattaagataat

SEQ ID NO: 257936 - DNA, 586 bp, Unknown
  Bacterial polypeptide expressing nucleotide sequence isolated from the Sargasso Sea
atgcttgatttctttctaagttatttgcctgagaagtcctcttttttaaatcttttttcttatctttctacaagaacaattctttctactttatcagccctcatgatagttcttttttttggagataaatttatagaattcataaggtctattcaatttaagcaaaaaattgacgacagagggcccaaaagtcataaagttaaagatggaactcctacgatgggcgggctgctaataattggtagtgttcttttatcaggacttttatggggagatttacaaaataaatatcttctaatctcactgtttacaatattctcttttggattgattggttttttcgatgattacagaaaagtcaaaagcttggactcaaaaggtctttctatggtgacgaaaatcttctttcaagtagtttttgcttttatcgcatcatctttactttactacagtgcaaatagcaccacagaaacaaactatattgttccattctttaaaactgtctcccttgatttaggcattttttttatttttatttctgtttttatacttgtaggaagctcaaatgcagtgaaccttaccgatg

SEQ ID NO: 257937 - DNA, 886 bp, Unknown
  Bacterial polypeptide expressing nucleotide sequence isolated from the Sargasso Sea
aatgttactacctttatttgaatacttatctgaattttttggaccttttcgagttgtagaatttctttctacaagagcaattcttgctacattaacttctctcttattttctctgatattaggaccaaaattcatcaataagatgaaagatattcaggtaggacaagttatacgagaggaaggccctgatagccatttatcaaaacagggcacacctacaatgggtggtactttgatcctaagttctatatttttaagtgtagtcttatggggggacctagaaaaccgatatctatgggttgcctttttaacagctatgtcttttggcgttctaggatggattgatgatcgcttaaaaataaaacatcaatccagtgacggcttgtcacctttaaataaaattttttggcagtctgtcataactattttggcttgttcttatctttatattactcaagaaaatatttctgaaacgagtctgatagttccgttctttaaggatatttccattcctctaggtgcaggttttattgttttgtcatattttgtagtaatagggactagcaatgcggttaatttaactgatggtctagatggattggccattcttccttgcgttatggtcgcagcaggtcttggaattattggttatttggctggaaatgccatatattcagattttttaaatattccttatttaccaggtacgggtgaaatgattgtattttgcggtgctttagtgggttctgggattgggttcctttggtttaatacttatcctgctcaagtatttatgggagatgtagggtctttatcgcttggagctgcattaggaatagttaccgttattataaggcacgaatatgtcttgctagtcatgggcgga

SEQ ID NO: 257938 - DNA, 955 bp, Unknown
  Bacterial polypeptide expressing nucleotide sequence isolated from the Sargasso Sea
tttgataaatcatttaacaagcaaacaaattacacagagtgtacgagatgatggaccagaagctcacttgaaaaagattggtacgccaacaatgggcggtttattaattttgttatccattatttttagcacactttgttggggggatataagtaatcgttatatattagttgttctgacggttacatttttgttcggcattattggtctaattgatgactacaaaaaagtaatacacaacaatccaaaaggtttacctgcttcatacaaatatgctgcgcaatcaatcgtagccttagcagcagcaatttacttatatcaatctgccgctttacctgttgaaacacaattattaattccgtttttcaaagattatattttcgatatgggttggttatatatagtacttgtttatttcgtaattgttggctctagtaatgccgttaatttaacggatggacttgatggcttagcgattttgccaacagtaatggtggctggtgcgttagcaatttttgcttacctaacgggccatataactttttctggctatctcggcatcccttacgttcccggtgttggagaagttgctgtattttgcggagcaatggttggttcagggataggttttctttggtttaatacatatccagctcaggtttttatgggtgatataggtgcgttatctttaggcgctgcattaggaattgtagcagttgtaactcgccaagagctcgtattatttattatgggcggtgtttttgttatagagacactttcagtaattttgcaagttacctcatataaattaacaggtaaaagaatttttaaaatggcgcctttgcatcatcactatgagctaaagggttggccggaaccccgggtaatagttcgattctggattattacagtaattctaattttgattggtcttgccagtctgaaaatacgatga

SEQ ID NO: 257939 - DNA, 577 bp, Unknown
  Bacterial polypeptide expressing nucleotide sequence isolated from the Sargasso Sea
tttgcatatgggtttattttttattccttttggtatttttgtaataatagggtcatctaatgctgtgaatttaacagatggcttggatggattagcaacagtgccagttatgttggtagcactatcattttctctaatatgttacttagttggaaatacaattttttctgaatatctacaaattcaatatattgagaatgttggtgaactttccattttttgtggatcgatcgtaggatcttgccttggttttctttggtataatgcaccaccagcaaaaatatttatgggtgatacaggatctttatccctgggaggctcaatagcttcagtagcaataatagttaaacatgaaatagttttggctattatcggcggcctatttgttttagagacagtttcggtaataatacaagtgatttcatttaaacttaccggaaaaagaatatttatgatggcgcctatacaccatcacttcgaaaaaaaggggtgggcagagtcaacagttgtaattagattttggataattgctattattttggccctagtaggtttagccactttaaaattacgttaa

SEQ ID NO: 257940 - DNA, 557 bp, Unknown
  Bacterial polypeptide expressing nucleotide sequence isolated from the Sargasso Sea
tataccatttgcaatattggtaattattggtttgtcaaatgctgttaaccttacagatggattagatggtctagcaacagtgcctgtaatattagttgcagcatgttttgcttttataagttatgttactggaaacatcgtattttcaaattatttacaaataccctacatagaaggaactggtgaagtatcaattttttgtggtgcaattattggctcttgtttaggtttcttatggtttaatgctccacctgctaaaatttttatgggtgacacaggctcattatctcttggaggatctttaggtgcagtaggaattatcacaaagcatgaaattgttttagctattactggtggactttttgttctagaggcagtttcagtaatggttcaagtgatttcgtttaaactcaccggaaaaagaatttttagaatggcgcctattcatcatcattttgagaaaaagggatggccagagtctacagttgtaattaggttttggattatctctatcatcctagcaatgattggtttagctaccttaaaattaagataat

SEQ ID NO: 257941 - DNA, 493 bp, Unknown
  Bacterial polypeptide expressing nucleotide sequence isolated from the Sargasso Sea
tcatcatctattatagtctttaccttaggtatcttttcatggatttctggtaatataattttttccgactatttaaacataatgtatttacctggaattggagaaattgttgtttttgtagcagctcttttaggaggtttaattggattcttatggtataatacttatccagctcaaatattcatgggagatactggaagtttaacaatcggaggaataattgctgtgatagctatcctagttagaaaggaacttatattgcctattctttgtggagttttcttaatagaaacattgtctgtaattattcaggttggttatttcaagtataccaagaaaaagttaggttttggaaaaagaatttttcttatgactccaattcatcatcattttcaaaaaaagggatacagtgaaagtaagattgttgccagattttggattatctcaattatgctagcaattctatctctaataacattaaaaatcagatgat

SEQ ID NO: 257942 - DNA, 1084 bp, Unknown
  Bacterial polypeptide expressing nucleotide sequence isolated from the Sargasso Sea
atgttaatttggctagccgactggctgacacaattcgattcagggtttaacgtattttcataccttacccttcgtgcaattttaagcacgctgaccgcattgcttattgccattcttattggccctaagatgattcgttatttacagcgtatgcaaattggtcaaactgtacgagacgatggcccgcaaagccatttgtcaaaatcaggcacacccactatgggcgggttacttatactcgcagcaattgtagtaagcggcctgctttgggctgacctgactaaccgttatgtgttggtaacccttaccgtggttgtggcttacggtattattgggtttgttgacgactacagaaaagtgatccgcaaagattcgaaggggcttatcgcccgttggaaatatttctggcaatctgtggttgcgttaggcgtcgcattctatctatacagcagtgcaacaataagcgctgaaacctcactactggtgcctttcttcaaagaagtgttcccgcagttaggtgcgttcttcatcattattacctactttgccattgtaggcacaagtaacgcggtaaaccttaccgatggattggatggacttgccattgtgcccactatattggtggcaggcgcatttgccattttcgcctatgtgacaggtaatgcgaactttgctgaatacctgaatattcctcatattccgcttaccagcgaactggtgattgtgtgtaccgccatggtcggtgcaggcttaggctttttatggtttaacacgtatccggcacaagtatttatgggtgacgttggctcactagcgctaggcggcacactaggtgtgttagctgtattagtgcgccaagaactcgtgttaatcatcatgggtggtgtttttgttatggaaaccctgtcggtcatccttcaggtaggttcttacaaattgcgtggccagcgtatttttcgtatggcgcctattcaccatcactatgaattgaagggctggccagagccgcgcgtaatagtgcgtttttggatcatttcaatcattttggtgttggtgggtcttgctaccctcaaacttagataag

SEQ ID NO: 257943 - DNA, 633 bp, Unknown
  Bacterial polypeptide expressing nucleotide sequence isolated from the Sargasso Sea
ccgaagattcagcagaaatatcattaatactcctttttaacaaagattggatctttgaaatgagcatgctttcatttattctgtttggctcatttgtaattgttggttcatcaaatgcagtaaatcttacagatggccttgatggtttagcaatattgccaactattttaattggtggaggcttaggattaatagcatatgcaatgggtaaccagttaattgcagaatatttatttatacctcatcttcaaattgcaggtgagctaattgtattttgcggagcgcttatagggtccggaattggcttcttatggtacaactcatatcctgcagaagtttttatgggagatgttggttctcttactcttggtgcaattcttggagtcctagctgtaattctgagacatgaaatagtttatgcaattatggcaggagttttcatagctgaaactctaagcgtcatgattcaagtcacttcttacagattaaggcaaaaaagagtttttttaatggcaccaattcatcatcactttgagctaaaagggtggccagagccaaaaattattgttagattctggattatcacccttgttctaattttagttgcccttgcaacactcaaattaaggtaat

SEQ ID NO: 257944 - DNA, 1084 bp, Unknown
  Bacterial polypeptide expressing nucleotide sequence isolated from the Sargasso Sea
atgcttttacctgtatttgaatacctaagtgaattttttggaccgtttagagtagtagagtttctatctacaagagcaatattagcgactttaacttcattgctttttgccttaattctaggaccaagattcattaataaaatgaaagatattcaagtaggtcaggttataagaaaggaaggcccagaaacccacctttctaagcaaggaactcctactatgggaggaacattaatattaagctctatattcctaagtgttttgttatggggagacttagaaaatcgatatttgtgggtagcttttttaacaactatttcttttggagtattaggatggatcgacgatagattaaagatcaaacacaagtctagcgatggactttcagcttctagtaagatcttttggcaatctgtgatagctataacagcttgctcttttttattttatagccatgaaaatataaaagaagttagcttaatagttcctttctttaaagatatatcaatacccttgggcataggctttatttttctttcttactttgttgttttaggaaccagtaatgcagttaatttaactgatggtttggatggcttagccatcttgccttgcgtgatggtagctgctggattaggaatcatcgggtatcttgctggaaatattatttacgctgactttctaaatatcccttatttgcctggaaccggtgagatgattgtattttgtggtgctttagttggatctggaataggcttcttatggtttaacacttatcccgcccaggtttttatgggcgatgttggatctctttctttaggtgctgctttaggcatagttacagttatcatcaggcacgagtatgttttattagtcatgggaggtctttttgttgttgaagccctgtcagttattgttcaggtaacttcttataaacttacaggtaaacgtatttttcaaatggctcctttacatcatcattacgaacttaaaggatggcctgagccgagggtgattgtcagattttggataattactttcatgttagttttacttggtcttgctttattgagattaaggtaga

SEQ ID NO: 257945 - DNA, 919 bp, Unknown
  Bacterial polypeptide expressing nucleotide sequence isolated from the Sargasso Sea
gtccattagagacgatggccctcagtcacatttatctaaggccggcaccccaacaatggggggattaataattttcacctcactaattatctcaactcttttgtgggcagacttatcaaattactacatctggcttttactgctaacaacatttttatttgcaggcattgggagcttagatgattatttaaaaattaaggaaaagaattccaaaggattaaaaggtaagcataaattaatttttcaagtgtcattttcggttttgatccttggaatttatttacatctgtctgatggtgacaatttatacttcatccttccttttaataaggattttatttttgatatttcaatcgtattttttatcttatttgggatatttgtgatagttggttcatccaatgcagttaacttaactgatggtttagatggtttagcaatcttgccttctattttaattaccggaggattggggttagttgcatatgctatgggaaaccaaattatagctgaatatttatatgttccttttttacctctttcaggtgagcttatcgtatttgcgggtgctttaattggggcaggaattggctttctttggtacaacacttaccctgcacaaatcttcatgggtgatgttggttctttaaccttgggagcaattttagcagtttttgcaattttactaaggcaagaaattgtattcgcttttatggcaggtatttttattttagaaacagtaagtgtaattttgcaggtcgcatcttataaactttttggaaaaagaatttttctaatggcaccaatccatcatcattttgaattaaagggttggccagaaccaaaggtaattgttagattttggatcatcactttcttattagtattatttgcgcttgcaacccttaagttacgttga

SEQ ID NO: 257946 - DNA, 1081 bp, Unknown
  Bacterial polypeptide expressing nucleotide sequence isolated from the Sargasso Sea
catgtttttatatttttctgaaaatttgattgagtggttttcgccattgaatgccttcacttatattacaacaagaggtattctcgctgcattaactgcactcattatttctttcctgtttggccccaagatcattactgcgttacagggcaaaaaaattggtgagacaatcagagctgatggcccatccagtcatactttaaagggtggcacgcctacgatgggaggattaatgattattctatcaatccttatcagtgttcttttgtggtcagatttaaataatatttataatttggttctcattgcatcgatcatttcttttggtctcattggattcattgatgacttcacaaagctcaaaaaaaacaagaaaggcatgtctgcaaaaacaaagtttattttgcagtttttcgttgcagcctcgtctacttattatctactgacacaaggaagtgacgtacttagttcagagttactcattccttttacaaataatattcgccttgatttaggttggctctttttgcctttcgcgatattagtgattgttggttcaagtaatgcagttaatctaaccgatggattggatggtttggcaatcatgcctgtatctatgattgccattgctcttggaatttttgcttatgtgactggtaattttaactttgccgagtatctagatttaccatttattcaagatgctggtgaagtttttgtcttttgttgtgccatctctggtgctggattgggatttttatggtttaacacttacccagctcaggtctttatgggagatgtcggtgcagtatctcttgggggaattcttggaactatttctgtaatagtaaaacaagagttgattctagctattatgggcggagtttttattatggaaactttatcggttattcttcaagttggttcattcaagttgagaggaaaaaggatcttcaacatggctccaatccatcatcactttgagttaaaaggatgggctgagcccaaagtcattgtgagattttggatcattaccgtttttcttgtcttgattggcttatcaagtcttaaaataagataa

SEQ ID NO: 257947 - DNA, 976 bp, Unknown
  Bacterial polypeptide expressing nucleotide sequence isolated from the Sargasso Sea
tagttctttcctatttggacccaagattattgcagtacttcagggcaataagattggtgagacaatcaggaccgatgggccatccagtcactcctcaaagggtgggactccaacgatgggtggtctcatgatcatcctctcaattattgtcagtgttcttatatggtcagacttgagcaatgtttataatttagtgctgattgtatcgatcatttcctttggactgattggatttattgatgatttcacaaagcttaaaagaaacaagaaaggtatatccgcgaaaacaaaattaattttgcagtttattgtcgcagcttcatctacttactatcttctggagcaagggagtagtgtgctcaactcagaagtgctgatcccttttacaaataatattcaccttgatttaggttggttctttctgccttttgcaatttttgtgattgttggctcaagtaatgcagttaatctaaccgatggattggatggtttagcaatcatgcctgtttcaatgattgccatagcccttggaatttttgcatatgttacaggcaattttaactttgctgagtatttaaatttgccgttccttcaagatgcgggtgaagtttttgttttttgttgtgccatctcaggtgctgggttgggatttttgtggttcaacacctatccagctcagatctttatgggggatgttggcgccgtatccctgggcggaatacttggaacgattgctgtgattgttaaacaagagctgatactggctatcatggggggtgtttttatcattgaaactttatctgtggtacttcaggttggttcattcaaactgagaggaaagaggatttttaatatggctccgatccaccatcactttgaattaaaaggatgggctgaacctaaagtaattgtgaggttttggatcattactgtttttcttgtgctcattggcttatcaagtcttaagataagataa

SEQ ID NO: 257948 - DNA, 244 bp, Unknown
  Bacterial polypeptide expressing nucleotide sequence isolated from the Sargasso Sea
agctattcttttaagacatgaattagtttttgcgattatggctggtgtttttgtaatggagactttaagtgtggctattcaagttatttcttttaaaactaggggtaaaagagttttcttaatggcacctattcatcatcattatgaactaaaaggtatggcagaacctaagataattgttcgtttttggataataaccctagttttaattttagttgcgttagccactcttaaattaagataa

SEQ ID NO: 257949 - DNA, 190 bp, Unknown
  Bacterial polypeptide expressing nucleotide sequence isolated from the Sargasso Sea
ctagaagcagtctcagtaattgtacaagtgatatcattcaaacttaccggaaaaagaatatttaaaatggccccaatccatcatcattttgaaaaaaaaggctggccagaatcgactgtcgttataagattttggataatatcaattattttagcaatgataggattagcaacattaaaactaagataat

SEQ ID NO: 257950 - DNA, 787 bp, Unknown
  Bacterial polypeptide expressing nucleotide sequence isolated from the Sargasso Sea
catgctttatagtttacttacttctcttatagaaacctattcatttttaaatgtatttaaatatataacatttagaatcggtttatctgttgttacatcattaacaattatttttttgattggcactcctcttattaactactttgcaaggaaacaaattactggtcctataagacaagatggaccaattgatcatataattaaaaaaagtggaacacccacaatgggtggtttaatgattttaatcggtatagtagtcagcacacttctatgggcagatctaaataatatttatatttggatagtactttttgtttgtacaagtctaggacttttaggttttttagatgattatttaaaaataaaatttaaaaattcaacaggaattaatgcaaaactgaaatttttatggcagtttataatatctttatcagcaattatcgctttagtttattttactgatcatgaaaatatatcaaaactttatgtacctttttttaaaaatttaatattgaatatgggtttattttttattccatttggaatttttgtaattattggatcttcaaatgcagttaatttgacagacggtttagatggtttagcaactgtcccagttatgttagttgcattatctttttctttaatttgttatttagtaggtaatacgattttcgcgaattatcttcaaattcaatatgtaccagaggttggtgagctatcagttttttatggtgcaatagttggttcatgtttaggttttctttggtataacgctccacccgca

SEQ ID NO: 257951 - DNA, 1084 bp, Unknown
  Bacterial polypeptide expressing nucleotide sequence isolated from the Sargasso Sea
gatgctggtgtatctggccgagtatttaacccgttttcacactgggtttaacgtattttcctatgtgacgtttcgagccattttgggcttgttaaccgcattagtatttagtttatggtggggtcctaaacttattgagcgtttgcagttaatgcaaattggtcaagtggtgcgtaatgatgggcctgagtcgcatttcagtaagcgcggaacgccgactatgggtggtttactgatccttgcggccatctttatcagtgtgctgttatggggcgatcttggtagccgttatgtttgggtgatgctgtttgttttaggcagcttcggcatgattggctttattgatgattaccgcaaagtggtacgtaaagatactaagggattaattgcgcgctggaagtatattctgcaatctttagcggcgttgattattgctttcttcctctacaccacagcgtctaacccgggtgaaacccagttagtcgtgcctttctttaaggacgtgatgccacagcttggcgctgtgtttatcgtattggcctactttactatcgtgggttcaagcaacgcagtgaacttaaccgacggtctcgatggtttggcgattatgccaacggtaatggtagcagcagcatttgccttgattgcttatctgtctggtcatgctcagtttgccaattacctgcatattccgcatttacctggctctggtgagctggtgatcgtttgcaccgcgattgtgggcgcaggtttaggctttttatggtttaacacttatccagcacaggtctttatgggcgatgtgggttctctttctttaggggctgcattaggtgcgattgcggtattagttcgccaagaaattctattagtgatcatgggcggggtgtttgtcatggaaaccgtgtcagtgatattgcaggtcggttcttacaaattacgcggtcaacggatattccgcatggcgcctatccatcaccactacgagttaaaaggttggcctgaaccacgcgtgattgtccgcttttggattatctctattttcttagtgttgctcggcttagccacgttgaagttaaggtaa

SEQ ID NO: 257952 - DNA, 260 bp, Unknown
  Bacterial polypeptide expressing nucleotide sequence isolated from the Sargasso Sea
atcccttggggcagttggaataattaccaaacatgaaattgttcttgcaataacaggtggactttttgtactcgaagcagtttctgtaatggttcaagttatttcctttaaacttactggaaaacgaatttttagaatggcaccaattcatcatcactttgagaagaaaggttggcctgagtcaacagtagttataagattctggatcatctctatcattttagcaatgataggattagcgactttaaagttaagataat

SEQ ID NO: 257953 - DNA, 718 bp, Unknown
  Bacterial polypeptide expressing nucleotide sequence isolated from the Sargasso Sea
atgctgctgatgctgtcgcaatggctgcagggcttgtcgcccgagttcggctttttccgggtgttccagtacctcacgttccgtgcagtgatggctgccatgacggcgctgctcatcgggctggtggcgggccccagggtgatccgcatcctcacctcgctcaagatcggccagcccattcggggctatgcgatgcagtcgcacctgtccaagagcggcacgcccaccatgggcggtgtgctgatcctgttgtcgatcgccatttccaccctgctgtggtttgacctgtccaaccgctttgtgtggatcgtgctcatcgtcacgctcggctttggcgccatcggctgggtggacgactggcgcaaggtggtcaacaaagaccccgagggcatgcgctcgcgcgagaagtatttctggcagtcggtgatcggcctcatggccgcgctgtacctggtgttcagcatttccgaaagctccaacgccaaggtgtgggagctgtttgtgggctgggtgcagtcgggcttctccttggacctgccgcccaaggcgggcctgcagttaccctttttcaaagaggtgagctacccgctgggcgtgctgggtttcgtgatcctcacctacctggtcatcgtgggttcgagcaatgcggtgaacctgaccgatggtctggacggcctggccatcatgcccgtggtgatggtgggctcggcactgggcg

SEQ ID NO: 257954 - DNA, 1087 bp, Unknown
  Bacterial polypeptide expressing nucleotide sequence isolated from the Sargasso Sea
aatgctttatcaatttttactaaattttgttgatacgtttagttttttgaatgtttttaagtatcttacttttaggactggcttgtcagtttttacctctttactaatagttttaatcattggaggtccatttatcaaatttttttcaaatcaaaaaatttttaaccctataagagatgatgggccagaggatcatattataaaaaaaattggaacacctacgatgggtggagtgattattctgataggtttgttaatttcagtattatgttgggcagatttatctaatataaatatattgttttgtctttatattgtagtttcttttggattgcttggagcttttgatgattttaaaaaaattaaaaataataattcttctgggatttcgtcaaagataaaaataattttacaaattgttttagcagttataggagtaactttttttatttcttatgtcgacttccaagagatgacaaatttgtattttcctttttttaaaaatttaatcttgaatcttggatggttttttattccattctcagtattcgtaataataggttcatctaacgcagttaatcttacagatggacttgatggtttagctacagtacctgtaatattagtggcagcttgctttgctttcataagttatgtaactggaaatatagtcttttcagattatctacaaataccttacatcgagggcacgggagaaatttcaattttttgtggcgcaattattggttcttgtttgggttttctttggtttaacgctccaccagcaaaaatatttatgggagacacaggatcattatctttaggaggttcgctgggtgctgttggaataatcacaaaacatgaaatcgtattagcaataacaggcggtctttttgttttagaggctatttcggttatggttcaagtaatatcttataaattaactgggaaaagaattttcaaaatggccccgatacatcatcattttgaaaaaaagggatggccagagtccacagtcgttattagattttggattatttctataattcttgccttgataggtttagccactttaaaattaagataa

SEQ ID NO: 257955 - DNA, 1081 bp, Unknown
  Bacterial polypeptide expressing nucleotide sequence isolated from the Sargasso Sea
atgtttttgtatttttctgaaaatttgatcgagtggttttcgccattgaatgctttcacttatattacaaccagaggcattcttgctgcactaacagctcttattatttctttcctttttggccccaagattatcactgtgcttcaggggaaaaaaatcggtgagacaatcagaaccgatggcccatccagtcactctttaaaaggtggcactccaacgatgggaggaatcatgattattctctcaattgttgtcagcgttcttatgtggtcagacttaagcaatgtttataatttggttctcattgcatcaatcatttcttttggactcattggatttattgatgatttcacaaaacttaaaaaaagcaaaaaaggcatgtctgcaaaaacaaagtttgctttgcagcttatcgtcgctgcttcatcgacttattatctattggggcaagggagcgaagtattgagttcagaggtccttatccctttcacaaataatattcgagttgatttaggctggctctttttgccttttgcaattttcgtaattgttggctcaagcaatgcagttaatctaaccgatggattggatggtttggcaatcatgcctgtctcaatgattgcaattgccttaggaatttttgcttatgtgactggtaattttaactttgctgaatatctggatttgccattcctaaaagatgcgggcgaagtttttgttttttgttgtgcgatctctggtgctggattggggtttctttggtttaacacttatccagctcagatttttatgggagatgtcggtgcagtgtcacttggcggaattcttggaaccattgctgtcattgtcaaacaagagttgattttggctatcatgggcggggtttttatcatggaaaccttatcagtgattcttcaggttggttcattcaagctgagaggaaaaagaatctttaatatggctccaatacatcatcacttcgaattaaaaggatgggctgagcccaaagtgattgtgaggttctggatcatcacagtttttcttgtgctcataggcttatcaagtctaaagataaggtaat

SEQ ID NO: 257956 - DNA, 1078 bp, Unknown
  Bacterial polypeptide expressing nucleotide sequence isolated from the Sargasso Sea
atgattgggaagattaaaaagtttaactttaaatcgttattactattaaatacttttgctttaatagcaacctcatatttttttaataattttatttttataggagtttttacattatttttttttgtatctttattcgcaacaaaaaatggtctagaaataataagaaaattaaatttacttcaaaatataagacctgaaggtccttctaatcactataaaaaaagggacactccaacgatgggtggcattcttttgataatcccttttttaatttttcttctaataataactataaatttaagttcactaaaattatttcttttattaatgactatttttggtttctttatcacaggttttttagatgattatttaagtgttagaaacaaaaaaaatacagggttaaaaacaaaagagaaatttatcttacaaagtatcatctcaataatttttatcttgttagcctatgaaaaaaacttaatcagtccattaataactatttctgactcctgggtaataaatatgaatattttcatattgccagtttcttttttagtacttgtgggtataagtaattcagtaaatttgactgacggattagatggattagcggctggatgtagtgggattgtcttttatggattaggaacagaaatattaatgaaaggacagcaagaactttttgtttttagcattttatgttattcgatgtccggcatatgcttaggctttctcaaatataatagttatcctgcaaaactatttatgggtgacacaggatctctaagtattggagcaattctgggttgtatagcgttattaaccaatagcgtttttaccttatctattttctccggaatatttattattgaatcattatcagtaatgattcaagtaggatattttaaaattacaaaaaaattatttcatagaggtgaacgcatatttttaatggctccactgcaccaccactttgaacttagcggagtaaaagaacaaaaaatagttgaaaatttttggaaaatcaacattttacttgtaattttaggtatagttttaaaaatcaatctttgaa

SEQ ID NO: 257957 - DNA, 820 bp, Unknown
  Bacterial polypeptide expressing nucleotide sequence isolated from the Sargasso Sea
atgcttctaagtttctttgagtatctctctcaattcaattctggcttcaatgtattccaatatttaactttgagaattgtaatgggagcgctaactgcacttttaatctctcttgttcttggaccatatattattttttacctcaagcataaacaattctatcaatctatacgtgcagacggtcctaaaagccatctagatgataagaatacaacaccaactatgggcggaattataattatatcatctgtcgtcatatcaactattttatggtcggatttatctaacaattatatattaacactattatttggaatactcgggtttggtgctattggtttttatgatgactataaaaaacttgtaaaaagaaatagtgatggaataaaaggaagattgaaactttccttgcaaataatatttgcctctatcataacactatttttatatctttttatggatactggaagtattgaatcagttttcccttttctaaaagataatagttattatttaggagtacttttcataccatggtcaattttcatattagttggatcatctaatgcggtgaacttaactgatggattagatggacttgcaatattaccttgtattttgattgcttcggcttttgtaattttttcttatgtccatgggaatataaatatttcgtcatatttattaatcccatatattgaaggtaccggtgagactgcaatctttgctgcgtcacttgttggagcaggattaggatttctctggtttaactcatatcctgcggaaatatttatgggtgattgcggctcattatcattgg

SEQ ID NO: 257958 - DNA, 1084 bp, Unknown
  Bacterial polypeptide expressing nucleotide sequence isolated from the Sargasso Sea
atgctggtgtatctggccgagtatttaacccgttttcatactgggtttaacgtattttcctatgtgacatttcgagccattttaggcttgttaaccgcattaatgtttagtttatggtggggtcctaaactgattgagcgtttgcagttaatgcagattggccaagttgtgcgtaacgacgggccagagtcgcatttcagtaagcgtggcacgccgactatgggcggcctgatgattttaggcgccatctttatcagtgtgctgttgtggggcgatctcggtagccgttatgtgtgggtgatgctgtttgtattgggcagcttcggcatgatcggttttattgatgattaccgcaaagtcgtgcgtaaagatactaagggactgatcgcccgttggaagtatattctgcaatccttagcggcgttgatcattgctttcttcctctataccacagcgtctaacccgggtgaaacccagttagtcgtgcctttctttaaggacgtgatgccacagcttggcgctgtgtttatcgtattggcctactttactatcgtgggttcgagcaacgcggtgaacctaaccgatggtctcgacggtttggcgattatgcctacggtaatggtggccgcggcattcgccttgattgcctatctgtctggccatgctcagtttgctaactacctgcacattccgcatttacccggttcgggtgagctagtgatcgtctgtactgcgattgtgggcgcaggcttaggctttttatggtttaacacttacccggcacaggtcttcatgggcgatgtgggctcgctgtctttaggcgcagccttaggcgcgattgcggtactggttcgccaagagatcctattagtgattatgggcggtgtgtttgtgatggaaactgtatctgtgatcctgcaggttggttcttacaagttacgtggccagcgcattttccgcatggcgcctatccatcaccactatgagttgaaaggctggcctgaaccacgcgtgattgtccgcttttggattatctcgattttcttagtgttactcggcttagccacgttgaagttaaggtaat

SEQ ID NO: 257959 - DNA, 1105 bp, Unknown
  Bacterial polypeptide expressing nucleotide sequence isolated from the Sargasso Sea
aatgttatacgaacttctattacctctcaaagcctattattctccattaaatttgtttcagtacataacttttcgttcagcgtcagctgcaatcttagcgctttttataagcttcctcatcgggccatggattatccacaaactgcgttttcatcaaataggtgaagaaatacgctcatccggacccgaatcgcacctcgtgaagaagggcacgccaactatgggggggatcattattctaggatctgtgatcctcccaacccttctgtttgcagatttatcaaatacatttattcaaataattctattatcattagtatggatgggagctataggttttttggatgattatctaaaagtagtaaaaaaattcgaaaaagggttgattggtaaatataaactaattggtcaaatatctcttggtatggtaattagttattggatatacaatacccctgaatatgcaaatatagtttcatctacgagtatcccatttctaaagaattacactatagattttggattattttacccactaattattattcttgttataacaggcacatcaaatgctgtcaacctaacagacggattagatgggttagctgctggtctattagctatttcttttgctgttttttccgcaattgcttatataagtggcagagttgatttttcagagtatttaaatataatgtatctacctggtgctggagaattaactgttttcactgcagctatcacaggtgcatgtattggatatctttggtttaatacaagtccagctgaagtatttatgggcgatattggatcattatcaactggagctgcattaggtgctctagcagtgctacttaagaaagaactattattagcgatcattggcggggtttttgtgtgggaagctttaagcgttatgattcaagttacttatttccgatggacaaaatataaatttggagaaggaaaaagatttttcaaaatggcccctattcaccatcatttcgaactaaaaggttggccggaatcacgaatagttgttcggttttggataattggaatcctatttgcccttttttcacttacaacatttaagataagataa

SEQ ID NO: 257960 - DNA, 1078 bp, Unknown
  Bacterial polypeptide expressing nucleotide sequence isolated from the Sargasso Sea
ttggcctttgaataccaatctttgtttagttttctaaatatttttagctatataacatttagagctggcggttctattcttactggattatttttttctctgatatttggaaattatataattaacaaattatcaaatgttcagccaactggccagccaataagagatgatggtccagagtcacatataattgcaaaaaaaggtactcctacaatgggtggcctgttgattattttaagtgtttttgtttcaacaattatttgggctgatttacaaaatatttttatatggattttactttcaactattttaatttttggatctattggttttgcagatgactacagtaaaatcaaatcaaataccagtaagggtatttcatcaaaaataagaattatatttcaaatcattttttcttttttcataacatatttaattcttatcaatttagatccaagtataagcaaatctatgacatttcctttctttaaaaatttaattatagattttggaatattttattttctaatttcgatatttataattattggatcggctaatgcagtaaacctaactgatggacttgatggtttagcaattgtccctgtaatgatagttgctatgtcttttgctttcatagcctatgtttcaggtaatatagttttttctaattatttacttatccaatatattcctggaactggtgaattagcagttttttgtggttctttaattggagccgctttaggttttctttggtttaacgcaccacctgctaaagtttttatgggtgatacaggatctttagcattaggtggctctttaggctcagtagcaataatatgcaaacatgaaattcttcttgcaataataggaggtttatttgttctagaaaccttgtctgtagtaattcaagtattcatttttaaaatgacaggaaaaagggtttttttaatggctccactacatcatcattttgaaaaaaagggatggcctgagtcaacaattgttattcgtttttggataattactattgtattagctttgataggtcttgcaactttaagaataagataat

SEQ ID NO: 257961 - DNA, 1084 bp, Unknown
  Bacterial polypeptide expressing nucleotide sequence isolated from the Sargasso Sea
atgatcttatatttaattgagtatttaaatcttggtgccctaaataattttttaaattatttaacagttagaacaggtctggcgttgtttacttcatttttttttattctcttttttggcccatttttaattaaaagaattggatcataccaatcaattggtcagcctattagagaagacggccctgagtctcacttagtagctaaaaaagggactccaacaatgggaggaattataattttgatttctatagttggatcaatgattctatgggtcaatcctgaaagctatatatcttggccaattatattccttctaatatcttttggattggttggttttgcagatgactttagcaaagttaagaaaaaatcaagtaatggaatttctgcgaaaataagaatcttttttcaaataataatatcgttgatatttatttattggataacaacttataatgaaattgatattcagttattatccttaccttttctcaaggatatatttctaaacttaggtttattttcaattccattcgttatattggtaattctaggatcagcaaatgcggttaatcttacagacggtcttgatgggctagcaattgttcccattatgattgtctctgcgacttttgctgtgatctgctacttggcaggaaatatgattttttcgaattatctttacattaattatttacctggagcaggtgaattaaccgtgctttgcgcagccataattggatccgctcttggctttttatggtacaacgcgcctcctgcaatggtctttatgggcgatacaggctctttatcattaggtgctgcattggggggtataagtgttctaaccaagcaagaaattgtattagcaatagttggaggaatattcgtcgcagaagcggtgtcagtaattcttcaggttggatcatataagttaaccggcaaacgaatattcaaaatggctcccttacaccatcattttgagaagaatggtattgcagaatcaaaaatagtaattcgtttttggataatcgctttaattcttgccttgattggactcgcaacacttaagattaggtaac

SEQ ID NO: 257962 - DNA, 568 bp, Unknown
  Bacterial polypeptide expressing nucleotide sequence isolated from the Sargasso Sea
ctggttttttatacctttttatatttttataattttgttggatcatctaatgcagtaaatttaactgatggtttagatggactcgcaactgttccaattatacttgtagctggttgttttgcgtttataagttacgtaacaggcaatgtggtattttcaaattatctacatattccatatctagagggcgtaggtgaggcatcagttttttgtggttcaataattggagcatgtataggctttctatggtttaacgctcctccagctaaaatatttatgggtgatacaggctctctcgctctcgggggttctttaggagcggtaggaataattacgaaacatgaaattgtgctagcaataaccgggggactttttgttttagaagcagtatcagttattgttcaagttgtatcatttaaacttacaggaaaaagaatatttaagatggcgcctatacatcatcattttgaaaaaaaaggatggcccgagtcgactgttgttgtaaggttttggataatttcattaattttagccatgataggtcttgctacacttaaattaagataat

SEQ ID NO: 257963 - DNA, 1078 bp, Unknown
  Bacterial polypeptide expressing nucleotide sequence isolated from the Sargasso Sea
gatgattgggaagactagatcgctaacttttacatcattatttttcttacttgtaatttcattaatagtaaattcttacattttcaatagtttactaataattaatatttttctaatatcaagtttaatttccttagtaataacaaaatacggttttaaaataattacacgattaaatttattacaaaatataagaagtgaaggtccaactcttcattttaataaaacaaatactcctacgatgggcggaatatttattattttgccctttttattactacttttaatagttaataattacgttgattctattggtatattattattatttttttgtactataagtttttttattataggatttttagatgattatttaagtattgcaaacaaaaaaaatacaggtctaaaatctaatgaaaaatttacattacaagctttaattgcaattttatttatcatatttgcaagtcaaagcaattatattaatcctttgatcactatatctaataattggaatatggatactaatatagtaatttttccaatctgttttttaactttagtaggtttaagtaatgcagtaaatttgaccgacggcctagatggattagcagctggatgtagcgcaatagttttttttggacttggtacggaaatatttattaaagatcaaaaagatttaataatttatggccttatttcctatgcaatgtcaggtttatgtataggttttctaaaatacaacaaatatcctgcaaagatatttatgggagatactggatctttaacaattggtgcggcgttaggatctatttcaatattaactaatagtttttttacgttatttattatctcaggaatatttattactgaagctctatcagtaatgattcaagtaagtttttttaaaatcaccaaaaagttatttaaaaaagggaaaagaatctttttgatgacaccaattcatcatcattttgaactaaagggtatcaaagaagagaaaatagttgaaaacttctggaaagtaaacatattacttattgttttaggtatagttttaaaaataaatctttga

SEQ ID NO: 257964 - DNA, 1105 bp, Unknown
  Bacterial polypeptide expressing nucleotide sequence isolated from the Sargasso Sea
atgctatataatctcctattgccatttaaagattcattttcaataattaatctatttgaatacataacatttcgtgctggaatagcagcaatagccgcacttttcataagcttcataatcgggccctgggttatccacatactacataaaaaccagattggcgaagaaattcgttcaacaggtcccaaatcacacatgaagaaagagggcacgcccacaatgggaggagtcatcatattaatggcagtactcctcccgaccctccttttttcaaaaatcaacagtgttttagtacagattataatatttgcgacaatatggatgggagttattggttttttggacgactatttaaaagttataaaaaagatgaaacgcggtctaattgctcgctataaactagcaggccaaataagcctcgggtgtattgtgagtttctggatattaaacacaccagaattcatcgatttcaatagtaaaacaacaatgccattttttaaaaatgttgaaatagatctaggcatgctttatccattgatggtaattctagtaattaccggaacttctaatgcagtgaatctaactgatgggcttgatggattattagctgggctcttagctatttgtttcactgtattctctgcaattgcctatatcacaggaagaattgacttctctgattatcttaatatactctatatacctggagcgggtgagctaactatttttacttcagctatggctggagcctgcattggatatttatggtttaactctcaccctgctgaaatatttatgggtgatactggttcactatcgacaggggctgcattaggcacactagcaattctattgaagaaagaattactactattcatcatcggcggggtatttgtgtttgaagcattatcagtcattatacaagtttcatattttcgatatacaaaaatctttaaagggcagggggaaaaaatatttaaaatggctccaattcaccatcattttgaactacagggttggccagaatcaaaagtggttatacgtttttggattatcggactattgcttgcactcttctctttaacaacttttaaaattagatgat

SEQ ID NO: 257965 - DNA, 1084 bp, Unknown
  Bacterial polypeptide expressing nucleotide sequence isolated from the Sargasso Sea
catgttagtgtggttagccgagtatttaactcaatatatcaacgcctttaacgtattcagttacctgaccttcaggtctattctgggtattttaaccgccttaatgctgagcctgtattttggccccaagctaatagctaagttacaacaactgcaaattggtcaaactgtacgtgatgatggcccacaaagccatttctcgaaaaaaggcactccgactatgggcggtttgctgattttaggttcagtgctggccagtattctgctgtgggcagacctgggtaataaatacgtctgggtagtgatttttacgctgataagctttggctggattggctttattgatgactaccgcaaagtagtgcgtaaagatccgaaaggcttgatcgccaagtggaaatacttttggcagtccttgtttgccatcgttatcgcatttttcctgtacgcctcggcagaacgtccagccgaaaccagtttagtggtgccatttattaaagatgtgctgccacagttgggttttatcttcattgctttgtgttatttcgtcattgtgggtaccagcaacgcggtgaatttaaccgatggtttggacggtttagccatagtgccaaccattatggtggcctttgcttttgccatcatcgcttatgccagcggtaacgtgaattttgccacttatctgaatattccttatctgcctcacgccagtgaactggtggtggtctgtgctgctttagtcggcgcaggccttggtttcctttggtttaatacctatccggctcaggtctttatgggcgatgtaggttctttagctttaggtgctgttttaggcgtgattgccattttagtccgtcaggaaattgtgctctttattatgggcggtgtttttgtgatggaaacagtgtcggtgattttgcaggttggttcttacaaattacgggggcagcggattttccgtatggcgcctattcaccaccattacgaattaaaaggctggcctgaaccacgcgttattgtgcggttctggattctgtcggtcatttttgtgctgattggtttagctactttaaaactgagataa

SEQ ID NO: 257966 - DNA, 1087 bp, Unknown
  Bacterial polypeptide expressing nucleotide sequence isolated from the Sargasso Sea
aatgctatatcaatttttactaaactttgttgatacttttggatttttaaatgtttttaaatatttaacatttagaactggtttatcagtttttacttctttgataattgttttaattattggtggcccatttatcagatttttttcaaaccaaaaaattttaaatccgatacgtgatgatggtccagaagatcatattataaaaaaaattggaacaccaacaatgggcggagtaattatcttattaggcttattgatatcagtactatgttggggtgacttatctaatattaatattctattttgtatatttatcgccgtttcttttggactgttaggagcctttgatgattataaaaaaattaaacatagtaattcttcaggaatatcatctaaattgaaaataattttacaaattataatagcaattacaggagtaagtttctttgtatattttgtagattatcaagatatcacaaatttatattttccattttttaaaaatctgatcgtaaatcttggttggttttttattcctttttcagtatttgtaattataggttcatctaatgctgtaaaccttacagatggcctagatggtttagctacagtaccggtgatattagttgcagtttgttttgcttttataagttacgttacaggaaatgttgtgttttcagattatttgcaaataccttacatagaaggcactggagaagtatcaattttttgtggagcaataataggttcatgcttaggttttttatggttcaatgctcctccagctaagatttttatgggtgatactggctcattgtctttaggaggttctttaggagctatagggataattacaaaacacgaaattgttttagcaattacaggaggcctttttgttttggaagcagtttctgtaatggtccaagtaatatcatataaactcacaggaaaaagaatctttaagatggcaccaatacaccatcattttgaaaagaaaggctggcctgagtcaacagttgtgatcaggttttggattatttcaataattttagcaatgataggtttagcaaccttaaaattaagataa

SEQ ID NO: 257967 - DNA, 1087 bp, Unknown
  Bacterial polypeptide expressing nucleotide sequence isolated from the Sargasso Sea
aatgtttgaatacttaggcaccattcttgtagatattgatcctggcttcgacgttctcagataccttactgttagaacaattggaggaacaataacagctttattgctgacaatatttttgggccctaagctaataagctggcttcaaaggatgcaatttaaacaatatggagtggagagaggcccagactcccacaaacaaaagtctggtaccccaactatgggaggattactaataatttcttcattgcttatatctactttattctgggcagatttgagtaatagatatatttgggtttgcctttttattacattgggttttaccatcataggttttcttgatgacttcttaaaaataaaatacaaggactcaagaggcatatctgggaggcttaagctcttgtctcaaactatagtttcaattattgctgtaagctttttatacttctctgccgaagattcagcagaaatatcattaatactcctttttaacaaagattggatcttcgaaatgagtatgctttcatttattctgtttggttcatttgtaattgttggttcatcaaatgcagtaaatctaacagatggccttgatggattagcaatattgccaactattttaattggtggaggcttaggattaatagcatatgcaatgggtaaccagttaattgcagaatatttatttataccacatcttcaaattgcaggtgagctaattgtattttgtggagcgcttatagggtccggaattggcttcttatggtacaactcatatcctgcagaagtttttatgggagatgttggctctcttactcttggtgcaattcttggagtccttgctgtaatccttagacatgaaatagtttatgcaattatggcaggagtttttatagctgaaactctaagcgtcattattcaagtcacttcttacaggttaagacaaaaaagggtttttttaatggcaccaatccatcatcactttgagctaaaagggtggccagagccaaaaattattgtcagattctggattatcacacttgttctaattttagttgcacttgcaacactcaaattaaggtaa

SEQ ID NO: 257968 - DNA, 1057 bp, Unknown
  Bacterial polypeptide expressing nucleotide sequence isolated from the Sargasso Sea
atgcaattcaacacagattttggtgtgcttcagtacattacagttcgaggtatctttagtgttttaacagctttacttgtctccttgatcataggcccatatttgattgagaagttgcaataccatcaaattggacaggtggtaagagatgacggtcccgaaactcatttcagcaaagcgggcacgcctactatgggtggagccttaattctggtaagtatagctatcagtacattgctttggtctgacttgaataatcactatgtttgggttcttttatcagtgaccctcctttttggaggtgttggatgggttgatgactatagaaaggtttttgagggaaattcagcaggactctcagcgagatggaagtacttttggcaatcattaattggatttgcagcagctctgttcttgtattcaacagcctcgagcccgattgaaacttcgtacattgtaccgttttttaaagacgtaataattgattttggttttttttatgtcgtgattagctactttgtgatagtgggtttcagcaatgcagtgaatttaacagatggtttggatgggttggctattctaccaactgttatggtaggaggagccttaggagtcatttcttacctagctggacatagtgaattttcagcgtatttaaatatccccaacgttttaggttctggtgaaattgtaatattcgcaggagcgttggttggcgcagggatgggttttctatggtttaacacctacccagcacaaatattcatgggtgatgtaggggccctcgcgctcggtgctgctcttggtgttatggctattgtttcacgccatgaaattgtgttgtttatcatgggaggagttttcgtcgtagagacagcttcagttatattgcaagttgcttcatataaattgacgggtagacgaatattcagaatggcaccattacatcaccactttgaattaaaaggttggccagagccgagagtaatcgtacgattttggataataactgtgatgcttgtcctttttggcctcgcaacattgaagttacgataag

SEQ ID NO: 257969 - DNA, 481 bp, Unknown
  Bacterial polypeptide expressing nucleotide sequence isolated from the Sargasso Sea
attgtccctgtaatgattgttgctatgtcttttgctttcatagcatatgtttcaggtaatgtagttttttctaattatttacttatccaatatattcctggaaccggtgaattagcagttttttgtggttctttaattggagctgctttaggttttctttggtttaatgcaccacctgctaaagtttttatgggtgatactggatctttagcattaggaggctctttaggctcaatagcaataatatgcaaacatgaaattcttcttgcaataataggaggtttatttgttctagaaaccttgtctgtagtaatccaagtattcatttttaaaatgacaggaaaaagagtttttttaatggctccactacatcatcattttgaaaaaaagggatggcctgagtcaacaatagttattcgtttttggataattactattgtattagctttgataggtcttgcaactttaagaataagataat

SEQ ID NO: 257970 - DNA, 1068 bp, Unknown
  Bacterial polypeptide expressing nucleotide sequence isolated from the Sargasso Sea
aatgatattatatctagttcaaatattaaactttgattttccaggaataaacttatttacatatctctcatttagagctggttgcgcaataataacttcacttctaattgttttacttattgggccaaagtttataaagagtatgcttatcaaacaaggtaatggtcagcctataagggaagatggcccaaaaagtcatttgcattcaaaaaaaggaacaccttctatgggagggctattaattctttctagttttttaattagcacgctaatctggggagatatttttaatagctttatgtggatagttattttatctacaattttattcggtttgattggttatattgacgacagaaaaaaaattaaggatcaaaatccaaaaggaatttcatcaaaaaataagtttttattgcaaatcttatcttcttttattttaatttttttaatttctttgcagtcgtcttcagaattagtttacagtatatccattccatttgtgaatggagtttttttcttagggttaattctttattattgttttacaagtttcgttattgttggaacatcaaacgcagttaatttaacggatggactagatggattagctatagtcccaataatgattgcaatagctagttttggtttaattacatatctatctggcaatttagtattttcggaatatttaggaataaattatataccatattcaggagagttaagtattctatgctgcgcacttttgggcagttgtctgggttttttatggtttaatgctcctccagctatgatttttatgggtgatacgggctcattatctttgggtgcaattttaggttctatcgctgttatcactaaacatgaactagttttaatagtcattggtggtattttcgttcttgaagcaatgtccgtaataattcaagttttctcttatagagtttttggaaagagagtatttaaaatggctccgatacatcaccattttgaaaagaaaggttggtctgagtcaacaatagtaattagattttggattatatcttttgtattagcgataattggatt

SEQ ID NO: 257971 - DNA, 1087 bp, Unknown
  Bacterial polypeptide expressing nucleotide sequence isolated from the Sargasso Sea
aatgctttttagtcttttttcgagcttagtcgaaatttttagttttctaaatgtttttaaatatttgactgtacgaacaggtctatcaatgtttacttcgatgacggtagtttttctagttgggggaccattaatcaattatttttcttcacatcaaattcatgatccaattagagaagatggaccgagtgagcatatagtcaaaaaaataggaactcccactatgggaggtttaatgatattacttggtattttctcaggagtattattgtggggtgatttgtcaaatccttacaattggttcttaatatatatagcaggatcttttggattacttggggcatatgatgactttcaaaaaataaaaaaaaataattcaaatggtatttcatcaaaattaaaaattataattcagattgttttagcattaggtggaatttatcttctttatctttttggtggatcaaatgaacttgaaaacttatattttccattttttaaaaatttagtaattaacctgggctggttttttattccattttatttatttgttattgtaggttcatctaatgccgttaacttgactgatggactggatggtttagcaacagttcctgttatattagttgcagcatgttttgcttttattagttatgttacaggaaatatagttttctcagaatatttaaaaattgtttatattgatggtgtaggagaggcatctattttctgtggagcaataataggatcttgtctcggttttttatggtttaatgcaccaccagcaaagatttttatgggtgacacaggctctttagccttaggaggttcactgggagcagttggaattattactaaacatgaaattgttcttgcaattacgggcggtctatttgtcttagaggcagtttcggtaattgcacaagtgatatcatttaaactaaccggtagaagaatatttaaaatggcaccaattcaccatcattttgaaaaaaaaggttggcctgagtcaactgtagtaattagattttggatcatttcaattattctggcgatgataggtcttgcaactttaaaattaagataa

SEQ ID NO: 257972 - DNA, 1033 bp, Unknown
  Bacterial polypeptide expressing nucleotide sequence isolated from the Sargasso Sea
atgtttgagtatttgggtacagttttagtatctgttgatcctggttttgatgttctaagatacttaaccgtaagaacaattggtggtacggtaacagcgcttttgctttcaatcttgatgggcccattaatcattaattctctcaaatcaatgcaatttgagcagtttgtcagaaaagatggaccacaatcccactacaaaaaaacgggtacgcccacaatgggaggattacttatattatcttctttaataatttcaactcttttatgggctgatcttggaaatagatatatttgggttgtattaggagtaaccataggtttttcaataattggtttttttgatgattatttaaaaattaaaaataaaagccccgatggactatcttcaaaacaaaagattttttttcaatccataattgctcttatatcaataacatatctatattactcagctgagattattcctgaacagtcgtttattgttcctttttttaaagatttaataatccccatgtctccctttgtttttatttttattggagtgtttgtattagttggttcttcgaatgctgtcaatttgactgatgggctggacggtcttgcaattcttccctcagtcttgattggaggagcacttggcttaattgcttatgctatggggaaccaaaatatagcagattatttgtatctaccacatcttccattatccggagagttaatagtgttctgtggggcactaattggatcaggtattggttttctatggtataacacatatccagctcaagtattcatgggagatattgggtcactaagtctcggagctatattaggaataatcgcaattattttaagacacgaattagtttttgcaattatggctggagtattcgtaatggagactctaagtgtagcaattcaagtaatttcgtttaaaacaagaggtaagagagtttttttaatggcaccaattcatcatcattttgaacttaagggctgggctgagcctaagattattgtcagattttgga

SEQ ID NO: 257973 - DNA, 940 bp, Unknown
  Bacterial polypeptide expressing nucleotide sequence isolated from the Sargasso Sea
atgctataccagtttctattaaattttgttgataattttggctttttaaacgtctttaaatatttaactttcagaactggtttatccttttttacatcattagtaatagttttatttattggaggtccttttataaaatttttttcaaatcaaaaaatttttaatccaattaggcaagatggacctgaagaccacatagttaaaaaaattggaacaccaacaatgggtggaattattattttacttggcctaattatttcagttattttatgggcagatttatcaaataataatattttattttgtttatacattgccctttcatttggattactcggtgcatttgacgattataaaaaaattaagcaaagtaattcctctggaatttcatcaaagttaaaaataactatacaaattattttagctataataggagtaggtttgtttgtccatttcaacaattatcaagatttaaataatttatattttcctttttttaaaaatttaataattaatcttggatggttttttataccttttgcgatatttgtaataataggttcctcaaatgcagtaaatcttacagatggtttagatggtctagcaacagtaccagtaatattagtggcagcttgttttgcatttataagctatgtaactggaaatattgttttttcaaattatttacaaattccttatattgaaggaacaggtgaagttgcaattttttgtggtgcgattattggagcttgcttaggattcttatggtttaatgctcctccagctaaaatttttatgggagacacaggctctttatctttaggtggttctttaggagccgtaggtattataacaaaacatgagattgttttagcaataacaggaggtcttttcgttttagaagcagtctccgtaatggttcaggtaatttcatttaaac

SEQ ID NO: 257974 - DNA, 1102 bp, Unknown
  Bacterial polypeptide expressing nucleotide sequence isolated from the Sargasso Sea
tttgcaatccacggattcgaaccaccgtccttggtgggagaacggctcattgagtgccagcttgctgatgctggtggtcttgatgaccagctttgcagctgacaagtggatcaccaatgcgcaactgagcctgccgctcttgatttcagcagtctgcgcaacagcgactgcagccttgggcattccgcttctgcggcgcttgaagatggggcaattcatccgtgaggaaggccccaaagcccatcagagcaaggcgggaacgccaacgatggggggccttctggtagttcccgtcggggtcattctcgggagcctgatcacacgggacgccgtggcgtcacagcaactgctcagcctggcagccctgaccctggcgttcatgctgatcggcggcatcgatgactggagcagcctcaccaaacacaccaatgctggcctgacggcgcgaggaaaattgctgctgcaagccgtggcagcctcaacctttctggccatcgctgcctggcagggctggatcagcagcagcattgccctgccctttggccttgaactgcccctaggtcttctgatctggccgctggggctgtttgtcgttctggcggagagcaacgccaccaacctcaccgatggcctggatggcttggccagcggctgcggagcactggtgtttaccggtctggcacttcaactgatgctccggggagacaacggagatcccgccttggctggcttctgcatgaccatggccggggcatggcttgggtttctggtacacaaccgaaacccggctcgggccttcatgggcgacacagggtccctggcgatgggagccgccctcagcggtgtggctctgttgtccaacagcctctggcccctgctggtgatgggaggcgtcttcgtcgccgaatccctctccgtgatcatccaggtttgggtgttcaaggccacgaaaggacctgatggtcaggggcgacgcgtgttccgcatggcgccgctgcatcaccactttgagctgggcggcaccaatgaacgaagcgtggtgcccgcgttctggctggtcacagcaggacttgtcctcctcggactgatgctgcgtccctga

SEQ ID NO: 257975 - DNA, 961 bp, Unknown
  Bacterial polypeptide expressing nucleotide sequence isolated from the Sargasso Sea
aatgctttatcaatttttattaaattatgttgatatttttagttttttaaatgtttttaaatatataacttttagaacaggattatctttatttacttcattaatcattgttttattaataggtggacctttcattaaatttttttcaaataataaaatattagatcctatacgtgatgatggaccagagaatcatatagtaaaaaaaattggtactccaacaatgggtggagttattattttatttggattattagtttcagttttgctttggggaaatttatcaaatgttagtattcttttttgtatttatattacaatttcatttggattgcttggagcacttgatgattataaaaaaattaaactaaataattcttcaggtatatcgtttaagtttaaattattatcacaaatttttttagcaattataggaattagtttttttctttattttgtagattatcaagaaatcaataatttgtattttcctttttttaaaaatttagtaattaatcttggatggttttttatacctttttcagtatttataattattggttcatctaatgccgttaatttaacagatggacttgatggattagcaacagtaccagtaattttagttgctgcttgctttgcttttattagttatataactggaaatattgttttttcagattatttacaaattccttacatcgaaggtacaggagaaatttctattttttgtggagccatcataggctcatgtttgggttttttatggtttaatgctccaccagcaaaaatttttatgggtgacactggctctttagctttaggtggttcattaggcacaataggaataataacaaaacatgaaatagttttagcaataactggtggattatttgtccttgaagcagtttcagtaatggttcaagtaatttcatttaagttaacaggtaaacgaattttt

SEQ ID NO: 257976 - DNA, 1105 bp, Unknown
  Bacterial polypeptide expressing nucleotide sequence isolated from the Sargasso Sea
aatgctctacgaacttttcacaccattcaaacatttaatttcattttttaatctgctcgagtatatcacttttcgagcagcgacggcatcaattttagctttattcatcagtttcattatcgggccctgggttatccacatactacataaaaaccagatcggtgaagaaattcgctcgacaggacccgaatctcacatgaaaaaaagaggcacgcccacaatgggaggagtcatcattttaatggcagtactcctcccaaccctcttactatcaaagctagatagccccttagttcaaattattgtcttttcaacagtttggatgggcttcattggcttaattgacgattatctaaaagttgtaaaaaagatagaacgagggcttattgctcgttacaaaattgctgggcaagtctcactgggatgtataattagtttttggatttttcaaatacccgaattcatcgaattcaatacaaagactacagttccattttttaaaaatgttgagattgattttggtatgttgtatccaattatggttgtgttggtaattactgggacatcaaatgcagttaatctaacagatggattagatggcttattggctggtttattagcaatttgctttacagtattttctgcgattacctacatcacaggaagagttgattattccgattatttaaatattttgtatatacctggtgctggtgagttgacaatatttacttctgctatggctggagcgtgtattggttatctttggtttaattcacatcctgctgaaatatttatgggagacacagggtctttatcaactggggccgccttgggtacgcttgctatacttctaaaaaaggaattgctcctactgattattggcggagtattcgtttgggaggcaatttcggttattattcaactatcttatttccgatatacaaaatcattgaatggtgagggaaagcgttttttcaatatggcacctatccatcatcactatgaactaaaaggctggccagaaacaaaagtagtgattcgcttttggattataggactattactcgctcttttttcattgactacctttaaaataagatga

SEQ ID NO: 257977 - DNA, 1015 bp, Unknown
  Bacterial polypeptide expressing nucleotide sequence isolated from the Sargasso Sea
atgctatttgaatttttaacctcacttgttgagcaatattcatttttaaatgtattcaaatatttaacatttagaactggtttatcattaatgacctcgcttataattgtttttttgatcggtggtcctttgattaaatttttttcaaagatggatattactggaccaattagacaggatgggccaattgatcatatagtaaaaaaatctggtacaccaacaatgggtggaattataattattataggaatgttaacaagcacacttctctgggcagatcttaaaaatatatacatttggtcgttaatatttatttctataagtcttggaactttaggttttatagatgatttattaaaaataaaatatagaaattcaataggattaaactcaaagcttaaattttttggtcagtttgttatcgggttaatcactttattaataataattcaattttcagatcatgagtacataaataacatttatttccctttttttaaaaatctaattttggatctaggaattttttttataccgtttggtttatttgtaattataggctcatcaaatgctgtaaacttaacagacggattagatggtttagcaacggttcccataatgttagtagcattatctttcacatttataagttatgtggtcggaaatattattttctcagaatatttacaaattcagtacattccaggcgtcggagaaattgcaattttttgtggagcaatagtaggctcttgcttagggtttctttggtataatgctcctcctgcaaagattttcatgggggatacgggttctttatctttaggtggttcattagcagctgttgcaataattgttaaacacgaaattgttcttgcgataattggaggtttatttgttctagaaactgtttctgtaatcatacaagttatatcttttaaactaactggaaaaagagttttcatgatggcgccaatacaccatcatttgaaaaaaaaggggggcagagtccacaata

SEQ ID NO: 257978 - DNA, 1087 bp, Unknown
  Bacterial polypeptide expressing nucleotide sequence isolated from the Sargasso Sea
atgctttatcaatttttacttaactttgttgacacatttggttttttgaatgtttttaaatacattacttttagaactggattatctctatttacatcattagctatagttctaattattggaggaccttttattaagtatttttccaaccaaaaaattttgaatcctattcgagatgatgggcctgaagagcatattgtaaaaaaaataggaacaccaacaatgggtggtgtaattattttaataggtttattagtttcagttttgttttggggagacttaacaaatataaatatacttttttgcatttatattgctatttcgttcggtgttttaggtgcttttgatgattttaaaaaaattaaacatagcaattcttctggtgtatcatcaaaatttaaaataatttctcagattattttagcaattataggagtttgtttttttgtttattatgtggataatcagaacataacaaacttatattttccattctttaaaaacttaattattaatttgggatggttctttataccatttgctgtgtttgttttaattggctcctccaatgcagttaatctaactgatggtttagatgggttagcgactgttccagtcattttggttgcaggatgttttgcatttataagttatgtaactggaaatattgttttttctgattacctacaaataccatacatagagggcacaggtgaaatctcaattttctgtggagcaatcataggatcttgtttaggttttctatggtttaatgctccaccagctaaaatttttatgggagatactggatccctgtccttaggaggatctcttggagcagttggaataataaccaagcatgaaattgttcttgcaataacaggcggactttttgtactcgaagcagtttctgtgatggttcaagttatttcctttaaacttactggaaaacgaatttttagaatggcaccaattcatcatcactttgagaagaaaggttggcctgagtcaacagtagttataagattctggatcatctctatcattttagcaatgataggattagcgactttaaagttaagataat

SEQ ID NO: 257979 - DNA, 1060 bp, Unknown
  Bacterial polypeptide expressing nucleotide sequence isolated from the Sargasso Sea
atgataggtataattgtcgctggcggcataagctttttatttgttatattttcaacgtcaattggagtaaattattttaaaactcgaaatattggacaaccaatacgtgaagaattaaattttcatgaacataaaaaaggtacacccactatgggtggcgtatttttaatactgggaacctttgttggtttcattttatctcatataaatttttggactattgggaagggttttaaaattgaattgctatcaattaatccacaaattttttatcttttactaataggaactcttatgggtctagtgggcctagttgatgattatttgaaagttaaacaaaatagaaatttaggtcttaaagccagaaataaatttatacttcaaacacttgttgcattaatagcaagttattatttctattttttagatgattcaactattttctatttatttagtggttttggcattgatgttggcatatttaaatggtttttaattgtatttattattgttggaattactaatgctgttaatttaactgatggtttggatggattagttgctggcagttcagctgtttcttttggtgctattttaataattgctttctggatatttagacatccagattattattctaattttataaaccctgtatttatttctgttgaattggcagttttaatttcttcaattgcaggctcttgtctcggttttttatggtggaatactaatccagctaaaataataatgggagatgtaggatctcaatttataggctcaatgtttcctctaattttatttgcaataggagctgatacattaatattattcttttgttttctttatattggtgaagctctatctgtaataattcaggtattatctttcaaatatagaggcaaaagagtttttaaaatgacccctatacatcatcattttgaaatgagtaattgggcagaaactacaattattgttaggttttggattataaacggaatagttattgtaatagggctaggtcttttctacggcgattgggtcttgtttggtaattaag

SEQ ID NO: 257980 - DNA, 406 bp, Unknown
  Bacterial polypeptide expressing nucleotide sequence isolated from the Sargasso Sea
tatttattcatcccatttaccccgcttagcggggagttaattgtgttttgtggagccttgatcggagctggcataggctttctttggtacaacacataccctgctcagatatttatgggagatttaggatctttaacactcgggggaattttaggcaccctggcagttttaataagacatgagatagtatttgcaattatggcaggagtttttgtgatggaaactttgagcgtaattattcaagtgggctcatataaattaagaggcaaaagagtctttttgatggcaccaattcatcaccattttgaattaaaaggctgggccgaaccaaaagttattgttcgattttggataataacttttgtacttgtcttatttgcacttgcaaccttaaagctcagataac

SEQ ID NO: 257981 - DNA, 1096 bp, Unknown
  Bacterial polypeptide expressing nucleotide sequence isolated from the Sargasso Sea
attgataccactaagagactattttggtttcttaaatctttttgagtatatcacttttagagctggggctagtgcaattttagcactattaattagttttatatttggaccatttgtagtaagaaaactaattaatcttcaaattggtgaatcaataagggatcatggccctgattctcacaaagaaaagcagggtacacctacgatgggtggtgttataattattttatcaacaattattccaacaattctattagcagatttaaataatttatttattcaaataatttgcttatctatggtttggatgggtttagttggtttttatgatgattatttaaaagtagttaagaaaagtaaagatggtttaagtggaaggtataaattgcttgctcaaactattcttggagtttttatatcatatttattaattaattcaaatgtatatggagactacactcttttaacttttgttccttttttaaaaaatgtttctattaatttcttttatcctatcatttatgctgtttttattattttagttgtttcagctacttcaaatgcagtaaatcttactgatggtctggatggcttagctgccgggttattagctatttctgtgagtgtatttggtgtaattgcatatatatcaggaagggttgattttaccgactacttatacatcgcttacttaccattagctagtgaacttacaatttttgccactgcgttttttggtggatgtcttggcttcttatggtttaatgcaaagcctgcagagatttttatgggagatgtaggatctttgtcaactggagctgcattgggaacattagcaattcttcttaagaaagaagtattattattaattgttggaggagtttttgtaatagaaacattatctgtaattattcaagttttatattttagatataccaaaaataaatatggtgaaggtaaaaaattctttctaatggcacctattcaccatcattttgaactcaaaggttggcccgaatcaagagtcgttactagattttggatcataggcatactttttgctttaatgtctttgactaccttcaaagttagataa

SEQ ID NO: 257982 - DNA, 697 bp, Unknown
  Bacterial polypeptide expressing nucleotide sequence isolated from the Sargasso Sea
attaaaaaaaaagagaacacaggtttacaaacaaaagagaaatttttcttacaaagtgtcatctcaataatttttatattgttagcctatgaaaaaaatttaatcagtccattaataacagtttctgactcctgggaaataaatatgaatattttcatattgccagtttctttttttgtacttgtgggcataagtaattcggtaaatttgactgatggactggatggattagccgctggatgcagtgggattgtcttttatggattaggaacagaaatattactgaaagaacagcaagaactttttgtttttagcatcttatgtttcgcgatgtccggcatatgcttaggctttcttaaatataatatttatcctgcaaaaatatttatgggtgacacaggatctctaagtattggagcaatgctgggatctatagcgttattaaccaatagcgtttttaccttatctattttctcgggaatatttattattgaatcgttatcagtaatgattcaagtaggattttttaaaattacaaaaaaattatttcatagaggtaaacgcatatttttaatggctccactacaccaccactttgaacttaaaggagtgaaggaacaaaaaatagttgaaaatttttggaaaatcaacattttacttgtaattttaggtatagttttaaaaataaatctttgaa

SEQ ID NO: 257983 - DNA, 1012 bp, Unknown
  Bacterial polypeptide expressing nucleotide sequence isolated from the Sargasso Sea
accggtctatcaatgtttacatcgatgatagtagtttttttagttgggggtccacttatcaattatttttcgtcacatcaaattcatgacccaatcagagaagacggaccaagtgatcatatagttaaaaaaataggaacacctaccatgggaggtcttatgattttactaggcatattctcaggagttcttttatggggtgacctttcaaacccctataattggttcttactttatatagctgggtcatttggactattaggagcttacgatgactatcaaaaaattaaaaaaaataattcaaacggtataagctcaaagctaaagattatattccaaattattttagcattagttggaatttttattctttatttttatagtggatctaatgagattgagaatttgtattttccattttttaaaaatttaataattaatttaggatggttctttattccattttatttatttattattgtaggttcgtcaaacgcggttaatttaacagatggtctagatggtctagctacagtgcctgtaatattggttgcagcatgttttgcttttattagttatgtatcaggaaatatagttttttcagaatatttacaaatcacatatattgaaggagtaggagagtcctctattttttgtggtgcaataataggatcttgtctaggtttcttgtggtttaatgctccacctgcaaaaatatttatgggtgacacagggtctttagcattaggtggatcattaggggcagttggcataattactaaacacgaaattgttcttgctattacaggtggactgtttgtcttagaagccgtttcagtaattgcacaagtaatatcattcaaactaactggtaaaagaatatttaaaatggcgccaatacatcatcattttgaaaaaaaaggttggcctgagtcaactgtagttattagattttggatcatatcaattatcttagctatgataggtcttgcaacattaaaacttagataat

SEQ ID NO: 257984 - DNA, 865 bp, Unknown
  Bacterial polypeptide expressing nucleotide sequence isolated from the Sargasso Sea
atgggtgggctaataattattattgggataatatcaagcactcttctttgggcagatcttaagaatatttatatatggactttaatttttgtttctttaagtttaggaatactcggattttttgatgacttattaaaaataaaacttaaaaattctagaggattaaattcaaaattaaaatttttaggacaattagttattggttcaatagccttatttattttaataaaatattcagatcatgaatatttatacgacctttactttcctttttttaaaaatcttattttacacatgggcttgttttttattccgtttggtttattcattattattggttcttcaaatgcagtcaaccttactgatggcttagatggtttagctaccgtacctgtgatgctcgtagctttgtcttttacattaatttgctacattgtaggtaacacaattttctctgaatatttgcaacttcaatatattcccgatgtaggagagctttcaattttttgcggttctatagtgggatcttgtttaggttttctttggtacaacgcgcctcctgcaaaaatatttatgggagacacagggtcgctttctttaggtggttctttagcagcagttgctataatagttaaacatgaaattgtattagcaataattggtggcctttttgttttagaaacagtctctgtaattattcaagtaatctcatttaaattaactggcaaaagagtttttatgatggccccatttcatcatcattttgaaaaaaaaggatggccagaatcaactattgtaattagattttggattataactattgtattagctttagtagggttagcaacattaaaaattagataat

SEQ ID NO: 257985 - DNA, 1150 bp, Unknown
  Bacterial polypeptide expressing nucleotide sequence isolated from the Sargasso Sea
aatgttatatcacttatttgaatacctagattttaattttgactttcctggttcagggctgttctcatttatttcatttagagccggtatggcggttattacctctcttttaataacgctcgtttttgggggtagattaattcggtttttacaaagaaagcaagttggagaaagtataagagaccttggtcttgaaggccaaattgaaaaagctggcactcctaccatgggcggagtaattattatagctggtattataataccaacgttgttgtttgctaaactaaataatgtttacactttgttaatgcttgtttctaccatttggttagggacaataggttttattgatgattacataaaggtcttcaaaaaaaacaaaaaaggattagctggtaaatttaaagttataggtcagattggagtggggttaattgttggtataacaatgtatttgagtgatgattttgactctttaaaaacaactattccttttattaaaaacaatgaatttgattattcatggttgttaacatggataagtgaagattttgcacaatatgcttggttaatctttattcctcttgtagtagtaattgtaacagcggtatctaatggtgctaacattactgatggattagatggtttagctacaggttcaagtgctataataggtactactttagccatttttgcttacctgtctggcaacatagtttttgctgattatttaaatataatatacatcccaaattctggagagttggtaatcttcatcagttcgtttgttggcgcctgcatagggtttttatggtataattcttacccagcaaaagtttttatgggagatacggggagtcttgctttaggtggaataattgctgttttttcaatagctattagaaaggaattattgattccagttttttgtggaatttttctaattgaaaatttgagtgtaataattcaagtagcttatttcaagtttacaaaacgaaaatatggagaagggaaaagagtttttctcatggctccaattcatcatcattttcagaaaaaaggaattcatgaagctaaaatagtttcaagaatgtggatcataggaattctgcttgctgttttgtcaatagttacactaaaactaagataa

SEQ ID NO: 257986 - DNA, 1084 bp, Unknown
  Bacterial polypeptide expressing nucleotide sequence isolated from the Sargasso Sea
catgctagtctggctggcggaactgctcaccccgcacttcaccttcttcaacgtcttctcctacctgacgtttcgcgccatcctgtcgatcatcaccggcctggtggtggcgctctggatggggccgcgtctcatccgccgcctgcagatcctcaaattcggccaggtgatccgcaatgacggtcccgagtcgcacctgagcaagaaaggcactccgaccatgggcggcctgatgatcatcgccgccatcttcatctcggtgctgctctggtgccgcctcgacaacccctatgtctggctggtgctgttcgtgctgggcgcctatggcgccatcggcttcgccgatgactacctcaaggtggtgcgcaagaacaccgacggcctgatcgcccgctggaagtacttctggcaatccgccgttgcgctgggggtggccgtgttcctttacgccaccgccacgcatgacggtcagacccagctggtggtgcccttcctcaaggacgtgatgccgcaactcgggctgatgttcatcgtattgacctacttcgtcatcgtcggcacctccaacgcggtcaatctcacggatggcctggatggtctggccatcatgccgaccgtgatggtggcggggggcttcgccttcatcgcctgggccaccggcaacgtcaatttcgccaactacctgcatattccctatgtgccctatacctccgagctggtgatcgtctgtaccgccatcgtcggggcgggtctgggtttcctctggttcaacacctatccggcccaggtgttcatgggggacgtgggctccctggcgctgggcggcgcgctcggcaccatcgccgtgctggtgcgtcaggagttcctgctggtgatcatgggcggcgtcttcgtgatggagaccgtctcggtgatcctgcaggtggggtcctacaagctgcgcggcgtgcgcatcttccgcatggcaccgatccatcaccactatgagaagaagggctggccggaaccgcgcgtcatcgtgcgcttctggatcatcacgctcatgctggtgctgctcggtctcgccaccctgaaggtgaggtaa

SEQ ID NO: 257987 - DNA, 1084 bp, Unknown
  Bacterial polypeptide expressing nucleotide sequence isolated from the Sargasso Sea
atgattgattttttactaaattttcttccagaaaaatctaactttttaaatttattttcctatctaacaactaggactgtcctttcaactcttactgggttaatgatggttctttttcttgggaatacttttattgagagaattagatcccttcaattccaacaatcgattggcgatcgtggtccagaaagccataagcttaaggatgggactccaacaatgggaggtttattaataattggcagtgtgattttatctggttttctttggggagacctaacgaataaatatctcttaatatccattttttgcttatttatgtttggtctaataggttttgttgatgattacaataaagtcaaacaacaaaatcaagaaggcatgtctggaaaatctaaaattttttggcaatttatctgtgcatgcataatatcagtggtgctctatactacagctgaaaataaaatggagacatcttatatagtgcctttttttaaagatgtcgtcttagattttggaatctggttcatttttatctctatttttataattattggaagttctaatgcagtcaatttaactgatggtttggatggtctcgctattttgccagtaataataataacagccgcacttggtataattgcatgggcttctggaaatgtaatagcagctgattatctttatattccacacatagttggcactggagaattattggtcctatgtggcgcaatgattggagctggaataggctttctttggttcaatacttatcctgctcaaatattcatgggcgatgttggatctctttcaatgggagcatttatagctcttgttgcaataatcgtaagacatgaaatagtctttgctgtaatggcaatggttttcataatggaagcaatgagcgttatcttgcaggtcacttcttttaagctaagaaagaagagaatttttagaatggctccaattcatcatcattttgaacttatgggatggaaagaacctaaaataattgttaggttttggatcttaacctttatttttgttttaatcggcctatctttactgaagattagataat

SEQ ID NO: 257988 - DNA, 769 bp, Unknown
  Bacterial polypeptide expressing nucleotide sequence isolated from the Sargasso Sea
aatgctatttagtcttttttcaaacttagtagatatctttagtttttttaacgtttttaagtatttgactgtaagaactggtttatcgatgtttacttctatgattgtagtttttatagtcggaaatccattaataaattacttttcagcaaaacaaattcacaatccaatacgagatgatggaccttcagagcatattgtaaaaaaaataggaaccccaacgatgggtggactaatgatattgcttggagttttttctggagtattattatggggagatctgtcaaatccatacaattggtttttaatttatatagcagcctcctttggattgttaggagcttatgatgattataagaaaattaagaaaaatcattcttcgggagtatcctcaaaatttaaaattataattcaagttattttagctttgattggaatatttattatttataattttggtgaatctacagaattaaaaaatctatattttccattctttaaaaatatagtaataaatttaggttggttttttattcctttttatttatttattttagttggttcctcaaatgctgttaatttaactgatggattagatgggctagcaacagttccagtaatattagttgcagcgtgttttgcatttattagttatgttactggaaatatagtattttctgagtatttacaaattccatatatagaaggtgtaggggaagcatctatattctgcggatcaatcatcggagcctgtttgggttttttgtgg

SEQ ID NO: 257989 - DNA, 845 bp, Unknown
  Bacterial polypeptide expressing nucleotide sequence isolated from the Sargasso Sea
tccaacaatgggtgggatttttatgataatcccttttttaattttgcttttaataataactatcaatttagattctccaaaattaattcttttattacttactatttttggtttcttttttacaggatttttagatgattatttaagcattaaaaaaaaagagaacaaaggtttaacaacaaaagagaaattaatcttacaaagtgtcatctcaataatttttatatcattagcctacgaaaaaaatttaatcagtccattaataaaaatttctgactccttgggaataaatttgaatgttttcatattgccagtttcttttttagtacttgtcggcataagtaattcagtaaatttgactgatggactagatggattagcagctggatgcagtgggattgtcttttatggattaggaacagaaatattactgaaagaacagcaagaactttttatttttagcattctatgtttttcgatgtcaggcatatgcttaggttttctcaaatacaattgttatcctgcaaaaatatttatgggtgacacaggatctctaagtataggagcaattctgggttctatagcgttattaaccaatagcatttttaccttatctattttctcaggaatatttattattgaatcattatcagtaataattcaagtagggttttttaaaattacaaaaaaattatttcttagaggtaaacgcatatttttaatggctccattacaccaccactttgaacttaaaggagtgaaggaacaaaaaatagttgaaaatttttggaaaatcaacattttacttgtaattttaggtatagttttaaaaatatatctttgaa

SEQ ID NO: 257990 - DNA, 279 bp, Unknown
  Bacterial polypeptide expressing nucleotide sequence isolated from the Sargasso Sea
ggtctctgtctctaggcggttctgtagcttcagtagcaataatagccaaacatgaaattgttcttgcaatagtaggagggctattcgttttagagacggtttctgtaatcattcaggtaatttcatttaaattaactggaaaaagagtattcatgatggctcccatccatcaccattttgaaaaaaagggatgggcagagtcaacggtagttattagattttggatcatagcaattattctagctttaattggactagcaacacttaaactaagataat

SEQ ID NO: 257991 - DNA, 1093 bp, Unknown
  Bacterial polypeptide expressing nucleotide sequence isolated from the Sargasso Sea
attgttatactatatcttaacttctctaatagaagaatacagctttttaaatatagtccgatatttatcttttagaagtggaatagcattgattacttcattatcaatagtttttatatttgcgcctaaaattattaattggttaaagtccaatcaaaaggaaggtcaaccaattagagcagatgggccagattggcacctagatatgaaaagaggtactcctactatgggaggagtaattattttaggagctctaataatatctactttattatgggctgatctatctaatatatatatctggatagtgttatatattacttttggatttggtttaattgggtttattgatgattacttaaaaattttaaaaaataatcataaagggttatctggcagattaaaacttttatttcaaatactaacaacagttattgcagcaacatggatttatttaatttcagataagtcattacaaggtatgttagcatttcctttcttaaaagatactaccttatatttaggttttgcgttatggtgtatattttctactttagtagttgttggttcatcaaacgcggttaatttgacagatggattagatgggctagctattgtaccaataattatagtagctggagtatttggaattattgcatatctaattggaaatagtattttttctaattatttaaatcttttttatatagagggtagtggtgaattaatagttttatgttctagccttgtgggagctggtataggttttttatggttcaatgctccacctgcaagcgtatttatgggagacacaggttctttatcaactggtgctgctttaggcattataagcgttatagttaaacatgaaattgtattggcgattgttggaggtttgtttgtgttagaagctgcttctgttattgtacaagtattgtcatttaagttaactggcaaaagaatttttaggatggcacctttacatcaccattttgaaaaaaaaggatggtcggagtcaactatagtaattagattttggattatagctgtaatacttgctttaataggtttagcaactttaaaacttagataa

SEQ ID NO: 257992 - DNA, 1084 bp, Unknown
  Bacterial polypeptide expressing nucleotide sequence isolated from the Sargasso Sea
atgattgattttttactaaattttcttccagaaaagtccaactttttaaatttattctcctatctaacaactaggactgttctttcaactcttactggattaatgatggttctttttcttgggaatacttttattgagagaattagatcccttcaattccaacaatccattggcgatcgtggcccagacagccataagcttaaggatgggactccaacaatgggaggtttgctgataattggcagtgtaattttatctggctttctttggggagatttaacgaataaatatctcttaatatctattttttgcttatttatgtttggtctaataggttttgttgatgattacaataaagtcaaacaaaaaaatcaagaaggcatgtctggaaaatctaaaattttttggcaatttatctgtgcatgcataatatcagtggtgctctatactacagctgaaaataaaatggagacatcttatatagtgcctttttttaaagatgtcgtcttagattttggaatctggtttatttttatctctatttttataattattggaagttctaatgcagtcaatttaactgatggtttggatggccttgctattttgccagtaataataataacagcggcacttggtataattgcatgggcttctggaaatgtaatagcagctgattatctttatattccgcatatagttggcactggagaattattagtcctatgtggcgcaatgattggagctggaataggctttctttggttcaatacttatcctgctcaaatattcatgggcgatgttggatctctttcaatgggagcatttatagctcttgttgcaataatcgtaagacatgaaatagtctttgctgtaatggcaatggttttcataatggaagcaatgagcgttatcttgcaggtcacttcttttaagctaagaaagaagagaatttttagaatggctccaattcatcatcattttgaacttatgggatggaaagagcctaaaataattgttaggttttggatcttaacctttatttttgttttaatcggcctatctttactgaagattagataat

SEQ ID NO: 257993 - DNA, 1081 bp, Unknown
  Bacterial polypeptide expressing nucleotide sequence isolated from the Sargasso Sea
catgtttttatatttttctgaaaatttgattgagtggttttctccactgaatgcttttacctatataacaactaggggtattctagccgcattaacagctcttgttatttctttcctaattggacccaagatcattggagcacttgagggcaataagattggtgagacaatcagaaccgatggaccatctagtcactcttcaaagggcgggactcctacgatgggtggaatcatgattattctctcaattgttaccagtgttgttatatggtcagacttaagtaatgtttataatttagttctcattatatcgatcatttcttttgggctgatcggatttattgatgatttcacaaagcttaaaaaaagcaagaaaggcatgtctgcgaaaacaaaattaattttgcaatttattatcgcagcttcatctacttactatcttctggggcaagggagcgatgtactcagctcagaagtactaatcccttttacaaataacattcgtcttgatttaggttggttctttctaccttttgcaatttttgtgattgttggttcaagcaacgcagttaatctaaccgatggattggatggtttagcaatcatgcctgtttcaatgattgctatagcccttggaatttttgcttatgtcacagggaattttaactttgctgagtatttggatttgccattccttgaggatgcgggcgaagtttttgttttttgttgtgctatctcaggtgctggattgggatttttgtggttcaacacgtatccagctcagatctttatgggagatgttggcgctgtatctcttggtggaatacttggaacgattgctgtgatcgtcaaacaagagctgatattggctatcatgggaggtgtttttataatggaaaccctatctgttgtacttcaggttggctcattcaaactgagaggaaagagaatttttaatatggctcccatccaccatcactttgaattaaaaggatgggctgagcctaaagtgattgtgaggttttggatcattaccgtttttctagtactcattggtttatcaagccttaagataagataa

SEQ ID NO: 257994 - DNA, 209 bp, Unknown
  Bacterial polypeptide expressing nucleotide sequence isolated from the Sargasso Sea
aatggcaatggttttcataatggaagcaatgagcgttatcttgcaggtcacttcttttaagctaagaaagaagagaatttttagaatggctccaattcatcatcattttgaacttatgggatggaaggaacctaaaataattgttaggttttggatcttaacctttatttttgttttaatcggcctatctttactgaagattagataat

SEQ ID NO: 257995 - DNA, 406 bp, Unknown
  Bacterial polypeptide expressing nucleotide sequence isolated from the Sargasso Sea
tatttatatttgccatatattaaagaatgtgggagaaataagcatactgctatcagctattcttggttccctattggggttcttgtggtttaactctaatcctgcacaaatatttatgggtgatgttggatctatacctctgggagcaactatcggtctagtatctataattattaagcaagaagttttattattaatatctggtggtatttttgtaattgaagcagtttcagtaattattcaaataatatcttttcgattatataacacgaggatactaaaaatggccccgcttcatcaccattttgagaaaatgggatattctgaatctaaaatagtaataaggttttggattttatctattattttagctttgattactattgcatcattaaagataagataa

SEQ ID NO: 257996 - DNA, 1087 bp, Unknown
  Bacterial polypeptide expressing nucleotide sequence isolated from the Sargasso Sea
atgctttacagttttttaacttcattggttgatacttttagttttttaaatgtatttaaatacattacttttagaattggtttatctgttgttacgtctttaactataatctttttgattggtacaccactaattaaatattttgcaaaaaagaaaattactggaccaattagacaagatggtcctattgatcatataattaaaaaaagtggaaccccaacaatgggaggattgatgatcctaataggtatcacagtaagtactattttatgggcagatttaacaaatatttacatttggatagttctgtttgtttgtactagccttggtttattaggttttttagacgattatttaaaaattaaattcaaaaattcatcaggagtaaatgcaaaattaaaattttttggtcagtttattatttctctaattagtattttgttgcttatctaccttactgaccacgagactatttcaaacctatattttcctttttttaaaaacctcgtattacatatgggcttattttttataccttttggtatttttgttattattggttcctctaatgcagtaaatttaactgatggattagatggtttggcaactgttccagttatgttggtcgctctatcattctctttaatatgttatttagttggaaatactatatttgcaaactatcttcaaattcaatacatacctaacgttggagagctatcaatattttgtggttcaatcgttggatcttgtttaggttttctttggtataatgcaccgccagcaaaaatatttatgggtgatactggatctttatcactgggtggatcaattgctgcagttgcaataattgtaaaacatgaaattgttttagcaattattggaggactatttgttttagaaactgtttctgtaatcattcaagtaatatcatttaagttgactggaaaaagagtatttatgatggctccaatacatcatcattttgaaaaaaagggttgggctgagtctaccgtggttattaggttttggattattgccatcattttagctttagtgggtctggccacattaaaattaagataat

SEQ ID NO: 257997 - DNA, 880 bp, Unknown
  Bacterial polypeptide expressing nucleotide sequence isolated from the Sargasso Sea
aagcggaactccgacaatgggtggtctaatgattcttattggaataatttcaagcactataatgtgggcagatttaaaaaatacttatatatggatagttctttttgtttgcgttgctcttggtttattaggatttttagatgattatttaaaaattaaatttaaaaattcctcaggtattaatccaaaattaaagtttttaggtcaattcttaatttctttaattgcaataatagctttaatttattttacagaacatgaaactattttaaatttgtattttcctttttttaaaaatttagtattaaacttgggtttattctttattccttttggtatttttgtaattattggatcctcgaatgcagttaatttaaccgacggccttgatggtcttgctacagtaccggtaatgctagttgcattatctttttctctgatctgttatttagtgggaaatacaattttttcaaattatttgcagatacaatatgtgcctaacgtaggtgaactatcagtattctgtggttcgattgtaggggcatgccttggttttctttggtacaatgcaccacctgctaaaatatttatgggtgacacaggttcattgtctctaggtggatcaattgcctcggttgcgataatagcaaaacatgaaattgttcttgcaattattgggggactttttgttttagagacagcttcagtaattattcaggtagtttcttttaaacttacaggtaaaagagtttttaaaatggcgccaatacaccatcattttgaaaaaaaagggtgggcagagtccactgttgtgattagattttggatcatttctataattcttgcattaattggccttgcgaccttgaaattgagataa

SEQ ID NO: 257998 - DNA, 1105 bp, Unknown
  Bacterial polypeptide expressing nucleotide sequence isolated from the Sargasso Sea
tatgctttactacttattatatccactgaaagatcttttttcaccattaaatgtctttcaatatattacttttcgtagtgctattgctgcaatactagctctaattattagctttattcttgggccagtaataattaatcatcttcgtaaaaatcaaataggtgaacaaattcgaaagcatggtccacaaagccattattcaaaagagggcactcctacaatgggtggattaataatattgctggcgattatactccctacgctactatttgctgatatatataatccttttgtacaaatcttagttatatctacgatttggatgggtttaattggattcattgatgattatttaaaatctatcaagaagctgaaaaaaggtttagtcgccaaatataaattagcaggccaaattgctattggcttatttattactttttggatttataatactccagcatgggataatttccgaactgttacctctattccttttctaaaagatacagtagttgactttggtttattatatccactaatgatagttttagttgtcactgccacttctaatgctgtcaatctaactgatggacttgatgggctcgcagctgggctattagctatatcattctcagtcttctcgattattgcgtatgttagtggtcgtgtagacttttctgactatttgaatataatttatctgcccggcgctggtgagctaacgatttttacggcatcttgtgtcggagcatgtctaggctatctatggttcaactcttcccctgctgaaatatttatgggcgatactggctcactatctacaggttcagcattaggtactttagcaatattattaaaaaaagaattcttattaatcattattggagggttatttgttgccgaagctatttctgttatcctccaagtaggttattatcgctacacaaaaaataagtatggagaaggaaaaaaattatttttgatggctccatttcaccatcactttgaactgaaaggtttgcctgagtccaaggtagttatccgcttttggattataggtttgcttctcgctctattaacaattacaacttttaaaattcgttaa

SEQ ID NO: 257999 - DNA, 859 bp, Unknown
  Bacterial polypeptide expressing nucleotide sequence isolated from the Sargasso Sea
ggtttgattattcttttaggtgtattttctggtgtattgttatggggtgatctaactaattcatataattggtttttaatttatatagcaggatcttttgggattttaggagcttatgatgattatagaaaaattaaatttaataattcatctggaatttcattaaaattcaaaataattttacaaattattttagcattaattggaatattaattttatatttttctggtcaatctaatgaattaggaaatttatattttccattttttaaaaatttagtaataaatcttggttggttctttattcctttttacctttttgtaattgtgggatcttcaaatgcagtaaatttgacagatggtttagatggacttgcaacagttcctgttatgttggttgccgcatgttttgctttcattagttatgtttctggaaatataattttttctgattacctccaaataccttatatagaaggagtgggtgaggcttctatattttgtggctcaataattggtgcttgcttaggttttttatggttcaatgcacctcctgcaaaaatatttatgggagacacgggctctttatccttgggaggatccctgggtgccattggtataattactaaacatgaaatagtgttagcaataacagggggattgtttgttttagaggcaatttcagtaatagttcaagttatatcttttaaaattacaggaaaaagaatatttaaaatggctccgattcatcatcattttgaaaaaaaaggatgggaagagtctactgttgttatcagattttggataatagcaattattcttgcaatggttggactagcaacacttaaacttagataat

SEQ ID NO: 258000 - DNA, 719 bp, Unknown
  Bacterial polypeptide expressing nucleotide sequence isolated from the Sargasso Sea
aaaaagcaagaaaggcatgtctgcgaaaacaaaattaattttgcagtttattgtcgcagcttcatctacttactatcttctggggcaagggagtagtgtactcagctcagaagtactaatcccttttacaaataatattcgccttgatctaggttggttctttctgccttttgcgatttttgtgattgttggctcaagcaatgcagttaatctaaccgatggattggatggtttagcaattatgcctgtttcaatgattgccatagcccttggaatttttgcatatgtcacaggtaattttaactttgctgagtatttagatttgccatttcttcaagatgccggtgaagtttttgttttttgttgtgccatctcaggtgctggattgggatttttgtggttcaacacctatccagctcagatctttatgggggatgttggtgctgtatctctcggtgggatacttggaacgattgctgtgattgtcaaacaagagctgatattagctatcatgggaggtgtttttatcattgaaactctttctgtggtacttcaagttggttcatttaaactcagaggaaagagaatttttaatatggctccgatccaccatcactttgaattaaaaggatgggctgagcccaaagtgattgtgaggttttggatcattaccgtttttcttgtgctcattggcttatcaagtcttaagataaggtaat

SEQ ID NO: 258001 - DNA, 433 bp, Unknown
  Bacterial polypeptide expressing nucleotide sequence isolated from the Sargasso Sea
tctggctggtaatataatttattcagattttttaaacattccttacttaccaggcacaggcgaaatgattgtattttgtggggctttagttggttctggaattggtttcctatggttcaatacttatcctgctcaagtttttatgggggatgtaggatctctttctttaggcgctgctttagggattgtgactgtaattattaggcacgagtacgtattactggttatgggaggaatatttgttgttgaagcactctcagtaatagttcaaatttgttcttataaattaaccggcaagcgtatttttcaaatggctcctttgcaccatcactatgaacttaaaggatggcctgaaccaagagtaattgttaggttttggataatcacattcatgttagttttgcttggtctggctttactgagattaagatag

SEQ ID NO: 258002 - DNA, 534 bp, Unknown
  Bacterial polypeptide expressing nucleotide sequence isolated from the Sargasso Sea
tagtaggctctagtaatgcagtaaatctaaccgatggtcttgatgggcttgcaatattgccatgtattctaattgccgcagctttcgttgtattttcatatgtacaaggtaattttaatattgcaaattacctattaataccatatctaccccatgtctctgagacagctatttttgccagcgctatagtaggttcgggactgggtttcttatggtacaattcatatccagcgcagattttcatgggtgatgtaggctcattatctcttggagcaatacttgcgactcttgcgattattttaagacttgaaattatatatgcaatcatgggaggcatttttgttatagaagctttatcagtcataattcaggtaacctcatttaaattatttaaaaaacgcgtgtttaaaatgtctccaatacatcatcattttgaacttaatggatggcaagagcctaaaattattgtgaggttttggataattacttttgttcttgttcttatagcgttggcttctttgaagattagataat

SEQ ID NO: 258003 - DNA, 669 bp, Unknown
  Bacterial polypeptide expressing nucleotide sequence isolated from the Sargasso Sea
tatcttcttttattctaatttttttaatttctttgaagtcgtcttcagaattagtttacagtatttcaatcccatttgttaatggagtttttttcttagggttaattctttattattgttttacaagtatagtcattgttggaacatcaaacgcagttaatttaacggatggattagatggattagctatagtcccgattatgattgcaatagctagttttggtttaattacatatctatctggtaatttagtattttcggaatatttaggaataaattatataccatattcaggagagttaagcattctatgctgtgcacttttaggtagttgtctgggttttttatggtttaacgctcctccagctatgatttttatgggtgatacaggctcattatctttgggtgcaattttaggttctatcgctgttatcactaaacatgaactagttttaatagtcattggtggtattttcgttcttgaagcaatgtccgtaataattcaagttttctcttatagaacttttggaaagagagtgtttaaaatggctccgatacatcaccattttgaaaagaaaggttggtctgagtcaacgatagtaattagattttggattatatcttttgtattagcgatagttggattagcgactttgaaaataaggtaaa

SEQ ID NO: 258004 - DNA, 856 bp, Unknown
  Bacterial polypeptide expressing nucleotide sequence isolated from the Sargasso Sea
acttatattatcttctttaataatttcgactcttttatgggctgatcttggaaatagatatatttgggttgtattaggagtaaccataggtttttcaataattggtttttttgatgattatttaaaaattaaaaataaaagccccgatggactatcttcaaaacaaaagattttttttcaatccataattgcccttatatcaataacatatctatattactcagctgagattattcctgaacagtcttttattgttcctttttttaaagatttaataatacccatgtctccctttgtttttatttttattggagtgtttgtattagttggctcttcgaatgctgtcaatttgactgatggactggacggtcttgcaattcttccctcagtcttgattggaggagcacttggcttaattgcttatgctatggggaaccaaaatatagcagattatttgtatctaccgcatcttccattatctggtgagttaatagtgttctgtggggcactaattggatcaggtattggttttctatggtataacacatatccagctcaagtattcatgggagatattgggtcactaagtctcggagctatattaggaataatcgcaattattttaagacacgaattagtttttgcaattatggctggagtattcgtaatggagacactaagtgtagcaattcaagtaatttcttttaaaacaagaggtaagagagtttttttaatggcaccaattcatcatcattttgaacttaagggctgggctgagcctaagattattgttagattttggataatcacacttgttttaattctaattgcattatcaacattaaagttaaggtaa

SEQ ID NO: 258005 - DNA, 368 bp, Unknown
  Bacterial polypeptide expressing nucleotide sequence isolated from the Sargasso Sea
tagcagttttgtgtgctgcattattggatctgccttaggatttttatggtataacgcacctcctgctatggtttttatgggagatacaggatcacttgcattaggaggagcaattggatctattagtatattaataaagcaagagctcgttttggcaatcgttggtggaatatttgttgctgaggcagtttcagtcattcttcaagtaggttcgtataaacttactggaaaaaggatttttaagatggctcctctacatcatcattttgaacaaaagggcgttccagagtctcaaatcgttattcgcttttggattgtagcagtcattctagctctaataggattagcaactttaaaaatacgctaaa

SEQ ID NO: 258006 - DNA, 409 bp, Unknown
  Bacterial polypeptide expressing nucleotide sequence isolated from the Sargasso Sea
aaattatttacatattccctacatagaaggaactggtgaagtatcaattttttgtggtgcaattattggctcttgtttaggtttcttatggtttaatgctcctcctgctaaaatttttatgggtgacacaggctcattatctcttggaggatctttaggtgcagtaggaattatcacaaagcatgaaattgttttagcaattactggtggactttttgtactagaggcagtttcggtaatggttcaggtgatttcgtttaaacttactggtaaaagaatttttagaatggcacctattcatcatcattttgagaaaaagggatggccagagtctacagttgtaattaggttttggattatctctatcatactagcaatgattggtttagctactttaaaattaagataa

SEQ ID NO: 258007 - DNA, 798 bp, Unknown
  Bacterial polypeptide expressing nucleotide sequence isolated from the Sargasso Sea
atattggggtagtcttaggtgtaacaattggctttgctttaattggtttttttgatgattatctaaaaataagaaaaaaaagctcagatgggttaacttcaatacaaaagattatttttcaatcaataattgcattaatatcaatgacgtatctatattattcagcagaaataatgcctgagacttcatttatcgttcctttttttaaagatttaatattaccaatgtcgccattcatttttatttttactggcatgtttgtattaataggatcgtctaatgcggtcaatttgactgatgggttggatgggcttgctatccttccaacagttttaattggcggcgcgttaggattaattgcttatgctatgggtaatcaacttatcgctgactatttatatctacctcatcttcctctatccggagagttaatagttttttgtggtgctttaattggatcaggaataggttttctatggtacaacacctatccagctcaagtttttatgggtgatattggttccttaactcttggagctattctagggataattgcaataatattgcgacatgaattggtcttcgctattatggctggcgtttttgttgtagaaactcttagtgtggcgattcaggtaatttcatacaagacaagaggcaaaagagtatttttgatggccccaattcaccatcattatgaattaaaaggctgggcagagcctaaaataatagtaagattctggatagtaactttagttttaattttaattgcgttggtaactctaaagcttagataac

SEQ ID NO: 258008 - DNA, 550 bp, Unknown
  Bacterial polypeptide expressing nucleotide sequence isolated from the Sargasso Sea
gatgcactggaccatctccaacatcctaacgttacttcgcgtggcgttgatcccggttatcgtcgccctctacctgggcggggcgtcgggctatctgaccgcaggagtctttctgctggctggactgacagactgggcagatgggttcttggcacgccagcgcaatgaagaatcgccctttggcgcgtttctggaccccgttgctgacaaattgatggtctcggcggtattggtcctaatggcggcagatccgcagatgcgggagcacgtgttcagcccaggcctgtttacggtcatcgttgctatcatcattggacgtgaaattacaatctcggcattgcgcgagtggatggccgaattgggaaggcgcggcgtggtagccgtgggatggattggcaaggtcaaaacaacgcttcagttcgttgcgatcactgtgctgttgtttgcccaagctgggatgcacaaagaaacgctaatccttggtgaactccttttgttcgttgccggcgccttaacgctctggtcgatggttatctatttgcgcggcgct

SEQ ID NO: 258009 - DNA, 556 bp, Unknown
  Bacterial polypeptide expressing nucleotide sequence isolated from the Sargasso Sea
atgacaaatattcctaatctgctgacgttttttcggatcttgctcatccccgtcttcgtcatcctgttctaccttccctatcagtggtcctatctggcggcggccatcgtcttcatcctggcggcggcgactgactggtttgacggctaccttgcccgcaagctgaaccagtccactgccttcggcgccttccttgatccggtggccgacaagatcatggtggcggcggcgctggtagtgatcgtcgagcactacaacaccatctgggtgaccattcctgccatgaccatgattggccgcgagatcatcatctccgccctgcgtgaatggatggccgagctgggcaagcgctcctcggtggcggtcagctggattggcaagtggaagaccatgatccagatggtgtcgctcaccggtctcatctggcagtacgacatctggatggtgtggctggcctatgtgctgctctatgtggccaccgtgctcaccttctggtccatgttccagtacatgaaggccgcctggggcgatctgacctaccactcccgcttctagt

SEQ ID NO: 258010 - DNA, 568 bp, Unknown
  Bacterial polypeptide expressing nucleotide sequence isolated from the Sargasso Sea
aatggctaatttggcaaatttattaacactattgcgtgttctcctaataccaatgatggtattgactttctatatgcctttcgtgtgggcccatattctggcggctgggttttttgcgatagcagcagttactgattggttagatggcctggtggccaggcggatgcatattgagtcgccttttggtgcttttttagaccccgtagcggataaaatgattgtggcggtggctttaatattggtcgctactgagcatggtggcgccttgttgggcatacctgctgcggtgatcattgggcgtgaaattttcatttctgcattgcgtgagtggatggcagaattgggcaagcgcgccagcattgcggtgtccatgctgggcaaacttaaaacagcattgcaaatggtggcattattgctgctcttaatctatacacccggttttttctcttctaaaataattcttcatgttggtttcatatgtctatatttatcaatgtttttaacgctatggtctatggttgtttatattcgtttggcatggccggacttgacaatagatcataaataa

SEQ ID NO: 258011 - DNA, 574 bp, Unknown
  Bacterial polypeptide expressing nucleotide sequence isolated from the Sargasso Sea
gatgcgctggaccatttccaacatcctaacgttacttcgcgttgctctgatcccggttattgttgctgtttacctgggaggggcgtcgggctatctcaccgcaggagtcttcctgcttgctgggctgacagactgggcagatggttttttagcgcgacaacgaaacgaagaatcgccctttggcgcttttttggaccctgttgcagacaaactgatggtctcagcggtattggttctgatggcggcagatccgcatatgcgtgaccacgtgttcagccccgcgctatttacagtcatcgttaccatcatcattggccgggaaattacgatctcggcattgcgcgagtggatggccgaattgggaagacgtggtgtggttgctgtcggctggattggtaaagtaaaaacaacactgcagtttgttgcgatcactgtcctgctttttgcgcaagccgggatgcaaaaagaaatgctcatcctcggtgaaatcctcttgtatgtggcgggcgccctaacgctctggtcgatggtgatctatttgcgcggcgcatggccgtcactctcggaagagtag

SEQ ID NO: 258012 - DNA, 550 bp, Unknown
  Bacterial polypeptide expressing nucleotide sequence isolated from the Sargasso Sea
atgccgtttaacttacctatagcattaaccctttttaggctttttttactgcccatcttcgtggtgctcttttatctgccttacagttggactcccttcgtggctgcttttgtgttttggcttgccgccattaccgatgccttggatggctatgccgcccgtaaactcaagcaactcacgcgttttggggcttttctcgatcccgttgccgataaacttatggtgatcaccgcgctggtgttactggtggagcaatatgccgatatttggttaacgctgccggcactgtttatgattggtcgcgaaattgtgatttcagccctgcgtgaatggatggctgaattaggtaaacgcgggacggttgcggtttcttggatcggcaaatataaaacggcggcgcagatggtggcgattattggcctgatctggcaatacaacccactcatgatcaccgcggcatttgtgctgttatatatcgctgccgtgttaaccttctggtcaatgatgagctacattttagccgcttggaaagatttaacggccgaatagc

SEQ ID NO: 258013 - DNA, 442 bp, Unknown
  Bacterial polypeptide expressing nucleotide sequence isolated from the Sargasso Sea
tgccgtgaccgactggcttgatggttatctggcccgtcgctgggagcagggcacgcccttcggtgctttcctcgatccggtagcggataaattgatggtggcggtggcattggtgctgctggttgccgagcacgccaatctctggctgaccctggccgcggcaaccatcatcggccgcgagatcgtcgtgtctgcgttgcgtgagtggatggccgaactcggtgcgcgtgcacacgttgcggtatccaatctcgctaaatggaaaaccgcagcgcagatgctggcgttggtcattctgttgggcaatccgccggtctttaccttctgggttgtgctcggatacatccttctggtggtcgcagccgtgctgacattgtggtcgatgctgcagtacctgttggccgcctggccgcacctcagcaccacctctgataagaaataa

SEQ ID NO: 258014 - DNA, 266 bp, Unknown
  Bacterial polypeptide expressing nucleotide sequence isolated from the Sargasso Sea
gatgattatcgggctgggatcagatctttgtaatatcgaacggattcaaaactctctcgaccgatatggcgagcgtttcgaaaaccgcgttttcacagaagtcgaacgcgcaaaggcccgccgccgcccgtacactattgctggaacctatgcgaaacgctttgccgcgaaagaagcattcagcaaggctgtggggaccggtttcaagcgcggtgtttacatgaaagacatcggcgtcgtgaatgccccatcaggcgcccccaccc

SEQ ID NO: 258015 - DNA, 308 bp, Unknown
  Bacterial polypeptide expressing nucleotide sequence isolated from the Sargasso Sea
tatgaaaattcttggaattggtatcgacatcattgataacaataggatcaaggaatccattaagaacaataaatttaaaagtcgaatttatagtagtaatgaacttaaattatcaaaaaaaaccaaaaataaagtagcttttttttcgaagagatttgcagctaaagaagctttttctaaagcattagggactggattttcttccaatttaagctttaaagacattgaaatcacaaatgataaaaaaggtatgcctaaatatgttgataataaaaaaattataaaaattgtgcaaaaaaaatataaaa

SEQ ID NO: 258016 - DNA, 388 bp, Unknown
  Bacterial polypeptide expressing nucleotide sequence isolated from the Sargasso Sea
atgtcaattattggtattggagtagatattgtaaaaaataatagattgaaaaaattaataaaaaataagctttttttaaagagaatatttacataccaggaacaaaaatcatcatctacactgaaaaataaacttaattattactcaaaaagatttgcagcaaaagaagcgttttctaaagctacaggcctaggcatttcaaaaaatcttcattttaaaaatattgaaataaaaaatgataaaaaaggacgaccttcaattagccttaatccagttacaagcaaatacttaaaaaaaaaatttaaagttaaatcatttaaaacgaatctatcaatatctgatgaaaagaattattctgtagcttacgtaataatagaaaaattatgat

SEQ ID NO: 258017 - DNA, 325 bp, Unknown
  Bacterial polypeptide expressing nucleotide sequence isolated from the Sargasso Sea
atgatttatacaggaattgatattatcgaaatagacagaattgtaagagtaaaaaacatatataaagaaagatttttaaaaaaaatttatactctcaatgaaataaaatactgtcgaaatcgtggaccccaactagcaagtagatttgctgctaaagaagcaatgatgaaaaccttaggaactggaataagaggaatcccttggaaatcaattgaagtagtcagaaagagaggacaagctccaaaaatattactccatggacctgccaaatctaaagcaaacgaactgaagattaaatatattgctctagagtttatctcattca

SEQ ID NO: 258018 - DNA, 388 bp, Unknown
  Bacterial polypeptide expressing nucleotide sequence isolated from the Sargasso Sea
atgaaaattcttggaattggtgttgatattgttgaaaataaacgaattcaaaaatcgattaaaaatcctttatttaaaaaaagaatttactcatttaaagaattgaaactatctaatgctgtaaacaataaagtagcttatttttcaaagcgatttgcggctaaagaagctttttctaaagctcttggcacaggttttcgtatgaatttaaattttaaagatatagaagttgttaatgataaaatgggaaagccttattatgttaaaaataaaaaaattacaaaaatcatacaaaaaaattttaaaatcaaaaattttaaatgttttttatcaatttcggatgaaaaaaattactcaactgcatttgcaattattcaaacatcatgaa

SEQ ID NO: 258019 - DNA, 205 bp, Unknown
  Bacterial polypeptide expressing nucleotide sequence isolated from the Sargasso Sea
atgaagttatttggaattgggacagacattatcaaaacaagcagaattaaaagcgctatacgaaaaaaaaaatttttatcaaaaatatttgataaacaagaaattgcaaaatgtaagaaaagtttaaattcatcaaactgttttgctaaaagatttgcagccaaagaagccttttcaaaagctatgggcacgggaatcacaaaag

SEQ ID NO: 258020 - DNA, 388 bp, Unknown
  Bacterial polypeptide expressing nucleotide sequence isolated from the Sargasso Sea
tatgaaaattcttgggattggggtcgacatcattgaaaacaaaagaatcaaagagtcaattaagaacaataaatttaaaaaacgaatttatagcattaatgaactcaaattatcaaaaaaaactaaaaataaagtagcttttttttcgaagagatttgcggccaaagaagctttttctaaagcattagggactggcttttcatcaaatttaaactttaaagacattgaaattacaaatgataaaaaaggtatgcctaaatatgttgataataaaaaaattataaaaattgtgcaaaaaaaatataaaattaaaaagtttaattcttttctgtcaatttcagatgaaaaagattattcaacagcctttgcaataattcaatccatatga

SEQ ID NO: 258021 - DNA, 308 bp, Unknown
  Bacterial polypeptide expressing nucleotide sequence isolated from the Sargasso Sea
aatgaaaattcatggaattggaatagatatagttaaaatttcaagaataaatcaatctatcaataataagaagtttcttaaaagaatatttaacaaagacgaaataagaaaatgtgataaacagattaacaaaaaaaattgttatgctaaaagatttgctgcaaaagaagccttttcaaaagcactaggattgggtatttcaaagggaataagttttaacgaaattatcgtgtttaatatcaaatctggtaaaccaagtattagattgttaggtaccacaaagaaaatagttcataaaattataaaga

SEQ ID NO: 258022 - DNA, 388 bp, Unknown
  Bacterial polypeptide expressing nucleotide sequence isolated from the Sargasso Sea
aatgaaaacattaggcattggtgtagatataattgataattcaagaattaaaaaatcaattagtaataaaaaattcttaaatagaattttttcatatagtgaaataaaattttctaaaaaaataaataataaaactaactacttttccaaaaggtttgcagcaaaggaggctttttctaaagctttaggcacaggttttagaaaaggtttaaattttaatgacatttcgataattaatgatcgatatggtaaacctaaaattaaaattaacaaaaaacttaataatattataaaaaataaatttaaaactcataaagttaatgtacatttatcaatctctgacgaaaaaaaacattccgtagcctttgtaatattggataaaaaatga

SEQ ID NO: 258023 - DNA, 361 bp, Unknown
  Bacterial polypeptide expressing nucleotide sequence isolated from the Sargasso Sea
atgaaaatttttggaatcggtacggacattgtaaaaacaagtagattaaaaaaattaataaaaaagaaatcctctattacaagattatttaataaaacagaaatttctaagtgtaaacgaattaagcactctcaaaactgttttgcgaaaagatacgcagccaaagaagccttttcaaaagctttgggtactggaatttctaaaggtataaattttaatgaaatagttgtttacaatgaaaaaaatggaaaaccttacataaaattattaggtgagacaaaaaagaaagttgaggataaaattaaaaaaaaagaatacaaaatttctttatcattatcagatgaggaaaaatatgctgttg

SEQ ID NO: 258024 - DNA, 244 bp, Unknown
  Bacterial polypeptide expressing nucleotide sequence isolated from the Sargasso Sea
gttttgcaagagatttgccgcaaaagaagcttttgctaaagctttaggaacaggtatagcaaaaggaattaactttaatgaaattataattcttaatgaaaaaaatggaaaaccgtttattaaattaataaataaaactaaaaaaaatgttgaaaagaagttaagaaaaaaaaaatttaaaatttctttatcactaactgatgaagataattatgcggttgcttttgttacactttcattatga

SEQ ID NO: 258025 - DNA, 409 bp, Unknown
  Bacterial polypeptide expressing nucleotide sequence isolated from the Sargasso Sea
atgatctacggcatcggtaccgacatctgcgacgtgcgccgcatcgcggccagcctggcccgccatggcgaccgttttgcagaaaaggtgctggccgatggcgaactggccacctggcgcgaacgcagcgcgcgctggcctgaccggggcttgcgctacctggccacccgcttctccgccaaggaggccttcagcaaggcgattggcctgggcatgcgcatgcccatgacctggcgccattgcgaggtcgccaagctgcgcagcggccaacctgtcatcgtgctgcacggcgcgctcaaggaatggtttgaggcccagggcctacaggcgcacctgagcgtgaccgacgagaccgactacgccgccagcttctgtgtggtggagaaaattcaaaccaaatcgccttgaa

SEQ ID NO: 258026 - DNA, 311 bp, Unknown
  Bacterial polypeptide expressing nucleotide sequence isolated from the Sargasso Sea
aatgaaaacattgggtataggagttgatattattaagaataaaagaattcgattattacttaataataaaacatttgtaaatagaacatttagtaaaaatgaaattagattttcaaataaaattaaaaaaaaagtcaactattttgcaaaaagatttgctgcaaaagaatctttggttaagtcacttggtactggttttagatataatataagtctaaaagatattgaaattttaaatgatgagttaggtaaaccatattttttaaaatcaaaaaaaattgatgatatcattgcaaaaaaatttaagataa

SEQ ID NO: 258027 - DNA, 333 bp, Unknown
  Bacterial polypeptide expressing nucleotide sequence isolated from the Sargasso Sea
gatgactcttgtacacggaatagacataattgaaatagataggattagaaaagtagccaatcagtatggccgtcgtttctataatcggatctattcaaaatttgagatcgattattgcaaaggtaatccttcaaaactggcaacaaggtttgccgctaaagaagcggtgatgaaagctttgggtacaggtgttagaggtgtttcctggaaagaaattgaaattgtacgtcagccgggtaaagccccacaggtgtgtcttcacggtcgcgcaaaaaaacgtgctaaggccttgggtatagatgagatggccatatcgttgtctcattctgataa

SEQ ID NO: 258028 - DNA, 388 bp, Unknown
  Bacterial polypeptide expressing nucleotide sequence isolated from the Sargasso Sea
atgaaaattcttggtattggtgttgatattgttgaaaataaaagaattcaaaaatcgattaaaaatcctttatttaaaaaaagaatttattcatttaaagaattaaaacagtctaatgctgtaagtaataaagtagcttttttttcaaaaagatttgctgcaaaagaagcattttctaaagcccttggcactggttttcgtatgaatttaaattttaaagatatagaagttgtaaatgacaaaatgggaaagccttattatgttaaaaataaaaaaattacaaaaatcgttcaaaagaactttaaaatcaaaaattttaaattttttctatcaatttcggatgaaaaaaattattcaacagcatttgcaattattcaagtaacatgaa

SEQ ID NO: 258029 - DNA, 388 bp, Unknown
  Bacterial polypeptide expressing nucleotide sequence isolated from the Sargasso Sea
atgaaaattcttggaattggtgttgatattgttgaaaataaaagaattcaaaaatcgattaaaaatcctttatttaaaaaaagaatttactcatctaaagaattgaaacaatctaatgctgcaaacaataaagtagcttatttttcgaagagatttgctgcaaaagaagctttttccaaagcccttggcacaggttttcgtatgaatttaaattttaaagatatagaagttgttaatgataaaacgggaaagcctcattatgttaaaaataaaaaaattacaaaaatcattcaaaagacttttaaaattaaaaattttaaatgttttttatcaatctcagatgaaaaaaaatattcaacagcatttgcaattatccaaacattatgaa

SEQ ID NO: 258030 - DNA, 242 bp, Unknown
  Bacterial polypeptide expressing nucleotide sequence isolated from the Sargasso Sea
aaagagatttgctgcaaaagaagcattttctaaagctcttggcacaggttttagtatgaatttaaattttaaagatatagaagttgttaatgacaaaaagggaaagccttattacgttaaaaataaaaaaattacaaaaatcgtacaaaagaactttaaaatcaaaaattttaaatgttttttatcaatttcggatgaaaaaaattattcaacagcgtttgcaatcattcaaacatcatgaa

SEQ ID NO: 258031 - DNA, 379 bp, Unknown
  Bacterial polypeptide expressing nucleotide sequence isolated from the Sargasso Sea
atgatctttggaattggaacagacattgttgaaattaacagagtaaaaaaaatgaattctattgaaaaatttgctcaaaagattttggggaatcaagagatggatatattcgaatcaattgatgacgaaaagaagatatattttctttcaaagcagtttgcagccaaggaagccttttcaaaagcacttggtaccgggattaataaaagtctaagtttcaaagatattgaattacttagagatgagaagggcaaacctttctttaactttaattcttcttcctctgcacttctttcaagttttggtatagttggaacacatgttagtctttctgatgaaaaagataatgctattgcatttgtaatattagaaaaatgaa

SEQ ID NO: 258032 - DNA, 283 bp, Unknown
  Bacterial polypeptide expressing nucleotide sequence isolated from the Sargasso Sea
gttatttagtgaaaataatttagattcagagaaggtaatattaaaaattgcaggtagatttgcagctaaagaagcagcttcaaaagccctaggaactggatttaaaaatggtattaaattttcagacttcgaaatctttaatgatgaaaaaggaagaccttttataaatttttgcggtaaagcaagagaaactcttgataaaaatttaaaaattaaaccatttttaacaattagtaatgaacgaatttacgcagttgctctggtcacttttataagcttttaa

SEQ ID NO: 258033 - DNA, 397 bp, Unknown
  Bacterial polypeptide expressing nucleotide sequence isolated from the Sargasso Sea
atgaatatttttggtataggaacagatatagttaatacaaaaagaattgaaaaatctataaaaatgtatggcaataaatttaaaaataaaatatttactaaaaaagaaatacgatactgcgaaaacaaaaaaaatcctgctcctttttatgcaaaaagatttgctgctaaagaagcttttacaaaagctttaggaacaggattcagaaaaaatataacttttaaaaatatagaaatttctaatgataaatatggtaaaccttttattacattagatagttctgttaatatttttcttaaaaaaaaaattaaaaagaagaaatactttattcatttatcactatctgatgatcgcccttgggcacacgcaactgtaataatctcttatttgaaatgaa

SEQ ID NO: 258034 - DNA, 367 bp, Unknown
  Bacterial polypeptide expressing nucleotide sequence isolated from the Sargasso Sea
tttgggtactgatatcgtaaatattaaaagaatagaaaaaattttatcaaaatataagaaaaaattcatagataaaattcttcattcagaggaaaaaaaacaaaaaaatataacagctaattttttatctaaaaaatttgcagcaaaagaagcattttccaaggcattaggcactggtattggtggtgtaataaattttaatgaaattataatttacaataaatctagtggtgcaccagacattaaaattgataaaaaggctcaaaaaagagtcttaaaaaaattaaaagtaagcaaagctaaattttttatatctatttctgatgattatccttttgctttggctacagttattatatcgaaataa

SEQ ID NO: 258035 - DNA, 367 bp, Unknown
  Bacterial polypeptide expressing nucleotide sequence isolated from the Sargasso Sea
tatgattggcaatggaatagatattatcgaaattgacagaattcaagaagcttgtctcaaatggggtgacaggtttcttaatcgtatctatactcaacaagaacagaattattgccgagggcgtttcccacaattagcagctagatttgctgccaaggaagcaatgatgaagtcattgggtactggcaaacgtggacttttatgggttgaaattgaagtggttcgcgaacgaggtagagctcctaccatagtattacatggtaatgcgttatctattgctgaaaatcaaaacatcaaagaaatacaattaacaatttctcattctagaaattatgcggtagcttcaacacttgctataaaatattag

SEQ ID NO: 258036 - DNA, 388 bp, Unknown
  Bacterial polypeptide expressing nucleotide sequence isolated from the Sargasso Sea
atgaaaaaattaggtataggtgttgatataattaataactcacgaattaaaaattcaattacaaataaaaaatttctgtctagaattttttctaatatcgaaattactaattcaaaaaaaactagtaacaaaactggctatttttctaaaagatttgcagcaaaagaagcattttcaaaagctcttggaacaggatttaggaaaggattaaattttaatgatatttctatcgttaatgataaacatggaaaaccatttattatagttaataataaacttaaaaatattataaataaaagatttaaaacaaaaaaaataaatgtattcttatcaatttccgacgaaaaaaatcattcaattgcatttgttgttctagaaaaaaaatgaa

SEQ ID NO: 258037 - DNA, 388 bp, Unknown
  Bacterial polypeptide expressing nucleotide sequence isolated from the Sargasso Sea
atgaaaattcttggtattggtgttgatattgttgaaaacaaaagaattcaaaaatcgattaaaaatcctttatttaaaaaaagaatttattcatttaaagaattgaaacattctaatgctgcaaacaataaagtagcttttttttcgaagagatttgctgcaaaagaagcattttctaaagctcttggtacaggtttttgtatgaatttaaattttaaagatatagaagttgttaatgacaaaaagggaaagccttattacgttaaaaataaaaaaattacaaaaattgtacaaaagaactttaaaatcaaaaattttaaatgttttttatcaatttcggatgaaaaaaattattctactgcatttgcaattattcagacatcatgaa

SEQ ID NO: 258038 - DNA, 430 bp, Unknown
  Bacterial polypeptide expressing nucleotide sequence isolated from the Sargasso Sea
gatgattattgggattggcaatgacctaattgatattagtcgtgttgaacgtgtcctcgatcgtttcggagatcgctttgtgaggcgggtttatactaatgtcgaacgtgcaaaatccgagcgacgtgctaatagggtagaaagttacgctaaacggtttgcggcgaaagaagcatgctcaaaagcattggggacaggtattcgtatgggcgtattttggcgtgatatggccgttacaaatctcaacagcggtaaaccgaccctttcgcttactggcggcgcagcaaaacgcctggacgagattacgccaaggggtatgataccacaaattgacattagtatgactgatgaaccacctcttgctcaggctattgttatcatttcggctttgccaaaaaattctgagaacagaagtataactgtagattga

SEQ ID NO: 258039 - DNA, 388 bp, Unknown
  Bacterial polypeptide expressing nucleotide sequence isolated from the Sargasso Sea
atgaacatatttggaattggcacagacatagttaatattaaaagaattaaaagtttacttaaaaaaaacaagaattttaaaaaaagaatatttactaaatttgaaaccaaaatatgtgaaaatagagctaacaaaattaattgttttgccaaaagatttgctgccaaagaagctttgtttaaagcactgggtattcataataaacttagttttcttgatgttgagattaaaaataacatatcaggacttcctaattttaaaataaaaggtaattctttaaaaaatttaaagaaaatcttcaaaaatagaaagtttaaaatccatttatctctttcggatgatgaaccatgggccgtcgcttcagtcattatatttttatataaataat

SEQ ID NO: 258040 - DNA, 331 bp, Unknown
  Bacterial polypeptide expressing nucleotide sequence isolated from the Sargasso Sea
tttttctaggtatggcaaaaagtttgcttataaaatattgaatacgcaagaaatgaatgattttttaaattcaaaacacaaaactgcctttttagcaaaaagatttgcagcaaaagaggctataggtaaagcgattggtcgaggaattttaaatggaactttacttaagtatatttgtattgcaaatgacaaaaatggtaaaccatttgtaaagtcaataaataaaaaaataattaacgaaaacgagtttgatttttttctatcattatctgatgaaattgaatatgcacacgcaagtgtaataatagcgaggaaaagaagtgttgtataa

SEQ ID NO: 258041 - DNA, 386 bp, Unknown
  Bacterial polypeptide expressing nucleotide sequence isolated from the Sargasso Sea
gaaaacattaggtattggtgttgatattatcgaaaactcaagaattaaaaaatcaattaaaaataaaaaatttttaaatagaattttttcttttaatgaacttaaatttttaaaaaaaaaaactaataaggttaattttatttctaaaagatttgcagctaaagaagctttttctaaagctttaggcactggttttagaaagggcttaaattttaatgatatttcaattataaatgatagttatggaaagcctaaaattaaaattaataaaaaaataaataatattattaaaaaaaagtttaaaactactaaagttaatatacatttatcaatttctgatgaaaaaaaacattcaatcgcatttgtaatattagataaaaaatgaa

SEQ ID NO: 258042 - DNA, 355 bp, Unknown
  Bacterial polypeptide expressing nucleotide sequence isolated from the Sargasso Sea
aatataaaaagaattaaagacgctattaataaaaataaaaattttaaaaaaaggatttttacctcttttgaaattagcgcatgcgaaaaaagagttaataagattaattgttttgctaaaagattcgctgctaaagaagcactatttaaagctgttggtattcccaacaaacttcagtttaatgatgttgaaattaaaaataatcgttcaggtcttccaaacttctatataaaaggcagttcattaaaaaatttaaaaaaaatatttaaaaataaaagatttaaaattcatttatcactttccgatgatgaaccatgggctgttgcaactgctataatatttaccaataaatgaa

SEQ ID NO: 258043 - DNA, 388 bp, Unknown
  Bacterial polypeptide expressing nucleotide sequence isolated from the Sargasso Sea
aatgctcgtaacaggcatagatatcattgagatagaccgaatcaaattagtcttcgataaatatggtgacagattcttaaatcggatttatacggtcaaagaacgtgaatattgcagaggcagagcctctcaattggcaagtagattcgcagcaaaagaagccactatgaaagcattgggaactggagttagaggggtagggtggaaagatattgaaattttgagacaaaagggaatggccccctatataaaacttcatggtcgtgcaatacaacgtgcagaaaaaatgggtttatcagatctagctttatcattatcacattcaaaagaattcgccattgcatctgttattggagacagtcaaaaagggaatttgatccctagataa

SEQ ID NO: 258044 - DNA, 388 bp, Unknown
  Bacterial polypeptide expressing nucleotide sequence isolated from the Sargasso Sea
aatgaaaattctaggtattggtgttgatattgtagaaaataaaagaattcaaaaatcgattaaaaatcctttatttaaaaaaagaatttactcatttaaagaattaaaacaatctaatacagtaaataataaagtagcttatttttcgaagagatttgctgcaaaagaagcattttctaaagcacttggcacaggttttcgtataaatttaaattttaaagatatagaagttgttaatgacaaaatgggaaagccttattatgttaaaaataaaaaaattacaaaaatcattcaaaagaactttaaaatcaaaaaatttaaattttttttatcaatttcggatgaaaaaaactattcaacagcatttgcaattattcaaagatcatga

SEQ ID NO: 258045 - DNA, 391 bp, Unknown
  Bacterial polypeptide expressing nucleotide sequence isolated from the Sargasso Sea
aatgagaatatttggaataggcacagatatagttaacgttaaaagaatggaaaaatcttttagaaaaaacaaatcatttaaaaaaaggattttttctcaaaaagaaattacctattgtgataaaaaaaagaatccttattcattttatgccaaaagatttgcagcgaaagaggctttgagtaaagctttagggacaggtattagaaaaggaataaattttaaagatattgaaatatataatgatattttgggtaaaccatcaattaaattaaaaggtacaacagcaaattttcttaaaaaaaaaataaaaactaaaaaatattcaatatatttatctttatcagatgatttaccttgggcaaatgctacagtaataatatcttacaattaa

SEQ ID NO: 258046 - DNA, 388 bp, Unknown
  Bacterial polypeptide expressing nucleotide sequence isolated from the Sargasso Sea
atgaaaattcttggtattggtgttgatattgttgaaaataaaagaattcaaaaatcgattaaaaatcctttatttaaaaaaagaatttactcatataaagaattgaaacaatctaatgttgtaaacaataaagtagcttatttttcgaagagatttgctgcaaaagaagcattttctaaagctcttggcacaggttttcgtatgaatttaaattttaaagatatagaagttgttaatgataaaatgggaaagccttattatgttaaaaataaaaaaattactaaaatcatacaaaaaaattttaaaatcaaaaattttaaatgttttctatcaatttcggatgaaaaaaattactcaactgcatttgcaattattcaaacatcatgaa

SEQ ID NO: 258047 - DNA, 260 bp, Unknown
  Bacterial polypeptide expressing nucleotide sequence isolated from the Sargasso Sea
gaacttttctaattgttttgcaaaaaaatttgccgcaaaagaggccttttccaaagcactaggtactggtatttcacaaggaattaattttaatgaaattattattttaaataaaaaaaatggtaaaccgtttataaaattaattaataaaacgaaaaaaattgttgaaaaaaaattgattaaaaaaaaatatactatttcattatctttgtccgatgaagataattatgcagtagcttttgttacaatatctttatgaa

SEQ ID NO: 258048 - DNA, 219 bp, Unknown
  Bacterial polypeptide expressing nucleotide sequence isolated from the Sargasso Sea
aatgaaaattcttggtattggtgtagatattgttgataataaaagaattcaaaagtctattaaaaatcctttatttaaaaaaagaatttatacatttaaagaattaaaacaatcctatactgtgaataataaagtaggttatttttcaaagagatttgctgcaaaagaagcattttctaaagctctcggaataggttttcgtatgaatttaatttttaa

SEQ ID NO: 258049 - DNA, 388 bp, Unknown
  Bacterial polypeptide expressing nucleotide sequence isolated from the Sargasso Sea
atgaaaattcttggaattggtgttgatattgtagaaaataaaagaattcaaaaatcgattaaaaaccctttatttaaaaaaagaatttactcatttaaagaattgaaacaatctaatgcagtaaataataaagtagcttatttttcaaagagatttgctgcaaaagaagctttttctaaagctcttggcacaggttttcgtataaatttaaattttaaagatatagaagttgttaatgacaaaatgggaaagccttattatgttaaaaataaaaaaattacaaaaatcattcaaaagaactttaaaatcaaaaattttaaatgttttctatcaatttcggatgaaaaaaattattcaacagcatttgcaattatccaatcatcatgaa

SEQ ID NO: 258050 - DNA, 235 bp, Unknown
  Bacterial polypeptide expressing nucleotide sequence isolated from the Sargasso Sea
tctggcaaaacaatttgctgcaaaagaggctgtttcaaaagcattaggtactggtattggcaaggatataagatttaatcagattgaaatattaaggaattcagatggaaagccatatcttaatcatgatggcataattacaacaattttaaacgatttgggaatcactaaaacacatgttagtctttcagatgaaaaaaaatatgttcttgcttttgtagtacttgaaatatga

SEQ ID NO: 258051 - DNA, 391 bp, Unknown
  Bacterial polypeptide expressing nucleotide sequence isolated from the Sargasso Sea
atgtcaataattggaattggtgtagatattataaacaataatagattgaaaaagttaataaaaaataaaacttttattaagaaaatatttactaattatgagcaaaaaaaatctaaaactttaaaaaataaattaagttatttctcaaagagatttgccgcaaaagaagcgttctcaaaagctacaggcttaggtatatctaaaaatttgcattttaaaaatattgaagttaaaaaaaataataaaggtcagccatcaattaatataaataaatttaccaaaaattatctaaaaaataaatttaaagttagatctttcaaaactaatttatctctttctgatgaaaagaattactcaatagcttatgttgtaattgaaaaaaatgattaaa

SEQ ID NO: 258052 - DNA, 361 bp, Unknown
  Bacterial polypeptide expressing nucleotide sequence isolated from the Sargasso Sea
atgcatataggaatagacattattgaaatcgatagaattgcatctgttcttggcaagtatcctgttagattcctggaaaagattttcactgagtacgaaaaaaattattgtaggggaaggccagcacaacttgctgcaagatttgcatctaaagaggcaggaatgaaggctcttggaacaggaatacgtggtgttggctggagagagatagaagttcaaaggcataaaagcggaaaaccatacttaattctacatggaagagctaaaaaaagagctgagaaacttaatataaaatctattgaattaagtataagtcattcaaaaaatttagctactgctatagttcatatgacatcatgat

SEQ ID NO: 258053 - DNA, 388 bp, Unknown
  Bacterial polypeptide expressing nucleotide sequence isolated from the Sargasso Sea
atgaaaattttgggaattggggtcgacataattgaaaataataggatcaaaaaatcaattcaaaataataaatttaaaacccgcgtttatagtagcaatgaactcaaactatctaaaaatgttaaaaataaagttgcttatttttctaaaagattcgctgcaaaggaagctttttctaaagcgttaggaactggattttctgaaaatttaaactttaaagatattgagattgtaagtgataaaaaaggaaagcctaaatatgctaaaaataaaaaaattataaaaattgttcaaaaaaagtataaaattaaaaaatttaattcttttttgtcaatttctgatgagaaagattattcaacagcttttgcaattattcaatcagtatgaa

SEQ ID NO: 258054 - DNA, 400 bp, Unknown
  Bacterial polypeptide expressing nucleotide sequence isolated from the Sargasso Sea
atgattggaatagggtcagatttgttagatataagaagaatagagaaaactatctctaaatttggtgatcgatttaaaaataaaatatttactaaaaatgaaattcataaatgtgaaaaaagattaaataagattgaatgttatgcaaagcgatttgctgcaaaagaagctgcatcgaaggcacttggaaccggatttagaaaaggtgtattttggaaagatttagaagtagtaaatctaccatctggcaagccaacaataaaatttcatggaaattcattgaatcatttaaattcattattaccgccagaaagcgatcctagtatcaatcttacaataacggatgagtatccttatgcacaagctttagtaattatctcatctgaaaaaaataaataat

SEQ ID NO: 258055 - DNA, 376 bp, Unknown
  Bacterial polypeptide expressing nucleotide sequence isolated from the Sargasso Sea
catgccaatcatctgcaccggaatagatataatcgaaattgatagaatccaaaatgtgttgtcacgatatggaaatagatttctgaataaaatattcactcccgatgaaatacaatactgtagagggcgttccccaaatttagcaggaagatttgctgctaaagaagccacaatgaaagcactgaagaccggagcacgaggcgtatcatggaaggacatcgaagtaataagggcgtcaaatggtgcaccttcgattaagctatataatcgggccctagctaggtcagaatcattgggtgtaagcagcctctctataagtttttcccactcacgtgactatgcagtagcatcagtgatagcatcttcgaaagaataa

SEQ ID NO: 258056 - DNA, 346 bp, Unknown
  Bacterial polypeptide expressing nucleotide sequence isolated from the Sargasso Sea
aagaattcaaaatttactgaaaaaaaacaagaattttaaaaaaagaatatttactaaatttgaaaccaaaatatgcgaaaaaagagctaacaaaattaattgttttgccaaaagatttgctgctaaagaagctttatttaaagcactaggtattcataataagcttagttttttagatgttgaggttaaaaataacgtatcaggacttcctaattttcaaataaagggaaattcttttaaaaatttaaagaaaatttttaaaaatagaaaatttaaaattcatttatctctttcggatgatgaaccatgggccgtcgcttcggttattatatttatatataaataa

SEQ ID NO: 258057 - DNA, 703 bp, Unknown
  Bacterial polypeptide expressing nucleotide sequence isolated from the Sargasso Sea
catgcagcggctcgacgcgccgctcgccgcgtcgcgcgccggcgtgcagatcgcgcgcgtcgatttcgactggcgcttgccgcttgcgtcgcccgcatatgcggcactcagcgatgacgagcgcgcgcgggccgcgcgcttcatgcggcatgaggatgcggtgcgcagcgccgcgacgcgtgccgcactgcgcgacgtgctcggcacggccctcggcatcgcgccgcaggcggtggcgatcgtcgtcgacgcctcggggcgaccgtcgctggacggtgctcatcgtgcctcgctcgacttcaacgtgtcgcacgcgggcgaccatgcgctgcttgcgtgggctcccggcggccgcgtgggcgtcgatatcgagcgctgcaaccgcgcgaccgactggcgcgcgctgacgcgcgaagtttgcgcgccggccgaggccgcctatctcgacagcctgccgcttgacatgcgcgccggcgcattcatgcgcgtctggtgtgcgaaggaggcgctgctcaaggcgctcggcacgggcatcgtcggcgggctgagcgcgttcgcggtcatgccgccgcgcgatggcgcgacccccgcgacgacgatcgtcgagccggccgcgcccgccgccggcgtcgcggcgttcgatgcggcgtggttcgacgcggcgcccggctatgcggcgtgcgtcgcatggacgcgtgcgtga

SEQ ID NO: 258058 - DNA, 430 bp, Unknown
  Bacterial polypeptide expressing nucleotide sequence isolated from the Sargasso Sea
atggcgatctacggcatcggtaccgacatcgcccaggtgagccgcatcgcggccgtgctcgaacgcacgggcggccggtttgccgagaaggtgctgggccccgacgagctgcgcgtgttccatgcgcgccgtgcccgctccgaggcgcgcggcatcgcgttcctcgcgacgcgcttttccgcgaaggaagcgttctcgaaggcgatcgggctcggcatgcactggccgatgacgtggcgtgcgctgcagaccctcaaccatccgagcggcgagccgtacgtggttgcgtcgggcgagctggccgactggcttgccgcccgtggcatcacggcgcgcgtgacggtcagcgacgaacgcgactacgcggtgtcgttcgtggtcgccgagacggacgctgcgcctgcacctgtttcccgaacctcctcctgac

SEQ ID NO: 258059 - DNA, 385 bp, Unknown
  Bacterial polypeptide expressing nucleotide sequence isolated from the Sargasso Sea
atgaaaatttacggcataggaacagatgtagtaaatataaatagaataaaaaaacctttaaaaagtaaaaattttataaatagactgttcaacaaagacgaaattaaaagatgcaacggtcaattaaataaggcaaattgttatgccaaaagatttgcagctaaagaagcattttccaaagctattggcactgggatttctaggggtatcaattttgatgaaattattgtgtataatatcaaatctggaaaacctggaattaaattactaggcaatactaagaaaatagttaacaaaattttaaataaaaaaaaaattaatatttttttatccttgtccgatgataaaccatttgcagtagctacagttgttatttctatatgac

SEQ ID NO: 258060 - DNA, 385 bp, Unknown
  Bacterial polypeptide expressing nucleotide sequence isolated from the Sargasso Sea
atgagtatttatggaataggtactgacatagttagcgttgacagattaaagatatcattaaaaaaaaaagattttattaaacgtatttttaatgaaaaagaaattataaaatgtaaaaatattaatcgtagctctaattgttatgctaaaagatttgctgcaaaagaggcatttgcaaaagctttaggcacaggaatatcaaatggtataaattttaatgaaattatcattttgaataaaaaatcaggtaaaccctacatcaatattgttggtcaaacaaagaaaatacttaataaaatatttaaaaagaaaaaatcaaagatttcactatctctttcagatgaaaaaaaatatgcagttgcttttgtaacaatatcaatatgaa

SEQ ID NO: 258061 - DNA, 319 bp, Unknown
  Bacterial polypeptide expressing nucleotide sequence isolated from the Sargasso Sea
atgaaattatatggcattggcactgatatcgtaaaaattagtagaattagaaaaaatattaaaaaaaagtcttttattaatcgtctgtttaatcctaatgaaattttaaagtgcaataaaagaaaaaactcttctaattgttttgcaaaaagatttgcagctaaagaagctttttcaaaagcttttggtaccggtatatctaaacaggtaaatttcaatgaaattattgtattaaatgaaaaaaatggcaaaccttttatcaaacttttacataagacaaaaattaacgtgaaaaaaaacttaaaacaaaaaaattaag

SEQ ID NO: 258062 - DNA, 307 bp, Unknown
  Bacterial polypeptide expressing nucleotide sequence isolated from the Sargasso Sea
aatggatatttatggtgtaggagtagatatagtcgatattaagagaatcgctaaagcgataaaaaaaaatgataaatttataaatagagttttttctaaagatgaaataaataaatgtcatcgaataaaaaattatcaaaactgtttcgctaagagatttgcggctaaagaggctttttctaaggcattggggaccggtatttcaagaggattgcaatttaaagaaatacttatttcaagcaataataagggtaaacctgatttaagattagtcgggagcgctaaaggtttagtgaaaaaattttaa

SEQ ID NO: 258063 - DNA, 289 bp, Unknown
  Bacterial polypeptide expressing nucleotide sequence isolated from the Sargasso Sea
aatgagattcttaaatgtaaaaataataaaaattcttcaaactgttttgctaaaagatttgctgctaaagaggctttttcaaaagctttaggtactggcattgctaaaggtataaattttaatgaaatagtgattttaaacgagaagaacggaaaaccttttataaaattattagataaaacaaaaaaaattgttgataaaaaaattaaaagaaaaaattacaagatttctttatcgttaactgatgaaaaaaactacgctgtagcttttgttactatatcaatatgaa

SEQ ID NO: 258064 - DNA, 385 bp, Unknown
  Bacterial polypeptide expressing nucleotide sequence isolated from the Sargasso Sea
atgaaaatttttggtgttgccactgatatagtaaaaactaatagaattcaaaaattgctgaaaaggaagaatgttttagaaaaattgtttaacaaagaagaaattataaaatgcaaaagaataaaaaaagcagaaaattgttttgcaaagagatttgcagcaaaagaagccttttcaaaagcactaggcaccggcatttcaaaaggaattaacttcaatcagataattgtcctaaatgaaaaaaatggcaaaccctttataaaattaattgaaaataccaagaataatgttgaaaaaaagttaaagaaaaaaaattataaaatttcattatcgcttactgatgaggatgagtatgcagttgcctttgtaacaatttcaatatgaa

SEQ ID NO: 258065 - DNA, 260 bp, Unknown
  Bacterial polypeptide expressing nucleotide sequence isolated from the Sargasso Sea
aatgaaaatttttggtgttggtactgatatagtaaaaactaatagaattcaaaaattgttgacaaggaagaatattttagaaaaattgtttaataaagaagaaatcataaaatgcagaaaaattaaaaaaacagcaaattgttttgcaaaaagattcgctgcaaaagaagctttttcaaaggcattaggtaccggtatttcaaaaggaattaactttaatcaaataattgttctaaatgaaaaaaacggcaaacctttta

SEQ ID NO: 258066 - DNA, 939 bp, Unknown
  Bacterial polypeptide expressing nucleotide sequence isolated from the Sargasso Sea
ttttgatgcaaatggaggaagtggatcaaatacaactcagacgatagagcataacgtttctgaaaatttagatgctaatccttttacaaaaactggatatagttttgcaggatgggcaacaaattcaggtggaagtgttgccttcgcagaaggagcaagttatacagggatttcaaacgcaaccttatatgctcagtggacggtaaatgcatatacaattaccttcaacacaaatggaggagatgctggttcaacggcttcacagaacatcaattacggagcaagtgcgaacttgactaccaatggatttactaaaactggctatacgtttgcaagctggaacacacaggcagatggactaggaacagatataaatgatggagcaagttatacgatgtcctcagcaagcaacgtaacgttgtatgcaaaatggacggtaaatgcctacacgattactttcaacacaaacggaggagatgctggttcaacggcttcacagaacatcaattacggagcaagtgcgaacttgactaccaatggatttactaaaactggctatacgtttgcaagctggaacacacaggcagatggactaggaacagatataaatgatggagcaagttatacgatgtcctcagcaagcaacgtaacgttgtatgcaaaatggacggtaaatgcctacacgattactttcaacacaaacggaggagatgctggttcaacggcttcacagaacatcaattacggagcaagtgcgaacttgactaccaatggatttactaaaactggctatacgtttgcaagctggaacacacaggcagatggactaggaacagatataaatgatggagcaagttatacgatgtcctcagcaagcaacgtaacgttgtatgcaaaatggacggtaaatgcctacacgattactttccacacaaacgg

SEQ ID NO: 258067 - DNA, 382 bp, Unknown
  Bacterial polypeptide expressing nucleotide sequence isolated from the Sargasso Sea
atgattagcggtattggtatcgacttatgtgacgttgagcgaattcgaaacgtgttgaaacgttatggagatcattttgcctctcgtatccttgaccccgtggaacacacagaatttcagtcgttgagagcgtcacagcgtcctcaatttctggctaaacgctttgcggcaaaagaggcaatttctaaagcgctggggactggtattgggcggggattcgggtttcgtgatttatttgttcgccatgacgaactcggtcgtccggtggtcgaattgaatccagagaataaagtactgagcgacgcccttccttgtaagattcatctcagcattagcgacgatcgttcacacgcgattgctttttgcacaatcgagagttaag

SEQ ID NO: 258068 - DNA, 361 bp, Unknown
  Bacterial polypeptide expressing nucleotide sequence isolated from the Sargasso Sea
gtaagcataaatagaatagaaagactttttaataaatatcaaaattggtttattgagaaaattttttccactaaagaaagagaattgtttgacaaaaccaaaagaattaagtttatcgcaaataggtttgcagctaaagaagcacttgttaaagcattaggtacaggatttattaaaaatataaatatcaaggagataagtattattaatgatgaacttggcaaaccttattatgaaatatcaggtttaacaaaaaaatttatagaaaaaagattaaattttgataaaacatcttttaatattaccttatcagacgaaaaagaatatgttgttgcattagctacaataattattaattaga

SEQ ID NO: 258069 - DNA, 385 bp, Unknown
  Bacterial polypeptide expressing nucleotide sequence isolated from the Sargasso Sea
atgaaaatttacggaatcggaacagatatagcgaacattaatagaataaaaaaatcattaaaaaataaagattttataaacagattgtttgataaaaatgaagttaaaaaatgcagcactcagatcaataaagcaaattgttatgctaaaagatttgctgctaaagaggcattttcgaaagctatcggaacaggaattgccaagggtataaattttaatgaaattatagttcataatatcaaatctgggaaacctagtattaaattgctaggaaacaccagaaaaatagttaacaaaatttttaaaaaaaagaagtttagtatttttttatctttatcagatgataaaccatttgcagttgccactgttgttatttcaatatgaa

SEQ ID NO: 258070 - DNA, 394 bp, Unknown
  Bacterial polypeptide expressing nucleotide sequence isolated from the Sargasso Sea
aatgaaaatctttggtataggaaccgatataattaatataaaaagaatggagaaattattaaaaagtaataattcaaattttaaaaatagaatcttttcaaagaaagaaattatgtattgtgaaaaaaaaaataatcctttctcattttatgctaagagatttgctgctaaagaagctttaagtaaagcattaggcaccggtataagaaaaggcattagttttaaaaatattgaaatactcaatgataatttgggcaaaccttctatcaatttaaagggatctacagaaatttttttgaaaaaaaaactcaagaccaaaaaatattctatacatttatctctatccgatgataaaccttgggctcaagctacggtaattatatcttacaattaa

SEQ ID NO: 258071 - DNA, 385 bp, Unknown
  Bacterial polypeptide expressing nucleotide sequence isolated from the Sargasso Sea
atgaatatttttggaattggaaccgatataattcaggtagataggataaaaaaaaatctaaaaaaaaaaggttttattaatagaattttcagcaaaaaagaaatcacaaaatgcaaaaaaatttctaactcatcaaattgttttgcaaaaagatttgcagcaaaagaagcattttcaaaagcactgggtacaggtatttcaagaggtataaactttaatgaaatattaattctcaataaaaaatcaggaaaaccatatataagtttagttggtcaaactaaaaaaatattcagcagcaaggttaaaaataaaaaaacaaaaatagctctttcagtatctgatgaaaaaaaatatgcagttgcttttgtaacaatatctatatgaa

SEQ ID NO: 258072 - DNA, 385 bp, Unknown
  Bacterial polypeptide expressing nucleotide sequence isolated from the Sargasso Sea
atgaaaatttttggtgttgggacagatatagttagaataaaaagagttaaaaattcttttaaaaaaagatcatttctatcaagaatatttaacaaagatgaaactttaaaatgcaaaaaaagtatcaacaaatttaactgttttgcaaaaaggtttgctgctaaagaagctttttcaaaagcgttaggcacaggtatatctagaggaataagttttaatgaaatagttatcttaaatgaaaaaaatggaaaaccatttataaaattactctcaaaaacaaaaaaaattgtagagaaaaaatttaaaaagaaaaattataaaatatccttatcaatagcagatgaaaaagattatgcagttgcatttgtaacaatctcaatatgaa

SEQ ID NO: 258073 - DNA, 265 bp, Unknown
  Bacterial polypeptide expressing nucleotide sequence isolated from the Sargasso Sea
aatgaaaatttatggaataggcactgatatagccaatattaacaggataaaaaaatcattaaaaaataaagaaataattaataggctttttaatacaagtgaagttaaaagatgcaataatcaaattaataaacctaactgttttgctaaaagatttgctgctaaagaggcattctctaaggctttaggaacaggaatttctaaaggtataaattttaatgaaattattgtgcataatattaaatcaaggaaagccaaatattaa

SEQ ID NO: 258074 - DNA, 386 bp, Unknown
  Bacterial polypeptide expressing nucleotide sequence isolated from the Sargasso Sea
aatgaatttttttggaattggaacagatattgttagtattgatagagtaaaaaaatctttaaaaaataaaaatttcctcaaacgtatttttaacgaaaaagaaatttttaaatgtaaaaagactataaaaagcactaattgttttgcaaaaagatttgctgcaaaagaagctttctcaaaagcacttggtactgggatagcaaaaggaataaattttaatgagataattgttcttaacaaaaagtcaggtaaaccctatataattctggttggtcaaacaaaaaaaacacttagcaaaaaatttaaaggaaaaaaatcaaaagtatcattgtctctttcagatgaaaaaaaatatgctgtagcttttgtaactatttctctatgaa

SEQ ID NO: 258075 - DNA, 385 bp, Unknown
  Bacterial polypeptide expressing nucleotide sequence isolated from the Sargasso Sea
atggcaatcgttgggcttggcactgacatagttgaaatcgagcgtattacggcccatgtggcacgttccggcgataagctggcaaaacgtgtactgacagaggctgagttcgctatctatcaacaacatagccaaccgagccgctatttggctaaacgttttgccgccaaagaggccgcagctaaagccttggggacggggattggtcgaggggtatcttttcagcatatccacattgggaatacgcccgatggcgcgccgacgattgattttacagaaggagcgcagcagcggttagctttgctcaacggcgtgatcgggcacatttcaatcgcggatgaaaaatcctacgctattgctacggttatcctcgaatctcgctagt

SEQ ID NO: 258076 - DNA, 385 bp, Unknown
  Bacterial polypeptide expressing nucleotide sequence isolated from the Sargasso Sea
atgagtatatttggaataggaactgatattgttaaggtgagtagaattaaaaaattaattataaataaaaagtttttgaaaagattatttaataaagatgaaattaaaaaatgcagtaaatcaaaaaatacctccagctgttatgcaaaaagatttgcagctaaagaggccttttccaaagctctaggtacaggtatatcaaaaggacttagctttaatgaaattataatcctaaataaaaatagtggaaaaccatttataaagctaattgattccacaaaaaaaattgttgaaaaaaaattaaaaaaaaaaaaatataagatttctttatctttaactgatgaaaaaaattatgccgtagcttttgtgacgattagtatatgac

SEQ ID NO: 258077 - DNA, 382 bp, Unknown
  Bacterial polypeptide expressing nucleotide sequence isolated from the Sargasso Sea
aatgaaaatttatggtattggcacagatatagcaaatgttaacagaattaaaaaatctttaaaaaataatatttttataaacagaatatttaacaaaaaagaaattataaaatgctcaaaacaaaaaaataaggcaagttgttatgcaaaaaggtttgctgcaaaagaagctttttcaaaagctttaggaactggcatctctaaaggtattaattttaacgagataattgttcataatataaaatctggaaaacctaaaattaaactagagggaaaaacaaagataatagtgaataaaattttaaaaaaaaaatttgatatttttttgtctctatctgatgataaaccattcgctgttgcaacaattgttatatcagtatga

SEQ ID NO: 258078 - DNA, 394 bp, Unknown
  Bacterial polypeptide expressing nucleotide sequence isolated from the Sargasso Sea
gatgaaaatttttggtattggaacagatatagttaatattaaaagaatagaccagtctttaaaaaaatatggtattacttttaaaaaaaaaattttttcagaaaaagaaattgcttattgtgaaaaaaaaaggaatcccagctcgttttatgcaaaaagatttgctgcgaaggaagcttttagtaaggctttgggaactggaattagaaagggtgttaaccttaaaaatatagaaattttaaatgatagtaatggcaagcctctaataaaattgaagggtaatttagctaattttttaagaaaaaaaattaaagctaaaaaatactatatttatctttcgctttctgatgataaaccatgggctcaagctacagtaataatttcttataattaa

SEQ ID NO: 258079 - DNA, 385 bp, Unknown
  Bacterial polypeptide expressing nucleotide sequence isolated from the Sargasso Sea
atgaaaatttttggtatcggaacagatatagtaaaaactagtagaatcaaaaaaattttatcaaataaattaatcataaataaaatttttcacattaaggaaattcaaagatgtaagaaaacttataaaattcataattgtcttgcaaaaagatttgcagctaaagaagctttttctaaggcattaggaacgggtatttcaagaggcattaaatttaatgaaatagttatcttaaataaaaaaaatggaaaaccatatataaaattattaaataatactaaattgatagtcgaaaaattattaaagaaaaaaaaatataagatttcactgtcaatttctgacgaaagtaactatgcagtagcttttgtaactatttcaatatgaa

SEQ ID NO: 258080 - DNA, 385 bp, Unknown
  Bacterial polypeptide expressing nucleotide sequence isolated from the Sargasso Sea
aatggcaatcgttgggcttggcactgacatagttgaaatcgagcgtatcacggctcatgtggcacgttccggcgataagctggctaaacgcgtacttacagaggctgagttcgatatctatcaacagcatagccaaccgagccgctatttagctaaacgctttgccgccaaagaagccgccgctaaagctttggggacggggattggtcgtggcgtatcttttcagcatattcacattggcaatacgactgatggtgcgccaacgattgactttactgaaggggcgaagcagcgtttagctttgctcaatggtgtgattgggcacatttcaatcgcagatgaaaaatcctacgctattgcgacggttatcctagaatctcgctag

SEQ ID NO: 258081 - DNA, 217 bp, Unknown
  Bacterial polypeptide expressing nucleotide sequence isolated from the Sargasso Sea
aatggccattgttggtttaggtaccgacattattgaaatagcgcgtatcgagcacagtctggcgcgctccccccgtttagtgcaacgggtattgactgaatctgagcagcaaattctggctgctcatggtcagccagcccgatatttcgccaaacgttttgctgcgaaagaagcggcagcgaaagccttgggtaccggcataggccggggtatttcc

SEQ ID NO: 258082 - DNA, 385 bp, Unknown
  Bacterial polypeptide expressing nucleotide sequence isolated from the Sargasso Sea
aatgaaaattcatggaattggtacagatattgtaaaaataaaacgaatagaagattctattaaaaaaaaatcatttattaatagattatttaacaaaaaggaaatatcaaaatgtaaaaaattaaaaaactcatctaattgttttgctaagagatttgcagcgaaagaagctttttcaaaagctttaggtactggaatagcaaaaggaattaatttcaacgaaattgttgtgttaaatgaaaaaaatgggaaaccttatattagattattagataaaacaaaaaaaaatgtaaaaaaaagatttaaaaataagagatatagaatttctttatctttaacagacgaagataaatatgctgttgcatttgttacaatctcactatga

SEQ ID NO: 258083 - DNA, 385 bp, Unknown
  Bacterial polypeptide expressing nucleotide sequence isolated from the Sargasso Sea
atgaaaatctacggaataggaactgatgtagtgaatattaatagaattaaaaaatctttaaagaataagaattttatagctagattattcaatgctaatgaaattaagaagtgcaacactcaaattaataaagcaaattgttatgctaagagatttgcagctaaggaagccttttcaaaagctattggaactggaatttctagaggaataaattttgatgaaataatcgtatataatgtcaaatctggaaaaccagctattaaattattgggtaataccagaaaaatagttaacaagatccttaataaaaaaaaaattaatatttttttatctttatctgacgataaaccatttgctgtagctaccgttgttatttctatatgaa

SEQ ID NO: 258084 - DNA, 892 bp, Unknown
  Bacterial polypeptide expressing nucleotide sequence isolated from the Sargasso Sea
agaaaactaaaaaataaaaaaaatatattgggtggtaaaggtgcgaaccttggtgaaatgggtagattaggactacctgtgcctccaggttttaccatttctactaatgtctgtgatattttttataaaaataaaaaaaaattacctaataagattataaaaaatatagaagaggagttaaaaaaaattgagaacaagactaaaaagaaatttggtgatttagaaaatccgttacttgtttcagttagatctggcgctagagtttcaatgccaggtatgatggacacaatattaaatcttggtcttaacgataaaacagtcgaatctttaagtagaaaaacgtctaacggacgatttgcaaaagatagctatagaagatttattcaaatgtatagcaatgttgttttgggtgtcgaaggacatttatttgaagagttaattgataattataaacttactaaaggagttttattagacacagaccttgatgaaagtgattgggatggattgattaaaaattttaaggaactggtcaaaaaagaaaagaaaataaattttcctcaagatgtcaagcaacaactttacggagctattaacgcagtatttttatcttgggaaagtcaaagagctaaaacttatagaaagttaaatcagattccagattattggggaacagctgtaaacgttcaagctatggtttttggaaatatgggaaaagattgttctactggagtagcctttactcgaaacccttcgactggagaaaaattattctttggcgaatttttaattaatgcccaaggagaagatgtagtcgctgggacaagaacgccacaatatattacaaaaaaagcaaaaatatcctctggttcaaaagaaccttcaatgaaga

SEQ ID NO: 258085 - DNA, 880 bp, Unknown
  Bacterial polypeptide expressing nucleotide sequence isolated from the Sargasso Sea
atgaaaaaattagtatttaattttagatcaaaaggtgcacaaaagttaaaaagaccaaaaaatatacttggtggcaaaggtgcaaacctatctgaaatgggtagaataggtcttccagttccaccaggttttacgatttctactgaggtatgtgatttattttataaaagtaaaaaaaaacttagttcaaaaataattaaagaaataaatgcagaattgaaaaatattgaaaaagaatctggaaaaaaatttggagatttaaaaaatcctctacttgtgtctgtaagatcaggtgcaagagtatctatgccgggaatgatggatacaattttaaatcttggattaaatgatgagactgttattgctttagccaataaaacctcaaacaccagattcgctaaagatagttatagaagatttattcaaatgtattcaagtgtagttttgggcattgaaagttataattttgaagaacttattgaaaattataaattaaccaaaggagttttgttagatacagatttagatgaaaatgattgggatggccttattaatgattttaaaaatattgtaaaagaaaaaacaaaaaaagaatttccacaaaacgttaatcaacaacttataggagctattagtgcggtatttttatcatgggaaagtcataggtcacaagtttatagaaagctaaatcaaataccatctaattggggtacagctgtaaatgttcagtcaatggtatttggtaatatgggaaataattgtgcaactggtgtagtttttacaagaaatccatcagatggtagcaatgcaatatttggtgagtatttgattaatgctcaaggagaagatgttgttgcgggtacaagaactccccaaaata

SEQ ID NO: 258086 - DNA, 385 bp, Unknown
  Bacterial polypeptide expressing nucleotide sequence isolated from the Sargasso Sea
atgaaaaaattagtttttaatttcaaatcaaaagatacaaaaaaaataaaatttccaaaaaatatcttgggtggaaaaggggcaaacctggctgaaatggggcgactcgggtatccagttccttcaggctttactatttccaccgaagtgtgtgatttattttataaaaataataaaaaaattagtccaaaaatattaaaaaatataaaaattgaaattaaaaatattgaaaaagattcaggtaaaaaatttggcgatttaaaaaaccctttactagtctcagtaagatcgggagccagaatttcgatgcctggaatgatggacacgatattaaacttaggtctaaatgacaaaacagttttagcgctagccaaaaaactttaaa

SEQ ID NO: 258087 - DNA, 1042 bp, Unknown
  Bacterial polypeptide expressing nucleotide sequence isolated from the Sargasso Sea
tccctcgggggcaaaggatgtaacctcgcagagatggctcgaatcggactcgccgttccccctggattcacggtgagcacggagacgtgcgccgagtatcacgaaaacggcggtgagttgccggaagacgcttggaacgacatgatggagggtttgcaattcgtcgagacggcgctcgggaaaaagtttggcgacgccgccgatccgctcctcgtcagcgtgcgaagcggcgccgcgatcagcatgccaggcatgatggatacgattctcaacctcggtttaaacgacgacgtcgtgcaaggcttggcgaaacgcgccggagggagattcgcgtacgactcgtacaggcgattcctcgacatgtttggcgtagtgtgtttggacattcctcatgaaaaattcagcgacgcgttggaaacgttgaagcaagacgtcggtgcgcagtccgactccgatctgacggaagaaaacttgcgtgatctcgtcgaaatttacaaaggagtttacgcctcgagcgacgtatcgttccctcaagatgtgtttgtccaacttcggtacgcgtcttgcgccgtctttgactcgtggcagagcgaacgcgcgaaaaagtacatggcgatcaataaaatcaccggtttgcgaggcaccgcggtcaacgttcaagcgatggttttcggaaacttgggagatacgtcaggaaccggtgttttgtttactcgtaatccaaacaccggagaaaaaaagttgtacggcgagtacttggtcgacgcgcaaggggaagacgtcgtcgccggcatccgcacaccgagcgacatctccaccatggctgacgctctcccggatgcgtacgaggagttggtgaaaaacacgcaaatactcgaatcccattacaaggacatgcaagacattgaattcacggtccaagatggtaaattgttcatgctccaaacgcgctcgggaaaacgaacgggcgccgccgctgtgaaaatcgccgtcgactttgtggaggacggaaccgtaaccgagaaggaggccgttcacatgg

SEQ ID NO: 258088 - DNA, 1006 bp, Unknown
  Bacterial polypeptide expressing nucleotide sequence isolated from the Sargasso Sea
aatgaacaataaacaaaaaatatattttttttcacaacttcaaacagatggggatcaaaatatggttgatgtccttggcggcaagggagcaaatattgcagaaatgtgtaagcttgggcttcctgttccccctggctttaccctggctacaagcctttgttctgactatttgaaaaccaagtcactctctatcggtctaaaaaaaaacattaaaaaaaacatcataaaaacagagggtgttcttggaaaaacgtttggcggaccaagccctttgcttctttctgttaggtctggcgcccccgtgtctatgccgggaatgatggagacaattttaaacataggacttacatctaaaacaataccatttatgattgatgcaagcggaaatgagggttttgtatatgatagttatcgaaggttaattatgatgtacgcagatgtggttatggagaaggctttgggattaaacaagtcttcgcggccaatcagagggttgatggaaaaagagcttgaattaaccaaaaaagttaagggatataaaaacgactcttatatgaaagccaaagattggaagattttatccgaaaaatatttaaaaatagtaaaacaagaatttggggttccttttcctgacgaccactacgaacagctctatggtgctgttgctgcggtctttgaaagctggaacgggaaaagagcaaaagaatataggcgctttgaaaaaatttcttcttccatgggaacagccgttaatatacaggcgatggtttttggaaaccttggaaaggattgtggtacaggcgttgctttcacaagaaacccctctaccggtgaaaatgttttctttggagagtggctaccaaatgcccagggtgaggatgttgttgcgggcatcagaacgccccacccaataattgatgaaaaaaacagtaaagaatcgttgtctgttgtaatgccaaaagcctttgaagagctaaacgatgtaaggaaaaaactagaaaaccac

SEQ ID NO: 258089 - DNA, 659 bp, Unknown
  Bacterial polypeptide expressing nucleotide sequence isolated from the Sargasso Sea
attgagcaaagattctggaaaaaaatttggagatttaaaaaatcctttgttagtttccgtaagatctggggccagagtttcaatgcctggcatgatggatactatattaaatttgggattaaatgataaaactgtacttgcacttgcaaaaaaaacctcaaatttaagatttgccaaagatagctatagaagatttattcaaatgtattccaatgtcgtattgggagttgaggcatacaattttgaagaacttattgaaaattataaattaacaaaaggagtcttgcttgataccgagctagatgaaaatgactgggatggtttaattaaagattttaaaaatgttattaaagaaaaaacaaaaaaagaattcccccaaaatataaatgagcaactaataggagcaatatcagctgtatttttatcttggcaaagtaatagagcaaaagtttatagaaaacttaatcagataccttcagattggggcacagccgttaatgtacaactgatggtattcggaaatatgggacaagattgtgctactggagtagtttttactagaaatccatcaaacggtagaaatgaaatttatggagaatatttggttaatgcccaaggagaagatgttgttgcaggtacaagaactcctcaatatataa

SEQ ID NO: 258090 - DNA, 790 bp, Unknown
  Bacterial polypeptide expressing nucleotide sequence isolated from the Sargasso Sea
ctagcaaataaaacaaagaatataagatttgccaaagatagttataggagatttattcaaatgtattcagatgttgttcttggcatagaagcctataattttgaagatttaattgaaaattataaattaaccaaaggtgttttgttagatactgaattagatgaaaatgattgggatggtttaattaatgattttaaagaattagtaaaaaataaaactaaaaaagaatttccacaaaatgttattgaacaattgataggagctattagtgctgtatttctttcttgggatagccaaagagcaaaagtttacagaaaaataaatcatataccttcaaattggggaactgctgtaaatattcagtcaatggtttttggaaacatgggggatgactctgctactggagtagtttttactagaaatccttcaaatggaataaatgaaatttatggtgaatatttaattaatgcgcaaggcgaggatgtagtggctggcacaagaactcctcagtacattacaaaaaaagctagtaaaaattcaaatggaaaatcaatggaagagttatttcctaaagtttttagtgaacttaaaaagaatttaaaaattttagaaaaacattacaaagacatgcaagatgttgaatttactgttgaaaataaaaaattatggatgcttcaaacaagatcaggaaaaagaacagcaaaatctgctgtaaaaattgctgtagatatgtataaagaaaaacttatttcaaaaaaagaagcagttttaagagtagacccaagttctc

SEQ ID NO: 258091 - DNA, 820 bp, Unknown
  Bacterial polypeptide expressing nucleotide sequence isolated from the Sargasso Sea
aaaaccttaaacgaaagatttgcaaaagatagttatagaaggtttattcaaatgtacggcaatgtagttcttggtttagaaagtcatttatttgaagaaatgattgataattacaaattaacaaaaggtgttttgttggataccgaattaaattcggatgattgggacggacttataaaaaattttaaggagctaattttagaaaagactaaaaaaagttttcctcaagatgtatatgaacaactatttggagctattaaagcggtatttttatcctgggaaagtaaaagagcaaaaaattatagaaaatttaatcatatccctcacaattggggaacagcagttaatattcagtcaatggtttttggaaatatgggagatgactgcgctactggagttgcattcacaagaaacccatcgactggagaaaataaattttttggagaatatttaattaatgctcaaggcgaagatgtagtagccggtagcagaaccccaagatatataacaaaaaaagcaaaagaggatgccggggccaaagataattccttagaagaagtcatgcctaaagtttttaaagaattaaaaaacatatttataaaattagaaaaacattatcgagatatgcaagatattgaatttaccatagaaaacaacaaactttggatgttacaaactagaaacggaaagcggacagctaatgcagcaattaaaattgctattgatatggttaaagagaaattaatttcaaaaaaagaagcgattttaagagtagatccaaatactttggatacacttttacacccgaaccttagatgaa

SEQ ID NO: 258092 - DNA, 883 bp, Unknown
  Bacterial polypeptide expressing nucleotide sequence isolated from the Sargasso Sea
atgaaatcgatctatgcgtttgaggaagctgatagtaaaaacaggatgctgctaggaggtaagggtgctggcctaagtgaaatgacaagattgaaacttccagtcccacctggatttacaattactacagaagtttgcaacaaatattatgaaaatggaaaaaaacttccaaaagatgtaatgcctttagtaatgaaaaatatcgctaagatggaaaaaaagacaaataaaaaatggaattctataaaaaatccattactagtctcagttagatcaggtgctgcaatttctatgccaggaatgatggatacaattttgaatttaggattaaatgaaaaaacagtagaaggatttgcagaacaaacaaaaaatcctagattttcatgggattcgtatagaagatttattcaattatttggaaaagttgtatttggagtaaatgatgagaaatttgatcatgttttagattctgcaaaaagcaaacaaggcgtgactgacgatagcaaactaaacgtagaatcgctcaagaaaattgttgtagaatataagaaaatttgtgaagaacatacaaaaagaaaattcccagatacacctaacgagcaattaagattagcaattgaggcagtattcaaaagctggatgggagaaagggcagtcgtttatagagagaaaaatggaatcacaaaagacattgcaaatggaacagcagtaaatgttgtaacaatggtatttggaaacatgggagatgatagtgcaacaggagtagtttttacaagaaacggacataatggtaaacgagaaattgaaggagagtaccttactaatgcacaaggagaagacgttgttgctggagttagaaccggaaaaaatgtcgagttataaa

SEQ ID NO: 258093 - DNA, 924 bp, Unknown
  Bacterial polypeptide expressing nucleotide sequence isolated from the Sargasso Sea
ttatcggtaaggtctggtgctagagttccaatgccaggtatgatggatacaattttaaatcttggtctaaatgataaaactgtaattgcactcgccaaaaaaacctcaaatggaagatttgctaaagatagttatagaagatttattcaaatgtatggaaatgtagttatgggtgttgaaagctaccactttgaagaattgattgaaaattataaattaactaaaggtgtacttttggacactgatttaaatgaagaagattgggatggattgatcaaagacttcaaaaatactgttagagaaaaatctaaaaaagattttcctcaagatgtttatcaccaactatttggcgcaattagtgctgtgttcttatcatgggaaagtaatcgtgcaaaagtttacagaaaattaaaccagattccctctgaatggggaacagcagtaaacgttcaatctatggtttttggtaatatgggtaatgattgtgcaactggtgttgtctttactagaaatccatcagatggatcaaaggatatttatggagaatatttaataaatgctcaaggagaagatgttgtcgctggcactagaacaccacaatacataacaaaaaaagcaaaaaaaaatgcaaaagctaaagaggcatcgatggaggagtccatgcctaaggcttataaagaattatttaaaattttaaataaattagaaaaacattataaagatatgcaagacgtagagttcactgttgaaaacaataaactttggatattacaaactcgatctggtaaaaggacatcaaaatcagctgttaagatagcagtggatatggtcagagaaaagttgatttcaaaaaatgatgccattttaagaattgatcctaactctctagacacattattacacccaactttagacgagcaaaga

SEQ ID NO: 258094 - DNA, 790 bp, Unknown
  Bacterial polypeptide expressing nucleotide sequence isolated from the Sargasso Sea
tttagtatctgtaagatctggagctagagtctcaatgcctggaatgatggatacaattttaaacctcggacttaatgataaaacagtttttgctttagcaaagaaaacttcaaacatgagatttgctcatgacagctatagaaggtttattcaaatgtatagcaatgttgtaatgggtatagaatcttataattttgaggaattaattgaaaactacaaactgacgaagggtgtattgttagatactgagcttgatgaaaatgattggattggattaataaaagactttaagagagttgtaaaattaaaaacaggtaaagaatttccacaaaatgtttttgaacaattgtcaggagctatatctgcagtatttttatcatgggaaagtaatagagccaaagtttatagaaagctgaatcatattccagataattggggtactgcagtaaatgttcagtctatggtttttggtaatatgggtaatgactgtgctactggagtagtttttacaagaaatccatctgacggtaagaaagaaatttatggagagtatttaatcaacgcccagggtgaagatgtagttgcaggaactagaacccctcaatatataactaaaaaagcaagacttgagtcaggagcaaagcaaaaatctatggaggaagctatgttaagatcctttactcaattaaaaaaaaatttaaatattttagagaaacattacaaagacatgcaagatgttgagtttactatagaaaataataaactttggatgcttcaaactagatctgga

SEQ ID NO: 258095 - DNA, 931 bp, Unknown
  Bacterial polypeptide expressing nucleotide sequence isolated from the Sargasso Sea
tttggctaacaaaacatctaatggaagatttgcgaaagatagctatagaagattcatccagatgtatggaaatgtagtcatgggtattgaaagttacaattttgaggaattgatagaaaattataagttaacaaagggtgtattgcttgacacagatctcgatgaagaggattgggatgggttaataaaagattttaaaaatgtagttaaagaaaagaccaataaagactttcctcaagatgtttaccatcaattgtttggtgcaataagtgctgtatttttatcttgggaaagtaaaagagcgaaaatttatagaaaattaaatcaaattccttccgaatggggaaccgctgttaatgttcaatctatggtttttggaaatatgggcaatgattgtgcaacaggtgttgtattcactagaaacccttcaaatggatcaaatgatatttatggagaatatttgattaatgctcagggagaggatgttgtagctggaactagaactccacaatatattacaaaaaaagcgagaaaagaggcaaaagttgatgacgcatctatggaagagacgatgccagaagtatatcacgaattatataaaattttaaaaaaactagagaaacattataaggatatgcaagatgtagagttcactgttgaaagtaataaactttggatattgcaaactcgatctggaaaaagaacatcaaaatcagcaataaaaattgctgttgatatggttagagaaaagttaatcaataaaaacgatgctgttttaagagttgatcccaattctttagacgcacttttgcatcctactttagatgagagaagttcaatcaaagttatagcaaacggtcttccggcatcccctggcgcagtaagtggaaaagtagttttcagctcagaggaggctgaaagattaaatgat

SEQ ID NO: 258096 - DNA, 958 bp, Unknown
  Bacterial polypeptide expressing nucleotide sequence isolated from the Sargasso Sea
ataccttgttgattggtcatacgatttctgtgatattggtataagagccaacgcagatactatcgaagatgcaagagttgcaagatcttttaagattgatggtgtagggttgtgtagaaccgaacatatgtttcttgcatccagcaggataaaccttgtaagacaaatgattttgtctgaagatgaaatagcaaagttatctatactagagcaattacttcaaatccaaaaaaatgattttatagagcttttcaaagaaatggcaggacttcctgtgacaataagattattggatccgccccttcatgaatttcttccaaattctgaattagagataagcaacacagcaaaaatgatgaaaattgaaaaaaatcaattgattgatcgtataaaagatctcaccgaatttaatccgatgctgggtactagaggagtaaggttaggagttatgatgcctgaattatacgaaatgcaagcgaaagcaatatttctagctgctttagaagtaaataaattttttggaactaaagtagttcccgagattatgatcccgttggtttctgcgaacaaggaggttgatttggtaaaaagacgtgtagaaagggtgctaaaggaaattgaaagaaaagattcagttcccttagaatacatgcttggggtaatggtagaaaccccaagagctgctttaagggcaggagatattgctcgatctagtgagtttctaagctttggtacaaacgatttgactcaaatgacttatgggctaagcagggatgattcaaacagatttatgaaagaatacctggagaagggcctttacaagatagacccttttaaaacattggatcttgaaggggtaggggaacttttgaaaatagcattgcaacgagcaaagaacgcaaatccaaatattgtgacaggtttatgcggtgaacacggaggagatccgagttcataa

SEQ ID NO: 258097 - DNA, 879 bp, Unknown
  Bacterial polypeptide expressing nucleotide sequence isolated from the Sargasso Sea
cccgggttttacaatatctacagaggtatgtgatttgttttataagaataaaaaaaaattaaataaaaaaatacttaatgaaataaataaagaattaaaatttattgaaaaagactcaggaaaaaaatttggagatataaaaaatcctcttctagtttctgtaagatctggagctagggtttctatgcctggtatgatggatacaattttaaatctaggtctaaacgataacacagtaatagcacttgcaaaaaaaacttcaaatttaagatttgcaaatgatagttataggcgtttcattcaaatgtattctaatgttgttttgggaatcgaaggttatcactttgaggatataattgaaaactataagctaacaaaaggagtattactagacacagaattagatgagtatgactgggaagctttaataaaagattttaaaaatatagtgaaagaaaaaacaaaaaaagattttcctcaaaacgtcaaagagcaactagtgggagctataagtgctgtttttttatcctgggaaagtcacagagcaaaagtctatagaaaattaaatcaaataccatctagttggggtacagctgttaatgtgcaatcaatggtttttggaaatatgggaaatgattgtgcaactggtgttgtctttactagaaatccatcagatggatcaaaaaatatttacggagaatacttaataaatgcgcaaggggaggatgttgttgctggaactagaacaccacaacatattacaaaaaaagctagagttgaatcaaaagaaactcttaagtcaatggaagagttaatgccttcgacatacaagcaattaaaaaaaattctaaataagctggaaaaacattacaaagatat

SEQ ID NO: 258098 - DNA, 703 bp, Unknown
  Bacterial polypeptide expressing nucleotide sequence isolated from the Sargasso Sea
aatgaagaagcttatttttaattttaattcaaaagatataaaaaaaattaaaaatgcaaaaaatatcctaggaggaaaaggtgctaatcttgcagaaatgggaagattagggtttcctgtaccctcaggatttactatttctacaaatgtctgtgatattttttatgataataaaaaaaaacttgggtcaaaaatcattaacgcaattaagaaagaaataagaagtatagaaaaagcatctggcaaaaaatttggaaatataaataatccacttttactttctgttagatctggtgccagagtttctatgcctggaatgatggatacaatacttaatttaggtttaaatgatcaaacagccgatgctcttgcaaaaaatagttcaaataaaaggtttgcaatggacagctacagaagatttattcaaatgtatggcaatgtagtattgggaatagatagttttaatttcgaagacttaattgaaaactataagctttctaaaggagtcctgttagatacagatcttaatgctgaagattgggatcgtttgataaaagattttaaaaatattgtgaaagaaaaaacaacgaaagaatttccacaggatgtttatgaacaattattcggtgctatttcagcagttttcttgtcttgggaaagtaaaagagcaaaagtttatagaaaaataaatcaaataccatca

SEQ ID NO: 258099 - DNA, 908 bp, Unknown
  Bacterial polypeptide expressing nucleotide sequence isolated from the Sargasso Sea
tgcgatttattttataaaaataataaaaaaattgatccaaaaatattaaaaaatataaaagccgaaataaaaaatattgaaaaagactcaggtaaaaaatttggagatttaaaaaacccattgctagtttcagtaagatcgggtgccagaatttcaatgcctggaatgatggatactatattaaacttaggtttaaatgacaaaacagtcgtagcacttgctaaaaaaacttcaaatcccagatttgctaaagatagctatagaaggtttatccaaatgtactccactgttgtattaggagttgaaaactataattttgaagagcttatcgaaaattataaattaacaaaaggagttttgttagatactgatttagacgagaatgattgggatggtttaataaaagattttaagaatgttgtgaaagaaaaaacaaaaaaagaatttcctcaggatgttaatcaacaattaacaggagcaataaaagctgtatttttatcttggcaaagtaatagagcaaaagtttacagaaaactcaatcaaataacttcagactggggaacagctgtaaatgttcagttaatggtatttggaaatatgggtgaagattgtgcaactggggtagtttttacaagaaacccatcaacaggtaaaaatgaaatttatggagaatatttaattaatgcacaaggagaagatgttgttgcgggcacaagaaccccacaatacataacaaaaaaagctagaattgaagctgggctaaaagaaatttcaatgcaagaatcaatgccagcagttttcaaacaattatataaaattttaaagaacttagaaaaacattataaagatatgcaagacgttgagtttacagttgaaaaaaataaactttggatattgcaaacaagatc

SEQ ID NO: 258100 - DNA, 739 bp, Unknown
  Bacterial polypeptide expressing nucleotide sequence isolated from the Sargasso Sea
ttttcggcgatggctagtgaacgcacaaggggaggatgttgtggctggcttaagaacccctaatccacttaatgaagaaacaaagacagaaggaacaaaagatctgccttctttagaatccagtatgccagacatttattctgagctaaaagggattcgtggccgccttgaaaagcattacaatgatatgcaggatattgaatttaccatccaagaaggaaaactatggatgcttcaaacaagggttggaaaacgaaatgggtcagctgccataaaaatggctgttgatatgaagaaggaaggaatgatagacaaaaaaactgctctcttgcgagtaaagccagagcaactagacgaactccttcaccccatgctagattcagaatcagaaaaaggtgctcctctcttaggaaaaggacttcctgctggccccggtggagcatctggcagggtagtttttactgctgatgatgcagaacagtggcataagaatggtgaaaaagtaattctaattagagaagaaacatctccagaagatgttcacggcatgcacgctgctgaggcgattttaacggctaaaggaggcatgacatcccatgctgctcttgtagcacgtggatggggtaagtgttgtatagtgggatgtagtgagctacagattgatgttaataaaaaagaagttgtcatcggagaaagtactatttctgagggcgattggataacaatgaacggaaccgaa

SEQ ID NO: 258101 - DNA, 805 bp, Unknown
  Bacterial polypeptide expressing nucleotide sequence isolated from the Sargasso Sea
ttgcaaaagttagtttattactttggtgacaaaaaaactgaaggtaaagctgatatgagagatcttttaggtggtaagggagctaacttggccgagatgtgtaatcttggtttgccagttccgcatggctttacaatttctacagaagtctgcacttattattatgataataataaaactctacctaatgaacttaaattagaaataaaaaaaaatataaataaaattgaaaattttaccaaaaagaaatttggaagtaattctaaccctctcttattatctgtgagatctggttctagagcatcgatgccaggtatgatggatacaattcttaatcttggccttaacaatgaatctgtaaatggacttgctgaaagtaccaaaaacgaaagatttgcttttgatagttatagaaggtttattcaaatgtattcagatgttgtgcttgatattgacaattcattatttgaggacgcattagaagatataaaaattgagaatgggttatcagaagatactgatcttacatctcagaatttaaaggacctaacggaaacatataaaaaaattgtgttaaatgaaataaagcgtccatttccgcaagatccatctgagcagctatggggatcaataagttcagttttctcaagttggatgaataatcgtgcaattacgtacagaaaattaaataatttaccttcaagttgggggactgctgtaaatattcaatcaatggtatttggaaatatgggagaagattgcgcaactggtgttgccttcacccggaatcctaacaatggagaaa

SEQ ID NO: 258102 - DNA, 868 bp, Unknown
  Bacterial polypeptide expressing nucleotide sequence isolated from the Sargasso Sea
aaaggagcaaacttagctgaaatggctagacttggattgcctgtgcctccaggctttacaatttctacagaattgtgtgcagttttttataaaaataaaaaaaaattaaccccaaaaattttcaacgaaattaagaaagaattgaaaaaaattgaatcaataactaaaaaaaaatttggtgacaattcaaatccattgctagtatccgtaaggtccggctcaagagtttctatgccaggtatgatggatactattcttaatttaggtttaaacgataagacagtcgaggcattatcaaaaaaaacctctaacgaaagatttgcaaaagatagttatagaagatttatacaaatgtatggaaacgtcgttttagggatcgaaagccatctttttgaggagatgattgataactataaattaaccaagggagttttaatggatacggaattaaactctgaagattgggacggtcttataaaaaattttaagggtttaatattagaaaaaacaaagaaaaatttcccccaagatgtttatgaacaactctttggagcaattagagcagtatttttatcttgggagagtaaaagggcaaaaaattacagaaaatttaatcatataccaggagactggggaacagcagttaatgttcaatctatggtatttggaaatatgggagacgattgcgctactggagtggcgttcacaagaaatccatcaacgggtgagaataaattttttggagaatatttaattaatgcgcaaggagaagatgttgtggctggtagtagaactccaagatatataacaaaaaaagcaaaagaagacgctggagcaaaagatgaatctatggaagaaactatgccaa

SEQ ID NO: 258103 - DNA, 847 bp, Unknown
  Bacterial polypeptide expressing nucleotide sequence isolated from the Sargasso Sea
ggactgcccgtaccacccggttttacaatatctacagaggtatgtgatttgttttataagaataaaaaaaaattaaataaaaaaatacttaatgaaataaataaagaattaaaatttattgaaaaagactcaggaaaaaaatttggagatataaaaaatccccttctagtttccgtaagatctggagctagggtttctatgcctggtatgatggatacaattttaaatctaggtctaaatgataatacggtaacagcacttgcaaaaaaaacttcaaatttaagatttgcaaatgatagttataggcgttttattcaaatgtattctaatgttgtattgggaatcgaaggttatcactttgaggatataatcgaaaactataagctaacaaaaggagtattactagacacagaattagatgagtatgactgggaagctttaataaaagattttaaaaacatagtaaaagaaaaaacaaaaaaagattttcctcaaaacgtcaaagagcaactagtgggagctataagtgctgtttttttatcttgggaaagtcacagagcgaaagtctatagaaaattaaatcaaataccttctaattggggtacagcagttaatgtacaatcaatggtttttggaaatatgggtaatgactgtgcaactggtgtagtttttactagaaatccatcagatggagccaaaaatatttatggagaatatttaataaatgcgcaaggagaggatgttgttgctggaaccagaacaccacaacatattacaaaaaaagctagagttgaatcaaaagaaactcttaagtcaatggaagaggcaatgccagcgacatacaagc

SEQ ID NO: 258104 - DNA, 649 bp, Unknown
  Bacterial polypeptide expressing nucleotide sequence isolated from the Sargasso Sea
atgaaaaaacttgtttttaactttaattcaaaagagtcttcaaaattaataaattctaaaaatttattaggtggaaaaggtgcaaatttagcagaaatgggtaaattgggtttgcctgtacctccaggttttactatttcaacagaagtatgtgaattattttataaaaataaaaaaaaattaaattcaaagattattgaacaaataagtaaagaattaaaaaatattgaaaaaaaatcagaaaaaaaatttggagatttaaaaaatcctttattagtttcagttagatctggtgcaagagtttcaatgcctgggatgatggatactattttaaatcttggtctgaacgataaaactgtaatagctcttgcaaaaaaaacttcaaatatgagatttgcaaaagatagctatagaagatttattcaaatgtattcgaatgtagttttaggtattgaaaactactattttgaggaattaattgaaaattataaattaaccaagggtgttttattagatacagatcttgatgagaatgattgggatggcttgattagtgattttaaaaatgtagttagagagagagccaataaagattttcctcaggatgtaaacctgcagcttgtaggagctatcagcgcagtatttttat

SEQ ID NO: 258105 - DNA, 397 bp, Unknown
  Bacterial polypeptide expressing nucleotide sequence isolated from the Sargasso Sea
aatgaaaaaacttatttttaattttagttcaaaagaatcattaaattcaaagaaagctaaaagtattttaggtggaaaaggtgcgaacttagctgaaatgggtaaactaggtttgcctgtacctccaggatttactatttcaacagaagtatgtgaattattttataaaaataaaaaaaaattaaattctcaaataattaaacaaataaatttagaactaaagaatatagaaaaacaaacaaaaaaaaaatttggtggtttaacaaatcccttgctagtttcagttagatctggcgcaagagtttcaatgccaggaatgatggatactattttaaatcttggtttaaatgataatacagttttagccctatcaaaacaaacttcaaatattagattt

SEQ ID NO: 258106 - DNA, 778 bp, Unknown
  Bacterial polypeptide expressing nucleotide sequence isolated from the Sargasso Sea
ttttataagaacaagaaaaaattaacacctaaagtatgtagtgaaattaaaaaagaattaaaaaaaattgagataaaaaccaaaaaaaaatttggagacaataaaaatcctttattggtatcagtaagatctggatcaagagtatccatgcctggaatgatggatacaattttaaatttaggtcttaatgatagaacggttgaagctttgtccaaaaaaacttcaaacgaaagatttgccaaggacagttatagaagatttattcaaatgtatgcaaatgtggttctaggagtagaaagtcatctattcgaggaaatgattgggaattataaattaaccaaaggtgttttgctggatacagaactaaatgctgatgattgggacggtcttattaaaaattttaaaaaattaatatcagaaaaaacaaaaaaaatttttcctcaagatgtgtatgagcaactttttggagctattaaagctgtatttttatcttgggaaagtaaaagagcaaaaatttatagaaagcttaaccacataccaggagattggggcacagcagtaaacgtccagtctatggtttttggaaacatgggaaatgattgtgctaccggagtagcatttactagaaacccatctactggagaaaataaattttttggcgagtatttgattaatgctcaaggagaagatgtggtcgctggaagcagaactccgagatatataacaaaaaaagctagagaagatgctggagcaaaagaagaatccatggaagaaataa

SEQ ID NO: 258107 - DNA, 845 bp, Unknown
  Bacterial polypeptide expressing nucleotide sequence isolated from the Sargasso Sea
aggcttaaacgacaggaccgtggaagcattgtcaaaaaaaacttcaaacgaaagatttgccaaagattgttatagaagattcatacaaatgtacgcaaatgtggttttagggattgaaagtcatctgtttgaggaaatgattgataactttaaactaacaaaaggtgttttaatggacaccgagttaaacgctgatgattgggatggcctaataaaaaatttcaaatttttaatattagaaaaaacaaaaaaagattttcctcaagatgtttacgcacaattgtttggagccatcaaagcggtatttttatcttgggagagtaaaagagcaaaaaattatagaaaatataatcatataccgtcagattggggaacagcagtaaatattcaatctatggtatttggaaatatgggaaatgattgtgctacaggtgttgcatttacaagaaacccgtcgactggagaaaataaattttttggagaatatttaataaatgcccaaggagaagatgtcgtagctggcagtagaacacctagatacattacaaaaaaagcaaaagaaaatgctggagctgaagaaaaatcgatggaagaaactatgccaaaagttttcaaggagcttaaaagcatttttgcgaaattagaaaaacattatcgagacatgcaagatattgaattcacagtagaaaataaaaaattatggatgctacagacaagaaatggaaagcgaactgcaaaagcagcaattaaaattgcagttgatatggttaaggaaaaactaatttctaaaaaggaagcaattttaagaattgatcctaacactctggatacacttttgcacccaa

SEQ ID NO: 258108 - DNA, 904 bp, Unknown
  Bacterial polypeptide expressing nucleotide sequence isolated from the Sargasso Sea
aggaacaggtatccgccaaaaattagagcaccatttagattcatacaaaactgaaaataatctcgatggagatactgatctttctgaggaggattggaaatatgtaattgatctatttaagaatgaaataaaatcttcttttggtgcagagtttcctgataatgctgaagctcaattatggggcgggattgaggctgtttttaaaagttggaatggtgcaagagcaataagctatagaagaatagaaaatataccagaagaatggggtaccgctgttaatgttcaaacaatggtctttggaaacacaggagaaaaatctgctactggtgttgcatttaccagaaacccagcaaccggcgaaaataaattttttggagaatggcttactaatgcacaaggagaagatgttgttgcaggccttcgcactcctaacccacttaatgaagacacaaagacagaagatactaggcacctcccctctttgcaagatactatgccaaagatttacgatgaattatttgaaataaaaaatagattagaaaaacattactccgacatgcaagatattgaattcaccatccaagagggaaaactgtggatgctccaaactagggttgggaaaagaaacggtgttgctgcaataaaaatggctgtagatatgtttaacgaaaatatgatagataaaaaaactgccattatgagagtaaatccaaatcagttagatgagctacttcatccagcattagataaagcaagcgaagatagcgctaccaaattaacaaaaggactccctgcaggcccaggtggtgcaaaaggcagagtagtctttacagctgacgatgcagaagaatggaaaaataaaggagagaaagtaattcttgtaagggaagaaacttctcctgag

SEQ ID NO: 258109 - DNA, 633 bp, Unknown
  Bacterial polypeptide expressing nucleotide sequence isolated from the Sargasso Sea
aatgaaaaaacttatttttaattttagttctaaagaatcattaaattcaaagaaagctaaaagtattttaggtggaaaaggtgcgaacttagcagaaatgggtaaactaggtttgcctgtacctccaggatttactatttcaacagaagtatgtgaattattttataaaaataaaaaaaaattaaattctcaaataattaaacaaataaatttagaactaaagaatatagaaaaacaaacaaaaaaaaaatttggtggtttaacaaatcctttgttagtttcagttagatctggcgcaagagtttcaatgccaggaatgatggatactattttaaatcttggtttaaatgataatacagttttagccctatcaaaacaaacttcaaatattagatttgcaaaagatagttacagaagatttattcagatgtactccaacgtagtcttgaatattgaaaattatcattttgaggaactaatagaaaattataaattaactaagggtgttttgttagatactgagcttgatgaaaatgactgggatggattaattaaagattttaaagatttagtcatagaaaaaacaaaaaaagaattcccacaagatgttaaacaacagcttattggagctat

SEQ ID NO: 258110 - DNA, 928 bp, Unknown
  Bacterial polypeptide expressing nucleotide sequence isolated from the Sargasso Sea
gttttacaatatctacaaagtttgtgaaattttttatagaaataaaaaaaaattaaataaaaatttaatttctcaaattaaaaaagaattaaaattaattgaaaaagatgtttctaaaaaatttggagatttaaaaaatccgcttttgttgtctgtgcgttctggtgcaagagtatcaatgccaggtatgatggatactattctaaatctaggtctgaacgataaaacagttaaagctttagcaattaaaacctcaaatggaagatttgctaaagatagttatagaagattcattcaaatgtatggtaatgtggtaatgggtgtcgaaggttattattttgaggaattaattgaaaattacaaacttacgaaaggtgttttattagatacagatttagatgaaagtgattgggatggattaattgaagactttaaaagaatagtaagagaaaaggtaaaaaaagattttccccaagatgtttatgaacaattgttaggagcaataagtgcagtatttttatcgtgggaaagtaatagagcaaaagtttatagaaaactaaatcaaatcccagctgagtggggaactgctgtaaatgttcaatcaatggtttttggaaatatgggtgatgactgtgcaacaggagttgtgtttaccagaaatccatcagatggatcaaatgaaatatatggtgaatatttaattaatgcgcaaggtgaagacgttgtagcgggtacaaggactcctcaatatattactaaaaaagctaggcaagatgccaaagtaaaagagttatcaatggaagaatctatgccaaaagtttttaaagaacttcaaaaaattttaaaaaagttagagaaacattataaagatatgcaagatgtagaatttacagtcgaaagtaataaactatggatgcttcaaacaaga

SEQ ID NO: 258111 - DNA, 360 bp, Unknown
  Bacterial polypeptide expressing nucleotide sequence isolated from the Sargasso Sea
gctttggaacaaatgacctaacacaggcagtgtttagttttagtagagaggatgcagaaggaaaattccttccagaatatatggaaaaagagctcctagaaaccagcccattccaatcaatcgatgtaaatggagtaggacatcttatgaaaattggcattaaacaaggaagagatatcaaaaaagatttggaaattggtatatgtggagaacatggcggagatccaaattcaattaaattctgtcattctgcaaacgtctcctatgtcagtgcatcaccacatagaattcctattgcaatagttgcagcagcacaagcagcaatagaacagaaaaaaactaaaaaatcaaagaaataaa

SEQ ID NO: 258112 - DNA, 752 bp, Unknown
  Bacterial polypeptide expressing nucleotide sequence isolated from the Sargasso Sea
cttggttgaaaaagattggaaaaatgtaattgaaatttttaaaaatgaaataagagcaactctaggatcagagttccctgatgatgctgaagctcaattatggggaggaattgaagcggtctttatgagttggaatggcgctagagctatgagttatagaaaaatagaaagcatacctgaagaatggggaactgctgtaaatgttcagactatggtttttggtaatacgggggaagaatcagctacaggagtcgcttttacaagaaaccctgcaactggagaaaataaattttttggggaatggctaacaaatgcacaaggagaagatgttgttgctggacttcgtactcctaatccacttaatgaggacacaaaaaccgaggacacaaaaaaccttccttcattggaagataccatgccagaaatatataatgagctatttaatataaaaaacagactagaaaaacattattctgacatgcaagatattgaatttactattcaagaagggaaactctggatgttgcaaactcgtgttggaaaaagaaatggtgtggctgcaattaaaatggctgttgatatgtttaatgagggaatgattgataaaaaaactgctataatgagagtaaaccctaaccaactagatgaattgctacacccagctttagataaaaacagtgaaaatagtgctacaacattaacaaagggtcttccggctggtccaggtggagcaaaaggacgagttgttttta

SEQ ID NO: 258113 - DNA, 910 bp, Unknown
  Bacterial polypeptide expressing nucleotide sequence isolated from the Sargasso Sea
tataaaaacaaaaaaaaattaaataaaaaaatacttaatgaaataaataaagaattaaaatttattgaaaaagactcaggaaaaaaatttggagatttaaaaaatcctcttctagtttctgtaagatctggagctagggtttctatgccaggtatgatggatacaattttaaatctaggtctaaatgataatacggtaatagcacttgcaaaaaaaacttcaaatttaagatttgcaaatgatagttataggcgttttattcaaatgtattctagtgttgtattgggaatcgaggcttatcactttgaggatataatcgagaactataagttaacaaaaggtgtattattagatacagaattagatgagtatgactggcaagctttaataaaagatttcaaaaacttagtaaaagaaaaaacaaaaaaagattttcctcaaagtgtcaaagaacaactggtaggagctataagtgctgtttttttatcttgggaaagccacagagcaaaagtttatagaaaattaaatcaaataccgtctaattggggtacagcagttaatgtacaatcaatggtttttggaaatatgggaaatgattgtgcaactggtgtagtctttactagaaatccatcagatggatccaaaaatatttatggagaatatttaataaatgcgcaaggagaggatgttgttgctggaactagaacaccacaacatattacaaaaaaagctagagttgaatcaaaagaaactcttaagtcaatggaggagaaaatgccaaagacatacaagcaactaaaaaatatattaatcaaattagaaaaacattacaaagatatgcaggatgttgaatttacagttgaaaataaaaaactttggatgcttcaaacacgctctgaaaacgaacagc

SEQ ID NO: 258114 - DNA, 883 bp, Unknown
  Bacterial polypeptide expressing nucleotide sequence isolated from the Sargasso Sea
atgggtagaatgggacttccagtgccccctgggatttacaatttcaacaaaagtttgtgaaattttttataaagataaaaaaaaattgaataataaattaattggtcagataaaaaaggagttaaagataattgaaaatgatgtatcaaaaaaatttggagatctaaaaaaccctcttttgttatctgtaagatctggagctagagtttcaatgcctggaatgatggacacgattctaaatcttggtttaaatgataagacagtaatagctttggcgaacaagacttcaaacggcaggtttgcaaaagatagttatagaagatttatccagatgtacggcaatgttgttatgggagttgaaagttaccattttgaagaactaattgagaactataaattgacaaaaggagtgttgttggacactgaattagaggaggaagattgggacggtcttataaaagattttaaaaatactgtaaaagaaaaaacaaataaagattttcctcaagacgtttatcaacaactgttaggtgcgattagtgctgtgtttttatcttgggagagtaatagagcaaaagtttacagaaaattaaatcagatacccgctgaatggggtacggctgtaaacgtacagtctatggtatttggaaatatgggaaatgactgtgcaactggtgtagtttttacaaggaatccttctgatggttcaaataatatctatggagaatatttaattaatgctcaaggagaagatgttgttgctggaactagaacacctcaatacataacacaaaaagcaaaaaaagaggctaaggttaaagaggcatcaatggaagaagcaatgccaaaagtttattcagaattagctaaaattttaaaaaaa

SEQ ID NO: 258115 - DNA, 522 bp, Unknown
  Bacterial polypeptide expressing nucleotide sequence isolated from the Sargasso Sea
aaatcatggtgcctctggtaggctttgatgccgagctcagggatcaagttgctatcgtgcgggctgttgccgacgaggtaatggctagagccggtatagaggtttcgtatcaggtaggaactatgattgaagtccctcgggctgctattacggcggatgaaatcgcgcaaacagcggagttctttagctttggaacaaacgacctgactcaaacaactctaggactttctagagatgatatggggacgttttttgatgtttatcgtgacaaggagatttacggtcacaatcctttcgccagtattgatgaggcgggcgttggacgcctgatgcgaacggctattcgtggtggcaaagacaagcggccgagcctcaaattaggtatctgtggtgagcacgcaggcgatgcctcttctatcgtgttctgcgaagagcttggcctcgattatgttagctgttcgccgcctcgtgtacctgtggctcggcttgccgctgcgcaggctgtgctacgcaggaattagc

SEQ ID NO: 258116 - DNA, 739 bp, Unknown
  Bacterial polypeptide expressing nucleotide sequence isolated from the Sargasso Sea
gaaaatccattattgctttcagttcgatctggtgccagagtttctatgcctgggatgatggatacaattttaaatttaggattaaatgataaaactgttaaagctctagcgacaaaaacttctaatagtagatttgctaaagatagctatagaagatttatacaaatgtatggcaatgtagtaatgggtgtcgaaggatatcattttgaggaattaatagagaattataaacttactaaaggagttttgttagacactgagttagatgaaaatgattgggatctactaatcaaagattttaaaagaacagttaaggaaaaagcaaataaagattttcctcaagatgtttatgaacaattatttggagctataagtgcagtttttttatcttgggaaagtaagagagcaaaagtctacagaaaattgaattatatacctgcagagtgggggacagcggtcaatattcaatctatggtttttggaaatatgggaaatgattgtgcaacaggggttgtttttacaagaaatccatcaagtggtgaaaacgaaatttatggagaatatttaattaacgcacaaggagaagatgttgttgctggtacaagaacaccacagtacataaccaaaaaggctagacaaagtgctaaagttaaagctctatcaatggaagagtatatgcctgaagtttataaaaaactttataaaattctaaaaaaattagaaaatcactacaaaaata

SEQ ID NO: 258117 - DNA, 875 bp, Unknown
  Bacterial polypeptide expressing nucleotide sequence isolated from the Sargasso Sea
agtattgaatgttggtcttacgagcaaaacaattccaggactaatcaaaaaaactggtaacccaagatttgtctatgatgcatatagaaggcttattacaatgtacgcagatgtagtaatggaaaaagcagcgggaattgaaccaaaagacggtgttggaataagacaaaaacttgaacaccatttagattcatataaatctaaaaatgggctcgaaggcgatactaatctatctgaagaggattggaaaagtgtaattgatatatttaaggatgaaattaaatcttctcttggtgcagagtttcctgacaatgctgaagctcaattatggggtggaattgaggctgtttttaaaagttggaatggtgcaagggcaataagctacagaagaatagaaaatataccagaggaatggggtaccgctgttaatgtccaaacaatggtctttggaaacacaggagaagaatctgccactggtgttgcatttaccagaaacccagcaactggtgaaaataaattttttggagaatggcttactaacgcacaaggagaggatgttgttgctggtcttcgtacgcctaatcccctgaatgaagacacaaagacagaagatactagccacctcccctctttgcaagatactatgccagagatttacgatgaattatttgagataaaaaatagattagaaaaacattactccgacatgcaagatattgaattcaccatccaagagggaaaactgtggatgctccaaactagggttggaaaaagaaatggtgttgctgcaataaaaatggctgtagatatgtttaacgaaaatatgatagacaaaaaaactgccattatgagagtaaatccaaatcagttagatg

SEQ ID NO: 258118 - DNA, 541 bp, Unknown
  Bacterial polypeptide expressing nucleotide sequence isolated from the Sargasso Sea
atgcctaaatacttgtttagttttggagacaaaaaaacaaaaaaaatattaaattccaaaaatattttggggggaaaaggagcaaacctagctgaaatggctagacttggattgcctgtacctccaggctttacaatttctacagaattgtgtgctgttttttataaaaataaaaaaaaattaaccccaaaaattttcaacgaaattaagaaagaattaaaaaaaattgaatcaataaccaaaaaaaaatttggtgacaattcaaatccattgctagtatccgtaaggtccggctcaagggtttctatgccaggtatgatggatactattcttaatttaggtctaaacgataagacagtcgaggcattatcaaaaaaaacctccaacgaaagatttgcaaaagatagttatagaagatttatacaaatgtatggaaacgtcgttttagggatggaaagccatctttttgaggagatgatagataactataaattaaccaagggagttttaatggatacggaattaaactctgaagattggg

SEQ ID NO: 258119 - DNA, 790 bp, Unknown
  Bacterial polypeptide expressing nucleotide sequence isolated from the Sargasso Sea
gcccgcgccgtcgctgcccccgaggcccccgccgtcaccaagcgagtcttcaccttcggcgacggacaggccgacggcgacgcctccatgaagaccctgctgggcggcaagggcgccaacctcgcggagatgaaccgaatcggcctctccgtccccgcgggattcaccgtcaccaccgagacgtgcgccgcgttccacgaaaacggcggcgagctcccggctggctgctgggacgagatgctcgagggactcgccttcgtggagaagtgcatggggaagaagctgggcgacgcgtccaaccccttgctcctctccgtccgctccggcgcggcggtctccatgcccggcatgatggacaccgtgctcaacctcggactcaacgacgacgtcgccgagggactcgccgccaaagccggcgagaagtttgcgtttgattcctaccgccgattcctggacatgtacggagacgtggtcatgggcatcgagcaccacctgttcgagcaccagatcgactcgctgaagaaggaagtgggcgtcgcgcaggacaacgagctcaccgcggagcacctgagggagctcgttaagcggtacaagaaggtttacgaagccgaagggaagatgttcccgcaggagcccctcgagcagatgcgcctcgcggcgaacgcggtgtttgacagctggaacagcgaccgcgcgaagaagtacatggcgatcaaccagatcaccggcctgaagggcaccgcggtgaacatccaggccatggtgttcggcaacatgggcgaaacctcgg

SEQ ID NO: 258120 - DNA, 895 bp, Unknown
  Bacterial polypeptide expressing nucleotide sequence isolated from the Sargasso Sea
aatgaaaaaattagtatttaactttaaatccaaggatatcaaaaaattaaaaaatccaagaaatattcttggtggaaaaggtttaaatttagctgagatgggcaaactaggaatgcctgttccaccaggtttcactatatcaacagaagcatgcgattttttttataaaaataggaaaaaattaaatgctaaaataattaaagaaattaaagacgaattgaaaattgttgaaaaagaaaccgggaaaaaatttggtgatttaaaaaatccattgttggtttcagtaagatcgggtgcaagagtttcaatgcctggtatgatggatacgattttaaatttaggattaaatgatcaaacagtaactgctttagcaaacaaaacatctaatttaagattcgctaaagatagctatagaagatttattcaaatgtattctaacgtggttttaggtattgagaattataatttcgaggacctaattgaaaactataaattaactaaaggtgtgctcttagatacagagcttgatgaaaacgattgggatggtttaataaatgattttaaaaatattgttaagcaaaaaacaaaaaaaagttttccacaggatgtaaaggaacaattaaatggtgcaattagcgctgtgtttttgtcatgggagagtcatagggcaaaagtctatagaaaattaaatcaaataccatctacttggggaactgcagtgaacattcagtctatggtctttggaaatatgggtaatgattgtgctacaggagtagtttttaccagaaacccatcagatggtggtaattatatttatggtgaatatttaattaatgcccaaggtgaagatgtagtagctggaaccagaacacctcaacatataaccaaaaaagct

SEQ ID NO: 258121 - DNA, 878 bp, Unknown
  Bacterial polypeptide expressing nucleotide sequence isolated from the Sargasso Sea
gatggataccatccttaatttaggactaaatgacaaaactgttattgcccttgcaagaaaaacttcaaatgaacgatttgcaaaagatagttatagaagatttattcaaatgtatgccaatgttgttttgggagtagaaagttataattttgaggaattaattgaaaattataaactaacaaagggagttttgttagataccgatcttgatgaaaatgattgggatggccttattaaagatttcaaaaatgttattaaaacaaaaacaaaaaaagaatttcctcaagatgtttataatcaattaataggagcaatttcagcagtatttttgtcatgggagagcaaaagggcaaaagtttatagaaagctaaatcaaataccatcagaatggggaacagcagtaaacgttcaactaatggtctttggaaatatgggtcaagattgtgctaccggagtagtttttaccaggaatccttccactggttcaaaagaaatttatggagagtatttaataaatgctcaaggagaagatgtcgttgctggaacaagaacaccacaatatataacaaaaaaagcaaggatagaagccaatgtaaaagaaaaatcaatggaagagtcaatgaataaagtatttaaacaattagataaaattttaaaaaatttagaaaatcattataaagatatgcaggatgttgagttcacagttgaaaataaaaaactttggatattacaaacaagatctggaaaaaggacagccaaatcagcagtaaaaattgcagttgacatggttaaagaaaaattaattacaaaaaaagaagctattattagaatagacccacattctttggatacacttctacacccaaccttaaatgaaa

SEQ ID NO: 258122 - DNA, 800 bp, Unknown
  Bacterial polypeptide expressing nucleotide sequence isolated from the Sargasso Sea
gaaccttcctgtaactataaggcttttagatccacctctgcatgagtttcttccaaattcacaacaagaaattcagaggacggcaaatcttatggcgataacggaacagcaactagctgatcgcattaaagatttatcggagttcaatccgatgttgggtacaagaggggtgaggcttggtgtgatggttcccgagatatatgatatgcaggtgcaggctatttttctggcggcgattgaggttttcaagaaatacaaaatagtagtaaatcccgaaattatgattccattaatttctgctaataaagaagttgatttggtgagagatagaattagagaagttttttcacaattgaacaagaacaattttgtagatcttaaatataagttaggagtaatggttgaaactcccagagctgcgttaagagccggtgacattgcgaaatcgtgtgattttttgagttttggtaccaatgatctaacacaaatgacttatggcttgagcagagatgactctaatagatttatgaaggagtatatagagaaaggactttacagtggcgaccccttcaaaactattgatgtcgagggagtaggcgaattgcttaaaatagcagttcaaagagctagaaatacaaattcaaagatagtaacgggcttgtgtggcgagcatggtggtgaccctacatccattcatttttgtcgctctgttggttttgaatacatatcatgttcgccatacagagtgccgatcgctaggttggccgctgctcaatcaagaataagaaatttaaactaga

SEQ ID NO: 258123 - DNA, 838 bp, Unknown
  Bacterial polypeptide expressing nucleotide sequence isolated from the Sargasso Sea
cggtgcagcttccggtaagatttatttctccgccgaagacgcagtgaaggcagcagcgaaagggcaaaacgtgattcttgtccgccaagccacttctcccgaagatcttcgtggtatgatcgccgccgacggcatcctcaccaccgaaggtggggcttcttcgcatgctgctcttgtggcccgccagatgggcaaggtttgtgtttgcggtgcccacggcatgtcgatcgactacgccaagaagacgctttccggaaacggtgttactctgaaggaaggcgatgagctttccctgaacggatttgttggaaacgtttacaagggcaatattaagtcttctccttcacaggtcattcaggggctcatcgagaacaaggctgctgccaagcgttctgacacatacaaaaagttcatggagctcatgagctggaccgacaagctgcgcacgctcggtgtccgcaccaactcggacactccggagcaggtgcagcaggccatcaagtttggtgctgaaggcattggcctgacccgcgccgagcatatgttttttgagggtagtcgcattgatgcggttcgtgagatgatcctcgctgatgacgatgctggccgcgccaaggcgctcaagaagatcaaggtcttcatgaagaaagacttcattgggatcttcaagtcactcgaaggtcgcccggccaccattcgtcttctagatcctcctcttcatgaattcatcggcaccatggatgccgatcagaagaaggatctctccaagaagatcggcatgagcgctcctgcgatcactaagcgtatccacgctttgcacgaggagaacccgatgctg

SEQ ID NO: 258124 - DNA, 606 bp, Unknown
  Bacterial polypeptide expressing nucleotide sequence isolated from the Sargasso Sea
tacgacttgcaattacgacagaagacctttaccggacacaaacacgggcgctcatagcagcagttaaaaaacgcatctcacaaggtggtgacccgaaagtggagatcatggttccccttgtatctcttgaagaagaacttaccctcgtggtggaatggatcagagaagagctaaataattcaccgatacgcatacccgttgggacaatgatcgaaacccccagagcagcgctaattgctggagctctagcgaaacacatcgatttcataagttttggcacgaatgaccttactcagatgacgtttggatttagccgcgatgatgtggaagttactgtcattaacgagtacatcgaaaaagaacttcttgagaaaagcccatttgagacactcgatattggtggtgtcggtcaactggtcacaacaggaatcaccgaaagtcggaaagtaaacccaagtataaaaatcggtatctgcggtgaacacggaggcgacccagcgtcaatacgatttttagtagacgccggtgtagattatgtcagctgctcaccaccacgaatacctatagcgcgacttataagcagtcaaatacttctcgatatgtaaa

SEQ ID NO: 258125 - DNA, 844 bp, Unknown
  Bacterial polypeptide expressing nucleotide sequence isolated from the Sargasso Sea
aaatattttacaaggataaaaaaaaaattaaataaaaatttaatttctcaagttaaaaaagaattaaaattaatcgaaaaatacgtttttaaaaaatttggagacttaaaaaatccacttttgttgtctgtacgctctggcgcaagagtatcaatgccaggtatgatggatactattctaaatctgggtcttaacgataaaacagttaaagcattagctattaaaacttcaaatggaagatttgctaaagacagttatagaagattcattcaaatgtacggtaatgtggtaatgggtgtcgaaagttatcattttgaggaattaattgaaaattataagcttacgaaaggtgttttgttagatacagatttagatgaaagtgattgggatggactaattgaagactttaaaagaacagtaagaaaaaaggccaaaaaagaatttcctcaagatgtttatgaacaattactaggagcaataagtgctgtatttttatcgtgggaaagcaatagagcaaaagtttatagaaaactaaatcaaatcccagctgagtggggtactgctgtaaatgttcaatcaatggtttttggaaatatgggtgataattgtgcaacaggagttgtgtttacaagaaatccatcagatggatcaaatgaaatatacggagagtatttaataaatgctcaaggtgaagatgttgtagcgggtacaaggacacctcaatatattactacaaaagctagacaagatgcgaaagcaaaagaattatcaatggaagagtctatgccaaaagtttttaaagaacttcaaaaaatattaaaaaagttagagaaacattacaaag

SEQ ID NO: 258126 - DNA, 907 bp, Unknown
  Bacterial polypeptide expressing nucleotide sequence isolated from the Sargasso Sea
ttcccccccggttttacaatttctacaaaagtatgtgatttattttataaaaataaaaaaaaattgaattcaaaaatagttaaagatattaaaaaagagcttaaatttattgaaaaagagactggtaaaaagtttggtgatttacaaagtccacttttagtttctgttagatcgggagcgagagtgtcaatgcccggcatgatggatacaattttaaatcttggacttaatgacaaaacagttttagctttagccaataaaacttctaacatgaggtttgccaaagatagctatagaagatttattcaaatgtacagcaacgtagttatgggagttaaaagttatcactttgaagagttaattggaaattataaacttaccaagggagttttattagatactgaactagatgaaaatgattgggatggattaataaatgattttaaaagaatagttaaagaaaaaacaaataaagaatttcctcaaaatgtctttgatcaattatttggttctattagtgcagtatttttatcttgggaaagcaatagagctaaagtttatagaaaattaaaccaaattccttcagaatgggggacagcagttaatgttcaatccatggtttttggaaacatgggatatgacagcgcaactggagtagtttttacaagaaatccatctgatggaacgaatgaaatttatggtgaatatttagttaatgctcaaggagaagatgtcgtagctggaacaagaacgccacagcacattactaaaaaattacggattaatgctaagacaaaagaaagatcaatggaagagtttatgccaaaactttttaatcaattaaaaaaaaatttactcattttagaaaaatattacaaagatatgcaagatgtcgagttacgataga

SEQ ID NO: 258127 - DNA, 874 bp, Unknown
  Bacterial polypeptide expressing nucleotide sequence isolated from the Sargasso Sea
aaagtttgtgaaatttattataaaaacaataaaaaacttaatactaaaattattaaagaaataagaaaagagttagcagtaatagaaaaagaatctggtaaaaaatttggagacttaaaaaatcccttattagtttcagtaaggtcaggagcaagagtttctatgccaggcatgatggatacaattttaaacttaggattaaatgataaaactgttttggcattagccaacaaaacttcaaatcgtaggtttgcaaaagatagttatagaagatttatacagatgtatagcagtgttgttatgggaatagataattataattttgaagaattaattgaaaattataaattaactaaaggagtacttttggatacagaattagatgaaaatgactgggatggtttaataaatgattttaaagaggtagtattaaaaaaaacaaaaaaagaatttcctcaaaatgtttttgagcaacttttcggggctataagtgctgtttttttgtcatggaatagtaacagagcaaaagtatataggaaattaaatcggataccatcggactggggtactgcagttaatgttcagtcaatggtttttggaaatatgggaaataattgtgcaacaggagtagtgtttactagaaatccatctgatggaaataatgaaatttatggagaatatcttatcaacgctcaaggagaagatgtagtagcaggaaccaggactcctcaatacataactaaaaaagctagaataaattctttatcaaaagttaaatcattagaagagacaatgccaaaagtatttaatcagctcaaaaaaatactaaacaaattagaaaaacattataaggatatgcaagatgtagagttta

SEQ ID NO: 258128 - DNA, 710 bp, Unknown
  Bacterial polypeptide expressing nucleotide sequence isolated from the Sargasso Sea
gccaaagatatttaaacaactaaaaaaaattttaaaatctttggagaagtattacaaagatatgcaagatgtagagtttactatagaaaatggaaagctttggatacttcagacaagatcaggtaaaaggactgctaaatcagcaattaaaatagctgttgacatggttaaagaaaaattaataacaaaaaaagatgcgttattaagaatagaccccggatcgcttgataatttattacacccttccttagatgaaaaagccgaaatgaacataattgcaaatgggttgcctgcttcaccaggcgcatcaagtggaaaagtggttttttcatctgatgaagccgaaagacttaattctatgatgcaagatacaatattggtaagagtagaaacttctccagaggatataaacggcatgcatgcggccaaaggaatattaacttcaagaggaggcatgacaagtcatgcagcagttgtagcaagaggcatgggtagaccatgtgtttctgggtcaagtgagattgaaattgattacaacaaaaaaatttttaaggttaataataaaattgttaaggaaggagaaattataacaatagatggatcttctggaagagtaattctgggagaggtcaaaactattaaacccgacgtatctggagattttcttacagtaatgaaatgggcagataaatatagaaaacttaaaataa

SEQ ID NO: 258129 - DNA, 448 bp, Unknown
  Bacterial polypeptide expressing nucleotide sequence isolated from the Sargasso Sea
tatgagtaggacacagtgggtataccgcttcggcggcggcgattctgaaggtgccgcggagatgagaaacctgcttggcggcaagggggcgaacctagccgagatgtcgtcgctgggattgccggtgccgccgggtttcacgatcacgaccgaggtctgcaccgcctattatgacaatgactggaattacccggacgacctgtcgggccaggtagatgcggcgctcgcctttatcgaggaaacgggcggcgcaaagttcggcgatcccgacaacccgttgttggtgtcagtgcggtcaggcgcgcgtgcatccatgccggggatgatggatacagttcttaatctcggcctcaacgatgcgacggtcgaaggactggccgcaaacagcggcgatgcgcgcttcgcctgggattcctatcgccggttcattcagatgttcggtgatgtg

SEQ ID NO: 258130 - DNA, 889 bp, Unknown
  Bacterial polypeptide expressing nucleotide sequence isolated from the Sargasso Sea
attgcacgttgacagcggcaaggctcctgcctattttccgcgctccggttttccggcgaacttcgaaagagatcttatggctaaagcaaaaaagtacgtttaccacttcagtaaatccaaaacggatggcaacggttccatgaaggcgctgttaggcggtaaaggcgccaaccttgccgaaatgagcagcattggagttcctgttccggctggtttcaccattacgaccgaagtttgcacgtactattacgacaacggtaagaaataccccaagactctcgatgccgagatcgaggcaaacattacaaaggtcgaaaaggccatgggcaaaaaatttggtgatctcgagaatccccttctgctttctgtccgttccggtgcgcgtgagtcgatgcccggtatgatggacaccattctcaatctcgggattaatgacgaagttgttgaggccctcgccaagaagaccggcaatgcaaaatttgcgtgggactcctaccgtcgtttcctccagatgtacggaagcgttgtgatggaagtggaagccgaagctggcgagcaccacgatccttacgaggtgattctggataaagccaaggccaaggccaaggtggaagacgattccggcctcaaggaaaatgacctccgcgaagtggtcgctgctttcaaggcgttgattaagaaacgctccggccagaacttccccgaagatccgcgtgagcagctcaagggagctgtgacggccgtcttcaattcctggcaaaacgaccgcgcgattgtttatcgccagaagtatgggatttccgctgcttggggaacggctgttaatgttcaagcaatggtctttggtaacaccggaaagaagtccggaaccggcgttgcatttacccgt

SEQ ID NO: 258131 - DNA, 876 bp, Unknown
  Bacterial polypeptide expressing nucleotide sequence isolated from the Sargasso Sea
gttgcagggcttcgcactcctaacccactaaatgaagacacaaagacagaagatactagtcacctcccgtcattgcaagatactatgccagagatttacgatgaattatttgaaataaaaaacagattagaacaacattattctgatatgcaagatattgaattcaccattcaagaaggaaaactgtggatgctccaaactagagttggaaaaagaaatggagtagctgcaataaaaatggctgtagatatgtttaatgaaaatatgatagataaaaaaactgctattaagagagtaaatccaaatcaattagacgaactacttcatccaacattagataaagcaagcgaagacagcgctaccatattaacaaaaggacttccggcaggtccaggtggcgcaaaaggtagagtggtttttacagctgatgatgctgaagaatggaaagataaaggtgaaaaagttatactcattagggaagaaacctcacctgaggatgtccatggcatgcacgccgctgaagcaatattgacagctcgtggaggaatgacctcacatgcagctctagttgcaaggggctggggaaaatgctgtattgtcgggtgtaatgaagtaaatatttctatacaggataaacaattatcagtgggggatgtagttgttaaagaaggtgattggataacaatgaatggtactattggagtggtatatttaggccaattagatctaatacctgctgatccagatagaaatgtagaatacaaagaattaatgaaatgggcagatgaaataagaaaactaaaaataagaacaaatgctgaaagtccagaagacgcaaaacaagctataaaatttggcgctgaaggaataggctta

SEQ ID NO: 258132 - DNA, 486 bp, Unknown
  Bacterial polypeptide expressing nucleotide sequence isolated from the Sargasso Sea
gcagggccttccagttacggtcagattacttgatccaccgcttcatgagttcttgccaaaatcagaaaaagaaatttcagaagttgctgatgtagttggtgctgacaaaaaagaggtggtgtctagaatagaagaacttcatgaacaaaatccaatgttaggacatagagggtgcagattgggtatctcatttcctgaaatttatgaaatgcagtgcagagcaatttttgaagccttatctgatttaaaaaaaaagaaacaaaaaacagctattcctgaaattatgattccacttgtttcaacagaagcagagataaaaataatgaaagatcttgtaataaaaactgcgaaaaaagtgcaagatgaaaataaaattaaaatagcatttttcgtcggaacaatgattgaattaccaagagcagcaataaaagcacacgatatagctaaacatgcagagttttttagttttggaacaaacgatttaac

SEQ ID NO: 258133 - DNA, 415 bp, Unknown
  Bacterial polypeptide expressing nucleotide sequence isolated from the Sargasso Sea
atgaaaaaacttatttttaattttaaatctaaagagtttaaaaaattaaaggaacctaaaaatattttaggaggcaaaggtgcaaaccttgctgaaatgggaaggctaggattgccagtaccacctggttttacgatttctacgaatgcatgctctttgttctatgaaaataaacgaaaattaaatagaaaattaattaaagaaattaacaaagaagtaaaattgattgaaaaagacacaaagaagaagtttggagatcttaaaaatcctttactaatatcagtgagatctggagcaagagtttctatgccaggtatgatggatacaattttgaatctgggccttaatgataaaacagtttcagctttagcaaaaaaaacctcaaatgctagatttgcaaaagacagctatcgaa

SEQ ID NO: 258134 - DNA, 859 bp, Unknown
  Bacterial polypeptide expressing nucleotide sequence isolated from the Sargasso Sea
aaaaataaaaaattctagaaatattctggggggaaaaggatctaatcttgctgaaatggcaagattgggtttgccagttcctccaggttttacaatttcaacagaaatgtgcgaagttttttacaaaggtaagaaaaaattaactcccaaaatcttcaaggaaattaaaaaagaattaaaaaaagtagagttaaaaactaaaaaaaaatttggtgataatacgaatcctctattagtatctgtaagatctggatcaagagtatctatgccaggaatgatggatactattcttaatttaggtctcaacgataaaacagttcaagcattgtcaaaaaaaacctcaaatgaaagatttgccaaagatagttacagaagatttattcaaatgtatggaaatgtagttttaggagtagagagccatttatttgaagacttgattgataattataaattaacaaaaggagttttattagatacagagctaaattctgatgattgggacggtctaattaaaaattttaaagaactgatatcagaaaaaactagtaaaaattttccacaagacgtttatgatcagttatttggcgctattaaagctgtatttttgtcctgggaaagcaaaagagcaaaaacttatagaaaatttaatcacatacctgctgactggggaacagcagtgaatgttcaatcaatggtatttggaaatatgggtgatgactgtgctactggagtagcttttactagaaatccatcaactggagaaaataaattctttggagaatacttaattaatgctcaaggagaggatgttgtagccggaagtagaacacccaagatatataacaaaaaaatcaaaaga

SEQ ID NO: 258135 - DNA, 592 bp, Unknown
  Bacterial polypeptide expressing nucleotide sequence isolated from the Sargasso Sea
gatgcctaaatacttgtttagttttggagacaaaaaaacaaaaaaaatattaaattccaaaaatattttggggggaaaaggagcaaacttagctgaaatggctagacttggattgcctgtacctccaggctttacaatttctacagaattgtgtgcagttttttataaaaataaaaaaaaattaaccccaaaaattttcaacgaaattaagaaagaattaaaaaaaattgaatcaataactaaaaaaaaatttggtgataattcaaatccattgctagtatccgtaaggtccggttcaagggtttctatgccaggtatgatggatactattcttaatttaggtctaaacgataagacagtcgaggcattatcaaaaaaaacctctaacgaaagatttgcaaaagatagttatagaagatttatacaaatgtatggaaacgtcgttttagggatcgaaagtcatctttttgaggaaatgatagataactataaattaactaagggagttttaatggatacggaattaaactctgaagattgggacggtcttataaaaaattttaagggtttaatattagaaaaaacaaagaaa

SEQ ID NO: 258136 - DNA, 755 bp, Unknown
  Bacterial polypeptide expressing nucleotide sequence isolated from the Sargasso Sea
atgggtttaccagtacctcctggttttactttttcaacaaacgtgtgcgaaattttttataaggataaaaaaaaattaaactctaaattaattaaccaaataaaaaaagaaatcaaaacaatagaaaaagatgtatctaaaaaatttggagatttaaaaaatcctcttcttttatcagttcgatctggagcaagagtttcaatgccaggtatgatggatacaattttgaacttaggactaaatgataaaacagttgttgccttggctaacaaaacatccaacggaagatttgcgaaagatagctatagaagattcattcagatgtacggaaatgtagtcatgggtgtcgaaagttacaattttgaagaattgatagaaaattataagttaacaaaaggtgtcttgcttgatacggatcttgatgaagaagattgggatggtttaataaatgattttaagaatgtagttaaagaaaagaccaataaagattttcctcaaaatgtttatcatcaattattcggtgcaataagtgctgtatttttatcttgggaaagtaaaagagcgaaaatttatagaaagttaaatcaaattccttccgaatggggaactgctgttaatgttcaatctatggtttttggaaatatgggtaatgattgtgcaacaggagttgccttcactagaaacccttcaaatggatcaaatgatatttatggagaatatttaattaacgctcaaggagaagatgttgtagctgg

SEQ ID NO: 258137 - DNA, 814 bp, Unknown
  Bacterial polypeptide expressing nucleotide sequence isolated from the Sargasso Sea
tattaaagaaataaatgaagaattaaaaaatatagaaaaaaaatcaaaaaagaaatttggtgacttaaaaaatcctttactagtctctgttagatctggcgcaagagtttctatgcccggaatgatggatactattttaaatctaggtcttaacgataaaacattaatagctcttgcaaaaaatacatcaaatatgagatttgcaaaagatagttatagaagatttattcaaatgtactcaaatgtagttttgggtattgaaaattaccattttgaggaattaattgaaaattataagttaactaagggtgttttattagatacagatcttgatgctgatgattggggtggtttgataaaagattttaaaaatgtagttagagaaaaaacaaaaaaagattttcctcaggatgtaaaacagcaactttttggagccattagtgcagtatttttgtcatgggaaagcaatagagcaaaagtgtataggaaattaaatcaaattccgtcaaactggggtacagcagtaaacattcaatcaatggtttttggcaatatgggagataattgtgctacaggagtggtttttacaagaaatccatctgatggaagtaaagaaatatacggagaatacttaattaatgctcaaggagaagatgttgtagcaggaacaagaactccgcagcatataactaaaaaagctagaataaaatcaaaggaaaaattactttcaatggaagaaactatgccttcgatttacatacagttaaaaaaaatattattaaagttagagaagcactataaagatatgcaagat

SEQ ID NO: 258138 - DNA, 913 bp, Unknown
  Bacterial polypeptide expressing nucleotide sequence isolated from the Sargasso Sea
aaaataattgaaaaagaatctaaaaaaaaatttggtgatttagaaaatcccctattggtttcagtgagatctggagcaagagtgtcaatgcctggtatgatggatacaatattaaatttaggtcttaatgataaaactgttgtggctttggctaaaaaaagttcaaacttaaggtttgcaaaagatagctatagaagatttatccaaatgtatagcaacgtagttttgggcgtagaaagttataattttgaagaattaattgaaaattataaacttaccaagggagtattactggatacagatttagatgctcaagattgggacggactaattaaagattttaaaagaattataagagagaaaacaaaaaaagaatttccccaagatgtttttcaacaattgttgggcgctgtaagtgcagtatttttgtcgtgggaaagcaacagagccaatatttatagaagattaaaccagattccttctcattggggaacagcagtaaatgttcaatcaatggtttttggaaatatgggagaagattgtgcgacaggtgtagtctttacaagaaatccttcagatggaaaaaatgaaatttatggtgagtatttaattaatgcccaaggagaagatgttgtagctggaaccaggacacctcaatacattacaaaaaaagcaagaaaaaaatctggctcaaatggaaaatcaatggaagaaactatgcctgatgtgtttaaagaattaaaaaaaaatttaaaaattttagaaaaacattacaaagatatgcaagatgttgaatttactgtagaaaataaaaaactttggatgctacagacaagatctggaaagagaacagcaaaatcttcagtaaaaatagcagtagaaatggttaaagaaaaattaattcaaaaaaaga

SEQ ID NO: 258139 - DNA, 811 bp, Unknown
  Bacterial polypeptide expressing nucleotide sequence isolated from the Sargasso Sea
cgccgcttcatccagatgtatagcgatgttgtgatgggggtagatcacggtttattcgaagatgcactggagaatatgaaaatgcaacgcggtgtcttcgaagacacagaattaactggcgttgatcttcaggctcttgtcgaagtttttaaaaatattgttcacgaagagttagatgaggtctttccgcaaaatccttggcatcaactttggggagctataggtgccgtctttacaagttggatgaatgctcgtgcaattacctaccggcggttgaataatatacctgctgcttggggaaccgctgtcaatgttcagggcatggtctttggaaatatgggtaatgattgtgcaaccggggttgcctttactcgcgatccgtcaaccggcgaaaacagtttttacggggaatttttgttcaatgcgcagggggaagatgtcgttgcgggtatccgcactccattgccgctgacaaaagcggctcgaatcaatgcggatggcgatgtgcaatcaatggaagaagcgatgccagaggtattcaaacagcttgatgcagttcgcaaaacgcttgaaagccattatcgagatatgcaggatcttgagtttacggttcagcagggtgttttatatatattgcaaacacgtagtggtaaacgcaccgccgaggctgcacttcgtatggctgttgaaatggctgatgagggattgatcagccgagatgaggctttgtgccgaattgacagcaacgcacttgaccagttgcttcatccaacgctagatcctcatgccgaaagggttgttttgacgcgcg

SEQ ID NO: 258140 - DNA, 853 bp, Unknown
  Bacterial polypeptide expressing nucleotide sequence isolated from the Sargasso Sea
tttacaatatcaacagaggtttgtgaaatcttttataaaaataaaaaaagattaaatcaaaatctaatttctcaaattaaaaaagaattgaaattaattgaaaaagatgtttctaaaaaatttggagacctaaaaaatccacttttgttgtctgtacggtctggcgcaagagtatcaatgccaggtatgatggatactattctaaatctgggtttgaatgacaaaacagttaaagctttagctattaaaacatcaaatggaagatttgctaaagacagttatagaagattcatccaaatgtatggaaatgtagtaatgggtgttgatagttattattttgaggaattaattgaaaattataaacttacgaaaggtgttttgctagatacagatttagatgaaaatgattgggatggattaattaaagactttaaaagaacaataagagaaaaggctaaaagagattttcctcaagatgtttataaacaattgttaggagcaataagtgcagtatttttatcgtgggaaagcaatagagcaaaagtttatagaaaactaaatcaaattccagctgagtggggcactgctgtaaatgttcaatctatggtgtttggaaatatgggtgatgattgtgcaacaggagttgtttttacaagaaatccatcagatggttcaaatgaaatttatggtgaatacttaattaatgcacaaggtgaagatgttgtagcgggtacaaggactcctcaatatataacaaaaaaagctagacgagacgctaaagtcaaagaattatcaatggaagaatctatgccaaaagtctatagagaacttcaaaaaattttgaaaaaattag

SEQ ID NO: 258141 - DNA, 815 bp, Unknown
  Bacterial polypeptide expressing nucleotide sequence isolated from the Sargasso Sea
aatgccgagatacatttttagctttggggacaaaaaaacaaaaaaagtatcaaactcaagaaatactttaggaggaaaaggagcaaaccttgctgaaatggcaagactaggtttgcctgtgccaccaggttttacaatttcaacacaaatgtgtgaaattttttataaaaataaaaaaaagctatcaccaaaagtatgtagtgaaattaaaaaagaattaaaaaaaattgagacaaaaaccaaaaaaaagtttggtcacaatacgaatccattgcttgtttcagtgagatctggatcaagagtatcaatgccaggaatgatggatactattttgaatttaggtcttaatgacaagacagtagatgctctatcaaaaaaaacttctaatgaaagatttgctaaagatagttacagaagatttatacaaatgtatggaaacgttgttatgggcataaagaatcatctttttgaagaaatgatcgacaactataaattaactaagggtgttttatcagatactgaactaaattcagaggactgggatggtttaataaaaaattttaaaaatttaatatcagaaaaaactaaaaaaaattttccccaagatgtatatgaacaactttttggggctattagagctgtttttttatcttgggaaagtaaaagagcaaaaacttatagaaagctcaatcatattccaggaaactggggtacagctgtgaatgttcaatcaatggtttttggtaacatgggaaatgattgtgctaccggggtagcttttacaagaaatccatcaactggcgagaataaatttt

SEQ ID NO: 258142 - DNA, 738 bp, Unknown
  Bacterial polypeptide expressing nucleotide sequence isolated from the Sargasso Sea
tttgcgaaagatagttatagaagattcattcaaatgtatggaaatgtggtaatgggcgtagaaaactatttttttgaagaattattagacaactataaattaacaaaaggagttttgttagacacagagcttggcccagatgattgggatggattaattaaaaattttaaaaatttaatatttgaaaaaactaaaaaaaattttccccaagatgtatatcaacaactttttggggcggtacgtgcagtatttttgtcgtgggaaagcaaaagggcaaaaacttatagaaaacttaatcatatccctggagagtggggaacagctgttaatatacaatcaatggtttttggtaatatgggaaatgattgcgctacaggagtagcttttacaagaaatccatctacaggtgagaatagattttttggtgagtatcttattaatgcccaaggagaggatgtagtggcaggaagcagaacaccaagatatataactaaaaaagctagagaagatgcaggtgccaaagaaaagtcaatggaagaaacaatgccagtagtttttaaagaattaaaaagtgtttttataaaattggaaaaacattacagagatatgcaagacatagaatttactgttgaaaacaaaaaactctggatgttacaaacacgaagtggaaaacgtacagccaaagctggaattaaaattgcagttgatatggtaaaagaaaagttaatttcaaaaaaa

SEQ ID NO: 258143 - DNA, 733 bp, Unknown
  Bacterial polypeptide expressing nucleotide sequence isolated from the Sargasso Sea
aaacttacaaaaggtgtccttctagatacagatctcaatgctaatgattgggatggtctggtaaaagattttaaaaaattaatcaaagagaaatcaaaaaaagaatttcctcaagacgtatatgaacaattaacaggagctatatacgcagtttttttatcttggcaaagcaatagagcaaaaatttatagaaaattaaattatataccttcagattggggaacagcagtaaatattcaatcaatggtttttggaaatatgggtgatgattgtgcaacgggcgttgttttcacaagaaatccctcaaatggagttaatgaaatttatggtgaatatttaattaatgctcagggagaggacgttgttgctggtacaagaacacctcaatatataacaaaaaaagctagaaaagaatctgactcaaatgataagtcaatggaagaatctatgccaaaagttttcaaacaattaaaaacaattttaagaactttggaaaaacactataaggatatgcaagatgttgagtttactgtagaaaatcagaaactatggatcttacaaactagatcaggaaaaagaacagccaagtcagcagtaaagattgctgttgatatgtttaaagaaaaattaatttctaaaaaagaagcagttttaagaatagatccaaattcactagatagtcttctccatcctactttggatgaaaaaagtggaaataaatgtgatcgctaaa

SEQ ID NO: 258144 - DNA, 468 bp, Unknown
  Bacterial polypeptide expressing nucleotide sequence isolated from the Sargasso Sea
aatgaaaaaactaatttttaattttaattcaaaacaatcaaaaaaactaaaaaattcaaaaaatatattgggcgggaaaggtgcaaacttagctgaaatgagaagactgggattaccagtgcctcctggttttacaatttcaacagatgcatgtcatttgttttatcaaaataaaaaaaaattaaatttaaaaataataaaagaaattaataagcagcttttattaattgaaaaagagacaaaaaagaaatttggagatttaaaaaatccactattagtgtcagttagatctggtgctagagtttctatgccaggaatgatggatactatattaaatttaggtcttaacgaccaaactgtaattgctcttgctaataaaacttcaaatgtaagatttgcaaaagacagctataggagatttattcaaatgtattcaaatgtagttttaggaattgaaagttataattt

SEQ ID NO: 258145 - DNA, 685 bp, Unknown
  Bacterial polypeptide expressing nucleotide sequence isolated from the Sargasso Sea
aatgcatgttaacgagattctcatgagactttcagaaagtaatcctatgttaggacataggggagtcaggctaggtttaagttatccagaaatttacgagatgcaagtagaggcaatatttagggcagttcatttagtttttgaaaatgataattttaaagtcaccccagaagtaatgatacctttagtgatgaacagtaatgagttatctgaaatgaaagatattctgaaaaaaaagattaaaaaaattgagaaagaactgaattataactttgactacaccataggaactatgattgaactgccaagtgctgctcttagttcttcagaaattgcaaaagatgctgatttcttttcatttggaacaaatgatttaactcaaactactttaggtctttcaagagatgacgcttcaaaatttttaggtgaatatgttgaaaagcaaatttttgatatagatccatttgtttccatagatccatcaaccgttggtcgacttgtagaactctcttctaatgatggaaagaaagctaataagtcattaaagataggtgtatgtggtgagcatgcaggtgatccaacttctattttttacttaaatactttaaatattgactatatttcatgttcaccatttaggattcctgcagctagattggcagcagctcaatctgaaactaaataa

SEQ ID NO: 258146 - DNA, 676 bp, Unknown
  Bacterial polypeptide expressing nucleotide sequence isolated from the Sargasso Sea
gatgcctaaatacttgtttagttttggagacaaaaaaacaaaaaaaatattaaattccaaaaatattttggggggaaaaggagcaaacttagctgaaatggctagacttggattgcctgtacctccaggctttacaatttctacagaattgtgtgcagttttttataaaaataaaaaaaaattaaccccaaaaattttcaatgaaattaagaaagaattaaaaaaaattgaatcaataactaaaaaaaaatttggtgacaattcaaatccattgctagtatccgtaaggtccggctcaagggtttctatgccaggtatgatggatactattcttaatttaggtctaaacgataagacagtcgaggcattatcaaaaaaaacctctaacgaaagatttgcaaaagatagttatagaagatttatacaaatgtatggaaacgtcgttttagggatcgaaagccatctttttgaagagataatagataactataaattaactaagggagttttaatggatacggaattaaactctgaagattgggacggtcttataaaaaattttaagggtttaatatttgaaaaaacaaagaaaaattttccccaagatgtttatgaacaactctttggtgctattaaagcagtatttttatcttgggagagtaaaagggcaaaaaat

SEQ ID NO: 258147 - DNA, 637 bp, Unknown
  Bacterial polypeptide expressing nucleotide sequence isolated from the Sargasso Sea
atgaaaaaggcttcaaaaaaaacaaatcttcaatctaaaaaaccatcaccaaaaagatatgtttttgcctttggtcgagaaaccgatggtaatgcacgcatgcgcgaattactgggtggtaagggagcaaatttggccgaaatggcctcaattggcttaccagtacctcctggctttacaatttcaactgaggtgtgcaactacttctacaatcatggaaaaacttatccaaaacagttactgaaagacgtcaagaatggcgttcaagaaatcgaagcacaattaggaaaaaattttggcgcctctgaaaatccacttttggtttccgtgcgctctggggcaagagactcaatgccgggaatgatggacactattctcaaccttgggctcaatgatcaaacagtcgaggggctttcgaggtcatccggtaatccacgatttgcttgggattgctatcgccgatttattcaaatgtatggtgatgtcgtcatgggggttcaggctcggaatgaagaggaggaggaaccttttcataaagaactagaaaagttaaagatctcccttggtatctcagctgacacagaactgacgactgaaaacttaaaaactcttgttactcggtacaaagcactgatta

SEQ ID NO: 258148 - DNA, 790 bp, Unknown
  Bacterial polypeptide expressing nucleotide sequence isolated from the Sargasso Sea
gaagcttgtgatgttttctataaaaataggaaaaaattaaacgtcaaaataaataaagaaataaatgatgaattaaaaattattgagaaagaaaccggaaaaaaatttggagatttgaaaaatcctttattggtttcagtaagatcaggtgcaagagtttcaatgcctgggatgatggatacaattttaaatttaggactaaatgatcaaactgtaactgctttagcaagcaaaacgtctaatttaagatttgccaaagatagttatagaagatttattcaaatgtattctaacgttgtattgggtattgagaattataattttgaagatttaattgagaactacaaattaacaaaaggagtgcttttagatactgatcttgatcaagaagattgggatggtttaataaatgattttaaaaatattgttaaagaaaaaacaaaaaaagactttcctcaagatgttaaggaacaattaaatggagcaataagtgcagtatttttatcttgggaaagcaatagggcaaaagtctatagaaaattaaatcaaattccttctaattggggaacggcagtaaatattcaatctatggtttttggcaacatgggaaatgattgtgccacaggagtagtttttacccgaaatccgtcagatggaagtaattatatttatggagaatatttaattaatgcgcaaggagaagatgttgtagcaggaacaagaactcctcaacatattaccaaaaaagctagattagaagcaaaagaaaatctgttatctttagaggaat

SEQ ID NO: 258149 - DNA, 775 bp, Unknown
  Bacterial polypeptide expressing nucleotide sequence isolated from the Sargasso Sea
ttataattttaaatcaaaagatgtaaaaaaactaaaaaaccctaaaaatatacttggtggaaaaggtgcaaatcttgctgaaatgggaagattgggactgccagtacctcatggatttacaatctctacagaggcatgtcatctattctatgaaaataaaaaaagattaaattcaaagataatcaaagaaattaacaaagaacttatattaatagaaaaggaaacaaaaaagaaatttggcgatttaaaaaatcccttattagtatcagtcagatcaggcgcaagagtttctatgcctgggatgatggatactattctaaatttaggcttaaatgataaaacagtaattgcgcttgccaacaaaacttcaaatatgagatttgcaaaagacagctaccggagatttattcaaatgtattcaaatgtagttttaggagttgaaagttataattttgaagagttaattgaaaattacaaattaacaagaggtgttcttcttgatactgagttagacgagaatgattgggacaacttaattaaagattttaaaaatttagttagagaaaaaactaaaaaatggtttcctcaaaatgttaaagagcagttaatcggagccataagcgctgtgttcttgtcttgggaaagtcatagggcaaaagtttataaaaaattaaatcaaatcccttctgattggggaacggctgtaaatgttcaatcaatggtttttggaaacatgggagatgattgtgctacaggagttgtatttacaagaaat

SEQ ID NO: 258150 - DNA, 922 bp, Unknown
  Bacterial polypeptide expressing nucleotide sequence isolated from the Sargasso Sea
aacaacagaggtttgcactcattactacaataataaacttgttttcccagaaaccttaaatgatcaaactattattgctctgaataatattgagtccataatgaaattaggctttggagatagaaaaaaccctttattggtttctgttcgctctggggcgcgacaatcaatgccaggaatgatggaaacggttcttaatattggactcactagtaatacaattcctggcctaatagaaaaaacaagtaatccgagattcgtatatgatgcttacagaaggttaatcactatgtatgcggatgttgtaatggagaaagcctctggtttagagcctgaagatggtcatggaattcggcataaattggaaaagatttttgatgattacaaacaaaacaaagggttaataaatgacacagatctttctggagatcaacttcaagatattgcagattcatttaaacatgaaataaaaagtacccttggacaagagttcccagatgacccctatgaccagttatggggcggaattgaagcagtatttaaaagctggaatggcgccagggcaaaaagctaccgccaaattgaaaatatacctggagaatggggtacagccgtaaatattcaagcgatggtgtttggcaatatgggagatgattctgccactggtgttgcatttacacgaaatcccgcaacaggagataataaattttatggcgaatggttagttaatgcacaaggagaagatgtagtcgcaggcttgaggactccaaaccctctaaatgaagccaccaaaacagatgatacaaaaagtctcctttctttagaaacttcatcgccagaattataccaagaactccatggcatacgaaacaaattagaaaatcattaccttgatatgcaagatatcgaatttacgatccaa

SEQ ID NO: 258151 - DNA, 334 bp, Unknown
  Bacterial polypeptide expressing nucleotide sequence isolated from the Sargasso Sea
actttgtaagatactaaaaaaactagaaaagcattacaaagatatgcaggatgtagagtttacagttgaaaataaaaagctgtggatgcttcaaacacgttctggaaaaagaactgcaaaatctgcagttaaaattacagttgatatggttaaagaaaaattaatttcaaaaaaagaggccgtgttaagaattgatccacactcacttgatacccttcttcatccaactctggatgaaaaaagcacaataaatgtaattgcaaatggcttgcctgcttcaccaggtgctgcgagtggtaagttgtattcacttctgaagaagcagaaaggctaa

SEQ ID NO: 258152 - DNA, 919 bp, Unknown
  Bacterial polypeptide expressing nucleotide sequence isolated from the Sargasso Sea
aagattcaggtaaaaaattttggagatttaaataatcctttactggtttcagtaagatcaggtgcaagaatttcaatgcctggaatgatggatactatattaaacttaggtctaaatgataaaacagttattgcgcttgccaaaaaaactttaaacccaaggtttgctaaggatagctatagaagatttattcaaatgtatgccaatgtagtattaggagttgaaaattataattttgaagagcttattgaaaattataaattaacaaaaggagttttgttagatacagagctagatgaaagtgattgggatggtttaatcaaagattttaaaaatgttgtgaaagatataacaaaaaaagaatttccccagaatgttgacgaacaattaataggagcaataaaagcagtatttttgtcttggcaaagtaatagagcaaaagtttatagaaaaataaaccaaataccttccgagtggggaacggcagtaaatgttcagttaatggtatttggaaatatgggtaaagattgtgctactggagtggtttttactagaaatccatcaacaggtaataaagaaatttatggagaatatttaattaatgctcaaggagaagatgttgttgcgggtacaagaaccccacagtacataacaaaaaaagctaggattaaagatggattgaaagaaagttcaatgcaggaattaatgcctactgtttttaatcaattatataaaattttaaagaatttagaaaaatactacaaagatatgcaagatgttgaatttacagttgaaaaaaataaactttggatattacaaacaagatctgggaaaagaacagccaaatctgctgtccagattgcagttgatatggttaaagaaaaattaatttcaaaaaaactgctatttatagaataga

SEQ ID NO: 258153 - DNA, 778 bp, Unknown
  Bacterial polypeptide expressing nucleotide sequence isolated from the Sargasso Sea
agatttgcaaaagatagttatagaagattcattcaaatgtattcaaatgtggtcctaggtatagagaattataattttgaggaacttattgaaaattacaaattaacaaaaggggttttgcttgatactgatttagatgcgagtgattgggatggtcttataaaagattttaaaaatataataaaagaaaagacaaaaaaagaatttccccaaaatgtaaatgatcagttaattggagcaataagtgcggtatttttatcatggcaaagcaatagagcaaaagtttatagaaaactaaatcaaattccttctgattggggaactgctgttaatgtccaatcaatggtatttggaaacatgggtgatgattgtgctactggcgtagtgttcacacgtaatccatctgatggatctaaaaatatatacggcgaatatttaataaatgctcaaggagaagatgtggtagctggaactagaacgcctcaatatataacaactaaagcaaaaaattctgcaaaagcgaatctcccatcaatggaagaaacaatgccaaatgcttttaaaaaattaaaaaaaatattaaaaaaattagaaaatcactacaaagatatgcaagatgttgagtttaccattgagaaaaataaattatggatgttacaaacaaggtcgggaaagaggactgccaaatcagcagtgaaaattgctgtagatatggttcaaaaaaatttaatttcaaaaaaagaagcagtattaagagttgaacctaactctttagata

SEQ ID NO: 258154 - DNA, 565 bp, Unknown
  Bacterial polypeptide expressing nucleotide sequence isolated from the Sargasso Sea
aatgaaaaaacttacattaaattttaattctaaggaaagtaaaaaaattaaaaatcctaaaaaccttttagggggaaagggtgctaatctcgcagaaatgggaagaatgggtcttccagtgcctccaggttttacaatatcaacaaaagtttgtgaaattttttataaagataaaaaaaaattaaataaaaatttaatttcccaaattaaaaaagaattaaaaataattgaaaaagatgtttctaaaaaatttggagacttgaaaaatccacttttgttgtctgtacgttctggtgcaagagtatcaatgccaggtatgatggataccattctaaatctgggtctaaacgataaaacagttaaagctttggcaactaaaactttaaatggaagatttgctaaagacagttatagaagatttattcaaatgtatggaaatgtggtaatgggtgtccaaggccatcattttgaggaattaattgaaaattataaacttacaaaaggtgttttattagatacagatttagatgaaagtgattgggatgggttaattgaagatttaaaa

SEQ ID NO: 258155 - DNA, 900 bp, Unknown
  Bacterial polypeptide expressing nucleotide sequence isolated from the Sargasso Sea
aatgaataagttaattttaaactttaagtctaaagactccaaaaaaataaaaaatccaaaaaactttttaggtggtaaaggcgctaatttatctgaaatgggtagaatgggtttgccagtaccacctggattcactatatccacaaaagtttgtgaaatattttatcaaaataaaaaaaagttaaatttaaaattaattaatcaaataaagaaagaacttatagtaatagaaaaaaatgtttctaaaaaatttggtgatttagagaatccactacttttatcagttagatcaggagctagagtttcaatgccaggtatgatggatacaattttgaatctaggtttaaatgataaaacagtcaatgcgcttgcaaaaaaaacatcaaatggaagatttgctaaagatagctatagaagatttattcaaatgtatggaaatgtagttatgggtgttgaaagctatcattttgaggaattgattgaaaattataaattaactaaaggagttcttttagatacagatctagacgaagaagattgggatggcttgataaaagattttaaaaatactgtaaaagaaaaatctaaaatggatttccctcaagatgtttatcaacaattatttggcgctattagtgcagtatttttatcctgggaaagtaatcgtgcaaaaatttatagaaaattaaatcagattccttctgagtggggcacagcagtgaacgtccagtctatggtttttggaaatatgggcaatgactgtgctactggagtagtgtttacaagaaatccatcagatgggtcaaatgatatatatggagagtatcttattaatgctcaaggagaagatgttgttgcgggaactagaacaccacagtacataactcaaaaagctaaaaa

SEQ ID NO: 258156 - DNA, 784 bp, Unknown
  Bacterial polypeptide expressing nucleotide sequence isolated from the Sargasso Sea
aatggggagaatgggcttgcctgtacctcctggttttactatttcaacgaaagtttgtgaaattttttataaggacaaaaaaaaattaaattccaaattaatcaatcaaataaaaaaagaaattaaaaaaatagaaaaagatgtatcaaaaaaatttggagatttaaaaaatcctcttcttttatcagttcgatccggagcaagagtttcaatgccaggtatgatggacacaatcttgaatttagggcttaatgacaaaacggtggttgctttagctaataaaacttctaacggaagatttgcgaaagatagctatagaagattcatccagatgtacggaaatgtagtcatgggtgttgaaagttacaattttgaggaattgatagaaaattataagttaacaaaaggtgtattgcttgatacggatcttgatgaagaggattgggatggtttaataaatgattttaagaatttagttaaagaaaagactagtaaagattttcctcaagatgtttatcatcaattattcggggcaataagtgcagtatttttatcttgggagagcaaaagagcgaaagtttacagaaagttgaatcaaattccttctgagtggggaacagctgttaatgttcaatctatggtttttggaaatatgggtaatgattgtgcaacaggagttgtcttcactagaaacccttcagatgggtcaaatgatatttatggagaatatttgattaatgctcagggagaagatgttgtagctggaacaagaactccacagtac

SEQ ID NO: 258157 - DNA, 900 bp, Unknown
  Bacterial polypeptide expressing nucleotide sequence isolated from the Sargasso Sea
gatggatacaattttaaatttaggattaaatgataaaaccgttaaagccctagcgtcaaaaacctctaatggtcgatttgccaaagatagctacagaaggtttattcaaatgtatggaaatgtagtaatgggtgttgaagggtatcattttgaggaattaattgagaattacaaacttacaaagggtgttttgttggatactgatttagatgaaaatgactgggatggacttattgaagattttaaaagaacagttaaggaaaaagcaaatagagattttccacaagatgttcatgaacagttattgggagcaatcagtgcagtatttttgtcttgggatagtaagagagcaaaaatctatagaaaattaaatcatatacctgcagagtggggaacagctgttaatattcaatcaatggtttttggaaacatgggagacgattgtgcgactggtgttgtttttacaagaaatccatcagacggtgaaaacgaaatttatggagaatatttaattaatgcacaaggagaggatgttgtggctggaacaagaactcctcaatatataactaaaaaagctagacaaaatgctaatgttaaagctccatcaatggaagagtctatgcctaaagtttatatacaactttataagattttaaaaaaattagaaaaacattacaaagatatgcaggatgtggagtttacagttgaaaataaaaacctgtggatgcttcaaacacgttctggaaaaagaactgcaaaatctgcagttaaaatcgcagttgatatggttaaagaaaaattaatttcaaaaaaagaggctgtgttaagaattgatccacactcacttgatactcttcttcatccaaccttagatgaaaaaagcacaataaattgtaattt

SEQ ID NO: 258158 - DNA, 595 bp, Unknown
  Bacterial polypeptide expressing nucleotide sequence isolated from the Sargasso Sea
tatggccaaatgggtctacacattcggagataaagaagctgagggcagtgcttctatgaaagatcttcttgggggtaagggggctaaccttgctgaaatgtcaaatctagggttagctgttcctcctggttttacaataactactgaagtttgtgataactactacaataacaataaagagtaccctagtgaattatcaaatcaagttttgtcagcaataaagcatattgaaataattacaggatcagaatttggaaataaaagtaatccgctacttgtatccgtaaggtctggagcaaaagcatcaatgccaggcatgatggatacagtccttaacttaggattaaatgacgaaactgtcgaaggattagctagttcaagtgaaaatgataagtttgcctgggatagttatagacgtttcatacaaatgtatggtgatgttgtgatgggcattcctcactataagtttgaaaagtttctagaagatatgaagctatctaagggtgttgaaaatgatagtggtttagactcatcagatttaaagagattagttaaagaatataaagaactagtaaagattgagacaaaagagaac

SEQ ID NO: 258159 - DNA, 1666 bp, Unknown
  Bacterial polypeptide expressing nucleotide sequence isolated from the Sargasso Sea
atgagtagtaaattaatatatgaattttcccaaaaaaaaacagacggagataaaactatgtctgaccttcttggaggaaagggagcaaacctagctgaaatgagtaatttaggaattaacgttccaccaggattcacagttactactgaagtttgtaattactttattgaaaacaaatcttttcctgaaaattttgataaagagttaagcgcttctataaaaaaacttgaagattactcaggaaaagtgtttggtacttcagagaaccctttacttttgtctgtcagatcaggtgggagaatatctatgcctggcatgatggattctatattaaatattggtcttaatgatgataatgttatccatctatcaaaagtgtttaatgatgaacgatttgcactagattcttacagaagacttattcaaatgtatggaaatgttgttttagatatagaccataagagatttgaagcagtgcttgaaaataaaaaaagaattgataatttaaattcagatgctgattttaactcagaccatcttcggtggataattgatgcttataagaacactgttgaaagattttctgacggcccttttccgcaagacccagaagagcagttaaaagcttcgattcaggctgtatttaatagttggttgaatcgaagggcaataacatatagaaaaattaataatatacctgatcattggggcactggagcaactattcaaacaatggtttttgggaatttaaatgataattccggaacaggagttgcctttaccagatttccttcaacaggtaaaaatgaattgtacggagaatatttaatgaatgcccagggagaggacgttgtcgctgggttaaggacacctttcccaataacaaaacatgaaaaaaatacagatccttctttatcagaagaaaaccctaaattgcatgcagagataagagagatagcaactaaattagaaagtcactacaaggaagtacaggatattgaatttacaatagaagataaaaaactttacgtactccaaacaagaacagcaaaaagaacagcacaagcaagtgtaaaaattgctgttgatatgcatagcgaaaaaatagtaagcaagaaagaggcaataaatatggttgatgcggatagcatcacaactattttgcatccacagtttgttgaggatcaagataaggaaatatttgagagaggcctgaatgcttcaccaggcgctgcttttggtgaaatagtatttgatgctgataaagctgaagaagaggccaacaaaggaagaaatgtaattctagttagagacgaaacaagtccagaagatatacatggaatgttttcatcagttgcaatattgactacaaaaggcggaatgacaagtcatgctgctgtagttgcaaggggcatgggtaagccctgcattgttggcgcagaaaatttagtaattgattattctaccaaaactatttctagtaaagagaaagttctagaagaaggagatttaatctctatagacggatcaacaggcgagatatatattggagaattagagttagaagcacctaagttatctgaagaattcaatacgcttatggattggtgcaatgaacacaaaaaattagagattagagcaaatgctgaaacagaaatagatacgt

SEQ ID NO: 258160 - DNA, 992 bp, Unknown
  Bacterial polypeptide expressing nucleotide sequence isolated from the Sargasso Sea
gatgaagcccttctcagggcattctggagcatgcatgcgaaaaccggtttggcttttttctgaaggtagtcacaaacgcagggatctgctcggcaacaaaggagccaatctctgcgaaatgacctcacttggcatgccggtgccttttggtttcatcattaccacccagacccacctcgagtaccaacgtctcaggcagcgcattcccgagggaacgatggaagaagtgaaagcgccgctgcttaagatggaaattcgtcagggagccgaattcggcaatccggtcaatcctttgctcgtctcggttcgttccggagcttcggtttccatgcccgggatgatggataccctgctcaacctcggcatcaacgatgaaatcgtcgaaggactggcaaagctgaccaccaacccacgatttgcctatgacacctaccgccgcttactgcaactgtatggtgccgtagtcggcggcaaagggatacatccatacacgcaaatcctcaaagactattgtcagcagcatgggcttgaagagcatgccgatttggatgtcggggaactcaaagaaatcgtcggacttttcaaaaagatccatttgcctcctgacaatccatggactcagcttgaaaacgcgattggtgcagtcttttcctcctggaacaacccccgttcccaaacctaccgccggctgaatgacatccctgacagtattggcaccgcagtcatcatccaggccatggtcttcggcaacatggggcaaaattcaggaagcgggattgccttcacacgaaacccttcaaccggtgaaaaaaagttttttggtgagtacctaatgaatgctgagggtgaagacattgcttccggcagaagaacctcgcgaagcctggacgaattcaaggaggaatccccgatcctttacaaccagctttttcaactgcagaaaactctggaggaacatttaccgggacatgcaggatctggaattcaccatc

SEQ ID NO: 258161 - DNA, 1030 bp, Unknown
  Bacterial polypeptide expressing nucleotide sequence isolated from the Sargasso Sea
aatgaataataaactcatttatcaattttcctccaccaaaactgaaggagatagatctatggtggatttgcttggaggtaaaggagcaaatttagccgagatgtccagtcttggaattaatgtccctccagggtttacagtaacaacagaggtttgtaattatttcatagagaacaaatcttttccagataaatttgataaagaattagaaacagcacttactaacttagaaaaattaacagaaaagaaatttaatgacgataaaacacctctcttattatctgttagatcgggaggaaaagtatcaatgccaggaatgatggattctattttaaatattggaattaatgacaaaaatgtagattctttagcatctaactttaatgatgaaagatttgctcttgattcgtatcgtcgattaattcaaatgtatggaaatgttgttctagaaattgaaatggacagatttgaggcaattattgataataaaaaaaggatcgatggagtggaaaatgataacgattttgattcagaacaattgagttggatcattgatgcttttaaaaccactgttgaaaggtttggtggaaacccttttccacaagatcctattattcaactcaaactgtcaattgaggcagtatttaaaagctggctaaacaaacgagctgttacttatcgaaaaataaataatatacctaacaatttgggtactgccaccactgttcaatctatggtttttggaaatttaaatgaatcttcaggaacgggcgttgctttcacaaggtttccatatacaggaaaaaacaaattgtatggggagtatttaatgaatgctcaaggagaagatgttgttgcaggaataaggacaccatttctgataggaaaacatgaaaagaatactcaaccttctcttgaggaagaaaacccagctctgtttaatgatataaaatttattggtgataaattagaaactcactataaagatgcacaagatattgagttttcgattgaagatggagaattattt

SEQ ID NO: 258162 - DNA, 1015 bp, Unknown
  Bacterial polypeptide expressing nucleotide sequence isolated from the Sargasso Sea
atgaataaattaattttaaattttaaatcaaaagattcaaaaaaaattaaaaatcctagaaattttttaggcggaaagggtttaaatttatatgaaatggagagaataggacttcctgttccacctggttttacaatttcaacaaaagtttgtgaaatattttataaaaataaaaaaaaattaaactcaaaattaattagtcaaattaaaaaacagttaaaaataatagaaaaagacgtatcaaaaaaatttggagatttaaaaaatcctcttttattatctgtaagatctggtgccagaatttcaatgcctggtatgatggatacaattcttaatcttggattaaatgacaagactgtaattgctcttgcaaataaaacctctaatggaagatttgccaaagatagctatagaagatttattcaaatgtatggcaatgttgttatgggagttgaaagctattgttttgaggaattaattgaaaattataaattaacaaaaggagttttattagatactgaattgaatgaagaagattgggatggtcttattaaagatttcaaaaacactattaaggaaaaaacaaataatttttttccccaagatgtatatcaacaattatttggtgcaataagttctgtatttttgtcttgggaaagcaataggtctaaagtatatagaaaactaaatcaaattccttcagattggggaactgcagtaaatgttcaatcaatggtttttggaaatatgggagatgattgtgcaaccggagttgtttttacaagaaatccttctaatggtttgaataatatttatggagaatatttaattaacgctcaaggagaggatgtggtagcaggaactagaacaccgcaatacatcactaaaaaagcaaaaaaagaagcaaaagtaaaagagctttccatggaagaagctatgccaaaagtttataaagaaaaatttaaaattttaaaaaaattggagaaacattataaagatatgcaagatgtagagt

SEQ ID NO: 258163 - DNA, 976 bp, Unknown
  Bacterial polypeptide expressing nucleotide sequence isolated from the Sargasso Sea
atgaaaaaactaattttaaattttaaatctaaagacagcaaaaaaattaaaatccccaaaaattttttgggtggaaaaggtgctaatctttcagaaatgggtcgaatgggattaccagttccacctggatttactatttctacaaaagtatgtgatttattttataaagataaaaaaaaacttaataaaaatataatcacatcaattaaaaaagaattaaaggcagttgaaaaagaagtttcaaaaaaatttggtgatttaaaaaatccattattactttcagtcagatccggagcgagagtttctatgcctggtatgatggatacaattttgaatttaggattaaacgataaaactgtcaaagcccttgcatcaaaaacctctaatggtcgatttgccaaagatagctatagaaggtttattcaaatgtatggcaatgtagtaatgggagttgaaggatatcattttgaagaactaatcgagaattacaaacttacaaagggtgttttgttagacactgatttagatgaaaatgactgggatggactaattgaagattttaaaaggaaagtaaaggaaaaagcaaatagagattttcctcaagatgttaacgaacagttgttgggagcaatcagttcagtatttttgtcttgggatagtaagagagcaaaaatttatagaaaattaaatcacatacctgcagagtggggtacagcggttaatgtccaatcaatggtttttggaaacatgggagacgactgtgcaactggtgttgtttttacgagaaatccatcagacggtgaaaacgaaatttatggagaatatttaatcaatgcccaaggagaggatgttgtggctggaacaagaactccacaatatataactaaaaaagctagacaaaatgctaaagttaaagcttcatcaatggaagagtctatgcctaaagtttataaacaactttataagatactaaaaa

SEQ ID NO: 258164 - DNA, 1062 bp, Unknown
  Bacterial polypeptide expressing nucleotide sequence isolated from the Sargasso Sea
aatgacgaaactcatattaaatttcaattcgaaacattcaaaaagtattaaaaatcctaaaaattttttaggcggaaaaggtgctaacctttctgaaatgggtaggatggggttgccagttcctcctggcttcacaatatctactaaagtttgtgagattttttataaagataacaaacgattgaataacaaattaatttctcaaattaaaaaagaattaaaaattatagaaaaagaagtttctaaaaaatttggagacttaaaaaatcctttgttgttatctgttaggtcgggtgcaagagtatctatgccaggaatgatggatacaattcttaacttaggtttaaatgataaaacagtaaatgcgttagctttgaggacttcaaatggacgatttgctaaagacagttacagacgatttattcaaatgtatggaaatgttgtgatgggtgttgagagctatcattttgaagagctaatagaaaattataaattaacaaaaggtgttttgttagacactgacttagatgaaaatgattggaatggtttaatagaagattttaaaagaacagtaaaagaaaaaacaaaaaaggaatttccacaagatgtatttcaacaactatttggagcaattagcgctgtttttttatcatgggaaagtaatagagcaaaagtttatagaaaattaaatcaaatacctgcagagtggggaacagcagttaacgttcaatcgatggtttttggtaatatgggtgatgattgtgctactggagttgtatttacaagaaatccttcagatggatcaaatgaaatatatggagagtatttaattaatgcacaaggtgaggacgttgttgctggtacaagaacacctcaatacataactagaaaggcaagaaaaaatgctaaagttgaagagtcttcaatggaggagtcttttccaaaagtctttaaacaattaaaaaatattttaaagaaattggaaaagcattacaaagatatgcaagatgtagaatttacagttgagaataataaactttggatgcttcaaactagatcggg

SEQ ID NO: 258165 - DNA, 1046 bp, Unknown
  Bacterial polypeptide expressing nucleotide sequence isolated from the Sargasso Sea
aatgaataagttaattcttaattttaagtccaaagattcaaaaaaaatagaaaatccaaaaaattttttaggtggcaaaggggcaaacttatctgaaatgggaagaatgggtttaccagtacctcctggttttactatttcaacaaaagtatgcgaaattttttataaggataaaaaaaaattaaattccaaattaattagccaaataaaaaaagaaataaaaacaattgaaaaagatgtatcaaaaaaatttggagatttaaaaaatcctcttcttttatcagttcgatctggagcaagagtttcaatgccaggtatgatggatacaattctgaatttaggactaaatgataaaacagttgttggtttagcaaataaaacatctaacggaagatttgcgaaagatagctacagaagattcatccagatgtacggaaatgtagtcatgggtgttgaaagttataattttgaggaattgattgaaaattataagttaacaaaaggtgtattgatggacacagatctcgatgaagaggattgggatggtttaataaatgattttaaaaatgtaattaaagaaaagactagtaaagattttcctcaagatgtttttcatcaattatttggggcaataagtgcagtatttttgtcttgggagagtaaaagagcgaaagtttacagaaagttgaatcaaattccttctgaatggggaacagctgttaatgttcaatctatggtttttggaaatatgggtaatgattgtgcaacaggagttgtcttcactagaaatccttcagatgggtcaaatgatatttatggagaatatttgattaatgctcagggagaagatgttgttgctggaacaagaactccacagcacattacaaagaaggcaagaaaagaagcaaaagttgatgatgcatctatggaagagtcgatgccagaagtatatcacgaattatataaaattttaaaaaaactagagaaacattataaggatatgcaagatgtggagttcactgttgaaagtaataaactttggatat

SEQ ID NO: 258166 - DNA, 418 bp, Unknown
  Bacterial polypeptide expressing nucleotide sequence isolated from the Sargasso Sea
atgcgaaaaccggtttggcttttttctgaaggaagtctcaaacgcagggatctactcggcaacaaaggagccaatctctgcgaaatgacctcacttggcatgccggtgccttttggtttcatcatcaccacccagacccacctcgagtaccaacgtctcaggcagcgcattcccgaggggaccatggaagaagtgaaggcggcgctgcttaagatggaaatccgtcagggagcagaattcggcaatccggtcaatcctttgctcgtttcggttcgttccggagcttcggtttccatgcccgggatgatggataccctgctcaacctcttcttccaccggattggtatcgactatgtttcctgcagtccccatctggtgcccatcgctcgtctgactactgccaaggcaagcatttaaa

SEQ ID NO: 258167 - DNA, 997 bp, Unknown
  Bacterial polypeptide expressing nucleotide sequence isolated from the Sargasso Sea
aatgaaaaaatttgttttcaattttaattctaaagaatctaaaaaattaaaaaattcaaaaaatatattgggtggcaaaggtgccaatctagtagagatgggaaaattaggtttgcctgttcctccaggttttactatttcaacagaagtatgtgaactattttacaaaaacaataaaaaattaaattcgaaaattatcaaagaaataagtaaagaattaaaaaatattgaaaaaaaatcagaaaaaaaatttggcgatttaataaatcctttattagtttcagttagatctggcgcaagagtttcaatgccaggaatgatggatactattttaaatcttggtcttaacgataaaacagttattgctctttcaaaaaaaacttcaaatatgagatttgcaaaagatagttacagaagatttattcaaatgtactcaaatgttgttttgggtattgaaaattatcattttgaagaattaattgaaaattataaattaactaaaggtgttttcttagatacggatcttgatgaaaatgattgggatggattaattaaagattttaaaaatatagttagaaaaaaaacaaaaaaagattttccgcaagacgtaaaacaacaacttattggagccattagtgcagtatttttatcatgggaaagtcatagatcaaaggtgtatagaaaattaaatcaaataccgtcaaactggggtacggcagtaaatgtacaatcaatggtttttggcaacatgggagataattgtgcaacaggagtagtttttacaagaaatccatcagatggaagtaaagaaatatatggagaatacttaattaatgctcaaggagaagatgtggtagcaggaacaagaacaccacagcatataacaaaaaaatctagaataaaatcaaaagagaaattactttctatggaagagtcaatgacttcagtttacagcaagttaaaaaaaatattattgaaattagagaaacattataaa

SEQ ID NO: 258168 - DNA, 1012 bp, Unknown
  Bacterial polypeptide expressing nucleotide sequence isolated from the Sargasso Sea
atgaaaaagcttgtgtttaactttacatcaaaagagacaaaaaatattaaaaatccaaaaaatattcttggaggcaaaggagcaaatcttgctgaaatgggaagaatgggattcccagttccttcaggatttactatatccacagaagcatgtgatttgttttataagaataaaaaaaagattaaaaaaaatattttaaaacaaattaagaaagagattaaaaaaatagaagtacagactggaaaaaaatttggtgattcaactaatcctttattggtttcggttagatcaggggcaagaacttccatgccaggaatgatggatacaatattaaatcttggtttaaatgataaaacagttaaagcattagcaaaaaaaacatccaatggcagatttgcaaacgatagttatagaagatttattcaaatgtatgccaatgttgttatgggagtcgaaaactatcatttcgaagagctaattgaaaattacaaacttacaaaaggagtgcttttagataccgaattagatgttgaagattggagcggtttgataaaagattttaaaaatgtagtcaaagaaaagactaacaaaaatttccctcaagacataaatgaacaacttattggagctatatcagctgtatttttatcctgggaaagcaatagagcaaaagtttatagaaaacttaaccaaataccatccgagtggggaacagcagttaatgttcaatcaatggtttttggaaacatgggtaatgattgtgctactggtgttgtttttacaagaaacccttcaactggaaaaaaagaaatttatggtgaatatttaattaatgcacaaggcgaagacgtagtttctggcaccagaactcctcaatacataactaaaaaaggaagagaaaacgcaggctcaaaagatagctcaatggaagagtctatgcccaaagtatttaaacaattagataaaattttaaaaacattagaaaaatattataaagatatgcaagatgtga

SEQ ID NO: 258169 - DNA, 1232 bp, Unknown
  Bacterial polypeptide expressing nucleotide sequence isolated from the Sargasso Sea
aatgaaaaaacttattttaaattttaattctaaagatactaaaaaaattaaaaaccctaaaaattttttaggaggtaaaggtgccaatttatctgaaatgggaagaatggggcttccagttcctccaggatttacaatttctacaaaagtatgtgaatttttttttaaaaacaaaaaaaaattagataaaaaaataattaatcaaattaaaaacgaattaaaaattatagaaaaaagtgtttcaaaaaaatttggagatttaaaaaatcctttactgctctctgttagatctggagcaagagtttcaatgcctggaatgatggatacaattttaaatttaggtttaaatgataaaacggtaaaagcattagcatcaaaaacctcaaatggtagatttgccaaagatagttatagaagatttattcaaatgtacggcaatgttgttatgggaattgaaagttatcattttgaagaactaattgaaaattataaactcaccaaaggagttttgttagatactgatttagatgaacatgattgggatggtttaattgaagatttcaagagaatggttaaagaaaaagctaaaaaagatttcccccaagatgtttacgaacaacttttaagcgcaattagttcagtatttctatcttgggaaagtaacagagcaaaagtttatagaaaattaaatcaaatcccatcagaatggggaacggcagttaatgttcaatcaatggtatttggcaacatgggtgaggattgtgcaacaggagttgtttttacacgaaatccatcagatggtttaaatgaaatatatggtgaatatttaattaatgcacagggtgaagatgtagttgctggaacaagaactcctcaatacattactaaaaaagcaagacaaaaagcaaaatcaactgcattttcaatggaagaggctatgcctaaagtttatagagagctttataaaattttaaaaaaattagaaatatattacaaagatatgcaagatgtagagtttactgttgaaaataaaaaactctggatgcttcaaacaagatcgggaaaaagaaccgctaaatcagcaattaagattgctgctgatatggtaaaagaaaagctgatttcaaagaaggaagctatattaaggatagatcctaattcattagattcattacttcatccaacccttgatgaaaacagtttaataaatgttatagcgccatggtctacca

SEQ ID NO: 258170 - DNA, 944 bp, Unknown
  Bacterial polypeptide expressing nucleotide sequence isolated from the Sargasso Sea
tttggagggcaaaggcaaaaatcttgctgaaatgggtcgattgggattaccagttcctcctggttttacaatttctacagaagtatgtcatttattttataaaaataaaaaaaaattaaattcaaatattattaaagaaataaataaagaacttacattaatagaaaaagaggcaaaaaagaaatttggagatttgaaaaaccctctgttagtgtcagttagatcaggtgctagagtatctatgccaggcatgatggatactattttaaatttaggtcttaacgatcatacagttattgctcttgcaaagaaaacttcaaatatgaggtttgccaaagatagttatagaagatttattcaaatgttttccactgtagttttgggtgttgaaagttatttttttgaggaattaattgataattataaactaacaaaaggtgttctccttgacacagaattggacgaacatgattgggataatttaattaaagattttaaaattttagttagggaaaaaacaaaaaaagaattcccacaagatgttaaaaaccaattaattggagctatttgctctgtatttttatcttgggaaagtcatagagcaaaagtttatagaaaaataaatcatatcccttcagattggggaacagctgtgaatgtacaatcaatggtttttggaaacatgggtgatgattgtgctactggagttgtatttacaagaaatccatctgatggtgccaaagacatttatggtgaatatttgattaatgcccaaggagaggatgtggttgctggtactagaacacctcaacacataacaaaaaaagctagaacaaattctaaggataaaaaaccttctatggaagaagcaatgccagcagtctataaaaaattgaaaaatattttgttaaaattagaaaaatattacaaagatatgcaagatg

SEQ ID NO: 258171 - DNA, 1612 bp, Unknown
  Bacterial polypeptide expressing nucleotide sequence isolated from the Sargasso Sea
catggtaaaaaataagccagtttacgccttcgaagaagcagatagcaaaaaaagaatgttgttaggcggaaaaggtgcaggattgagcgaaatgacacgcctaaaattaccagtaccaccaggatttacaattacaacagaagtttgtaacaagtattatgataatggaagaaagcttccaaaagacgtcatgccagcagtaatgaaaaatattgtaaaaatggaaaaaaagacagggaagaaatggaattcaactaaaaacccactattggtttcagttcgttccggagctgcaatttctatgccaggaatgatggacacaattttgaatttaggattaaatgaaaaaactgtagaaggatttgcagtacaaacaaaaaatcccagattctcatgggattcttatagaagattcatccaattatttggaaaagtcgtttttggagtaaatgatgaaaaatttgatcatgtattagattctgcaaaaagtaaacaaggagtaacagacgatagtaaactaaacgtagaatcactcaaaaaaattgttaaagagtataagaaaatttgtgaaaatcatacaaaaagaaaattcccagatacaccaaatgaacaattaggattggcaatagaagcagtattcaaaagttggatgggtgaaagagctgttgtatatagagagaaaaatggaattaccaaagatattgcaaatggcactgcagtaaatgttgttacaatggtatttggaaatatgggagatgatagtgcaacaggagttgtttttacaagaaacgggcataatggaaaacgggagatagaaggagaatatctcaccaatgctcaaggcgaagatgttgttgcaggggtaagaactggaaaaaatgtagaattattaaaaaaagagatgccaaaatctcataaagaattaagcaatgcatgtgaaaaattggaaaaacatttccgagaaccacaagacattgaatttacaattgagcagggtaaattttatctcttacaaacaagaactgcaaaaatgagtgcaggtgcacttgtaaaaacttcagtagacatggtaaaagaaaaattaattgatagaaatagatcactgactagaattccagcacaacaactagaagcattgcttcacagaacaatggatgaatcaaaggtaaaagatcataaacaattagcaaaaggtattgcagcctcacctggcgctgcaagtggaattgcagtttttgatgttaaaaaagcaattgaactaggagaggcaggaaaaaaggtcattttgattagaaaagaaacaaaacctgaagacgtaccagcatttttctcagcagaagggattctgacaagtcttggcggaaaatcatcacatgctgcaattgtatcaagaggaatgggcaaaccatgtattgtaggatgtgcagaattaaaaattaattatgaaaataatacatgtactgcaaatggtattacagtaaaagaaaatgaaatgatttcaattgatggcagtataggcacagtattaattggagaagtaccaacagtcgaaccaaaagtcacaaaagatttcaaacaattcttagctgggcacaaaatacaaaacaattag

SEQ ID NO: 258172 - DNA, 626 bp, Unknown
  Bacterial polypeptide expressing nucleotide sequence isolated from the Sargasso Sea
ggggattctctatccagaaattactgaaatgcaaactcgtgcgatatttgaagctgccgcacaagttcaaaaaagtaaaaaacgcattaaagtgaacccagaaataatgattccactggtagggtttcaagaagaattagcagatcaactaactattgttcaccgggttgcaaaggaagtaatgaaggcaaggaaagtccgtattaattatattgtcggcactatgattgaggttccgagagcagcgataacagctgatgaaatagcgaaagaggccgatttctttagctttggtacgaacgatttgacacaaactaccctaggtcttagtcgggatgacatggggcttttttatgatgagtatcaacgtaaagagatctatcataaaaaccctttcgcaagtcttgataaaaccggcgtgggtaaattagtaaactacgcagcacacaaaggacgccaaactaagccaggattaaaattaggtatatgtggggaacatgctggagacccttcctcgatagatttctgtcataaagcaggattgaattacgtaagttgctctcctccgagggtaccggttgctaggcttgcggcagctcaggcgaaattgcgcgacaaaaaataac

SEQ ID NO: 258173 - DNA, 757 bp, Unknown
  Bacterial polypeptide expressing nucleotide sequence isolated from the Sargasso Sea
actggtatttaattttaaatctaaaattactaaaaaatttaaatttccaaaaaatatactaggaggtaagggagctaatcttgctgaaatgggtagattaggttttccagttccatctggatttactatttctacaaatgcatgtgaagcattttacaaaaataacaaaaaattagacaaaaaagtattaattgagattaaaaaagaattaagtcaaattgaaaaagaaattggtaaaaaattcggcaatactatcgatcctcttctactatctgtaagatctggtgcgagagtatcaatgcctggtatgatggatactattttaaaccttggtcttaacgatataacagtcgaggcacttgctaaaaaaactaaaaacaacagatttgccaaagacagttacagaagatttattcaaatgtactcttctgtagtattaaatatcgaaagttataaatttgaggatttaatagaaaattacaaattaaccaaaggcgtacttctagatactgatcttgaaacgagcgattgggaggcgttaattagagattttaaaaatgttgtaaaacaagagactaaaaaagattttcctcaaaatgtagaggatcaattaataaatgctgtctcttctgtatttttatcttgggaaagcagtcgagcaaaaacttatagaaagattaatcgaataccatccgattggggaaatgctgtaaatgtgcaatcaatggttttggaaatatgggagataaatgtgcaa

SEQ ID NO: 258174 - DNA, 1009 bp, Unknown
  Bacterial polypeptide expressing nucleotide sequence isolated from the Sargasso Sea
atgaaaaaacttatttttaattttagttcaaaagaatcattaaatccaaagaaagctaaaagtattttaggtggcaaaggtgcgaacttagcagaaatgggtaaactaggtttgcctgtacctccaggatttactatttcaacagaagtatgtgaattattttataaaaataaaaaaaaattaaattctaaaataattaaacaaataaatttagaactaaagaatatagaaaaacaaacaaaaaaaaaatttggtggtttaacaaatcccttgctagtttcagttagatctggcgcaagagtttcaatgccaggaatgatggatactattttaaatcttggtttaaatgataatacagttttagccctatcaaaacaaacttcaaatattagatttgcaaaagatagttacagaagatttattcagatgtactccaacgtagtcttgaatattgaaaattatcattttgaggaactaatagaaaattataaattaactaagggtgttttgttagatactgagcttgatgaaaatgactgggatggattaattaaagattttaaagatttagtcatagaaaaaacaaaaaaagaattcccacaagatgttaaacaacagcttattggagctatcagttcagtatttttatcttgggaaagtcatagagcaaaagtttatagaaagttaaatcaaataccatccgattggggcacagcagtaaatgttcagtcaatggtatttggcaatatgggaaataatagtgcaacaggcgtagtatttacaagaaatccatcagatggaagtaatgaaatatttggtgagtacttaattaatgcccaaggcgaagatgttgtagctggcaccagaacccctcaacacataactagaaaggctagattaaattctaaggaaaaattactttcaatggaggagtcaatgccttcaatttataaagatttaaaaaaaatattatttagattggaaaaacattatagagacatgcaagatg

SEQ ID NO: 258175 - DNA, 950 bp, Unknown
  Bacterial polypeptide expressing nucleotide sequence isolated from the Sargasso Sea
atgtacggaaatgtagttcttggaatcgagagccatctatttgaggaaatgattgataattataaattaacaaaaggtgttttattagatactgaattaaattctgaagactgggatggtcttataaaaaattttaaagaacttatttctgaaaaaactaaaaaaagttttcctcaagatgtaaacgagcaattattcggtgcaattaaagcagtatttttgtcctggaatagtaaaagagcaaaaacttatagaaaatttaaccatataccagatgaatgggggacagctgtaaatattcaatctatggtttttggaaatatgggagacgactgcgcaactggagtagcatttacaagaaacccatcaacaggagaaaatagtttttttggtgaatatttaataaatgcccaaggagaagatgttgtagcgggaagtagaaccccaagatacattacaaaaaaagcaaaattagatgctggcgcaaaagaagcatcaatggaagaaactatgccaaaagtctttaaagagttgaaaggtgtttttttgaaattagaaaaacattatagagatatgcaagatatagagtttactgtagaaaacaataaactttggatgctacaaacaagaagtggaaaacgtactgcaaaagcagcaatcaaaattgctgttgatatggtcaaagaaaaattaatttcaaaaaaagaagcaattctaagaatagacccaaatactctagatactctattgcatccaactttagatgaaaaagtagaaaagaaagtaatagcaaaaggattgccagcttcaccgggagcagcaagtggaaaagttgtttttaatgctgatgatgccgaaagtatgaataaccaaaaagaagacacaatattagtaagagttgaaacttcacctgaagatatacacggcatgcatgctgctaaaggaatttt

SEQ ID NO: 258176 - DNA, 915 bp, Unknown
  Bacterial polypeptide expressing nucleotide sequence isolated from the Sargasso Sea
ggagttttattagacacagatttagacgagagcgattgggatggcttaattattaattttaaagagttagtaaaaaaagaaaaaaaaattaattttcctcaggacgtcaaagagcaattattaggagcaataaatgcagtatttttatcttgggacagccaaagagcaaaaacttatagaaaattaaatcaaattccagatcattggggaacagctgtaaacgttcaagctatggtttttggaaatatgggtgatgattgttcaacaggtgttgcctttacaagaaatccttcgacaggagaaaattctttttttggagaatttctaattaatgcacaaggtgaagacgttgtagcgggtactagaactcctcaatatatcactaaaaaagcaaaaaaagattcaggatctaaagctccttcaatggaagaggctatgcccaaagtttataaagagcttacaaatgtatttcttaagttagaaaggcattataaagatatgcaagacattgagtttacagttgaaaataataaactttggatgttgcaaaccagatctggaaaaagaacagccaaagctgcaattaaaattgcagtggatatggttaaagagaaattgatttcaaaaaaagaagcaatcaaaagaattgatccaaatactctagatactttactacatcctactttagacgaaaaagttgagaaagaggtaattgcctcgggattaccggcatctccaggcgctgcaagtggtaaagttgttttcactgctgatgaagcagagaaattaaacgggatgatgcaagatacaatattagtgaggttagaaacttcaccagaggatattcatggaatgcatgcagctaaaggaatacttactgcaagaggtggtatgactagtcatgctgcagttgta

SEQ ID NO: 258177 - DNA, 862 bp, Unknown
  Bacterial polypeptide expressing nucleotide sequence isolated from the Sargasso Sea
gttggtgatgtaattatcaaagaaggcgattggataacaatgaatggtaccaccggagttgtatacctaaatcagttagatttaatacctgccgatccagatagaaatgaagaatacaaagaactaatgacatgggcagatgaaataagaaaactaaaaataagaacaaatgctgaaagcccagaagatgcaaaacaagcaataaaatttggtgcagaaggaatagggttgtgtagaacagaacatatgttctttgatgaaacaagaattttagcaatgagaaaaatgatactagcagataacgatgatgatagaagagatgctgttatggggcttttgccatttcaaaaagaagacttcaaaggcactttagaagctatggaaggaaagcctgtaactattagattgcttgatccccccctacatgagttcatcacattagataatgaacaaataaaagagctagctgatagtattggcattgatagttctattgttagtcaacgtatttcaagccttcacgaacttaatccaatgttaggacaccgtggatgtagacttggaattgcatatcctgttatcacagaaatgcaagccagtgcaatcttagaagctgctgctgaacttaccaaggacggcctgaatgttttaccagagataatgatcccattagttggaacagttaaagaatacatcgaccaagaaaggattgttcgaaaggtggcttcagaggtcgaaagtaaatatgatattaaactaaactatcttgttggtacaatgattgaacttccaagagcttgtctaactgctgatgaaatagcagagcatgcagagttttttagttttgggaataatgatctca

SEQ ID NO: 258178 - DNA, 949 bp, Unknown
  Bacterial polypeptide expressing nucleotide sequence isolated from the Sargasso Sea
aagaataaaaaaaaaataaataaaaatttaatttctcaaattaaaaaagaattaaaattaatcgaaaaagatgtttctaagaaatttggggacttaaaaaatccacttttgttgtctgtacgttctggtgcaagagtatcaatgccaggtatgatggatactattctaaatctgggtctgaacgataaaacagtcaaagctttagcaattaaaacctcaaatggaagatttgctaaagacagttatagaagattcattcaaatgtacggtaatgttgtaatgggtgtagaaggttatcattttgaggaattaattgaaaattataaacttacgaaaggtgttttgttagatacagatttagatgaaagtgattgggatggattaattgaagattttaaaagaacagttagagaaaagacaaaaaaagattttcctcaagatgttcatgaacaattgctaggtgcaataagtgcagtatttttatcgtgggaaagtaatagagcaaaagtttatagaaaaataaatcaaatcccagccgagtggggaactgctgtaaatgttcaatcaatggtttttggaaatatgggtgatgattgtgcaacaggagttgtgtttacaagaaatccatcagatggatcaaatgaaatatatggtgagtatttaattaatgcgcaaggcgaagatgttgttgcgggtacaaggactcctcaatacataacaaaaaaagctaggagagatgctaaagtaaaagaattatcaatggaagaatctatgcctaaagtctttaaagaacttcaaaaaattttgaaaaaattagaaatacattacaaagatatgcaagacgtagagtttacagttgaaaatagtaaactatggatgcttcaaacaagatcaggaaaaagaacagcaaaatcagcagtcaagattgcagttgacatggtaaagaaaa

SEQ ID NO: 258179 - DNA, 375 bp, Unknown
  Bacterial polypeptide expressing nucleotide sequence isolated from the Sargasso Sea
caattaaagcaaaagagatagcaaaacatgctgaatttttcagttttggtactaatgatttaactcaaacgacgtttggaataagtagagatgatagtggaaagtttttaaatgattatattgataataaaattttttctattgatccatttgtttcaattgatgaaggtgtagaggacttgattgaaatagcagtatcaaaaggaaaaaaacaaaataaaaatattaaactgggtatttgtggtgaacatggaggtgatccaaaaagtatatttttttgttctaaagtaggcttgaactacgtgtcttgctctccatatagagtgccgatagctagacttactgcagcccaagcagaaatcaatcaaaattaaa

SEQ ID NO: 258180 - DNA, 678 bp, Unknown
  Bacterial polypeptide expressing nucleotide sequence isolated from the Sargasso Sea
aaagagtggcagacctcattgaaacgaacccaatgctgggccacagagggtgcagattagcaataacctaccctgaaataccagaaatgcaagcgaaagcgatatttgaagcatgtgttgagatttatagcacaaaaaaacaaattatatgccctgagataatggtcccacttgtatcgaccaagcgcgagcttgatatagtaaaggatgttatagacagggcagcaaaagaagtaatggctaagtctggtataaatttaaactacactgtaggaacaatgattgaattacctcgtgcagcattaagatctgctgagattgctgaagcggccgattttttctcttatggaacaaatgacttaacgcaaacaacatttggcatcagtagagatgactcgtcgaaattccttcaggaatatgttgaaaaatctatattggaaaaagatccgtttgtatcaattgactccgatggtgttggtgaattgattgaactctcatcaaaaaggggaagatcaacaaaatcagacataaaattgggcatatgcggagaacatggcggtgacccaaattctattgcattttgcgctctaaataaactagactacgtctcatgctcaccataccgagttccaatcgcaagactttcggcggcgcaagctgaagtaaaaaaatcctgat

SEQ ID NO: 258181 - DNA, 355 bp, Unknown
  Bacterial polypeptide expressing nucleotide sequence isolated from the Sargasso Sea
tgcaaaacatgccgaattttttagttttggcaccaatgatttaactcaaaccacatttggaattagtagagatgacagtggaaaatttctaaatgattatatagaaaataaaatatttgatatagaccccttcgtgtcaatagatgatggagtgggagatttaattgagattgctgtatctaaaggaaaaaaacaaaacaaaaaaatcaaattaggcatatgcggtgaacatggcggtgacccaaagagtatagatttttgttctaaaactggattaaattatgtttcatgctctccttatagagtgccaatagcaagattagctgccgcacaagcagaattaaaaaaagattaa

SEQ ID NO: 258182 - DNA, 1022 bp, Unknown
  Bacterial polypeptide expressing nucleotide sequence isolated from the Sargasso Sea
atcagtgaaaatatccgtagatatggtttctgagggactcatttcaaaagaagaatcattaaaccttattgatcctacaagaataaatgaacttatgctcccaaaattttctgatgaagaagaagatttatcactcaaatgtaaagcatatattgactctgggttaaatgcttctcctggagcagcagttgggaaaatcgtttttgatcctactgaagctgtagaaatgaaaaatctaggtgaaaaagtaatattggtcagagacgaaaccagccctgatgatatacatggaatgcatgcgtctactggcgtattaactgcaaagggtggagcaacaagtcatgcagccgtggttgctagaggcatggggaaaccgtgtataactgggtgtgatagtttacatatcgatcaacaaaacaaacgatgtacaatcggaaatcaaacattccaactttatgacattatcagtatagatggatcatctggagaaatttttaccggtacaatgaaaaccataaccccatcacctagtgacacaaaagagttatctacaattttagaatgggcagattctacaagaaaattaggaatatgggcaaatgcagacactcccgaagatgcaagtaaggcaatagaattaggtgcagaaggaataggtctttgtagaaccgaacatatgttttttggcgaagaaagacttccatgggttcaacaattaattatgtccacatcctcaattagtactaatggaaataatcagcaaaacaaataccaagaatcaattttaaaaatgctcgaatttcaaattcaagatttttatgaaatcttaaaagtaatggataataaacctgttgtgattagattaattgatccaccgttacacgaatttttaccttcctatgaaaaactaatagatcagatatatgaagaaaaaatgaataataatcaaggtgagttattagatcagttagaagatattcttgctattgttaaagatattaaagaatccaatcctatgttag

SEQ ID NO: 258183 - DNA, 883 bp, Unknown
  Bacterial polypeptide expressing nucleotide sequence isolated from the Sargasso Sea
ttaaatcatataccatctgaatggggcacagcagttaacgtacaatctatggtttttggaaatatgggaaatgattgtgctactggagttgtttttacgagaaatccgtcagatggatcaaataatatttatggagagtatttaattaatgctcaaggagaggatgtagtagcaggaacaaggacaccacaatatattacgaaaaaagccaaacgagaggcaaaagttgaggcactttctatggaagaatctatgccaaaagtttatttacagcttcataagattttaaaaaagttagaggcgcattacaaagatatgcaagatgtagaatttacagttgagaatgaaaaattatggatactacaaaccaggtcaggtaaaaggactgctaaatcagcagttaaattagctgtagatatggttaaagaaaaattaattactaaaaaagaagcaattttaagaatagatccaaattctttagatacattattacaccctactttggatgaaaaaagttctataaaaataattgcaaatggtttacctgcctcaccaggagctgctagtggaaaggtggtatttacatctgaagaggctgaaagacttaataatatgatgcaggatgtaatattggttagagtagaaacttctcccgaagatattcagggtatgcacgctgctaagggaatattgactgctaggggaggaatgacaagtcatgcagctgttgttgcaagagggatgggtagaccatgtgtttcaggatcaagtgaaattgatattgattatgaaaaaaaaattttcaaaactgctacagtggaaattaaagagggcgatataatcacaattgatgggtcctctggaagaattattttaggtagcg

SEQ ID NO: 258184 - DNA, 907 bp, Unknown
  Bacterial polypeptide expressing nucleotide sequence isolated from the Sargasso Sea
caaggtgaggctgcaattttggttagaattgaaacaagccccgaggatatttcgggaatacacgactccgcaggcgttatgacggtaagaggtggcatgacaagccatgctgcagttattgctcgaggattagggctgccatgtgtcgtgggtgtaaatagcgtaagtatcaatttatctgagaaaacactaacctcacaggatggtagaaaatttctagagggtgaaaaaattacgctggatggtaccacaggtcaggttttaggagggtctgcggaaatggttcaaccagtaatttcgggtgctttttctaaattaatggattgggcggacaagtatcgaacaattggagttagagcaaatgctgatagccctcaggaagcgttgcttgctaaaaattttggtgctgacggtattggattatgtaggacagagcatatgttttttgaaaaacaaaaactacttgtcatgagagagatgatattagcagatacagataagaccagaaacgagtcattaaaaaaattattgccgatgcaaagggacgattttattaaattttttcagatcatggatggaatgccagtaacaattaggcttttagaccctccattacatgagtttcttccacattctgaggaagaaatgatgatactggccaagtcaatgaatttgtcgttaaaaaaaatagtagatagatctagggagatacaggaatttaatcccatgttggggaagcgcggagttcgtttgggcgttaccctgccagaaatttatgatatgcaagttcgagcaatattcgaggcggtatcatacgtaaatgggaaaagttcatacactgtggttcctgaaattatgattccacttgtatcgaccaaccgtgaagttgagttgattaaatccagga

SEQ ID NO: 258185 - DNA, 883 bp, Unknown
  Bacterial polypeptide expressing nucleotide sequence isolated from the Sargasso Sea
aataacaaaaggtgtatgttggatacagaattaaattctgacgattgggacgggcttataaagaattttaaaaatttaatattagaaaaaacaaataaaaattttccacaagatgtttacgagcaactctttggagctattaaagctgtgtttttatcttgggaaagcaagagagcgaaaacttacagaaaatttaatcatattccaggtgattggggaacagcagtaaacgttcagtctatggtgtttggtaatatgggagatgactgtgctactggagtagcattcacaagaaacccatcgactggagaaaataaattttttggcgaatacttaattaatgctcaaggagaagatgttgtcgctggaagcagaacaccgagatatataacaaaacaagcgaaggaaaatgctggagcgaaagaagagtccatggaagaagctatgccaaaaatttttaaagaactaaaaaacgtatttatgaaattagaaaaacattacagagacatgcaggatattgaattcacagttgagaacaataaactttggatgttacaaacaagaagcggtaagcgtacagctaaggcagcaattaaaattgctgtagatatggttaaggagaaattaatttcaaaaaaagaagcaattttaagaatagacccaaacactctagatactcttttacatccaactctagatgagaaagtagaaaagaaagtaatagcaaaaggcttgccagcttctccaggtgcggcaagtggtaaagtagtttttagtgcagatgaagctgaaaaaatgaataaccaaaaagaagatacaatattggtgagagttgaaacttcaccagaagatattcacggtatgcatgcggctaagggaatat

SEQ ID NO: 258186 - DNA, 820 bp, Unknown
  Bacterial polypeptide expressing nucleotide sequence isolated from the Sargasso Sea
aatggattggtgtaatgaattcaaaagacttgaaattagagcaaatgcggagacaactattgatacagccaaagcacttgaatttggagcagaaggcattggtctgtgtaggacagaacatatgttttttgaaggagaaagaatccttcctatgagagaaatgataatgtctgacagtaaacaaggaagaaaaagagcattaaaaaaattaataaaatatcaaatatctgattttgagtctcttttcaaattacttaatgaaaaaccaataacagtgagattgttagatcctccaatgcatgaatttcttcctaagagtgatttagagatttcgcagcttgcaaatgagataggagtatcaccaatgcatgttaacgagattcttatgagactttcagaaagtaaccctatgttaggacataggggagtcaggctaggtttaagttatccagaaatttatgagatgcaagtagaggcaatatttagggcagttcatttagtttttgaaaatgataattttaaagtcactccagaagtaatgatacctttagtgatgaacagtaatgagttgtctgaaatgaaagacattctgaaaaagaagattaaaaaaattgagaaagaactgaattataactttgactacacaataggaactatgattgaactaccaagtgctgcccttagctcttcagaaattgcaaaagatgctgatttcttttcatttggaaacaatgatttaactcaaactactttaggtctttccagagatgacgcttcaaagtttttaggtgaatatgttgaaaagcaatttttgatatag

SEQ ID NO: 258187 - DNA, 808 bp, Unknown
  Bacterial polypeptide expressing nucleotide sequence isolated from the Sargasso Sea
agattttccacaagatgttaacgaacagctattgggagcaatcagcgcagtatttttgtcttgggatagtaagagagcaaaaatctatagaaaattaaatcacatacctgctgagtggggtaccgcagtcaatgttcaatcaatggttttcggaaacatgggtgatgactgtgcaactggtgttgtgtttacaagaaatccatcggatggtgaaaatgaaatttatggagaatatttgatcaacgcacaaggggaggatgttgtagcaggtactagaacaccacaatacataactaaaaaagctagaaaagattctaaggccaaagctctatcaatggaagagtctatgcccaaagtttataaacaactccataagatcttaaaaaaattagaaaagcattacaaagatatgcaagatgtagaatttacagttgaaaataaaaagctgtggatgcttcaaacacgttcaggaaaaagaactgcaaaatctgcagtcaaaatcgcagttgacatggttaaagaaaaattaatttcaaaaaaagaggctgttttaagaattgatcctcactcacttgatacgctcctgcatccaactttagatgaaaaaagttcaataaatgttattgcaaatggtttacctgcctcaccaggtgctgctagtggtaaagtcgtattcacatcagaagaagcagagagactaacatcaatgatgcaggatacaatattggttagagtagaaacctctcccgaagatatacaaggaatgcatgcagctaaaggaatattaactgcaagaggtgggatgaca

SEQ ID NO: 258188 - DNA, 931 bp, Unknown
  Bacterial polypeptide expressing nucleotide sequence isolated from the Sargasso Sea
tacaattttaaatttaggtcttaatgataatacagtaatagcacttgcaaaaaaaacctcaaatttaagatttgcaaatgatagttataggcgttttattcaaatgtattctaatgttgtaatgggaatcgaaggttatcactttgaggatataattgagaactataagttaacaaaaggggtattacttgatacagaattagacgagtatgactggaaagctctaataaaagattttaaaaacattgtaaaagaaaaaacaaaaaaagattttcctcaaaacgttaaagaacaactggtgggagcaataagtgctgtttttttatcttgggaaagtaatagagcaaaagtctatagaaaattaaatcatataccatctaattggggtacagcagttaatgtacaatcaatggtttttggaaatatgggaaatgattgtgcaactggtgtagtgtttactagaaatccatcagatggatcaaaaaatatatatggagaatatttaataaatgcgcaaggagaggacgttgttgccggaactagaacaccacaacatattacaaaaaaagctagagttgaatcaaaagaaactcttaagtcaatggaagaggcaatgccagcgacttacaagcaactaaagaatattttaactaaattagaaaaacattacaaagatatgcaggatgtagagtttactgttgaaaataaaaaactttggttgcttcaaacacgctctggaaaacgaacagctaagtctgctgtaaaaatagctgtagatatggttaaagaaaaattgattactaaaaaagatgcaatattgcgaatagaaccaaattctttagacactttacttcatccaactttagatgagaaagcgaacttggaagtaattgggtcaggcttgcctgcatcacctggtgctgcaagtgaa

SEQ ID NO: 258189 - DNA, 678 bp, Unknown
  Bacterial polypeptide expressing nucleotide sequence isolated from the Sargasso Sea
taaaatcaagaacagaggaattgcatgaacataatccaatgctcggacatagaggatgtagattgggtatttcttttccagaaatttacgaaatgcaatgtagagcaatttttgaagctttagttgaatgtaaaaagaagaaactcaaatctacaatgccagaaattatgatacctctcgtatcaactgaggctgaaatcaaaataatgaaagatctagtaattagagttgctaaaaaagttcaagatgaaaataataccaaaataagttttttggtaggaaccatgattgaactaccaagagcagccattaaagcaaaagatattgcaaaacatgctgaattctttagtttcggaactaacgacttaactcaaacaacttttggcattagtagagatgacagtggaaaatttttaaatgattatattgaaaataagatatttgacattgatccttttgtttctatagacgaaggtgtaggagacttaatcgaaatagctaccttaaaaggaagaaaacaaaataaaaaaattaaacttggaatttgtggagaacatggaggagatcctaaaagtataaatttttgttcaaaaacaggattgaattatgtctcttgttcaccttacagagttcctgttgcacgtttggcagccgctcaggctgagcttaaaaaatagg

SEQ ID NO: 258190 - DNA, 969 bp, Unknown
  Bacterial polypeptide expressing nucleotide sequence isolated from the Sargasso Sea
gttgtaatgggtgtagaaagccatcttttcgagaaattaattgataattacaaattaacaaaaggtgttttgacagacacagaactaagttctgaggattgggacggtttaattaaaaattttaaaaatctaataattgacaaaacaaataagagttttccacaagacgtatacgaacaactcttcggagctattaaggcagtatttttgtcatgggaaagcaaaagagcaaaaacttatcgaaagctaaatcatattcccgggcactgggggacagctgtaaatgttcagtccatggtttttggaaatatgggagacaattgtgctactggagtggcatttacaagaaacccctcaactggtgagaataaattttttggagaatacttaattaatgcacaaggagaagatgtggtagcagggagcaggacaccaagatatataacaaaaaaagcaaaagaaaatgctggcgcaacagaagcttccatggaagagacaatgccaaaagtttttaatgaattaaaaaatgtatttgtaaaattagaaaagcattacagagatatgcaagatattgagtttacagttgagaataaaaaattatggatgctgcaaacaagaaatgggaaaagaacagctaaagcagcaattaaaattgcagtagatatggtaaaagaaaaattaatttctaagaaagaagcaattttaagaatagatccaaatactctcgatacacttcttcacccaactttagatgaaaaaattgaaaaaaaagtaattgctaaaggtttgcctgcttccccgggagcggctagtggaaaagtagtatttaccgctgatgaagctgagaggatgaatatacaaaaagaagatacaatattagtcagagttgaaacttcaccagaggatattcatggtatgcacgccgccaagggtatcttaacctcaagaggagggatgacaagtcacgcc

SEQ ID NO: 258191 - DNA, 502 bp, Unknown
  Bacterial polypeptide expressing nucleotide sequence isolated from the Sargasso Sea
gtttcaacagaggcggagataaaaattatgaaagacctagtgattaaaacagcaaaaaaagttcaagaagaaagtgggagtaaaattgaatttttagttggtactatgattgaattacctagagccgcaatcaaagctaaagatattgcaaaacatgccgagttttttagttttggaacgaacgacttaactcaaactacttttggcataagtagagatgatagtggtaaatttttaaacgattatatcgataataaaatttttaaagttgatccatttgtatctattgatgatggagttaaggatttagtagaaataggagttaaaaaaggaaaaaagcaaaacaaaaaaattaaactaggaatttgtggagaacatggtggtgatccaaaaagtattgatttttgttcaaaagttggtttagactatgtctcttgttctccttatagagttccaatcgcaaaattagctgctgctcaggctgagttaaagaaagaatagt

SEQ ID NO: 258192 - DNA, 514 bp, Unknown
  Bacterial polypeptide expressing nucleotide sequence isolated from the Sargasso Sea
ggaatacctctagtatcaactgacactgaattgaaaattttaagaaatattgtagataaaattgcagaagaaaaagaaaaagagaataaaataaagcttaattatattgtgggtacaatgattgaacttccaagggcagcattgcaagcaaaacagatatccaaatatgctgatttttttagttttggaacaaatgatctcactcaaactacgttaggtataagtcgtgacgactcaggtaaatttttaaatgattacatagatagcaaaatatatgatgttgatccttttgtaagtattgaccaatcaggagtgggcgagctagtcgaaatggcatcaatcagaggaagaaaaactaataaaaaaattaaactaggaatttgtggagaacatggtggagatccaaaaagtataaaattttgttccaaaaaaggattaaattatgtttcttgttctccttttagagtcccagttgctcgtctggcagcagctcaggccgaattaacaaaataat

SEQ ID NO: 258193 - DNA, 524 bp, Unknown
  Bacterial polypeptide expressing nucleotide sequence isolated from the Sargasso Sea
accagagataatgatacctttagtttcaacagaagacgagcttgggataatgagaaaattagtaaatagggtcgctgatcaacttcaacaagaaaataaagttaaaataaattattttgtaggcacgatgatcgagcttccaagagcagcgttaagagctgcgccaatatcgaagtatgctgatttttttagttttggaactaacgatttgacacaaactacatttggtatcagtagagatgactcaggaaaatttttaaatgattatattgatcataaaatttttgatgaagatccatttgtaagtattgataaagatggtgttggtgaacttgttagaattgcatcacaaagaggaaaaaaacaaaacaaaaaacttaaactagggatttgcggcgaacatggaggagatcctagaagtatcgaattttgttctaaaaatggattaaattatgtttcttgctcaccgtttagagtcccaattgcaagacttgcagcagcacaagctgagcttagaagataat

SEQ ID NO: 258194 - DNA, 892 bp, Unknown
  Bacterial polypeptide expressing nucleotide sequence isolated from the Sargasso Sea
acagagacaagtcccgaagacattaatggaatgaacgtatcgagtggaattttaacgacgagaggagggatgacatcacatgcggctgtggttgcccgaggtatgggaaagccatgtatttctggggcaggagacctgagagtggatttaacttcaaagtcacttctctgggttggtggtcagttgatagaaggcgatactattacaattgatggagcaacgggatccgtctatttggatgaagttgcaacctcagagcctcaacttacgggggattttagccggttaatgaattgggcagatcagtatcgcactctgggtgtcagaactaatgctgaaacaccagaggatgcactaattgctaaaaaatttggtgcagaaggtattggtctcagtagaactgaacatatgttcttcgatccaaagcgaataatacatatgcgagaaatgatcttggcttcagacacagatactaggcgtaaagcactagaaaagctcttgccctatcagtgcgatgatttctataaattatttaagataatggagggtctgccggttacaattcgtctacttgacccaccgctaaatgaatttttacctagtacagagaatgaattaaaagaggtagcagaagctgctggagcaaagttaaaagatctacagctcagaaaaatcgaattagatgaggttaacccgatgcttggacatcgaggctgtcggcttgggataacatttcctgaggtatacgaaatgcaagcccgggccatatttttagccgcagctaggctaatagaaattaaagaaaaagtaaacttagaaataatgatacctcttatagttgataagcccggaattagataccttgaaagaattagtgaaaaggtagcaagga

SEQ ID NO: 258195 - DNA, 782 bp, Unknown
  Bacterial polypeptide expressing nucleotide sequence isolated from the Sargasso Sea
catgttttttgatgaagagagaattttatctgttagggaaatgattctttctaaaaccaaagaagacagagccaaagctttagataaactcctaccacatcaaaaaaaagactttactgaaatttttaggattatgaatggcttaccagttacagtaagattgttagatcctccattacatgaatttttaccaagaacaaataaagaaattggcgaattagcagaaattgttaatcttacagtaaaagaagttgaaacaagaattgaggaacttcatgaacaaaacccaatgctaggtcacagaggttgcagattagctatatcatttcctgaaatatatgagatgcaatgtagagcaatttttgaagcattatgtgagcttaaaaaaaataaaattaagtcagcttttcctgaaataatgatacctctggtttctacagaggctgaaattaaaataatgaaagacttagtcaaaagaatagcaagcatggttcaaaaagaaaataaattaaaaatagactttatggttgggacaatgattgagcttccaagagcagctataaaggcaaaagaaatagcaaaacacgcagaattcttcagttttggaacaaatgatttaactcaaactacttttggaataagtagagatgatagtggaaaatttttaaatgattacttagaaaataaaatattttctattgatcctttcgtatcaattgatgaaggggtttcagatttatttgagattgctgttgcaaaaggtaagaaccaaaataaaaaga

SEQ ID NO: 258196 - DNA, 926 bp, Unknown
  Bacterial polypeptide expressing nucleotide sequence isolated from the Sargasso Sea
tctccaaaaaacttcaaatgatagatttgctaaagatagttatagaagatttattcaaatgtatgcaaatgttgtattgaatattgagagttataattttgaagaattaatagaaaattataaattaacaaaaggtgttttgcttgatacagagttagatgcttctgattggaatggtttaataaaagatttcaaaaatatagtaaaagaaaaaacaaaaaaagaatttcctcaagatgtaagtgagcaattaacaggagcaatttcttctgtatttttgtcctgggagagcaagagagcaaaagtttatagaaaattaaaccagattccttcttattgggggacagcagtaaatgttcaatctatggtatttgggaatatgggagctgactgtgcaacaggagttgtctttacaagaaatccttcaaatggaataaaagaaatatatggtgaatacttgattaatgcacagggcgaagatgtagtggctggcacaagaacacctcaatacattacaaaaagagcaagaaaagaatctggttcaaaagaagactcaatggaagaatctatgccgaaagtttttcaacaactgattaaaatattaaggactctagaaaaacattataaagatatgcaagatgttgagtttacagtagaaaatcaaaaactttggattttacaaaccagatcgggaaaaaggactgctaagtctgcagtaaagatagcagcagacatggtcaaagaaaaattaatttcaaaaaaagaagctgttttaagaatagatcctaattcattagatacacttttacatcctacattagatgaaaaaagcaatataaaagttattgctaaaggattaccagcatcacctggagcaacaagtggtaaagtagttttttcttctgatgaagcagagagacttaatg

SEQ ID NO: 258197 - DNA, 718 bp, Unknown
  Bacterial polypeptide expressing nucleotide sequence isolated from the Sargasso Sea
tgccaagaaaaagaaaaaactcttggacagagttgaagagcttcacgaattcaatcccatgttaggcctcagaggttgtcgattaggaattacaatgccagaaattacaaaaatgcaggcgcgagcaatttttgaggcggctattatagtatctaaaagaaaaatcaaagtataccctgagataatggttccattggttggcatggtatcagaaattaaattccaaaaagacatcatcaataagattgctaaagaagtgttggggaaaaagaagattaattatctcgtgggtactatgattgaagtcccacgcgctgctgctgttgcagatcaaattgcaaaagaagcagaatttttctcatttggcacaaacgacttgactcaaacagtttttgcttattcaagggatgattccgtaaaatttatcaatgcatatatggaaaccaaagttgatattgacggaaaaacaacagaaatactagaaagagatccttttacaagtattgatgtccgcggagttggcgaattcatgaaaattggacttgaacgaggaagatcaaccagaaaaaatctgaaaattggtatttgcggggagcatggtggtgatcctgcatcgattgaattttgtcatcaaattggtcttgattacgttagttgctctccatttagagtaccaatcgcaagacttgcggcggccaggatagcacttaagagttaa

SEQ ID NO: 258198 - DNA, 911 bp, Unknown
  Bacterial polypeptide expressing nucleotide sequence isolated from the Sargasso Sea
aatgatatttattggagaatatttaattaatgctcagggagaagatgttgtagctggaactagaactccacaatatattacaaggaaggcaagaaaagaagcaaaagttgatgatgtatctatggaagagtcgatgccagaagtgtatcacgaattatataaaattttaaaaaaacttgagaaacattataaagatatgcaagacgtagaatttaccgttgaaagtggtaaactttggattttacaaactcggtctggtaaaagaacatcaaaatcagcagtaaaaatcgcagttgatatggttaaggaaaagttaattaccaaaaatgatgctgttttaagagttgatccaaactctctagatacgcttctacatcctactttagatgagaaaagttcaactaaggttatagcgaacggtcttccggcgtcacctggtgcagtaagtggaaaagtggttttcacttcagaagaagctgaaagattaaatgatatgatgcaggatacaattttagttagaattgaaacttctccagaagatattcaaggaatgcatgctgcaaagggaattttaacctcaagaggaggaatgactagtcatgctgcagtagtagctagggggatgggaagaccttgtgtttctggttcaagtgaaattgaaattaattacgataaaaaagtctttaaaacatctttggctgaggttaaagaaggcgagacaattactattgatggttctacaggaagaataattttaggcacagttccaactataaaacctgagatatcaggagatttttcaaaattgatgagctgggctgataaaattagaaaacttaaagtacgaactaactctgaaactcctctagacactaaaacggccagagattttggcgcagagggtattggac

SEQ ID NO: 258199 - DNA, 553 bp, Unknown
  Bacterial polypeptide expressing nucleotide sequence isolated from the Sargasso Sea
aacaaaaaaaattaagtctgttcttcctgaaataatgattccacttgtatctacagaggcagagataaatataatgagaaacttagtcaatagggttgctaaaaaagtgcagaaagataaaaatttcaaaatagattatttagtaggtactatgatagaattgccaagagcagcaataaaggcagaagatattgctaagcatgctgatttttttagctttggtacaaacgacctcacacagacgacttttggaataagtagagacgatagtggaaaatttcttaacgattatattgaaaataaaatatttgaggttgatccatttgtttcaatagatgagggagttggagacctgattaaattggcgagcattaatggcaagaaacaaaatagtaaaattaaacttggtatttgtggtgagcacggtggtgatccaaaaagtattaatttttgttcaaaaattggattaaactatgtctcatgctccccatatagagttccaatagccagattagctgctgcacaagcaaatttaataaaaaagattaaataa

SEQ ID NO: 258200 - DNA, 883 bp, Unknown
  Bacterial polypeptide expressing nucleotide sequence isolated from the Sargasso Sea
atcggattattcagaatagaacatatgttctatggtgaaggatctgaagaaccacttttccatcttcaagaaatgattatggcaaatagccaagaagaaagaagggttgctttagactctttatttcctttcatgaaaaatgatattaaagaaacattaagagcaatgaaaggattgcctgtaacaattagactaatggatccaccacttcatgaatttattccacacgatgctaaaagacagaagaaactcgctaatgctttaggaataaatgctaaagaattagaaagaagatccgaggcactaaaagagtccaatcctatgatgggacatagaggtgttagattaggaataacacatcctgaaataactgaaatgcaagctagagcaatattggaagctgctgccgaactcactgctgaaaatgtaaagactttcccagaaataatgattccattaactggaatggaaaccgaatacaatcatcaagaaaaaattgtaagagaagttgctgccaaaattgaaggtttagataattacatggttggaacaatgatggaaattccaagagcaagtcttgttgcaaatagaattgcagaaactgctgaatttttctcatttggtacaaatgatttaacacaaatgacatttggattcagtcgtgatgatactggtggcttcatgccagcatacctggaattggaattgctacctgaagatccttttgcaagcctagatgagggagtgtgtgaattggtcaaaatgggaatagaaaaaggaagaaatacgaaacctaatctaaaagtaggaatatgtggcgaacacggtggagagcctaagtctgttcacttttgccataatgtaggtatggattatgtttcat

SEQ ID NO: 258201 - DNA, 556 bp, Unknown
  Bacterial polypeptide expressing nucleotide sequence isolated from the Sargasso Sea
tgaattaaaaaaacaaaaagtaaaagcagcttttgtagaaattatgataccgttggtttcaactgagtctgaattaaagattttaagagctttagtaaataaaattgctaatgaaatagaaaaagaaaataaattaaaacttgaatatatggtcggcactatgattgaattaccacgtgctgccttacaagcaaagtctatctcaaaacatgctgatttttttagctttggaactaatgatttaactcaaacaacatttggaataagcagagatgactcaggtaaattcctaaacgattatattgataataaaatatttgatgtagatccgtttgtaagtattgatcaaaatggagtaggtgagttagttcaaatagcttcctcaagaggtaggaaaacaaacaaaaatattaaattaggtatttgcggtgaacacggtggcgatccaaagagcattgagttttgttctagaacgggacttaactatgtttcttgctctccatttagagtgccagtagcaagattagctgctgcacaagcggaattaagaaaatag

SEQ ID NO: 258202 - DNA, 879 bp, Unknown
  Bacterial polypeptide expressing nucleotide sequence isolated from the Sargasso Sea
ggtatttggaaatatgggaaatgattgtgcaacaggtgtagtttttaccagaagtccttcagatggaaataatgaaatttatggagagtacttaattaatgctcaaggcgaagatgtagttgcgggtagtagaacacctcaatacatcacaaaaaaaacagaaaaaaaatcttcatcgaaaaaaaattcgatggaagaaataatgccaaaagtttttaatcaactaaaaaaaatattaaagactttagaaaaacattataaagacatgcaagatgtagaatttacagtagaaaatagcaaactttggattttgcaaactagatctggaaaaagaactccaaagtcagctattaaaatagctgcagatatggtgaaggaaaaattaattacaaaaaaagaagcaattttaagaattaatccaaactccttagaatctcttttacacccaacactagatgaaaaaagtgaatttaatgtaattgctaaaggactgcccgcatctccaggtgctgcaagtggaaaagttgtttttaattcagaagaagctgaaagattgaataatatgatgcaggatacaattttagttagagtcgagacttcgccagaagatattcatggaatgcatgctgcaaaaggaattcttacttcaagaggcggaatgacaagtcatgcagcagtagtcgcaagaggaatgggaagaccatgtgtttcaggatctagtgaaataaatattgattacgaaaaaaaattattcaaaacaaataagcatgaaataaaagaaggagatacaatcaccatagatggttcaacaggaagaataataattggcaaagtaaaaactgttaaacctgaaatttctggagatttttctaaatttat

SEQ ID NO: 258203 - DNA, 880 bp, Unknown
  Bacterial polypeptide expressing nucleotide sequence isolated from the Sargasso Sea
cccgctgctgttgttgcaagaggaatgggacgtccatgtgtatcaggtaccagtgatatagaaatagattacgataataagaattttaaaacaaaagatcatgttattaaagaaggtgaattaattactattgatggatctacaggaagaataattgttggagaagtaaaaacagcaaagccagaaatttctggggatttttcaataataatgaactgggccgataaaattagaaaactaaaagtcagaacaaattctgagacaccaatggatagcaaagttgctagagattttggtgcagaaggaattggtttgtgtagaactgaacatatgttttttgatgaggagagaattttgtctgtaagacagatgatactttcaaagtctaaagaggatagggcaactgctttagataaattattaccacatcagaaaaaagatttttttgagatatttaagataatgcaaggattgccagtaactgtaagattacttgaccctcctttgcacgaatttcttccaaaaagttcacgtgaaatagaagatgtggcaaattcattaaatttagcaaaaaacgaaatacaattaagaattgcagaacttcacgaacaaaatccaatgttaggacacaggggttgcagactaggaatatcctttcccgagatttatgaaatgcaatgtcgcgctatatttcaagcacttattgaattgaaaaaaaataaaattagatcagcgtttcctgagataatggtacctttagtctcaaccgaagctgaaattaaaatcatgaaagatcttgttataaaaactgctcgaaaagttcaaaatgaaaataaaataaaaatcaactttttagttggcacaatgatagaattaccta

SEQ ID NO: 258204 - DNA, 414 bp, Unknown
  Bacterial polypeptide expressing nucleotide sequence isolated from the Sargasso Sea
ggcacaatgatgaaataccgagagcagctatcaaggctcaggatatagcaaaacatgcagaattttttagttttggcactaatgatctaacacaaacaacttttggtattagtcgtgatgatagtggtaaatttttaagtgattatttagaaaataagatattttcaatcgacccattcatttcaattgacgatggagtgaaagatttgattaggatggcagtcttggcagggaaaaagaaaaataaaaaaattaaattggggatttgtggagagcatggtggcgacccaaaaagtattaatttttgttctacgataggtttagattatgtatcttgttctccttatcgagtgcctatagctaggttggctgcagctcaggctgaattgaaaaagaaaagacaaaacaagtgaa

SEQ ID NO: 258205 - DNA, 789 bp, Unknown
  Bacterial polypeptide expressing nucleotide sequence isolated from the Sargasso Sea
tttgttagatacagatttagatgaaagtgattgggatggacttattgaagattttaaaagaacagtaagagaaaaaacaaaaaaagattttccccaagatgttcatgaacaattgctgggagcaataagtgcagtatttttatcgtgggaaagtaatagagcaaaagtttacagaaaactaaatcaaatcccagcagagtggggaactgcagtgaatgttcaatcaatggtttttggaaatatgggtgatgattgtgcaacaggagttgtgtttacaagaaatccatcagatggattaaatgaaatatatggtgagtatttaattaatgcgcaaggcgaagatgttgtagcgggtacaaggactcctcaatacataacaaaaaaagctaggagagacgctaaagtaaaagagttatcaatggaagaatctatgccaaaagtctttatagaactccaaaaaattttgaaaaaattagagacgcactacaaagatatgcaagacgtagagttcacagttgaaaatagcaaactatggatgcttcaaacaagatcaggaaaaagaacagcaaaatcagcggtcaagatcgcagttgatatggttaaagaaaaattaatctctaaaaaggaagctgtattaagaattgacccaaattctttagatacacttttgcaccctactttggatgaaaaaagttcaattaatataatagcaaatggattaccagcatcaccaggtgcagccagtggtaaagttgtatttacatcagaagaggctgaaagattaaccgc

SEQ ID NO: 258206 - DNA, 721 bp, Unknown
  Bacterial polypeptide expressing nucleotide sequence isolated from the Sargasso Sea
gtggaagatgtatcgaattcattaaaattaacaaaaaatgaaatagaggcaagaattacagaacttcatgaacaaaatccgatgcttggacatagaggttgtaggttaggtatttcatatccagaaatttacgaaatgcagtgtagggcaatatttgaggcattaattgagttgaaaagaaaaaaaatcaaatctgcttttccagaaataatgatacccttggtttcaacagaggcagaaattaaaattatgaaagatcttgtgataggtatagctaagaaagtgcaaaatgataacaaaactaaaataaattttttagtgggcacaatgattgagttaccaagagcagctttaaaagctaatgatattgcaaaacatgcagaattttttagttttggtacaaatgatttaacacaaactacttttggtataagtagagacgatagtggtaaatttttaaacgattatattgaaaataaaatctttgatatagatccctttgtttctattgacgatggagtaggtgatttaatccaaatagcatttcaaaaaggaaaaaaacaaaataaaaaaattaaactcggaatatgtggtgaacatggtggagatccaaagagtatacatttatgttcaaaaattggtcttaactatgtttcttgctctccatacagagtaccaatagcaagacttgcagctgctcaagctgaaatattaaaataat

SEQ ID NO: 258207 - DNA, 541 bp, Unknown
  Bacterial polypeptide expressing nucleotide sequence isolated from the Sargasso Sea
aataaaattaagtcagcttttcccgaaataatgattcccctagtttctacagaggctgaaattcaaataatgaaagatttagttaaaagaatagcaaatatggttcaaaaagaaaataaattaaaaatagactttatggttggaacgatgattgaacttccaagagcagctattaaggcaaaagaaatagcaaaacacgctgaattttttagttttggtacaaatgatttaacgcaaactacttttggaataagcagagacgatagtggaaaatttttaaatgattacttagaaaataaaatattttctatcgatccttttatatcaattgatgaaggggtttcagatttagttgaaattgctgttgaaaaagggaaaagccaaaataaaaagataaagctaggtatttgtggagagcatggaggcgaccctaaaagtatttctttttgtgcaaaagcaggacttaattatgtgtcttgttctccttatagagttccaattgctagactagcagcagcacaagcagagttgaaaaaataat

SEQ ID NO: 258208 - DNA, 734 bp, Unknown
  Bacterial polypeptide expressing nucleotide sequence isolated from the Sargasso Sea
catgacaagtcacgccgctgttgttgcaagaggtatgggtcgaccatgtgtttctggttccggagaaataaatatcgattatgatactaaagaatttgtagctggagatcttactattaaagagggagatattattacaatagatggtggatcaggaaaagtaatgaaaggtttagttccaacagttaaaccagatatctcaggttatttttcaacattaatgaaatgggcagatcagtttagaaaattaaaaataagaacaaatgctgaaacacccaaggatactaaaacagcaagaaactttggagctgaaggaattggtttatgtagaaccgaacacatgttttttgatgaagaaagaatactatcagttagacaaatgatattgtcgaaaaatttagatgatagaaagattgctttaactaagttactcccttatcaaaaaaatgattttaaggaaatttttaaaattatgaaaagcttacctgtaacagttaggcttttagatccaccattgcatgaatttcttcccaaaactgataaagatatggaggaggtagctagatctcttaatttaggagcaaaagaaattaagaatagagtagttgaattacacgagcttaatcctatgctaggccacagaggatgtagactcggcatctcttttccagaaatttatgaaatgcaatgtagagcgatttttactgcactagttgagtgtaaaaagaaaggta

SEQ ID NO: 258209 - DNA, 619 bp, Unknown
  Bacterial polypeptide expressing nucleotide sequence isolated from the Sargasso Sea
tgttgcaggtacaagaacccctcaacatataaccaaaaaagccagaataaaatctaaagaaaaattactttcaatggaagaatctatgccggcgatttatagacagttaaaaaaaatattatttaaattggagaaacactacaaagacatgcaagatgttgagtttacagtagagaataaaaaactatggatgttgcaaacaagatcaggaaaaagaactgcaaaatctgcagttaaaatagctacagaaatggtcaaggaaaaattaatttcaaaaaaagaagcggttttaagaattgagccaaactcattagatgctttacttcatccaacattagatgagaaaagcaatattaaagtaatcgcaaaaggtttaccagcatcacctggagccgctagtgggaaagccgttttttcctcagatgaagcccaaagacttagtgaaatgatgcaaagtacaattttagttagagtcgaaacatcaccagaggatattcatggtatgcatgctgccaaaggtattttaactgcaagaggcggaatgacaagccatgctgctgtagtagcaagaggtatgggacgtccatgtatatctggttcaaccgaaatagaaatttga

SEQ ID NO: 258210 - DNA, 369 bp, Unknown
  Bacterial polypeptide expressing nucleotide sequence isolated from the Sargasso Sea
aggcaaaagatatcgctaaacacgctgaattttttagttttggaactaatgatttaactcaaactacatttggaattagtagagatgatagtggtaaatttctaaacgattatattgagaacaaaatttttgaaattgatccttttgtatcaattgatgagggagttggagacttaataaaaattgcaacctacaaaggaagaaaacaaaacaaaaaaattaaacttggaatttgtggtgagcatggcggagatcctaaaagtatagaattttgtgcaaaaactggattagattatgtgtcttgttctccctatagggttccagttgcaagattagcagcagcacaagctcaactaaaaaaaaactaaa

SEQ ID NO: 258211 - DNA, 748 bp, Unknown
  Bacterial polypeptide expressing nucleotide sequence isolated from the Sargasso Sea
aaaagtgccttagaaattgatgatatttcaaaatctttaaatttatcaattaaagatattgaaggaagaatcgaagagcaacatgaacaaaatcccatgttaggtcacagaggatgtagactgggtatttcttttccagaaatttatgaaatgcaaattagagcaatatttgaagctctagtagagtgcaaaaaaaaaaaaattaaatcaactatgcctgaaataatgataccactggtatcaactgaagctgaaataaaaataatgaaagatcttgtaattaatgttgctagaaaagttcaaaatgaaaataaaatgaaaattaaatttctagtaggcacaatgattgaacttcctagagctgcgataaaagcaaatgatatagctaaatatgcagaattttttagttttggaactaatgatctaactcaaactacatttggaattagcagggatgacagcggtaaatttttaaatgattacattgaaaacaaaatttttgatattgatccatttatatcaattgatgatggagttggtgatttaattaaaattgctgcaactagaggaaaaaagcaaaacaaaaaaattaaacttggaatttgtggtgaacatggaggagacccaaaaagtatagagttttgctctaaagttggattggattatgtctcttgttctccttatagagtacctgttgctcgtttagcagctgctcaagctaatttaaagaatattgtagctcgttaaa

SEQ ID NO: 258212 - DNA, 679 bp, Unknown
  Bacterial polypeptide expressing nucleotide sequence isolated from the Sargasso Sea
gaatctagaattgatgaattgcatgaacaaaatcctatgttgggtcataggggatgtagacttggaatatctttccccgaaatatatgaaatgcaatgtagagcaatatttgaagctttagctgagcttaaaaaagaaaaaattaaatctgcttttccagaaattatgattcctctggtttccactgaggcagaaataaaaataatgaaagatttggtgataagaattgcaagtgaagtccaaaaggagcacaaattaaaaattgagtttatggtaggtacgatgattgaacttcctagagcggctataaaagccaaagatattgcaaaacatgctgaattttttagttttggaactaatgatttaactcaaactacatttggaataagcagagatgatagtggaaaatttttaaatgattacttagataataaaattttttcgattgatccgtttatttcgatagatgatggagttggggatttaattaaaatagctgttgaaaagggaaaaagtcaaaataaaaatataaaacttggaatttgtggagaacacggtggtgatcctaacagtattttattttgctcaaaagcaggattaaattacgtttcttgttctccgtacagagtacctgtagcaagactggctgctgcacaagccgaattaaaaaataaataga

SEQ ID NO: 258213 - DNA, 682 bp, Unknown
  Bacterial polypeptide expressing nucleotide sequence isolated from the Sargasso Sea
taaggatagaatagccgaactccatgaggaaaatcctatgctaggtcacagaggttgcaggctaggtatttcgtttcctgaaatttatgaaatgcaatgtagggctatatttgagtcaacagtggaactaaagaaagaaaaaataaaatcctcatttattgaaattatgatacctcttgtttcaactgagtctgaattaaaaattttaagacaattagttaataaaatcgctaaagagatagagagcaaaaataaaataaagttagatttcattgtaggcacaatgatagagttgcctcgagctgctttgcaagctaaatccatctcaaaacatgcagacttttttagttttggtactaatgatttgactcaaaccacattcggaataagtagagatgactcagggaagtttttaaacgattatattgataataaaatttttgatgttgacccctttgttagcatagatgaaaatggggtaggagaattagtagaaatagcttcaaaaagaggcagaaaagttaataaaaaaattaaattaggaatttgtggagaacacggcggcgaccctaaaagcattgaattttgttctaagactggattagattacgtttcttgttcaccttttagagtacccattgctagactagcggctgctcaagcagaattaaataaacagtaa

SEQ ID NO: 258214 - DNA, 677 bp, Unknown
  Bacterial polypeptide expressing nucleotide sequence isolated from the Sargasso Sea
ggagtgagagctaatgcagatactcctcaggaagctgcgcttgcacagagttttggcgttgatgggattgggttgtgtagaactgagcatatgttctttgagcaagatcgcctaattgtcatgagggaaatgattttagcgaaaagtgaagctgcaagaaagaacgctttaaggcggttacttccaatgcagagagaagacttcataaaactttttcggatcatgcttggctcccccgtaacaatacggcttttagatccaccgctgcatgaatttttacctcattcggaagatgaaatgcgtcttattgctgcgtcaatgaatgtacccttgagcgacgtagtcgaaagatcaaaagatttgaaggagttcaatccaatgctcggaaaacgtggcgtaagattgggagtaacaatgcctgaaatatatgaaatgcaagcccaagcaatttttgaggcgtcgatggaaatcaataatgggtgtgaggataccgtgaccccagaaatcatgattcccctagtttctgtaaccagagaagttgaattaataaaaaatagaatcaaaaatgtggctaaaaatatagaatcggtatccaattcgcttatcaagtacaaattgggtgttgtcgtcgaaacccccagagctgccctgcgtgcaggggacataagtgcgtcgag

SEQ ID NO: 258215 - DNA, 496 bp, Unknown
  Bacterial polypeptide expressing nucleotide sequence isolated from the Sargasso Sea
tggacggttacagaatatgtcgaccaggaaaaaatcgtacgaaaagtcgcctcagaagtcgaaagtaaatatgatatgaagttaaattatttagttggtacgatgatcgagcttcctagagcatgtttaactgctgatgaaattgcagagcatgcagaatttttcagctttgggacaaatgatctcactcaaaccacatatggttttagtagagatgacattggttcatttttgccagaatatctagatcgtaacattctacctggagacccatttcaaagtttagatgttaaaggtgttggtaaattagtatctatggcagttaaatatggtagagatattaactctaatctaaaaataggtatatgtggtgaacacgggggagaccctaaatcaattcatttttgcaaacagaatggattggactatgttagctgttctccttttagagttcctattgctaggctatccgcagctcaagcagaaataagttaaa

SEQ ID NO: 258216 - DNA, 415 bp, Unknown
  Bacterial polypeptide expressing nucleotide sequence isolated from the Sargasso Sea
tcttgtgggtacaatgatcgagttacctagagcagcaattaaggctgatgatattgcaaaacatgctgaattctttagttttggcactaatgatttaacacaaacaacttttggaataagtagagacgatagtggtaaatttttaaatgattatatagataataagatttttactattgatccgtttgtatccattgatgacggagtgaaagatttagtcgaaatagcggtttctaaaggaaaaaaacaaaataaaaagattaaactaggtatttgtggtgaacatggtggtgatccaaagagtattaaattttgttcgaaagctgggcttaattatgtttcctgttcaccttacagagttcctatagctagattagcagcagcacaggctgagcttttgaaaaataaaaattaa

SEQ ID NO: 258217 - DNA, 676 bp, Unknown
  Bacterial polypeptide expressing nucleotide sequence isolated from the Sargasso Sea
atttttaaaactagttctatagagataaaggaaggtgatttaattacaatagatggatcaacaggaagagtcattcaaggagaagtcccaaaaataaaacctgaaatttcaggtgatttttctaaattaatgagatgggcagatagttttagaaagttaaaaataagaactaattctgaaacatcattagatacaaagaccgcaagagacttcggagcagaaggaataggtctatgcaggacagagcacatgttttttgatgaagaaagaattttgtctgtaagagaaatgatactttcaaaaactaaggaagatagaaataaagctttaaagaagcttttgccacatcaaaaaaatgattttattgaaatatttaaaattatgagaagtttgcctgttacagttagattgctagatcctccattgcatgaatttcttcctagaacagaaaaagaaattagtgaagtagcaaataaattaaaattacctattaaggaggtagaatctagaattagtgaactacatgaacaaaatccaatgttaggacacagaggttgcaggctaggaatctctttccctgaaatttatgaaatgcaatgtagagcaatatttgaagctctagcagatttaaaaaaggaaaaaattaaatctgctttcccagaagataatgatacca

SEQ ID NO: 258218 - DNA, 532 bp, Unknown
  Bacterial polypeptide expressing nucleotide sequence isolated from the Sargasso Sea
tttcctgagattatgattcctttagtttctactgaaactgagattaaactaatgaaagatttagtaatcaatattgctaaaaaagttcaaaaagaaaataaaacaaaaattgaatttcttgtgggcacaatgattgagttaccgagagcagcaattaaagctgatgatattgcaaaacatgctgaatttttcagttttggtactaatgatttaacacaaacaacttttggaataagtagagacgatagtggtaaatttttaaatgattacatagataataagatttttactattgatccatttgtatccattgacgatggagtaaaagacttagtcgaaatagccgtttctaaaggaaaagaacaaaataaaaaaattaaacttggtatatgtggtgaacatggtggtgatccaaagagtattaaattttgttcaaaagctggtcttaattatgtttcttgttcaccttatagagttcctatagctagattagcggcagcacaggctgagcttttgaaaaataaaaaataaa

SEQ ID NO: 258219 - DNA, 613 bp, Unknown
  Bacterial polypeptide expressing nucleotide sequence isolated from the Sargasso Sea
cctttccgatatttatgaaatgcaatgtcgtgcaatatttgaagctttgtctgaacttaaaaaaaacaagcaaagattcgcatttcctgaaataatgataccacttgtttcaactgaagcagagataaaaataatgaaagatttagtaattcgaatagcaggacaagtagaaaaagagaataaaattaaagttgattatttagttggtactatgattgaattaccaagagcagcagttaaagccaaagatatagcgaaacatgctgaattttttagttttggaacaaatgatttaacacagactacttttggaataagtagagatgacagtggaaagtttttaaatgactatataaataataaaatatttactatagatccatttgtttcaatagatgaaggagttgaagaattgattgagatagctgtttcaaaaggaaaaagacagaataaacatataaaattaggaatttgtggtgagcacggtggagatccaaagagtatagctttttgctctgaggttggattaaactatgtatcttgttctccttatagggtgccaattgcaagattggcagcagctcaagcagaattaaaaaaaaaaaaaatttaa

SEQ ID NO: 258220 - DNA, 640 bp, Unknown
  Bacterial polypeptide expressing nucleotide sequence isolated from the Sargasso Sea
atgcttggacatagaggctgtagattgggtatttcatttcctgaaatttatgaaatgcaatgtgaggcaatttttaaagccttgtcagagcttaaaaaaaataaacaaaaatttgcattccctgaaataatgattccacttgtgtcaactgaagcagaaatcaaaataatgaaagaccttgtaattaatactgcaagaaaagtacaaaaagaaaataaagtaaaaatagaatttttagttggaacaatgattgagctaccaagagcagcaattaaagcaaaagatatagcgaaacatgctgagttttttagctttgggacaaatgatttaacacaaactacttttggtattagtagagatgatagtggaaaatttctaaacgactatattgaaaacaagattttttcaattgatccatttatttcaatagatgaaggtgtagaagatttagttgagatagctgttactaaaggaaaaaaacaaaataaaaaaattaagttaggtatttgcggtgaacacggaggtgatcctaaaagtatatatttttgctcaaaaataggtcttaattatgtttcatgctctccatatagagttccaatagcaagactggctgcagcccaggctgaaataaataaatagt

SEQ ID NO: 258221 - DNA, 568 bp, Unknown
  Bacterial polypeptide expressing nucleotide sequence isolated from the Sargasso Sea
tgaagctttatcagagctaaaaaaaaataagcaaaaatttgcatttcctgagataatgataccactagtttcaactgaagaagaaataaaaattatgaaagatttagttataagtgttgctggacaagtagaaaaagaaaataaaattaaagtagattatttggttggtacaatgatagagttaccaagagcagcgttaaaggctaaggatatagcaaaacatgctgaattttttagctttggaacaaatgatttaacccaaactacttttggaataagccgagatgatagtggaaaatttttaaatgattatattgataacaagattttttcaatagatccatttatttcaattgatgaaggggtaaaagatttaattgaaattgcagtgataaaaggaaaaaaacaaaataaaaaaattaaattaggaatttgtggtgagcatggaggtgatccaaaaagtatacatttttgttcgagagctggcttaaattatgtttcttgttcaccctacagagttccaattgctagattagcagctgctcaagcagagttgaaaaaaaattaa

SEQ ID NO: 258222 - DNA, 823 bp, Unknown
  Bacterial polypeptide expressing nucleotide sequence isolated from the Sargasso Sea
aacgaatttaatactttgatggcatggtgcgatgattttaaaaaactttcaataagagcaaatgcagaaacaataaatgacacagccaagtctttagagtttggcgctgacggaattggtttatgtagaacagaacatatgttttttgagagtgaaagaatacttcctatgagagagatgattatggcaaacaataagcaaggtagaaaaagagcattaaataaaattattgattttcaaataaatgattttgttgaaatatttaagcttttaaaagacaaacctataactgttcggctacttgatccaccaatgcatgaattcttaccaaaaagtgatattgaaatttctgagttagccaattctttaagagtttcaccagcatatgtttcagaagttttatcgagaattagtgaaagtaacccaatgttaggtcatcgaggtgtacgtttaggtttaagttatccagaaatttatgagatgcaagttgaggcaatttttaaagctacttaccaaattcatcaaaaagaaaagatcataattaagcctgaaataatgattcctttaataatgaatgcaagtgaatttacaaaaatgaaaaagattataaccaaaaaaattaaaagcttgaagaaagaatcagactttaattttgattaccagctaggaactatgattgagttaccaagtgctgccttgaattcatcggaaattggagaacatgcagatttcttttcgtatggaacaaatgatttaactcaaacaacccttggtttatcaagagatgacgcatctaaatttttgaatgaatacgtagagaaaa

SEQ ID NO: 258223 - DNA, 806 bp, Unknown
  Bacterial polypeptide expressing nucleotide sequence isolated from the Sargasso Sea
gatggtggtcggggaccggacctggaacgaaggggactggatctccctggacgggacggcgggggaagtgctggaggggaaggtggcgctccagccggcccaggtgaacgaggggccgttcgcgaagatcctggagtgggcgtcggagttccggaccatgggcgtccggacgaacgcggacacgccgaaggacgccgccaaagcccttgagttcggggcggaggggatcgggctctgccgcacggagcacatgttcttcgagggggatcgcatcgacgcggtgcgggagatgatgctcgccgagaacctcgaggaccggaaggccgggctccggaagatcctcccctaccagcgcgcggacttcgcgggcctcttcacggtgatggagggccgcccggtgacgatccgcctcctcgatcccccgatgcacgagttcatgccccacgaccgagaggcccaggatgccctcgcgccgaagatggggaagaccggggactggatccggtcccgggtccacgcgctcgaggagtcgaaccccatgctcgggcaccgtggggtgcgcctggggatctcctacccggagatctacgagacccaggtggaggcgatcttcgaggcggcctgcgacgtcgcggacgaggcggaggaggctcgggacatcgacggctggcgggaccggttccactgcgacctcgaagtggaggtgatgatcccgctcgtggggaaggtgaaggagctctcgctcatgaaggagcgctgcgtcgcggtggcggacgcggtgctcgagcgccgggagcggctaggca

SEQ ID NO: 258224 - DNA, 763 bp, Unknown
  Bacterial polypeptide expressing nucleotide sequence isolated from the Sargasso Sea
ctccccttccgaatttttgcccactaagcagtctgaaatggaagaattggcggcattattgaagttgccagttgaagatattgaacgacgtgttgattctttgcgtgaacagaacccaatgttaggacataggggggttagattggcgatgacttttccagaaatatacgatattcaagtacaggcaattatagaagctgcatgcaccttatctgaacaaaatgtaactgtttatcctgaaattatgattccattagtggggttagctgaagaattgcgtatcgcccgtgagcgtgtagttatggttgcagaatcagtgataaaagaaaaagggattgaaattgaatattctattggcacaatgattgagttgccacgtgcatgcgtagtagcagatgagatagctcaatatgcagattttttctcttttggaactaatgatcttactcaaacaacattaggtctttctcgagatgatgcatcaaaatttttgccttcatatattgataatcgaatccttgccaatgatcctttcgtacggttggaaactgaaggggttggaaaattgattactcttggtattgaaagaggaaaattgcaaaaaccagatctaaaaatcggcatatgcggtgaacatggtggtgatcctgtgtcaattaattttttcgaacaagaacattttgattatatatcctgttctccctatcgcgtcccaatcgcaaggctcgctgccgcacaagctaagttggcgaatgataattag

SEQ ID NO: 258225 - DNA, 843 bp, Unknown
  Bacterial polypeptide expressing nucleotide sequence isolated from the Sargasso Sea
gatgaaagtgatttgggatggattaattgaagattttaaaagaacagtaagagaaaaggcaaaaaaagattttcctcaagatgttcatgaacaattgctaggagcaataagtgcagtatttttatcgtgggaaagtaatagagcaaaagtttatagaaaattaaatcaaattccagcagagtggggaactgctgtaaatgttcaatcgatggtttttggaaatatgggtgatgattgtgcaacaggagttgtgtttacaagaaatccatcagatggatctaatgaaatatatggtgagtatttgattaatgcgcaaggcgaagatgttgtagcgggcacaaggactcctcaatacattacaaaaaaagctaggatagatgctaaagtaaaagaattatcaatggaagagtctctgccaaaagtctttaaagaacttcaaaaaattttgaaaaaattagagatgcattataaagatatgcaagacgtagagtttacagttgaaaatagtaaactatggatgcttcaaacaagatcaggaaaaagaacagcaaaatcagcagtgaagatcgcagttgatatggttaaagaaaaattaatttcaaaaaaggaagctgtattaagaattgacccaaactctttagatacacttttgcaccctactttggatgaaaaaagttcaattaatgtaattgcaaatggattgccagcatcaccaggtgcagccagtggtaaagttgtatttacatcagaagaggctgaaagattaaccgcaatgatgcaagatacaattttggtcagagtagagacctctccagaggatatacaaggaatgcatgccgctaa

SEQ ID NO: 258226 - DNA, 348 bp, Unknown
  Bacterial polypeptide expressing nucleotide sequence isolated from the Sargasso Sea
atgctgatttctttagtttcggaactaatgatctaacacaaaccactctaggaataagtcgagatgattcaggaaaatttttaaatgattatcttgataataaaatatttgaagtcgatccatttgtaagcatcgatcaaaatggagtgggtgaactagtagaaatagcaacctctagaggcagaagaacaaataaaaatattaaattagggatttgtggcgaacacgggggagatccaaaaagcattgatttttgttctagaacaggacttaattatgtctcgtgctctccgtttcgtgttcctgtagcgagactagcagctgctcaagctgaaattaataagtaat

SEQ ID NO: 258227 - DNA, 611 bp, Unknown
  Bacterial polypeptide expressing nucleotide sequence isolated from the Sargasso Sea
aatttatgaaatgcaatgtagggctatttttgaggctttatctgaattaaagttaaaaaaattgaattcggcatttcctgaaataatgattccactagtttctacagaagctgaaataaaaattatgaaagatttagttgtaagagttgcaaaagaagttcaaaaaaataaaggtgtaaaaattgattatttggtaggaaccatgattgaattgccaagagcagcactaaaggcaaaagaaattgcaaaacacgcagatttttttagttttggaacgaatgatctaactcaaacaacatttggcttaagcagagatgacagtggaaaatttttaaatgattatattgaaaataaaattttttctgttgatccttttgtttcaattgacgatggtgtgggagatttggttgagttagcagttgaaaaaggaaaaaaacagaataaaaaaattaaacttgggatctgtggagaacatggtggtgacccaaaaagtataaagttttgtgcaaatactggtttagattatgtatcttgctcaccatacagagtcccggttgcaagattagcagcagctcaagcagaattatctaaaaaaaaattaaatttctaat

SEQ ID NO: 258228 - DNA, 866 bp, Unknown
  Bacterial polypeptide expressing nucleotide sequence isolated from the Sargasso Sea
tttgtcatgggagagtaaaagagcaaaggtttatagaaaattaaatcatatcccatcagaatggggaactgcagtaaatgtacagtctatggtttttggtaatatgggtgatgattgtgcgactggtgttgtatttacacgtaatccatctaatggaatgaatgaaatctatggcgaatatttaataaatgctcaaggagaagatgttgttgcgggaacaaggactccccaacatataactaagaaagctagagaagatgcaaaagaagcacttctttcgatggaagaaactatgcctaaagtttacaaaaatttaaaaaatattcttattaaactagagaaacattataaagatatgcaagatgtagagtttactgtcgaaaataataagttgtggatgttgcaaacaagatctggaaaaagaactgcaaaatcatcagtaaaaattgctgtcgacatggaaagagaaaaacttataacaaaaaaagaggcagtgctcagagtacagccaaattcattagatactttgcttcatccaactttagatgaaacagcaaatctagaagtaatagccaaaggcctcccagcttcgccaggagcagctagtggaaaagtagtatttacttctgatgaggctgaaagattaaatggaatgatgcaaaatacaatcttagttagagtagaaacatcaccagaagatataaatggaatgcatgcagctaaagggattcttacagcgagagggggaatgaccagtcatgctgcagtggttgcaagaggaatgggtagaccttgtgtatccggctcaagcgaaatagaaatagattaccaaaataaaattttcaaaacgaaaaataatgaaatta

SEQ ID NO: 258229 - DNA, 529 bp, Unknown
  Bacterial polypeptide expressing nucleotide sequence isolated from the Sargasso Sea
gtgcctgaaataatgattccattagtttcaactgaagctgaaataaagataatgaaagatttagttattaaagttgcaaaacaagttcagaatgaaaataaaagtaaaatagaatttttagtaggcacaatgattgagcttcctagagcagcacttaaagcaaaagagttagcaaaacatgctgaattttttagttttggaacaaacgatttaacacaaactacatttggtataagcagagatgatagtggtaaatttctcaatgattatattgaaaataaaatatttgatattgatccatttatttccatagatgatggggttggggatttaattgaaatagcaacattaagaggaaaaaaacaaaataaaaaaattaaacttggaatttgtggagaacatggaggggatccaaaaagcatagaattctgctctaaagtagggttagattatgtctcttgctctccctatagagttccagttgcgagattatcagcagcccaagctcaattaaaaaagagctcttaga

SEQ ID NO: 258230 - DNA, 887 bp, Unknown
  Bacterial polypeptide expressing nucleotide sequence isolated from the Sargasso Sea
gcgcgtcgacgcacatatcccttcagagtggggaactgcagtaaatgttcagtccatggtttttggtaatatgggtgatgattgtgcgacaggtgttgtatttacacgtaatccatccaatggaatcaatgaaatctatggcgaatatttaataaatgctcaaggagaagatgttgttgcagggacaaggacgccccaacatataactaagaaagctagaaaagttgcaaaagaaacacttctttcaatggaagagtcaatgcctagagtttacaaaaatctagaaaaaattcttataaagctggagaaacattataaagatatgcaggatgtagagttcacagtcgaaaataataagttatggatgttgcaaacaagatctggaaaaagaactgcaaaatcatcagtcaaaattgctgtcgatatggaaagagaaaaactcatcacgaaaaaagaggctgtgcttagagtacaaccaaattcattagatactttgcttcatccaactttagatgaaacagcgaatttagaagtaatagccaaaggccttccagcttctccaggagcagctagtggaaaagtagtatttacatctgatgaggctgaaagattaaatggaatgatgcaaaatacaatcctagtaagagtagaaacatcacctgaagatatcaatggaatgcatgcagctaaaggaattcttactgcaagaggagggatgaccagccatgctgcagtagttgcaagaggaatgggtagaccttgtgtatctggctcaagcgaaatagaaatagattaccaaaataaaatttttaaaacaaaaaataatgaaattaaagagggtgatttaattacaattgatggatcaactggtagaattataaaaggag

SEQ ID NO: 258231 - DNA, 637 bp, Unknown
  Bacterial polypeptide expressing nucleotide sequence isolated from the Sargasso Sea
aggagcagcaagtggtaaggttgtctttaccgctgaagacgctgaaagaatgaaaaatcaaaacgaagatacaatattagttagggttgaaacctcaccagaagatattcacggaatgcatgcagctaaaggaatattgacagcaagaggtggaatgactagccatgctgctgttgttgccagaggtatgggacgaccatgtgtatctggttcaggggaaatcaatatagattatgaaacaaaagagtttaaagtagatgatcttactattaaagaaggcgatgtaattacaattgatggcgggacaggaaaggtgatggaaggtttagtcccaacggttaaacctgacatttctggatatttctcaacaattatgaactgggcagatgagtttagaaaattaaaaataagaacaaatgctgaaacaccacaagatacacaaatggcaagaaattttggtgcagaaggcattggtttatgtaggacagaacacatgttctttgatgacgaaagaattttatcagttaggcaaatgattttatcaagacatttagatgatagaaaaatcgcattagaaaagttgctaccccatcaaaagaatgatttcaaaaaaatttttaaaatcatgaaaggtttg

SEQ ID NO: 258232 - DNA, 599 bp, Unknown
  Bacterial polypeptide expressing nucleotide sequence isolated from the Sargasso Sea
ggaaagcaatcgtgcaaaaatttatagaaaattgaatcagataccttctgaatggggaacagcagtaaatgttcaatctatggtttttggaaatatgggaaatgattgtgcaactggtgttgtatttactagaaatccatcagatggatcaaatgatatctatggtgaataccttattaatgctcaaggtgaagatgttgttgcaggaactagaacaccacaatacataactaataaagcaaaaaaaaatgcaaaagttaaagaagcatcaatggaacagtcgatgcctaaagtttataaagagttgtataaaattctgaagaaattggaaaaacattataaagatatgcaagatgtagagtttacagttgaaaataataaactttggatattacaaactcggtcagggaaaagaacttcaaaatcagcagtaaagattgcagtagatatggttaaagaaaatttgattttaaaaaaagatgcaattttaagaattgatccaaattctttggatacattgttacacccaacgctagacgaaaaaagtaaaatagagacaatagcgactgggcttccagcctctccaggtgcagcaagcg

SEQ ID NO: 258233 - DNA, 804 bp, Unknown
  Bacterial polypeptide expressing nucleotide sequence isolated from the Sargasso Sea
ttatgaaaagaaattatttaaaacaaaggagcatgaaattaaagaaggtgacataataactattgatggatcaactggaaggataatcttaggtgaagttaaaactgttaagccagaaatatcaggtgatttttcaaaattaatgaggtgggctgacagttttagaaaattaaaaattagaacaaattcagaaacgcccatagatacaaaaaatgctagagaatttggagcagaaggtattggactgtgtagaactgaacatatgttttttgaagaagaaagaattctttatgtgagacaaatgatattatcaaagtcaaaaactgatagagatgaagtactagacaaactgctccctcaccaaaaaaatgattttattgaaatatttaaaataatgaatggtttgccagtgacagttaggttattagacccaccattacatgagtttttaccaaagaatgaaaatgaaataaaagatattgcaaaatctttagaattaccaaccaaagaagttgaaattagaattagcgagctacatgaacaaaatccaatgttgggacatagaggttgtagattagggatttcttttcctgaaatttatgaaatgcagtgtagagcaatatttgaagctttatccgaatgtaaaaacaaaaaatataaatctattttacctgagataatgattccacttgtttcaactgaagcagaaataaaaataatgaaaaatttggtaataagagttgcgagtgaagttgaaaaagaaaagaatattaaattaaattttttagtcggtacaatgattga

SEQ ID NO: 258234 - DNA, 709 bp, Unknown
  Bacterial polypeptide expressing nucleotide sequence isolated from the Sargasso Sea
agaactagctaacaatattggtatcgatagttctattgttaatcaacgtatttctagtcttcacgaacttaatccaatgttagggcaccgtggatgtagactaggaatcgcataccctgttattacagaaatgcaagcacgtgcaatcttagaggcagcagctgagcttactaacgatggtttaaatgttttaccagaaataatgatcccattagttgggacggttacagaatatgtagaccaggaaaaaatcgtacgaaaagtcgcctcagaagtcgaaagtaaatatgatataaagttaaattatttagttggtacaatgatcgagcttcctagagcatgtttaactgctgatgaaattgcagaacatgcagaatttttcagctttgggacaaatgatctcactcaaaccacatatggttttagtagagatgacattggttcatttttgccagaatatctagatcgtaacattctacctggagacccatttcaaagtttagatgttaaaggtgtcggtaaattagtatctatggcagttaaatatggtagagatgttaatccttcgattaaaataggtatttgtggcgagcatggaggagaccctaactcaattcatttttgtaaaaataatggattagattatgtgagctgctctccatatagagttcccatagcaaggttgtcagccgcgcaagctgaattatag

SEQ ID NO: 258235 - DNA, 681 bp, Unknown
  Bacterial polypeptide expressing nucleotide sequence isolated from the Sargasso Sea
aaaatgagtctagaattagcgagctacatgaacaaaacccaatgctaggtcatagaggctgcaggctagggatttcttttcctgaaatttatgaaatgcaatgtagagcaatatttgaagctttaacagatttaaaaacaaaaaaaattaaatctgcttttccagaaataatgatacctttggtttcaactgaagctgaaataaaaattatgaaagatctagtgataagaacagccaaaaaagttcaagaagaaaataaaattaaaattaaatttttagtaggaaccatgattgaattacctagagcagcaattaaggccaaagatatcgcaaaacacgcagagttttttagctttggaactaacgacttaacacaaactgcatttggaattagcagagatgatagtggtaagtttttaaatgattacattgaaaataaaattttcgatattgatccatttatttcaatagatgaaggtgtgggagatctaatcaaaattgcttctgataaaggaagaaaacaaaacaaaaatataaaattaggcatatgtggagaacatggaggagatccaaaaagtatatatttttgttctgatgcaggattagactacgtttcttgctcgccttatagagttccagttgcaagacttgctgctgcacaagctcaattaaaaaaataat

SEQ ID NO: 258236 - DNA, 907 bp, Unknown
  Bacterial polypeptide expressing nucleotide sequence isolated from the Sargasso Sea
agagttgaaacgtcaccagaggatattcatggaatgcatgcagctaaaggaatattaacagcaagaggcggaatgacaagtcatgctgctgtagtagctagaggtatggggcgaccatgtgtttcaggttctggagaaattaatatcgattatgaaacaaaagaatttaaagttggagatttaagcatcaaagagggagaagttataactattgatggaggaacaggtagagtaatgaaaggcctagttccaacagtcaaacctgaaatttcaggttacttctcaactataatgaaatgggcagatgaatttagaaaactcaaaataagaacgaatgctgaaacacctcaagatactaaaatggctagaaatttcggcgcagaaggggttggtttatgtaggactgagcacatgttttttgatgacgagagaattctatcagttaggcaaatgattctttcaaaaagtctagatgatagaaaaattgctttagaaaaactgttacctcaccaaaaaaatgattttaaagaaatttttaaaattatgaagggtttgccagtaactgtaagacttttagatccacctttacatgagttcttgcctaagacagataaagatatggaggaggtagcaagatcattaaatctaggaattaaagaaattaaaaatagagtagcagaattacacgaattaaatccaatgctaggtcatagaggatgtagattgggtatttcatttccagaaatttatgaaatgcaatgtagagcaattttcagtgcattaattgaatgcaaaaaagagaatattaaatcagttataccagagataatgatacctttagtttcaacagaagacgagcttgggataatgagaaaattagtaaatagagttgctgatcaacttcaac

SEQ ID NO: 258237 - DNA, 673 bp, Unknown
  Bacterial polypeptide expressing nucleotide sequence isolated from the Sargasso Sea
agaattgcagaactccatgaggaaaatcctatgcttgggcatagaggatgtaggctggccatttcttttccagagatttacgagatgcaatgtagagcaatatttgaagctatagtcgaattaaaaaaacaaaaagtaaaagcagcttttgtagaaattatgatacctttagtatctactgaatctgagttaaaaattttaagagctttggtaaataaaatagctaaagaaatagaaaaagaaaataaattcaaacttgagtatatggttggcaccatgattgaattgccgcgtgctgctttacaagctaaatctatttcaaaacatgctgatttttttagctttggaaccaatgatttaactcaaacaacatttggaataagcagagatgactcaggtaaattcttaaacgattatattgataataaaattttcgatgtagatccatttgtaagtattgatcaaaatggagtaggtgagttagtggaaatagcttcttcaagaggtagaaagacaaataagaatattaagcttgggatttgcggtgagcatggtggcgatcccaaaagtatagaattttgttcaagaacaggacttaattatgtttcttgttctccatttcgagtccctgttgcaagattagctgctgcacaagctgaactaacgaaataaa

SEQ ID NO: 258238 - DNA, 905 bp, Unknown
  Bacterial polypeptide expressing nucleotide sequence isolated from the Sargasso Sea
aataagtgctgtatttttatcttgggagagcaaaagagcgagagtttacagaaagttgaatcaaattccttctgaatggggaacagctgttaatgttcaatctatggtttttggaaatatgggtaatgattgtgcaacaggagttgtcttcactagaaacccttcagatggttcaaatgatatttatggagaatatttgattaatgctcagggagaagatgttgtagctggaacaagaactccacagtacattacaaagaaggcgagaaaagaggcaaaagttgatgatgcatctatggaagagtcgatgccaaaagtatatcacgaattatataaaattttaaaaaaactagagaaacattataaggatatgcaagatgtagaattcactgttgaaagtaataaactttggatattacaaactcgatctggaaaaagaacatcaaaatcagcagtaaaaattgctgttgatatggttagagaaaagttaatcaataaaaatgatgctgttttaagagttgatcccaactctttagacacgcttttgcaccctactttagatgagaaaagttcaatcaaagttatagcaaacggtctaccagcgtctcctggagcagtaagtggaaaagtagttttcagctcagaggaggctgaaagattaaatgatatgatgcaagatacaattttagttagagttgaaacttctccagaagatattcaaggaatgcatgctgcgaagggaattttaacttcaagaggaggtatgactagtcatgctgcagttgtagctagggggaatgggaagaccttgtgttctggttcaagtggaattgaaataattacgataaaaaaatctttaaaacatcctcggctgagatcaaagaaggtgaaacaattactattga

SEQ ID NO: 258239 - DNA, 737 bp, Unknown
  Bacterial polypeptide expressing nucleotide sequence isolated from the Sargasso Sea
agaacaaataaagaaaatgggcgaattagcagaaattgttaatcttacagtaaaagaagtggaaacaagaattgaggaacttcatgaacaaaacccaatgctgggtcacagaggttgcagattagctatatcatttcctgaaatatatgagatgcaatgtagagcaattttcgaagcattatgtgagcttaaaaaaaataaaattaagtcagcttttcctgaaataatgatacctctagtttctacagaggctgaaattaaaataatgaaagacttagtcaaaagaatagcaagcatggttcaaaaagaaaataaattaaaaatagactttatggttgggacaatgattgagcttccaagagcagctataaaggcgaaagaaatagcaaaacacgcagaattcttcagttttggaacaaatgatttaacccaaactacttttggaataagtagagatgatagtggaaaatttttaaatgattacttagaaaataaaatattttctattgatcctttcgtatcaattgatgagggggtttcagatttagttgagattgctgttgcaaaaggtaagagccaaaataaaaagatcaaactagggatatgtggagagcacggaggtgatcccaaaagtatttctttttgtgcgaaagtaggacttaattatgtttcttgttccccttatagagttccagtcgctagattagctgcagcacaagcagagttaaaaaaataac

SEQ ID NO: 258240 - DNA, 889 bp, Unknown
  Bacterial polypeptide expressing nucleotide sequence isolated from the Sargasso Sea
tgttgtagcgggcacaaggacgcctcaatacataacgaaaaaagctaggagagatgctaaagtaaaagaattatcaatggaagagtctatgcctaaagtctttaaagaacttcaaaaaattttgaaaaaattagagacgcattacaaagatatgcaagacgtagagtttacagttgaaaatagtaaactatggatgcttcaaacaagatcaggaaaaagaacagcaaaatcagcagtgaagatcgcagttgatatggttaaagaaaaattaatttctaaaaaggaagctgtattaagaattgacccaaattctttagacacacttttgcaccctactttagatgaaaaaagttcaattaatgttatagcaaatggattgccagcatcacctggtgcagcaagtggcaaagttgtatttacatcagaagaggccgaaagattaaccgcaatgatgcaagatacaattttagtgagggtagaaacttcaccagaagacatacaaggaatgcatgccgcgaaaggaattttgactgctagaggaggaatgacaagtcatgcagctgttgttgcgagaggcatgggtagaccatgtgtatcaggatcaagtgaaattgatattaactatgaaaataaatcttttaaaacttcttcaatggagattaaagaaggggacgtaataactatagacggctcaactggaagaattattgctggaagtgtttcaactgtaaaaccagaaatatctggtgatttttctaagctaatgtcttgggctgatagttttagaaaattaaaagtaagaacaaattctgagacaccaaaagatactaaagcagcaaaagatttggagcagaaggtattggcctctgtagaactgaacatatgtttt

SEQ ID NO: 258241 - DNA, 712 bp, Unknown
  Bacterial polypeptide expressing nucleotide sequence isolated from the Sargasso Sea
attgatcgctgggagtggcaagcgctatctgcatggctttttccttccaaacagtcaaggaaatgatgccatcatgggtttgcggacaccacatatgctgagcgagttgcagaattctaaggaaaagcaatctagtcggtctctggaaaatttaaacagtcggtgcttcaaaaaaattaaaatgattgtagaggaaagtgaaaaaaaattaggggatttatttgagtttgagttcacaattgaaaataacaagttgttcgtgttagatgcggtaaaagcagaaaggagtccccgtgcatcagtagcggttgctgttgatttagcactgagaggggctatttcgaaagaagaagctgtgctaagagtcaacccagataatttgatagaattcctgcatccgcagattgacccaaattctgaaagagatgtttttggcaatgggttgcccgctagtcctggggcagcatgcggcaagattgttttttcaagttttgccgctaaccaattaagtgcaaaaggtgaagctgcaatcttggttagggtagaaacaaccccagaagacattcgtgggatgcacgcttcagtcggagtattgacggagagaggcggtatgacaagccatgctgcagtcgttgcgcgaggtttgggcttaccttgcgtcgtaggagctcacaacctaacaatgaatcttttggataaaactgttgctacg

SEQ ID NO: 258242 - DNA, 627 bp, Unknown
  Bacterial polypeptide expressing nucleotide sequence isolated from the Sargasso Sea
tcagggaaaaagaacagccaagtcagctgtaaaaattgctgttgatatggttaaagaaaatttaatatcaaaaaaagaggcagtattaagagttgaaccaaattctttacatactttgcttcatccaactttagatgaaaaatcaaatatagaaataattgcaaagggattgccggcatcacctggtgcagcgagtggcaaagtggtatttacatcagatgatgctgaaaggcttaaagcattaatgcaaaatactatattagttcgagttgaaacttcacccgaagatattcatggcatgcatgctgctaatggcatattaactgcaagaggaggtatgaccagtcatgcagctgtagtggctagaggaatgggaagaccttgtgtatcaggctctagtgaaatcgaaattgattatgagaaaaagttattcaaagttcaagacagagaaataaaagaaggagatctaatcactattgatggatctactggtaggataattctaggtgaagtgaaaactgttaagccagagatttcaggagaattttctaagcttatgaattgggctgacaattatagaaaactaaaaatacgaacaaattcagagacacctgttgatagtaaaac

SEQ ID NO: 258243 - DNA, 652 bp, Unknown
  Bacterial polypeptide expressing nucleotide sequence isolated from the Sargasso Sea
atataaaattttaaagaagctagagaaacattataaggatatgcaagatgtagaatttacagttgaaaacaataagctttggatattacaaactcgttcaggcaaaagaacatcaaaatcagctgtaaaaattgctgttgatatggttagggaaaaacttatatctaaaaacgaggcagttttaaggatagatcctaactctttagatacgttattgcatccaactttagatgaaaaaagctcaatagaagtaattgcaaatggacttccagcttctccgggggccgcaagtggaaaagtagtatttagttctgaggaagcagagagattaaatgacatgatgcaagatacaattttagtaagagttgagacatccccggaagatattcagggaatgcatgcagcaaaaggaattttaactgcaagaggtggcatgactagtcatgcggcagtggttgcaagaggaatgggtagaccatgtgtttctggctctagtgaaattgatattaattatgatcaaaagatttttaaaacttcttcaactgaggttaaagagggtgacacaattacgattgatggttcaactggaagaataattttaggcactgtgcctactgttaaacctgagatatcaggagatttttcaaaatta

SEQ ID NO: 258244 - DNA, 829 bp, Unknown
  Bacterial polypeptide expressing nucleotide sequence isolated from the Sargasso Sea
agctatagacgatttattcaaatgtttagcaatgttgtaatgggagtagaaggtcatttatttgaagaaatgatagataattttaagcttaccaaaggtgtactacaagatacagagattgatgcttctgactgggatggacttatagaaaattttaaaaaactggtaaaagataaaaccggtaaaaattttcctcaagatgtcaatgaacaattaattgaggcaataaattcagtatttagatcttgggatagtcaaagagcaaaaacttatagaaaacttaatagaatacctgatgagtggggaacagctgtaaatgttcaggccatggtatttggaaacatgggtaatgattgtgccactggagtagcttttacaagaaatccttctactggtgaaaattctttctttggtgaatatttaataaatgctcagggtgaagatgtagttgctggtactagaactccacattatattacaaaaaaatctaaaagagagtcaagctcaaaagaattatctatgcaagaggctatgcccaaagcctacaaagaattagaaaaagtttttattaaattagaaaaacattatagagatatgcaagacattgaatttacagttgaaaatggcaaactgtggatgcttcaaacaagatctggaaaaagaactgctaaagcaggaattaaaattgccgtcgatatggttaaagaaaaattaatttcaagaaaagaagcaatacttagaatagatccaaatactattgacacacttttacaccctacattagatgataaagttaaaaaagaagttatagcatctgggctaccagctt

SEQ ID NO: 258245 - DNA, 541 bp, Unknown
  Bacterial polypeptide expressing nucleotide sequence isolated from the Sargasso Sea
aataaaatctattattccagagataatgatacctttagtatcgactgaagcagaaataaaaataatgaaagatttagtaattaaagttgcaaaagaagttgaaaacaaaactaaaacaaaactaaattttttagtgggtacaatgattgagcttcctagagcagcaatcaaagcagatgatatatctagacatgcagaattctttagttttggtacaaatgatttaacacaaactacttttggaattagcagagatgatagtggcaagtttttaaatgattatattgataataaaattttcgatgttgatccatttgtttctatagacgatggagttggggatttgatagaaatggcaacaaaaaaaggcagaaaaattaacaaaaaaattaaacttggtatatgtggtgaacacggaggtgaccctaaaagtatcgacttttgtgcacgcgctggtttagactatgtatcctgttcaccatatagagtgcctattgcaagacttgctgctgctcaagctcaattaaaaaaaataaattaa

SEQ ID NO: 258246 - DNA, 657 bp, Unknown
  Bacterial polypeptide expressing nucleotide sequence isolated from the Sargasso Sea
agaatccaatgttgggccatagaggctgtagactgggtatttcttttccagaaatttatgagatgcaatgtgaagctattttcgaagcattagcggattgtaaaagaaaaaaaataaaattagtaataccagaaataatgatacctctagtttctacagctgcagaaatacaaattttaagaaatttagttgataaaactgctgaaaaaatccaaaaagctcgatctgtaaaaataaaatattacgttggtactatgattgaattaccaagagcagcattaagagcaaaagatatagcgaaatttgcggatttctttagttttggaactaacgatttgacccaaactacttttggaataagcagagatgactctggtaaatttttaaatgattacgtagaaaacaaaattttcaataatgatcctttcgttagtattgatgaacgtggtgtaggtgagttaattaagatagcaacagagcgaggaagacttcaaaaaaaatcccttaagctaggtatttgcggagagcatggtggagatccagctagtgtagaattttgtgaaaaaattaaattaaattatgtatcttgttctccttacagagttccaatagctcgtttagcagccgcccaagcttatttaaagaaaaaaaaataat

SEQ ID NO: 258247 - DNA, 457 bp, Unknown
  Bacterial polypeptide expressing nucleotide sequence isolated from the Sargasso Sea
aatcaaattcaaaaagcacattcaataaaaataaaatattatgtaggcacaatgatcgaacttcctcgagcagctataagagctaaagatatagctagacatgctgatttttttagttttggaactaacgatttaacacaaaccacatttggtattagcagagacgactcaggaaaatttcttaatgattatgtagaaaataagatttttaacaaagatccttttgttagcattgatgaaagaggtgtaggagaattaattaaaattgcaaccgcaagaggaagattggaaaaaaaatctttaaaactcggaatttgtggagagcatggaggagatcctgcaagtattgagttttgtgaaaacgcgaaattaaattatgtatcctgttctccttatagagttcctatagcacgccttgcagccgctcaagcatatttaaagaaaaagttactttaaa

SEQ ID NO: 258248 - DNA, 934 bp, Unknown
  Bacterial polypeptide expressing nucleotide sequence isolated from the Sargasso Sea
ttatttgaaaattataaacttacaaaaggagttttacaagataccgaactcgaggaagatgattgggatggtttaatacaaaatttcaaagatattgttaaagaaaaaacaaaaaagaattttcctcaagatgttaacgaacaattgcgtggtgctattggtgctgtttttttatcttggaatagtaaaagggcaaaaacttacaggaagataaactatatccctgaccattggggaacagctgttaatatacaggccatggtgtttggtaatatgggagaaaattgtgcaacaggtgtagcttttactagaaatccttctacaggaaataaggaaattttcggagaatatttaattaatgctcagggtgaagatgtagtagcgggaacacgtacaccccaacatctttctaaaaaatcaagagataaatcaaattctgaaaaaatatctttggaagaatctatgccaaaaatattcaaacaattaaaaaagatttttagtcagttagaaaaaaaatatagagatatgcaagatatagagtttactgttgaaaataataatctatggatgttgcaaactcgatctggaaaaagaactgcaaaagcggcaattaaaattgctgttgatatggttaatgaaaaattaattacaaataaagaagcaattttgagaattgatccaaatatattagatactttattacaccccactctagatgaaaaagctgaaaaaaaagtaatagctactgggctgccagcttcacctggagcagcaagtggtaaagtaactttttctgcagatgaagctgaaagattaaaagaacaaatgcaagattcaatattagtaagagttgaaacctcaccagaagatattaatggaatgcatgcagccaaaaggtattcttacagctcgtggaggtatgacaagtcatgca

SEQ ID NO: 258249 - DNA, 472 bp, Unknown
  Bacterial polypeptide expressing nucleotide sequence isolated from the Sargasso Sea
tatgaaagatcttgtaataagagtagctaaggaagtccaaaaagaatacaaaactaaagttgattttttagttggaactatgattgaattgccaagagcggctataaaagctcaagatattgcaaagcacgctgaattttttagttttggtacgaatgatttaacccaaacaacatttggaataagtagagatgacagcagtaaattcttgaatgattatatagaaaataaaatatttgatattgatccttttatatcaatagacgaaggagttggtgaattgattgagatagcgtccaataagggcagaaaacaaaataaaaaaataaaattaggaatatgcggagaacacggtggtgatccaaagagtatacatttttgttcaaaaacaggtttacattatgtgtcttgttcaccatatagagttccagttgcgagattagcagcagcacaagctgaattaaaaaaataa

SEQ ID NO: 258250 - DNA, 757 bp, Unknown
  Bacterial polypeptide expressing nucleotide sequence isolated from the Sargasso Sea
gaattcttacctaaatctgataaagaaatttctgaagtagcaaatgttattggatcagataaaaaagatattaaggccagaatagaggaacttcatgaacagaatccaatgttaggacacagaggttgtagacttggtatctcatttcctgaaatttatgaaatgcaatgtacagctatattcgaagcccttgcagaattgaaaaaaagtaaacaaaaatttgcttttcctgagataatgatacctttagtttcaactgaagctgagattaaaataatgaaagatttagtaattagtattgcaagaaaagtacaaaaagaaaataaaacaaaaattgaatttcttgttggtacaatgattgagttgccaagagcagcaatcaaggctgatgatattgcaaagcatgctgaattttttagttttggtaccaatgatctaacacaaacaacttttggaataagtagagatgatagtggtaaatttttaaatgattatatagacaacaagatttttaccattgatccattcgtatctattgatgacggggtaaaagatctagttaaaatagcagtttcaaaaggaaaaaaacaaaataaaaaaattaaattagggatatgtggcgaacatggtggtgatcccatgagtattaaattttgttcaaaagttgggcttaattatgtttcatgttcaccttatagagttcctatagctagattatcagctgcccaagctgctcttttaaaaaataaagattaat

SEQ ID NO: 258251 - DNA, 865 bp, Unknown
  Bacterial polypeptide expressing nucleotide sequence isolated from the Sargasso Sea
aatgctgagactccttcagacgcgaaaagggctttggactttggtgctgaaggtattggattattcagaatagaacatatgttctatggtgaaggatctgaagaacctcttttccatcttcaggaaatgattatggcaaataatcagggagaaagaaaagctgctttagattcattattccctttcatgaaaaacgatatcagagaaacgttaagagcaatgaaaggattgcccgtgacaatcagattgatggatcctccgttgcatgaatttattcctcatgattctaagagacagaagaaactcgcagattctttaggtattaatgcagaagaactagaaaggcgatctgatgctttgaaagaatcaaatcctatgatgggacacagaggtgtaagattaggaataacacatcctgaaataactgaaatgcaagctagagctattctagaagctgcagctgaacttactgctgaaaatgtaaaaactttccctgaaataatgataccactaactggaatggaaactgaatacaatcaccaagaaaaaattgttagagaagttgcctcaaagatagatggtttggacaactatatggttggaacaatgatggaaattccaagagcaagtattgttgcagatcgaatagctgaaactgcagaatttttctcgttcggtactaatgatttaacccaaatgacttttggatttagtcgtgatgatacgggtggtttcatgccttcatatttagagcaagatttgttgcctgaagatccatttgcaagtttagatgagggtgtatgtgaattggtaaaaatgggaattgaaaaaggacgcaaaacaaaacctaatcttaaagtaggaa

SEQ ID NO: 258252 - DNA, 865 bp, Unknown
  Bacterial polypeptide expressing nucleotide sequence isolated from the Sargasso Sea
gattccagcacaacaacttgaagcattattgcatagaacaatggatgaatcaaaaattaaagagcataaacaattagcaaaaggaattgcagcatcacctggtgctgcaagtgggattgccatctttgatgttaaaaaagcaattgaattgggagagtcaggaaaaaaggtcattttaattagaaaagaaacaaaaccagaagatgttccagcatttttctcatcagagggaattttaaccagtcttggaggaaaatcatcacatgctgcaattgtttcaagaggaatgggtaagccatgtatcgtaggatgttcagaattaaaaataaattatgacaataacacatgtacagcaaacggaattacagttaaagaaaatgaaatgatttcaattgatggaagtgttggtaccgttttcattggagaggttcctacagttgaaccaaaagtaactaaagactttcaaacaattcttagttgggcacaaagtactaaacaattaggaattcgtgctaacgcagatacaccagatgcagcaaaacttgcaagacaatatggtgcacagggaattggattgtgtagaacagagagaatgtttaacgagacagataggattggattatttgttgaaatgattatggcacaatcagaaaatgaaagaaatcaagtattaaagaaactacaagaattgcaaaaaagtgactttattggaatcttaaaggcaatggaaggatacaaagttacaataagactactagatccaccattgcatgaatttttaccaaatcctgaagaactaaaagagaaaatgactaaagaaaatgataacagtgaaaagacaaaacgagttctagacagagcacga

SEQ ID NO: 258253 - DNA, 585 bp, Unknown
  Bacterial polypeptide expressing nucleotide sequence isolated from the Sargasso Sea
tgcaaattagagctatatttgaagccctagtagaatgcaaaaaaagaaaaatcaagtcaactatgcctgaaataatgataccacttgtgtcaactgaagctgaaattaaaattatgaaagatctggtaattaatgttgctagaaaagtgcaaaatgagaataaaacgaaaattaaatttctagttggcaccatgatagaacttccaagggctgcaataaaagctaaagatattgcaaaatatgctgaattttttagttttggaactaacgatctgacacaaactacatttggaattagcagagatgatagtggtaaattcttaaatgactatattgaaaacaaaatttttgatattgatccatttatctcaatagatgatggggttggagatttaattgaaatcgctgtgactagaggaaaaaaacaaaataaaaaaattaaacttgggatttgcggtgagcatggaggagatccaaaaagtatagagttttgttctaaagttggattagattatgtttcttgttccccttatagggtacctattgcacgtttagcagcagcccaagctcaattaaaaaaataat

SEQ ID NO: 258254 - DNA, 692 bp, Unknown
  Bacterial polypeptide expressing nucleotide sequence isolated from the Sargasso Sea
aattaatgctcagggagaagatgttgtagctggaacaagaactccacagtacattacaaagaaggcaagaaaagaggcaaaagttgatgacgcatctatggaagagtcgatgccagaagtatatcacgaattatataaaattttaaaaaaactagagaaacactataaggatatgcaagatgtggagttcactgttgaaagtaataaactttggatattacaaactcgatctggaaaaagaacatcaaaatcagcagtaaaaattgctgttgatatggttagagaaaagttaatcaataaaaatgatgctgttttaagagtcgatcccaactctttagatacgcttttgcatcctactttagatgaaagaagttcaatcaaagttatagcaaacggtcttccagcgtctcctggtgcagtaagtggaaaagtagttttcagctcagaggaagctgaaagattaaatgatatgatgcaagatacaattttagttagagttgaaacttctccagaagatattcaaggaatgcatgctgcaaagggaattttaacttcaagaggaggtatgactagtcatgctgcagttgtagctaggggaatgggaagaccttgtgtttctggttctagtgaaattgaaattaattacgataaaaaaatctttaaaacatcttcggttgagatcaaagaaggtg

SEQ ID NO: 258255 - DNA, 379 bp, Unknown
  Bacterial polypeptide expressing nucleotide sequence isolated from the Sargasso Sea
gcagcaataaaggcaaaagatatcgctaaacatgctgaattttttagttttggaacaaatgatttaactcaaactacatttggaattagcagagatgatagcggtaaattccttaatgattatattgagaacaaaatttttgatatcgatccttttgtatcaattgatgagggggttggagacttaataaaaattgcaaccgataaaggcagaaaacaaaacaaaaaaataaaacttggaatttgtggtgagcatggtggagatcctaaaagtatagaattctgtgcaaaaactggattagattatgtatcctgttcgccctacagggttccagtggcaagattagcagcagcccaagcacaattaaaaaaaaattaaa

SEQ ID NO: 258256 - DNA, 765 bp, Unknown
  Bacterial polypeptide expressing nucleotide sequence isolated from the Sargasso Sea
gttgaaattaaagaaggagatataattacaattgatggatcaacgggtagaattattttaggagaagtgccgactgttaaaccagaaatttctggagatttttcaaagttaatggtatgggcagacaattatagaaaactcaaagtaagaactaactctgaaacaccacttgatacaaaaacagcaagagactttggtgcagaaggtataggtctttgtagaacagagcatatgttttttgatgaagacagaattctgtcagtaagagaaatgattttatctaaaacaatagaagatagaagccaagcacttgcaaaacttttaccacatcaaaaaaacgattttattgaaatttttaaaattatgaatggtttaccagttactgtaaggttattagacccaccattgcatgaatttttgcctaaaaatgcaaaagaaataaaaagtgtatctgatgctctagagctctctactaacgaagtagaattaagaattggagaacttcatgagcataatcctatgcttggccacaggggatgtagattaggaatttcttttccagaaatttacgaaatgcaatgcagagcaatttttgaagcattagttgaatgtaagaaaaaaaaatataaatcaataataccagaaataatgattcctttagtttcaacagaggcagagattgaaataatgaaaaatttggtaaatcgaattgctaataaagtccaaaaagaaaataaaatcaaaattgactatttggttggaaca

SEQ ID NO: 258257 - DNA, 799 bp, Unknown
  Bacterial polypeptide expressing nucleotide sequence isolated from the Sargasso Sea
gattgggatggcttaattaaagattttaagaatgttgtaaaagcaaaaactaaaaaagaatttccccaagatgtaaatgaacagttaacaggagcggtagcagctgtattcttatcttggcaaagtaacagagcaaaagtttacagaaaaattaaccaaataccttccgattggggaactgcagtaaatgttcagtcaatggtatttggaaatatgggacaagattgtgcgactggagttgtttttactagaaacccatctacaggtaaaaacgaaatttatggagaatatttaattaatgcgcaaggtgaagatgttgttgcaggcacaagaactccacaatatataacaaaaaaagctagagacgaggcgaagtccaaagaagagtcgatggaagaatttatgcccaatgttttcaagcagctaaataaaattttaaaaagtttagaaaaatattataaagatatgcaggacgttgagttcacagttgagaataatactctttggatattacaaacaagatctggaaaaagaactgcaaaatcagcagttaaaattgcagttgatatggttaaagaaaaattaatttcaaaaaaaaatgctattacaagaatagatccacattctctagatacacttcttcatcctaccttagatgaaaaaagtaaaataaatgttattgcaaaaggtttacctgcttctcctggcgccgcaagtggaaaagtagttttttcatctgatgaagcagaaagacttaatgaaatgatgcaagatactattttagttagattagaaactt

SEQ ID NO: 258258 - DNA, 479 bp, Unknown
  Bacterial polypeptide expressing nucleotide sequence isolated from the Sargasso Sea
agaaattatgaaaaatcttgttgataaagttgcagatcaagtaaaagtagaaaataaaacaaaaatagattacttggtagggacaatgatcgaattaccgagagctgcgataaaagctgaagatatagccagacatgctgacttttttagttttggaacgaatgatctaacacaaactacatttggtattagcagagatgatagtggtaaatttttaaatgattatattgaaaataaaatatttgatgtcgatccatttatatcaatagatgatggtgtaggagatttaattgaaattgctacattaaaaggaaaaaagcaaaataaaaaacttaaattaggaatttgcggagagcatggcggagatccaaaaagtatcaatttttgttcaagcacaggtcttaattacgtttcttgctcaccttatagagtgcctgttgcaagacttgcagcagcacaagcacagcttaaaaaataga

SEQ ID NO: 258259 - DNA, 550 bp, Unknown
  Bacterial polypeptide expressing nucleotide sequence isolated from the Sargasso Sea
aaaaaggggaataaaatctgcatttcctgaaataatgattcctttagtatctacagaagctgaaataaaattaatgaaagatttagttattagtacagctagcaaagtacaaaaaaagcataaattgaaaatagaatttttggtaggcacaatgattgaattgcctagagcagctttaaaagcaaaagaaatttcaaaacatgcagaatttttcagttttgggacaaatgatttaactcaaactacttttggaattagtagagatgacagtggaaaatttttaaatgattatttagaaaataaaatattttctatcgatcctttcgtatcaattgatgaaggtgtctcagacttagttgaaatagcagttgaaagaggaaagaaaaataataaaaatttaaaattgggaatatgcggagaacacggaggagatcctaaaagtatagaattttgtgcaagagtaggattaaattatgtttcatgttcaccttatagagttcctgtcgcgaggttagctgcagcacaggccgaaattaagaagaatatataa

SEQ ID NO: 258260 - DNA, 821 bp, Unknown
  Bacterial polypeptide expressing nucleotide sequence isolated from the Sargasso Sea
gctcaggagagacgtagtagctggaacaaggacaccaagatatattaccgaagttgcaaagagagaatctaattcaaaagagcaatcaatggaaaaattatttcctaccatctttaaggagctaaaaaaaaaactgaaaactttagagaaacattatagggatatgcaagatgtagaatttacagttgaaaataaagagttgtggattctgcaaactagatcaggaaaaagaacagcaaaatctgcagttaaaattgcctctgacatgttcaaagaaaatttaataacaaaaaaagaagcaatattgagaatagatcctaattctcttgatacacttttacacccaactttggatgaaaacattaaatttaaagtcataggaaaaggattaccggcttcgccaggagcagcaagtggaaaggttgtattcacatcagaagaagcagtgaggctaaatgaaatgatgcaagatacaattttagttagaatagaaacttctccagaagatatccatggtatgcattctgcaaaaggaattttaactgctagaggaggaatgacaagtcatgctgctgtagttgcaagaggcatgggcagaccatgcgtttctggttcaagcgatatagaaattgattatataaataaaacttttaaaacaaaagaccaagaggttaaggaaggagacataataactattgatggctcgagtggaaaaataattctaggagaagttaaaacagtgaaacctgaaatttcaggagatttttctaaaataatgaaatggtctgatgaaataagaaaattaaaaattagaactaatg

SEQ ID NO: 258261 - DNA, 933 bp, Unknown
  Bacterial polypeptide expressing nucleotide sequence isolated from the Sargasso Sea
gatgtatctaaaaaaatttggggatttaaaaaatcctcttttattatctgtgcggtctggtgcaagagtatcaatgccaggcatgatggacacaatacttaatcttggactcaatgataaaacagttattgctttatccaataaaacttcaaatggaagatttgctaaagacagttatagaagatttatacaaatgtatgccaatgttgtaatgggtgttgaaagttatcattttgaagagttaattgaaaattataaacttacaaaaggtgttttattggatactgaattagatgaacaggattgggatggtttaataaaagattttaaggatactgttaaagaaaaaacaaaaagagattttccacaaaatgtttatgaacagttatttggagctattagtgctgtttttttatcttgggaaagtaatcgtgctaaagtttacagaaaattaaatcaaataccagctgaatggggaacagcagtaaatgttcaatcaatggtttttggaaatatgggaaatgattgtgcaactggagtagtttttacaagaaatccctctgatggatttaatgatatttatggagaatatttaattaatgcgcaaggagaagatgttgtggcgggaacacgaacgccacaatatattactaaaaaagctaggaaagagtctaaagctaaagaactctctatggaagagtctatgcccaaagtttattctgaattatttaaaattttaagaaaattagaaaaacattataaagatatgcaagatgttgagtttacagttgaaaataaaaagctttggatattgcaaacgcgctccggtaaaagaacttccaaatcagcagttaaaattgctgtagatatggtaaaagaaaaattaattttcaaaaatgaagcagtcttaagagtaaacccctattctcttga

SEQ ID NO: 258262 - DNA, 484 bp, Unknown
  Bacterial polypeptide expressing nucleotide sequence isolated from the Sargasso Sea
aatgaaaaagttagtaattaaagttgctagagaagttcaaaatgaaagtaaaactaaaataaaatttctagttggaacaatgatagaacttcccagagcggcaattaaagcaaaagatatcgcaaaacatgctgaattttttagttttggaactaatgacctgacgcaaactacattcggaattagcagagatgatagtggtaaatttttaaatgattacatagaaaataaaatttttgacattgatccatttatctcaattgatgatggagttggagatttaattaaaatagcaacaaacaaaggaaaaaaacaaaacaaaaaaatcaaacttggaatttgtggcgaacatggaggagacccaaaaagtatagaattttgcgctaaagttggcttagattatgtttcttgctcaccttatagagtccctgttgctcgtttagcagcagcgcaagctcaattaaaaaaggggataaaaatttaa

SEQ ID NO: 258263 - DNA, 715 bp, Unknown
  Bacterial polypeptide expressing nucleotide sequence isolated from the Sargasso Sea
gatgtagagttcacagtcgaaaattctaaactttggatgcttcaaacaagatctggaaaaaggactgcaaaatctgctgtaaaaattgctgtagacatggtcaaagaaaaattgataacaaaaaaagaggcagtattgagagttgatcctaatactttggacacacttcttcacccaacattagatgaaacaaaagaagttaaaactattgcaaaaggtttacctgcgtctccaggtgcaacaagtggaaaagttgttttttcatctgatgaagcagaaagattaaatggtatgatgcaagacactattcttgttagagtagaaacttcaccagaggatatccacggcatgcatgcagcaaaaggtattttaactgctcgtggaggaatgacaagtcatgctgcagttgttgcaagaggtatgggaagaccatgtgtatcaggttcaagtgaaatagatatcaattatgagcaaaaaatatttaggacttcttcaaacgtagaagtaaaagagggagatgttattacgattgatggatctacaggaagagttattttagacaaagttccaacattaaagccagagatctcaggtgatttttcaaaattaatgagttgggctgatagttacagaaaattaaaggtaagaacaaactccgagactccccttgacacaaaaacagcaagagaattcggagctgaggggattggtcttt

SEQ ID NO: 258264 - DNA, 802 bp, Unknown
  Bacterial polypeptide expressing nucleotide sequence isolated from the Sargasso Sea
ttttgatgaagaaagaattttatcagtaagggaaatgattttatcaaagactaaagaagatagatcaattgcattaaaaaaacttttgcctcatcaaaaaaaggattttatagaaatatttaaaattatgagtggattgccagttacagtaagattgttagatccacctctccatgagtttttgcctcgaacagataaagagattaatgaagttgcaaatattgttaatcttccagtaaaagaagtagaatctagaattgatgaattgcatgaacaaaatcccatgttgggtcataggggatgtagactcggaatatcttttcctgaaatatatgaaatgcaatgtagagcaatatttgaagctctagcagagctcaaaaaagaaaaaattaaatctgcttttccagaaattatgatcccattagtatctactgaagcagaaataaaaattatgaaagatttagtaatcagaattgcaaatgaagttcaaaaagagcataaattaaaaattgagtttatggtaggtacgatgattgagcttcctagagcagctataaaagccaaagatattgcaaaacatgctgaattttttagttttggaactaatgatttaacgcaaactacatttggaataagcagagatgatagtggaaaatttttaaatgattatatagataataaaattttttcaattgatccttttatttcaatagatgatggagttggagatttaatcaaaatagctattgaaaagggaaaaagtcaaaataaaaatattaaacttggaatttgtggagaacac

SEQ ID NO: 258265 - DNA, 637 bp, Unknown
  Bacterial polypeptide expressing nucleotide sequence isolated from the Sargasso Sea
catgaacttaaccccatggcttggacatagaggatgtagattgggtatctcttttccagaaatttacgaaatgcaatgcagagctattttcagtgctttaattgaatgtaaaaaagagaatattaaatcaattataccggagataatgatacctttagtttcaacagaagacgagcttgggataatgagaaaattagttaacagggttgctgatcaacttcaaaaagaaaataaagttaaaataaattattttgtaggcacgatgatcgagcttcctagagcagcgttaagagctgcaccaatatcaaagtatgccgatttttttagttttggaactaacgatttaacacaaactacatttggtatcagcagagatgactcaggaaaatttttaaatgattatattgatcataaaattttcgatgaagatccatttgtaagtattgataaagacggcgttggtgaacttatcaaaattgcatcacaaagaggaaaaaaacaaaacaaaaaacttaaattaggaatttgcggtgaacacggaggagatcctagaagtatagaattttgttctaaaaatggattgaattatgtttcctgctcgccatttagagtcccaattgcaagacttgcagcagca

SEQ ID NO: 258266 - DNA, 967 bp, Unknown
  Bacterial polypeptide expressing nucleotide sequence isolated from the Sargasso Sea
agtagaagggcatttgtttgaagaaatgatagataattttaaattaacaaagggtgttttacaagatactgaaatcgatgcttccgactgggatggacttatagaaaattttaaaaaattagtaaagaaaaaaactggtaataattttcctcaagatgtaaacgagcaattaattcaagcggtaagttcagtatttagatcttgggaaagtcaaagagcaaaaacttatagaaaacttaacagaatacctgatgagtggggaacagcagtaaatgttcaagcaatggtatttggaaacatgggcaatgattgtgctactggagttgcttttaccagaaatccttctactggtgaaaattctttctttggagagtatttaataaatgctcaaggtgaggatgttgtcgctggaactagaactccacaatatattacaaaaaaatctaaaaatgaatccggctcgaaagaaccttcaatggaggaagcaatgccaaaagcatacaaagaattagaaaaagtttttttaaaattagaaaaacattacagagatatgcaagacattgaatttacagttgagaataataaattgtggatgcttcaaacaagatccggaaaaagaactgcaaaagcaggaattaaaattgctgttgatatggttaaggaaaaattaatctctagaaaagaagctttactaagaatagatcctaatactattgatacacttttgcatcctactcttgataataaagtcaaaaaagaggtggtagcatcggggttgcctgcttcgcctggtgctgccagtggtaaagttgtttttgacgccgatgaagcagaaaaattaaataatatgatgcaagatacaattttagtaagattagaaacatccccagaggatattcatggaatgcatgcagcaaaaggtattttaaactgcagaggcgggatgacaaagtcatgctgctgtagt

SEQ ID NO: 258267 - DNA, 929 bp, Unknown
  Bacterial polypeptide expressing nucleotide sequence isolated from the Sargasso Sea
gcagtatttttatcatggggaaagtaatagagcaaaagtctatagaaagcttaaccaaattccatctaactggggaactgctgtaaatgtacaatctatggtttttggcaacatgggagaaaattgtgcaacaggagtagtttttacaagaaatccatctgacggaagaaaagaagtatatggtgaatatttaattaatgcccaaggcgaagatgtcgttgctggaacaagaactcctcagcatataactaaaaaatctagagtaaaatcaaaggaaaaactaccttcaatggaggagtcgatgccatcaatttttaggcagttaaaaaaaatacttatcaaattagagaaacattataaagacatgcaagatgttgaatttacagtagagaataaaaaactttggatgttgcaaacaagaacaggaaagagaacggctaaatctgctataaaaatagcaacagacatggttaaagaaaaattaatttcaaaaaaagatgcaattttaagaattgaaccaaaatctttggatactttacttcatccagctcttgacgaaaaaagcagcgtagaagtaatagcaaaagggttgcccgcatcgcctggtgcagctactggaaaggttgttttttcatctgatgaagcccagaggcttaatgaaatgatgcaaaatgttatactagttaggacagaaacatctcctgaagatattcatggcatgcacgctgctaaaggaatattaactgcaagaggcggtatgacaagtcatgctgctgtagttgcaagaggaatgggtcgtccgtgtgtttcaggatcaaatgaaatagaaattgattatggtaaaaaattatttaaaacaaaaaatcgagaaatcaaagaaggagagaagataacgattgatggatcgacaggtagaattattttaggtg

SEQ ID NO: 258268 - DNA, 520 bp, Unknown
  Bacterial polypeptide expressing nucleotide sequence isolated from the Sargasso Sea
atcatgatacctttagtatcaactgaagcagaaataaaaataatgaaagatttagtaattagagttgcaaaagaagttgaaaacaaaactaaaacaaaactaaattttttagtgggcacaatgattgagctcccaagagcagcaatcaaagcagatgatatatctaaacatgcagaattctttagttttggaacaaatgatttaacacagacaacatttggaattagtagagatgatagtggaaagtttttaaacgattatattgataataaaattttcgatattgatccatttgtttccatagacgatggtgttggggatttgattgaaatggcaacaataaaaggtagaaaaataaacaaaaaaatcaaactgggtatatgcggtgaacacggcggtgatcctaaaagtatcgacttttgtgcacgtgctggtttagattatgtatcctgttcaccttacagagtaccaattgcaagacttgctgccgctcaagctcaactaaaaaaaataaattaaa

SEQ ID NO: 258269 - DNA, 917 bp, Unknown
  Bacterial polypeptide expressing nucleotide sequence isolated from the Sargasso Sea
tcgcctcaccttaatgcgtgagatgatttttgcccataatagggaggaacgcagagcagtactggagagattattgccaatgcaaaggtcagacttttttgaattatttactctcatgaaaggtctcccagtttgtattagattatttgatctacctttacacgagtttttaccaaatgatcgagaaggtatgcatgatctagccgaggctttagatttaccactatcaagtgttatgagtagggtagaaactttagctgaatataatccaatgcttgggatgcgtggcgttcgtgttggtgtaacagttcctgaaatttatgagatgcaagcacgggcaatttttgaagcaacagctgaggcaagtaaaaatggtgcaatagtggtaccagaaatcatgattccccttgtttcagcaaaacgtgaagtagaattagttagaacaagaattgatggagtggcggcgttggtacgggccgaaacaggaatagaatttgattacagtcttggaataatggttgagacacccagagctgcattgcgcgcagatgatattgcctcaaattccgcgtttttgagttttggcactaatgatttaactcagatgacctatggcttatcccgcgatgatgcaggccgtttcatgtctgactatgtttaccaaggtgtgttcccggaagatccttttcatacacttgacattgatggagttggcgagttgttgaaaatgggtgtaaccagagctcgaggcgttaaaagtgatattgttctatctatctgcggcgagcatggcggaagtccggagtccatagatttttgtagacaaataggaatggactatgtttcctgttctccttttagagtcccagttgccaaattggccgcagctcagttggctattaaagaccggtattgat

SEQ ID NO: 258270 - DNA, 602 bp, Unknown
  Bacterial polypeptide expressing nucleotide sequence isolated from the Sargasso Sea
agagggagatataataacaatagacggatcaacaggaagaataattgaaggtagtgttgctaccgtaaagcctgaaatatctggtgatttttcaaaattaatgtcttgggctgatagttatagaaaattaaagattagaacaaattcagaaactccaaaagatactaaaactgcgaaagattttggtgctgaaggtattggactttgcagaactgagcacatgttttttgatgaagaaagaattttatctgttagggaaatgattctttctaaaaccaaagaagacagagccaaagccttaaataaactcttaccacatcaaaaaaaagacttttctgaaatttttaagattatgaatggcttaccagttacagtaagattgttagatcctccattacatgaatttttaccaagaacaaataaagaaatttgcgaattagcagaaattgttaatcttacagtaaaagaagttgaaacaagaattgaggaacttcatgaacaaaacccaatgctaggtcacagaggttgcagattagctatatcatttcctgaaatatatgagatgcaatgtagagcaatttttgaagcattatgtgagctta

SEQ ID NO: 258271 - DNA, 603 bp, Unknown
  Bacterial polypeptide expressing nucleotide sequence isolated from the Sargasso Sea
ccgaaatttatgaaatgcaatgtagagccatatttgaagctttggttgaatgcaaaaataaaaaatataaatcaatattacctgaaataatgattccactagtttcaaccgaagctgaaataaaaatcatgaaagatttagtaataagggtagcaaaacaggttcaagatgaaaataagttgaaaattaattttttagttggcacaatgatagagcttccaagggccgccattaaagcaaaagatattgcaaagcatgcagaattttttagttttggaactaatgacttaactcaaactacgtttggtattagtagagatgatagtggaaagtttttaaatgattatattgaaaataaaatatttgatgttgatccattcgtatctattgatgaaggagttggtaatttaattgagttagcaacaattggtggtaaaaaacaaaacgaatatattaaactaggaatatgcggcgaacatggtggagatcctaaaagtatagatttttgttctaaaactggattagactatgtttcttgctctccttatagagttcctgtagcaagattagcagctgcgcaagctcaattaaaaaaatcttaaa

SEQ ID NO: 258272 - DNA, 397 bp, Unknown
  Bacterial polypeptide expressing nucleotide sequence isolated from the Sargasso Sea
atgattgagctaccaagagctgcgttacaagccaaatcaatatcaaaacatgcagatttcttcagttttggaactaatgatttaacacaaactacactaggtattagtcgtgatgactcgggaaaatttttaaatgattacattgataataaaattttcgaaattgatccatttgtaagcattgatcaaagtggagtaggagagcttgttgaactagcatctactagaggtagaaaagtaaataaaaaacttaaactcggaatttgtggcgaacatggtggagatccaaagagtattgagttttgctcaagaacaggtttgaattatgtttcttgttcaccgtttagagttccaatcgcgagattagcagctgctcaagctgaactaagaagataat

SEQ ID NO: 258273 - DNA, 958 bp, Unknown
  Bacterial polypeptide expressing nucleotide sequence isolated from the Sargasso Sea
ggtgcagccagtggtaaagtagtattcacatctgaggaagctgaaagactaagtgccatgatgcaagatacaattttagttagagtagaaacttctccagaagatattcaaggaatgcatgctgctaaaggaatattgacagctagaggaggaatgacaagccatgctgcagttattgcaagaggcatgggtagaccttgcgtatctggatcaagtgaaattgatataaactatgaaaataaatgttttaaaacttcttcaatggaaataaaagagggagatataattaccatcgatggatcaactggaagaattatagccggaagtgtttcgactgtgaagccagaaatatctggcgatttttcaaaattaatgtcttgggccgatagtttcaggaaattaaaagtaagaacaaattcagagacccctaaagatactaaaacagcaaaagactttggtgcagaaggtattggactttgcagaactgagcatatgttttttgatgaagaaagaattttgtctgtaagggaaatgatactatctaaaacaaaagaggacagagcgacagctttagaaaaactattacctcatcaaaaaaaagattttattgatatatttaaaattatgagtggtttaccagtaacagttaggttgttagacccaccactgcatgaatttttgcctcgtacaattaaggaaataaatgaagttgctaatacagttaatcttccagttaaagaggttgagtcaaggatagaagagcttcatgaacaaaatccaatgttaggtcatagaggttgtaggcttgggatatcttttccagaaatttatgaaatgcaatgtagagcaatatttgaagctttagcagaacttaaaaaaagtaaaattaaatctgcatttcctgaaattatgatacccttggtatctactgaagctgaaataaaaattagaaagattt

SEQ ID NO: 258274 - DNA, 767 bp, Unknown
  Bacterial polypeptide expressing nucleotide sequence isolated from the Sargasso Sea
ttagatgaaaaagattgggaaggtttgattaatgactttaagaaagttgttaaagacaaaactaataaaaattttccacaaaatgtctatgatcaattacttggagcgatttgtgctgtatttttatcttgggaaagtaatagagcaaaagtttatagaaaactaaatcaaatccctagcgaatggggaaccgcagttaatgttcaatcgatggtatttggaaatatgggtagtgatagcgcaactggagttgtttttacaagaaatccatcagatggtacaaatgaaatttatggagaatatttaataaatgctcaaggagaagatgttgtagcaggaacaagaacaccacaatacataaccaaaaaagctaaaaaagatgctaatgcaaaagaggactcaatggaagagtctatgcctatagtgtttaaacaattagataagattttaaaagttttagaaaaacactacaaagatatgcaggatgtcgaatttacagttgaaaataaaagattgtggatgcttcaaacaagatctggaaaaagaaccgcaaagtctgctgtcaaaatagcagtagatatggttaaagaaaaattaatatcaaaaaaagaagcagttttaagagttgatccaaattcattagatacgttgttacatccaacacttgatgaaaaaagttcaataaatattattgcaagtggattacctgcgtctcctggtgctgctagtggaaaggtagtcttttcatctgatgaagctgaaagatt

SEQ ID NO: 258275 - DNA, 868 bp, Unknown
  Bacterial polypeptide expressing nucleotide sequence isolated from the Sargasso Sea
agcagttgtggcaaggggaatgggaaggccttgtgtttctggatcaagtgaaattgacatcaattatgaaaataagtcatttaaaacatcatcaatggaaattaaagagggagatataataacaatagatggatcaacaggaagaataattgaaggtagtgttgctaccgtaaagcctgaaatatctggtgatttttcaaaattaatgtcttgggccgatagttatagaaaattaaagattagaacaaattcagaaactccaaaagatactaaaactgcgaaggattttggtgctgaaggtattggactttgcagaactgagcacatgttttttgatgaagagagaattttatctgttagggaaatgattctttctaaaaccaaagaagacagagccaaagccttagataaactcctaccacatcaaaaaaaagactttactgaaatttttaagattatgaatggcttaccagttacagtaagattgttagatcctccattacatgaatttttaccaagaacaaataaagaaattggcgaattagcagaaattgttaatcttacagtaaaagaagttgaaacaagaattgaggaacttcatgaacaaaacccaatgctaggtcacagaggttgcagattagctatatcatttcctgaaatatatgagatgcaatgtagagcaattttcgaagcattatgtgagcttaaaaaaaataaaattaagtcagcttttcctgaaataatgatacctctggtttcgacagaggctgaaattaaaataatgaaagacttagtcaaaagaatagcaagcatggttcaaaaagaaaataaattaaaaatagactttatggttgggacaatgattgag

SEQ ID NO: 258276 - DNA, 922 bp, Unknown
  Bacterial polypeptide expressing nucleotide sequence isolated from the Sargasso Sea
tatgagccagcggaaatgggtatataaatttggcggcggaggtggggaaggcgcgtctgacatgaaaaacttgctcggtggcaagggtgcaaacctcgctgagatgtcgtctcttggcctgcccgtccctcccggcttcacgatcaccacggaattgtgcgccgcttactatgacgctggcgagagttacccagacgctctttccggtcaggtggatgcggcgctggagttcgttgaggaaaccgtctgtgcgaagttcggtgattccgagaatccgatgctggtgtcggttaggtctggcgctcgggtctccatgcccggcatgatggatacagtactcaaccttggcctgaataacgctacggtcatgggtctggcagcgaaaagcggtgattcccgatttgcgtgggattcttatcgtcgtttcattcaaatgtacggtgacgtcgtcctcggcgtcgatcacgataattttgaggaaattattgacaaccaaaaaatgatgaatggcgccgcccttgataccgatctcgatgctgatgactggaaggcggttgtatccgggttcatggagcgagtcgaggacgagactggaaagccttttccgcaggaaccgcgggatcagctatggggcgcgatcacggcagtgtttggcagctggcagaacgaccgcgcgaacacgtaccgccggcttcataatatccccgaaagctggggcacggcggttaacgttcaggctatggtgttcggaaatatgggagacgattgcgccaccggcgtcgcctttacccgtgatccgtccgacggacgccatacgttctatggtgaaatattgggtaatgctcagggcgaggatgtggtcgccggcattcgcacgcccccacacctggacatatctggcaaaaaagagcatggctccgat

SEQ ID NO: 258277 - DNA, 715 bp, Unknown
  Bacterial polypeptide expressing nucleotide sequence isolated from the Sargasso Sea
gttttttgatgaaaagagaattatctctgtgagacaaatgatactttctaaaactttagaagatagaaaagaggctattgcaaaattattaccatatcaaaaaaatgattttattgagatttttaaaataatgaatggtttgcctgtaacagtaaggttattagatccacctttacatgaatttttacctaagacagataaagatattgatgctatagcaaaagaattaaatttatctcaaaacgatattaaatcaagaataactgagcttcatgaacaaaatccaatgttaggacatagaggttgcaggttaggaatttcttttcccgaaatttaccaaatgcaatgccaagcaatttttgaagctttagctgaatgtaaaaagaaaaagattaaattagttatacctgagattatgattcctttagtatctactgcagcagaaatacaaatccttagaagtttggttgataacatggcaaaaaaaatacaaaaacaacactcaataaaaataaaatattttgtaggcaccatgatagaattacctcgcgcagccataagagccaaagatattgccaagtatgctgatttttttagctttggaactaatgatttgacacaaaccacttttggtatcagtagagatgactcaggtaaatttcttaatgattatgtagaaaataaaatttttactaaagatccatttgttagcatt

SEQ ID NO: 258278 - DNA, 837 bp, Unknown
  Bacterial polypeptide expressing nucleotide sequence isolated from the Sargasso Sea
agaggaatgggaaggccatgtgtttctggctcaagtgaaattaaaattaattatgccaataaaatttttaaaactaactctatagagataaaagaaggtgatttaattacaatagacggatccacaggaagaattattcaaggagaagttccaagaataaaacctgaaatttcaggggatttttcaaaattaatgagttgggcagatagttttagaaagttaaaagtgagaacaaattctgaaactttattagacacaaagactgcaagagattttggagcggaaggaataggcttatgtaggactgagcacatgttttttgatcaagaaagaattttatctgttagagaaatgatactttcaaaaactaaagaagatagggataaagcattagaaaaacttttaccacatcaaaagaatgattttattgaaatatttaaaattatgagcaacttgcccgttacagttagattattggatcctccgctacatgaatttcttccaagaaccgaaaaagaaaccaatgaagtagcaaaaaaattaaaattatctattaaagaagttgaatctagaattagcgaattacatgaacaaaatccaatgttaggacatagaggatgtagattgggaatttcatttcctgaaatttatgaaatgcaatgtagagcaatatttgaagctttgacagatttaaaaaagaaaaaaattaaatctgcctttccagagataatgatacctttagtttctaccgaagctgaaataaaaattatgaaagaccttgtaattagaactgcaaaaaaagttcaggatgaaaataaaattaagattaaatttctt

SEQ ID NO: 258279 - DNA, 773 bp, Unknown
  Bacterial polypeptide expressing nucleotide sequence isolated from the Sargasso Sea
aatgggggtagaaggtcatttatttgaagaaatgatagataactttaaacttacgaaaggtgtactacaagacacagaaattgacgcttctgattgggacggacttattgaaaactttaaaaaattggtaaaagaaaaaacagggaaaaatttccctcaagatgttaatgagcaattaatcgaggctgtgagctcagtatttagatcttgggagagtcaacgagcaaaaacttataggaagctcaatagaatacctaatgaatggggaacagctgtaaatgttcaagctatggtctttggaaatatgggcagtgactgtgctactggagttgcttttactagaaatccatcaactggtgaaaattcattctttggagagtatttaattaacgctcaaggtgaagatgtcgttgctggtacaagaactccccaatacattactaaaaaatcaaaaatagagtctggctcaaaagaactttctatgcaagaagcgatgcctaaagcttacaaagaattagaaaaagtatttataaaattagaaaaacattacagggatatgcaagatatagaatttacagtagagaacaaaaaactttggatgcttcaaacaagatcaggcaaaagaactgctaaggcaggaattaaaattgccgttgatatggtaaaagaaaaactaatttctaaaaaagaggcagttttaagaatagaccccaatactattgacacacttttacatcccactttagatgataaagttaaaaaagagatagtag

SEQ ID NO: 258280 - DNA, 607 bp, Unknown
  Bacterial polypeptide expressing nucleotide sequence isolated from the Sargasso Sea
atcttttcctgaaatttatgaaatgcaatgtaaagctatatttgaagctttagcatatctcaaaaaaagtaaaataaaatctgcgtttcctgaaataatgatacctttggtatctacagaagcagaaataaaaattatgaaagatttagtaattagaactgcatctaacgttcaaaataagtataaattgaaaatagaatttttagtgggcacaatgattgaattacctagagcagcgataaaagctaaagaaattgcaaaacatgctgaattttttagttttggaacaaatgatttaacacaaacaacttttggaattagtagagatgatagtggaaagtttttaaatgattatttagaaaacaaaatattttcagttgatccatttgtgtcaattgatgaaggagtttctgatttagttgaaatagcagtacataagggaaaaagtcaaaataacaaattaaaattaggtatctgtggtgagcatggtggagaccctcgtagtattttattttgtgcaaaagtgggactaaattacgtttcttgttcaccatttagagtgcctgttgctagattggctgctgcacaagcggaattattaaaataa

SEQ ID NO: 258281 - DNA, 518 bp, Unknown
  Bacterial polypeptide expressing nucleotide sequence isolated from the Sargasso Sea
agatgaaaaggttgaaaaaaaagtaatagcaaaaggattgccagcatctccaggagcagcaagtggcaaggtagtttttacagctgatgaagcagaaagaatgaaaaatcaaaaagaagatactatattagttagggttgagacatcaccggaggatatccacgggatgcatgctgctaaaggtatactgactgcaagaggtggaatgacaagtcatgccgcagttgttgcaagaggtatgggacgaccatgcgtatctggttctggagaaataaatatagattatgaagcaaaacaatttaaagtaggagatcttactgtaaaagaaggtgatattatcactattgatggaggctcaggaaaagtaatgagcggattagttccaactgttaaacctgatatttcaggatatttttcgactttaatgaagtgggcagaccaatttagaaaattaaaaataagaacaaacgctgaaaccccacaagatacaagaactgcaagaaattttggagcctgaa

SEQ ID NO: 258282 - DNA, 352 bp, Unknown
  Bacterial polypeptide expressing nucleotide sequence isolated from the Sargasso Sea
ttggagcctgaaggtattggcttatgtagaacagagcacatgtttttcgacgatgaaagaattctatcagttagacagatgattttgtctaaacatttagatgatagaaaaattgctttagataaattactcccttatcagaaaaatgatttcaaagaaatttttgaaattatgaaaggtttacctgttacagttagacttttagatccaccattacatgaatttttacctaaaactgaaaaagatatggaagaagttgcaagatcattaaatctaggagtgagagagatcaagaacagagtttctgaattacatgaactaaatcctatgttaggtcatagaggatgtaggt

SEQ ID NO: 258283 - DNA, 862 bp, Unknown
  Bacterial polypeptide expressing nucleotide sequence isolated from the Sargasso Sea
tcatgcgcacctgctgggtggtaagggcgcgaatttagctgaaatgagtggcattggtttgccagtgccgccgggctttaccattagcactgacgtatgcacctatttttatgataacaaccatacttacccagatacacttgacgccgaagtccgcgccgccattgccaaaatagaggcggaaactggcagcgcgtttgccgattcaaaaaatccattgcttgtatctgtgcggtccggcgcacgggcgtcgatgcccggtatgatggatacagttttgaatctgggcctgaatgatgaaaccgcggctggattggctaaacacgccactgacagtcggtttgcatatgacagctatcgccgctttattcagatgtatagcgatgttgtaatggatgttgatcatgggctgtttgaagatgcactcgaagatatgaagcgcgagcgcggcctgaccaatgattcagatttgacaggcgatgacatgattgcacttgtcgcgatctataaagatatcgttatggatgaaatggacacgccgttcccgcaagacccgtgggtacaattatggggggcagtaggggccgtattcactagttggacaaatacaagggcggcaacctatcggcggctgaataatataccggccgcttggggtaccgcggtaaatgtacaagccatggtgtttggcaatatgggagatgattgtgcgaccggtgttgctttcacccgtgatccgtcaaccggtgaaaatagtttttacggcgagtttctagtcaatgcgcagggtgaggatgttgtagcgggcattcgcacgccgttaccgctgactataaaagaaagtgaaaaatccggcagtagc

SEQ ID NO: 258284 - DNA, 806 bp, Unknown
  Bacterial polypeptide expressing nucleotide sequence isolated from the Sargasso Sea
ttgtgtttctggatcgagtgaaattgacatcaattatgaaaataagtcatttaaaacatcatcaatggaaatcaaagagggagatataataacaatagacggatcaacaggaagaataattgaaggtagtgttgctaccgtaaagcctggaatatctggtgatttttcaaaattaatgtcttgggctgatagttatagaaaattaaagattagaacaaattcagaaactccaaaagatactaaaactgcgaaagattttggtgctgaaggtattggactttgcagaactgagcacatgttttttgatgaagaaagaattttatctgttagggaaatgattctttctaaaaccaaagaagacagagccaaagccttaaataaactcttaccacatcaaaaaaaagactttactgaaatttttaagattatgaatggattaccagttacagtaagattgttagatcctccattacatgaatttttaccaagaacaaataaagaaattggcgaattagcagaaattgttaatcttacagtaaaagaagttgaaacaagaattgaggaacttcatgaacaaaacccaatgctaggtcacagaggttgcagattagctatatcatttcctgaaatatatgagatgcaatgtagagcaatttttgaagcattatgtgagcttaaaaaaaataaaattaagtcagcttttcctgaaataatgatacctctagtttctacagaggctgaaattaaaataatgaaagacttagtcaaaagaatagcaagcatgattcaaaaagaaaataaattaa

SEQ ID NO: 258285 - DNA, 631 bp, Unknown
  Bacterial polypeptide expressing nucleotide sequence isolated from the Sargasso Sea
ttgccgattggctatcacctatccggaaatttgtcggatgcaggcacgggctattttgaggcgtctgctgcaattgctcagaaaacaggtgacgtgccatcgccagaaattatggttccgttggcggcaacagcgcgtgaaattagcctgtgcaagcaggaaatagatgcggtggctacggaggtgatggctgaaacaggcgtttctatatcctatcttgttggcactatggttgaattaccacgttcgtctatctgtgccgcagaactcgctgaggaggcagaatttttttcatttggcactaacgacttgacgcaaacagctttaggaatcagccgcgatgatgctggatcatttttacattattatgcagacgccgatatttactcggtcgacccctttgtctcaattgaccgtgagggtgtggggtttcttgtcgatataggtgtgaaacgaggtcgagcaacccggccagacattaagttgggtatttgcggtgaacatggtggcgacgcccaatcgatctatttcttcgaggaggtcggacttgattatgtgtcttgttcgccattccgagtgccagcggcgcgactcgcagcagcgcaagccgctataaaaaattcagtttaat

SEQ ID NO: 258286 - DNA, 937 bp, Unknown
  Bacterial polypeptide expressing nucleotide sequence isolated from the Sargasso Sea
taaaggcgaacaaatcattcttgttagagaagagacttcgccagaagatgtccatggtatgcatgctgctgaagcaatattaacagcacgaggcggtatgacttcacatgcagcattagtagcaagaggctggggtaagtgttgtattgttggttgtaatgaaataaatatttccgtaagtgataaacaactatcggttggtgatgtaattattaaagaaggcgattggataacaatgaatggtaccaccggagttgcatatctaggccagttagatctaatacctgctgatccagatagaaatgaagaatacaaagaactaatgacatgggcagatgaaataagaaaactaaaaattagaacaaatgctgagagcccagaagatgcaaaacaagcaataaagtttggtgcagaaggaatagggttgtgtagaacagaacatatgttctttgatgaaacaagaattttggcaatgagaaaaatgatactagcagataacgatgatgatagaagagatgctgttatgggacttttaccatttcaaaaagaagacttcaaagggactttagaagcgatggaaggaaagcctgtaactattagattacttgatccccccttgcatgagttcattacattagataatgagcaaataaaagagctagctgatagtattggcattgatagttcgattgttagtcaacgcatctcaagccttcacgaacttaatccaatgttaggacatcgtggatgtaggcttggaattgcctaccctgttattacagaaatgcaagccagtgcaatcttagaagctgctgctgaacttaccaaggatagcctgaatgttttaccggagataatgatcccattagttggaactgttacagaatacattgatcaagaaaagatcgttcgcaaggttgcttcagaagttgaaagt

SEQ ID NO: 258287 - DNA, 416 bp, Unknown
  Bacterial polypeptide expressing nucleotide sequence isolated from the Sargasso Sea
tacaatgattgagcttccaagagctgctcttaaagctaaggatatagcgaaacatgctgaattttttagctttggtacaaacgatttaactcaaactacatttggcattagcagagatgatagtggaaaatttttgaatgattacatagaaaataaaatttttgatattgatccttttatttcaattgatgatggtgttggagatttgataaaaattgcaactgaaaagggaagaaaacaaaataaaaaaattaaactaggaatttgtggcgagcatgggggagatccgaaaagtatatacttttgtgctaaatcgggattagattatgtatcttgctcaccatatagagtcccagttgctagattagctgcggctcaagcacaattaaaaaaaaagaaaaataatcatcggtaat

SEQ ID NO: 258288 - DNA, 832 bp, Unknown
  Bacterial polypeptide expressing nucleotide sequence isolated from the Sargasso Sea
gcagagactttatccataaactattctgaaaaaaccatttcaagcaaagaaaaaacattagaagaaggagatttaatatcattagatggctcagcgggagaaatatacataggggaacttaaacttgagccacctacattatctcaagagttcaacactttaatggattggtgtaatgaattcaaaagacttgaaattagagcaaatgcggagacaactattgatacagccaaagcacttgaatttggagcagaaggcattggtctgtgcaggacagaacatatgttttttgaaggagaaagaattcttcctatgagagaaatgataatgtcagatagtaaacaaggaagaaaaagagcattaaaaaaattaataaactatcaaatatctgatttcgagtctcttttcaaattacttaatgaaaaaccaataacagtcagattattagatcctccaatgcatgaatttcttcctaagagtgatttggagatttctcagcttgcaaatgagataggagtatcaccaatgcatgttaacgagattctcatgagactttcagaaagtaatcctatgttaggacataggggagtcaggctaggtttaagttatccagaaatttacgagatgcaagtagaggcaatatttagggcagttcatttagtttttgaaaatgataattttaaagtcactccagaagtaatgatacctttagtgatgaacagtaatgagttatctgaaatgaaagatattctgaaaaaaaagattaaaaaaattgagaaagaactgaattataacttagactacaccataggaactatgattgaactgccaa

SEQ ID NO: 258289 - DNA, 674 bp, Unknown
  Bacterial polypeptide expressing nucleotide sequence isolated from the Sargasso Sea
aatagaagaactacacgagcaaaacccaatgctaggtcatagaggatgtagattgggtatttcttttcctgaaatttatgaaatgcagtgtttagcaatttttgaagctttatcagatttaaaaaagaataaacaaaaatcagcttttcctgaaataatgatacctctcgtttcaactgaagcagagataaagattatgaaagatcttgttattaggacagcaagaaatgtggaaaaagataaaaaaattaaactaaattttttagtaggaacaatgattgaattaccaagagcagctattaaagctcaagatatagcaaaacacgctgagttttttagttttggtacaaatgatcttacccaaacaacttttggtataagtcgtgatgacagcggtaaatttctgaatgactatttagaaaataagatttttaccatagacccatttatttcaatcgatgaaggggttaaagatttaattaaaatagcagttttaaatggaaaaaaaaataataaaaaaattaagctaggaatttgtggagaacacgggggtgatccagtaagtatagatttttgttctaatacaggtttggattatatctcttgctcaccttaccgagtacctatagccagattagctgcagctcagtctgaattaaaaagggtcaaataaa

SEQ ID NO: 258290 - DNA, 855 bp, Unknown
  Bacterial polypeptide expressing nucleotide sequence isolated from the Sargasso Sea
tgttgtagcgggtacaaggactcctcaatatataacaaaaaaagctcggagaaacgctaaagtaaaagaattatcaatggaagagtctatgcctaaagtctttaaagaactccaaaatattttgaaaaaattagaaatacattacaaagatatgcaagacgttgagtttacagttgaaaatagtaaactgtggatgcttcaaacaagatcaggaaaaagaacagcaaaatcagcagtgaagatcgcagttgatatggtaaaagaaaaattaatttctaaaaaagaagctgtattaagaattgacccaaattctttagatacacttttacatcctactttgaatgaaaaaagttcaattaatgtaatagcaaatggattgccggcatcaccaggtgcagccagtggtaaagttgtatttacatcggaacaagctgaaagattaaccgcaatgatgcaagatacaattttggttagagtagagacctctccagaagatatacaaggtatgcatgctgctaaaggaattttaactgctagaggaggaatgacaagccatgcagctgttgtagctagaggtatgggtagaccatgtgtatcaggatcaagtgaaattgatattaactatgaaaataaatcatttaaaacttcttcaatggaaattaaagaaggggacgtaattactatagatgggtcaacgggaagaattattgctggaagtgtttcaactgtgaaaccagaaatttctggtgatttttctaagctaatgtcttgggcggataattttagaaaattaaaagtaagaacaaattctgagacaccaaaagatactaaaacagcaaaagattttggtgcaga

SEQ ID NO: 258291 - DNA, 359 bp, Unknown
  Bacterial polypeptide expressing nucleotide sequence isolated from the Sargasso Sea
aatagcaaaacatgcagaattttttagttttggcactaatgatttaacacaaacaacatttggaataagcagagatgatagtggaaaatttttaaatgattatattgaaaacaaaatttttgaggttgatccatttgtttcaattgatgacggagttggtgatcttatagaacttgctgcaaaaaaaggtaaaaaacaaaataaaaaaattaagctgggtatttgtggtgaacatgggggagatccaaagagtataaatttttgttcaaaaactggcctagattacgtttcttgttctccttatagagttcctgtagcaatattagccgcagcccaagctgagttaaaaaataaataac

SEQ ID NO: 258292 - DNA, 560 bp, Unknown
  Bacterial polypeptide expressing nucleotide sequence isolated from the Sargasso Sea
aattgagtgtaaaaaagaaaaaatacaatctgtaataccagaaatcatgataccccttgtttctactgaggacgagattggtataatgagaaaattagtagatgaggtagccaagaaagttcagaaagaaaacaaaattaaattagaatactttgttggtacaatgatcgaattaccaagagcagcactaagagcagcgcctatatcaaaatatgctgacttctttagttttggaacaaatgatttaacacaaactacttacggtataagccgcgatgattctggaaagtttttaaatgattacttagatcataaaattttcgataccgatccattcgtaagtattgataaagatggagtaggtgagttggttaaaatcgcgaccgaaagaggaagaaaaaataatagaaaacttaaattaggaatttgtggagaacatggtggtgatcccaaaagtatagaattttgttctaaagcaggattaaactatgtctcttgctctccttttagagtaccaattgctaggttagcagcagcacaagctgaacttaggaaataaa

SEQ ID NO: 258293 - DNA, 439 bp, Unknown
  Bacterial polypeptide expressing nucleotide sequence isolated from the Sargasso Sea
aaaatgaaaacaaaacaaaaattaaattatttagttggaactatgatgaatttaccaagagcggctataagagcgaaagatattgcaaaacatgcagatttttttagctttggaactaacgatttaacgcaaacaacatttggaataagcagggatgatgctggtaaatttttaaatgattatatagaaaataaaatttttgaggtagacccatttatttcaatagataaaggagttggagaacttatagaattagcaacagaaaaagggaagaaacaaaacaaaaagattaaattagggatttgcggtgaacatggtggtgatcctaaaagtatatttttttgttctaagattggtcttaattatgtttcctgttccccttatagagttccggttgcaagattatctgctgcgcaagctgcaatactaaaagattaaa

SEQ ID NO: 258294 - DNA, 878 bp, Unknown
  Bacterial polypeptide expressing nucleotide sequence isolated from the Sargasso Sea
cggcggccagacgtctcacgcggccgtggtggcgcgtggcatgggcaagccctgtgtggttggctgcaccgagattcacgtcgactacgggcgccagctgttctacgcgggtgacaccgtcgtgagaaagggcgactggatcaccatcgacggcggaaccggcgacgtcatggagggcaaggtcgagatgctcgcccccgaccccgagcagggtgcgatgagcacgctgctgtcctgggcggatgagcacgcgcgcctggccgtgcgcgccaacgcagacaatggcgccgatgcgtcgcgagcgcgtgagctgggtgcggttggcatcggcctgtgccgcaccgagcacatgttcttccagcccgatgccctgcgcgccatgcgtcgtatgattctggcggaggacccgcatgcccgtcagcgcgcgctgacggacatcctgccggtacagcgcagcatgttcaccgagatcttccatgcgatggacggcttgcccgtcaccatccgcctgctcgacccgccgctgcacgagttcttgcccaagagcgaagacgacatcggtgcggtggccgaggacctgggcattcgcaccgacgcactgcgcagccgcattgagcagctcgaagaagccaacccgatgctggggcaccgcggtgtgcgcgtgggcatcaccgcccccgaggtgtaccgcatgcaggtgcgagccatcttcgaggccgcctgtgaggcgcagaaggccggcgccgtggtgttccccgaggtcatgattccactcgtagccatgcccgccgagctcgagcgcacccgcgaagaagcgaccgacgtggccgaggctgtcctggcggagttcgacaccacgctcgactacaccgtgggca

SEQ ID NO: 258295 - DNA, 806 bp, Unknown
  Bacterial polypeptide expressing nucleotide sequence isolated from the Sargasso Sea
gattttaaaaacactgtaaaagaaaaaacaaaaaaagattttcctcaaaatgttaaagaacaactggtgggagctataagtgctgtatttttatcttgggaaagtaacagagcaaaagtctacagaaaattaaatcaaataccgtcccattggggtacagcagttaatgtacaatcaatggtttttggaaatatgggaaatgattgtgcaactggtgtagtatttactagaaatccatcagatggatcaaaaaatatttatggagaatatttaataaatgcacaaggagaggatgtagttgctggaaccagaacaccccaacatattacaaaaaaagccagagttgagtcaaaagaaactcttaagtcaatggaagagacaatgccagagacatacaagcaacttaaaaatattttaaataagttagaaaaacattacaaagatatgcaggacgtggagtttactgttgaaaataaaaaactttggatgcttcaaactcgctctggaaaacgaacagctaagtctgctgttaaaatagctgtagatatggttaaagaaaagttgattaccaaaaaagatgcaatattgcgaattgaaccaagttctttagacactttgcttcatccaactttagatgaaaaagtaaacttagaagtaattggcttaggcctgccagcatcacctggtgctgctagtggaaaagttgttttcacgtctgaggaggctgaaagactgaatagtatgatgcaaagtacaatattagttcgtgtagaaacttcaccagaagatatacatggtatgcatgc

SEQ ID NO: 258296 - DNA, 784 bp, Unknown
  Bacterial polypeptide expressing nucleotide sequence isolated from the Sargasso Sea
tatggaaggaaagccagtaacgattagattacttgacccacctttgcatgagttcatcaccttagataatgaacaaatcaaagaactagctaacaacattgggatcgatagttctattgttagtcaacgtatctctagtcttcatgaacttaatccaatgttaggacaccgtggatgtagacttggaatcgcataccctgttattacagaaatgcaagcaagtgcaatcttagaggcaacagctgaacttacaaaagatgggttaactgttttaccagaaataatgatcccattagttgggacagttacagaatacgtcgaccaggagaaaattgtacgaaaagttgcctcagaagtcgaaagtaaatataatatgaagttaaattatttagttggtacgatgattgagcttcctagagcatgtttaactgctgatgagattgcagagcatgcagaattttttagctttggaacaaatgatctcactcaaaccacatatggttttagtagagatgacattggttcatttttgccagaatatctagatcgtaacattctacctggagatccatttcaaagtttagatgttaaaggtgttggtaaattagtatctatggcagttaaatatggtagaaatattaactctaatctaaaaataggtatatgtggtgaacatgggggagaccctaaatcaattcatttttgcaaacagaatggattggactatgttagctgttctccttttagagttcctattgctaggctatccgcagctcaagcagaa

SEQ ID NO: 258297 - DNA, 525 bp, Unknown
  Bacterial polypeptide expressing nucleotide sequence isolated from the Sargasso Sea
ttgtagaaataatgataccgctagtttcaactgagtctgaattaaaaattttaagagcattagttaataaaattgctaaagaaatagaaaaagaaaaaaaattaaaacttgaatatatggtaggcaccatgattgaattaccaagagccgctttacaagcgaagtctatttcaaaacacgctgatttttttagctttggaacgaatgatttaactcaaacaacattcggaataagccgggacgactcaggaaaatttttaaatgattatattgataataaaatttttgatatagatccatttgtaagtatagatcaaaatggggtaggcgaacttgtagaaatagcgtcttccagaggaagaaagacaaataaaaatatcaagttaggtatttgcggtgaacacgggggcgatccaaagagtattgaattttgttctaaaacgggactaaactatgtttcctgctctccatttagagtaccagtcgcacgattagcagcagctcaagcagaactatctaaataat

SEQ ID NO: 258298 - DNA, 489 bp, Unknown
  Bacterial polypeptide expressing nucleotide sequence isolated from the Sargasso Sea
aagctgaaataaagataattaaagaactagtaattaaagttgcaagagaagtacaaaatgaaaataaaactaaaattaaatttttagtaggaacaatgatagagcttccgagagctgcaattaaagcaaaagacattgcaaaacatgctgaattttttagctttggtactaatgatttaactcaaacaacatttgggattagcagagatgatagtggtaaatttttaaatgactatataaaaaataaaatctttgatgttgatccatttatttcaattgatgaaggagttgggaatttggtagaattggcagttattaatggaaaaaaacaaaataaaaatattaaactcgggatttgcggagagcatggaggggatccaaaaagtatagaattttgttctaaagctggtttagactacgtttcatgttcaccatatagagttccaattgctagattagcagccgcacaggctcaattaaaaaaataat

SEQ ID NO: 258299 - DNA, 453 bp, Unknown
  Bacterial polypeptide expressing nucleotide sequence isolated from the Sargasso Sea
aaaagttcaaaaagaaaataaaaacaaaaattgaatttcttgtgggcacaatgattgagttacctagagcagcaattaaggctgaggatattgcaaaacatgctgaattctttagttttggcactaatgatttaacacaaacaacttttggaataagtagagacgatagtggtaaatttttaaatgattatatagataataagatttttactattgatccgtttgtatccattgatgatggagtgaaagatttagttgaaatagcagttgctaaaggaaaaaaacaaaataaaaaaattaaattaggaatatgtggtgaacatggcggtgatccgaagagtattaaattttgctcaaaagctgggcttaattatgtttcctgttcaccttacagagttcctatagctagattagcagcggcacaggctgagctttcgaaaaataaaaattaaa

SEQ ID NO: 258300 - DNA, 811 bp, Unknown
  Bacterial polypeptide expressing nucleotide sequence isolated from the Sargasso Sea
caaggactttaagaatactgttaaagaaaaagcaaaaaaagaatttcctcaaaatgtttatgaacaattattaggtgcaattagtgcagtatttttatcttgggagagtaatagagcaaaagtatatagaaaattaaatcaaattccttctgagtggggaactgcagttaatgtacagtcaatggtatttggaaatatgggaaatgattgtgcaacaggtgttgtttttacgagaaatccctctgatggttctaatgatatttatggagagtatttgataaatgctcagggagaagatgttgtagcaggaaccagaacaccacaatacataacaatgaaagctaaaaaaagatctaaatttaaaggactatctatggaagagtccatgccaaaagtctatcaagaattgctaaagattttaaaaaaattagagaatcattataaagatatgcaagatgttgaatttacagttgaaaataaaaaactttggatattacaaactcgttcaggcaaaagaacatcaaaatctgctgtaaagattgcagttgatatggtcaaagaaaaattaatttcaaaaaatgaagctgtcttaagaatagatcctaattctctagatacgttgctgcacccaactttagatggaaaaagttccatagatttaatagcaaaaggcttgcctgcatctccaggcgctgctagcggtaaagtagtttttacgtcagaggaagctgaaagattaaacgatatgatgcaggatactattttagttagaatagaaacttctccagaggatattcagggaatgcatgct

SEQ ID NO: 258301 - DNA, 806 bp, Unknown
  Bacterial polypeptide expressing nucleotide sequence isolated from the Sargasso Sea
tattatgaaaataaaatatttaaaacatcatctattgaccttaaagagggagatataataacgatagatggctcaacaggaagaataattgagggaagtgtagctactgtaaaacctgaaatatctggtgatttttcaaaattaatgtcttgggctgatagttatagaaaattaaatataagaacaaattcagaaacaccgaaagatactaaaacggcaaaagaatttggagccgaaggtattggactttgtagaactgagcacatgttttttgatgaagataggattttgtctgtcagggaaatgattctttctaaaacgaaagaggatagagctaaagcattagaaaaacttttaccacatcaaaaaaaagattttaaagaaatttttaaaattatgaatggtttacctgttacagttagattgttagatccacctttacatgaatttttgccaagaaaaaataaagaaatcagtgaattagcagatgctattaatctttcattagatgaagttgaaacaagaatagaagaacttcatgaacaaaatccaatgttaggtcacagaggttgtagattagctatatcattccccgaaatatatgagatgcagtgtagagcaatttttgaggcattatgtgagctaaaaaaaaataaaattagatcagcttttcctgaaataatgataccattggtctcaacagaggctgaaattaaaataatgaaagatttagtaagaagaactgcaagtatagtccaaagagaaaataaaataaaaattgattttatggttggaactatgattga

SEQ ID NO: 258302 - DNA, 321 bp, Unknown
  Bacterial polypeptide expressing nucleotide sequence isolated from the Sargasso Sea
gctgatcaaatttctgagctgggcggatgaaatccgcaagctcggggttagggccaatgccgactaccccagagacgcacaacgggcccgggaatacggggcggagggaatcggcctctgccgtaccgagcacatgttttttgaagcagaacggatgctcaaggtccagacccagcatttccatatcctcagtgaaattgacagtgctctggccgaaatccgggtcaaacaggattacctggaacaggtggaagcattacgtgaattgaatccgatgcttgggacgcgaggggtaagactcggaatcattatctcggaatt

SEQ ID NO: 258303 - DNA, 604 bp, Unknown
  Bacterial polypeptide expressing nucleotide sequence isolated from the Sargasso Sea
catgaaaggcctagttccaactgttcaaccagaaatatcaggatatttttctaaaataatgaagtgggcagatgaatttagaaaattaaaagtaagaactaacgctgaaactgaggcagatagtaagaccgctagagactttggagctgaaggaataggcctttgtagaactgagcatatgttttttgatgaggaaaggattttatccgtaagacaaatgattttatcaaaatctatagaggacagaaatcatgctttaacaaaacttttaccacaccaaaaagacgattttaaaaaaatatttaaaattatgtctggtttgcctgttactgttagattattagacccgcctttgcatgaatttttacctaaagcagaaaaagacattgaggaagttgctagatctttaaatttatcctcaaaagaaattaaagatagaattggcgagctacatgaggaaaatccaatgttgggtcatagaggttgcagactaggaatctcattcccagaaatctatgaaatgcaatgtgaggcaatttttaatgcattagtagaattaaagaaagaaaagataaaaacagcatttgtcgaaatcatgataccg

SEQ ID NO: 258304 - DNA, 859 bp, Unknown
  Bacterial polypeptide expressing nucleotide sequence isolated from the Sargasso Sea
gtattttctgcttcagaagcccaagcatgtgctgcccgcggagaggcatgtattttagtccgtcgtgaaacaagtccagaagatatacgtgggatgaatgctgcagctggtgttttgactgaaagaggtgggatgacaagtcatgctgcagttattggtcgtggaattgggcttccttgcgttgttggtgtttctgagatcaactttaatccaagtaataaggctttttcgatttccgatgggcgtgcttttaaacagggggatttgattacaatagatggcacgcttggacaggtcctaggtggaacaccaaaaatgattgaagccgtgttagatgactcgcttaaattaatgttggaatgggctgaagaggcaggtgatataaaagtaagagcaaatgctgatactccaagcgaggcaaagacagcgcagaattttaatgcgcatggtattggcctttgtcgaacagagcatatgttttttgaggcggatcggcttactttaatgcaagagatgatatttgcgcataatagggaagaacgcagagcagtactggaaagattattgcccatgcaaaggtcagatttttttgagctatttactctgatgaaaggcctccctgtttgtattagattatttgacctgccattacatgaatttttaccaaatgatcgagaaggcatgcttgatctagccgaggctttagatttgccgttatcgaatgtgatgagtagggtggagacactggctgaatataatccgatgcttggcatgcgtggggttcgtgttggtgtaacagttcctgaaatttatgaaatgcaggcaagggcaattttgaagcaaccgctgaagcaagtaa

SEQ ID NO: 258305 - DNA, 496 bp, Unknown
  Bacterial polypeptide expressing nucleotide sequence isolated from the Sargasso Sea
tggtttcaacttaaaagagtttttaaatcaaaagaagattgttcttgaagcaaaaaataaaattattggcaaaagcggtttaaaaattaatttaaaaatcggaaccatgattgaagttccacgagcttgccttgttgctgaagacattgctaaagaagctgacttttttagttttggtacaaacgatcttacgcaaaccacctttggttttagcagagatgatacgggcaccttctttccgcactatttcaatgaggagattttattggtagacccttttgaagaaattgatcgtaaaggcgttggtaagcttatgaagatggcagtaaaagatgcacaagctgttaaaaataacatctctattggtatatgtggagaacacggaggtgagccgaaaagtatagagttttgtaaaatattgggccttgattatgtcagctgttctccttatcgtgtacctatcgcacgtcttgctgcggcacaagttgagatatga

SEQ ID NO: 258306 - DNA, 558 bp, Unknown
  Bacterial polypeptide expressing nucleotide sequence isolated from the Sargasso Sea
tagttgagtgcaaaaagaaaaaatataaatctatattaccagaaataatgattcctttagtttcgactgaagcagaaataagaataatgaaggatttagtaatcagagttgcaagagaagttcaagatacaaataatacaaaaataaattttttagttggaacaatgattgagcttccaagagcagcaataaaagcaaaagagatagcaaaacatgcagaattttttagttttggaactaatgatttaactcaaactacatttggaataagccgagatgacagtgcaaaatttttaaatgattatattgaaaataaaatatttgatatagatccttttatatcaatagatgatggtgtcggagatttaatagaaatagccagcattagaggaaaaaagcaaaataaaaaaattaaacttggaatatgtggagaacatggaggcgatccaaaaagtatacatttttgttctaagactggattagattatgtttcttgttcaccttatagagtgccagttgcgcgtcttgcggctgcccaagcagaattaaaaaaataaa

SEQ ID NO: 258307 - DNA, 556 bp, Unknown
  Bacterial polypeptide expressing nucleotide sequence isolated from the Sargasso Sea
gactgaactaaaaaagaaaaaaatgaaaatggcatttccagaaataatgttaccattagtgtcaacagaggttgaaattaaaataatgaaagatttggtaacaagaatagctaaagaagttcaaagtaataacaatataaaaatagattatctagtaggaacaatgattgaattgccaagagcagcaattaaagctaaagaaattgcaaaacatgctgatttttttagcttcggaactaatgatcttacacaaaccacatttggaattagtagagatgatagtggtaaatttttaaacgattacatcgaaaacaaaatttttgatattgacccattcatttcaattgatgaaggtgtaggagatttaattcaaatagcttctgaaagaggaagaaaacaaaataaattaattaaacttggaatttgtggtgaacatggtggagaccctaaaagtattcatttttgttcaaaggcaggtttaaattatgtttcatgctcaccttacagagttcctgttgcaagattagcagctgctcaagcccaactaaaaaaatag

SEQ ID NO: 258308 - DNA, 622 bp, Unknown
  Bacterial polypeptide expressing nucleotide sequence isolated from the Sargasso Sea
gaatcaaatacctgcagaatggggaacagcagtcaacgttcaatcaatggtttttgggaatatgggtgatgattgcgctaccggagttgtatttacaagaaatccatcagatggatcaaaagaaatatatggtgagtacttaattaatgcacaaggtgaggacgttgttgctggtacaagaacacctcaatatataactaagaaggcaagaaaaaccgctaaagttgaagaaccttcaatggaggaatctttgccaaaagttttcaatgaattaaaaaaaattttaaaaaaattggaaaaacattacaaagatatgcaagatgtggaatttacggttgagaataataaattgtggatgcttcaaactagatcgggaaaaagaactgcaaaatctgccgtaaagattgcagttgatatggttaaggaaaaattaatatcaaaaaaagaagcagtattaagaattgatccaaattctctagatacacttctgcatcctacacttgatgaaaacagtacaatcaatgtaatagcaaatggtttgcctgcatctccgggagcagcaagtgggaaagtggtatttacatcagaagaagctgaaagattaacttcgatgatgcaagac

SEQ ID NO: 258309 - DNA, 940 bp, Unknown
  Bacterial polypeptide expressing nucleotide sequence isolated from the Sargasso Sea
atgtgttttgggagtggaaagtataaatttgaagagcttatagaaaattataaattaacaaaaggtgtattgttagatacagatcttgatgaaaatgattgggatggtttaattaaggattttaaagatgttattaaagaaaaaacaaaaaaagaatttcctcaggatgttaatcaacaattaattggggcaatatcagcggtatttttatcctggcagagcaatagggcaaaagtttatagaaaacttaatcagataccatcagattggggaacagcagtaaacgttcaattaatggtatttggaaatatgggtcaagattctgcaacaggagtagtttttactagaaatccttcttcaggttcaaatgaaatttatggagaatacttaattaatgctcaaggagaagatgttgttgcgggtacaagaacgccacaatatataaccaaaaaagcaagaatagaagctaaagatcgaaaaaactcaatggaagagtctatgaataatgtttttaaacaattagaaaaaattttaaaaaaattagaaaaatactacaaagatatgcaagatgttgagttcaccgttgaaaacaaaaaactttggatactacaaacaagatcaggaaaaagaacagccaaatcagctgttaagattgcagtagatatggttaaagaaaaattaatttcaaaaaaagaagctattaagagaatagacccacattctttagatacacttttacatccaacattagatgaaagaacaaatataaatgttattgcaaaaggtttgcctgcttctccaggagcagctagtggaaaggtagttttttcttctgatgaagcagaaagattaaatgaaatgatgcaagacacaattttagtcagaatagaaacctccccagaagacatacatggtatacatgcagcaaagggaatttgac

SEQ ID NO: 258310 - DNA, 625 bp, Unknown
  Bacterial polypeptide expressing nucleotide sequence isolated from the Sargasso Sea
tgtagattgggtatttcctttccagaaatttatgagatgcagtgtgaggcaatttttgaagctctatcagatttaaaaagatacaaacaaaaatcggctttacccgaaataatgataccacttgtttctacagaagcagaaattaagattttgaaagatttagtaatcaaaacagcaaggaaagttcaaaataaaaataaaataaaaatacaatttttagttggtaccatgatagagttgcccagagctgcaatcaaagcaaaagatattgcaaaacatgcagaattttttagttttggaaccaatgatcttactcaaacaacttttggaattagtcgggatgacagtggaaaatttttgaatgattatattgataacaagatattttctatagacccttttgtttcaatagatgatggggtagaagacttaattgaaatagcagtagaaaagggaaaaaagcaaaataaaaatataaaattaggaatttgtggcgaacacggaggtgatccaaaaagtatttatttttgttcaaaagctggattaaattatgtttcatgttctccttatagagttccaatagcaagattagctgcagcacaagcagaacttaagaaaaagtaat

SEQ ID NO: 258311 - DNA, 520 bp, Unknown
  Bacterial polypeptide expressing nucleotide sequence isolated from the Sargasso Sea
aatgattcctttagtttcaaccgaggccgaaattaaaataatgaaagatttagtaattaatactgcaagaaaagttcaaaaagaaaataaaacaaaaattgaatttcttgtgggtacaatgattgagttgcctagagcagcaattaaggctgatgatattgctaaacatgctgaattctttagttttggcactaatgatttaacacaaacaacttttggaataagtagagacgatagtggtaaatttttaaatgattatatagataataagatttttactattgatccgtttgtatccattgatgacggagtgaaagatttagtcgaaatagcggtttctaaaggaaaaaaacaaaataaaaaaattaaactaggtatatgtggtgaacatggtggcgatccgaagagtattaaattttgttcaaatgctgggcttaattatgtttcttgctcaccttacagagttcctatagctagattagcagcagcacaggctgagcttactaaaaataaaaattaa

SEQ ID NO: 258312 - DNA, 668 bp, Unknown
  Bacterial polypeptide expressing nucleotide sequence isolated from the Sargasso Sea
tatggttttcggaaatatgggtgataattgttcaacaggtgttgcttttactagaaatccttcaacaggagagaattctttttttggagaatttttaataaacgcgcagggtgaagatgttgtagcgggcacgagaactccacaatatattacaaaaaaagcaaaacaagcttcaggttccaaagatccttcaatggaagaggctatgcctaaagtttataaagaacttgcaaaagtatttcttaagttagaaaggcactataaggatatgcaagacatcgaatttacagttgaaaataataaactttggatgcttcaaacaagatctggaaaaagaactgctaaagcagcaattaaaattgcagttgatatggttaaagagaaattaatttcaaaaaaagaagcaattaaaagaattgatccaaatactttagatactttattacatcctactttagacgaaaaagttgagaaagaggtaattgcttcgggattacctgcatcgccaggagctgcaagtggtaaagttgttttcactgctgatgaagcagagaaattaaacgggatgatgcaagatacaatattagtgaggttagaaacttcaccagaagatatacatggaatgcatgcagctaaaggaattcttactgcaagaggaggaatgacga

SEQ ID NO: 258313 - DNA, 734 bp, Unknown
  Bacterial polypeptide expressing nucleotide sequence isolated from the Sargasso Sea
aactccacaatacataacaaaaaaagccagaattgaagctaaagctaaagagagttcattagaagagtcaatgcctaccgtttttaaacagctggataaaattttaaaaaatttagaaagacattataaagatatgcaggatgtagagttcacagttgagaataataaactttggatattacaaacaaggtctggaaaaagaacaactaaatctgctgtaaaaattgcagttgatatggttaaagaaaaattaatttcaaagaaagacgcagttatgagaatagacccccattctttagataaacttttacatccaactttagatgaaaaaggtaaaataaatattattgcaaaaggtttgccagcttctcctggcgcagctactggaaaagtagttttttcatctgatgaagcccaaagacttaatgaaatgatgcaggatacaattttagttagagtagaaacttcaccagaggatatacacggtatgcatgctgcaaaaggaatattgacttcaagaggaggaatgactagtcatgcagcggtggttgcaagaggaatgggtaggccatgtgtttcaggctcaagtgaaattgacattaattatgatagaaaaatttttaaaactgcatctatagaaataaaagagggtgatttaattactatagatggctctacaggaagaattattcaaggagaagttccaaaattaaaacctgaaatttcagggtatt

SEQ ID NO: 258314 - DNA, 508 bp, Unknown
  Bacterial polypeptide expressing nucleotide sequence isolated from the Sargasso Sea
acctttagtttctactgagtctgagttaaaaattttaagatccttagttaataaaattgctaaagaaatagaaaaagaaaataaattaaaacttgaatatatggtacgtactatgattgaattaccacgtgctgctttgcaagcaaaggctatttcaaaacatgctgatttctttagctttggaaccaatgatttaacacaaacaacatttggtataagccgagatgactcagggaagtttttaaacgattatatcgataataaaatttttgatgtagatccgtttgtaagtattgatcaaaatggagtaggtgagctagtggaattagcctcttcaagaggcagaaagacaaataaaaatattaagctagggatttgtggtgagcatggtggcgatccaagaagtattgaattttgctctacaacaggactgaactatgtttcttgctctccattcacagttccagtagcaagattagctgctgcacaagcagagttatctaaataa

SEQ ID NO: 258315 - DNA, 643 bp, Unknown
  Bacterial polypeptide expressing nucleotide sequence isolated from the Sargasso Sea
tatgcttggtcatagaggatgtagacttggaatatcttttcctgaaatttacgaaatgcaatgcagagcaatttttacagctttaatcgaatgtaaaaaagaaaaaatacaatctgtaataccagaaatcatgataccccttgtttctactgaggacgagattggtataatgagaaaattagtagacgaggtagccaagaaagttcagaaagaaaacaaaattaaattagaatactttgttggtacaatgatcgaattaccaagagcagcattaagagcagcgcctatatcaaaatatgcagacttttttagttttggaacaaatgatttaacgcaaactacttatggtataagccgtgatgactctggaaagtttttaaatgattacttagatcacaaaatttttgataccgatccattcgtaagtattgacaaagatggagtaggagaattagttaaaattgcgaccgaaagaggaagaaaaaacaatagaaaactcaaattaggaatttgtggagaacatggtggtgatcctaaaagtatagaattttgttctaaagcaggattaaactatgtctcttgctctccttttagagtaccaattgcaaggttagcagccgcacaagctgagctttcaaaataa

SEQ ID NO: 258316 - DNA, 643 bp, Unknown
  Bacterial polypeptide expressing nucleotide sequence isolated from the Sargasso Sea
atgctaggacatcgaggttgtagattaggtatttcatttccagaaatttatgaaatgcagtgtagagcaatttttgaagcattatctgaattaaaaaagaaaaaaataaaaacagcatttcctgaaataatgataccgctggtttctacagagtccgaaattaaaattatgagagatttagttgtaagagttgctaaccaagttcaaaaatttaatgatataaaaattgattatttagttggcacaatgattgaattacctagggcagctattaaagcaaaagaaattgccaagcatgccgatttttttagttttggaactaacgatttaacccaaacaacttttggtataagtcgagatgatagtggtaaatttttaaacgattatatagaaaataaaatattttctattgatccatttatttcaattgacgatggtgttggagagttaattcaaatagcatctgaaaaaggaaaaaagcaaaataaatctatcaaactaggcatttgtggagagcatggaggtgacccaaaaagtattcatttttgttcaaatgttggtttaaactatgtttcttgctcaccatatagagtccctgttgcaagacttgcagcagctcaagcacaaattaaaaaaaattgat

SEQ ID NO: 258317 - DNA, 646 bp, Unknown
  Bacterial polypeptide expressing nucleotide sequence isolated from the Sargasso Sea
tatgttgggtcataggggatgtagacttggaatatctttccctgaaatatatgaaatgcaatgtagggcaatatttgaagctttagctgagcttaaaaatgaaaaaattaaatctgcttttccagaaattatgattccattggtgtctactgaagcagaaataaaaattatgaaagatttggtaataagaattgcaagtgaggttcaaaaggagcataaattaaagattgattttatggttggtaccatgattgaacttccgagagctgctattaaagcaaaagatattgcaaaacatgctgaattttttagttttggaactaacgatttaacgcaaactacatttggaatcagcagagacgatagcggaaaatttttaaatgattatttagataataaaattttttcaattgatccgtttatttcgatagatgaaggagttggggacttaataaaaatagcagttgaaagaggaaaaagccaaaataaaaaaataaaacttggaatttgtggagaacacggtggtgatcctagtagtatattattttgctcaaaagcaggattgaactacgtttcttgttcaccatatagagttccggtagcaagattggctgctgcacaagcagaattaaaaactaatagttga

SEQ ID NO: 258318 - DNA, 592 bp, Unknown
  Bacterial polypeptide expressing nucleotide sequence isolated from the Sargasso Sea
tatgagatgcaatgtagagcaatttttgaagcattatgcgagcttaaaaaaaataaaattaagtctgcttttcctgaaataatgatacctctagtttctacagaggctgaaattagaataatgaaagacctagttaaaagagtagcaagtttggttcaaaaagaaaataaattaaaaatagaatttatggttgggacaatgattgagcttccaagagcagctataaaagcaaaagaaatagcaaaacatgcagaattctttagttttggaacaaatgatttaacccaaactacatttggaataagtagagatgatagtggaaaatttttaaacgattacttagaaaataaaatattttctattgatcctttcgtatcaattgatgaaggggtttcagaattagttgagattgctgttgcaaaaggtaagagccaaaacaaaaagattaaactagggatatgtggagagcacggaggcgatcctaaaagtatttctttttgtgccaaagcaggacttaattatgtgtcttgttccccttacagagtcccagtcgctagactagctgcagcacaagcagagttaaaaaaataat

SEQ ID NO: 258319 - DNA, 625 bp, Unknown
  Bacterial polypeptide expressing nucleotide sequence isolated from the Sargasso Sea
ggttgcagattaggaatatcatttccagaaatatatgagatgcagtgcactgcaatatttgatgccttagttgaatgcaaaaaacttaagaaaaagtctataattccagagattatgataccattggtatcaactgaagcagaaattaaaataatgaaagatttggttattagagttgctaaagaagttgaaaataaaactaaaataaaatttaattttttagtcggtacaatgattgaattaccaagagctgcaataaaagctgatgatatatctagacatgcagaattttttagttttggaacaaacgatttaacacaaaccacttttggaattagcagagatgacagtggtaaatttttaaatgattatattgaaaataaaatttttgatgttgatccatttgtttcgatagacgatggagtaggagatttaattgaaatagcaacaaaaaaaggaagaaaaaataataaaaaaattaaacttggtatttgtggtgaacatggaggagatcctaaaagtatagatttttgtgcacgtgctggtttagattatgtatcttgttcaccctatagagttcctgtcgcaagacttgcagctgctcaagctcaattaaaaaaataaa

SEQ ID NO: 258320 - DNA, 587 bp, Unknown
  Bacterial polypeptide expressing nucleotide sequence isolated from the Sargasso Sea
ttctccagaagacatacaaggaatgcatgcggctaaagggattttaactgcaagaggaggaatgacaagccatgcagcagtagttgcaagaggtatggggcgtccgtgtgtttcaggttctagtgaaattgatatcaattatgaaaataaaagttttaaaacttcatcaatggaaataaaagaaggtgaaattattactattgatggctcaacaggtagaattattcagggaagcgtagcaacagtcaaaccagaaatttcaggagatttttcaaaattaatgatgtgggctgataattttagaaaattaaatattagaactaattctgaaactccaaaggatacaaaaacagctaaagattttggagcagaaggtattggtctatgtagaacagagcatatgttttttgatgaagaaagaattttatctgtgagagaaatgattttatcaaaaactatagaggatagatcaatagcactgaataaacttttacctcatcagaaaaaagatttcatagaaatatttaagattatgagtagacttccagtaactgttagattgcttgaccctccgcttcatgaatttt

SEQ ID NO: 258321 - DNA, 754 bp, Unknown
  Bacterial polypeptide expressing nucleotide sequence isolated from the Sargasso Sea
aactggaattgttgtattttctgcgtcagaagctcaggcatgtgctgctcgtggggaagcgtgtattttagtccgtcgcgaaacaagtccagaagatattcgcgggatgcatgcagcagctggtgttttgacggaaagaggtggaatgacaagtcatgctgcagttattggtcgtggaattgggcttccttgcgttgttggtgtttctgagatcaactttaattcaaataataaatctttctctatttccgatggacgtgctttcttacagggggatttgattacgatagatggaacacttggacaggtcctaggtggaacaccaaaaatgattgaggccgctttagatgactcgcttaaattgatgttggaatgggctgaagaggctggtgatataaaggtgagagcaaatgctgatactccaagcgaggcaaagaccgcgcaaaattttaatgcgcacggtattgggctttgtcgaacagagcacatgttttttgacgcagatcgcctcactttaatgcgagagatgatttttgcacataatagggatgaacgcagagcggtactggaaagactattgcccatgcaaaggtcagatttttttgaactatttaacttaatgaagggcctccctgtttgtataagattattcgacctgccattgcatgagtttttaccaaatgatcgagagggtatgcatgatttagccgaggctttagatttgccactatcgaatgtaatgagtagggttgag

SEQ ID NO: 258322 - DNA, 853 bp, Unknown
  Bacterial polypeptide expressing nucleotide sequence isolated from the Sargasso Sea
tgtcgaacagagcacatgttttttgacgcagatcgcctcactttaatgagagagatgatttttgcacataatagggatgaacgcagagcggtactggataggttattgcccatgcaaaggtcagattttttcgagctatttactctgatgaaaggcctccctgtttgtattagattatttgacctgccactgcatgagtttttgccaaatgatcgagaaggtatgcatgatctagccgaggctttagatatgccgttatcgaatgtgatgagtagggtggagacactggctgaatataatccgatgcttggcatgcgtggggttcgtgtcggagtaacagttcctgaaatttatgagatgcaagcgagggcaattttcgaagcaaccgctgaagcaagtaaaaatggcactccagttgtcccagaaataatgattcctcttgtatcggcaaaacgtgaagttgaactggttagatcgagaattgatggagttgcgtcgatggtgcgggcggaaacaggagtacaatttgattatcgccttggaataatggttgagacacccagggctgcattgcgcgcagatgatattgccttaaattctgcatttttgagttttggaactaatgatttgacccagatgacatatggcttatcccgcgatgatgcaggtcggttcatgtctgactatgttcaacagggtgttttcccagaagatcctttccatactctcgacattgatggagttggcgaattgttgaaaatgggtgtaaccagagctcgaggcgttaaaagtgatattgttctttctatttgcggcgaaaatggcggaagccccgagtctatagatttttgta

SEQ ID NO: 258323 - DNA, 554 bp, Unknown
  Bacterial polypeptide expressing nucleotide sequence isolated from the Sargasso Sea
atgtaaaaaacaaaaaattcaatcaacaatgcctgaaatcatgatacctttagtttcaacagaagcagaaataaaaatcatgaaagatttagtcattagggttgcaaaaaaagttcaagatgcgaataaaattaaaatcgattttttagttggaacaatgattgaattgccaagagcagcaataaaagcaaaagatatcgctagacatgctgaattttttagttttggaactaatgatttaactcaaactacatttggaattagtagagatgatagcggtaaatttctaaacgattatattgagaataaaatttttgacattgatccttttgtatcaattgatgatggagttggagacttaataaaaattgcaactgacaaaggcagaaaacaaaacaaaaaaattaaacttggaatttgtggtgagcatggtggagatcccaaaagtatagaattttgtgcaaaaactggattagattatgtgtcttgttcaccttacagagttccagttgcaagattggcagcagctcaagctgaaataaaaaaaaattaaa

SEQ ID NO: 258324 - DNA, 442 bp, Unknown
  Bacterial polypeptide expressing nucleotide sequence isolated from the Sargasso Sea
gttcaagatgaaaataaaattaaaatagattttttagtaggaacaatgattgaattaccaagagcagcaataaaggcaaaagatattgctaaacatgctgaattttttagttttggaacaaatgatttaactcaaactacatttggaattagcagagatgatagtggtaaattcctaaatgattatattgagaacaaaatttttgatattgatccttttgtatcaattgatgagggggttggagacttaataaaaattgcaaccgataaaggtagaaaacaaaacaaaaaaataaaacttggaatttgtggtgagcatggtggagatcctaaaagtatagaattctgtgcaaaaactggattagattatgtatcctgttcgccctacagggttccagtggcaagattagcagcagcccaagcccaattaaaaaaaaattaaa

SEQ ID NO: 258325 - DNA, 568 bp, Unknown
  Bacterial polypeptide expressing nucleotide sequence isolated from the Sargasso Sea
tttgaggctttaatcgaatgtaagaataagaaaattaaatcaattattccagaaattatgatccctttagtttcaactgaagctgaaatagaaataatgaaaaatttggttgacaaagttgcagatcaagtaagagcggaaaataaaacaaaaatagattacttagtaggtacaatgatcgaattaccaagagctgcgataaaagccgaagatatagctagacatgctgacttttttagttttggaacgaatgatctaacacaaactacatttggtattagcagggatgatagtggtaaattcttaaatgattatattgaaaataaaatatttgatgtcgatccatttatatcgatagatgatggtgtaggtgatttaattgaaattgctacattaaaaggaagaaagcaaaataaaaaacttaaattaggaatttgtggagagcatggcggagatccaaaaagcatcaatttttgttcaagcacaggtcttaattacgtttcctgttcaccttacagagtgcctgttgcaagacttgcagctgcacaagcgcaattaaaaaaataat

SEQ ID NO: 258326 - DNA, 848 bp, Unknown
  Bacterial polypeptide expressing nucleotide sequence isolated from the Sargasso Sea
aatggaggtcggcggcgacatcatcgaagaaggcgactggatctccctcgatggaaccctgggtgaagtctaccttgggcaacttccgaaggtcgtccccgatatcaaaaaccccgggctgatcaaactgctgagctgggcggatgaaatccgcaagctcggggtttgggccaatgccgactaccccagagatgcacaacgggcccgggaatacggggcggagggaatcggcctttgccgtaccgagcacatgttttttgaagcagaccggatgcccatcgtccaggccatgatcatggccaggcatgtcctggaacgtaaggaatccctggatcagcttctcctcctgcagcgcgaagattttgcacggcttttccgggcgatggacggccatccggtgatcatccgcctgatcgatcctccgctgcacgaattcctcccctcttacgacgaactggtgcagggattggcggatctcaaagtccggacccagcatttccataccctcagtgaaatcgacagtgctctggccgaaatccgggtcaagcaggattacctggaacaggtggaagcattacgtgaactgaatccgatgcttggaacccgaggggtaagactcgggatcctgatcccggaattgacccagatgcaggtccgggcgatcttcgaagccgcctgcatctgctccaaagacggggtcaacgtccagcccgaagtgatgattcccctgacctctcatgtcaatgaactcaagatccagcagtcgcagcttgaggaagttgcccgtgaggtgatgaaggagcaggatctgggagtgaaatacaaattcgggactatgatcgaacttc

SEQ ID NO: 258327 - DNA, 723 bp, Unknown
  Bacterial polypeptide expressing nucleotide sequence isolated from the Sargasso Sea
agaaaaaaaaataaattttccacaagatgtaaaggaacagctatttggcgctatcagtgcagtttttttgtcgtgggaaagtcaaagagctaagacatatagaaaattaaaccaaatacccgaccactggggcactgcagttaatgttcaagcgatggtatttggaaacatgggcaatgattgttcaactggagtggcattcacaagaaatccatcgactggagaaaattctttttttggagagtttttaataaacgctcaaggtgaagatgttgttgctggaacacgcacgcctcaacatattacaaaaaaatctagaaaagattctggttcaaaagatctttcgatggaggaagcaatgccaaaaatttatcaagagttaacaaaaatatttaaaaaattagagaaaaattatagggatatgcaagatatagaattcacagtcgaaaataataaactttggatgcttcaaaccagatcaggtaaacgtactgcaaaagccgcaatcaaaattgcagttgatatggttaaagaaaaattaatttctaaaaaagaagcaattttaagagttgacccaaacactttagacaccttgctgcatccgacattagatgaaaaatttaaaaaagaagtcatggccacaggacttccagcttcacccggagcggctagtggaaaagtagttttttctgcagatgatgctgaaaaattaaactcaatgat

SEQ ID NO: 258328 - DNA, 346 bp, Unknown
  Bacterial polypeptide expressing nucleotide sequence isolated from the Sargasso Sea
cacgcagaattttttagctttggcactaatgatttaacacaaacaacatttggaataagcagagatgatagtggtaaatttttaaatgattatattgaaaacaaaatttttgatgtcgacccatttgtttcaattgatgacggagttggtgaacttatagaatttgctgcagaaaaaggtaaaaaacaaaataaaaaaattaagttgggtatttgtggtgaacatggaggagatccaaaaagtataaatttttgttcaaaaactggcctagattatgtttcttgttctccttatagagtccctgtggctatattagctgcagctcaagctgagttgaaaaaataaa

SEQ ID NO: 258329 - DNA, 630 bp, Unknown
  Bacterial polypeptide expressing nucleotide sequence isolated from the Sargasso Sea
aaaagctaggcaagatgctaaagtaaaagaattatcaatggaagaatctatgccaaaagtttttaaagaacttcaaaaaattttgaaacaattagagaggcattacaaagatatgcaagatgtagagtttacagtcgaaagtaataaactatggatgcttcaaacaagatcgggaaaaagaactgcaaaatcagcagtcaaaattgcagttgacatggttaaagaaaaattaatttctaaaaaagaggctgtattaagaattgacccaaactctcttgatacacttttgcaccctactttggatgaaaaaagcccaatcaatgtaatagctaatggattgccagcatcaccaggtgcagccagtggtaaagtcgtgtttacatcggaagaggctgaaagacttactgcaatgatgcaagatacaattttggtaagagtagagacctctccagaagatatacaaggaatgcatgctgccaaaggaattttgactgctagaggaggaatgacaagtcatgcagctgttgtggccagaggtatgggcagaccatgtgtgtcaggatcaagtgaaattgatataaactacgaaaataagtcttttaaaacttcttcaatggagattaaagaagg

SEQ ID NO: 258330 - DNA, 746 bp, Unknown
  Bacterial polypeptide expressing nucleotide sequence isolated from the Sargasso Sea
aatgctcaagggggaagatgttgtagctggcagtagaactccaaggtatatcacaaaaaaagcaaaagaagaggctggagcaaaagatgagtccatggaagaaactatgccaagagtttttaaagaactcaaaagtatatttgtaaaattagaaaaacattatcgggatatgcaagatattgaattcacagtggaaaataacaaactatggatgctgcaaacaagaaacggaaagagaactgcaaaagcagcaattaaaattgcagttgatatggttaaagaaaaattaatctctaaaaaagaagcaattttaagaatagacccaaacactctagatacccttttgcatccaacattagatgaaaaagtaaataaagaggtaatagcgaagggtctaccagcctcacctggcgcagctagtggcaaagtagtttttagtgcagacgaggctgagaaaatgaataatcaaaaagaagatacaattttggttagagttgaaacgtcaccagaggatattcatggaatgcacgctgctaaaggaatattaactgcaagaggcggaatgacaagtcatgctgctgtagtagccagaggtatggggcgaccgtgtgtttcaggttcaggagaaattaatatcgattatgaaacaaaagaatttaaagttggagatttaagcatcaaagagggagaagttataactattgatggaggaacaggtagagtaatgaaaggcctagttccaacag

SEQ ID NO: 258331 - DNA, 878 bp, Unknown
  Bacterial polypeptide expressing nucleotide sequence isolated from the Sargasso Sea
tatagaaggtttatacaaatgtacgcaaacgttgttatgggtatagagagccatctatttgaagaaatgattgataattataagttaacaaagggtgtcttgtctgacactgagcttaattccgaggactgggatgggctaataaaaaactttaaaaatttaatattggaaaaaacaaaaaaaaatttccctcaagatgtatacgtgcagctttttgaagctattaaagctgtatttttgtcttgggaaagcaaaagagcaaaaacttatagaaagcttaatcatattccgggaaattggggtacagcagttaatgtacaatctatggtttttggtaatatgggaaatgattgtgctactggagtagcctttacaagaaatccatcaactggtgaaaataaattttttggagagtaccttattaatgctcaaggagaagacgttgttgctggtagcagaacgcctagacatataactaaaaaagccaaggaagatgctggtgcaaaagaggtttcaatggaagaaaaaatgcccaaagtctttaaagaattaaaaaatatatttattaaattggaaaaacattacagagatatgcaagatatcgagtttacggttgagaacaataaactttggatgttacaaacccgaaatggaaaacgtacagcaaaagcagcaattaaaatttctgtagacatggtcaaagaaaaactaatttcaaaaaaagaggctattttaaggatagatccaaatactttagatacacttctccaccccactttggatgagagcgtagaaaaaaaagtgattgcaaaaggtcttccagcctctcctggagcagcgagtggaaaagtagtttttactgctgatgaggctgagag

SEQ ID NO: 258332 - DNA, 472 bp, Unknown
  Bacterial polypeptide expressing nucleotide sequence isolated from the Sargasso Sea
ttagttgataaaatagcccatgagattcaaaaaattaattctatgaaaattaaatattatgtgggtactatgatagaacttcctcgcgccgcaataagagcaaaagatatagcaaaatatgctgacttttttagttttggcaccaacgatttaacccaaactacttttggtattagtcgagatgattcaggtaaatttcttaatgattatgttgaaaataaaatttttaataaagatccttttgttagcattgacgaaaggggcgtaggagagctaattaaaatcgctacagaaagaggtagattagaaaaaagatttttaaaactaggtatatgtggcgaacatggtggtgatcccgcaagtatagagttttgcgaaaaagctaaattaaattatgtttcttgctctccctacagagtcccaattgcacgtttggctgctgcgcaagcctatttgaaaaaaagaaaataat

SEQ ID NO: 258333 - DNA, 933 bp, Unknown
  Bacterial polypeptide expressing nucleotide sequence isolated from the Sargasso Sea
tatgacctcccatgctgcactagtagctaggggttggggaaagtgctgtatcgtaggttgcagcgcaattcaaatcaatactcaagatagagaggtaaagattggtaataccaagctagaggaaggagactggatcacgatgaatggcacatctggtaacatatacaatgaccagctagaccttattcctgcagaccccgatacacatcctgaatataaggagttaatggtttgggctgatgaaacaagaaaaatgaaaattcgtactaatgctgaaagtcctgaagatgctgcccaagcaataaagtttggagcagaagggattgggctttgcagaacagaacatatgttctttgatgagtcacgtatcctggcaatacgaaaaatgatttttgcagataatgagacaagtcgacgtgatgcggtaatggaactgctcccatttcaaaaagaagattttaagggcatattagaagccatggaggggaaaccggtaacaataagacttttggaccctccactacatgaattcatgactctcacagaagaacaacaaaatgaacttgcaaaaagtcttaatgttgaaataaatgctgtaaaaaatagaatatcagctctacatgagcttaatccaatgcttggacatcgcggatgtaggctaggtatcgcatatcctgaaataacagagatgcaggttactgcaattctagaggccaccgccgaattaacacaagcaggaaaatctgtcctacccgaaatcatgattccacttgtaggaacggtttcagaatacacagaccaagaaaagattgtgcgcgaggttgcagataaaataaataacgactataaaatagagcttaaatatttagtcggtacaatgattgaattaccacgagcttgcctaactgcagatgagattgcaaaacatgcaga

SEQ ID NO: 258334 - DNA, 711 bp, Unknown
  Bacterial polypeptide expressing nucleotide sequence isolated from the Sargasso Sea
aaaaaaaatattattgagattggaaaaacattatagagacatgcaagatgttgaatttacagtagagaataaaaagctttggatgttacaaactagatcaggaaaaagaacagcaaaatctgcaattaaaattgctacagatatggttaaagaaaagttaatttcaaaaaaagaagcagttttaagaattgaaccaaactccctagactctttacttcatccaaccttggatgagaaaagtaatattgaagtaatagcaaaaggtttgcccgcatctcctggggctgcaagtggaaaagttgttttttcctcagatgaagctcaaagacttaatgacatgatgcaaaatacaattttagttagagtagaaacttctccagaagatattcatggcatgcatgctgcaaaaggaattttaactgcaagaggtggaatgacaagccacgctgcagtagttgcaagaggaatggggcgcccatgtgtttctggttcaagcgaaatagaaattgattatgaaaataacttatttaaatcaaatggatatgcaattaaggaaggagatttgataacaattgatggttcaactggtagaattattttaggagaagtaaaaactgttaaacctgaaatttcaggagatttttctaaattgatgagttgggcagatagttttagaaaattaaaaatcagaacaaattctgaaacacctat

SEQ ID NO: 258335 - DNA, 782 bp, Unknown
  Bacterial polypeptide expressing nucleotide sequence isolated from the Sargasso Sea
tatgttttttgacgaagaaagaattttatcagtaagagaaatgatattatcaaaaacaaaagaagatcgatctaatgcactgaaaaagctattaccatatcaaaaaaaagattttattgaaatatttaagattatgaaaggtttaccagtaacagtaaggttacttgacccaccactacatgaatttttgccaaaaaataataatgaaattaatgatgttgcggtttcattaaatattcccattaaagaacttgaaattagaatttcagaacttcatgaacaaaatccaatgttaggtcatagaggttgtagattggcaatttcattccccgaaatttatgagatgcaaagtactgcaatttttgaagctttagtggaatgtaaaaaacaaaaaattcaatcaactatgcctgaaataatgattcctttagtttcaacagaagcagaaataaagattatgaaagatttagtaattagggttgcaaaaaaagttcaagatgagaataaaattaaaattgattttttagttggaacaatgattgaattgccaagagccgcaataaaggcaaaagatatcgcaaaacatgctgaattttttagttttggaactaatgatttaactcaaactacatttgggatcagcagagatgatagtggtaaatttctaaacgactatattgataacagaatttttgatattgatccttttgtatcaattgacgatggagttggcgacttaataaaaattgcaactgataaaggaagagaacaaaacaaaaaaa

SEQ ID NO: 258336 - DNA, 771 bp, Unknown
  Bacterial polypeptide expressing nucleotide sequence isolated from the Sargasso Sea
tttacaagaaatccttcagatggattaaacgaaatatatggagaatatttaatcaatgctcaaggggaagatgtcgttgcaggcactaggacaccacagtacattactaaaaaagcaagattacaggcaaaagttaaagcttcttcaatggaagagattatgccaaatgtatacaagcaactttataaaattttaaaaaaattagagaagcattataaagatatgcaagatgttgagtttacagttgaaaataaaaaattatggatgcttcaaactagatctggaaaaagaacagctaagtctgctgtaaagatagctgttgatatggttaaagaaaagctaatatcaaaaaaagaggctgttttgagaattaatccaaattctttagataccttgcttcatcctactttagatgagaaaagttcaataaatgtaatagctaatggcctaccagcttcacctggtgctgtaagtggaaaagtagtttttacctctgaagaggccgaaagattaaacgggatgatgcaagatacaattttagtgagggtagagacatccccagaagatattcaaggaatgcatgcggctaagggaattttaactgctagagggggaatgacaagtcatgcagcagtagttgcgaggggaatgggaagaccgtgtgtgtctggatcaagtgaaatagacataaattatgaaaaaaaatcattcaaaacttcatctatagaagtcaaagaaggagagatcataactattgatggttctactggt

SEQ ID NO: 258337 - DNA, 814 bp, Unknown
  Bacterial polypeptide expressing nucleotide sequence isolated from the Sargasso Sea
tctggcgctagagtttcaatgccggggatgatggatacaattttaaatcttggtcttaacgataaaactgttttagcacttgcaaaaaaaacttcaaatatgagatttgccaatgatagctatagaagatttatacaaatgtactcaaatgtagttttgggtattgaaaattatcattttgaggaattaattgaaaattataaattaacaaaaggtgttttattagatactgatcttgatgcaaaagattgggaaggattaataaaagattttaaaaatattgttaaaaaaaaaacaaaaaaagattttcctcaagatgtaaatcaacaacttataggagctattagttcagtatttttatcttgggaaagtaatagagcaaaagtatatagaaagttaaatcaaatcccatctagctggggtaccgccgtaaatgtacaatcaatggtctttggtaacatgggagaaaattgtgctacaggagtagtttttactagaaatccatcagatggaagtaaagaaatatatggagaatatttaattaatgcccaaggagaagacgtagttgcaggaacaagaacacctcaacatataacgaaaaaatctagaacaaaatcaaaagaaaaattactttcaatggaagaggccatgccttcaatttacaataaactgaaaaaaatattattgaaattagaaaaacattataaagatatgcaagatgttgagtttacagttgagaataaaaaactatggttgctacaaacaagagcaggcaagagaacagcaaagtctgcagtaaaaattgctaccgaaa

SEQ ID NO: 258338 - DNA, 502 bp, Unknown
  Bacterial polypeptide expressing nucleotide sequence isolated from the Sargasso Sea
actggctgccgaaatacaaatacttagaaacttagttataaaaacagcagaagaaattaaaaaaaaatattcggtaaaaataaaatattatattggtacaatgatcgaattacctcgggccgcaataagagcgaaagatatagcaaaatatgccgatttttttagttttggaactaacgatcttacccagactacgtttggtattagcagggacgattctggaaaatttcttaatgactatgttgaaaacaaaatttttaataaagatccatttatcagtattgacgaaagaggagttggagaattgattaaagttgctacagaaagaggcagatctgaaaaaaaatcactaaaactaggtatatgcggtgaacatggcggggatcctgcaagtattgatttttgtgaaaaagctaaactaaattatgtatcctgttcgccctacagagttcccgtagcacgtcttgcagctgcccaagcatatttaaagaaaaaaaagtaa

SEQ ID NO: 258339 - DNA, 685 bp, Unknown
  Bacterial polypeptide expressing nucleotide sequence isolated from the Sargasso Sea
aatgaaattggatggaagaataaccgaacttcatgaacaaaatccaatgcttggacatagaggttgtagacttggaatttcttttccggaaatttacgaaatgcaatgcagagcaatatttgaagcactaatagaattaaaaagaaaaaaaataaaatttgcttttccagagataatgatacctttagtttcaacagaggctgaaataaaaattcttaaagaacttgtaattgcaactgcaaaaaaagttcaaaatgataacaaaactaaaatagactttttggttggaacaatgattgagctaccaagggcagcattaaaagctgatgatattgctaagcatgcagaattttttagttttggtacaaatgatctaactcaaactacttttggattaagtagagatgatagtggcaaatttttaaatgactatttagaaaataaaatttttgatacagacccttttgtatcaattgatgagggtgtgcgcgatttgatagatatcgcaacaaaaaaagggaaaaaacaaaataaaaaaattaaactaggcatatgtggagagcacggaggagatcctaaaagtatatatttgtgctcaaaaattgggcttaattatgtttcgtgttcaccttatcgagttcctattgctagacttgcagcagcccaggcagagcttaaaaagtaa

SEQ ID NO: 258340 - DNA, 553 bp, Unknown
  Bacterial polypeptide expressing nucleotide sequence isolated from the Sargasso Sea
aaaaaataaacaaaaatttgcttttcctgagattatgattcctttagtttcaaccgaagctgagatcaaaataatgaaagatttagtaatcaatactgcaagaaaagttcaaaaagaaaataaaacaaagattgaatttcttgtgggtacaatgattgagttacctagagcagcaattaaggcggatgatattgcaaaacatgctgaattctttagttttggcactaatgatttaacacaaacaacttttggaataagtagagacgatagtggtaaatttttaaatgattatatagataataagatttttactattgatccgtttgtatcgattgatgatggagttaaagatttagtcgaaatagcggtttctaaaggaaaaaaacaaaataaaaaaattaaattaggtatatgtggcgaacatggtggtgatccaaaaagtattaaattttgttcaaaagctgggcttaattatgtttcctgttcaccttacagagttcctatagctagattagcagcggcacaagctgagcttttgaaaaataaaaattaa

SEQ ID NO: 258341 - DNA, 829 bp, Unknown
  Bacterial polypeptide expressing nucleotide sequence isolated from the Sargasso Sea
ttcctttccaagaaaagatttttacaaaatatttaaaaaaatggacggtttgccagtaactgtaaggcttttagatccacctcttcatgaatttatcaatatacacggcaaagaaatgaaaaagttggcgagcgacatgaacctgccgcttaaaaatgttgaagaaagagttgaatccctaaaagaggcaaatcccatgcttggccacaggggttgccgtcttggtatatcgtatccagaagtaaccgccatgcaggctcgcgctattattggagcggctgcaaagcttaaaaaagaaggaaataatccaaaagttgagctaatgatacctctcgtttctaatttagaggaatttttaaaccagaaagaaattgttcttgcagtaaaaaatgaaatacttgaaaaggacgatttaaaaataaattttaaaattggaaccatgatcgaagtacctcgcgcctgtcttgtagctgaagaaattgctgaggtggctgacttttttagctttggcacaaatgaccttacacaaaccacgtttggttttagtagagatgatacaggtaccttttttcctcattattttgatgaagaaattatgcttgcagacccctttgaacagattgatcgtaaaggggttggcaaacttatggagatcgctgtaagagacgcaaaggctagtagaaataagatttctcttggtatttgtggtgagcatggaggagaacctaacagtatagagttttgtaaaatattgggtcttgattatgttagctgttctccttatcgtgtacctattgcaaggctagctgcagcacaggttgaactatga

SEQ ID NO: 258342 - DNA, 790 bp, Unknown
  Bacterial polypeptide expressing nucleotide sequence isolated from the Sargasso Sea
gaatggggaacagcagtaaatgttcaatcaatggtttttggtaatatgggagatgactgtgcaactggtgtagtatttactcgtaatccatctgacggaaagaatgaaatatatggggaatatttaataaatgctcaaggagaagatgttgtagcaggaacaagaacacctcaatatataacaaagaaagctagaaaaaatgcaaatgaaatactcccttcaatggaagaatctatgccaagtgtttataaaaatttaaagaacattctcatcaaactagagaaacattataaagatatgcaggatgtagagttcacagtagaaaatatgaagttgtggatgttgcaaacaagatcgggaaaaagaacagcaaaatcatcagtaaaaattgctgttgatatggaaagagaaaaactaattacaaaaaaagaggcagtgcttagagttcaaccaaattctttagacacattattacatccaacattagatgaaaaagcaaatttaaatgtaatagctaaaggtcttccagcttctccgggagcagcttgtggaaaagtagtatttacctctgatgaagctgaacgactaaatggaatgatgcaaaatacaattttagtaagagtagaaacatcacccgaagatatacatggaatgcatgctgccaagggaattcttacagcaagaggaggtatgacaagtcatgctgctgtagttgcaagaggaatgggaagaccttgtgtatccggttctagcgaaatagaaatagactaccaaaaaaaaatttttaaaa

SEQ ID NO: 258343 - DNA, 523 bp, Unknown
  Bacterial polypeptide expressing nucleotide sequence isolated from the Sargasso Sea
tatacctgaaataatgataccgcttgtgtcaaccgaagctgaaataaaaataattaaagatctggtaattaatgtcgctagaaaagtacaaaatgaaaataaaactaaaattaaatttttagttggcactatgattgagcttccacgagccgcaataaaagcaaaagatattgcaaaatatgcagaattttttagttttggcactaacgatcttacacaaactacatttggaattagcagagatgatagtggtaaatttttaagtgattatattgaaaataagatttttgatattgatccttttgtttcaattgatgatggagtaggagatttaatggaaatagctgtgacaaaaggaaaaaaacaaaataaaaaaattaaacttgggatttgtggagaacacggaggtgatccaaaaagtatagaattttgttctaaaattggattagattatgtttcttgttccccttatagggtacctattgcacgcttagcagcagctcaagctcaattaaaaaaataa

SEQ ID NO: 258344 - DNA, 667 bp, Unknown
  Bacterial polypeptide expressing nucleotide sequence isolated from the Sargasso Sea
ttcagaacttcatgaacaaaatcccatgctgggtcatagaggttgtagattagcaatttcattccctgaaatttatgagatgcagtgtactgcaattttcgaggctttagtggaatgtaaaaaacaaaaaattcaatcaacaatgcctgaaatcatgatacctttagtttcaacagaagcagaaataaaaatcatgaaagatttagtcattagggttgcaaaaaaagttcaagatgcgaataaaattaaaatcgattttttagttggaacaatgattgaattgccaagagcagcaataaaggcaaaagatattgctaaacacgctgaattttttagttttggaaccaatgatttaactcaaactacatttggaattagtagagatgatagtggtaaatttctaaatgattatattgagaacaaaatttttgacattgatccttttgtatcaattgatgatggagttggagatttaattaaaattgcaactgacaaaggtagaaaacaaaacaagaaaattaaacttggaatttgtggtgagcatggtggagatcccaaaagtattgaattttgtgcaaaaactggattagattatgtgtcttgctctccctacagagttccagttgcaagattagcagcagcccaagctcagataaaaaaaatttaa

SEQ ID NO: 258345 - DNA, 522 bp, Unknown
  Bacterial polypeptide expressing nucleotide sequence isolated from the Sargasso Sea
tagaaattatgatacctcttgtttcgaccgactcagaacttaaaatattaagggctttagttaataaaattgcaaaagaaattgagaaagcaaacaaattaaaacttaattttattataggcacaatgattgagctgccacgagctgctttgcaagctaaatctatttcaaaacatgcagatttttttagttttggaactaatgatttaacccaaaccactctaggaattagccgagatgactctggtaaatttctaaatgattatattgataacaaaatatttgatgtagatccttttgttagcattgatcaaaatggagtaggtgaacttgtagaaatagcatcttctagaggcagaaaagtaaacaaaaaaattaaactaggaatttgtggagagcatggcggtgaccctaaaagtatagagttttgttcaagaacaggacttgattatgtatcttgttcacctttccgtgtacctgtagcgagattagcagcagctcaagcagaattaagaagataac

SEQ ID NO: 258346 - DNA, 766 bp, Unknown
  Bacterial polypeptide expressing nucleotide sequence isolated from the Sargasso Sea
attcgcaatgaaacatcccctgaagatattcatggcatgcatgcttcacaagggatcttaacagcaaaaggaggaatgacttctcatgcagccttagttgcgcgtggatggggaaagtgttgtattgtaggctgttctaggattatcatcgatgtagaaaataaatcggtaaatattaatgggacaatattgaaagaaggagattggatatcgcttaatggatcaacaggaaatatttatcaaggaaaaattaatttaattaatcctaatttgaaaaaaaataaaatattttcagattttatgaaattatgtgataaacatcgaactattaaaatacgaaccaatgttgatactcctgaagatgcacaacaggcattagactttcaatgtgaaggtattgggttgtgtcgaaccgaacatatgttctttgatcctgatagaattagtgcaatgagggaaatgattttatcaaaaaatgaaaaatatagaaaacaagcattaatgaagttgttgccatatcaaaagcaggacttctataatttattaaaagtaatgagcggattgcctgtaacaatccgtttactagatcctccattgcatgaatttttaccgcaaacagaagaacaaattttacacttagctagtgaaatgggcattacatctaagactatttatgatagaatagatgctttacatgagctcaacccaatgcttgggcatagaggatgtcgtttagggatagtgtatcctgaaataactataatgc

SEQ ID NO: 258347 - DNA, 610 bp, Unknown
  Bacterial polypeptide expressing nucleotide sequence isolated from the Sargasso Sea
atcttttcctgaaatttatgaaatgcaatgtcgagctattttcgaggctctgatagattgtaaaaagagaaaacttaagtctactatgcccgaaataatgatacctctagtttctacagaagcagaaataaagattatgaaagacttagtgattagagtggctaaaaaagttcaagatgaaaacaatactaaggtaagttttttagttggaacaatgattgaattaccaagagcagcaataaaagcaaaagatatagcaaaacatgctgaattttttagttttgggacaaatgacttaacccaaaccactttcggcatcagcagagacgacagtggaaagtttttgaatgattacatagaaaataaaatatttgatattgatccttttatatcgattgatgatggtgttggtgatttaattgaaatagcaactttaaaaggaaaaaaacaaaataaaaatattaaacttgggatttgcggtgagcatggtggagatccaaaaagtattaacttttgctcaaaaacagggttaaattatgtttcttgttcaccttacagagttcctgttgcaagattagcagcagcacaagctgagttaattaaaaaataa

SEQ ID NO: 258348 - DNA, 535 bp, Unknown
  Bacterial polypeptide expressing nucleotide sequence isolated from the Sargasso Sea
atgcctgagataatgatcccattaatatcaactgaggcagaaattaaaattatgaaagatctagtaattagagtagctagaaaagttcaaaaagataataaagttaatctcgattatttagttggtacgatgattgaactaccaagagccgctattaaagctaaagatattgcaaaacatgctgaattttttagttttggaactaatgatttaacccagactacatttggcattagtagagatgatagtggaaaatttttgaatgattatttagaaaataagatatttgatattgatccatttatatcaatagacgatggtgttgcagatttaattaaaatggcctcttttaaaggaaaaaaacaaaaccagaaattaaagctgggtatttgcggcgaacatggtggagatccaaaaagtatagaattttgtgccaaaactggattagattatgtttcttgttctccatatagagtacctattgctagacttgcagcagctcaagctgaaataaaaaaaaatataaacttttaaa

SEQ ID NO: 258349 - DNA, 743 bp, Unknown
  Bacterial polypeptide expressing nucleotide sequence isolated from the Sargasso Sea
accacgtactgaaaaggaaattaatgaggttgctggtacagtcaatcttccagttaaagaggttgtctcaagaattgaagagctccatgagcaaaatcctatgttgggtcatagaggatgtcgtctgggaatatcttttccagaaatttatgaaatgcaatgtaaagcaatatttgaggctttagcttacctaaagaaaaacaaaattaaatctgcatttcctgagataatgatacctttagtatctacagaggctgagattaaaataatgaaagatttagtaactagaattgctagtcgagttcaacaagaaaataaattgaaaatagaatttttagtaggaacgatgattgaattacctagagccgcaataaaagcaaaagagattgctaagcatgcagaattctttagttttggaacaaatgatttaacccagacaacttttgggatcagtagagatgatagtggtaaatttttaaatgattatttagaaaataaaatattttctgttgatccttttgtctcaatagatgaaggagtttcagatttacttgaaatagcagtagaaaaaggacgagaacaaaataaaaaactgaaattaggtatctgtggagagcatggaggagatccacatagtatatctttttgttctaatgcaggattgaattatgtttcttgttcaccttacagagtacctatagcgagattagcagctgcacaggcagagctcaaaaaaaattaat

SEQ ID NO: 258350 - DNA, 735 bp, Unknown
  Bacterial polypeptide expressing nucleotide sequence isolated from the Sargasso Sea
gaagcagttctcagagtagagcctgagcatcttgaacaattcctttttccaatttttaatcccgaggacaagaaaaaatttgatattatgacacgaggtctagctgcatcaccgggagctgcgtccggtagagttgcactcgacgcacaaaccgcggtagagttaggcaaaaaagggaaaagagtcgttttagtgactcaagaaactagtcccgatgacattcacggaatggcagctgctcacggattattaacagcgagaggaggtcgaacaagccacgctgctgttgtaggaagacaaatgggaaaagtttgtgtcgttggagccgaggaaattaaagttaatattaaagatagaaattttagtgtaggaaataagattattaaagaaggtgattatatttctatagatggctttgaaggaaaagttttttcaggagatatccctgttgttgcttcagaagtaatccaggttatgcaaggaaatatgcgagaaattgcttctgaaagatataatattttttcaactattttaaagtgggctgattcgtttagaacgctcgatattagaactaatgctgatgtgccaagtgatgcagctacagctattaaatttggtgcagaaggaattggtctttgtagaactgaacatatgttttttgccgaggatagaataaaaataatgcaagaaatgattctatcaaaaagtgaaaaagaacgaatcaagcatttaaac

SEQ ID NO: 258351 - DNA, 808 bp, Unknown
  Bacterial polypeptide expressing nucleotide sequence isolated from the Sargasso Sea
cagattccttctccattggggaacagcagtaaatgttcaatcaatggtttttggaaatatgggagaagattgtgcgacaggtgtagtctttacaagaaatccttcagatggaaaaaatgaaatttatggtgagtatttaattaatgcccaaggagaagatgttgtagctggaaccaggacacctcaatacattacaaaaaaagcaagaaaaaaatctggctcaaatggaaaatcaatggaagaaactatgcctgatgtgtttaaagaattaaaaaaaaatttaaaaattttagaaaaacattacaaagatatgcaagatgttgaatttactgtagaaaataaaaaactttggatgctacagacaagatctggaaagagaacagcaaaatcttcagtaaaaatagcagtagaaatggttaaagaaaaattaatttcaaaaaaagaagctatacttcgagtggacccaggctcattggattctttgctacatccaactcttgatgaaaaaagcgatataaaagtaattgcaaagggattaccagcctcaccaggagcagcgagtggaaaagttgttttttcgtcagacgaagcagaaagacttaactcaatgatgcaagatacaattttagtaagaattgaaacatctccagaggatattcatggaatgcacgcggccaaaggaattttaacatcaaggggaggtatgactagtcatgctgcggttgttgcaagaggaatgggaagaccctgtgtttctggctcaagtgaaattgatattaattatgaaaacaaaacttttaaaacatct

SEQ ID NO: 258352 - DNA, 830 bp, Unknown
  Bacterial polypeptide expressing nucleotide sequence isolated from the Sargasso Sea
aaatatattttaggtggaaaaggtgctaatcttgctgaaatgggaaaactaggttttccggttcctccaggttttactatttctacattagcttgcgaactattttataaaaataaaaaaaaacttaattcggcattaacaaatcaaataaaagcagaattaaaaatcatagaaaatgatacaggaaaaaaatttggcgatgtaaaaaatcctttattggtttcggttagatcaggagcacgagtttcaatgcctggaatgatggatacaattttaaatcttggtttaaatgatcaaaccgtaattgcattagcaaataaaacaaagaatataaggtttgccaaagatagttatagaagatttattcaaatgtattcagatgttgttcttggtgtaaaagcttataattttgaagatttaattgaaaattataaattaaccaaaggagttttattagatacagatttagatgaaaatgactgggatggtttaattaatgattttaaagaattagtaaaaaataaaactaaaaaagaatttccacaaaatgttattgaacaattgataggagctattagcgcagtatttctttcatgggatagccatagagcgaaagtttacaggaaaataaatcaaataccttcaaattggggaactgcagtaaatattcagtcaatggtttttggaaatatgggaaatgactctgcaactggagtagtatttacaagaaatccttcaaatggaataaatgaagtatatggcgaatatttagtcaatgcacaaggcgaagatgtagtggccggtacaagaactcctcagtatattacaaa

SEQ ID NO: 258353 - DNA, 611 bp, Unknown
  Bacterial polypeptide expressing nucleotide sequence isolated from the Sargasso Sea
aatatcttttcctgaaatttatgagatgcaatgtaaagcaatatttgaagcgttagtgtacctcaaaaaaaataaaattaaatctgcatttcctgaaataatgattcctttggtgtctacagaaactgagataaaaataatgaaagatttagtaattagaactgctagttatgttcaaaaagaacataaattaaaaatagaatttttagttggtacgatgattgaactacctagagcagcaataaaagcaaaagagattgctaaacatgctgaattttttagttttggcactaatgatttaacacaaactacttttgggattagtagagatgatagtggaaaatttttaaacgattatttagaaaataaaatattttctgttgacccttttgtttcaatagatgaaggagtttcagatttagttgaaatagcagttgaaaaaggacgaaaacaaaataaaaatcttaagttaggtatttgtggagagcatggaggagatcctcatagtatatctttttgttctaaagcggggttaaattatgttagttgctcaccttacagagttccaatagctaggttagctgctgctcaagctgaaattaaaaaataaa

SEQ ID NO: 258354 - DNA, 826 bp, Unknown
  Bacterial polypeptide expressing nucleotide sequence isolated from the Sargasso Sea
gttagataccgaacttaattcagatgattgggatggtcttatagtgaattttaaaaacttgatttttgaaaaaactaaaaaaaaattcccgcaagatgttttcattcagctttttggagcaatcagtgcggtatttttatcttgggaaagcaaaagagcaaaaacttatagaaaactgaaccatattccttctgattggggaacagctgtaaatgttcagtcaatggtatttgggaatatgggcaatgattgtgcaactggagttggttttactagaaatccatcaactggtgaaaataaattttttggtgaatatttaataaatgcgcaaggagaagatgttgtggcaggtagtagaacccctagatatattacaaaaaaagcaaaagaagagtctggagcaaaagaagactcaatggaagaaaaaatgccaaaagtcttcaaagaattaaaacatgtttttataaaattagaaaaacattacagagacatgcaagatattgaatttacagttgaaaataataaattatggatgttacagactagaaacggaaagcgcacagctaatgcagcaatcaaaattgctgtagatatggtaaaagaaaaattgatttcaaaaaaagaagcaattttaagaatagacgcaaatactctagatacacttttgcatcctacattagacgagaaagcagataaacaagtgatcgcaaaaggtttacctgcttctccaggggcagcaagtggtaaagttgtttttactgctgatgaagcagaacgaatgaacaatcaaaaagaagatacaatattggtgagggttgaaacttct

SEQ ID NO: 258355 - DNA, 861 bp, Unknown
  Bacterial polypeptide expressing nucleotide sequence isolated from the Sargasso Sea
gtgtagtatttacaagaaatccatcagatggaagtaatgaaatatttggtgagtacttaattaatgcccaaggcgaagatgttgttgctggcactagaactcctcaacacataactaaaaaggctagattaaattctaaggaaaaattactttcaatggaggagtcaatgccttcaatttataaagatttaaaaaaaatattattgagattggagaaacattatagagacatgcaagacgttgaatttacagtagagaataaaaaactttggatgttgcaaactagatcaggaaaaagaacagcaaaatctgcaattaaaattgctacagacatggttaaagaaaagttaatttcgaaaaaagaagcagttttaagaattgaaccaaatactctagactctttacttcaccccaccttagacgagaaaagtaatattgaattaatagcaaaaggtttacctgcatctcctggagctgcaagtggaaaagttgttttttcctcagatgaagctcaaagacttaatgacatgatgcaaaatacaatcttagttagagtcgaaacatctccagaagatattcatggcatgcatgctgcaaaaggaattttaactgcaagaggtggaatgacaagccacgctgcagtagttgcaagaggaatggggcgcccatgtgtttctggttcaagtgaaatagaaattgattatgaaaataacttatttaaatcaaatggatatgaaattaaggaaggagactcgataacaattgatggttcaactggtagaataattttaggagaagtaaaaactgttaaacctgaaatttcaggagatttttctaaattgatgagttgggcagaatagt

SEQ ID NO: 258356 - DNA, 691 bp, Unknown
  Bacterial polypeptide expressing nucleotide sequence isolated from the Sargasso Sea
atatattactaagaaagcaagaaaaaatgctaaagttaaagagccttcaatggaggagtctttgccgaaagttttcaaagaattaaaaaaaattttaaagaaattagaaaaacattacaaagatatgcaagatgtggaatttacagttgagaataataaactatggatgcttcaaaccagatcgggaaaaagaactgcaaaatctgcagtaaagattgcagttgatatggttaaggaaaaattaatttcaaaaaaacaagcagtattaagaattgatccaaattctttagacacacttttacatcctacacttgatgaaaagagtgcaatcaatgtaatagcaaatggtttgcctgcatctccaggagcagcaagtggaaaagttgtatttacttcagaggaagctgaaagattaacttcgatgatgcaagacactatcttagtaagagtagaaacatcacctgaggatatacaaggaatgcatgctgcaaaaggaattttgactgctagaggaggaatgacgagtcacgctgcagtagttgcaaggggcatgggaagaccatgtgtatctggctcaagtgaaattgatataaattatgagatgaagacatttaaaacatcctcaatggaaattaaagaaggggatatcattactatagatggatcaactggtagaatcatatcaggaagt

SEQ ID NO: 258357 - DNA, 872 bp, Unknown
  Bacterial polypeptide expressing nucleotide sequence isolated from the Sargasso Sea
ctcaattatagatttgcaaaagatagttatagaagatttattcaaatgtatgcgaatgttgtgttaaatattgaaaactataattttgaagaattgatagaaaattataaattaacaaaaggtgttttacttgatactgaacttgatgcttctgattgggatggtttaataaatgattttaaaaatttaataaaagaaaaaacaaaaatagaatttcctcaagatgtaaatgaacaattaataggagctatatctgctgtatttttatcttgggaaagcaaaagagcaaaagtttatagaaaattaaaccaaataccttcagattggggaactgcagttaatgttcaatcaatggtatttggtaatatgggtgaagattgtgcgacaggagttgtttttacaagaaatccttcaaatggaaaaaatgaaatatatggagaatacttaattaatgcacaaggagaagatgtagtagctggaacaagaacacctcaatatataacaaaaaaagcaagaaaagcaactggctcaaaagaaagttcaatggaagagtctttaccaaaagtttttcaaaaacttaaaaaattattaaagactcttgaaaagcattataaagatatgcaggatgttgagtttacagtagaaaataaaaaactttggattttacaaacaagatcaggaaagaggacagccaagtcagcagtaaaaatagcatttgatatggtaagggaaaaattaatctctaaaaaagaagctttattaagaatagatccaaattctttagatacacttctccatccaactttagatgaaaaaagtaaaataatggttatcgccaaaggattgccagcatctcctggggccacaagtgg

SEQ ID NO: 258358 - DNA, 850 bp, Unknown
  Bacterial polypeptide expressing nucleotide sequence isolated from the Sargasso Sea
tcagttcgatctggagcaagagtttcaatgccaggtatgatggatacaattctaaacttaggactaaatgacaaaacagtggttgctctggctaacaaaacatccaacggaagatttgcgaaagatagctatagaagattcatccagatgtacggaaatgtagtcatgggtgttgaaagttacaattttgaggaattgatagaaaattacaagttaacaaaaggtgtattgcttgatacggatctcgatgaagaggattgggatggtttaacaaatgattttaagaatgtagttaaagagaagactggtaaagattttcctcaagatgtttatcatcaattattcggggcaataagtgctgtatttttatcttgggaaagcaaaagagcaaaagtttatagaaagttaaatcaaatcccttcagagtggggaaccgctgttaatgttcaatctatggtttttggaaatatgggcaatgattgtgcaacaggagttgtctttactagaaacccttcaaatggatcaaatgatatttatggagaatatttaattaatgcccagggagaagatgttgtagctgggactagaactccgcagtatattactaaaaaggcgagaaaagtggcaaaagttaaagatctatctatggaagagtcgatgccagaagcatatcaagaattatataaaattttaaaaaaacttgagaaacattataaggatatgcaagatgtagagttcactgttgaaagtaagaaactttggatattgcaaactcgatctggaaaaagaacatcaaaatcagcagtaaaaattgctgttgatatggttggagaaaaagttaatcaataaa

SEQ ID NO: 258359 - DNA, 508 bp, Unknown
  Bacterial polypeptide expressing nucleotide sequence isolated from the Sargasso Sea
cctaccttagatgaaaaaagtaaaataaatgttattgcaaaaggtttgccagcctctcctggtgcagcaagtggaaaagttgttttttcatctcatgaagcagaaagacttaatgaaatgatgcaagatacaattttagttagagtagaaacttcaccagaggatatacacggaatgcatgcagcaaaaggaatattaacgtcaagaggaggaatgacaagccatgcagcagtagtcgcacgaggaatgggaagaccgtgcgtttcagggtcgagtgaaattgatattaattatgaaaaaaaaatatttagaactaaatttatagagataaaagaaggtgatttaattacaatagatggttctacaggaagaattattcaaggcgaagttccaaaaataaaacctgaaatttcaggagatttttcaaaattaatgagttgggcagatagttttagaaagctaaaaataagaacaaattcagaaacttcattagatactaagactgcaa

SEQ ID NO: 258360 - DNA, 901 bp, Unknown
  Bacterial polypeptide expressing nucleotide sequence isolated from the Sargasso Sea
tacaaggaggtctaccgcaagcacgtcggcaagccgttcccccaggacccgaagacgcagctggaagccgccatcgaggccgtgttcaagagctggatgggggacaaggcggtcagctaccgccgcatcgagggcatcgtcggcctcaacggcaccggggtgaacgtccagaccatggtcttcggcaacaccggcgacgactccggcaccggggtggccttcacccgcgatccgtccaccggcaagaacgagttctacggcgagttcctcgtgaacgcgcagggcgaggatgtcgtcgccggcatccggacgccggagccggtcgcccggatggcgaagtgggacgccaaggcgcacaaggaactgctcaaggtccgcaccaagctcgagaagcactatcgggacgtgcaggacatcgagttcacgatcgagcggggcaagctctacatgctccagacccgcaacgggaagcgcaccggcgccgcggcggtcaagttcgccgcggacatggtcaaggagcggctgatctccaagaaggaggccgtcatgcgggtcagccccgatcacgtgacccagttgctgctgccgtccttcccgacctccgccaagaagggggccaaggccctgaccgtcggactccccgcctcccccggcgccgcggtgggtgcccccgccttcaccgccgaggaggcggtcgaacgggcgaagcagggcgagcaggtcattctcgttcgcaaggagaccagccccgaggacgtcgacggcatgcacatggccgccggcatcctgacctcgacgggcggcatgaccagccacgcggcggtcgtcgcccgtggctggggcaagtgctgcgtcgccggcgccggtgccgtccagatcgacgccgcgaagcgccgcttca

SEQ ID NO: 258361 - DNA, 948 bp, Unknown
  Bacterial polypeptide expressing nucleotide sequence isolated from the Sargasso Sea
aaaaatttgatttcacaaaatataaaagaattaaaattaattgaaaaagatgtttctaagaaatttggagacttaaaaaatccactcttactatctgtaagatcgggagcaagagtatctatgccaggtatgatggacactattttaaatctaggtttaaatgataaaacagttcaagctttagccattaaaactttaaatggaagatttgctaaagatagttatagaagattcattcaaatgtatggaaatgtagtgatgggtgttgaaagttatcattttgaagaattaattgaaaattataaacttacaaaaggtgtattattagatactgatttagatgaaagtgactgggatggattaattgaagactttaaaaggacagtgaaagagaaggctaaaaaagattttccacaagatgtttacgaacaattactaggagcaataagtgctgtatttttatcatgggaaagtaatagagcaaaaatttatagaaaactaaaccaaattccagttgagtggggaacagcagtaaatgttcaatctatggtatttggaaatatgggtgatgactgtgcaacaggagttgtgtttacaagaaatccgtcagatggattgaatgaaatttatggtgagtatttaattaatgcgcaaggtgaagatgttgtagctggtacaaggactcctcaatatatcactaaaaaagctaggcaggacgctaaagaaaaagaattatcaatggaagaatctatgccaaaagtttttaaagaacttaaaaaaattttaaaaaaattagagaagcattacaaagatatgcaagatgtagagttcacagttgaaagtaataaattatggatgcttcaaacaagatcaggaaaaagaacagcaaaatcagcagtcaaaattgcagttgatatggttaaagaaaaattaattcaaaaaaagagg

SEQ ID NO: 258362 - DNA, 475 bp, Unknown
  Bacterial polypeptide expressing nucleotide sequence isolated from the Sargasso Sea
gtattaagtattgagccaaattctcttgattcattgcttcatccaactttggacgaaaaaagcaaaatagaagtaattgccaaaggactgccagcctcgccaggagcagcaagtggaaaagtcgtcttttcatctgatgaagccgaaagtcttaatgcgatgatgcaaaacaccatattagttagagttgagacatctccagaagatattcatggaatgcacgctgccaaaggtattttaactgctagaggtggaatgacaagtcatgctgcagtcgtagccagaggcatgggtcgtccatgcgtttctggatcaagcgaaatagagattgactatgtaaacaaatcattcaaaacaaaggatcacgaaataaaagaaggagatttaataactatagatggatcaactggaagaattattttaggagaagtaaaaacagttaaacctgaaatttcaagagatttttcaaattaat

SEQ ID NO: 258363 - DNA, 439 bp, Unknown
  Bacterial polypeptide expressing nucleotide sequence isolated from the Sargasso Sea
ggttcaaaatgaaaataatatcaaaattaaatttctagttggtaccatgattgaactacctagagcagcaattaaagcagaagatatcgcaaagcatgcagaatttttcagctttgggactaacgatctaacgcaaacaacatttggaattagtagagatgatagcagtaaatttttaaatgattatatagaaaataaaatttttgatattgatccttttatatcaattgatgatggagtaggcgatttaattaaaatagcagcatttaaaggaaaaaagcaaaattcaaaaattaaacttggaatttgtggtgaacatggaggagatccaaaaagtatagaattttgttctaaagctggtttggattatgtttcttgttcgccttatagagttccagttgctagattggctgcagcacaagctcaactaaaaaaatag

SEQ ID NO: 258364 - DNA, 1132 bp, Unknown
  Bacterial polypeptide expressing nucleotide sequence isolated from the Sargasso Sea
atggggttgccagttcctcctggttttacaatatctaccaaagtctgtgagattttttatgaagataagaaaaaattgaataacattttaatttctcaaattaaaaaagaattaaaaattatagaaaaagatgtttctaaaaaatttggagacctaaaaaatcctttgttattatctgttagatcgggtgcaagagtatctatgccaggaatgatggatacaattcttaatttaggtttaaatgataaaacggtaaacgctttagctttgaaaacttccaatgggcgatttgccaaagacagttacagacgatttattcaaatgtatggaaatgttgtgatgggtgtagagagctatcattttgaagagctaattgaaaattataaattaacaaaaggtgttttgttagacacagacttagatgaaaatgattgggatggtttaattgaagattttaaaagaacagtaaaagaaaaaacaaaaaaagaatttccacaagatgtatttcaacaactatttggagcaattagcgctgtatttttatcatgggaaagtaatagagcaaaagtttatagaaaattaaatcaaataccagcagaatggggaacagcagtcaacgttcaatcaatggtttttgggaatatgggtgatgattgtgctactggagttgtatttacaagaaatccttcagatggatcaaatgaaatatatggtgagtatttaattaatgcacaaggtgaggacgttgttgctggtacaagaacacctcaatatataactaagaaggcaagaaaaaatgctaaagttgaagagccttcaatggaggagtctttgccaaaagttttcaaagaattaaaaaaaattttaaagaaattggaaaaacattacaaagatatgcaagatgtagaatttacagttgagaataataaactgtggatgcttcaaactagatcgggaaaaagaactgcaaaatctgcagtaaagattgcagttgatatggttatggaaaaattaatatcaaaaaaagaagcagtattaagaattgatccaaattctttagacacacttttgcatcctacacttgatgaaaagagtttaatcaatgtaatagcaaatggtttgcctgcatctc

SEQ ID NO: 258365 - DNA, 415 bp, Unknown
  Bacterial polypeptide expressing nucleotide sequence isolated from the Sargasso Sea
gattaaatttttagttggaactatgattgaattacccagggcagcaataaaagctaaagatatagcaaaacacgcagaattttttagttttggcacaaatgatttaacacaaaccgcatttggaattagtagagatgatagtggcaagtttttaaatgattatattgaaaacaaaatttttgacattgatccttttatttcaatagatgaaggagtaggtgatctaatcaaaattgcttctgaaagaggaagaaaacaaaataaaaatataaaactaggtatatgtggagaacacggtggggatccaaaaagtatatatttttgttcaggtgctggattagattacgtttcttgttcaccatatagagtgccagtagcaagacttgcagctgctcaagctcaattaaaaaaatag

SEQ ID NO: 258366 - DNA, 460 bp, Unknown
  Bacterial polypeptide expressing nucleotide sequence isolated from the Sargasso Sea
aagaactgcaaaaaaagtacagaatcaaaataaaacgaagattaaatttctagttggaacaatgatagaattgccaagagctgcaataaaagctacagatatagcaaaacatgctgaattttttagctttggaacaaatgatttaacacagacaacatttgggattagtagagatgacagtggtaaatttttaaatgattatattgaaaacaagattttcgacatagacccgttcatatcaattgatgaaggagtaggagatcttattaaaatcgcatccgaaaagggaagaaagcaaaataaaaatataaaattaggcatatgtggagagcacggcggagatccaaaaagtatatttttttgttcagaagtaggtttggattatgtttcatgttctccatatagagttccagtagcaagacttgctgcagcacaagctcaattaaaaaataatttgtaa

SEQ ID NO: 258367 - DNA, 509 bp, Unknown
  Bacterial polypeptide expressing nucleotide sequence isolated from the Sargasso Sea
ggtagggcatgtcaatgagtttaaaattgttcgtgaatttattttggaggtagcttccgaagttttaaagaaagaaaatgtcaatttggattttgaaattggcaccatgatagagcttccccgagctgcgctgacagcagatgaaattgccaatgaagcagatttcttttcttttggaactaatgatctgacacaaactgcatttggatttagccgggatgactccggaagctttctccgacaatatgtcgatctggagttgctggaccatgacccgtttgtatcaattgatcaggaaggcttggggcaactggtacaaatagcttttgaaaaaggacgaaaggtcaaacctaaaatccatatgggggtatgtggtgagcatgggggagatccagcttctattgggttttttagccgtttgggctttgactatgtgagttgttctccctaccgggtccccacagccattctttctgcggctcaggctgttataaagaaaaatccttgat

SEQ ID NO: 258368 - DNA, 365 bp, Unknown
  Bacterial polypeptide expressing nucleotide sequence isolated from the Sargasso Sea
agcaaatgaaatagcagataaagctgagttttttagttttggcacaaatgatttgacgcaaacaacttatggttttagtcgtgacgatataggcggcttcttacctgaataccttgaaagaggaattttagagcatgatccatttcaaagcctagatcaaactggagttggacagcttgtacaaatgggcgtagaaaaaggtagagaagtgcgaagtgatttaaaaataggtatatgtggagaacatggaggagatcctgaaagtattagtttttgtaatcgcattggcttagactatgttagttgttcaccttttcgtgttccaattgctagactttctgcagcgcaagcagagctaaaataaa

SEQ ID NO: 258369 - DNA, 1275 bp, Unknown
  Bacterial polypeptide expressing nucleotide sequence isolated from the Sargasso Sea
aatgaataagttaattcttaattttaagtctaaagattcaaaaaaaataaaagatccaaaaaattttttaggtggtaagggggcaaatttatctgaaatgggaagaatgggtttaccagtacctcctggttttactatctcaacaaaagtttgcgaaattttttataaggataaaaaaaaattaaattccaaattaattagccaaataaaaaaagaaattaaaataatagaaaaagaagtatcaaaaaaatttggagatttaaaaaatcctcttcttttatcagttcgatctggagcaagagtttcaatgccaggtatgatggatacaattttgaatttaggactaaatgacgaaacagttgttgctttggctaacaaaacatctaacggaagatttgcgaaagatagctacagaagattcatccagatgtacggaaatgtagtcatgggcgttgaaagttacaattttgaggaattgatagaaaattataagttaacaaaaggtgtattgctcgatacggatctcgatgaagaggattgggatggtttaataaatgattttaagaatgtagttaaagaaaagactagtaaagattttcctcaagatgtttatcatcaattattcggggcaataagtgctgtatttttatcttgggagagcaaaagagcgagagtttacagaaagttgaatcaaattccttctgaatggggaacagctgttaatgttcaatctatggtttttggaaatatgggtaatgattgtgcaacaggagttgtctttactagaaacccttcagatggttcaaatgatatttatggagaatatttgattaatgctcagggagaagatgttgtagctggaacaagaactccacagtacattacaaagaaggcgagaaaagaagcaaaagttgatgatgtatctatggaagagtcgatgccagaagtatatcacgaattatataaaattttaaaaaaactagagaaacattataaggatatgcaagatgtggaattcactgttgaaagtaataaactttggatattacaaactcgatctggaaaaagaacatcaaaatcagcagtaaaaattgctgttgatatggttagagaaaagttaatcaataaaaatgacgctgttttaagagttgatcccaactctttagacacacttttgcatcctactttagatgagagaagttcaatcaaagttatagcaaacggtcttccggcgtctcctggtgcagtaagtggaaaagtagttttcagctcaga

SEQ ID NO: 258370 - DNA, 820 bp, Unknown
  Bacterial polypeptide expressing nucleotide sequence isolated from the Sargasso Sea
ttacaaagttacaattagattgttagatccaccactacacgaatttttgccaaatcctgaagaattgaaagataaaatgaataaagaaaatgacaagagtgcaaaaactcaacgtgtcttagacagagcacgagaattagctgaaatcaatccaatgatgggacatagaggagtaagagtcgcaattacatatccagaaatttacagaatgcaaattactgcagtctttgaagcagccgcagaacttgcaaagaaaaaagttaacgcaaaaccacaaattatgattccacaagtaggaagtttagcagagttaaactacatcaaatcaatttatgacgatgtcaaaaaacagatagagcaaaaatacaagaaaaaattcaagattaactttggaaccatgcttgaagttgttcgtgcatgtcttacatctgacgaattagcagataccgcagaatttttcagctttggaacaaatgatctaacacaagcagtgtttagctttagtagagaagatgcagaagggaaattccttcccgaatatatggaaaaggagctattagaaaccagtccattccaatcaattgatgtaaacggagtaggtcatttaatgaaaattggaattaaacaaggaagagatatcaaaaaagacttggagattggaatttgtggagaacatggaggagatccaaattcaatcaagttctgccattctgccgacgtctcatatgttagtgcatcaccacatagaattcctatagcaattgttgcagcagcacaagcatcaattgaacagaaaaagactagaaaattaaaaaaataa

SEQ ID NO: 258371 - DNA, 1465 bp, Unknown
  Bacterial polypeptide expressing nucleotide sequence isolated from the Sargasso Sea
tttgaatttaggattaaatgaaaaaaccgtagagggatttgcacaacaaacaaaaaatccaagattctcatgggactcatatagaagatttattcaattatttggaaaagttgtatttggagtaaatgatgagaaatttgatcatgtgttagattctgcaaaaagcaaacaaggggtaactgacgatagtaaactaaacgtagaatcactcaaaaaaattgttgcagaatataagaaaatttgtgaaaatcatacaaaaagaaaattcccagacacacctaatgaacaattaggattagcaatagaagcagtattcaaaagttggatgggagaaagagcagtagtttatagagagaaaaatggaattacaaaagatattgcaaatggaactgcagtaaatgttgtaacaatggtatttggaaacatgggagatgatagtgcaacaggagtagtatttacaagaaatggacataatggaaaacgagagattgaaggagaatatctcaccaatgcacaaggcgaagatgttgttgcaggagtaagaactggaaagaatgtagaattattgaaaaaagagatgccaaaatcacataaagaattaagcagtgcatgtgcaaaattagaaaaacacttcagagaaccacaagacattgaatttacaatagaacaaggaaagttttacctcttgcaaacaagaactgcaaaaatgagtgcaggagcattagtcaaaacttcagtagacatggtaaaagaaaaattaattgataaaaacaaagcattaaccagaattccagcacaacaactagaagcattgttacacagaacaatggatgaatcaaaaattaaagatcataaacaactagcaaaaggaattgcagcatcaccaggtgctgcaagtggaattgcaatttttgatgtcaaaaaggcaatagaattaggagaagcaggaaaaaaggtcattttgattagaaaagaaacaaaaccagaagacgtgccagcatttttctcagcagaaggaattttgacaagcctagggggcaaatcatcacatgcagcaattgtatctagaggaatgggcaaaccatgcattgttggatgcgcagaattgaaaattaattatgataataatacatgtacagcaaatggaattactgtaaaagaaaacgaaatggtttcaattgatggaagcgtgggcacggtattcattgggcaagtaccaacagttgaaccaaaagttactaaagatttccaaacaattcttagctgggcacaaagtacaaagcaattaggaatacgtgctaatgcagatacaccagatgcagcaaaattagcaagacagtatggagcacaaggaatcggtctatgtagaacagagagaatgtttaacgaaacagacaggattggactatttgttgaaatgattatggctcaatcacaagatgagagaaacaaagtactcaaaaaa

SEQ ID NO: 258372 - DNA, 547 bp, Unknown
  Bacterial polypeptide expressing nucleotide sequence isolated from the Sargasso Sea
ttaataaaagagaatgttgaagttgcccctgaagtgatgatcccattagtagggacatataaagaatatgagcatcaagaagggcttgttcgaaaaatagcagaagaagtgaggtcagaatctggagaaaatttttcatatttagttggaacaatgattgagcttccaagagctgctcttacagcaaatgaaatagcagataaagctgagttttttagttttggcacaaatgatttgacgcaaacgacttatgggtttagtcgtgatgatataggcggcttcttgcctgaataccttgaaagaggtattttagagcatgacccatttcaaagcctagatcaaaatggagttggacaacttgttcaaatgggcgtagaaaaaggcagggaagtgcgaggtgatttaaaaataggtatatgtggagaacatggaggagaccctgaaagtattagtttttgtaatcgcattggcttagactatgtaagttgttcaccttttcgtgtcccaattgctaggctttctgcagcgcaagcagagctagaataaa

SEQ ID NO: 258373 - DNA, 643 bp, Unknown
  Bacterial polypeptide expressing nucleotide sequence isolated from the Sargasso Sea
tatgttaggacatagaggatgtagacttggcatttcttttcctgagatttatgaaatgcaatgcagagcaatttttaccgccttgatagaatgcaaaaaagaaaagatacaatcaataataccagaaataatgatacctctagtttcaaccgaagatgagcttggaataatgagaaagttggttaacagggtagccgatgaacttcagaaggagcataaagtaaaaattaattattttgttggcaccatgattgagttgccaagagcagcattgagagcagcacctatatcaaaatatgctgacttctttagttttggaacaaatgatttaacacaaaccacatttggtattagccgtgatgattctggaaaatttttagacgattacatagatcataaaatttttgataacgatccatttgttagcattgatagagatggcgtaggagagttggttaaaattgcttctcaaagaggaaaaaaacagaataaaaaacttaaactaggaatttgtggtgaacatggtggcgatccaaaaagtatagaattctgttctaaagcaggattgaattatgtgtcttgctcaccattcagagttccaattgcaagactagcagcagctcaagcagaactcaggagataa

SEQ ID NO: 258374 - DNA, 478 bp, Unknown
  Bacterial polypeptide expressing nucleotide sequence isolated from the Sargasso Sea
ctcgtaataaaaattgcaaaagaagttcaaaaagagaataaaactaagatagaattttcagttggtacaatgattgaattacctagagctgcaataaaagctaaagagattgcaaaacatgctgagtttttcagttttgggacaaatgatttaactcaaactacatttggaataagtagagatgatagtggtaaatttttaaacgattacattgagaataaaatttttacagttgatccatttgtatccattgatgatggcgttaaagacttagtagaaatcgcggtagaaaaaggaaaaaaacaaaataaaaaaattaaattaggaatttgtggagagcatggaggagaccctgatagtattctattttgctcgaagattggcttaaattacgtatcttgttcgccctatagagttcctatagcgagacttgcagctgctcaggctgagttaaaaaagtataaatctagatcttaaa

SEQ ID NO: 258375 - DNA, 387 bp, Unknown
  Bacterial polypeptide expressing nucleotide sequence isolated from the Sargasso Sea
tcgagcttcctagagcatgtttaactgctgatgagattgcagagcatgcagaatttttcagctttgggacaaatgatctcactcaaaccacatatggttttagtagagatgatattggttcatttttgccagaatatctagatcgtaacattctacctggagacccatttcaaagtttagatgttaaaggtgtcggcaaattagtatctatggcagttaaatttggtagagatgttaatccttcgattaaaataggtatttgtggcgagcacggaggagaccctaactcaattcatttttgtaaaaataatggattagattatgtgagctgctctccatatagagttcccatagcaaggttatcagccgcgcaagctgaattatagt

SEQ ID NO: 258376 - DNA, 697 bp, Unknown
  Bacterial polypeptide expressing nucleotide sequence isolated from the Sargasso Sea
tctaggagttaaagaaattaaaaatagagtagcagaattacacgaattaaatccaatgctaggccatagaggatgtagattgggtatttcttttccagaaatttatgaaatgcaatgtaaagcaattttcagtgcattaattgaatgcaaaaaagataatattaaatcaataataccagagataatggtacctttagtttcaacagaagacgagcttgggataatgagaaaattagtaaatagggttgctgatcaacttcaacaagaaaataaagttaaaataaattattttgtaggtacgatgatcgagcttccaagagcagcgttaagagctgcgccaatatcgaagtatgctgatttttttagttttggaactaacgatttgacacaaactacatttggtatcagcagagatgactcaggaaaatttttaaatgattatattgatcataaaattttcgatgaagatccatttgtaagtattgataaagacggtgttggcgaacttgtcaaaattgcttcacaaagaggaaaaaaacaaaacaaaaaacttaaattaggaatttgcggtgaacacggaggagatcctagaagtatcgaattttgttctaaaaatggattgaattatgtttcctgctcaccatttagagttccgattgcaagacttgcagcagcacaagctgagctcagaagataa

SEQ ID NO: 258377 - DNA, 1522 bp, Unknown
  Bacterial polypeptide expressing nucleotide sequence isolated from the Sargasso Sea
atgaacaataaacaaaaaatatattttttctctcagctccaaacagatggagaccaaaacatggtaaatattttaggtggaaaaggtgctaatattgcagaaatgtgtaaacttggtcttccggttcctccgggttttactttgtctacaagcctttgttctgactacttaaaatctaaatcgctatctattgttttaaaaaataacattaagaaaaatatatctaaaacagagggtgttattggaaaaatgtttggtggatcaaaccctcttcttctatctgttagatctggagccccagtttctatgccaggaatgatggaaacaatacttaatatagggcttacctcaaaaactatacctcatatgatcaaaatgagcaaaaatgaaagttttgtttatgatagttaccgaagactaatcatgatgtatgccgatgttgtcatggaaaaagcactcagactcaacaaatccaatcggtcaataagagagcttatggaaaaagaactagattctgctaaaaaatacaagggatataaaaatgattctaacatgaaagcaaaagactggaaggctttatctaataagtatctaagaatggttgagaaagagtttggaatcccttttcctgacgaccactatgagcagctgtatggagccattgctgctgtatttgagagctggaatggaaaaagagctaaagaatataggaattttgaaaaaatatcctcttctatgggcacagctgttaatgtacaagccatggtttttggaaatcttggaaaagattgtggaacaggcgttgcttttacaaggaacccttcaaccggagaaaatgttttttttggggaatggttaccaaacgcccaaggggaagatgttgttgctggtattaggactccccatccggtcgctggtaatagcaaaaactcactatctgttgctatgccaaaagccttcaaggagttggaaggtgtaagaaaaacgctcgaaaaccactttgatgatatgcaagatattgaatttacaattcaagaaaaaaagctttggatgctgcagacaagaagaggaaaaagaaccggtattgctgcaataaagattgcaactgacatggtcaaagaaaagcttataacaaaggaagtggctgtaagtagggttagaccgcatcaaatatatgaaagccttttgaaaaacattgatcctaaagatgttgaaaatagcctacctatttcgcttggcttgcctgctggccctggcgcatcttgtggtgttgccgtttttactgcagaaaaagctgaagagctaggtaaaaaaaacaaaaaagttattcttgtgcgagaagaaacatctccagaagacatacatggaatgcactactcggaaggaattctaacctccaggggtggtttaactagtcacgcagctttagttgcaagagggtggggtaaaagctgtgttgttgggtgccaagatttaaccattgataagagccacacgttcgcaaaaataggaaataaaaaaa

SEQ ID NO: 258378 - DNA, 778 bp, Unknown
  Bacterial polypeptide expressing nucleotide sequence isolated from the Sargasso Sea
ttttttaccaaatcctgaagaattgaaagataaaatgaataaagaaaatgacaaaagcaaaaaaactcaacgagttttagatagagcacgtgaattagctgaaattaatccaatgatgggacatagaggagtaagagttgcaattacatatccagagatatacaaaatgcaaattaccgctgtatttgaagccgcagcagagcttgcaaagaaaaaagttaatgcaaaaccacagattatgattccacaagtaggaagtttagcagaattaaactatatcaaatcaatttatgatgatgtaaaaaaagagatggaacaaaaatacaagaaaaaattcaaaataaactttggaaccatgctagaagttgttcgtgcatgtcttacatcagatgaattagcagatacagcagagtttttcagctttggaacaaatgatctaacacaggcagtatttagtttcagtagagaggatgcagaaggaaaattccttccagaatatatggaaaaagagctcctagagaccagtccattccaatcaatcgatgtaaatggagtaggacatcttatgaaaatcggaattagacagggtagagatatcaaaaaagatttggaaattggcatatgtggagaacatggcggagatccaaattcaatcaaattctgtcattctgcaaacgtctcctatgtcagtgcatcaccacatagaattcctattgcaatagttgcagcagcacaagcagcaatagaacagaaaaaaactaaaaaatcaaagaaatag

SEQ ID NO: 258379 - DNA, 493 bp, Unknown
  Bacterial polypeptide expressing nucleotide sequence isolated from the Sargasso Sea
gagtctgaattaaaaattttaagagctttagttaataaaattgctaaagaaatagagaaagaaaataaattaaaacttgagtatatggttggaaccatgattgaattgccgcgtgctgctttacaagctaagtctatttcaaaacatgctgatttttttagctttggaacaaatgatttaactcaaacaacttttggaataagccgagacgattcaggaaaatttttaaacgattatattgataataaaatttttgatatagatccatttgtaagtattgatcaaaatggagtaggtgaactagtagaaattgcgtcttccagaggaagaaagacaaataaaaatattaagttaggaatttgtggcgaacacggtggtgatccaaagagtattgaattttgttctagaacaggactaaactatgtttcctgctctccatacagagtcccagtagcaagattggctgctgctcaagcagaattatctaaataat

SEQ ID NO: 258380 - DNA, 1594 bp, Unknown
  Bacterial polypeptide expressing nucleotide sequence isolated from the Sargasso Sea
aaagttacctgatggattaagtgaagaaattattgcttatgttcaaaatttagaaaacctatctcaaaaaaactttgcaaaaagcgaatctccacttttattatcagtcagatcaggtgggatgatttctatgcctggaatgatggattctattttaaatataggtctaaacgaccaaaatgttcaaagccttgcaaaagcttttaatgacgaacgttttgctctcgactcatacaggagattgattcaaatgtattccaacgttgtacttggtgtagagatggatagatttgaagcagttatagcaaacaaaaagcggatagataatgtaatttctgatgccgattttaatgctaaacagcttgattggataattaatgcatataaaaatactgtagaaagatttactaactctccatttccccaagatcctcatgaacaattgcttggagcgattgaggctgtgtttagtagttggcaaaataaaagagcaattacttatagaaagataaataatattccagactctttaggcaccggagcaacagtccaaacaatggtttttggtaatttaaatgacaaatctgcaacgggtgttgcttttactagaaatccttcgaatggcactaaagagttgtacggagaatacttaataaatgcacagggagaagatgttgtagcaggtattagaactcctcatccaattagaaatattggaacttctgaactagagtcattggagttaaaatttcctgatgcatttcaagagattaaaggaatagcatcaaaactcgaaaaccatttcaaagaagtacaagatatagagtttacaattgagaacgaaaaagtttatttactacaaactagaaaagctaaaagaactgctgaggcaagtataaaaattgcaattgaattacataaagagggaatcacaacaaaagaagagtctttaacaatggtagatgcaaacaacattacaaatgtgttacatcctcaatttgtggaatcacaagaaaaacttctttttagcaaggcacttaatgcttctccaggcgcagctgttggtgaaattgtttttgatgcggataaagcagaaaaagaggccaatagaggaagagatgtaattttagttcgagatgaaactagccctgaagatattcatggaatgcactcatctgttggaatacttacaacaaaaggaggaatgactagtcacgctgctgttgtcgcaaggggcatgggaaaaccgtgtgtagttggtgcggaaggcttaaacatcgatgttgaaaataaaacagttggcaacggtgaagacctgctttctgagggagatattatttctattgatggttcattgggcgaagtttatattggagaacttgaaactgaaccaccaaaaccatcagatgaattcaacacacttatggaatggtgtaatgaatataagaagttagcaataagagctaattccgaaacagtgatagacactaaaaaatcacttgagtttggtgccgagggtataggcttgtgtagaacagagcatatgttctttgaaggtgagagaattattcctatgcgtgagatgattatgtca

SEQ ID NO: 258381 - DNA, 766 bp, Unknown
  Bacterial polypeptide expressing nucleotide sequence isolated from the Sargasso Sea
gaccccccactacatgaattcatgactctgacagaagaacaacaaaatgaacttgcaaaaagtctaaatgttgagataggtgctgtgaaaaatagaatatcagccctgcatgaacttaatcccatgctcggacatcggggatgtaggctgggtatcgcatatcctgaaataaccgaaatgcaggttactgcaattctagaggcaaccgccgagttaacacaagcaggaaaatctgtcctacccgaaatcatgattccacttgtaggaacggtttcagaatatacagaccaagaaaaaattgtgcgcaaggttgcagatagaataaataacgagtataaaatagagcttaaatatttagtgggtacaatgattgaattaccacgagcttgcctgactgcagatgaaattgcagagcatgcagagtttttcagctttggaacaaatgaccttacacagactacgtttggttttagtcgtgatgatataggctcatttcttcctgaatatttagagcgaaatattcttcctgaagatccatttcaaagcttagatacgaatggggttggtaaattagtaacaatggctgttaaatatgggcgcggtgttaatgatagtctaaaaattggtatctgtggtgagcatggtggcgacccagcatcaatcctcttttgcaaagagaatggactagactatgttagttgctcaccatttagggtgccaattgctcgtctagctgcagcccaggctgaattaaataataactaat

SEQ ID NO: 258382 - DNA, 643 bp, Unknown
  Bacterial polypeptide expressing nucleotide sequence isolated from the Sargasso Sea
aatgttaggccataggggatgtagacttggaatttcatttccagaaatttatgagatgcagtgcgaagctatttttgaagcattagttgagttaaagaaagaaaaaacaaaagcagcattcgttgaaataatgatacctctagtttcaacagacacagaattaaaaatcttaagagctttagtaaaaagaatagctaaaaaaattgatttaaaaaataaaactaaattagactatatcgtaggcacaatgatagagttaccaagagctgctttacaagccaaatcaatttcaaaacacgcagatttctttagttttggaactaacgatttaacacaaactacttatggtattagccgtgatgactcgggtaaatttttaaatgattatattgataataaaattttcgaaattgatccatttgtaagcattgatcaaagtggagtaggtgaacttgttgaactagcttctgctagaggaagaaaagtaaataaaaaacttaaactaggaatttgcggcgaacatggcggagatccaaagagtattgagttttgctctagaacaggtttgaattatgtttcctgttcaccattcagagttcctgttgcaagattagctgctgctcaagctgaattaagaagataa

SEQ ID NO: 258383 - DNA, 639 bp, Unknown
  Bacterial polypeptide expressing nucleotide sequence isolated from the Sargasso Sea
aactccgggctgatcaactgctgagctgggcagatgaaatccgcaagctcggggtttgggccaatcccgactaccccagagacgcacaacgggcgagggaatacggagcggagggaatcggcctctgccgcaccgagcacatgttttttgaagcagaacggatgccgatcgtccaggccatgatcatggccaggcatgtcctggaacgtaaggaatccctggatcagctactcaccctgcagcgcgaagattttgcagggcttttccgggccatgtacggccatcccgtgatcatccgcctgatcgatcctccgctgcacgaattcctcccctcttatgatgaactggtccagggtttggcggatctcaaggtccggacccagcatttccataccctcagtgaaatcgacagtgctctgaccgaaatccgggtcaaacaggattacctggaacaggtggaagcattacgtgaattgaatccgatgcttggaacccgaggggtaagactcgggatccttatcccggaattgaacctagatgcaggtccgggcgatcttcgaagccgcctgcgtctgctccaaagacggggtcaacgtccagcccgaagtgatgattcccctgacctctcatgtcaatgaa

SEQ ID NO: 258384 - DNA, 514 bp, Unknown
  Bacterial polypeptide expressing nucleotide sequence isolated from the Sargasso Sea
tatgatccctttagtttcaacagaagctgaaataaaaattatgaaagatttagtcattagggttgcaaaaaaagttcaagatgagaataaaattaaacttgattttttagttggaacaatgattgaattgccaagagcagcaataaaggcaaaagatatcgctaaacacgctgaattttttagttttggaacaaatgatttaactcaaactacatttggaattagcagagatgacagtggtaaatttcttaatgattatatcgagaacaaaatttttgacattgatccttttgtatcaattgatgatggagtcggagacttaataaaaattgctactgataaaggcagaaaacaaaacaaaaaaattaaacttggaatttgtggtgagcatggtggagaccctaaaagtattgaattttgcgcaaaaactggattagattatgtatcttgttcaccttacagagttccagtggcaagattagctgcagcgcaagctcaaataagaaaaaattaa

SEQ ID NO: 258385 - DNA, 1205 bp, Unknown
  Bacterial polypeptide expressing nucleotide sequence isolated from the Sargasso Sea
gatgtcaaaatatttatttagttttggagacaagaaaacaaaaaaaataaaaaactctagaaatattctgggtggaaaaggatccaatctagctgaaatggccaggctaggtttgccagtccctccaggctttactatttcaacagaaatgtgcgaagttttttataataataaaaagaaattaacaccgaaaattttcggagaaattaaaaaagagttaaaaaaagttgagttgaaaactaaaaaaaagtttggtgataatacaaatcctttactagtctcagtaagatcaggttcaagagtatctatgcctgggatgatggatacaattcttaatttaggcctcaacgataagacagttgagggactatcaaaaaaaacctcaaacgaaagatttgctaaagatagttatagaagatttattcaaatgtatggaaatgtagtcttaggagtcgaaagtcatttatttgaagagttgattgataattataaattaacaaaaggcgtattattagatacagagctaaattcagaggactggaatggtttaattaaaaattttaaagaactaatattagataaaagtaagaaaaattttccccaagatgtttatgaacagttatttggtgctatcaaagccgtattcttgtcttgggaaagtaaacgggcaaaaacttatagaaaatttaatcacatacctggagactggggaacagctgtaaatgttcaatcaatggtatttggaaacatgggtgatgattgtgccactggagtaggattcacaaggaacccgtcaacaggagaaaacaaattttttggtgaatatctaattaatgcccaaggtgaagatgttgtggccgggagtagaaccccaaggtatataacgaaaaaagcaaaagaagattcaggggcaaaagaagattctatggaagaaataatgcctacagtttttaaagaacttaaagatgtttttattaaattagaaaaacattatcgagatatgcaggatattgagttcacagtagaaaataataaactttggatgctacaaactcgaagtgggaaacgaacagcaaaagcagcaattaaaattgctgttgatatggttaaagagaaattaatttcaaaaaaagaagctattttaagaatagatccaaacactctggatacacttttacatccaactttagatgaaaaagtaaaaa

SEQ ID NO: 258386 - DNA, 358 bp, Unknown
  Bacterial polypeptide expressing nucleotide sequence isolated from the Sargasso Sea
atctcaaaacatgctgacttcttcagttttggaacaaatgatttaacacaaacaacctttgggataagtcgagatgactcaggaaaatttttaaacgattatattgataataaaatttttgacgtagatccatttgtaagtattgatcaaaatggagtaggtgagcttgtagaaatagcttcatcaagaggcagaaaaacaaataagaatatcaagttaggtatttgtggtgaacatggcggagatccaaggagtattaaattttgttctagaacaggactaaactatgtttcctgttctccatttagagttcctgttgcaagacttgcagctgcacaagcagaattatctaaataat

SEQ ID NO: 258387 - DNA, 635 bp, Unknown
  Bacterial polypeptide expressing nucleotide sequence isolated from the Sargasso Sea
ggacatagaggatgtagattggctatttctttttcctgagatttatgaaatgcaatgtagggcaatttttgaagccctaattgaatgtaagaataagaaaataaaatcaattattcctgaaattatgattcctttagtttcaaccgaagctgaaatagaaataatgaaaaatttggttgataaagttgcagatcaagtaaaaacagaaaataaaacaaaaatagattacttagtaggtacaatgatcgaattaccgagagctgcgataaaagctaaagatatagctagacatgctgacttttttagttttggaacgaatgatttaacacaaactacatttggtattagcagagatgatagtggtaaatttttaaacgattatattgaaaataaaatatttgatgtcgatccatttatatcaatagatgatggtgtaggagatttaattgaaattgctacattaaaaggaagaaagcaaaataaaaaacttaaactaggaatttgtggagagcatggcggagatccaaaaagtatcaatttttgttcaagcacaggtcttaattacgtttcttgttcaccttatagggtacctgttgcaagacttgcagctgcacaagcacaattaaaaaaataat

SEQ ID NO: 258388 - DNA, 1359 bp, Unknown
  Bacterial polypeptide expressing nucleotide sequence isolated from the Sargasso Sea
ggaatgatggaaacaatattaaacatagggcttacatctaaaacaataccacatatgattgaagcaagcggaaacgagggttttgtatatgatagttatcgaagactaattatgatgtatgcagatgtagttatggagaaggccctgatgctaaataaatcttcccgaccaatcagagagttgatggaaaaagaacttgggtcaattaaaaaaactaaaggatataaaaatgattctaacatgaatgctaaagactggaaggctttgtcagaaaaatatttaaaaatagtaaaaagggagttcggggttcctttcccagacgatcactaccaacagctctacggtgctgttgctgcggtctttgaaagctggaacgggaaaagagcaaaagaatatagaagttttgaaaaaatttcctcttccatgggaacggctgttagcatacaggcaatggtgtttgggaatcttggaaaagattgtggtacgggcgttgcttttacaagaaacccctccaccggtgaaaatgttttttttggagagtggctaccaaacgcccaaggcgaagatgtcgttgcgggcatcagaacgcctcatccaataattgatggcaaaaaaagtaaaaagtctttgtctgttgcaatgccaaaagcctttgaagaattaaacgatgtaagaaaaaagctagaaaatcattttgatgacatgcaagatattgaatttacagttcaagaaaataagttgtggatgcttcaaaccagaacgggtaaaagaactggtatagccgccataaagattgcaaccgacatggtaaaagagcaacttataactagagaggttgctgtgggtagggttcacccgcttcaaatctatgaaagcctcttaaaaaatatcgttgctgaagacttaaacaacaatttgccggtttcttttggtctgcctgccggaccaggtgcgtcttgcggggctgctgtttttagcgcagaaaaagctgaggctcttgggaaaaagggtaaaaaggttatacttgtacgcgaagaaacctcccccgaagacatccacgggatgcactactctgaaggcattctaacctcaaggggcggcttaacaagccacgctgctttggttgcaagaggttggggcaaaagctgtattgttggatgccaagacctaaccattgataaaaaccttaggtttgcaaaaatagccgataaaaaaataaatgagggtgatcaaataacgcttaacgggtcttctggggatatttatcttggtgagctggagttatttcaaaatccgctggacaacactggaccgcttagcctgttgttgtcttgggcagacaaaataagaagactaaaa

SEQ ID NO: 258389 - DNA, 442 bp, Unknown
  Bacterial polypeptide expressing nucleotide sequence isolated from the Sargasso Sea
attgaattaaaaaataaaactaaattaaattacatcgttggaactatgatagagttacctagagctgctctacaagcaaaatctatctctaaacatgccgatttcttcagttttggaactaatgatttaactcaaactacatttggtgttagtcgtgatgactcgggtaaatttttaaatgattatatcgataataaaattttcgaaatcgatccatttgtaagtatagaccaaagtggagtaggtgagctagttgagttggcttcttctagaggaagaaaagttaacaaaaaacttaaactaggaatctgtggtgaacacggtggagatcctaaaagtattgagttttgttctagaacaggtttgaactatgtttcatgttcacctttcagagttccagtagccagattagcagctgctcaagctgaactaagaagataat

SEQ ID NO: 258390 - DNA, 668 bp, Unknown
  Bacterial polypeptide expressing nucleotide sequence isolated from the Sargasso Sea
aatgtttaacgaaacagacagaatcggactatttgttgaaatgattatggcagaatcacaagaagagcgaaacaaagtactcaaaaaattacaagaattacaaaaaagtgacttcattggaattttaaaggcaatggaaggatacaaagttacaattagattgttagatccaccattacacgaatttttaccaaatcctgaagaattgaaagataaaatgaataaagaaaatgacaaaagcaaaaaaactcaacgtgttttagatagagcacgtgaattagctgaaattaatccaatgatgggacatagaggagtaagagttgcaattacatatccagagatatacaaaatgcaaattaccgcggtatttgaagccgcagcagagcttgtaaagaaaaaagttaacgcaaaaccacagattatgattccacaagtaggaagtttagcagaattgaactatatcaaatcaatttatgatgatgtaaaaaaagagatggaacaaaaatacaagaaaaaattcaagataaactttggaaccatgctagaagttgttcgtgcatgtcttacatcagatgaattagcagatactgcagagtttttcagctttggaacaaatgatctaacacaggcagtatttagtttcagtagagaggatgcagaaggaaaat

SEQ ID NO: 258391 - DNA, 528 bp, Unknown
  Bacterial polypeptide expressing nucleotide sequence isolated from the Sargasso Sea
aaaaccccaaggtagaactaatgatacccctagtttcaaacttaaaagagtttttaaatcaaaaaaacattgttcttgaagcaaaaaataaagctcttggcaaaagcgggttaaaaattaatttaaagattggaacaatgattgaggttccgcgagcttgccttgttgctgaagaaattgctaaagaggctgacttttttagttttggtaccaacgatcttacccaaactacgtttggttttagcagagatgatacgggaaccttttttcctcactattttgatgaagaaattttgctagtagacccttttgaagaaattgatcgcaaaggggttgggaagcttatggagttggctataagggatgcaagggctgttaaaaataaaatttctataggtatatgcggggagcatggtggagagcctaaaagtatagagttttgtaaaatattgggtcttgattatgtcagctgttctccttatcgtgtacctattgcacgtctcgcagcggcgcaggttgaactatgaa

SEQ ID NO: 258392 - DNA, 1564 bp, Unknown
  Bacterial polypeptide expressing nucleotide sequence isolated from the Sargasso Sea
aatgaaatcagtttattattttggagatagagaagcagacggaaaagcagaaatgaaaaacctacttggtggcaagggtgctaatttggctgaaatgaccaatctgggtatacctgtacccccaggattgacaattaccacagaagtttgtacttattattatgataactcaaataactttcctgatgatcttgagaaccaagtgaaagatgcaattggtaaaatagaatctgttatgggaaaagcgtttggtgaccctaaacacccactgttattatctgttcgatcaggtgcacgaatgtcaatgccaggaatgatggaaacagttttaaatgtaggcttaacatctaaaacaatacctggtttaattgaaaaaacaaacaatactcgttttgtatatgatgcatatagaagattaattatgatgtattcagatgttgttatggagaaggctgccggtttagaaccaaaagaaggtttaggaattagacatcaattggaaacaatacttgatgactataaaacaaaaaatggttataaatctgatattgatctttcaggtgatgattggcaaaaagttgctaatgattttaaaataagaattaaagatgttcttggaagagaatttccagatgatcattatgaacaattatggggaggcataaaagctgttttccaaagctggaatggtaaaagagccattagctatagaaaaatcgagaatattcctgaagaatggggtacagcggttaatgtacaagcaatggtttttggtaatacaggagatcagtcagcaacaggggttgcttttacaagaaacccagcaaccgggcaaaataatttttatggcgaatggttacaaaatgcccaaggtgaggatgttgttgccggaattagaacgccccaaccattaaatcagtctacaaagacagaagagtctaaacacttagaatcacttgaagaatttttaccagatatatataataaactggatttgatccgtcagaaacttgagcaacactataatgatatgcaagatattgagtttacaattgaagagggtagactctggatgttgcaaacaagaacagggaaaagaacgggccctgcggctattaagatggcagtagatatggtagatgaaaaaatgatttcaaaaaaagatgcaataatgcgtgttaccccagatcaaattgatgaattattgcacccaaagcttcatatagaagacgaagaaaagaccactattttagcgcgtggattaccagcaggaccagggggaggagttggacaagttgttttttctgctgatgatgcagaaaaatggcataaagatggcaaatcaattattttagttagagaagaaacatcaccagaagatgttcatggaatgcatgtttctgaggcaatattaacagcaaaaggtggtatgacctctcatgctgctttggttgcaagaggatggggaaaatgttgtattgttggttgcgcatcattaaatatagactttgtaaaaaaagaaatgactgtagataatcaaacggtaaaagagggtgactggatt

SEQ ID NO: 258393 - DNA, 1162 bp, Unknown
  Bacterial polypeptide expressing nucleotide sequence isolated from the Sargasso Sea
ttgcaaaaattagtttattactttggtgacagacaaactgaaggcaaagctgaaatgagggacttattaggtggtaagggagctaatcttgctgagatgtgtaatctgggactgccagtgccacatggttttacaatttctacagaagtctgcacttattattataacaacaataaatcactacctgaaaaacttaaattagaaatcaaaaaaaatataaaaaaaatcgaaaattttactaaaatgaaatttggtagtaattctaatcctctcttgttatctgtgagatctggctcaagggcctctatgccaggtatgatggatacgattttgaatcttggccttaacaatgaagctgttaatggacttgctcaaagtacaaaaaatgaaagatttgcatttgacagttatagaaggtttattcaaatgtattcagacgttgtgcttgaaattgataattccttatttgaggatgcgctagaggacataaaaattgaaaatggatactctgaagataccgagcttacacctcaaaatttaaaagacctgacagaaacatataaaaaaatagttttaaatgaattaaatcgtccattcccccaagatccatctgagcaactatggggagcaataagtgcagttttctccagttggatgaataatcgtgcgattacatacagaaaattaaataatttaccttcaagttggggtactgctgtaaatattcaatccatggtatttggaaatatgggtgaagattgtgcaactggtgttgcttttacaaggaacccaaataatggggaaaatattttttatggcgaatatttaatcaacgctcaaggtgaagacgttgtagctggaattagaacaccatacccattgtcaaaagatacagaagatgatttcactactgataaaagtttagaagtaaaaatgccaaaaatctatgatgaacttttggaatgtcgatcagttttagaaaaacattacggtgatatgcaagacattgagtttaccgttcaagataataagctatttttgctccaaactagaaatggtaaaagaactgcagaggcagcaatcaaaattgctgttgatatggttcatgaaggaaaaattaatactaatgatgcattaataagagtagaaccagaaaaagttt

SEQ ID NO: 258394 - DNA, 946 bp, Unknown
  Bacterial polypeptide expressing nucleotide sequence isolated from the Sargasso Sea
aatgatatgcagggatattgagtttaccatccaagaaggaaaactgtggatgcttcaaacaagggttggaaaacgaaatgggtcagctgccataaaaatggctgttgatatgaaaaaggaaggaatgatagacaaaaagactgctcttttgcgaataaagccagaacaattagatgagcttcttcatcctatgctagatttagaatcagaaaaaagtgcccctctcttaggaaaaggacttcctgctggacctggtggagcatctggtagagtagtttttactgctgatgatgcagaacagtggcataagaatggtgaaaaagtaattttaattagagaagaaacatctccagaagatgttcacggcatgcacgctgctgaggcaattttaacggctaaaggaggcatgacatcccatgctgctcttgtagcacgcggatggggtaagtgttgtatagtgggatgtagtgagcttcagattgatgttaataaaaaagaagttgtaatcggagaaagtactatttctgagggcgactggatcacaatgaacggaaccgaaggaaaaatttattccggggctgttgaactaattgatgctgatcctgacactcatcctgaatataaagagttaatggtctgggcagatgaagtacgacaattgaaaattcgtaccaacgccgaaagtcccaacgatgcaaaacaggcaattaaatttggagctgaaggaattggtctatgcagaactgagcatatgtttttcgatgaagctagaatccttgctataaggaaaatgatttttgcagataatgaacaagaccgtagaaacgccgtaatggagttgttaccatatcaaaaagaagactttatgggcatcttaaaagcaatggagggaatgcctgttaccataagactattagacccacctcttcatgaatttatgagtctt

SEQ ID NO: 258395 - DNA, 640 bp, Unknown
  Bacterial polypeptide expressing nucleotide sequence isolated from the Sargasso Sea
atgttaggtcatcgaggatgtagacttggtatatcattcccagaaatttatgaaatgcaatgtagagctatttttgaggcattaattgattgcaagaaaaataacattaaatcaacaatgccagaaataatgataccactagtatcaaccgaggcggaaataaaaataatgaaagatctagtaatcagggtagcaagaaaagttcagaatgaaaataaaaccagcattcgttttttagttggcaccatgatagaattaccaagagctgcaataaaatcaaaagaaattgcaaaacatgcagaattttttagttttggtacaaatgatttaacacaaactacttttggcataagcagagatgatagtggaaagtttttaaatgattatattgaaaacaaaatttttgatattgatcctttcgtatcaattgatgagggagttggtgatttaataaaaattgctactgaaaaaggaagaaaacaaaataaaagaatcaaattagggatttgtggcgagcatggaggagatccaaagagcatccatttttgtgccaaaaccggattagattacgtttcatgttctccttatagagtcccgatagcaaaactggcagcagcacaggcagaattaaaaaaataaa

SEQ ID NO: 258396 - DNA, 1597 bp, Unknown
  Bacterial polypeptide expressing nucleotide sequence isolated from the Sargasso Sea
caggcggctgtgagggtcgctgtaacactagctgaagatggcatcatttcacgcaatgaagctattatgagagttgagccgagagcgataagtgaattactgcataggcaaattgatcctgaagctgaacgtgatgtcttggggagtggagttgcggcgagtccgggtgctgcaactggcaagatcgttttttcagccgaagctgcccagtcacatgcatctagggggattgactgtatcctggttcgtagagaaacctcgccagaggacgtgaggggaatgcacgcatcggttggggttgtcacagagcgaggtggaataaccagtcatgcagcagtaattggaagaggtataggtttgccgtgtgtggtaggcgtaaaggatattcgatttcaagttaagaggaaaagtctaatttgcagtaatggccgtcaattaaaagaaggcgatgaaataactattgatggaacaagcggtgacatattgtttggttctcctaaaatggttgaggcggccttagatgatgcttttcaaacacttcttgagtggactgatgaagtttcagacatgacagttcgcgctaatgctgatactcctcaagatgctttaactgcgaggaaatttaatgctcaggggattggcctttgcagaacagagcacatgttttttgaaagtgatcgtcttaatgtgatgcgggaaatgatcttttcgaaatctgccgaggatcggcggttggtcttggaaagattgttgcccatgcaacgtaaagattttattgaattatttgaaatcatgaaggatttacctgtgtgtataaggcttttcgatccgccacttcatgaatttcttccctccgacagagaaggtatgcatgatttggcagaagctttgggtttaccgctatcagacgtcgtaagaagagtcgaaacaatgggtgaatacaatccaatgctaggtatgcggggggtacgcttaggcgttacagtgccagaaatctacgaaatgcaggccagggcaatttttgaggctatagttcaagtgagtaaggaaggtatttcagtggttccggaaataatgatcccacttgtaagtgctaaacgcgaagtagaactagttaagaaaagagttgcctccgtagcatcgcaagtaggattagaaacatctgcagaggtaaattataaactgggtgtgatggtggaaaccccacgtgcagctctaagagcaagtgatattgctatgaactcagagttcttgagctttggaacaaacgacttaacacaaatggcttatggcctttcaagagatgatgcgggaaagtttatgtctcaatacgttcaacagggtgtttttcaagaggatccctttcatatcttagaccctgagggtgttggagagcttgtaaaattgggtgcagatagagcaagatctatcaagccaaatatcactctttcaatctgtggtgagcacggaggtaatccagaatcaatagctttctctcatcaattaggcttccattatgtttcttgttcaccatatcgtgttccggtagcaaaacttgcagccgcgcaggttgccatttcaactcaaattagttagg

SEQ ID NO: 258397 - DNA, 844 bp, Unknown
  Bacterial polypeptide expressing nucleotide sequence isolated from the Sargasso Sea
aatggaactcctaccctaccaaaaagaagattttatgggtattctacaagcaatggaaggtaagccagtaaccattaggcttctagatccgcctcttcatgagtttatgacccttagtgaagaacaacaacaagaactggcaaataacttaggtgttgatgtgtccattgtaaaaaatagaatatcaatgcttcacgaactaaatcctatgcttggacaccgtggttgtcgattgggcatcgcatatcctgaaataactgaaatgcaggtgactgctattttagaggcaactgctgagttaacacaaaaaggtaaatcgatcatgcctgaaattatgattccacttgtaggaacagtttcagagtatgttgatcaagaaaagatcgtacgtacggtcgcaaaaacaacaaatgataaatacggaatagagcttaactatctagtgggaacaatgatcgaattgcctagagcatgtttaactgcagacgagattgcaaagcatgcagagttttttagctttggaacaaatgaccttacacaaacaacatttggatttagtcgagatgatataggctcttttcttccagactatctcgaaagaaatattcttcctgaagacccatttcaaagtctagatactaatggagttggtaagttagtatcaatggcggtagaatatggcagaggcgttaatacaaatttgaaaataggaatctgtggtgagcatggtggtgatccagcgtccattctcttttgcaaagaaaatggattggattatgttagctgctctccatttagggttccaatcgctcgactagctgcagctcaggctgaattaagataa

SEQ ID NO: 258398 - DNA, 800 bp, Unknown
  Bacterial polypeptide expressing nucleotide sequence isolated from the Sargasso Sea
aggccttccagttacaattagattacttgacccacctctacatgaatttttgcctaataatgagaaagatatgatttcgctttctacaacaacgggaataagtttagagaaaattaaagaacagtcactcaaattgcatgaggccaatccgatgcttggtcacagagggtgtaggctagctgtaagttaccccgaaatatgtgaaatgcaatcaaaggcaatatttgaagcggctgttaatattcaaaaaaagataaatcaaaaagttaatgtagaaataatgataccacttgcgtcaacttcaaaagaaattgatgtatgcaaagaaataatagataaagtagcctctacaatcacaataaaaatgaaagaaaaaattgattatttagttggtactatgattgaattgcctagagcagcgctctgtgcagatcaattggcttcatctgctgacttttttagttttggaacaaatgacttaacacaaacaacttttggtataagtagagatgatataggaaattttttaaataagtatctcgaagatggtatttttcaaaatgacccttttatttcaatagataaagaggctgttggttcattgttaaaaattggaattaaaaagggaaaagaaacaaacaaattcttaaaattaggtgtttgtggtgaacatggtggtgacccaaattcaatagatttttttgaggaaataggattagattatatctctgcttcaccttttcggatacctatagcaaggctagctgcagcacaatctataataaaaaagaaaaattaga

SEQ ID NO: 258399 - DNA, 634 bp, Unknown
  Bacterial polypeptide expressing nucleotide sequence isolated from the Sargasso Sea
ggttgtagacttggcatttcatttcctgaaatttatgagatgcaatgtagagcgatatttgaggctcttgcagacttaaaaaaaaacaaacaaaaatttgcttttcccgagataatgattcctttagtttctaccgaagccgagattaaaataatgaaagatttagtaatcaatactgcaagaaaagttcaaaaagaaaataaaacaaaaattgaatttcttgtgggtacaatgattgagttacctagagcagcaattaaggctgatgatattgcgaaacatgctgaattctttagttttggcaccaatgatttaacacaaacaacttttggaataagtagagacgatagcggtaaatttttaaatgattatatagataataagatttttactattgatccgtttgtatccattgatgacggagtgaaagatttagtcgaaatagcggtttctaaaggaaaaaaacaaaataaaaaaattaagttaggtatatgtggtgaacatggtggtgatccaaagagtattaaattttgttcaaaagctgggcttaattatgtttcctgttcaccttacagagttccaatagctagattagcagcggcacaggctgagctaacgaaaaataaaaattaaa

SEQ ID NO: 258400 - DNA, 785 bp, Unknown
  Bacterial polypeptide expressing nucleotide sequence isolated from the Sargasso Sea
tagtggaaaagtagttttttcatctgatgaagcggaaaggcttaatggtatgatgcaaaacactattttggttagagtagaaacatcgccagaagatataaatggtatgcatgcagcaaaaggaattcttacctcaagagggggaatgactagtcatgctgccgtagttgcaagaggaatgggaagaccatgtgtctccggttcaagtgaaattgatattgattatgagaaaaaattattcaaaacaaaaaatttagaaattaaagaaggagatattataacgcttgatggatcaactggaaggataattttaggtgaagtaaaaactataaaaccagaaatttcaggagatttttctaaagttatgaattgggcagactcctatagaaagttaaaaattagaacaaactcagaaactccattggatagtaaaactgcaagagaatttggggcggaaggaataggtttatgtagaacagaacatatgttttttgacgaggaaagaattttatcagttcgggagatgattttgtcaaaatctaaagaagataggaataaagcactagataagcttttacctcatcaaaaaaatgattttatagaaatttttaaaataatgaatggtcttcctgtaacagtaagattattagatccacctttacatgagtttcttccaaaaaatgaaaatgagattgaaatagttgcaaaatcactaaatttgagtgttaaagaggtaggttcaagaattaatgaacttcacgaacaaaatccaatgttaggtcaca

SEQ ID NO: 258401 - DNA, 916 bp, Unknown
  Bacterial polypeptide expressing nucleotide sequence isolated from the Sargasso Sea
atcaataaactattctgaaaaaactatttctagcaaagaaaaaaccttagaagaaggagatttaatatcattagatggctcagcgggagaaatatacataggggaacttaaacttgagccacctaaattatctgaagagttcaatactttaatggattggtgtaatgaattcaaaagacttgaaattagagcaaatgcggagacaactattgatacagccaaagcacttgaatttggagcagaaggcattggtctgtgcaggacagaacatatgttttttgaaggagaaagaattcttcctatgagagaaatgataatgtccgatagtaaacaaggaagaaaaagagcattaaaaaaattaataaactatcaaatatctgatttcgagtctcttttcaaattacttaatgaaaaaccaataacagtgagattgttagatcctccaatgcatgaatttcttcctaagagtgatttagagatttctcagcttgcaaatgagataggagtatcacccatgcatgttaacgagattcttatgagactctcagaaagcaaccctatgttaggacataggggagtcaggttaggtttaagttatccagaaatttacgagatgcaagtagaggcaatatttagggcagttcatttagtttttaaaaatgataattttaaagtcactccagaagtaatgatacctttagtgatgaacagtaatgagttgtctgaaatgaaagacattctgaaaaagaagattaaaaaaattgagaaagaactgaattataactttgactacacaataggaactatgattgaactaccaagtgctgcccttagctcttcagaaattgcaaaagatgctgatttcttttcatttggaacaaatgatttaactcaaactactttaggtcttttcaga

SEQ ID NO: 258402 - DNA, 845 bp, Unknown
  Bacterial polypeptide expressing nucleotide sequence isolated from the Sargasso Sea
tatgaatggtacaaaaggttatctatataatgcaaaacttgagttagttcctgcaaatccagatagtcattctgaatataaaattttaatgagttgggcagatgaatttagaaaacttaaaatccgaacaaatgctgaaagtccatcagatgcagctcaagcaattaactttggtgctgaagggatcggattatgtagaaccgaacacatgttttttgatgaaaagagaattattgcaatgcggaaaatgatcctagcggataataatgaagataaaagatctgcaataatggaacttttgccctttcaaaaagatgattttaaaggaatcttaaaagcaatggaaggtaaacctgtaacaattagattattagaccctccccttcatgagtttataactttagataataagcaaatatctgaacttgcattaaaattaaatatagaagagagatctatttcgaaacgtatttcaagtttacatgaattaaaccccatgctgggacatagaggctgcagattaggaatcgccttcccagacataacagaaatgcaagcaagagcgatattagaagcctctgttgaattaattaatgaaggagtatctgtttttcctgaaataatgattcctcttgttggaactgttactgaatatattgatcaagctaaaattgtcaaaaaaacagctaacgaaattgaaaaggaatcaggaaaaacacttaaatatctgattgggacaatgattgaattaccaagagcttgcttaacggcaaatgaaatagctcaacacgctgagttttttagttttggcacaaatgacttaactcagactacatacggtttta

SEQ ID NO: 258403 - DNA, 997 bp, Unknown
  Bacterial polypeptide expressing nucleotide sequence isolated from the Sargasso Sea
agaggaagaatgacaagtcatgcagctgttgtgccaagaggtatgggtagaccatgtgtatcaggatcaagtgaaattgatataagctatgaaaataaatcttttaaaacttcttcaatggtgattaaagaaggagacgtaatcactattgatggctcaactggaaaaattattgctggaagtgtttcaactgtgaaacctgaaatatctggtgatttttccaagttaatgtcttgggcggataactttagaaaattaaaagtaagaacaaattctgagacaccaaaagacaccaaaacagcaaaagattttggtgcagagggtattggactatgcagaactgaacatatgttttttgatgaagaaagaattttgtctgtaagagaaatgatattatctaaaacaaaagaagacagagcaatagcattacaaaaactgttaccgcatcaaagaaaagattttatagatatttttaaaatcatgagtggactacctgtcacagtcagattgttggacccacccttacatgaatttttaccacgtacagaaaaggaaattaatgaggttgctattatagttaatcttccagttaaagagattgagtcaagaattgaagagctccatgagcaaaatcctatgttaggtcatagaggatgtcgtctgggaatatcttttcctgaaatttatgaaatgcaatgcaaagcaatatttgaggctttggtttaccttaaaaaaaataaaattaaatctgcatttcctgaaataatgatacctttagtatctacagaggctgagattaaaataatgaaagaattagtaattagaactgctagtcaagttcaacaagaaaataaattaaaaatagaatttttagtaggaacgatgattgaattacctagagcggcaataaaagcaaaggagatcgctaagcacgcagaattctttagttttgggacaaatgatttaactcagactactttttggatcagtagagatg

SEQ ID NO: 258404 - DNA, 1012 bp, Unknown
  Bacterial polypeptide expressing nucleotide sequence isolated from the Sargasso Sea
aattacaaacttacaaagggtgttttgttagacactgatttagatgaaaatgactgggatggactaattgaagattttaaaagaacagttaaggaaaaagcaaatagagattttccacaagatgttcatgaacagttgttgggagcaatctgcgcagtattcttgtcttgggacagtaagagggcgaaagtctatagaaaattaaatcacatacctgcagagtggggtacagcagttaatgttcaatcaatggtttttggaaacatgggagacgactgtgcaactggtgttgtttttacaagaaatccatcagacggtgaaaatgaaatttatggagaatatttaatcaatgcacaaggagaggatgttgtggctggaacaagaactccacaatatataactaaaaaagctagacaaaatgctaaagttaaagcttcatcaatggaagaatctatgcctaaagtttataaacaactttataaaatactaaaaaaactagaaaagcattacaaagatatgcaggatgtagagtttacagttgaaaataaaaagctgtggatgcttcaaacacgttctggaaaaagaactgcaaaatctgcagttaaaattgcagttgatatggttaaagaaaaattaatttcaaaaaaagaggccgtgttaagaattgatccacactcacttgatacccttcttcatccaacgctagatgaaaaaagctcaataaatgtaattgcaaatggcttgcctgcttcaccgggtgctgccagtggtaaagttgtatttacatctgaagaagcagaaaggctaacatcaatgatgcaggacacaatattagttagagtagaaacctctccagaagatatacaaggaatgcatgctgctaaaggaattctaacagcaagaggtgggatgacaagtcatgcagctgttgtggcaagaggaatgggaaggccttgtgtttctggatcgagtgaaattgatattaattacaaaaataagtcatttaaaacat

SEQ ID NO: 258405 - DNA, 828 bp, Unknown
  Bacterial polypeptide expressing nucleotide sequence isolated from the Sargasso Sea
attgtttggtgcaataagtgctgtatttttatcttgggaaagtaatagagcgaaaatttacagaaaattaaatcacataccatctgaatggggaacagcagtaaacgttcagtctatggtttttggaaatatgggtaacgattgtgccactggagttgtatttacaagaaatccatcagatggatccaataatgtttatggagaatatttaattaacgctcagggtgaggacgtagtagcaggcactaggacgcctcaatatataaccaaaagagctcgtaaagcagctaatgcaaaagatctatctatggaagagtcgatgtcgaatgtttatagacaattaaaacaaattttaaagaaacttgaaaatcattataaagatatgcaagatgtagagtttacagttgaaaatggaaagttgtggatattacaaacaagatcaggcaaaagaacatccaaatcagctgtaaaaattgctgtagacatggtaaaggaaaaactaatctcaaaaaaacaagctatattaagaatagatccaaactctttagatacattgcttcacccaactttagatgaaaaaagtgaaattaaagtaatagctaatggtttgccagcatctcctggtgctgcaagtggaaaagttgtattcacctcagaagaagctgaaagattaaatgacatgatgcaagatacaattttagtaagaatagaaacgtcacctgaagatataaagggtatgcatgccgcaaaaggtattttaacagctagaggtggaatgacaagtcatgcagcagttgtcgctagaggaatgggcagaccatgtgtgtc

SEQ ID NO: 258406 - DNA, 929 bp, Unknown
  Bacterial polypeptide expressing nucleotide sequence isolated from the Sargasso Sea
agaacatatgttctttgatgaaacaagaattttagcaatgagaaagatgatattagcagataatgatgaagatagaagagatgctgtcatgggacttctcccgttccagaaagaagactttaaaggcactttagaagctatggaagggaagccggtaacgattagattacttgacccgcctttgcatgagttcatcaccttagatgatgaacaaatcaaagaactagctaacaatattggtatcgatcgttctattgttaatcaacgtatttctagtcttcacgaacttaatccaatgttagggcaccgtggatgtagacttggaatcgcataccctgttattacagaaatgcaagcacgtgcaatcttagaggcagcagctgagcttactaacgatggtttaaatgttttaccagaaataatgattccattagttgggacggttacagaatacatcgaccaggaaaaaatcgtacgaaaagttgcctcagaagtcaaaagtaaatatgacatgaagttaaattatttagttggtacaatgatcgagctccctagagcatgtttaactgctgatgagattgcagaacatgcagagttttttagctttgggacaaatgatctcactcaaaccacatatggttttagtagagatgatattggttcatttttgccagaatatctggatcgtaacattctacctggagacccatttcaaagcttagatgttaaaggtgtcggtaaattagtatctatggcagttaaatatggtagagatatcaatccttcgattaaaataggtatttgtggcgagcacggaggagaccctagctcaattcatttttgtaaaaataatggattagattatgtaagttgctctccatatagagttcccatagcaaggttatcagccgcgcaagctgaattatagt

SEQ ID NO: 258407 - DNA, 847 bp, Unknown
  Bacterial polypeptide expressing nucleotide sequence isolated from the Sargasso Sea
gtaaaagaacaattactaggagcagtaaatgcagtatttttatcttgggatagtcaaagagcaaaaacatatagaaaattaaatcaaattcctgatcattggggaactgcagtaaacgttcaagcaatggttttcggtaacatgggtaacaattgttcaacaggtgttgcttttactagaaacccatcaactggcgataattctttttttggtgaatttttaattaatgcccaaggtgaagatgttgtagcaggaacgcgaacacctcaatctataacaaagaaagccaaacaagagtctggttcgaaagatccatcaatggaagaggcaatgcctaaagtttataaagagctggaaaaagtattcctaaaattagaaaatcattacaaagatatgcaggacatcgagtttacagttgaaaataataagctttggatgttgcaaactagatcaggaaaaagaacagctaaagcttcaattaaaattgcagtggatatggttaaagaaaaattgatatctaaaaaagaagcaattaaaagaattgatccaaaaactttagacactctattacacccaactctagacgataaagtcaaaaaagaaattattgcatctggtttacctgcatctcctggtgcagcaagtggaaaagttgttttcactgcagatgaagcagaaaaattaaatgggatgatgcaagatacaatattagtgaggttagaaacttcaccagaagatatacatggaatgcatgcagctaaaggaattcttacagctagaggaggtatgactagtcatgctgcggttgtagcacgaggaatgggaagaccatgtgtctcgggctcaa

SEQ ID NO: 258408 - DNA, 853 bp, Unknown
  Bacterial polypeptide expressing nucleotide sequence isolated from the Sargasso Sea
aaggttgtatttacttctgatgaagcagaaagacttaatagtattatgcaaaatacaatattagtaagaattgaaacttctccagaagacattcatggcatgcatgctgctaaaggaattttaactgccagaggtggaatgaccagtcatgctgcggtggtcgccagaggcatgggtagaccatgtgtttcgggctcaagtgaaatagaaattgattataaaaacaaaatattcaaaacaaaatatggtgaaataaaagaaggagatctaataacaattgatggatctacaggcagaataattcttggagaagttaaaacagtaaaaccagaaatttctggagacttttcaaaattaatgaagtgggctgacagttttagaaaactaaaagtaagaacaaactctgaaactcctttagatagcaaagtagctagagaatttggcgctgaaggaataggattatgtagaacggaacatatgttttttgatgaagaaagaattttatcagtaagggaaatgatattatcaaaaacatctgaagatcgtgaaaatgcattgaaaaaattattaccacatcaaaaaaaagattttattgaaatatttaaaataatgagtggtttaccagttacagttagacttttagatcctccattacatgaatttttaccaaaaaatgaaaatgagataattgaagtttctaaatctttaaatattccaattcaagatacaagaggaagaataaatgagttacatgaacataatccaatgttaggtcatagaggttgtagattaggcatctcttttccagaaatatacgaaatgcaatgcaaagcgatatttgaggctttggtcg

SEQ ID NO: 258409 - DNA, 933 bp, Unknown
  Bacterial polypeptide expressing nucleotide sequence isolated from the Sargasso Sea
aacattcaaaagctggggacataattattaaagagggagatattattactatagatgtgggaagtggaaaagtaatgaaagggttagttcctactgttcaaccggaaatttccggatacttctctacaataatgaaatgggctgatgaatttagaaaattaaaagtaagaacaaacgccgaaacagaggtagatagtaaaactgctagagaatttggtgcagagggaatcggtttatgcagaactgagcatatgttctttgatgaggagagaattctatccgtaagacaaatgattttgtctaaatcaaaagatgacagaaatagtgccctagataaacttctaccccaccaaaaagaggactttaaaaaaatatttaaagttatgtcaggtttaccggttacagtaagattattagatccaccactccatgagtttttaccaaaagctgataaagacatagaggaagtagcaagatccttaaatttatcagcgaaagaggttaaagacagaatagcagaacttcatgaagaaaatcctatgcttggacatagaggatgtagacttggaatttctttcccagagatttacgagatgcaatgcagagcaatatttgaagctataatcgagttaaaaaaacaaaaagtaaaagcagcttttgtagaaataatgataccattggtttcaactgagtctgaattaaaaattttaagagctttagtaaataaaatagctagagaaatagaaaaagaaaataaattaaaacttgagtatatggttggtaccatgattgaattgccgcgtgctgctttacaagctagatctatttcaaaacatgctgatttttttagctttggaaccaacgatttaactcaaacgactttaggaattagccgagatgattcaggaaaatttttaaacgaattatattgat

SEQ ID NO: 258410 - DNA, 739 bp, Unknown
  Bacterial polypeptide expressing nucleotide sequence isolated from the Sargasso Sea
atgtggaaatgattgttctactggtgttgtttttactagaaatccttctgatggatcaaaggatatttatggagagtatcttattaatgctcaaggtgaagatgttgttgctggaactagaactccacaatacataactaaaaaagctaaaaaagaagcgaaagttaaagaggcatcaatggaagagtctatgcctaaaatttattctgaattgaataaaattcttaagaaattagaaaaacattataaagatatgcaagatgtagagtttactgttgaaaataacaaactttggattctacaaactcgtgcaggtaaaagaacatcaaagtctgctgtaaagatcgcagttgatatggttaaagaaaagttaatttctaaaaacgaagctgttttgagaatagatcctaattttttagatacattattacatccgactttagatgaaaaaagttctattaaagtaattgcaaatggacttccagcatcccctggtgccgcaagtggaaaagtagtttttacttcagaagaggctgaaagattaaatgatatgatgcaagatacaattttagttagattagaaacatctccagaagatattcaaggcatgcatgcagcaaaaggaattttaacagctagaggtggaatgacgagtcatgcagcagttgttgctagaggaatgggaagaccctgtgtttcaggctctagtgaaattgatataaattatgatcaaaaaatc

SEQ ID NO: 258411 - DNA, 818 bp, Unknown
  Bacterial polypeptide expressing nucleotide sequence isolated from the Sargasso Sea
tattgaaatatttaagataatgaaaggtttaccagtaacagtaaggttacttgatccacctctacatgaatttttgccaaaaagtaataatgagattaatgatgttgcagtttcattaaatattcctgttaatgaacttaaagttagaatatcagaacttcatgaacaaaatcccatgctaggtcatagaggttgtagattagcaatttcattccccgaaatttatgaaatgcaatgtaaagcaatttttgaagctttggtagaatgtaaaaaaaaaaaaattcaatcaactatgcctgaaattatgataccgctagtttcaacagaggctgaaataaaaataatgaaagatttagtaataagagttgcaaaaaaagtccaagacgaaaataaaataaaaattgattttttggtaggtacaatgattgaattaccaagggcagcaattaaagcgaaagatattgctaaacatgctgaattttttagttttggtactaatgatttaactcaaactacatttggaattagtagagatgatagtggaaaatttcttaatgattatatcgagaataaaatctttgatattgatccttttatatcaatagatgatggagttggagatttaataaaaattgcaacagataacggaagaaaacaaaataaaaaaattaaacttgggatttgcggagaacatggtggagatcctaagagtatagaattttgtgctaatactggactagattatgtttcttgttcaccctatagggtgccagttgcaaggttagcagcggctcaagctcaactaaaaaaaaattaaa

SEQ ID NO: 258412 - DNA, 858 bp, Unknown
  Bacterial polypeptide expressing nucleotide sequence isolated from the Sargasso Sea
tatggttaaggaaaaattaatttcaaaaaaacaagcaattctaagaatcgatcctaactccttagacacattgttacacccgactttagatgaaaaaagttctttagaaataattgctaatggtttgcctgcttcacctggagctgcttgtgggaaggtggtattcacatctgaagaagccgagagacttagtaatatgatgcaagatgtaatattagttagagtagaaacctccccagaagatattcaaggtatgcacgctgccaaagggatattaactgctagaggaggaatgacaagtcatgcagctgttgttgcaagaggaatgggaagaccatgtgtttcaggctcgagtgaaattgatattgattatgagaaaaaaaccttcaaaactgcttcaaaagaaattaaagaaggcgatataatcacaattgatggatcttctggaaaaattatttggggaagtgtaccaacagtaaaacctgaaatttcaggggacttctcaaaattaatgagctgggctgataatattagaaaacttaaagtaagaactaatgctgaaactccattagatacaaaagttgcaagagattttggagcagagggaatcggtttatgtagaacggagcacatgttttttgatgaagaaagaattatttctgtgcgagagatgatactttctaaaactaaagaagatagattaaaagcactcatgaaacttttgccacatcaaaaaaaagattttgtaaaaatattcaagattatgcatggattaccagtgactgtacgcttacttgatcccccgttacatgagtttttaccaaaatctgaaaaagaaatttcagaagttgcggaagt

SEQ ID NO: 258413 - DNA, 663 bp, Unknown
  Bacterial polypeptide expressing nucleotide sequence isolated from the Sargasso Sea
gaaaaataatttcaaaaaaagaagctatattaagaattaatcctaattctttagattctcttttgcatccaactttagatgaaaatagtaaaattaatgtaattgcaaaaggattgccagcatcaccaggagcagcaagtggaaaagtagtatttacttctgaagaagctgaaagattaaacagtatgatgcaagatactattttagtaagagtagaaacttctcccgaagacattcatggaatgcatgcggcaaaaggaattcttacttcaagaggaggaatgacaagtcatgccgctgttgtcgctagaggcatgggaagaccttgtgtttcaggttctagcgaaatagatattgattatgaaaaaaaaatatttaaaacaaatcatcatcaaataaaagaaggtgatataattactatagacggttcctcaggaagagtaattattggtgaagtaaaaactttaaaaccagaaatttccggtgatttttctagagtaatgatgtgggctgatagttacagaaagttaaaaattagaacaaattctgaaacaccattggatagtaaaacagcaaggcaatttggagcagaaggaattggattgtgtaggacagaacatatgttttttgatgaaggaagaattcttcagttagagaaatgat

SEQ ID NO: 258414 - DNA, 835 bp, Unknown
  Bacterial polypeptide expressing nucleotide sequence isolated from the Sargasso Sea
aatggaagaggtcatgccaaaagtttatacccaacttaaaaagattctcaaacttttagaaagacattataaagacatgcaagatgtagaattcacagtcgaaaattctaaactttggatgcttcaaacaagatctggaaagaggactgcaaaatcagctgtaaaaatagctgtagacatggttaaagaaaaattaataacaaaaaaagaggcagtcttaagagtcgaccccaacactttagacacacttcttcatccgacattagatgaaacaaaagaggttaaaactattgccaagggtttacccgcatctccaggtgcaacaagtggaaaggttgttttttcatctgatgaagcagaaagattaaatgggatgatgcaagatacaatacttgtgagagtagaaacttcaccagaggatatccatggtatgcatgctgcaaaaggtattttaactgctcgtggaggaatgaccagtcatgctgctgttgttgcaagaggtatgggaagaccatgtgtttcaggctcaagcgaaatagatatcaattacgaccaaaaaatctttcgaacttcctcaaatgtagaagtaaaagagggagatataattacaattgatggatctacaggaagagttattttagataaagttccaactttaaagccagagatttcaggcgatttttcaaaattaatgagttgggctgatagttacagaaaattaaaagtaagaacaaattccgaaacaccccttgatacaaaaacagcaagagaatttggagctgaaggtattggtctttgtaggactgagcatatgttttttgacgaggatagaatt

SEQ ID NO: 258415 - DNA, 759 bp, Unknown
  Bacterial polypeptide expressing nucleotide sequence isolated from the Sargasso Sea
aatggtatttggaaatatgggacaagattgtgcgactggggtagtttttacaagaaatccatctacaggtaaaaatgaaatttatggagaatatttaattaatgcacaaggagaagatgttgttgcgggcacaagaacaccacaacatataacaaaaaaagctagagttgaagctagaaaaaaagaaagatcaatggaagagactatgcccactgtttttaaaaaattatataaaattttaaagaatttagaaaaacattataaggatatgcaagatgttgagtttacagttgaaaaaaataagctttggatattgcaaacaagatctggaaaaagaacagccaaatctgctgtaaagattgcagttgatatggttaaaaaaagattaatttcaaaaaaaattgctatcacaagaatagacccacattctctagatacactcttacaccctactctagatgaaagaagtaaaattaatgttattgcaaaaggtttgccagcctctcctggagcggcaagtggaaaagtagttttttcatctgatgaagcagaaagacttaatgaaatgatgcaggatacaattttggtaagagtagaaacttcaccagaagatatacatggaatgcacgcagctaaaggaatacttacttcaagaggtggaatgacaagccatgcagcggtagttgcaagagggatgggaagaccgtgtgtttcaggctcaagtgaaattaatattaattatgataaaaaaatttttaa

SEQ ID NO: 258416 - DNA, 901 bp, Unknown
  Bacterial polypeptide expressing nucleotide sequence isolated from the Sargasso Sea
tgtttctggatcaagtgagatagaaatagactacgaaaataaactatttaaaacaaaatatattgaagttaatgagggagatttgataacaattgacggatcaacaggtagaattattcttggagaggtaaaaactattaagccagaaatttcaggagagttttcaaatttaatgaaatgggctgatggttttagaaaattaaaagtaagaaccaattcggaaacacctttagatagcaaaatagcaagagaatttggtgctgagggaataggtctgtgcagaacagaacatatgttttttgacgaagagcgaattttatctgttagagagatgatactttccaaactcaaggaagatagagcaaaagcactaaataaattactaccatatcaaagaaaagattttatagaaatttttaaaataatgaatggaatgccagttacagtcagattgttagaccctcctttgcacgaatttttacctaaaagtgaaagtgaaatcaacattgttgcaaaatctctaaatctaacaactaaagatgtgctagcaagaatttcagaactccacgaacaaaatccaatgttaggtcatcggggatgtagattgggaatttcatttcctgatatttatgaaatgcaaactagagcaatatttgaagcattagtagaatgtaaaaagaaaaaaattaaatcaacaatgccagagataatgattccacttgtttcaacagaagctgaaataaaaataatgaaagatttagtaattaaaattgcaagagaggtgcaaaacgaaaataaaacaaaaataaagtttttaattggtacaatgattgaacttccaagagccgcaattaaagcaaaagatatagcaaaacatgcagaattttttagttttggaaac

SEQ ID NO: 258417 - DNA, 787 bp, Unknown
  Bacterial polypeptide expressing nucleotide sequence isolated from the Sargasso Sea
gcctgtaacagttagacttttagatcctccattacatgagtttttacccaaaaccgataaagatatggaagaagtagctaggtcgttaaatttaggcgctaaagaaataaaaaatagagtagcagaattacacgaactaaatcctatgttagggcacagaggatgcagacttggtatttcttttccagaaatttacgaaatgcaatgcagagcaatttttactgcattaatagaatgtaaaaaagaaaaggtacaatccatcatacccgagataatgatacctttagtttcaaccgaagatgagcttggaataatgagaaaattagttaaccaagtagctgaaaaaattcaaaaagagcacaaagtaaaaattaattattttgttggtactatgatcgagttgccacgggcagcattaagagcggcgcccatatcaaaatatgctgacttctttagttttggaactaatgatttaacacaaactacattcggtattagccgtgacgactcaggaaaatttttaaatgattacatagatcataaaatttttgaagacgatccttttgttagcatcgacaaagatggtgttggggaactagttaaaattgcttctcaaagaggaaaaaaacagaataaaaaacttaaattagggatttgtggtgaacacggaggagatcctagaagcatagagttctgttctaaagcaggattgaattatgtgtcttgctcacccttcagagttccaattgcaagattagcagcggcacaagctgaactcaggagataa

SEQ ID NO: 258418 - DNA, 802 bp, Unknown
  Bacterial polypeptide expressing nucleotide sequence isolated from the Sargasso Sea
gggctaccagcatcaccaggagcagcgagtggtaaagttgtttttactgcagatgaagcagaaaaactaaatggtatgatgcaagatacgatattggttagattagaaacttcaccagaagacattcatggtatgcatgctgctaaaggaattttgacggcaagaggtggcatgacaagtcatgcagctgttgttgcaagagggatgggaaggccgtgcgtatctggttcgagtgaaatcacaattgattatgaactaaaacaatttaaagcaggtgacgagacaattaaagaaggtgatgttattacaatcgatggtggtagtggaaaagtaatgaaaggtttagttccaacagttcagccagaaatttcaggttatttttcaacaattatgaaatgggccgatgaatttagaaaacttaaagtaagaacgaatgctgaaaccgaggctgacagtaaaaccgctcgagagtttggggcagagggtatcggcttatgtcggacagaacacatgttttttgatgaagaaagaattttatcagttagacaaatgattttatctaaatcaagagaagatagagatagtgctctagggaaacttttacctcatcaaaaagaagattttaaaaaaatttttaaagtcatgtcaggtttacccgttacggtgagattattagatccaccgcttcatgaatttttacctaaagcagaaaaagacattgaagaagttgcaagatcattaaatttatcagctaaagaggttaaagaaagaatagccgaacttcacgaagaaaatcctatgt

SEQ ID NO: 258419 - DNA, 818 bp, Unknown
  Bacterial polypeptide expressing nucleotide sequence isolated from the Sargasso Sea
attaatttcaaagaaagaagctgttttaagaatagatcctaattcattagatagtcttttgcacccaactttagacgaaacaagcaaaataaatgtaatagcaaaaggtttgcctgcttcacctggggcagcaagtggcaaagtagttttttcatcagatgaagcggaaagattaaatggaatgatgcaaaatactattttagttagaattgagacatcgccagaagatattcatggcatgcatgcagcaaagggaattcttacagctagaggaggtatgactagccacgcagcagttgtagcaaggggcatgggaagaccatgtgtatctggttcaagtgaaatagatatagattatgaaaaaaaattatttaaaacaaaagtatacgaagtcaaagaaggagatataattacacttgatggctctacaggaagaataattttaggtgaagttaaaacagtaaaacctgagatatcaggtgatttttcaaagattatgggatgggctgactcatttagagaattaaaaattagaaccaattctgaaaccccattagatagtaagatagctagagaatttggagctgaaggaataggcttgtgtagaacagaacatatgttttttgaagaagaaagaattttatcagtaaggcaaatgatactatcaaaatctaaagaagatagaaatgtagctttatccaaacttttgccacatcaaaaaaaagattttatagaaattttcaaaataatgggtgggcttcctgtaacagtgagacttttagacccaccattgcacgaatttttgcctaagaatgaaa

SEQ ID NO: 258420 - DNA, 1006 bp, Unknown
  Bacterial polypeptide expressing nucleotide sequence isolated from the Sargasso Sea
aatgccgagactccgcaagatacgaaaatggcgataaactttggagccgagggtattggtttatgtagaactgaacatatgttttttgatgacgaaagaatcctttcagtaagacaaatgatcttatcaaaaaatctagatgacaggaaaaccgcattagataaattacttcctcatcaaaaaaaagattttaaagaaatttttaaaataatgaaaggtttgccagtaacagttagacttttagatcctcctttacatgaatttttaccgaaatcggacaaagacatggaagaagtagcaaggtcactaaacttaggtgtgaaagaaataaagaatagagtagaagaattacacgaactaaatccaatgcttggacatagaggatgcagactgggcatatcttttccagagatctatgagatgcaatgcagggcaattttttccgcattaatagaatgtaaaaaagaaaagatcgattctataatacctgagatcatgatacctttggtttcaactgaagatgagcttggattaatgaggaaattagttaacaaagtagctgatgaactacaggcagaacataaaataaaaatcaactattttgttggtactatgattgagttaccaagggccgcattaagagcagctcatatttcaaaatatgctgatttctttagctttggaactaatgatttaacacaaactacatttggaatcagccgagatgactcaggaaaattcttaaatgattacatagatcataaaatttttgaagaagatccatttgttagtattgacaaagatggagtaggagaacttgttaaaattgctaccgaaagaggtaaaaaacagaataaaaaacttaaattaggtatttgcggagagcacggtggagatcctagaagtatagagttttgttctaaagcaggattaaattatgtatcctgttctccttttagagttccaatcgcaagattagctgccgctcaagccgagcttaggagat

SEQ ID NO: 258421 - DNA, 955 bp, Unknown
  Bacterial polypeptide expressing nucleotide sequence isolated from the Sargasso Sea
gtctgctgttaaaattgcagttgaaatggttaaagaaaaattaatttcaaaaaaagatgctattatgaggattgatcctcattctttagatacacttttgcatcctacattagatgaaaaaagcaatatagaagttattgcaaaaggtttaccagcttctcctggtgctgcaactggaaaagtagttttttcatctgacgaagctgaaagacttaatgaaatgatgcaggatacaattttagtaagagtggaaacttcaccagaagatatacatggaatgcatgcagcaaaaggaatattaacctcaagaggcggcatgacaagccacgcagctgttgttgcaagaggaatgggaagaccatgtgtttcaggttcaagcgaaattgatattaattatgataataaaagttttaaaacaaaattaatggaaataaaagaaggtgatctaattacaattgatggatctacaggaagaattattaagggagaagttccaaaaataaaacctgaaatttcaggagatttttcaaaattaatgagttgggcagataattatagaaaattaaaggttagaacaaattctgaaacttcattagatacaaagactgcgagagattttggagcagaaggaataggtttatgtagaacagaacatatgttttttgatgaagagagaattttgtctgtaagacaaatgattctttcaaaaacaaaagaagacagagataaagctttagcaaaacttttacctcatcaaaaaaatgattttatcgagatatttaaaattatgagaaatttacctgtaactgttagattgttagatccacctttacatgagtttcttccaaggacagaaaaagaaataaacgaagtagcagagaaattaaaactatcaacaaaagaagttgcatctagaataacagaattacatgagcaaaatcctatgctaggacac

SEQ ID NO: 258422 - DNA, 757 bp, Unknown
  Bacterial polypeptide expressing nucleotide sequence isolated from the Sargasso Sea
agattaaataacatgatgcaaaatacaattttagtaagggttgaaacttcaccggaagatataaacggtatgcatgcatcaaaagggattttaacctcaagaggaggaatgactagtcatgctgccgtagttgccagaggtatgggtagaccatgcgtttctggatcgagtgaaattaatattgattacaataataaaacttttaaaactaaagagctagaggttaaagctggagaaattatcacaattgacggatctacaggaagaataatacttggcgaagttaaaacaataaaaccagaagtttcaggagacttttctacaataatgagatggtcagataaatttcgtaaacttaagatcagaactaactcagaaacacccattgatagcaaaaccgcgagagaattcggggcagaaggtattggattatgtagaactgaacatatgttttttgatgaagaaagaattttatcagtaagacaaatgatattgtcaaaatctaaagaagatagaagtaaagcattggcaaaacttttgccacatcaaaaaaaagattttacagaaattttttcaataatgaacggattacctgtaactgttcgacttttagatccacctttacacgagtttttacctaataatgaaaaagaaattttggatgtatcaaaagtgcttaatttacctacaaaagaagtaaaggcaagaattgacgaacttcatgaacataatccaatgcttggacatagaggttgta

SEQ ID NO: 258423 - DNA, 777 bp, Unknown
  Bacterial polypeptide expressing nucleotide sequence isolated from the Sargasso Sea
ttaattaatgcgcaaggtgaagatgttgtagcgggtacaaggactcctcaatacataacaaaaaaagctaggagagatgctaaagtaaaagaattatcaatggaagaatctatgcctaaagtctttaaagaacttcaaaaaattttgaaaagattagagattcattacaaagatatgcaagacgtagagtttacagttgaaaatagtaaattatggatgcttcaaacaagatcaggaaaaagaacagcaaaatcagcggtcaagattgcagttgatatggttaaagaaaaattaatttctaaaaaggaagctgtattaagaattgacccaaactccttagatacacttttgcatcctactttggatgaaaaaagttcaattaatgtaatagcaaatggattgccagcatcaccaggtgcagccagtggtaaagttgtatttacatcagaagaggctgaaagattaaccgcaatgatgcaagacacaattttggtcagagtagagacctctccagaagatatacaaggtatgcatgctgctaaaggaattttaacggctagaggaggaatgacaagtcatgcagctgttgttgcaagaggtatgggtagaccatgtgtatcaggatcaagtgaaattgatataaactatgaaaatagatcttttaaaacttcttcaatggagattaaagaaggagacgtaatcactattgatggctcaactggaagaattattgctggaagtgtttcaactgtgaagcctgaaatatctggtgacttt

SEQ ID NO: 258424 - DNA, 781 bp, Unknown
  Bacterial polypeptide expressing nucleotide sequence isolated from the Sargasso Sea
attatgaagggtttgcctgtgacagtcagacttttagatccaccattgcatgaattccttcctaaaactaacaaagacatggaagaggttgcaagatctcttaattcaggagttaaagaaataaagaatagagttgcagaattacacgaactaaatcctatgttgggtcacagaggatgtagacttggtatttcttttccagaaatctatgaaatgcaatgcagggcaatttttagtgcattaatagagtgtaaaaaagaaaagatacaatccataatacccgaaataatgattcctttagtttcaacagaggatgagcttggaataataagaaaattagttaaccgagtagccgatgagcttcaaaaagaacacaaagtaaaaattaattattttgttggtaccatgatcgagttgccaagggcagcattaagagcagccccaatatcaaaatacgcagatttttttagttttggaacaaacgatttaacacaaactacatttggtattagtcgtgatgattcaggaaaatttttaaacgattacttagaacataagatttttgataccgatccatttgttagtattgacagggatggtgtaggggaattggttaaaattgcttctcaaagaggaaaaaaacagaataaaaaacttaaactaggaatttgcggtgaacatggtggagatcctaaaagtatagaattttgttctaaagcgggattgaactatgtttcctgttcaccttttagagttccaatcgcaagactagcagctgcac

SEQ ID NO: 258425 - DNA, 881 bp, Unknown
  Bacterial polypeptide expressing nucleotide sequence isolated from the Sargasso Sea
attggatgaaaaaagtaatattaatgttatagcaaaaggtttaccagcgtctccaggagcgactagtggtaaagtggttttttcatcaaatgaagctgaaagattaaatggaatgatgcaaaacactatattggttaggattgagacatcgcctgaggatataaatggaatgcatgcagcgaaaggaattcttacttctagaggagggatgacaagccatgccgcagtagttgccagagggatgggaagaccatgtgtttctggttcaagtgaaatagaaataaattatgaaaaaaaactatttaaaacaaagggatatgaaattaaagaaggtgacataataactatagatggatcaactggaagaataattttaggtgaagttaaaactgtaaaaccagaaatatcaggtgatttttcaaaattaatgagctgggctgatagttttagaaaattaaaaattagaacaaattcagaaacgcccactgatacaaaaaatgctagagaatttggagcagaaggcattggattgtgtagaactgaacatatgttttttgaagaagaaagaattctttatgtaagacaaatgatattatcaaaatcaaaggctgatagagatgaagcgctaaccaagttacttccacatcaaaaaaatgattttattaaaatatttaaaataatgagtggtttgccggtaacagttagactattagatccaccattacatgagtttttgccaaagaatgaaaatgaaataaaagatattgcaaaatctttagaattatcgattaaagaaattgaaattagaattagagaattacatgaacaaaatccaatgttagggcacaggggttgtagattgggaatttcttttcccgaaa

SEQ ID NO: 258426 - DNA, 913 bp, Unknown
  Bacterial polypeptide expressing nucleotide sequence isolated from the Sargasso Sea
tatgcaagaatcgatgcccaagatttttagacaattaaagaaaattttaaaacatttagaaaaacattataaagatatgcaagatgtagagtttacggttgaaaataaaaaactttggatattgcagacaagatctggaaaaagaacagctaaatctgctgttaagattgcagtcgatatggttaaagaaaaattaatttcaaaaaaagacgctgtaaaaagaatagatcctcattcattagattcacttttacatccaacactggacgaaaaaagtcaaataaacgtaatcgcaaaaggtttgcctgcttctcctggcgcagctacaggaaaagttgttttctcatccgatgaagctgaaagacttaatgaaatgatgcaagatacaattttagtcagagtagaaacctctccagaagatatacatggaatgcatgcagcaaaagggatattaacttcaagaggagggatgacaagccatgcagcagttgttgcaagaggaatggggaggccatgtgtttcaggttcaagcgaaattgacatcaactatgatagaaagatttttaaaactacatctgttgaaataaaagaaggggatttagttacaattgatggatctacaggaagaattattcaaggagaagttccaaaagtaaaacctgaaatttcaggagacttttcaaaacttatgagttgggcagataattttagaaaattaaaagtaagaacgaattctgaaactcctttagatacaaaaactgcaagagattttggagcagaaggaatagggctgtgcagaacagagcacatgttttttgatgaagaaagaattttgtcagtcagagaaatgatactttcaaaaactacagaagatagaaataaagcattaaataagcttctaccacatcagaaa

SEQ ID NO: 258427 - DNA, 891 bp, Unknown
  Bacterial polypeptide expressing nucleotide sequence isolated from the Sargasso Sea
tccacaatatataactagcaaagctagacaaaatgcaaaagtaaaagctccatcaatggaggagtcgatgcctaaagtttatagacaactttataagatcctaaaaaaattagaaaaacattataaagatatgcaagatgtagagtttacagttgaaaataaaaagctgtggatgcttcaaacacgttctggaaagagaactgcaaaatctgcagttaaaattgcagttgatatggttaaagagaaattaatctcaaaaaaagaggccgtgttaagaattgatcctaactcactggatacacttctacatccaactctagatgaaaatagttcaataaatgtaattgcaaatggcttgcctgcttcaccaggtgctgcaagtggtaaagttgtattcacatctgaggaagcagagaggctaacatcaatgatgcaggacacaatattggttagagtagaaacctctcctgaggatatacaaggaatgcatgcggctaaaggaatattaactgcaagaggtgggatgacaagtcatgcggctgttgtagcaagaggaatgggaagaccttgtgtttctggatcaagtgaaattgatatcaattatgaaaataagtcatttaaaacatcatcaatagaaattaaagagggagatattataacaatagacggatcttcaggaagaataataaaaggtagtgttgctactgtaaagccagaaatatctggtgatttttcaaaattaatgtcttgggcagataattatagaaaactaaatataagaacaaattctgaaaccccaaaagatacaaaaactgcaaaagattttggtgctgaaggtattgggctttgtagaactgagcatatgttttttgatgaagagagaattttatc

SEQ ID NO: 258428 - DNA, 718 bp, Unknown
  Bacterial polypeptide expressing nucleotide sequence isolated from the Sargasso Sea
tttagaaaattaaaaatcagaacaaattcagaaactcctaaagatacaaaaacagctaaagattttggagcagaaggtataggcctctgcagaacagagcacatgttttttgatgaagaaagaattttatctgttagagaaatgattttgtcaaaaactaaagaagatagagcaaaagcacttgataaacttttacctcaccaaaagaaagattttatagaaattttcaaaattatgagtggtttaccagttaatgttagactgttggacccacctttgcatgaatttttacctagaacagataaagaaattaatgaggtagcaaatgtagtcaacctttcagtaaaggaggtagagtctagaatagacgagttacatgagcaaaatccgatgttaggtcataggggttgtagacttggtatttcttatccagagatttacgaaatgcaatgtagagctatatttgaagcattagctgaacttaaaaaaaataaaataaaatcagcttttccagaaataatgattcctctagtttctacagaggcagaaatagaaataatgaaaaggttagtaataaacattgctaaagaagtccaaaaacaaaaaaaaataaaaattgaatttttagttggaacaatgattgaacttccaagagcagcaataaaagcaaaagaaatcgcaaaacatgcagaattttttagttttggaactaacgatt

SEQ ID NO: 258429 - DNA, 910 bp, Unknown
  Bacterial polypeptide expressing nucleotide sequence isolated from the Sargasso Sea
ttagtaagagtagaaacttctcctgaagatattcatggaatgcatgctgcaaaaggaatactaacagccagaggaggaatgacgagccatgctgcagttgtggctagaggaatgggtcgtccatgcgtttcaggctcaagtgagattgaagtagattatgaaaataagatttttaaaacaaaaaataatattgttaaagagggagatataattactattgatggatcaacaggcagaataattgttggagaagtaaaaacagtaaaaccagaaatttctggtgatttttctaaattaatgaattgggcggataaggttagaaaattaagagtaagaacaaattcagaaacaccaattgatagcaaagttgcaagagattttggagccgaaggtattgggctatgtagaacagaacatatgttttttgatgaagagagaatattatcagttagacaaatgatactctcaaaatctaaagaagatagaggaattgcgctagacaagctgcttccacatcaaaaaaatgactttttagaaatatttaaaattatgcaaggattgccagttacagtaagattattagatcctcctttgcatgaatttttaccgaaacgtgaaaaagatatagaagacgtagcaaattcattaaaattaacaaaaaatgaaatagaagtaagaattaatgagctacatgaacaaaatcctatgctcggccatagaggatgtagactcggaatttcttttccagaaatttatgagatgcaatgtcgtgcaatattcgaagctcttatagaattaaaaaaaaagaatataaaatctgcttttcctgaaataatgattcctttagtttcaacagaagctgaaataaaaattatgaaagatcttgtaattagtacagcaagtaaagttc

SEQ ID NO: 258430 - DNA, 853 bp, Unknown
  Bacterial polypeptide expressing nucleotide sequence isolated from the Sargasso Sea
agaacagaacatatgttttttgatgaagaaagaattttatcagtaagagaaatgattttatcgaaaaccaaagaggatagatcgattgcattaaaaaaacttttacctcatcaaaaaaaggattttatagaaatatttaaaattatgagtggattaccagttacagtaagattattagatccaccacttcatgaatttttacctagaacggataaagagattaatgaagttgctaatgttgttaatcttccagtaaaggaagtagtatctagaattgatgaattacacgaacagaatcctatgttgggtcatagaggatgtaggctaggaatatcttttcctgaaatatatgaaatgcaatgtagagctatatttgaagctttagcagaacttaaaaaagaaaaaattaaatctgcttttccagaaattatgattccattagtttctactgaagcagaaataaaaattatgaaagaattagtaattagaattgtaggtgaagttcaaagagagcataaattaaaaattgaatttatggttggtacaatgattgaacttcctagagctgcaattaaagctaaagacatagcaaaacatgctgaattttttagttttggaactaacgatttaactcaaactacatttggaataagtagagatgacagtggaaaatttttaaacgattatttagataataaaattttttcaattgatccatttatttcgatcgatgagggagttggagatttaataaaaatagcagtagaaaagggtaaaagccaaaataaaaatataaaacttggaatttgtggagaacatggaggagaccccaagagtatttcatttgtcaaaa

SEQ ID NO: 258431 - DNA, 832 bp, Unknown
  Bacterial polypeptide expressing nucleotide sequence isolated from the Sargasso Sea
aaagaagcaatattaagaatagatcctaatactattgatacccttttacatccaactttagataataaagttaaaaaagagataatagcttctggattgcctgcctcacccggtgcagcaagtggtaaagtagtttttaccgccgatgaggctgaaaaactaaatagcatgatgcaggatacaattttagtaagacttgaaacttcaccagaagatatacatggaatgcatgctgctaaaggaattttaacagctagaggtggaatgacaagtcatgctgcagtagttgctaggggtatgggtcgcccatgtgtatctggctcaagcgaaattacgatcgattatgaaaataaacaatttaaagctggagatgaaattattaaagaaggggacgttattacaatagacggaggaagcggcaaagtaatgaaaggtctagtgccaactgtaaaaccagaaatttcaggatatttttctactataatgaaatgggctgatgaatttagaaaattaaaaattagaactaatgctgaaactgagcaagatagtaaaacagctagagattttggagcagagggcataggtctttgtagaacggagcatatgttttttgatgaagatagaattttatctgtaagacaaatgattctttcaaaatcaaatgaagatagaaatcatgctttgtcaaaacttttgccttatcagaaagatgactttaagaaaatttttaaagtaatgtctggattgccagtcacagtaagattattagatccacctctacatgaatttttacctaaggctgaaaaagatattgatgaagtcgctagatctc

SEQ ID NO: 258432 - DNA, 824 bp, Unknown
  Bacterial polypeptide expressing nucleotide sequence isolated from the Sargasso Sea
taatcaaataccttctgattgggggacggctgttaatgtccaaatgatggtatttggaaatatgggacaagattgtgctaccggagtagtttttaccagaaacccctcaacaggtagagatgaaatttatggagaatatttaattaatgcgcaaggagaagatgttgttgctggtacaagaacccctcaatatgtatcaaaaaaagctagaattaaagctgggattaaagaaaactcaatggaagaaacaatgcccacagtttttaatcaactatacaggattttaaagaatttagaaaaacactataaagatatgcaagatgttgagtttacagttgaaaaaaataaactttggatattacaaacaagatctggaaaaagaacagctaaatctgctgtcaagattgcagttgatatggttaaagaaaaattaatttcaaaaaaaactgctatcacaagaatagacccaaactctctagacacacttttgcacccaaccttagatgaaagaagtaaaataaatgtaattgcaaaaggtttgccagcttcacctggtgcagcaagtggaaaagtagttttttcatctgatgaagcagaaagacttaatgaaatgatgcaagatacaattttagttagagtagaaacgtcaccagaggatatacacggaatgcattcagcaaaaggaatattgacttcaagaggcggaatgacaagtcacgcagctgtagttgcgaggggaatgggaagaccatgcgtttcaggctcaagtgaaattgatattaattatgataaaaaaatttttaaaaccaaatctatagaggtaa

SEQ ID NO: 258433 - DNA, 865 bp, Unknown
  Bacterial polypeptide expressing nucleotide sequence isolated from the Sargasso Sea
aaactaaataatatgatgcaagatacaattttagtaagattagaaacttctccagaagacatccacggaatgcatgcagcaaagggtattttgaccgctagaggaggtatgactagccatgcagctgtagttgctagaggtatgggtcgaccatgtgtttcgggttcaagtgaaataacgatcgattacgaaaataaacaatttaaagcaggtaatgagattataaaagaaggtgacataataacaattgatggaggaagtggtaaagttatgaaaggtttagttccaacagttcaaccagaaatttcaggatacttctcaactattatgaggtgggcagatgagtatagaaaattaaaaattagaaccaatgcagaaactgaacaagatagtaatacagctaaagaatttggagcagagggaatagggctatgcagaactgagcatatgttttttgacgaggatagaattttatcagtaagacaaatgatactctctaaatcgcatgaagatcgaaatcatgcattatctaaacttttaccttatcaaaaagacgattttaaaaaaatttttaacgtaatgtctggattgccagttactgttagacttttagatcctccattacatgaatttttaccaaaatcagataaggacatagatgaagtcgcaagatctcttaatttggcatcaagagaagttaaagagagaatagatgaattacatgaagaaaatcccatgcttggacatagaggttgtagacttggtatatcttttcctcaaatttatgaaatgcaatgtaaagctatatttgaggcaatttcagatttaaaaaaagaaaaaataaagtcagcaatagtgagataat

SEQ ID NO: 258434 - DNA, 774 bp, Unknown
  Bacterial polypeptide expressing nucleotide sequence isolated from the Sargasso Sea
gatgcaagatacaattttggtaagagtagagacatctccagaagatatacaaggaatgcatgctgctaaaggaattttgacagctagaggaggaatgacaagtcatgcagctgttgtggctagaggaatgggtagaccgtgtgtatcaggatcaagtgaaattgatataaattatgaaaataaatcttttaaaacttcatcaatggagattaaagaaggagatataattactatagatggctcgactggaagaattattgctggaagcgtttcaactgtgaaaccagaaattactggtgatttttcgaagttaatgtcttgggccgacagttttagaaaattaaaagtaagaacaaattctgagaccccaaaagatactaaaatagcaaaagactttggtgcggagggtattggattatgcagaacggaacatatgttctttgatgaagaaaggatcttatctgtaagagaaatgatattatcaaaaacaaaagaagatagagcaatcgcattagaaaaactgttaccacatcaaagaaaagattttaatgatatttttaaaattatgagtggattgccagtcactgtaagattgctagacccaccgttacatgaatttttaccacgtactgaaaaggaaattaatgaagttgctaatacagttaatcttccagttaaggaggttttgtcacgaattgaagagcttcacgagcaaaatccaatgttaggtcatagaggttgtaggctaggtatatcttttcctgaaatttatga

SEQ ID NO: 258435 - DNA, 859 bp, Unknown
  Bacterial polypeptide expressing nucleotide sequence isolated from the Sargasso Sea
aaaggattgccagcttcacctgggagcagcaagcggaaaggtggtatttacatctgaagaggcagtaagactaaatgaaatgatgcaagacacaattttagtaagaattgaaacatcccctgaagatattcatggcatgcattctgcgaagggaatactgactgctagaggaggaatgacaagtcatgctgctgtggttgcaagaggtatgggaagaccatgcgtttctggttcaagtgatatagagattgattatgcaaataaaatttttaaatcaaaagatcaagaagtaagagaaggagatataataaccattgatggatctagtggaaaaataattttaggcaaagtcaaaactgtaaaaccagaaatttcaggaaattttttaaaaataatgaaatggtctgatgaaataagaaaattaaaaattagagccaatgccgaaactccatcagactcaaagacagcaagagattttggagctgaaggaattgggctttgtagaacagaacatatgttttttgaccaagatagaattctttcagttagagaaatgatactatctaaaacgaaaaaagatagaaacaaagctcttttaaaaatacttcccttacagaaaaatgattttaccgaaatatttaaaattatgaatggtctaccagtaaccgttagacttctggatcctccattgcatgagtttttgccaaaaaatgaaaaagaaattaacaatgtgtcaatttcattaaaaatgcccattcaggaagtaaaaaatagagttgcagaattgcatgagcaaaaccccatgttaggtcatagaggatgtaggcttgggatttcctttccggaaatatatgaaatg

SEQ ID NO: 258436 - DNA, 934 bp, Unknown
  Bacterial polypeptide expressing nucleotide sequence isolated from the Sargasso Sea
aatgatgcattaataagggtagacccagaaagtttaaatcaacttctccatcctactttggataataacgcaaagtctgatttcctgattagaggaatgccagcatcgccaggtgcagtatctggtaaaattgtccttgaatcagaagatgctgtcaaactatctgctgccggtgagagtgttatacttgtaagattagaaactagtccagaagatattgcaggtatgcatgctgcaagtggaatccttacttcaagaggcggaatgacaagccatgctgctgttgttgctagagggatgggaagagcatgtataacaggagcgaatgaattaagaatagattttgaaaataaaattatattttttggtgagaaaaaaatacagtctggaacagaaattacaatcgatggttcttcaggtaatgtttatctcggccaagtcccaacagtataccctgaaatgtctaaaagttttgtaactttgatgaagtgggctgataaattgagaagattaaaagttaggacaaatgctgaaacaccaaatgatgctaaaacagcaattaagtttggtgcagaaggtattggtttgtgcagaactgagcatatgttttttgataaaaatagaattaatgttatgaggcaaatgatcttagcagaagatagtaatgaacggaaaaatgcacttgataagcttttaccaatgcaaagaaaagattttgaggacctttttttaataatgaaaggccttccagtaacaattagattacttgacccacctctacatgaatttctgcctaataatgagaaagatatgatttcgctttcttcaacaacaggaataagtttagagaaaattaaagaacagtctctcaaattgcatgaggccaatccaatgcttggtcacagagggtgtaggctggctgtaagtacccaga

SEQ ID NO: 258437 - DNA, 820 bp, Unknown
  Bacterial polypeptide expressing nucleotide sequence isolated from the Sargasso Sea
ttgccagcatctcctgggagctgcaagtggaaaagttgttttttcctcagatgaagttcaaagacttaatgaaatgatgcaaaatacaattttagtaagagtcgaaacttctccagaagatattcatggtatgcatgcagctaaaggtattttaacagcaagaggtggaatgacaagccacgctgcggtagttgcaagaggaatgggacgtccgtgtgtttctggttcaagcgaaatagaaattgattatgaaaataacttatttaaagcaaacggtaatgaaattaaagaaggagatttgataaccattgatggttcaactggtagaataattttaggagaagtaaaaactgttaaacctgaaatttcaggagatttttctaagttgatgagttgggcagatagttttagaaaattaaaaatcagaacaaattctgaaacacctttggacagcaaaatagcaagggattttggagctgaaggaattggtttatgtagaactgaacacatgttctttgatgaagatagaattttgtcagttagagaaatgatactttcaaaatcaaaagaagaccgagctaaagctttagaaaaattattaccacatcaaaaaaatgattttatagaaatatttaaaattatgaatggacttccagttacagtaagacttttagatccaccactacatgaatttttacctaaaagtgcttcagaaattaatgatatttcaaaatctttaaatttatcaattaaagaaattgaaaacagaatcgaagaacaacacgaacaaaatcccatgttaggtcatagaggatgtaga

SEQ ID NO: 258438 - DNA, 834 bp, Unknown
  Bacterial polypeptide expressing nucleotide sequence isolated from the Sargasso Sea
atcaaaaagaagactttaaaaaaatattcaaagtcatgtcaggtttgcctgtaacagtaagattattagatccaccacttcatgaatttttaccaaaagctgacaaagatgtagaggaagtcgcaagatctttaaatttatcagcaaaagaagtaaaagatagaattacagaactccatgaggaaaaccctatgcttggtcataggggatgcagacttggtatttcttttccagagatttatgaaatgcaatgtagggcaatttttgaagctataattgaattaaaaaaacaaaaagtaaaagcagcttttgtagaaataatgataccgctggtttcaaccgattctgaattaaaaattttaagagctttagttaataaaattgcaaaagaaaaagaaaatgaaaataaattaaaacttgaatatatggttggtactatgattgaattaccacgtgctgccttacaagcgaagtctatttcaaaacatgctgatttttttagttttggaactaatgatttaacgcaaacgacttttgggataagcagggatgactcaggaaaattttttaacgactatattgataataaaatttttgatgtagatccatttgtaagtattgatcaaaatggagtaggagaactagtagaaatagcttcttcaagaggtagaaaaacaaataaaaatataaagttaggaatttgtggtgaacacggtggtgatccaaaaagtattgagttttgctctagaacaggtcttaactatgtttcctgctctccattcagagttccagtggcaagattagctgctgctcaagcagaattatctaaataat

SEQ ID NO: 258439 - DNA, 763 bp, Unknown
  Bacterial polypeptide expressing nucleotide sequence isolated from the Sargasso Sea
cccaccattacatgaatttttaccacgtacagaaaaggaaattaatgaggttgcaaatatagttaatcttccagttaaagaggttgagtcaagaattgaagagcttcatgagcaaaatcctatgttaggtcatagaggctgtcgtctaggaatatcttttcctgaaatttatgagatgcaatgtaaagcaatatttgaagctctagcgcaccttaagaaaagtaaaattaaatctgcatttcccgaaataatgatacctttggtttctacagagactgagataaaaattatgaaagatttagtaattagaacagcaagccaggttcaaaaagagcataagttgaaaatagaatttttagttggtacaatgattgaattgcctagagctgcaataaaagcaaaagaaattgcaaagcacgctgaattttttagttttggaacaaatgatttaactcaaacaacttttgggattagtagagatgatagtggaaaatttctaaatgattatttagaaaataaaatattttcagttgatccatttgtttcaatagatgaaggagtttcagatttagttagaatagcagttgaaaaaggactaaaacaaaacaaaaagcttaaattgggtatttgtggagaacacggaggggaccccaatagtatctctttttgcgctaaagtagggctaaattatgtttcatgttctccttacagagttccagttgcaaggcttgcagctgctcaagcagaattaaaaattaaatga

SEQ ID NO: 258440 - DNA, 838 bp, Unknown
  Bacterial polypeptide expressing nucleotide sequence isolated from the Sargasso Sea
gcaattaaattttggagcagagggaataggattgtgcagaacagagcatatgttttttgatgaaacaagaattcttgctatgagaaaaatgatcctttctgataatgatgatgatcgacgagaagctgtaatgggtcttcttcctttccaaaaagaagatttcaaagagactcttaaggcaatggcggggaaaccagtaaccatcagattactggacccaccgcttcacgagttcattactttagaagatgatcaaatcaatgacctcgccaaaaatattggtatagatagttcaatagttagccagcgaatagcaagtcttcatgagttaaacccaatgctagggcaccgtggatgtagacttggaattgcatatcctgaaataacggagatgcaagtcagtgcaatattagaagcaactgctgaattaattaaagatggcttaaatgtttttccagagataatgatacctttagttgggactgtaacagaatatattgatcaagaaaaaattgttcgagaagtagctaagaaagtagaagagaaatatagtattaaactaaactacttagttggaacaatgattgaattaccaagagcatgcctaactgcagatgaaattgcaaaacatgcagaattttttagctttgggacaaatgatttaacacaaactacttatgggtttagtagagatgatattggctcgtttttaccacaatacttagatcgtaatatacttccaggtgatcctttccaaagtttagatgtaaagggggttggtaaactagtaactatggcagttgaatacggtagaaaagtaaatccttcaattaaaata

SEQ ID NO: 258441 - DNA, 870 bp, Unknown
  Bacterial polypeptide expressing nucleotide sequence isolated from the Sargasso Sea
tatggtttttggaaatatgggcaatgattgtgccactggtgtattatttacaagaaatccatctaatgggaaaaatgaaatttatggggaatatttaattaatgctcaaggagaggatgttgttgctggtacaagaacaccaaactacattactaaaaaagctcataaagactcttcattgaaaggaaaatcaatggaagagttcatgcccaaaacatttagtatgctaaaaaagatattaaatatcttggaaaaaaaatataaagatatgcaagatgtagaatttacgattgaaaataataagctttggatattacaaacaagatctggaaaaagaactgcgaaatctgccgttaaaatcgcagttgatatggttaaacaaaaactaatttcaaaaaaagaagctgtattaagggttgatcctaattctttggatactcttttacatcctacgctcaatgagaacagtaatattgatgtaatagccaaaggtttgccagcatctccaggtgctgctagtggtaaagttgttttttcatcagaagaagctgaaagattaaataatatgatgcaaaacactatattagtaagaattgaaacttctccagaagatattcatggaatgcatgctgcgaaaggaatattgacttcaagaggaggtatgactagtcatgctgctgtagtagcgagaggcatgggaagaccctgtgtatctggttcaagtgaaattgacattgattatgaaaagaaattattcaaaacaaaaaaaggtgagattaaagaaggcgatataattacaattgatggatcaacaggaagaataattgtaggagaagttgaaacagttaagccagaaatttctggtgactt

SEQ ID NO: 258442 - DNA, 812 bp, Unknown
  Bacterial polypeptide expressing nucleotide sequence isolated from the Sargasso Sea
atagcttctggattacctgcttctcctggtgcagcaagtggaaaagtttttttttctgctgaagaagcagagaagttaaatggaatgatggaaaataccattttagtaagagtggaaacttcaccggaagatattcatggaatgcatgctgcaaaaggtattctaacttcaagaggaggcatgactagtcatgctgcagtagtagcaagaggaatgggcagaccatgtgtttctggatctagcgaaattactatcgattatgaaactaaacaatttaaagcaggtgaaattacagttaaagaaggagatattataactatagacggaggaagcggcaaagttatgcttggtactgtgcccacagttcaacctgagatatcaggatatttttctacaataatgaagtgggctgatcaatttagaaaattaaaaatcagaactaatgctgaaacagcaaaagacactaaaattgctagagagtttggagcagagggtattggactatgcaggacggaacatatgttttttgatgaagaaagaattttatctgtcaggcaaatgatactttctaagtctatagatgacagaagtaatgctcttgaaaaacttttaccccatcaaaaaaatgattttaaagaaatttttaaaactatgtacggattacccgttactgttagattattagacccacctttacatgaatttttgccaaaatctgataaagacatggaagaggtggctagatcattgaatttaggtgctaaagaaattaaagatagaatagcagagcttcatgaacaaaatccaatgtt

SEQ ID NO: 258443 - DNA, 907 bp, Unknown
  Bacterial polypeptide expressing nucleotide sequence isolated from the Sargasso Sea
aaaagtaacattaaagtaattgggaaaggccttccagcttctccaggagcagtaagtggcaaagttgttttttcctctaatgaagctgaaagattaaatggtatgatgcagaataccattttggttagagttgaaacctcaccagaagatatacacggtatgcatgcagcaaagggaattttaacttcaagaggcggaatgacaagtcatgcggctgtagttgccagaggtatgggtcgaccatgtgtttccggatcaagcgaaattgatattaattatgaaaaaaaaatattcaaagcttcaaaagttgaaattaaagaaggagatataattacaattgatggatcaacaggtagaattattttgggagaagttccgactgttaaaccagaaatttcaggagatttttcaaaattaatgggatgggcagacaattatagaaaactaaaagtaagaactaattccgaaacaccactcgatacaaaaacagcaagagactttggggcagaaggtataggtctttgtagaacagaacatatgttttttgatgaagacagaattctttcagtaagagaaatgattttgtctaaaacaaaagaagatagaagcaaagcacttgcaaaacttttaccacatcaaaaaaatgattttattgaaatttttaaaattatgaatggcttaccagttactgtaagattattagatccgccattgcatgaatttttacctaaaaatgaaaaagaaataaaaagtgtatcagacgcgctagagctctctactaatgaagtagaatcaagaattgcagaactgcatgaacacaatcctatgcttggtcataggggatgtagattaggaatttcttttccagaaatttacgaaatgcaatgtagagcaattttgaagcgct

SEQ ID NO: 258444 - DNA, 868 bp, Unknown
  Bacterial polypeptide expressing nucleotide sequence isolated from the Sargasso Sea
taaagatatgcaagatgtagagtttactgttgaaaatagtaaactttggatattacaaactcgatcaggtaaaagaacctctaaatcagctgttaaaattgcagtagacatggttaaagaaaatttgatttcaaaaaatgatgcaattttaagaattgatccaaattctctagatactttgttacacccgacactagatgaaaaaagtaaaatcgaggtaatagcgactggacttccagcatctccaggggcagcaagtggtaaagtagttttcagttcagaagaagctgagagattaaatgctatgatgcaagatgtaattttagttagagtagagacatctcctgaagatattcaagggatgcatgcagcaaaaggaattttaactgcaagaggtgggatgaccagtcatgcagcagttgtcgcaagaggcatgggaagaccctgtgtttctggttctagtgaaattgatataagttatgatcaaaaaacatttaaaaccccattagctgaagttaaggagggagatattattactattgatggatctactggtcgaataattttgggtaaagtgcctacagtaaaaccagaaatatcaggcgatttttctaaactaatgagttgggcagataattttagaaaattaaaaattagaacaaactctgaaacacctttagatacaaaaacggcaagagattttggagctgaaggaataggtctttgtcgaacagaacatatgttttttgatgaggaaagaattttatcagtaagagagatgattttatcaaaaacaaaagaggacagatcaaaagcgttacaaaaacttttaccacatcaaaaaaaagactttatagaaatttttaaa

SEQ ID NO: 258445 - DNA, 961 bp, Unknown
  Bacterial polypeptide expressing nucleotide sequence isolated from the Sargasso Sea
gattttaaaagaaacggtaaaagaaaaaacaaaaaaaagaatttccacaagaatgtatttcaacaactatttggagcaattagcgctgtatttttatcatgggaaagtaatagagcaaaagtttatagaaaattaaatcaaataccaccagaatggggaacagcggttaacgttcaatctatggtttttgggaatatgggtgatgattgtgctactggagttgtatttacaagaaatccttcagatggatcaaatgaaatatatggtgagtatttaattaatgcacaaggtgaggacgttgttgctggtacaagaacacctcaatatataactaagaaggcaagaaaaaatgttaaagttgaagacctttcaatggaggagtctttgccaaaagttttcaaagaattaaaaaaaattttaaagaaattggaaaaatattacaaagatatgcaagatgtagaatttacagttgaaaataataaactgtggatgcttcaaactagatcgggaaaaagaactgcaaaatctgcagtaaagattgcagttgatatggttaaggaaaaattaatatcaaaaaaagaagctgtattaagaattgatccaaattctttagacacacttttgcatcctacacttgacgaaaagagtacaatcaatgtaatagcaaatggtttacctgcttctccaggagcagcaagtgggagagtggtatttacttcagaagaagctgagagattaacttcgatgatgcaagatactatcttagtaagagtagaaacgtcacctgaagatatacaaggaatgcatgctgcaaaaggaattttgacagctagaggaggaatgacaagtcatgctgcagtagttgcaaggggtatgggaagaccatgcgtatctggctcaagtgaaattgatataaattatgagatgaagacatttaaaacatcttcaatggaaatcaaag

SEQ ID NO: 258446 - DNA, 850 bp, Unknown
  Bacterial polypeptide expressing nucleotide sequence isolated from the Sargasso Sea
attttatctgttagggatatgattttatctaaaacaaaagaagatagagcaaaagcactagataaacttttgccccatcaaaaaaaagattttatagaaatctttaaaataatgagtggtttacctgttacagtaagattgttagatcctcctctacatgaatttttaccaagaacaagtaaggaaattaatgaagttgcaaatgttgtaggactatcagttaaagaagttgagagtagaattgaagaactgcatgaacaaaaccctatgttgggtcatagaggttgtaggctgggtatatcttttccagagatttacgaaatgcaatgtagagctatttttgaggccttagctgaactaaaaaataaaaaaattaaatctgctttccctgagataatgattccacttgtttctactgaagctgaaattaagataatgaaagatttagtgaaaaaaattgcaagcgaagttcaaaaacaaaataaaattaaaatagaatttatggttggaacaatgattgaattgcctagagctgcaataaaagctaaagaaatagcaaaacacgcagagttttttagttttggaactaatgacctaacccaaacaacatttggaattagcagagatgacagcggaaaatttttaaacgattatttagataataaaatattttcaattgatccttttgtatcgatagatgatggagttgcagacttagttgaaattgcagttggaaaaggaaaaagtcaaaataaaaaactaaaacttggaatttgtggtgagcatggtggagatcctaaaagtattgaattttgttctcgaacaggattgaattatgtttcttgttcac

SEQ ID NO: 258447 - DNA, 874 bp, Unknown
  Bacterial polypeptide expressing nucleotide sequence isolated from the Sargasso Sea
actcctcaatatatacaaaaaaaagcaagagctgcttcaggatcaaaagaaacttcgatggaagagtccatgcctaaagtttttaagagacttgaaaaaatcttaattagtttggaaagtcattataaagatatgcaagatgttgaatttactgttgaaaataataaactttggattttgcaaacaagatcaggaaaaagaacagcaaagtcagcagtcaaaattgctgtagatatggttaaagaaaaattaatttccaaaaaagatgcaattttaagagttgatccaagttctttagatagcttattgcacccaacgctagatgaaaatactaagatcaatgtaattgcaaaagggcttccagcttcaccaggggctgcaagtggaaaagttgtatttacatctgatgaagcagaaagattagatggcttgatgcaaaatactattttagtaagagtagagacatcaccagaagatatacatggcatgcatgctgctaagggaattttaacagcaaggggtggaatgacaagccatgcagcggtagttgcaagaggtatgggacgaccatgtgtatcaggctctagtgaaattgaaattgattatgaaaaaaaagttttcaaaactaaaaacaatcaaattaaagaaggagatattattactattgatggatcaactggtagaataattttaggtgaggtgaaaacagtcaaacctgaaatttcaggggatttctcaaaattaatgggatgggctgataatttaagaaaattaaaaataagaactaattctgaaactcctcttgatagtaaaacggctagagaatttggagcagaaggcataggcctttgtcgaactgaacacatgttttttg

SEQ ID NO: 258448 - DNA, 856 bp, Unknown
  Bacterial polypeptide expressing nucleotide sequence isolated from the Sargasso Sea
gtaattgcaaatggtttgccagcatcacccggtgcagctagtggtaaagtagttttttcgtctgaggaagctgaaagactaaatgatatgatgcaggaagttatattagtaagattggagacatctccagaggatattcaaggaatgcatgctgctaaagggatattaactgcgagaggaggaatgacaagccacgctgctgttgttgcgagaggaatgggtagaccctgtgtatctggctcaagcgaaattgatataaattatgaaagaaaaatttttaaaacctcgtcaaaagaagttaaagaaggagatattattacgattgatggctctacaggcagaatcattttaggaagtgtacctacagttaaaccagaaatttcaggtgatttctctaaattaatgagttgggcagatgatattcgaaaattgaaagtaagaacaaattcagaaacacctttagatacaaagacggctagagattttggagccgaaggtatagggctttgtagaacagaacatatgttttttgatgaagagagaattctttctgtaagagaaatgatactttccaaaactcaagaggatagagcaaaggcattaagaaaacttttgccacatcaaaaaaaggattttattgaaatatttaaaattatgcatggcttacctgtaactgttcgtttactagatccacctttacatgaattcttacctaaatcacaaaaagaaattttagaagtggctaatgttgtgggcacaaatgttaaggaggtagaatcaagaattgaagaactacatgaacaaaatccaatgttaggacatagaggttgcagattaggggatttcatttcctgaa

SEQ ID NO: 258449 - DNA, 825 bp, Unknown
  Bacterial polypeptide expressing nucleotide sequence isolated from the Sargasso Sea
aagcaatggtttttggaaatatgggaaatgactgtgcaactggtgttgtgtttactagaaatccatctgatggatcaaaaaatatttatggtgaatatttaataaatgcacaaggtgaagatgttgttgctggaactagaacgccacaacatattacaaaaaaggctagagttgaatcaaaagaaacccttaagtcaatggaggaggcaatgccaaagacatacaagcaattaaaaaatattcttaataggttagaaaaacattacaaagatatgcaggatgttgagtttacagttgaaaaaaaaaaactatggatgctccaaacacgctctggaaaaagaacagccaagtctgctgttaaaatagctgtagatatggttaaagaaaaattgattactaaaaaagatgcaatattgcgaatagaacctagttctttagatactttacttcatccaactttagatgagaaagaaaacttagaagtaattgggtcaggcctacctgcatctccaggtgctgcaagtggaaaagttgttttcacttccgaagaggctgaaagactaaatagtatgatgcaaagtacaatattagttcgtgtagaaacttcaccagaagacatacatggtatgcatgcagcaaaaggaatacttacctcaagaggaggtatgacaagtcatgctgcagtagttgctagagggatgggacgaccatgtgtttctggatctagtgaaatagaaattgattatgaaagtaaattattcaaaacaaacaataaagtaattaaagagggtgaaataattacaattgatggttcaaccaggtaga

SEQ ID NO: 258450 - DNA, 824 bp, Unknown
  Bacterial polypeptide expressing nucleotide sequence isolated from the Sargasso Sea
gttccactgtatatcccggaaatgtcaaaaaactttgaagaattaatgaaatgggcagacagttcaagaagattaaaagtcagagcaaatgctgaaactcccaatgatgcaaagatagctctaaagtttggagcagaaggaattggactatgtagaaccgagcatatgttttttgatgaagaaagaattaatgtaatgaggcaaatgatacttgctgaaaatattactgagaggaaaagtgctctagataaattacttcctatgcaaatgaaagattttgaagaaattttttctataatgaatgatttgccagttacaattcgactattagatccacctctgcatgaatttcttcctagtagtgaaaaagatttgttatcattctctaaaacaactggaattgacattgaaaaagtaagaactcaatcattaagattacatgaatctaatccaatgcttggtcatagaggttgcagacttgcgatcagctatcctgaaatatgtgaaatgcaatcaaaagcaattttcgaagctgctattaatattcaaaaaaagtctaaagagtttgttaatattgaaataatgatacccctcgcatcgacttctgctgaacttggattttgtaaagatattataaatacagttgcttcatccataattaaaaaacatgctacgcaattaaattaccaaatcggtactatgatagaattacctcgagctgcattatgtgctgatgatttagcatcatcagcagatttttttagctttggcacaaatgatctcacccaaactgctttaggtataagtagagatgatataggttc

SEQ ID NO: 258451 - DNA, 963 bp, Unknown
  Bacterial polypeptide expressing nucleotide sequence isolated from the Sargasso Sea
taaagtttataaagaacttgcaaaagtatttattaagttagagaagcattataaatatatgcaagatattgagtttacagtagaaaataataaactttggatgttgcaaacaagatctggaaaaagaacagccaaagctgcaattaaaattgcggtggatatggtaaaggaaaaattaatttcaaaaaaagaagcaatcaaaagaattgatccaaatactctagatactttattacatcctactttagacgaaaaagttcagaaagaggtaattgctttgggattaccggcatcaccaggagctgcaagcggtaaagttgttttcactgctgatgaagcagagaaattaaacggaatgatgcaagatacaatattagtgaggttagaaacttcaccagaagacatacatggaatgcatgcagctaaaggaattcttactgctagaggtggcatgaccagtcatgctgcggttgtagcaagaggaatggggagaccatgtgtttcgggctcaagtgaaattacaatcgattatgagttaaaacaatttaaagctggagatgtgataattaaagagggagatattattactatagatggtggaagcggaaaagtaatgaaaggtttagttccaactgttcaaccagaaatttctggatacttttctacaataatgaaatgggctgatgaattcagaaaattaaaagtaagaacaaacgctgaaacggaggcagatagcaaaactgctagagaatttggtgctgaaggaattggtttatgtaggactgaacatatgttctttgacgaagagagaattctatctgtaagacaaatgattttgtcaaaatcaaaagaggacagaaatagtgcattagataaacttctaccttatcaaaaagaagactttaaaaaaatatttaaagtaatgtcaggcttacctgttacggtaagattattggatccacc

SEQ ID NO: 258452 - DNA, 892 bp, Unknown
  Bacterial polypeptide expressing nucleotide sequence isolated from the Sargasso Sea
tttagaaaattaaaagtaagaacaaattctgagacaccaaaagatactaagacagcaaaagattttggtgcagagggaatcggactatgcagaactgaacatatgttttttgatgaagaacgaattttgtctgtaagagaaatgatattatctaaaacaaaacaagacagagcaatagcattagaaaaactgttaccgcatcaaagaaaagattttatagatatttttaaaattatgagtggattaccagtcacagttagattgttggatccaccattacatgaatttttaccacgtacagaaaaggaaattaatgaggttgctaatatagttaatcttccagttaaagagattaagtcaagaattgaagagctccatgagcaaaatcctatgttaggtcatagaggctgtcgcctaggaatatcttttcctgaaatttatgaaatgcaatgtaaagcaatatttgaagcattagtataccataaaaaaagtaaaattaaatctgcatttcctgaaataatgatacctttagtatctacagaggctgagataaaaataatgaaagatttagtaattagaactgctagtcgagttcaagaagaacataaattaaagatagaatttttagttggtacaatgattgaattacctagagcagcgttaaaagcaaaagagattgctaagcatgcagaattttttagttttggaacaaatgatttaactcaaactacttttgggattagtagagatgatagtggtaaatttttaaatgattatttagaaaacaaaatattttctgttgatccttttgtttcaatagatgaaggagtttcagatttagttgaaatagctgtggaaaaaggacgaaaacaaaataaaaatcttaaattag

SEQ ID NO: 258453 - DNA, 828 bp, Unknown
  Bacterial polypeptide expressing nucleotide sequence isolated from the Sargasso Sea
ttacctcatcaaaaaaaggattttatcgaaatatttaaaattatgaatggacttccagttactgttagacttttagatccaccattacatgaatttttacctaaaagtgctacagaaatttcagatgtttcaaaatctttaaatttatcaattaaagaagttgagggaagaattgaagaattacatgaacaaaatcctatgttaggtcatagaggttgtagactgggcatttcttttcctgaaatttatgaaatgcaaattagagctatatttgaagcattagtagaatgcaaaaaaagaaaaattaaatcaactatgcctgagataatgataccacttgtatcaactgaagctgaaataaaaataatgaaagatctggtaattaatgttgctagaaaagtacaaaatgaaaataaaactaaaattaaatttctagttggtactatgattgaacttccaagagccgcacttaaagcaaaagatatagcaaaacatgctgaattttttagctttggaactaacgatttaacacaaactacatttggaattagcagagatgatagtggtaaatttttaaatgattatatagaaaataaaatttttgatattgatccatttatatcaattgatgatggagttggtgatttaattgaaatagctgcgactaaaggaaaaaaacaaaataaaaaaattaagctaggaatatgtggggaacatggtggagatccaaaaagtatagaattctgttctaaagctggtttggattatgtttcttgctctccttacagagtgcctgtcgctcgacttgcggctgcccaggctcaatta

SEQ ID NO: 258454 - DNA, 895 bp, Unknown
  Bacterial polypeptide expressing nucleotide sequence isolated from the Sargasso Sea
agtgagagaaatgatattatcaagaacaattgaagatcgatctaatgcactcaaaaagttattaccacatcaaaaaaaagattttattgaaatatttaagataatgaaaggcttgccagtaacagtaaggttgcttgacccacctctacatgaatttctgccaaaaagtaacaatgaaattaatgatgttgcagtttcactgaatattcctgttaaagaacttgaagttagaatttcagaacttcatgaacaaaatcccatgctaggtcatagaggctgtagattagcaatttcattccctgaaatttatgagatgcagtgtaatgcaatttttgaggctttagtggaatgtaaaaaacaaaaaattcaatcaacaatgcctgaaatcatgatacctttagtttcaacagaagcagaaataaaaatcatgaaagatttagttattagggttgcaaaaaaagttcaagatgcgaataaaattaaaattgattttttagttggaacaatgattgaattaccaagagcagcgataaaggcaaaagatattgctagacacgctgaattttttagttttggaactaatgatttaactcaaactacatttggaattagtagagacgatagtggtaaatttcttaacgattatattgagaacaaaattttcgatattgatccttttgtatcaattgatgatggagttggagacttaataaaaattgcaactgacaaaggaagaaaacaaaacaaaaaaattaaacttggaatttgcggtgagcacggtggagatcctaaaagtatagaattttgtgcaaaaactggattagattatgtgtcttgttctccttacagagttccagttgcaagattagcggcagcacaggctcaaataagaaaa

SEQ ID NO: 258455 - DNA, 924 bp, Unknown
  Bacterial polypeptide expressing nucleotide sequence isolated from the Sargasso Sea
attaggagaagtctcaactattaaacctgaaatttcgggtgatttttctaaattaatgagctgggcagataaatttagaaagttgaagataagaacaaattcagaaacacccgcagacactaaaacagcaagagattttggtgcagaaggcataggactttgcagaactgaacatatgttttttgatgaagaaagaatattatctgttagagaaatgatattatcaaaaactaaagaggacagaaacaaagctttaaacaaactcttaccacatcaaaaaaaagattttactgagatatttaaaataatgagtggtttaccagtaacagtaaggcttttggatcctccgcttcacgaatttttaccaaaaaatgaaaaagaaattcaagatgtttcaagagttcttgatttgtcagaaaaagaaattttgtcaaggattgatgagctacatgaacataatccaatgttgggtcatagaggatgtagacttggtatttcatttccagaaatatatgaaatgcagtgcaaagcaatttttgaagctttagttcaatgcaaaaaaaataaatataaatcaataattcctgaaattatgataccactggtctcaactgaagctgaaataaaaattatgaaaaacttagtaaacagtgtagcaaaaaaagttcaaaatgaaaataagatgaaaatagattacttggttggcacaatgattgagttaccaagagctgcaattaaagccggagaaatagcaaagcatgctgacttttttagttttggaacaaatgatttaacccaaactacttttggaattagtagagatgatagtggaaaatttttaaacgattatattgaaaataaaatatttgatgtggatccatttatctcaatagatgaaggagtaggagaacttattgaaattgc

SEQ ID NO: 258456 - DNA, 918 bp, Unknown
  Bacterial polypeptide expressing nucleotide sequence isolated from the Sargasso Sea
gatcaccaaaaaagatgcaatattgagaatagaaccaagttctttagactctttacttcatccaactttagatgagaaagcaaacttggaagtaattgggtcaggattacccgcatcacctggtgctgctagtggaaaagttgttttcacgtctgaggaggctgaaagactaaatagtatgatgcaaagtacaattttagttcgcatagaaacttcaccagaagatatacatggtatgcatgcagcaaaaggaatacttacctcaagaggaggtatgacaagtcatgctgcagtagttgctagagggatgggtcgaccatgtgtttctggatctagtgaaatagaaattgattatgaaaataaattattcaaaacaaacaataaagtaattaaagaaggtgaaataattacaattgatggttcaacaggcagaataattattggcgaggtaaaaacagttaaaccagaaatgtcaggtgatttctcaaaaataatgagttggtctgatgattttagaaaattaaaaataagaaccaattcggagacaccattggatagtaaaactgctagagaatttggtgcagagggtattggtttgtgtagaactgaacatatgttttttgatgaagaaagaatttcatcagtaagagaaatgatattatcaaaaacaattgaagacagatctaatgcactcaaaaagctattaccacatcaaaaaaaagattttattgaaatttttaagataatgaaaggtttacctgtaacagtaaggttacttgacccacctctacatgaatttttgccaaaaagtaaaaatgaaattaatgatgttgcagtttcactaaatattcccattaaagaacttgaagttagaatttcagaacttcatgagcaaaatccaatgctaggtcatagagg

SEQ ID NO: 258457 - DNA, 739 bp, Unknown
  Bacterial polypeptide expressing nucleotide sequence isolated from the Sargasso Sea
aagtggaaaggttgtatttacttcagaagaagctgaaagattaacttcgatgatgcaagacactatcttagtaagagtagaaacgtcacctgaagatatacaaggaatgcatgctgcaaaaggaattttgacagcaagaggaggtatgacgagtcatgctgctgtagttgcaaggggtatgggaagaccatgcgtatctggctcaagtgaaatagacattaattatgagatgaagacatttaaaacatcctcaatggaaattaaggaaggtgacattattaccatagatggatcaagtggaagaattatatcaggtagtgtggcaacagttaaaccagagatatctggagatttttctaaaataatgacttgggcagatagttttagaaaattaaatattaggacaaattctgaaacacctaaggatactaaaactgcaaaagattttggagctgaaggaattggtctttgcagaactgaacatatgttttttgatgaagagagaattttatcagtaagggaaatgattttatcgaagactaaagaagatagatcaattgcattaaaaaaacttttacctcatcaaaaaaaggattttattgaaatatttaaaattatgagtggattaccagttacagtaagattattagatccacctcttcatgagtttttgcctcgaacagataaagaaattaatgaagttgcaaatattgtaaatcttcctgtaaaagaagtagag

SEQ ID NO: 258458 - DNA, 850 bp, Unknown
  Bacterial polypeptide expressing nucleotide sequence isolated from the Sargasso Sea
gcgcgaagacttcaaaagctttttgccattatgcgcggattaccagttacaattcgattgttagatcccccattacatgagtttttgccaggtaaagatgaagaattacacgaagttgctaatgccgctggcaccgaatttgatgaagttagggcacgtgtagcggcactacatgaaacaaatccgatgttgggactccgaggttgccgtttggcaataatgtatcccgaaatttatgagatgcagtgtcgtgctatttttgaggctgctgccgaagtttcggaagaaaccggagacagtgttatgacggagataatgataccgttggttgcttctaaacaagaatttgagattttaagaactctggtatccgcaatcgctgccgaagtagaggaagagaaaaaggcttctttggactatttgatagggacgatgatcgaactgccacgtgctgcacttcgagccggtgaaatagcagaaacagctgaatttttctcctttggtactaatgacctaacccaaactacgtttggtcttagccgtgacgattcaggaacgttcttggatccctacattgaaaatgggatttttattaacgacccttttgttactattgatcaggatggagtaggcgagttagtaaagatagctattgatcgtggtcgtgaggttagagagagacttaaacttggaatttgcggggaacacggtggtgatccagagtccattaagttctgtcaattagttggactcgattatgtttcatgttctccgtaccgtgttcctgttgctcgtcttgcctgtgcacaagcttctataaataagcagaaaattattaccacagtgtaat

SEQ ID NO: 258459 - DNA, 751 bp, Unknown
  Bacterial polypeptide expressing nucleotide sequence isolated from the Sargasso Sea
ccttgatgagtcaaaagaaataaaaaccattgcaaaaggtctgccagcatcaccaggggcgacaagtggtaaagttgtttttacatcagacgaagcagaaagattaaatggtatgatgcaagatacaatattagttcgtgtagaaacttcccctgaagatattcatggcatgcatgcagcgaaaggaattttaacagccagaggaggcatgacaagccacgcagctgttgttgcaagaggtatgggtagaccctgtgtttctggatcaagtgaaatagatattaattatgatgagaaactttttaaaacttcctcaaatgttgaaataaaagaaggtgatataattacaattgatggatctacagggagggtaatttcaggagaagttccaacaataaaaccagagatttcaggagatttttcaaaattaatgaattgggctgataaatttagaaaattgaaagtaagaacaaattctgaaactccactagatacaaaaactgctagggactttggagctgaaggaattggtttatgtagaacagagcatatgttttttgatgaagatagaattctttcagtaagagagatgattttatctaaaactattgatgacagaaataaagctttggccaaacttctcccacatcaaaagaaggattttactgaaatttttgaaattatgagcggcttaccagtaactgtaaggctgttggatcacctttacatgagttcttacctaaaacgataa

SEQ ID NO: 258460 - DNA, 940 bp, Unknown
  Bacterial polypeptide expressing nucleotide sequence isolated from the Sargasso Sea
gcacagggttccgacttacctgcgatggaagaagtgatgccggcggtattcggccagctcaacgaggtacgtctcaacctcgaaaaacactaccgcgacatgcaggacatcgaattcaccgtccagcaggacaagctgtggatgctgcagacccggtctggcaagcggacggcgaaggcggcgctgaagatcgcctgcgatatggtcgcggaaggactgatcaccaaggaggaagcggtttcccgcgtcgatccggaatccctcgatcagcttctacacccgacgctggacccctacccaccgcgcgatctgctgacccggggtttgccagcgtcccccggtgctgcctccggcaaggtggtgttctctgcggatgaagcagaggcggaggccgcgaagggcgaagccgtcattttggtccggatcgaaaccagcccggaagacattcacggtatgcacgccgcccagggaatcctcaccagccgcggcggcatgactagtcacgcggctgtggtcgcgcgcggcatgggaaggccctgcgtatctggcacgggcgatctgcacatcgattacgccaggcagaaaatgaccgtcatgggccgcgaaatcgcagccggcgacacgctgaccatcgatggcggctccggagaggtgatggcgggtgaggttccgaccttgcagcctgaagtctccggcgatttcggcacgctgatgggctgggtcgacgacatccggaagctgcgggtgcgcaccaatgcggaaaccccgctagacgcgaaaaccgctgtggatttcggtgcagaaggcataggcctttgccgaaccgaacacatgttctttgacgccgaccgcatcatcgccgtgcgcgaaatgatccttgcgaacgataccgcaggccgaagggcggcactggaaaaaattctgcccatgcagcgccagg

SEQ ID NO: 258461 - DNA, 751 bp, Unknown
  Bacterial polypeptide expressing nucleotide sequence isolated from the Sargasso Sea
acagcaaaatcggcagtcaaaatcgcagttgatatggttaaagaaaaattaatttctaaaaaagaagctgtattaagaattgacccaaattctctggatacacttttacaccctactttggatgaaaaaagctcaattaatgtaattgcaaatggattgccagcatcaccaggtgcagccagtggtaaagttgtatttacatcagaagaggctgaaaggctaactgcaatgatgcaagatacaattttagtaagagtagaaacctctccagaagatatacaaggaatgcatgctgctaaaggaattttaactgccagaggaggaatgacaagtcatgcggctgtagttgctagaggtatgggcagaccatgtgtatcaggatcaagtgaaattgatataaactatgaaaataaatcttttaaaacctcttcaatggagattaaagaaggggacataattactttagatggctcaactggaagaattattgctggaagtgtttcaactgtaaaaccagaaatatctggtgatttttctaggataatgtcttgggctgacagttttagaaaattaaaagtaagaacaaattctgagactccaaaagatactaaaactgctaaagactttggtgcagagggtattggattatgtagaactgaacacatgttctttgatgaagaacgaattctatctgtaagagaaatgatattatcaaaaacaaaagaagacagagcaatggcattagaaaaac

SEQ ID NO: 258462 - DNA, 937 bp, Unknown
  Bacterial polypeptide expressing nucleotide sequence isolated from the Sargasso Sea
gagcaaagtttacagaaaactaaatcaaattccatcagagtggggtacagcggtcaatgtacaatctatggtatttgggaacatgggaaataattgtgcgacaggtgttgtatttacaagaaatccatctgatggatcaaataatatttatggagaatatcttattaatgctcagggtgaagatgttgtcgctggaactcgtacacctcaatacataactaaaaaagctaaaaaagatgcaaaagtcagcgatccatcaatggaggagtccatgccaaaagtatattctgagttaaacaaaatcctaaagaaattggagagtcactataaagatatgcaagatgtagaatttacagttgaaaataataaactttggatattacaaacccgttcaggaaagagaacttcaaagtcggcagtaaagattgcagttgatatggttagagaaaagttgataaccaaagatgaagctgttttacgaattgacccaaattctttagatacactgctacatcctactttagatgagaaaagttcaattcaagtaattgcaaacggtcttccagcatcaccaggtgctgctagtggaaaagtagtttttacctctgaagaggctgaaagattgagtaatatgatgcaagatacaattttagtaagagttgaaacctctccggaggatattcaaggtatgcatgctgctaaaggaattttaacagcaaggggaggcatgactagtcatgctgctgtagtagcaagaggtatggggagaccttgcgtttctggctcgagcgagattgatattcaatatgataaaaaaatctttaaaacatcatcaattgaaattaaagaaggtgacacaatcacaattgatggttccacaggaagaataattctgggcactgttccaacagtcaaaccagaaatttctggtgatttt

SEQ ID NO: 258463 - DNA, 811 bp, Unknown
  Bacterial polypeptide expressing nucleotide sequence isolated from the Sargasso Sea
attatgcagaactgaacatatgttttttgatgaagaacgaattttatctgtaagagaaatgatattatctaaaacaaaagaaaatagagcaatagcattagcaaaactgttaccacatcaaaaaaaagattttatagatatttttaaaatcatgggtggattgccagtcacagttagattgttggacccaccattacatgaatttttaccacgtacagaaaaggaaattaatgaggttgcaaatattgttaatctttcagttaaagaaattgaatcaagaattgaagagttacatgagcaaaatcctatgctaggtcatagaggttgtcgtctaggaatatcttttcctgaaatttatgaaatgcaatgtaaagcaatatttgaagctttagcatacctcaaaaaaattaaaattaaatctgctttccctgaaataatgatacctttagtatctacagaagctgagataaaaataatgaaagagttagtcatcagaactgcaagtcaagttcaacaagaacataaattgaatatagaatttttagtaggaacaatgattgaattacctagagcagcaataaaagcaaaggaaattgctaagcatgcagaattttttagctttggaacaaatgatttaactcagactacttttgggatcagtagagatgatagtggtaaatttttaaatgattatattgagaataagatatttaatattgatccatttatatccattgatgatggagtaaaagatttaattgaaatggcagtttctaaaggaaaaaaacaaaataaaaagataaaattaggc

SEQ ID NO: 258464 - DNA, 772 bp, Unknown
  Bacterial polypeptide expressing nucleotide sequence isolated from the Sargasso Sea
agtgaaaaagttgttttttcatctgatgaagcagaaagacttaatggaatgatgcaagatactattttagtaagagttgaaacatctccagaagatattcatggcatgcacgcagcaaaaggaattttaactgcaagaggtggaatgacaagtcatgccgctgttgttgcaagaggaatgggaagaccatgtgtttcaggctctagtgaaattgatattaattatcaaagtaaaaattttaaaacaaaaaatttggaagttaaagaaggagatataattacaattgatggttcaacaggtagaattattttgggagaggtgccaacggttaaacctgaaatatcaggaaatttttctaaattaatgaaatgggtagacaaatttagaaaattaaaagtaagaacaaactctgaaacacctttggatacaaaaactgcaagagattttggagcagaaggcataggtttatgtagaactgagcacatgttttttgatgaggagagaattttatctgttagagaaatgattttatcaaaaacaaaagaagatagagataaagctttagcaaaacttttgccacatcaaaaaaaagactttgtagaaatatttaaaataatgaacggtttacctgtcacagtaagacttctcgatccacctcttcatgaatttttacctaaaaatgaaaatgaaattcaagatgtctcaaattctttaaaattgtcagttaaagaagtccagtctagaatcgatgaattacatgagcacaatccta

SEQ ID NO: 258465 - DNA, 823 bp, Unknown
  Bacterial polypeptide expressing nucleotide sequence isolated from the Sargasso Sea
atggtttttggtaatatgggagaagattgttcgacaggtgtagcatttactagaaatccttcaacaggcgaaaaggctttttttggagaatatttgattaatgctcaaggcgaagatgtagttgcgggaacaagaacacctcaacatataaccaaaaaagctaagaaagactctggttcaaaaactctatcaatggaagaaactatgccaaaggtttatcagcaacttaaactaatttttcttaaattagaaaaacattatagagatatgcaagatattgagtttacagtagaaaataataaactttggatgttacagacgcgttctggaaaacggacagcaaaagctgcgattaaaatagcagttgatatggttaaagaaaatttaatttcaaaaaaggaagccattcttagaatagatccaaatactttagaaacattacttcacccaactctggatgaaaaagtagagaaaaaaattattgcctcaggattgccagcttctccaggagcagcaagtggaaaagtggttttttcagcagaagaggcagagagattaaatgctatgatggaaaatactattttagtaagagttgaaacgtcacctgaagatattcatggcatgcatgcagcaaaaggcattcttacctctagaggaggtatgactagccatgcagcagtagtcgcaagaggaatgggaagaccttgtgtttctggatctagcgaaattaacattgactacgaaacaagacaatttaaagcgggagaggctatagttaaagagggagacgttataactatagacggaggaagcggcaaagtca

SEQ ID NO: 258466 - DNA, 829 bp, Unknown
  Bacterial polypeptide expressing nucleotide sequence isolated from the Sargasso Sea
aaagaagattttaaaaaaatattcaaagtcatgtcaggtttgcctgtaacagtaagattattagatcctccacttcatgaatttttaccaaaagctgacaaagacatagaggaagtagcgagatctttaaatctatcagcaaaagaggttaaagacagaatttcagaactccatgaggaaaaccctatgttaggacacagaggttgccgacttggtatttctttcccagagatatatgagatgcaatgcagagctatatttgaagctatagttgaattaaaaaaacaaaaaataaaagcagcttttgtagaaattatgatacctttggtttcaacggactccgaacttaaaattttaagagctttagttaataaaattgctaaagaaatagaaaaagaaaataaattaaaacttgaatatatggtaggcactatgatcgaattaccccgtgctgctttgcaggcgaaatctatttcaaaacatgctgatttttttagcttcggaacaaacgatttaactcaaacaactttaggaataagtcgagacgactcaggaaaatttttaaatgattatattgataataaaatatttgaagttgacccgtttgttagtattgatcaaaatggagtgggcgagttagtggaaatagcttcctcaagaggcagaaaaacaaataaaaatattaaattaggtatttgcggtgaacacggtggagacccgaagagtatagaattctgttcaagaacaggactaaactatgtttcatgctctccatttagagttccagtagcaagattggctgccgctcaagcagaattatctaaataat

SEQ ID NO: 258467 - DNA, 777 bp, Unknown
  Bacterial polypeptide expressing nucleotide sequence isolated from the Sargasso Sea
cagttagattattagatccccctttacatgaatttttacctaaaaatagtaacgaaattaatgatgttgcccaatctttaaatttaaacacaaaggatatagaggcaagaattaatgaactgcatgaacacaatccgatgctaggtcacagaggatgcagattaggaatttcatttccagaaatttatgagatgcagtgtagagcaatatttgaagcattaattgaatgtaagaataaaaaatataaatctattacacctgaaataatgatccctttagtttcaacggaagcagaaataaaaattatgaaagacttagttataagagttgctaaagaagttcaaaacgaaaaaaaagttaaattagattttttagtaggaacaatgattgagcttccaagagcagcaataaaagcacaggatattgcaaaacatgctgaatttttcagttttggaacaaacgatttaactcaaactacatttggaattagtagagatgatagtggcaagtttttaaatgattatattgaaaataaaatatttgatatagatccttttgtatcaatagatgatggtgttggagatttaattgaaattgcagttaagaagggaaaaaaacacaataaaaaaatcaaattaggcatttgtggagagcatggtggtgatccaaaaagcatttatttttgctctaaaacaggattagattatgtctcttgctcaccttatagagtcccagttgcaagacttgctgctgcacaggctcaattaaaaaaataga

SEQ ID NO: 258468 - DNA, 918 bp, Unknown
  Bacterial polypeptide expressing nucleotide sequence isolated from the Sargasso Sea
atgagttgggctgacaagtttagaaaattaaagattagaactaattctgaaactccattagatactaaaattgcaagagaatttggtgctgaaggaataggtttatgtagaacagagcacatgttcttcgatgaggaaagaattttatcggttagagaaatgatcctatctaaaaccaaggaagatcgacataaagctttatcaaagcttttaccccaccagaaaaatgattttatagaaatttttaaaataatgaacggtttaccagtaactgtaagattgctcgatcctcctttgcatgaatttttaccaaaaaatgaaaatgaaattaatgatgtttcagagtcattgaaattatctgtaaaagaaatcgaatctagaataagtgaattgcacgaacataacccaatgcttggacacaggggctgtagattgggaatttcttttcctgaaatttatgaaatgcagtgtagagcaatatttgaagcactaatagaatgtaaaaataaaaaaattaaatctattctgcctgaaataatgattccattagtttcgactgaatccgaaataagaattatgaaaaatttagtaataaatactgcaagaaaagtccaagaacaaaataaagtaaaaattaattttttggttggtacaatgatagagctaccaagagccgcattaaaagcaaaagagatagctaaacacgctgaattttttagctttggaacaaatgatctaacccaaacaacctttggaattagtagagatgatagtggaaaatttttaaatgattatattgaaaataaaatttttgatattgatccttttatttctattgatgaaggcgtaggagacttaattgaaattgcaacaattaacggaaaaaaacaaaataaaaaaattaaactgggaatctgt

SEQ ID NO: 258469 - DNA, 931 bp, Unknown
  Bacterial polypeptide expressing nucleotide sequence isolated from the Sargasso Sea
aatgggacgaccatgtgtatcaggctcaagtgaaattgagattgattatgaaaaaaaaatttttaaaaccaaaaataatcaaattaaagaaggtgacattattactattgatggatcaactggtagaataattttaggagaggtgaaaacagtcaagccagaaatttctggtgatttctcaaaattaatgggatgggctgataatttaagaaaactaaaaataagaactaattctgaaactcctcttgatagcaaaacagctagagaatttggagccgaaggaattggtctttgtagaactgaacacatgtttttcgatgaggaaagaattttatccgtaagacaaatgattttatcaaaatcaacagaagatagagcagatgcattatcgaaacttttaccacatcaaagaaatgattttgttgaaatttttaaaattatgaatggtttaccggtaacagtaagactattagacccacctctacatgaatttttacctaagagtgaaaccgaaatatctgatgtagctaaatctttaaatttatctgccaaagatgttgaggccagaattcaagaattacatgagcaaaatcccatgttgggacatagaggttgcagacttggaatttcatttccagaaatttatgaaatgcaatgtagagctatatttgaggcattaattgaatgtaaaaaaagaaagctcaaaccaataatgccagaaataatgatacctttagtttcaactgaagctgaaattaaaattatgaaagatttggttataagagttgcaagcaaagttcaaaaagataacaaagctaaaataaaatttttagtcggtacaatgattgagctacccagagctgctattaaagcaaatcatattgcaaaacatgctgaattttttagttttggtactaacgatctaacccaa

SEQ ID NO: 258470 - DNA, 912 bp, Unknown
  Bacterial polypeptide expressing nucleotide sequence isolated from the Sargasso Sea
tatggttaatgaaaaattaatttcaaaaaaagaagctgtgttaagaattgatccaaactcactagatacacttttgcatcctacgttggatgaaaaaagttcaattaaagtgatagcaaatggattgccagcatcaccaggtgcggccagtggtaaagttgtatttacatcggaagaggctgaaagactaactgcaatgatgcaagatacaattttggtaagagtagaaacctctccagaagatatacaaggtatgtatgctgccaaaggaattttgacagctagaggtggaatgacaagccatgcagctgttgtggctagaggtatgggcagaccatgtgtatcaggatcaagtgaaattgatataaactatgaaaataaatcttttaaaacttcttttatggaaattaaagaaggagacgtaattactatagatggctcaacaggaagaattattgctggaagtgtttcaactgtaaaaccagaaatatctagtgatttttctaagctaatgtcttgggctgacgattttagaaaattaaaagtaagaacaaattctgagacaccaaaagatactaaaatagcaaaagactttggtgcggaaggtattggactatgtagaactgaacatatgttttttgatgaagaacgaattttgtctgtaagagaaatgatattatcaaaaacaaaagaagatagagcaatagcattagaaaaactgttaccacatcaaagaaaagattttatagatatttttaaaattatgaatggattgccagtcacagtaagattgttggatccaccattacatgaatttttaccaagcacagaaaaagaaataaatgaggttgctaacacagttaatctatcagcaaaggatgttatatcaagaattgaggaacttcatgaaca

SEQ ID NO: 258471 - DNA, 847 bp, Unknown
  Bacterial polypeptide expressing nucleotide sequence isolated from the Sargasso Sea
actttgtcgaacagagcatatgttttttgatgaagaaagaattttatcagtgagagaaatgatactttcaaaaactaaagaggatagaaataaagctttagaaaaacttttgcctcatcaaaaaaatgattttattgaaatttttaaaattatgagcaatttacctgttacagtaagattattagacccaccattacatgagtttcttccaaaaacagaaaaagaaattaatgaaatcgcaaataaattaaaattatctctaaaagaaattagaggtagaattaatgagctgcatgaacaaaatccaatgttaggacatcgaggatgtagattaggaatttcatttcctgaaatttatgaaatgcaatgtagagcaatctttgaagcattgtcagagttagaaaagaaaaaaataaaagcagcatttccagaaataatgatacctttagtatctactgaagctgaaataaaaattatgaaaaacctagtaataagaactgcaaaaaaagtacagaatcaaaataaaacgaagattaaatttctagttggaacaatgatagaattgccaagagctgcaataaaagctacagatatagcaaaacatgctgaattttttagctttggaacaaatgatttaacacagacaacatttgggattagcagagatgacagtggtaaatttttaaatgattatattgaaaacaagatttttgacatagacccgttcatatcaattgatgaaggagtaggagatcttattaaaatcgcatccgaaaaggggagaaagcaaaataaaaatataaaattaggcatatgtggagagcacggtggggatccaaaaagtata

SEQ ID NO: 258472 - DNA, 889 bp, Unknown
  Bacterial polypeptide expressing nucleotide sequence isolated from the Sargasso Sea
atttatagaaaattaaatcaaattccatctgagtggggaactgcagtaaacattcaatcaatggtttttggtaatatgggtaatgattgtgctactggagtagtatttacaagaaacccttcagatggatccaatgatatttatggagaatatttaattaacgcgcaaggtgaagatgttgtcgctggcactagaactccacaacatataactaaaaaagcacgtaaagaagctcaaacaaaagatttatcaatggaagactcaatgccaaaagtttacaaacaattagagaaaatccttaaaaaattagagaaccactataaagatatgcaggacgttgaatttacagttgaaaataacattctttggattttacaaaccagatcaggcaaaagaacatctaaatcggcagtgaaaattgctgttgatatggttaaagaaaaactaattacaaaaaaacaagcagtgttaagagtagatccaaattcattagatacattacttcatccaactttagatgaaaaaagtgaaatcaaagtcatcgctaatggtttgccagcctcacctggtgccgcaagcggaaaagtagtttttacatctgaggaagcggaaagattaactggaatgctccaagatacaattttagttagaatagaaacatcacctgaagatattcaaggaatgcatgcagctaaagggattttaacagcaagaggaggaatgacaagtcacgcagcagttgttgcaagaggaatgggcagaccatgtgtttcaggctcaagtgaaattgatataaattatgaaaaaaaaacctttaaaacttcttctatggaagttaaagagggcgaaatcataactattgatggatctactggcagaattatttctg

SEQ ID NO: 258473 - DNA, 851 bp, Unknown
  Bacterial polypeptide expressing nucleotide sequence isolated from the Sargasso Sea
ctatagagcaaaagtatatagaaaattaaatcaaatcccatcaagttggggtacggcagtaaatatacaatcaatggtatttggcaatatgggagatgattgtgcaacaggagtagtttttactagaaatccatcagatggaagtaaagaaatatatggagaatatttaattaatgctcaaggagaagatgtagttgcaggaacgagaactccacagcatataacgaaaaaatccagaataaaatcaaaagaaaaattactttcaatggaagagtcgatgccttcaacttacacaaaattaaaaaaaatattattaaaattagaaaaacattataaagacatgcaagatgttgagtttacagtggagaataaaaaactttggattctacaaacaagatcgggcaagaggacagcaaagtctgcagtaaaaattgccacagacatggttaaagaaaaattaatttcaaaaaaattagcagttctaagggttgaaccaaattcattggatactttgcttcatccaaccttagatgaaaaaagcagtatagaagtaattgcaaaaggattgcccgcctcaccgggggcagctagtggaaaggttgttttttcctcggatgaagcgcaaagacttaatgatatgatgcaaaatacgatattagttagagtagaaacatctccagaagacattcacggcatgcatgctgctaaaggaatattgactgccagaggtggaatgacaagtcatgctgctgtagttgcgagaggaatgggtcgtccatgcgtttctggttcaagtgatattgaaattgattatgaaaataatttatttaaggcaaatggttatgaaatta

SEQ ID NO: 258474 - DNA, 655 bp, Unknown
  Bacterial polypeptide expressing nucleotide sequence isolated from the Sargasso Sea
agagttgagacttctcctgaggatatacaagggatgcatgctgctaaaggaattttgacagctagaggtggaatgacaagccatgcggctgttgtggctagaggtatgggcagaccatgtgtatcaggatcaagtgaaattgatataagctatgaaaacaaatcttttaaaacctcttcaatggagattaaagagggtgacataattaccatagatggctcaactggaagaattattgctggaagtgtctcaactgttaaaccagaaatatcaggtgacttttctaagctaatgtcttgggctgacgattttagaaaattaaaagtaagaacaaattctgagacaccaaaagatactaaaacagcaaaagattttggtgcagagggtattggactatgcagaactgaacatatgttttttgatgaagaacgaattttatctgtaagagaaatgatattatcaaaatcaaaagaagacagatcaatagcactagagaaactgttgccatatcaaagaaaagattttattgatatttttaaaattatgagcggattaccagtcacagttagactgttagacccaccgttacatgaatttttaccacgtacagaaaaggaaattaatgaggttgccaacatagttaatcttcctaatt

SEQ ID NO: 258475 - DNA, 864 bp, Unknown
  Bacterial polypeptide expressing nucleotide sequence isolated from the Sargasso Sea
agtcaaataattaaagaaggggatattataacaattgatggcgggagtggtaaagttatgcttggaaccgtaccaactgtaaaacctgagatatctggttacttttcaacgattatgaggtgggcagaccaatttagaaaattaaaagtaagaactaatgccgaaacagcaaatgacactaaaattgcaagagaatttggtgctgaaggcataggtttatgtagaacggaacatatgttttttgatgaagaaagaattttgtcagtcaggcagatgatattatcaaagtctattgatgatagaaacaatgctttagataaacttttacctcaccaaaaaaatgactttaaagaaatatttaaaactatgcatggactgcctgttacagtcagattattggatcctcctttgcatgagtttttaccaaaatcagacaaggatatagaagaagtagctaggtcattaaatttaggtgctaaagaaattaaagatagaatagcggaacttcatgaacaaaatccaatgttaggtcatagaggctgcagacttggtatttcttttccagaaatatacgagatgcaatgtaaggctatttttgaagctctagttgagtgcaagaaagaaaagtcaaaatctgcaattgctgaaattatgattcctttagtctcaactgatttagagctaaaaatactaagagatcttgtaaatagagttgctaaacatgtccaagagcaacataaagtaaaaattgattatattgttggaactatgattgagttaccaagagcagctttacaggcaaaagctatctctaaatatgcagatttttttagttttggaacaaatgattttaacacaaacagc

SEQ ID NO: 258476 - DNA, 892 bp, Unknown
  Bacterial polypeptide expressing nucleotide sequence isolated from the Sargasso Sea
atgattttgtctaaatcaaaagatgacagaaatagtgcgctagataaacttttacctcaccaaaaagaggactttaaaaaaatatttagagttatgtcaggtttacccgttacagtaagattattagatccaccacttcatgaatttttaccaaaagctgataaagacatagaagaagtcgcaagatctttaaatttatcagcaaaagaagttaaagatagaatatcagaacttcatgaggaaaatcctatgcttgggcatagaggatgcagactaggtatttcttttccagagatttatgagatgcaatgtagagcaatatttgaatctatagtcgagttaaaaaagcaaaaagtaaaagctgcttttgtagaaataatgataccattggtttcaactgagtctgaattaaaaattttaagagatttagtaaataaaattgctaatgaaatagaaaaagaaaacaaatcaaaacttgagtatatggttggtaccatgattgaactaccgcgtgctgctttacaagctaaatctatttcaaaacatgctgatttttttagctttggaaccaatgatttaactcaaacaacatttggaataagcagagatgactcaggtaaattcttaaacgattatattgataataaaattttcgatgtagatccatttgtaagtattgatcaaaatggagtaggtgagttagtggaaatagcctcatcaagaggcagaaaaacaaataaaaatattaagttaggtatttgcggtgaacacggtggtgatccaaagagtattgaattttgttctagaacaggactaaactatgtgtcctgctctccatacagagtcccagtagcaagattagctgctgcacaagctgaactaacgaaataaa

SEQ ID NO: 258477 - DNA, 880 bp, Unknown
  Bacterial polypeptide expressing nucleotide sequence isolated from the Sargasso Sea
gctagatactttattacatcccacattagatgaaacagtaaaaaaaaatgttattgcatctgggcttcccgcttcacctggagcagcaagtggcaaagttgtgttttcagctgatgaggctgaaagacttaacggattaatgcaaaatacaatattagtaagagttgaaacttcaccagaggatatacacggtatgcatgcagctaaaggaatccttaccgcgagaggaggaatgaccagtcacgcagccgtagtagcaagaggtatgggaagaccatgtgtttctggatcaagtgaaattacaatagattatgatcaaaaaatatttaaaactggagatgagataattaaagaaggtgaaataattaccattgacggaagcagtggaaaggtgatgaagggattagtcccgacggtgcaacctgaaatttccggatatttctcaaaaataatgggttgggctgatgagtttagaaaactaaaagttagaactaatgctgaaaccgagaatgatagtaaaactgcaagagaatttggtgccgagggaattggtctttgtaggactgaacacatgttttttgatgaagaaagaattttatcagtcagacaaatgatactatctaaatcaaaagaagatagagatagcgcattacaaaagcttttaccttaccaaaaaaatgactttaaaaaaatttttaagattatgtcaggcttaccagtaacagtaagattgcttgatccacctttacatgagtttttaccaaaggctgtaaatgatattgaagaggtagcaagatccttaaacttggcatcaaaagaaattaaagaaagaatttcagagttgcatgaagagaatcccatgttaggacataggggtgta

SEQ ID NO: 258478 - DNA, 869 bp, Unknown
  Bacterial polypeptide expressing nucleotide sequence isolated from the Sargasso Sea
tcaaacaagatctggaaaaagaactgctaagtctgcagttaagatagctgttgacatggtaaaagaaaaattaatttcaaaaaaagaagctgttttgagaattgatccaaattctttagatactttgcttcatcctactttagatgaaaaaagttcaattaatgtaatagcacacggtttaccagcatctcctggcgcagcaagtggaaaagtagtttttacttcagaagaggctgagaggctggctggaatgatgcaggatacaattttagtgagagtagaaacatctccagaagatattcaaggaatgcacgcagccaaaggtattttgactgccagaggtggaatgacaagtcatgcagcagttgttgccaggggtatgggtagaccatgtgtttctggttcaagcgaaattgatattaactacgaaaataaggtatttaaaactccatctttagaaattaaagaaggagaaattataaccatagatggttctacaggaagaattatttcaggaaatattgaaacagttaaacctgaaatttctggagatttttcaaaattaatgtcctgggcagataaatttagaaaattaaaaattagaacgaattcagaaacacccaaagatacaaaaacagccaaagattttggtgctgagggtatcggtctttgtagaacggaacacatgttttttgatgaagagagaatattatctgtaagagaaatgattttatctaaaacaaaagatgatagagcgaaagctcttgataaacttttgcctcaccaaaaagaagattttatgcaaatctttaaaattatgagcggcctgccagttactgtcagactgttagacccccccactacatgag

SEQ ID NO: 258479 - DNA, 819 bp, Unknown
  Bacterial polypeptide expressing nucleotide sequence isolated from the Sargasso Sea
tgccgagggaatcggactttgtaggactgaacatatgttttttgatgaagagagaattttatctgtgaggcaaatgattttatcaaaatctaaaattgatagagatacagccttgtctaaactattaccttatcaaaaaaaggattttatagaaatttttaagataatgaaaggtttgccagtgactgtaagattacttgacccacctttacacgaattcttacctaaaaataaaaatgagattgaactagttgcaaattctttaaatctttccgttaatgaggttgaaattagaatacaagagttacatgaacaaaaccctatgttgggtcacagaggatgtaggttagccatctcatttccagaaatttatgaaatgcaatgtaaagcaatttttgaggcattagtagaatgcaaaaaaaataaaataaaatcgataattccagagataatgataccgttagtctcaaccgaagctgaaatcaaaataatgaaagatctagtaataaaagtcgctaaacaagttcaaaaaaattataatataaggttaaattttttggttggtacaatgattgaattaccaagagcagctttaaaggcaaaggatattgcaaaacatgctgaattttttagttttggtacaaacgatttgactcaaaccacttttggaataagtagagatgatagtgcaaaatttttaaatgattatatcgaaaataaaatttttgaaattgatcctttcatctcaatagatgagggagttggtaatttagttgaaattgctactcaaaacggaagaaaacaaaacaacaaaattaa

SEQ ID NO: 258480 - DNA, 868 bp, Unknown
  Bacterial polypeptide expressing nucleotide sequence isolated from the Sargasso Sea
gcaaatggattgccagcatcaccaggtgcagccagtggtaaagttgtatttacatcagaagaggctgaaagattaaccgcaatgatgcaagatacaattttggtaagagtagagacctctccagaagatatacaaggaatgcatgctgctaaaggaattttgactgccagaggaggaatgacaagtcatgcagctgttgttgcaagaggtatgggtagaccatgtgtatcaggatcaagtgaaattgatataaactatgaaaataaatcttttaaaacttctgcaatggagattaaagaaggagacgtaatcactattgatggatcaactggaagaattattgctggaagtgtttcaactgtgaagcctgaaatatctggtgatttttccaagttaatgtcttgggcagatagctttagaaaattaaaagtaagaacaaattctgaaactccaaaagataccaaaacagcaaaagattttggtgcagagggtattggactatgtagaaccgaacatatgttttttgatgaagaacgaattttatctgtaagagaaatgatattatctaaaacaaaagaagacagagcaatagcattacaaaaacttttaccgcatcaaagaaaagattttatagatatttttaaaatcatgagtggattaccagtcacagttagattgttggacccaccattacatgaatttttaccacgtacagaaaaggaaattaatgaggttgctaatacaattaatctgccagttaaagaggttgagtcaagaattgaagagctccatgagcaaaatcccatgttaggacatagaggatgtcgtctgggaatatcttttcctgaaatttatgaaatgcaatgca

SEQ ID NO: 258481 - DNA, 849 bp, Unknown
  Bacterial polypeptide expressing nucleotide sequence isolated from the Sargasso Sea
tttggacactcaaacagcgagagattttggcgctgaggggattggcctttgtagaactgaacatatgttctttgatgaggaaagaattttatcggtaagagaaatgattttatccaaaacccaagaggatagatcgagagccttagaaaagcttctacctcatcaaaagaaagatttcatagaaatatttaagataatgcaaggtctccctgtaacagtacggttacttgatcctcctttacatgaattcttaccaaaatctgaaaaagaaatttctgaggttgctaaagtagtaggcacagatatcaaagaagttgagtcaagaatagaggaacttcatgagcaaaaccctatgttaggtcatagaggttgtagattgggaatatcttttccagaaatatacgaaatgcaatgtagagcaatatttgaggctttaattgaactgaaaaaaaataaacagaaaagtgctttacctgaaataatgatcccactagtttcaactgaagcagagatcaagataatgaaggatttagtaattaatattgcaaaaaaagttcaaaacgaaaataaaataaaaattgaatttttagttggcacaatgatagaattaccaagagctgcaattaaagccaaagatattgccaaacatgcagaattttttagttttggaacaaatgatttaacacaaaccacttttggcataagtagagatgatagtggtaaatttctaaatgattatattgataataaaatttttattacagatccctttgtgtctattgatgacggtgttaaagatttagtggaaatagcggtagaaaaaggaaaaaaacaaaatagaaaaattaa

SEQ ID NO: 258482 - DNA, 891 bp, Unknown
  Bacterial polypeptide expressing nucleotide sequence isolated from the Sargasso Sea
tttggtgccgaggataggtctttgtcgcacagagcacatgttcttcgatggaaatcgaatagatttgatgcgccagatgatactcgccgcagatgtggaggagcggcgcgcagctctgaaaaagctactgccgtttcaaaagaaagacttccaaggcctctttcgcgccatggaggggcgccctgtcacgattcgccttttagatccgccattgcatgaattcttacccaatgatgatactcggcgtgcagagcttgctcaaaaattaaacgtttcgactgagtacattatcgaacgaattaaggcgctgcacgaggaaaacccgatgttaggctgtcgaggctgcaggcttggtgttttgcatcctgaaatcactgagatgcaagtccgtgcgatctttgaggccgctgtctctttgcgaaagagcaagcgtcctgtgatagtaaaacctgaaatcatggtgccactggtgggctttgatgccgaactcagggatcaagtgactatcgtgcgggcggttgccgatgaggtgttgactaagacgggtatagagattccatatcaggtaggtactatgattgaagtccctcgagctgctattactgccgatgagattgcccaaacagcagagttttttagttttgggacaaacgatctaacacaaaccactctaggactttctagagatgatatggggtcattttttgacgtgtatcgtgacaaggaaatctacggccacaatcctttcgccagcattgatgaagcaggggttggtcgcttgatgcggacggctattcgtggcggcaaagacaagcggccgagtctcaaattaagtatctgtggtgagcacgcaggcgatgcgtcttctatcgcgttctgtgaagagctttg

SEQ ID NO: 258483 - DNA, 864 bp, Unknown
  Bacterial polypeptide expressing nucleotide sequence isolated from the Sargasso Sea
agatagagataaagctctagctaaattattaccacaccaaagaaatgactttgttgaaatatttaaaataatgaatgggcttccagtaactgttagactgttggacccacctttgcatgaatttttaccaaagaataaagatgaaattaatgatgtagcgaaatcattaaatttaaatattaaagagattgaaggaagaattagcgaactacacgaacaaaatcccatgctaggtcatagaggatgcagactaggaatttcttttcctgaaatttatgaaatgcaatgtagagcaatatttgaagcattagttgaatgtaaaaataaaaaatataaatctattatacctgaaataatgattcctcttgtttctacagaagaagaaataaaaataatgaaaaatttagttataagagttgctagcaaagttcaaaatgaaaaaaaatctaaattagattttttagtaggaacgatgattgaacttccaagagctgcaataaaagcaaaagatatagctaaacatgcagagttttttagttttggaacaaatgatttaacgcaaactacgtttggaattagtagagatgatagtggaaaattcttgaacgattatattgaaaataaaatttttgatatagatcctttcatttcaatagatgatggggtgggtgatttaattgaaattgccgttattaaaggaaaaaaacaaaataaaaaaattaaactaggtatatgtggagaacatggcggagatcctaagagtataaatttttgttcaaaaataggattggattacgtttcttgttctccgtatagagttcctattgcaagactagctgctgcacaagcacaattatcaaaaaa

SEQ ID NO: 258484 - DNA, 915 bp, Unknown
  Bacterial polypeptide expressing nucleotide sequence isolated from the Sargasso Sea
aagtgctgactcggacgttaagagagttctagagggaaaattaaggccaaccaatagctacaccttcagtttatttgaaacggtcatgaaatgggctgatcgacagcgcagccttaagataaggactaatgctgataccccagctatggcaaaacaagccgtctcttttggggccgagggaataggcctttgccgaactgaacacatgttctttgatggtgatcggataaattttatgcgccaaatgatcttagctgttgacgaggtgcagcgaagatcggcattgaaaaaattactgccttttcagaaaaaagattttgtcggattatttaaggaaatgaatggaaggccggttaccattcgcttgctagatcccccacttcacgaatttttgccacaagacgatgtggtaagacgtcagctcgctgagaagctgggtgtaccctttgactttgttatagatcgaatcaagtccttacatgaagagaaccctatgctgggatgccgcggctgcagactggggattctctatccggaaattactgaaatgcaaacccgcgcaatatttgaagctgctgcgcaagttcaaaaaagtaaaaaacgcataaaagtgaacccagaaataatgattcccttagtcggattccaagaggaattagcagatcaactatctattgttcaccgggtcgcaaaggaagtaatgaaggcaaggaaagtccgtattaattatattgttggcactatgatagaggttccgagagcagcgataacggctgatgagatagcgaaagaggccgatttctttagctttggtacgaacgatttgacacaaactaccctaggtcttagtcgggatgacatggggcttttttatgatgagtatcaacgtaaagagatctatcataaaaacccatt

SEQ ID NO: 258485 - DNA, 856 bp, Unknown
  Bacterial polypeptide expressing nucleotide sequence isolated from the Sargasso Sea
aaatcttcagtcaaaattgcagtagatatggttaaagaaaaaataatttcaaaaaaacaagcaattttaagaatagatcctaatactttagaaactcttttacatccaagtttagatgaaaaaagtgaactgaatgtaatagccaaaggtctaccagcatctccaggagctgcgagtggaaaagtagttttttcatcagatgaagcagaaagactcagtgatgttatgcaaaatacaattttagtaagaatagaaacttctcctgacgacattcatggaatgcatgcagcaaaaggaattctaactgctagaggaggaatgactagccacgcagccgttgtagctagaggaatgggaagaccttgtgtatcaggttctagcgagattgatattgattataagaataaattattcaagacaaaaaactatgaaattaaagaaggcgatgtaattactattgatggatcgacgggtagaataattttaggaaaagttaaaacaattaaaccagagatttccaatgatttttcaaaagttttaaattgggcagatagtttaagaaaattaaaaattagaacaaattctgaaactccacttgatagtaaaattgctagagaatttggcgccgaaggtattggcttgtgtagaacagagcatatgttttttgaagaagagagaattctttcggtcagacaaatgatattgtcaaaatcaaaagaagatagagacaaagctctagataagttgttacctcaccaaaagaaagattttgttgaaatatttaaaataatgaatggactgccaaaaacagtaaggttgctggatccgcctttgcacgaatttttaccaaaaaaga

SEQ ID NO: 258486 - DNA, 816 bp, Unknown
  Bacterial polypeptide expressing nucleotide sequence isolated from the Sargasso Sea
aaagaaattttaaaatcatgaagggtttacctgttacagttagacttttagatcctcctctacacgaatttcttcctaaaactgataaggacatagaagaggttgctagatctctaaacctaggtgtaaaggagataaaaaatagggtggcggaactacacgaattaaatcctatgttaggccacagaggatgtaggctaggtatttcctttccagaaatttacgaaatgcagtgcaaagcaatatttacagctttaatcgaatgcaaaaaagaaaaaatacaatccataataccagaaataatgatacccttagtttcaaccgaggatgagcttggaataatgagaaaattagttaaccgagtggctaacgaacttcaaaaagaacacaaaataaaaattaattatttcgttggtaccatgattgagctaccacgggcagcattaagggcagcaccaatatcaaggtatgcagatttttttagttttggtacgaacgatttaacccaaacaacatttggtattagtcgcgatgactcaggaaagtttttaaatgattatttagaaaataaaatttttgatggagatccattcgtaagtattgatagagatggcgttggtgagttagtcaaaattgcatctgaaagaggaaaaaaacagaataaaaaacttaaattaggaatttgcggagaacatggtggagatcctcgaagtattgatttttgttcaaaagtgggattaaattatgtttcttgttcaccgtttagagttccaattgcaagactagcagctgcacaagctgaacttaggagataaa

SEQ ID NO: 258487 - DNA, 774 bp, Unknown
  Bacterial polypeptide expressing nucleotide sequence isolated from the Sargasso Sea
agatagagcaaaagcattaaaaaaattattaccacatcaaagaaaagattttattgaaatattcaagattatgcatggtctaccagtaacagttcgtttacttgatccaccattacatgaatttttgcccaaatcatcaaaagaaatttcagaagttgctaatgtagttggagtagatgtaaaagaggtggagtctaggatcgaagagttgcatgaacaaaatccgatgcttgggcacagagggtgtagactgggtatttcttttccagaaatttatgagatgcaatgtcgtgcaatatttgaggcactatctgaacttaaaaaaaataatcaaaaatctgcttttccagaaattatgataccactagtttcaactgaagcagaaataaagatcatgaaagatttagtaattagagttgcaggaaaagtagagaaagaaaataaattaaaagtaagttatttagtaggtacaatgattgaattaccaagagctgcaattaaagcaaaagatattgcaaaacatgctgaattttttagttttgggacaaatgatttaactcaaacaacttttgggattagtcgtgatgatagtggaaaatttttaaatgattatattgaaaataaaatattttccatagatccctttgtttcaattgatcaaggagttgaagatttaattgaaatagcagtagatagaggaaaaaaacaaaataaaaaaattaaactaggaatttgtggtgaacatggaggtgatccaaaaagtattcatttttg

SEQ ID NO: 258488 - DNA, 856 bp, Unknown
  Bacterial polypeptide expressing nucleotide sequence isolated from the Sargasso Sea
aagacagcgagagaatttggtgcagagggtattggactttgtagaacagaacatatgttttttgatgaagaaagaattctatcagtaagacaaatgattctatctagatctgtagaagacagaaatcatgccctattaaagctattgcctcatcaaaaagatgattttaaaaaaatatttaaagttatgtcaggcttacctgttacggtaagattattagatccacctttacatgaatttttgcctaaagctgaaaaagacatagaagaagttgcgagatctttaaatttatcttctaaagaaatcaaagatagaattgcagaacttcatgaagaaaatcctatgttaggtcatagaggatgtagacttggaatttcatttcctgaaatttatgaaatgcaatgtgaagcaatttttgaagcattagtagagctaaagaaagaaaaaactaaagcagcatttgttgaaataatgatacctttagtatctacagatacagaattaaaaattttaagagccttagtaaaaagaatagctaagaagattgaattaaaaaacaaaaccaaattagattacattgtcggaacaatgatagagctaccaagagctgctttacaagctaaatcaatatcaaaacatgctgatttttttagttttggaactaacgatttaacacaaaccacactaggtattagtcgtgatgactcaggtaagtttttaagtgattatattgataataagatttttgatattgatccatttgtaagtattgaccaaagtggagtaggtgaacttgtcgagttagcttctgctaggggaagaaaagccaataaaaaactcaaactaggaatttgtg

SEQ ID NO: 258489 - DNA, 814 bp, Unknown
  Bacterial polypeptide expressing nucleotide sequence isolated from the Sargasso Sea
ccaaaaaaatgattttattgaaatatttaaaattatgagcaatttgcctgttacagtaagattgttagatccgccattacatgaatttcttccaagaacagaaaaagaaattaatgaactagcaaatgaattaaaattatctattaaagaaattaaaggtagaattaatgagttgcacgaacaaaatccaatgttgggccacagaggatgtagattgggcatttcttttcctgaaatttatgaaatgcaatgtagagcaatctttgaagcattatcagagttagaaaagaaaaagataaaatcagcatttccagaaataatgatacccttggtatctaccgaagcagaaataaaaattatgaaagatcttgtaataagaactgcaaaaaaagttcagagtcaaaataaaacaaagattaaatttctagttggaactatgattgagttgccaagggccgcaataaaagcaaacgatatagcaaagcatgctgaattttttagctttggaacaaacgatctaacacagacaacatttggaattagcagggatgatagtggtaaatttttaaatgattatattgagaataagatttttgatatagacccttttatatcaattgatgaaggagtgggagatctaattaaaattgcttctgaaaaaggaagaaaacaaaataaaaatataaaattaggaatttgtggtgagcacggaggggatcctgcaagtattcatttttgttcacaagtaggcttagattatgtttcatgttctccatatagagttccagtagcaagacttgctgcagcgcaagca

SEQ ID NO: 258490 - DNA, 849 bp, Unknown
  Bacterial polypeptide expressing nucleotide sequence isolated from the Sargasso Sea
tctggatgaaaaaagttctatagaagtaattgcaagcggtcttcctgcatctcctggcgcagcaagtggaaaagtagtctttacatctgaagaagctgaaagattaaatgatatgatgcaagatacaattttggttcgagtagaaacatctcctgaggatattcaaggtatgcatgctgcaaaaggaattttaacagccagaggtggcatgaccagccatgctgcagtagttgcaagaggaatgggaagaccttgtgtttcaggttcaagtgaaattgatattaattatgaaaaaaaagtttttaaaactttgtcggttgaagttaaagagggagatataattactatcgatggttctacaggaagaattatcttaggaaatgtgccaacggtcaaaccagaaatttctggtgatttttctaaattaatgggatgggctgatgatataagaaaattaaaagtaagaacgaattctgaaacgccattagacacaaagatagctagagattttggggcagaggggattggactttgtaggacagaacatatgttttttgatgaagaaagaattttatctgtacgagaaatgattttatcaaaaactcaagaggatagagcaaaggctttaaaaaagcttttaccacatcaaaaaaaagattttatgaaaatatttgagattatgcatggattaccagttacagttcgattgcttgatccacctttgcatgaatttttaccgaaatctaaaaaagaaatcacagaagttgcaaatgctattgggataaatgtaaaagaagtggagtctagaattgaagaattgcatgagcaaaatccaatgcttggacatag

SEQ ID NO: 258491 - DNA, 738 bp, Unknown
  Bacterial polypeptide expressing nucleotide sequence isolated from the Sargasso Sea
tcctactttagatgaaaaaagttttatcaaggtaattgctaatggccttccagcatccccaggagcagcaagtggaaaagtagtttttacatctgaagaagctgagagattaaatgatatgatgcaggatacaattttagtaaggattgaaacatctccagaagatattcaaggcatgcatgcagcaaaaggaattttgactgctagaggtggaatgacaagtcatgccgcagttgtggcgagaggcatgggaagaccctgtgtttctggctctagtgagatcgatattaactatgatctaaaaacttttaaaacatcatctatagaagtcaaggaaggagatacaattactattgatggctctacaggaagaattattttagggacagtcccaacagtaaaacccgaaatttctggtgatttttctaaattaatgagttgggctgatggtataagaaaattaaaagtaagaacaaattctgaaactcctttagatacaaaaattgcaagagattttggagctgaaggaattggtctttgtagaactgaacatatgttttttgacgaggagagaattttatcagttagagaaatgattttatctaaaactccagaagatagagctattgcattaaaaaagcttctacctcatcaaaaaaaagattttatggaaatatttaaaatcatgcatggccttccagttacagtaagattattggacccaccattacatgaatt

SEQ ID NO: 258492 - DNA, 747 bp, Unknown
  Bacterial polypeptide expressing nucleotide sequence isolated from the Sargasso Sea
cctaatacactcgatacattgttacatccaacattagatgaaaaagttaaaaaagaaattattgcttcagggttgcctgcatcaccaggagctgcaagtggaaaagttgttttcacagccgatgaagctgaaaggcttaacggaatgatgcaagacacaatattagtcagattagaaacttcacctgaggatattcacggcatgcatgctgcaaaagggattttgacggctcgaggcgggatgacaagccacgcagcagtagttgctagaggtatgggaagaccttgtgtatctggttcaagcgaaattacaattgattatgaaacaaaaaaatttaaagcaggcaatgagattataaaagaaggagatatcataactattgatggaggaagcggcaaagtgatgaaaggattagttccaacggttcaacctgagatatctggatatttttctacaattatgaaatgggctgacgaatttagaaaattaaaagttagaactaatgcagagacggaagcagatagtaaaacagcgagagaattcggtgcagaaggcattggtctttgtagaacagaacatatgttttttgatgaagaaaggattttatcagtaagacaaatgattttatctaaatctatagaagatagaaatcatgcgttgttaaagcttttacctcatcaaaaagatgattttaaaaaaatatttaaagttatgtctggtttgcctgttacagtaaggttattagac

SEQ ID NO: 258493 - DNA, 799 bp, Unknown
  Bacterial polypeptide expressing nucleotide sequence isolated from the Sargasso Sea
actccggaagaggcagagagattaaatgatatgatgcaggatactattctagttagagtagagacatcaccagaagatattcaaggaatgcatgcagctaaaggaattttaacagcaagaggtggtatgacaagtcatgctgcagtagttgccaggggaatgggcagaccttgtgtatctggttctagtgagatcgatattaattatgaaaaaaaattctttaagacttcatcttgtgaagttaaagaaggagacataattacaatagatggatctactggaagaattattttaggtagtgttccaacagtaaaacctgaaatttcaggagatttttcaaaattaatgaagtgggctgataatattagaaaattaaaagttagaacaaattccgaaactccaatcgacactaaaaatgccagagaatttggtgcagaaggcataggtttatgtaggacagaacatatgttttttgatgaagagcgaattttatcagtgagggaaatgattttatcaaaaactcaagaagatagagcaaacgctttaaaaaaacttttaccacaccaaaaaaaagattttatagatatattcaaaattatgcatggtttacctgtcactgtaagattgttggatccaccattacatgagtttttaccaaagtcaaaaaaagaagtttctgaagttgcaaacataataggattagatgaaagtgaagtagagtccagaattgatgagcttcacgaacaaaatccaatgttaggtcatagaggttgtagattgggcatctcttttccagaaa

SEQ ID NO: 258494 - DNA, 840 bp, Unknown
  Bacterial polypeptide expressing nucleotide sequence isolated from the Sargasso Sea
aggaaaaagaacagcaaaatcagcagtgaagatcgcagttgatacggttaaagaaaaattaatttctaaaaaggaagctgtattaagaattgacccaaattctttagacacacttttgcaccctactttggatgaaaaaagttcaattaatgttatagcaaatggattgccagcatcaccaggtgcagccagtggtaaagttgtatttacatcagaagaggctgaaagattaaccgcaatgatgcaagatacaattttggttagagtagagacctccccagaagatatacaaggaatgcatgctgctaaaggaattttgaccgctagaggaggaatgacaagtcatgcagctgttgttgcgagaggtatgggtagaccatgtgtatcaggatcaagtgaaattgatataaactatgaaaataaatcttttaaaacttcttcaatggagattaaagaaggagacgtaatcactattgatggctcaactggaagaattattgctggaagtgtttcaactgtgaagcctgaaatatctggtgatttttccaagttaatgtcttgggcagatagctttaggaaattaaaagtaagaacaaattctgagacaccaaaagataccaaaacagcaaaagattttggtgctgagggtattggattatgcagaactgaacatatgttttttgatgaagaacgaattttgtctgttagagaaatgatattatctaaaacaaaagaagacagagcaatagcattacaaaaactgctaccacatcaaagaaaagattttatagatatttttaaaatcatgtatggattaccagtcacagttagattgttgga

SEQ ID NO: 258495 - DNA, 946 bp, Unknown
  Bacterial polypeptide expressing nucleotide sequence isolated from the Sargasso Sea
taccattgatggatcaactggtagaattatatcaggaagtgtggccacagttaaaccagatatatctggggatttctcgaaaataatgacttgggcagataattttagaaaattaaatattagaacaaattcagaaactcctaaagacaccaaaacagcaaaagattttggagctgaaggaattggtctttgtagaacagaacacatgttttttgatgaagaaagaattttatcagtaagggaaatgattttatctaaaaccgaagaggatagatcaattgcattaaaaaaacttttacctcatcaaaaaaaggattttaaagaaatatttaaaattatgagtggattaccagtcacagtaagattattagatccgccacttcacgagtttttgccccgaacagataaagagattaatgaagttgcaaatattgttaatcttccggtaaaagaagtagaaaatagaattaacgaattgcatgaacaaaatcccatgttgggtcatagaggatgtagacttggaatatctttccctgaaatatatgaaatgcaatgtagagcaatatttgaagctttaactgagcttaaaaaggaaaaaattagatctgcttttccagaaattatgatcccattagtttctaccgaagcagaaataaaaattatgaaggagctagtaattagaattgcaagcgaagttcaaaaagaacataaattaaaagttgattttatggttggcacgatgattgaacttcctagagctgctataaaagccaaagatatagcaaaacatgctgaattttttagtttcggaactaatgatttaactcaaactacattcggaataagcagagatgatagtggaaaatttttgaatgattatatagataataaaattttttcaattgatccgtttatctcaatagatgatggagttggggatttaata

SEQ ID NO: 258496 - DNA, 846 bp, Unknown
  Bacterial polypeptide expressing nucleotide sequence isolated from the Sargasso Sea
cttatcaaaaaaatgattttattgagatttttaaaataatgaatggtttacccgtaacagtcagactgttagaccctcctctacatgaatttttaccaaaaacaaaaaaagatattgatgatatagcgaaagaattaaatatatctcataacgatatcaaatctagaattactgagctacatgagcaaaatcctatgctggggcacagaggatgcaggttaggaatttcctttccggaaatttatcaaatgcaatgtaaagctatctttgaagctttagcagaatgtaaaaagaaaaaattaaaattggttataccagaaataatgatacctttagtctctactgcagctgagattaagataattagaaatttagttgataagaccgcaatggaaatacaaaaagaacattctattaaaattaaatattatgtgggtactatgatagaacttccaagagcggcattaagagcaaaagatattgcaaagtatgcagatttttttagttttggaacaaacgatttaacacaaactacttttggaattagccgcgatgactcaggtaaatttcttaacgattatgtagataataaaatttttaataaagatccgtttattagtattgatgaaagaggagttggagaactaattaaaattgctacagaaagaggaagattacaaaaaaaatctatcaaactaggtatttgtggagaacatggtggagatccatcaagtattgaattttgtgaaaaagctaaattaaactatgtatcatgctctccttatagagttccaatagcacgtcttgcggctgcccaagcatacaaaaagaaaaaatcagtttaaa

SEQ ID NO: 258497 - DNA, 713 bp, Unknown
  Bacterial polypeptide expressing nucleotide sequence isolated from the Sargasso Sea
tgggttgccagcatcaccaggtgctgcaagtggtaaagtagtatttacatctgaggaagcagaaagattaactgcaatgatgcaagatacaattttagttagagtagagacttctccggaagatatacaaggaatgcatgctgctaaaggaatattaactgctagaggaggaatgacaagtcatgcggctgttgttgcaagaggtatgggtagaccatgtgtatcaggatcaagtgagattgatataaattatgaaaataaatcttttaaaacttcctcagtggagattaaagaaggagacatcatcactatagatggctcaacaggaagaattattgcaggaggcgtttcaactgtgaaaccagaaatttctggtgatttttcgaaattaatgtcttgggccgacagttttagaaaattaaaagtaagaacaaattctgaaactccaaaagatactaaaacagcaaaagactttggtgcagagggtattggactatgtagaactgaacacatgttttttgatgaagaaagaatcttgtctgtaagagaaatgatattatcaaaaacaaaagaggacagagcaatagcattagaaaaattgttgccgcatcaaagaaaagattttattaatatttttaaaattatgagcggattacctgttacagtaagattgttagacccaccactacatgaatttttaccacgcacaaaaa

SEQ ID NO: 258498 - DNA, 942 bp, Unknown
  Bacterial polypeptide expressing nucleotide sequence isolated from the Sargasso Sea
ttttacggagaatggcttcaaaatgctcaaggtgaagacgtagttgctgggattaggacacctcatcctttaaatgaagcaacaaaagaagaggaatcgaaacacttagagtctttagaagaatttttaccagatgtatatggccaacttgatgaaattcgaatcaaactagaaaatcattataatgacatgcaggacattgaatttacaattgaagaaggtcgtctttggatgttgcaaacgcgcacggggaaaagaacaggtggtgctgctattcaaatggcagtagacatggtaagcgataatatgatttcaaaagaagaagcaattatgcgagtaacgccagatcaaattgatgaattactacatccaagacttaatattgaagaagaaaaaaaagctgtttctttaactcgaggcttacctgctggcccaggaggtgcggtcggacaagtagtttttactgctgatgacgcagaaaattggcataaaaaaggtaataatattgtactagttagggaagaaacttcccccgaagatgtacatggaatgcatgttgccgaggctattctaacagccaaaggaggaatgacatcccatgctgcactagttgcaagaggatggggaaagtgttgcattgttggttgctcagctatcaatattgattttgagaaaaagcaaatgacaattgataatgaaacaattaaagaaggtgactggatatcaatgaatggatcaacaggcacagtctaccctggacaagttaatcttgaatcagctgatccacaatcaaatcgatcctataaggatttaatatcgtgggctgatgaatttaggacattaaaaattcgcacgaacgcagatagtccacaagatgctttccaggctattgaatttggggcagaggggattggattatgtagaactgaacacatgtttttt

SEQ ID NO: 258499 - DNA, 865 bp, Unknown
  Bacterial polypeptide expressing nucleotide sequence isolated from the Sargasso Sea
tttacagaaaacccatcagatggctcaaataatatttatggagaatacttaattaatgctcaaggagaagatgttgttgctggaactagaacacctcaatacataaccacaaaagcaaaaaaagacgcaaatgttaaagaagcttctatggaagagtctatgccgaaagtttatttagaattatttaagatattaaaaaaattagagaaatattataaagatatgcaggatgttgaattcacagttgaaaataaaaaactttggatattacaaacacgttcgggtaaaagaacctcaaaatcagctgtaaagatagcagtcgatatggttaaagaaaaactaatttcaaaaaatgatgcagttttaagaattgatccaaattctttagatacacttttacacccaactttagatgaaaaaagttctatagaagtaattgcaaatggacttcctgcctcaccaggagctgcgagtggcagagtagtttttacctcagaagaagctgaacgattaaatgatatgatgcaagatactattttagttagagtagaaacatctcctgaggatattcaaggtatgcatgcagctaaaggaatacttacagcaaggggaggtatgacaagccacgctgcagtggttgcaaggggcatgggtagaccttgtgtttctggttcaagtgaaattgatattaattatgaaaaaaaaatttttaaaacttctttaatagaaataaaagagggtgatgtaatcactatagatggttctactggaagaattattttgggaaaagttccaactgtaaaacctgaaatttctggtgatttttcaaaattaatggaatgggcagataaagtaaggaagtaaa

SEQ ID NO: 258500 - DNA, 818 bp, Unknown
  Bacterial polypeptide expressing nucleotide sequence isolated from the Sargasso Sea
tgaaactccattagatagtaaaattgcaagggaatttggagcagaaggtataggactatgtaggactgaacatatgttttttgaagaagaaagaattttatcggtgagacaaatgattctttcaaaatcaagtgaagacaggaatatagctttatcaaaacttttaccacatcaaaaaaaagattttatagaaatatttaaaattatgggtggtttgcctgtcacagtaagacttttagatccaccattacatgaatttttaccaaaaaatgaaagtgaaataaccgatgtttcaaaatcactaaatttgtcaattaaagaagttgactcaagaattaaggaacttcacgaacaaaatcctatgctaggacatagagggtgtaggctgggtatttcttttcctgaaatttatgaaatgcaatgtagagccatttttgaagccctagttgaatgtaaatataaaaaatttaaatctattttaccagaaataatgatacctttggtatctactgaagcagaaataaaaataatgaaagatttagttataaagatagctaaaaaagttcaagatgaaaataaaataaaaatagattttttagtgggaactatgattgaacttcctagggcagcaattaaagcaaaagatattgcaaaacatgcagaattttttagttttggaacgaacgacttaactcaaactacatttggcataagtagagatgatagtggtaaatttttaaatgattacattgaaaataaaatatttgatgttgatccatttatatccatagatgatggagtgggtgatttaattaaaa

SEQ ID NO: 258501 - DNA, 954 bp, Unknown
  Bacterial polypeptide expressing nucleotide sequence isolated from the Sargasso Sea
gcagctaaagggattctaactgcaagaggaggaatgacaagtcatgctgcagtagtagcaagaggaatgggtagaccatgtgtttcaggttcaagcgaaataacaatcgattatgaattaaaacaatttaaagctggagacgttattattaaagaaggagatattattactatagatggtggaagcggaaaggtaatgaaaggactagttcctactgttcaaccggaaatttctggatatttctctacaataatgaaatgggctgataaatttaggaaactaaaagtaagaacaaacgctgaaacagaagcagatagtaaaacggctaaagagttcggcgctgagggaataggtttatgcagaactgagcatatgttctttgatgaagagagaattctatctgttagacaaatgattttgtctaaatcaaaagaggatagaaatagtgcactagataaacttctacctcatcaaaaaaaagattttaaaaaaatatttaaagttatgtcaggcctacctgtcacaatcagactattagatccaccacttcatgaatttttaccaaaagttgacaaagacatagaggaagtcgcaagatctttaaatttatcagcaaaagaagttaaagatagaatagcagaactgcatgaggaaaatcctatgcttggacatagaggatgcagattaggtatttctttcccagagatttacgagatgcaatgtagagcaatatttgaagctatagttgaattaaaaaaacaaaaagtaaaagcagcatttgtagaaattatgataccgttagtatcaactgagtctgaattaaaaattttaagagctttagtcaataagattgccaaagagattgaaaaagaaaacaaactcaaacttgattatttggtaggcactatgattgaattaccacgtgccgctttacaagcgaagtctatttcaaaa

SEQ ID NO: 258502 - DNA, 994 bp, Unknown
  Bacterial polypeptide expressing nucleotide sequence isolated from the Sargasso Sea
tggagaatatcttattaccgctcaaggggaggatgtagtagccgtacaaaggacccccaaaattacattacaaaaaaagctaacaaagactcaaattcaaaaggtaaatcaatggaagaagctatgccaaaagtttatttccaactcaaaaaaattctaaaacttttagaaaaatattacaaggatatgcaagatgtagaattcactgtcgaaaattctaaactttggatgctccaaacaagatctggaaaaagaactgcaaaatctgctgtaaaaatagctgtagacatggtcaaagaaaaattgataacaaaaaaagaagcagtgttaagagttgatcccaatgctttagacacacttctccatccaactttagatgagacaaaagaaataaaaactattgcaaaaggtttgcctgcgtccccaggtgctacaagtggaaaagttgttttttcatctgacgaagcggaaagattaaatgggatgatgcaagacacaatacttgtgagagtagaaacttcacccgaggatatccatggcatgcatgctgcaaaaggtattttaactgctcgtggaggaatgaccagtcatgctgctgttgttgcaagaggcatgggaagaccatgtgtttcaggatcaagtgaaatagatattaattatgaacaaaaaatattcagaacttcttcaaacgtagaagtaaaagagggagatgtgattacaattgatggatcaacaggaagagtaattttagacaaagttccaacattaaagccagaaatttccggtgatttttcaaaattaatgagttgggctgacagttatagaaaattaaaagtaagaacaaactcagaaactcctcttgatacaaaaactgcaagggaatttggggctgagggtattggtctttgtaggactgaacatatgttttttgatgaggatagaattttatctgtaagagagatgattttatctaaaactatgaggacagaaataa

SEQ ID NO: 258503 - DNA, 967 bp, Unknown
  Bacterial polypeptide expressing nucleotide sequence isolated from the Sargasso Sea
ttctccagaggatattcacggcatgaatgctgctaaaggaattttaactgctcgaggtggaatgacgagtcatgcagcagtagttgctagaggaatgggaaggccctgtgtttctggttcgagtgaaatcacaattgattatgaaacaaaacaatttaaagcaggtaacgagattataaaagagggcgatatcataacaattgacggaggtagtggaaaagtaattaagggttcggttccaacagttcaaccagaaatatcaggttatttttctacgattatgaaatgggctgatgaatttagaaaattaagagttagaacaaatgcagaaacagaagcagacagcaaaacagccagagaatttggcgctgagggcattggcctttgtagaacagaacacatgttttttgatgaagaaaggattttatcagtaagacaaatgatcttatctaaatctgcagaggatagaaatcatgcattattaaaactcttacctcatcaaagaaacgattttaaaagaatatttaaagttatgtctggcttgccagtaacagtaagactactagacccacctttacatgaatttttgcctaaagcggaaaaagatatagaggaagttgcaagatctttaaatttatcatcaaaagaaattaaagacagaatttcagagcttcatgaagaaaatccaatgttaggtcacagaggatgcagattaggaatttcgtttccagaaatttacgagatgcaatgtgaagctatatttgaatcattagttgaacttaagaaagaaaaaattaaggcagctttcgttgaaataatgatacctttggtatcaacagaagcagaattaaaaattttaagagctttagtaaaaagaatagctaaaaaaattgaattaaaaaataaaactaaattagattttatagttggaacaatgattgagttgcctagagcagctttacaagcc

SEQ ID NO: 258504 - DNA, 836 bp, Unknown
  Bacterial polypeptide expressing nucleotide sequence isolated from the Sargasso Sea
ttatcaaagaaaagattttgttgatatttttaaaattatgagtggattaccagtcacggtaagattgttggatccaccattacatgaatttttgccacgtacagaaagggaagttaatgaagttgcgaatatagttaaacttccagttaaagaggttgagtcaagaatagaagagttacatgagcaaaatcctatgttaggtcatagaggctgtcgtctaggtatatcttttcctgaaatttatgaaatgcaatgtaaagcaatatttgaggctttagtacaccttaaaaaaaataaaattcaatctgcatttccagaaataatgatacctttagtgtctactgaggctgaaataaaaataatgaaagatttagtaaatagaactgctggtcaagttcaaaaagaacataaattgaaaatagaatttttagttggcacgatgattgaattgccaagagcagcaataaaagcaaaagagattgctagacatgcagaattttttagttttggaacaaatgatttaactcaaactacttttggcattagtagggatgatagtggtaaatttttgaatgattatttagaaaacaaaattttttctattgatccttttgtttcaattgatgaaggagtttctgatttagttgaaattgcagtagaaaaaggaagaaaacaaaacaaaaaacttaaattaggtatttgtggagagcatggaggagacccacatagtatatctttttgttctaaagctggattaaattatgtttcttgttctccctacagagttcctgttgccaggttggctgctgctcaggctgaaattaaaaaaaaataaa

SEQ ID NO: 258505 - DNA, 855 bp, Unknown
  Bacterial polypeptide expressing nucleotide sequence isolated from the Sargasso Sea
tgcagaaacagaggtagacagtaaaacagctagagaatttggcgccgaaggaattggcctatgtagaactgagcatatgttttttgatgaagagagaattttatctgttagacaaatgattttatctaaatcaaaagaagatagaaatagtgcgctagaaaaacttctaccccatcaaaaagaggactttaaaaaaatatttaaagttatgtcaggtttacctgttacagtaagattattagatccaccacttcatgagtttttaccaaaaactgacaaagacatagaggaagtcgcaagatcctttaatttatcagcaaaagaagttaacgatagaatagcagaacttcatgaagaaaatcctatgcttggacatagaggatgtaggcttggtatttcttttccagagatttacgagatgcaatgcagagcaatatttgaagctatagtcgaattaaaaaagcaaaaagttaaagcagcttttatagaaataatgatacctttagtatcaactgaatctgaattaaaaattttaagaactttagttaataaaatagctaaagaaatagaaaaagaaaataaattaaaacttgagtatatggtaggtactatgattgaattaccacgtgctgctttacaagccaaatctatttcaaaacatgctgatttcttcagttttggaacaaatgatttaacacaaacgacttttggaataagcagggatgactcgggaaaatttttgaatgactatattgataataaaatttttgatgtagatccattcgtaagtattgatcaaaatggagtaggagaactagtagaaattgcttcttcaagagggagaaaaacaaataa

SEQ ID NO: 258506 - DNA, 742 bp, Unknown
  Bacterial polypeptide expressing nucleotide sequence isolated from the Sargasso Sea
catggtcttcctgttacagtaagattgttagatcccccattacatgaatttttacctaaatctgataaagagatttctgaggttgcaaatgttgttggtacggacattaaagaagtacagtctagaattgaagagctccatgagcaaaatccaatgcttgggcacagaggttgtagactaggtatttcttttccagaaatttatgagatgcaatgtagggctatttttgaagcattagtggatcttaaaaaaaataaacataaatcagcatttcctgaaattatgatacctcttgtttcaactgaggcagagataaagattatgaaaaatttagtaattaacacagcaaagaaggttcaagatgaaaataaaactaagatagaatttttggttggtactatgattgagctacctagagctgcaataaaagcgaaggatatagctaaacacgctgaattttttagttttggcacaaatgacctgacacaaactactttcggaattagtcgagatgatagcgggaaatttttaaatgattatatcgataacaaaattttctctatagatcctttcatttcaattgatgaaggagttgaggatttaataaaaatagctgtagaaaaaggtaagaaacaaaataaaaaaattaaactaggaatttgtggtgagcacggaggtgatccaaaaagtattcatttttgctctaaagctggacttcattatgtatcttgctctccatata

SEQ ID NO: 258507 - DNA, 820 bp, Unknown
  Bacterial polypeptide expressing nucleotide sequence isolated from the Sargasso Sea
tggaaagggtttaccggcatcacctggagcggcaagtggtaaagtagcattttcatcagaagaagcagaaaggttaaatgctatgatgcaaaatactatactagtaagagtagaaacgtctcccgaggacattaatggtatgcatgctgcaaatggaattttaacatccagaggaggaatgaccagtcacgctgctgttgttgcaaggggtatgggtagaccctgtgtatccggttgtagtgaaattgatattgattatgaaaaaaaaactttcaaaattaaaaatttagaagtccaagaaggagatgtaattactattgatgggtcatcaggcagaattatattgggagatgtagaaactattaaacctgaaatatcaggagaattttctaaaataatgaaatgggctgatagctttagaaaattaaagattaggactaacgctgagacaataatggatacaaaaactgccagagaatttggagccgaaggaataggtctttgtagaacagaacatatgttttttgacgaagagagaattatttttgtaagacaaatgattttatcaaaatcaaaaaacgataggaacaaggctttatctaaattattacctcaccaaaaaaatgactttgtggagatatttaaaattatgaatggtttaccagtaacagtcagattattagacccacctttacatgagtttcttccaaagaatgaaaatgagataaatgaggtagcaaaatccctaaaattatctttcaaagaagtagaaggaagaataagtgaacttcacgaacaaaatcctatgctagggcacaga

SEQ ID NO: 258508 - DNA, 856 bp, Unknown
  Bacterial polypeptide expressing nucleotide sequence isolated from the Sargasso Sea
taagccagatgctatacttcgtatagatccaatttcactcgatcaactgctccatccagccctcgatcctgaagcgccaaggcttgtaattgctcaaggtcttcctgcatctcctggggccgcagttggaagagttgtatttactgctgatcaagctgaggatatggcagctaaaggtgagtcagttatacttgtaagggcagagactagtcctgaagatattcatggcatgcatgctgccaagggtatagttacttcaagaggtgggatgactagtcatgcggcagttgttgctaggggtatggggcgaccatgtattacgggcgcatctgctcttaaaatagactccgtgaatcgtattatttcaatagatggtaaaactataactgaacaagacattataactgtggatggttcacgaggagaaatccttaaaggagagatagggactatcccccctgatcttactggagattttggtactcttatgaactgggctgattcatataggcagcttcgtattagagctaatgctgaaacacctaaagattcattggtttcactaggctttggggctgaaggaatcggtttatgtaggactgagcatatgttttttgagtctgatcgaattatagctatgagagagatgatactggctcatactttagaggaaagacgtacagcaattcaaaaactattaccaatgcaacgggaagactttttagagttatttaggataatggaagggcgcccaatcactattcgtttattggatccgccacttcacgaatttttacctagatcagaatctgagataagcgaattagctgaatctactggtgttacccaagaactt

SEQ ID NO: 258509 - DNA, 768 bp, Unknown
  Bacterial polypeptide expressing nucleotide sequence isolated from the Sargasso Sea
gattttggagctgaaggaatagggttatgtagaactgaacatatgttttttgatgaagaaagaattttatcggttaggcaaatgatactgtcaaaatcaaaaaaagatagagcgattgctctgagtaaattattgccacatcaaagaaatgactttatcgaaatattcaaaataatgagtggacttccagttactgtgagacttttagatcctccactacatgagtttttacccaaaagtgaaaaagagattttggatgtttcaaaatctttaaatttatcctttgaggaagtagagggaagaatagatgaacttcacgaacaaaatccaatgctaggtcatagaggttgcagattaggaatttcttttcctgaaatatatgaaatgcaaattagagcaatttttgaagcattagtagaatgtaaaaaaagaaaaataaaatcaaccacacctgaaataatgatcccacttgtttcaacagaagcagaaataaaaataatgaaagaactagtgataaaagttgcacgagaagttcaaaacgaaaataaaactaaaataaattttctagttggtacaatgatagagcttcctagagccgcaattaaagcaaaagatattgcaaaacatgcagaattttttagctttggaactaatgatcttacacaaacaacattcggaattagtagagatgatagtggaaaatttttaaatgattatatcgaaaataaaattttcgatattgatccatttatatctatagatgatgaa

SEQ ID NO: 258510 - DNA, 715 bp, Unknown
  Bacterial polypeptide expressing nucleotide sequence isolated from the Sargasso Sea
tatattagtaagagttgaaacttcacctgaagatattcatggtatgcatgcagctaaaggtatattaactgcaagaggaggcatgactagccatgctgctgtggtggccagaggaatgggaagaccttgtgtatctggctcaagtgaaatcgaaattgattatgagaaaaaattattcaaggttcaagatagagaaataaaagaaggagatttaatcactattgatggatctacaggtaggataattttaggtgcagttaaaacagttaaaccagaaatttcaggagagttctctaagctaatgaattgggctgacagttttagaaaactaagaatacgaacaaattcagaaacacctcttgatagtaaaatagcaagagattttggagcagaaggaattggattatgtagaactgagcatatgttttttgaagaagaaagaatactatcagttagagaaatgattctatcaaaaaataaagatgatagattatcagcactttcaaaattattacctcatcagaaaaaagattttattgagattttcaaaattatgaatggtttgccagtaacagttagattattagaccccccattgcatgaatttttaccaagaactgataaggaaataggtgaagtttcaagctcattaaatattccaattaatgaattgaagggaagaattacagaacttcatgaacaaaatccaatgctt

SEQ ID NO: 258511 - DNA, 844 bp, Unknown
  Bacterial polypeptide expressing nucleotide sequence isolated from the Sargasso Sea
ctacaaacaagatctggaaaaagaacatcaaaatctgcagtaaagattgctgtagacatggttaaagaaaagttaatttctaaaaaacaagcaattatgagaattgaaccaagttctcttgatacactgttacaccccactttggatgaaaaaagcaaaatagaggttattgcaaatggtttaccagcttccccgggagcagctagtggaagagtagtgttctcatcagatgaagcagagcgacttaacgatatgatgcaaaatacaatattagttagaatagaaacttccccagaagatatacacggtatgcacgtagcaaaaggaattttaacatcaagaggaggaatgacttcacatgcagcagtcgttgcaagaggtatgggaagaccttgcgtatcaggttcaagcgaaatcgaaattgattatggtaaaaaaatttttaatacaaaaaattatgaaattaaagaaggagatgtaattaccatagatggttcaactggtagaattatattaggagaagtaaaaactatcaaaccagaaatgtcaggagatttttctaaagtaatgagctgggcagacaactatagaaaactaaaaattagaacaaattctgaaacacctgctgatagtaaaatcgctagagagtttggtgcagaaggaattggattatgtagaacagaacatatgttctttgatgaagaaagaatactttctgtaaggcaaatgattttatcaaaatctagagaaaatagagataatgctttgttaaaacttttaccccatcaaagaaatgattttattgaaatatttaaaattatgagtggatttcccagttacagtt

SEQ ID NO: 258512 - DNA, 836 bp, Unknown
  Bacterial polypeptide expressing nucleotide sequence isolated from the Sargasso Sea
tccaaatacactagatactttattacacccaactttagatgaaaaagctgagaaaaaaataattgcttctggtttgcctgcatcacctggagccgcaagtggaaaagttacattttcagcagatgaggccgaaagaatgaaagaacaaatgcaagaaacaattttggtaagagtggaaacatcaccggaagatattaatggaatgcatgcagcaaagggaattcttacagctagaggtggaatgactagtcatgcagcagtagtagctagaggaatgggaaaaccttgtgtttctggatcaagtgaaatcaaaattgattatgaaaataagttgtttaaatccggtaacaatacaattaaagaaggcgaaacaataaccattgatggcggtagcggaaaagtcatgttaggcaaagttccgactgttaaacctgatatatcgggagatttttctaaaatgatgcattgggctgatcagtttagaaaactaaaagtaagatctaattctgaaacaccagcagatacaaaaattgcaagagattttggagccgaagggattgggctgtgcagaaccgaacatatgttttttgatgaaaaaagaattatttcagtaagacaaatgattttatcgaaaactttagatgatcgaaaaactgctcttgcaaagttattgccataccaaaaaaatgattttgttgaaatttttaaaataatgaatggttttccagttactgtaagattattagacccccctctacatgagtttttgccaaaaactgaaaaggatgtcgatgatatagctaaagagctaaatatttctcataatgatattaaat

SEQ ID NO: 258513 - DNA, 856 bp, Unknown
  Bacterial polypeptide expressing nucleotide sequence isolated from the Sargasso Sea
attttgtctgtaagagaaatgatattatctaaaacaaaagaagatagatcaatagcattagaaaaactgttaccataccaaaaaaaagattttatagatatttttaaaattatgagtggattgccagtaacagtaagattactggatccaccactacatgaatttttaccacgtacagaaaaggaaattaatgaggttgctaatgtagttaatcttccagttaaagaggtagagtcaagaattgaagagcttcatgagcaaaatcctatgttaggtcacaggggctgtcgtttaggaatatcttttcctgaaatttatgagatgcaatgtaaagcaatatttgaagctttagcaagcattaaaaaaagtaaaattaaatctgcattacctgaaataatgatacctttggtatctacagaggctgagataaaaataatgaaagatttagtaattagaatagccattcaagttcaaaaagaacataaattgaaaatagaatttttagttggtacgatgattgaattacctagagcagcaattaaagcaaaggagattgcaaagcatgcagaattctttagttttggaacaaatgatttaactcaaactacttttggcattagtagggatgatagtggtaaatttttaaatgattatttagaaaacaaaatattttccgttgatccttttgtttcaatagatgaaggagtttcagatttagttgaaatagcagttgaaaaaggacgaaaagaaaacaaaaaacttaaatttggtatctgcggagaacatggaggagatccaaagagtataaccttttgttctaaggctggattagattacgtttcttgctcaccttata

SEQ ID NO: 258514 - DNA, 817 bp, Unknown
  Bacterial polypeptide expressing nucleotide sequence isolated from the Sargasso Sea
acaccattggatagtaaaactgcaagagaatttggtgcagaaggtattggtttatgtagaactgaacatatgttttttgaagaagagagaattttatcagtaagagaaatgatattatcaaaaacaatagaagatcgatctaatgcactcaaaaagctattaccacatcaaaaaaaagattttattgaaatatttaagataatgaaaggcttaccagtaacagtaaggttacttgacccaccactacatgaatttttgccaaaaagtaataatgaaattaatgatgttgcagtttcattaaatattcccattaaagaacttgaagttagaatttcagaacttcatgaacaaaatccaatgctaggtcatagaggctgtagattagcaatttcattccctgaaatttatgagatgcagtgtactgcaatttttgaagcattagtggaatgtaaaaaacaaaaaattcaatccactatgcctgaaatcatgatccctttagtttcaacagaagcagaaataaaaattatgaaagacttagtcattagggttgcgaaaaaagttcaagatgagaataaaattaaaattgattttttagttggaacaatgattgaattgccaagagcagcaataaaggcaaaagatatagctaaacacgctgaattttttagttttggaacaaatgatttaacacaaactacatttggtattagcagagatgatagtggtaaattccttaatgattatattgagaacaagatttttgatattgatccttttgtatcaattgatgatggtgttggagacttaataaaaattg

SEQ ID NO: 258515 - DNA, 952 bp, Unknown
  Bacterial polypeptide expressing nucleotide sequence isolated from the Sargasso Sea
ggagaagatgtagtagctggaacaagaacacctcaatacattacaaaaaaagcgaaaatagagtcaggctcaaaagaattatcaatggaagaagttatgcctaaagtttatcaacaacttgcaaaagttttcatcaaactagaaaaacattatcgagacatgcaagatattgagttcactgttgaaaataaaaaattatggatgttacagacaagatctggaaaaagaacagcaaaagcggcaatcaaaattgcagtagatatggttaaagaaaaattaatttcaaaaaaggaagcaatactaagaattgatccaaacacacttgatactttattgcatccaactttagatgaaaaagttaaaaaagagattattgcaactggtttacctgcatcaccaggagcagcaagtggaaaagttgttttcacagccgacgaagccgaaagactaaatgcaatgatgcaagacacaatattagttagactagaaacttcccctgaagatattcacggcatgcatgctgcaaaaggaattttaacagcacgaggtggaatgacaagccatgcggctgtagttgctcggggcatgggaagaccttgcgtatctggttcaagcgaaattacgattgattatgaaacaaaacaatttaaggcaggcaacgaaattgtaaaagagggtgatatcataactattgatggaggaactggaaaagttatgaaaggtttagtcccaacggttcagcctgaaatatcagggtatttttctacaattatgaaatgggctgatgaatttagaaaattaagagtaagaacgaatgcagaaacagaagctgatagcaaaacagcgataaaatttggagctgaaggcattggtctttgtagaacggaacatatgttttttgacgaagaaagaattttatcagtaagacaaatgattttatctagatctatag

SEQ ID NO: 258516 - DNA, 918 bp, Unknown
  Bacterial polypeptide expressing nucleotide sequence isolated from the Sargasso Sea
aaaggtaaatcaatgggaggaggctatgccaaaagtttatgttcaactaaaaaaaattttaaagcttttagaaaaattttacaaggatatgcaagatgtagagttcacagtcgaaaattctaaactttggatgcttcaaacaagatctggaaagaggaccgcaaaatctgctgttaaaattgctgtagacatggttaaagaaaaactgataacaaaaaaagaggcagttttaagagtcgaccctaacactttagatacacttctccatccaacattagacgaaactaaagaagtaaaaactattgctaaaggtttgcctgcgtctccaggtgcaacaagtggaaaggttgttttttcatcagatgaggcagaaagattaaatgggatgatgcaagacacgatacttgtaagagtagaaacctcacctgaggatattcatggtatgcatgctgcaaaaggtattttaactgctcgtggaggaatgactagtcatgctgctgttgttgcaagaggtatgggaagaccatgtgtatctggttcaagtgaaattgatataaattatgaacaaaaaatatttagaacttcgtcaaatgtagaagtaaaagagggagatgtaattacaattgacggatctacaggcagggtaatcttagataaagttccaactttaaagccagagatctcaggtgacttttcaaagttaatgagttgggctgatagttacagaaaattaaaagtaagaacaaactccgagacccctcttgatacaaaaacagcaagagaatttggagctgaggggattggtctttgtagaactgagcatatgttttttgacgaagacagaattctgtctgtaagagaaatgattttatcaaaaactatagaggatagaaataaggctttggcaaaattattacc

SEQ ID NO: 258517 - DNA, 895 bp, Unknown
  Bacterial polypeptide expressing nucleotide sequence isolated from the Sargasso Sea
aataaattattcaaaacaaataacagagtaattaaagagggagaattaattacaattgatgggtcaacaggaagaataattattggtgaggttaaaacagttaaaccagaaatatcaggtgacttctcaaaaataatgagttggtctgatgattttagaaaattaaaaattagaactaattcggagactcctttagatagtaaaactgcaagagaatttggtgcagagggtattggtttgtgtagaactgaacatatgttttttgatgaagaaagaattttatcagtaagaaaaatgatattatcaaaaacaagagaagatcgatctaatgcactcaaaaagttattaccacatcaaaaaaatgattttattgaaatatttaagataatgaaaggtttgccagtaacagtaaggttacttgatccacctctacatgaatttttgccaaaaagtaataatgaaattaatgatgttgcagtttcactaaatattcccgttaatgaacttaaagttagaatttcagaacttcatgagcaaaatcccatgctaggtcatagaggttgtagactggcaatttcttttcctgaaatttatgagatgcagtgtactgcaatttttgaggctttagtggaatgtaaaaaacaaaaaattgaatcaaccatgcccgaaatcatgatacctttagtttcaacagaagcagaaataaaaatcatgaaagatttagtcataaggatcgcaaaaaaagttcaagatgagaacaaaattaaaattgattttttagttggaacaatgattgaattgccaagagcagcaataaaggcaaaagatatagccaaacatgctgaattttttagttttgggacaaatgatttaactcaaactacatttggaatta

SEQ ID NO: 258518 - DNA, 840 bp, Unknown
  Bacterial polypeptide expressing nucleotide sequence isolated from the Sargasso Sea
gttgagtcaaaagaaactcttaagtcaatggaagaggcaatgccagctacatataagaaactaaagaatatattaactaaattggaaaaacattacaaagatatgcaggacgttgagtttactgttgaaaataaaaaactttggatgcttcaaacacgctctggaaaaagaacagctaagtctgctgttaaaatagctgtagatatggttaaagaaaagttgattaccaaaaaagatgcaatattgcgaatagaaccaagctctctagactctttgcttcatccaactttagatgagaaagcaaacttagaagtaattgggtcaggcttacccgcatcacccggtgccgctagtggaaaagttgttttcacatctgaggaggctgaaagactaagtagtatgatgcaaagtacaatcttagttcgtgtagaaacttcaccagaagatatacatggtatgcatgcagcaaaaggaatacttacctcaagaggaggtatgacaagtcatgctgcagtagttgctagagggatgggacgaccatgtgtttctggatctagtgaaatagaaattgattatgaaaataaattattcaaaacaaaaaataaagtaattaaagagggtgaaataattacaattgatggttcgactggcagaataattattggtgaggtaaaaacagttaaaccagaaatatcaggcgatttctcaaaaataatgaattggtctgatgattttagaaaattaaaaattagaactaattcagagacaccaatggatagcaaaactgctagagaatttggtgctgagggcattggtttatgtagaactgaacatatgttt

SEQ ID NO: 258519 - DNA, 792 bp, Unknown
  Bacterial polypeptide expressing nucleotide sequence isolated from the Sargasso Sea
cttttgcaccctactttagatgaaaaaagttcaattaatgtaatagcaaatggattgccggcatcaccaggtgcagccagtggtaaagttgtattttcatcagaagatgctgaaagactaactgcaatgatgcaagatacaattttggtaagagtagaaacttctccagaagacatacaaggaatgcatgctgcaaaaggaattttgactgctagaggaggaatgacaagtcatgcagctgttgttgcgagaggtatgggtagaccatgcgtgtctggatcaagtgaaattgatataaattatgaaaataaatcttttaaaacttcttcaatggagattaaagaaggggacgtaatcactattgatggctcaactggaagaattattgctggaagtgtttcaactgtgaagcctgaaatatctggtgatttttccaagttaatgtcttgggcagatagctttaggaaattaaaagtaagaactaattctgagactccgaaagatactaaaatagcaaaagattttggtgctgagggaattggattatgcagaactgaacatatgttttttgatgaagaaagaattttgtctgtaagagaaatgatattatctaaaacaaaagaagacagagcaacagcattaaaaaaactgttaccgcatcaaagaaaagattttatagatatttttaaaatcatgagtggattaccagtcacagttagattgttggacccaccattacacgaatttttaccacgtacagaaaaggaaattaatgaggttgctagtatagtt

SEQ ID NO: 258520 - DNA, 877 bp, Unknown
  Bacterial polypeptide expressing nucleotide sequence isolated from the Sargasso Sea
agttctttagacactttgcttcatccaactttagatgagaaatcaaacttagaagtaattgcgttaggcttgcctgcatcacctggagccgcaagtggaaaagttgtgttcacgtccgaggaggctgaaagactaaatagtatgatgcaaagtacaatattagttcgtgtagaaacttcaccagaagatatacatggtatgcatgcagcaaaaggaatactgacatcaagaggaggtatgacaagtcatgccgcagtagttgctagaggaatgggacgaccatgtgtttctggatctagtgaaatagaaattgattacgaaaacaaattattcaaaacaaaaaataaagtaattaaagagggagaactaattacaattgatggttcaacaggcagagtaattattggcgaggtaaaaacagttaaaccagaaatatctggttatttctcaaaaataatgagttggtctgatgattttagaaaattaaaaattagatctaattctgagacgccattagatagtaaaactgctagagaatttggtgcagaaggtattggcttgtgtagaactgaacatatgttttttgatgaagaaagaattttatcagtaagagaaatgatattatcaaaaacaattgaagatcgatctaatgcactcaaaaagctattgccgcatcaaaaaaaagattttattgaaatatttaaaataatgagaggtttaccagtaacagtaaggctgcttgatccaccacttcacgaatttttgccaaaaagtaataacgaaattaatgatgttgcagtttcactaaatattcctgttaaagaacttgaagttagaatttccgaacttcatgaacaaaatccaatgctaggtcaca

SEQ ID NO: 258521 - DNA, 806 bp, Unknown
  Bacterial polypeptide expressing nucleotide sequence isolated from the Sargasso Sea
atcagtcaaaattgctgtcgatatggaaagagaaaaactcatcacgaaaaaagaggctgtgcttagagtacaaccaaattcattagatactttgcttcatccaactttagatgaaacagcgaatttagaagtaatagccaaaggccttcctgcttctccaggagcagctagtggaaaagtagtatttacatctgatgaggctgaaagattaaatggaatgatgcaaaatacaatcctagtaagagtagaaacatcacctgaagatatcaatggaatgcatgcagctaaaggaattcttactgcaagaggagggatgaccagccatgctgcagtagttgcaagaggaatgggtagaccttgtgtatctggctcaagcgaaatagaaatagattaccaaaataaaatttttaaaacaaaaaattatgaaattaaagagggtgatttaattacaattgatggatcaactggtagaattataaaaggagaggttaaaactgttaaacccgaaatttcgggagatttttctaaacttatgagctgggctgacaaatttagaaaactaaaaattagaactaattctgaaacacctcttgacagtaaaactgctagagaatttggagctgaaggaataggtctttgtagaacagaacatatgttttttgatgaagagagaattttatctgtaagagaaatgattttatcaaaatcaaaagaagatagggctagtgctttaaagaaactacttccttttcaaaaaaaggattttattgatatctttaaaattatgaatggtctacctgttacag

SEQ ID NO: 258522 - DNA, 828 bp, Unknown
  Bacterial polypeptide expressing nucleotide sequence isolated from the Sargasso Sea
aaaaggattttatcgaaatatttaaaattatgaatgggcttccagttacagtaagacttttagatcctcctttacatgaatttttacctaaaagttttagtgaaatcgaagatgttgcgaaatctttaaacttatcaactaaagaagttgaagtaagaattggtgaattacatgaacaaaatccaatgttaggccatagaggctgcaggttaggcatttcttatcctgaaatttatgcaatgcaaactagagctatatttgaagcattagtagaatgtaaaaaaagaaaaataaaatcaactatgcctgaaataatgattccattagtgtcaactgaagcagaaataagaataatgaaagatctagtaattaaagttgcaagagaagtgcaaaaagaaaataaaattaaaattaaatttctagttggtactatgattgagcttcctagagcggcaatcaaagcccaagatattgcgaagcatgctgaattttttagctttgggactaatgacttaacccaaactacgttcgggattagtagagatgatagtggtaaatttttaaatgattacatagaaaataaaatctttgatattgacccatttatttcaattgatgaaggagttggtgatttaattaaaatagcagcagctaaaggaaaaaaacaaaatataaaaattaaacttggaatttgtggtgaacatggaggagatccaaaaagtatagaattttgttctaaagctggtttagattatatttcttgttcaccttatagagttccagttgctagattggctgcggctcaagctcaacttaaaaaacattaat

SEQ ID NO: 258523 - DNA, 856 bp, Unknown
  Bacterial polypeptide expressing nucleotide sequence isolated from the Sargasso Sea
ggtattgggctttgtaggactgaacacatgttttttgatgaggaaagaattttatctgttcgagaaatgattttatcaaaaacacttgatgatagatctaaagctttgcaaaaaattctcccacatcaaaaaaaagattttatggatatatttaagattatgcacgggcttccagttactataagattattagacccaccattacacgaatttttacctaaatctgataaagaaatttccgaagtagctagtgttattggatcagacaaaaaggaaattgaaaaaaggatagaggaactgcatgaacaaaatccgatgttaggacatagaggctgtaggcttggtatctcatttcctgaaatttatgaaatgcaatgtagagcgatattcgaggctcttgcagatcttaaaaaaagtaaacaaaaatttgcttttcctgagataatgatacctttagtttcaaccgaggctgagattaaaataatgaaaaatttagtgattaatactgcaagaaaagttcaaaaggaaaataaaacaaaaattgaatttcttgtgggaacaatgattgagttacctagggcagcaattaaagctgatgatatagcaaaacatgcagaattttttagttttggtaccaatgatttaacacaaacaacttttggaataagtagagatgatagtggtaaatttttgaatgattatatagataataagatttttactattgatccgtttgtatctattgatgatggagtaaaagatttagtgcaaatagcggtttataaaggaaaaaaacagaataaaaaaattaaactcggtatatgcggtgaacatggcggtgatccaaagagtatca

SEQ ID NO: 258524 - DNA, 859 bp, Unknown
  Bacterial polypeptide expressing nucleotide sequence isolated from the Sargasso Sea
ctttgtagaactgaacatatgttttttgatgaagaaagaattttatcagtaagggaaatgattttatcgaagactaaagatgatagatcaattgcattaaaaaaacttttacctcaccaaaaaagggattttaaagaaatattcaaaattatgagtggattaccagttacagtaagattattagatccacctcttcatgagtttttgcctcgaacagataaagagattaatgaagttgcaaatgttgttaatcttccggtaaaagaagtagaatctagaattgatgaattacatgaacaaaatcctatgttgggtcataggggatgtagacttggaatatcttttcctgaaatatatgaaatgcaatgtagagcaatatttgaagctttagctgagctcaaaaaagaaaaaattaaatctgctttcccagaaattatgatcccattagtgtccactgaagcagaaataaaaattatgaaagatttagtaattagaattgcaagcgaagttcaaaaagagcataaattaaaaattgagtttatggtaggtacgatgattgaacttcctagagcggcaataaaagccaaagatattgcaaaacatgctgaattttttagttttggaactaatgatttaactcaaactacatttggaataagcagagatgatagtggaaaatttttaaatgattatttagataataatattttttcaattgatccgtttatttctattgatgatggagttggagatttaataaaaattgcagttaaaaaaggaaaaagtcaaaacaaaaatttaaaacttggaatttgtggagaacatggtggcgaccctaagagtatttcattttgttcaa

SEQ ID NO: 258525 - DNA, 772 bp, Unknown
  Bacterial polypeptide expressing nucleotide sequence isolated from the Sargasso Sea
taaaactgcgaaagattttggtgctgaaggtattggactttgcagaactgagcacatgttttttgatgaagaaagaattttatctgttagggaaatgattctttctaaaaccaaagaagacagagccaaagccttaaataaacttttaccacatcaaaaaaaagactttactgaaatttttaagattatgaatggcttaccagttacagtaagattgttagatcctccattacatgaatttttaccaagaacaaataaagaaattggcgaattagcagaaattgttaatcttacagtaaaagaagttgaaacaagaattgaggaacttcatgaacaaaacccaatgctgggtcatagaggttgcagattagctatatcatttcctgaaatatatgagatgcaatgtagagcaattttcgaagcgttatgtgagcttaaaaaaaataaaattaagtcagcttttcctgagattatgattccattagtatctacagaggcagaaattaaaatcatgaaagatttagtaataaatattgcaggtgaagttcaaaaacagaataaaattaaaatagaatttatggttggtacaatgattgaattgccaagagctgcaataaaagcaaaagaaatagctaaacacgctgagttttttagttttggaactaatgatctaacacaaacaacattttggattagtagagatgattgtggaaatttcttaacgactatttggataataaaatattctcatttgatccatttatatctatag

SEQ ID NO: 258526 - DNA, 868 bp, Unknown
  Bacterial polypeptide expressing nucleotide sequence isolated from the Sargasso Sea
tcaggttctagcgaaattgatgtcaattacgaaaaaaaaatatttaaaacttcagaatttgaaataaaagaaggagatataattacaatcgatgggtccacaggaagaataattttaggcgaagtagagacagtaaagcctgaaatttcaggtgatttttcaaaattaatgaaatgggcagatgatttcagaaaacttaaaattagaactaattcggaaacaccaactgatacaaaaactgcaagagactttggagctgagggcattggtctttgtagaactgaacacatgttttttgatgaagatagaattttatctgttcgagaaatgatattatcaaaaacaattgaagatagagcaaaagcattagaaaaattattacctcaccaaaaaaatgattttattgaaatttttaaaattatgaatggtttacctgtgaccgtgagattattagatcctccattgcacgaatttttaccaaaaaatgaaaaggaaataaaagatgtatcaaaagctctggaattaagtactaacgaaatagtttctagaattgctgaattgcatgaacataatcccatgttaggtcatagaggttgtagattaggaatttcttttcccgagatctatgagatgcaatgtaaagcaatctttgaggcattagttgaatgtaagaaaaaaaaatacaaatcaataattccagaaataatgatacctttagtttctacagaggcagaaatagaaattatgaaaaatttagttatccgggttgcaaataaaattcaaaaagaaaataaaataaaaattaattatttagtaggaactatgatcgaattgcctagggcagctcttaaagccaaagatataagct

SEQ ID NO: 258527 - DNA, 937 bp, Unknown
  Bacterial polypeptide expressing nucleotide sequence isolated from the Sargasso Sea
tatgaaaggtttagtgccgaccgttcaacctgaaatttcaggttatttctcaaaaataatgcaatgggcagatgaatttagaaaattaaagattagaactaacgctgaaacagaaaaggatagcaaaactgcaagagattttggagctgaggggattggattgtgtagaacagagcatatgttttttgatgaagatagaattctgtcggtaaggcaaatgatattatcaaaatcaaatgatgatagaaatcatgcgttatcaaaacttttaccctatcaaaaagatgattttaaaaaaattttcaaagttatgtctggtctaccagtaactgtaagattattagatccaccactacacgaatttctgccgaagtcagagaaagatgttgatgaagtcgccagatctcttaacttagcatcaaaagaagttaaagaaagaatttctgaattgcatgaggaaaacccaatgctaggtcatagagggtgtagacttggaatatcatttcctgagatttacgaaatgcaatgtaaagctatttttgaagctatctctgaattaaaaaaagaaaaaattaagtctgccatagttgaaattatgataccacttgtttcgacagagttggagataaagattatgcgagacctagtaaataaagtagcaagagaaatccaagataaaaataaattaaaactcgattacatagttggtactatgatagaattgcctagagcagcccttcaagcaaaaaatatttcaaaacatgcagatttttttagttttggtactaatgacttaactcaaacgacatttggaattagtcgagatgactctggaaaatttcttaatgattatatcaacaacaaaatttttgatgttgatccttttgtaagcattgatcaaaatggtgtaggtgaacttgtagaaatagcatctgaa

SEQ ID NO: 258528 - DNA, 831 bp, Unknown
  Bacterial polypeptide expressing nucleotide sequence isolated from the Sargasso Sea
gccagtggaaaagttgttttttcatctgatgaatcgcaaagacttaatgatatgatgcaaaatacaattttagttagagtagaaacatcaccagaagacattcatggaatgcatgctgctaagggaattttaactgctagaggtggtatgacaagtcatgctgctgtagttgcaagaggaatgggtcgtccatgtgtttcaggctcaagtgaaatagaaattgattatgaaaataatttatttaaagcaaatggatatgaaattaaagcaggagaaataataactgttgacggttcaacaggtagaattattttaggagaagtaaaaactgttaaacctcaaatttcaaatgatttttctcagctaatgagctgggcagatagtttcaaaaaattaaaagttagaacaaattctgaaacacctttagatagcaaaatagcaagagattttggagcagaaggcattggtttgtgtagaacagagcatatgttttttgatgaagaaagaattttatcagttagagaaatgatactttcaaagtcacaagaagatagagcaagcgctttaaacaaactattaccatatcaaaaaaaagattttatcgaaatatttaaaattatgaacggacttccagttactgttagacttttagatccaccattacatgaatttttaccaaaaaacaccaaagagatttctgatgtttcaaaatctttaaatttatcaattaaagaagttgagggaagaattgatgagctgcatgaacaaaatcccatgttaggacatagaggttgcaggctaggtatttcttttcctgaaatttatcaaatg

SEQ ID NO: 258529 - DNA, 955 bp, Unknown
  Bacterial polypeptide expressing nucleotide sequence isolated from the Sargasso Sea
aaagaagcaagatcgaaagataaatctatggaagagtcaatgcctaaagtatttaaacaattagataaaatattaaaaactttagaaaattattataaagatatgcaggatgttgaatttacagtagaaaatcaaaagttgtggattttacaaactagatcaggaaaaagaacggccaagtcttcagtaaagatagctgtagatatggttaaagaaaaattaatttcaaaaaaacaagcagttttaagaattgactcaaatggtctagatacacttttgcatccaacattagatgaaaaaagtaatataaatgtaattgctaaaggtttaccagcatcaccaggtgctgcaagtggaaaagtagttttttcatctgatgaagcggaaagacttaatggaatgatgcaaaatacgattttagtaagagttgaaacatccccagaagatattcatggaatgcatgctgccaaaggaatactaacttcaagaggcggaatgacaagtcatgcagcagttgtagcaagaggaatgggcagaccgtgcgtttctgggtccagtgaaattgaaatagattatcaaaataaaatttttaaaacaaaagaacataaaatagaagaaggagatattgttacaattgatggctcaacgggaagaataattttaggagaagttaaaactataaaacccgaaatttctggggatttttcaaaagttatgaattgggcagatagttttagaaaattaaaaataagaacaaattcagagactccaattgacagtaaaacagccagagaatttggtgcagaaggaattggtttgtgcagaacagaacatatgttttttgatgaagagagaattttgtcagtaagacaaatgattttatcaaaatctaaagatgatagaaatgcagctctaagcaagcttttgccccatcaaaaaaatgactttatagaaa

SEQ ID NO: 258530 - DNA, 742 bp, Unknown
  Bacterial polypeptide expressing nucleotide sequence isolated from the Sargasso Sea
aattttagtaagaatagaaacttccccagaggatattaatggaatgcatgctgcgaaaggtatccttacagcgagaggtggaatgactagtcatgcagctgttgttgcaaggggtatgggcaaaccttgcgtttcaggatcaagcgaaattaaaattgattacgaaaaaaaagaatttaaatcaggggaacatacaatcaaagaaggtcaagtcattacaatagatggtgggagtggaaaagttatgcttggaaaagttcccacagttaaacctgatatttctggtgatttttccaaagtgatgatttgggctgataaaattagaaaacttaaggttagaactaactcagaaacaccggcggacaccaaaattgcaagagattttggagccgaaggtattggtttatgtagaacagaacatatgttttttgatgaaaaaagaattatttccgttcgacagatgattctctcaaaaacattaaacgacagaaaatctgccttagaaaaattgcttccttatcaaaaaaatgatttttttgaaatttttaaaatcatgaatggtttaccagtaacggtaagattgcttgatccgccattacatgagtttttgcctaaaacagataaagatatttctgatattgctagggaattaaatatatcaaacgatgatatcaaatctagaatagctgaactgcacgagcaaaatccaatgttaggtcacagagggtgtagattggggata

SEQ ID NO: 258531 - DNA, 811 bp, Unknown
  Bacterial polypeptide expressing nucleotide sequence isolated from the Sargasso Sea
aaaatgaataatcaaaaagaagatacaattttggttagagtagaaacgtcaccagaagatattcatggaatgcacgctgctaaaggaatattaaccgcaagaggcggaatgacaagccatgctgctgtggtagcaagaggtatggggagaccgtgtgtttcaggctctggagaaattaatatcgattatgaaacaaaagaatttaaagtaggagatttaagcatcaaagagggagaagttataactattgatggaggaacgggtagagtgatgaaaggcctagttccaacagtcaaacctgatatttcaggttacttctcaactataatgaaatgggcagatgaatttagaaaactcaaaataagaacgaatgctgaaacaccacaagatactaaaatggctagaaatttcggcgcagagggaattggtttatgtaggactgagcacatgttttttgatgacgagagaattctatcagttagacaaatgattctttcaaaaagtctagatgacagaaaaattgctttagaaaaactgttacctcaccaaaaaaatgattttaaagaaatttttaaaattatgaagggtttgccagtaactgtgagacttttagacccacctttacatgagttcttgcctaagacagataaagatatggaggaagtagcaagatcattaaatctaggggttaaagaaattaaaaatagagtagcagaattacacgaattaaatccaatgctaggccatagaggatgtagattgggtatttcttttccagaaatttatgaaatgcaatgtagagcaattttca

SEQ ID NO: 258532 - DNA, 964 bp, Unknown
  Bacterial polypeptide expressing nucleotide sequence isolated from the Sargasso Sea
gcaaggggaggaatgacaagtcacgcagctgtagtggctagaggaatgggtagaccttgtgtttcaggttcaggagaaataaatattgactatgaattaaaggaattcaaagttggagaagtagttataaaagaaggcgatatcatcacaattgatggtggcacaggaagagtaatgaagggacttgttccaacagttaaacctgacatctctggttatttttcaacaataatgaagtggtcagatgaattcagaaaaataaaaatcagaacaaatgccgagactcctcaagatacaaaaatggcaagaaattttggagccgagggtattggtctatgtagaacagagcatatgttttttgatgatgaaagaattttatctgttagacaaatgattttatcaaaacacttggacggaaggaaggctgcgttagacaaattacttcctcatcaaaaaaatgactttaaagaaatttttaaaattatgaagggtttaccagtaactgtaagacttttagatcctcccttacatgagtttttacctaaatctgaaaaagatatggaagaagttgccagatcattaaattcaggtgttaaagaaattaaaaatagggttacagaattacacgagttaaacccaatgttaggtcatagagggtgcagactgggtatttcatttccagaaatttatgaaatgcagtgtagagcaatttttacagctttaatagaatgtaaaaaagagaagatagaatcaataatacctgaaataatgatacctttagtctcaactgaggatgagttaggattaatgagaaaattagtaaatagggtagcagacgaacttcaaaaagaacataaagtaaaaattaactactttgtaggtacaatgatagagctgcctagagctgcattaagagcggccccgatatcaaaatatgcagatttttttagctttggaacaaatg

SEQ ID NO: 258533 - DNA, 874 bp, Unknown
  Bacterial polypeptide expressing nucleotide sequence isolated from the Sargasso Sea
atctaaagaattcaaaacaggagaccttactattaaagaaggcgacatcatcaccattgatggagggtcaggaaaagtaatggaaggtttagttccaacagttaaaccagacatttcaggttatttttcaacggtaatgaaatgggcagatgaatttagaaaattaaaaataagaacaaacgctgaaacaccacaagacactaaaatggctaggaattttggagctgaaggaattggtctatgcaggactgaacacatgttttttgacgaagaaagaattttatcggttagacaaatgatcttatcaagacatttagatgatagaaaaatcgcactagacaagctgcttcctcatcaaaaaaatgattttaaagaaatttttaaaattatgaaaggtttacctgtaacagttagacttttagatccaccattacatgaatttcttcctaaaactgataaagatatggaagaggtggctagatcacttaattcaggaattaaggaaataaagaatagagtagcggagttacatgagttaaaccccatgttaggacacagaggatgtaggcttggtatttcttttccagaaatctatgaaatgcaatgtagagcaatctttacagcactgatagagtgtaaaaaagataaggttcaatccataatacctgaaatcatgattcctttggtctcgactgaagatgagcttggaataatgagaaaattagttaatagaatagctgacgaacttcaaaaagaacacaaagtaaaaattaattattttgttggtactatgattgaattaccacgagcagcattgagagctgcaccaatatcaaagtatgctgacttttttagctttggaaccatgatttaa

SEQ ID NO: 258534 - DNA, 909 bp, Unknown
  Bacterial polypeptide expressing nucleotide sequence isolated from the Sargasso Sea
tgcaaaggcatattaactgcaagaggaggtatgaccagtcatgcagctgtagtggctagagggatgggaagaccttgtgtatcaggctcaagtgaaatcgaaattgattatgaaaaaaaattattcaaagttcaaaacagagaaataaaagaaggagatttaatcactattgatggatctactggtaggataattttaggtgaagtaaagactgttaagccagaaatttcaggagaattttccaagcttatgaattgggctgacaattatagaaaattaaaaatacgaacaaattctgagacacctcttgatagcaaaatagcaagagactttggagcagaaggaattgggttatgtagaactgagcatatgtttttcgacgaagagagaatattatcagttagagaaatgatactttcaaaaactaaagatgatagattattagcactttcaaaattattaccacatcagaaaaaagattttattgatattttcaaaattatgggtggtttgccggtaacagttagattattggaccctccattacatgaatttttaccaagaactgataaggaaataagtgaagttgcaagctcattaaatattccaattaaggaattaaaagtaagaattaccgaacttcatgaacaaaatccaatgcttgggcacagaggttgtaggcttggaatatcttttcctgaaatttatgaaatgcagtgtagagcaatttttgaagccttagttcaatgtaaaaaacaaaaagttaaatcaataataccagaaataatgatacctttagtttcaactgaagctgaaattaaaattatgaaggatttagtcataagaattgcaaaagaagttgagactgaaaaaaaaatgaagttaaattttttggtaggcacaatgatt

SEQ ID NO: 258535 - DNA, 844 bp, Unknown
  Bacterial polypeptide expressing nucleotide sequence isolated from the Sargasso Sea
tagtggcaaagttgtatttacatctgaagatgcagaaaggctaacatcaatgatgcaggacacaatattagttagagtagaaacctctcctgaggatatacaaggaatgcatgcggccaaaggaatattaactgctagaggtgggatgacaagtcatgcggctgttgtagcaagaggaatgggaagaccttgtgtttctggatcgagtgaaattgatattaactatgaaaataagtcatttaaaacatcatcgatggaaataaaagagggagacataataacaatagatggatcaacaggaagaataatcgaaggtagggttgctacagtgaaaccagaaatatctggtgatttttcaaaattaatgtcttgggctgatagttatagaaaattaaatataagaacgaattcagagactcctaaagatacaaaaacagcaaaagattttggtgctgaaggcattgggctgtgtagaactgagcacatgttttttgatgaagagagaattttatctgttagggaaatgattctttctaaaactaaagaagatagatctaaagctttagataaacttttaccgtatcaaaaaaaagattttactgagatttttaaaattatgaacggtttaccagttacagtgaggttattagatcctcctcttcacgaatttttaccaagaacaattaaagaaattagcgaattagcagaagtagttaatctttcagcaaaagaggttgaaacaaggatagaggaacttcatgaacaaaacccaatgctaggtcatagaggttgcagattagctatatcatttcctgaaatatatgaaatgcaatgtagggcaatt

SEQ ID NO: 258536 - DNA, 815 bp, Unknown
  Bacterial polypeptide expressing nucleotide sequence isolated from the Sargasso Sea
tgcaagaggtatgggcagaccttgtgtttctggctcaagtgaaattgatatcaattatgatcaaagaattttcaaaacatcatcaatcgaagtcaaagagggtgatataattactatagatggctcttcagggagaataattttaggtacagttccaacagtaaaacctgagatttcaggggatttttcaaaattaatgagttgggctgacaatataagaaaattaaaaataagaactaactcagaaacaccacaagacaccaaaacagcaagagattttggcgcagagggaataggtctttgtagaacagaacatatgttttttaatgagaaaagaattttatctgtaagagagatgattttatctaaaactcaagaagatagagccagagctttagaaaaacttttacctcatcaaaaaaaagattttatagaaatatttaagattatgcatggtcttcccgttactgtgagattgttagatccaccattacatgaatttttacctaaatctcaaaaagaaattaatgaagttgcagaaattatcggtgtagataaaaaagatattgcgtcaagaatagaagagctacatgagcaaaatccaatgttaggtcatagaggctgtagattggggatttcttttcctgaaatttatgagatgcaatgtagagcaatttttgaagctttatctgatcttagaagaaataaacaaaaatctgctttaccagaaataatgataccacttgtatcaacagaggcagaaataaaaatcatgaaagatttagttataaatactgctagaaaagttcaaaatg

SEQ ID NO: 258537 - DNA, 715 bp, Unknown
  Bacterial polypeptide expressing nucleotide sequence isolated from the Sargasso Sea
ctgacaaatgtagaaaaattaaaagttagaacaaattcagaaacacccgtcgatactaaaattgctcgagactttggagccgaaggaattggtctttgtagaacagaacatatgttttttgatgaaaaaagaataatttcagtaagagaaatgatactttctaataccatagaagatagaaaaaaagctttagaaaaacttcttccttatcaaaaaggggattttttcgaaatttttaaaattatgaacggcttaccagtgactgttagacttttagatccgcctttacacgaatttttacccaaaacagataaagacgtcgatgatattgcaaaagagttaaatattagtcatcaagacataaaatccagaataattgagttgcatgagcaaaatcctatgctcggccatagagggtgccgactgggtatttcttttccagaaatttacgaaatgcaatgccaagccatcttcgaagctttagcagagtgtaagaaaaaaagaataaaattagttataccagaaattatgattcctctagtttctacggcagctgaaattcaaatacttagaaatttagttgataacactgctaaaaaaattcaaaaggcgcactctataaaaataaaatattatgttggaactatgattgaacttcctagagcagctttaagagcaaaagatatagcaaaacatgcagatttttttagttttg

SEQ ID NO: 258538 - DNA, 877 bp, Unknown
  Bacterial polypeptide expressing nucleotide sequence isolated from the Sargasso Sea
attaattcaaaaaaagatgcagttttaagaattgaaccaaattctttagaaactttacttcatccaactttggatgaaaaaagcaatatagaagtaattgcaaaaggattacctgcatctcctggagctgcaagtggaaaagttgttttttcctcagatgaagctcaaagacttgatgacatgatgcaaaatacaatcttagttagagtcgaaacttccccagaagatatacacggcatgcatgctgcaaaaggaattttaactgcaagaggtggaatgacaagccacgctgcagtagttgcaagaggaatggggcgcccatgtgtttctggttcaagtgaaatagaaattgattatgaaaataacttatttaaatcaaatggatatgaaattaaggaaggagatttgataacaattgatggttcaactggtagaattattttaggagaagtaaaaactgttaaacctgaaatttcaggagatttttctaaattgatgagttgggcagatggttttagaaaattaaaaatcagaacaaattctgaaacaccattagacagcaaaatagcaagagattttggagctgaaggaattggtttatgtagaactgaacacatgttctttgatgaagatagaattttgtcagttagagaaatgatactttcaaaatcaaaagaagaccgagctaaagctttagaaaaattactaccacatcaaaaaaatgattttatagaaatatttaaaattatgaatggacttccggttacagtaagacttttagatccaccactacatgaatttttacctaaaagtgcttcagaaattaatgatatttcaaaatctttaaatttatcaataaaagaaatgaagcaagaat

SEQ ID NO: 258539 - DNA, 946 bp, Unknown
  Bacterial polypeptide expressing nucleotide sequence isolated from the Sargasso Sea
agaaatccatcagatggattaaatgaaatttatggtgagtatttaattaatgcacaaggtgaagatgttgtggcaggcacaaggactcctcaatacatcacgaaaaaagctagacaagacgctaaagtaaaagaattatcaatggaagagtctatgcctaaagtctttaaagaacttcaaaaaattttgaaaaaattagagatgcattacaaggatatgcaagacgtagagtttacagtcgaaagtaataagctgtggatgctccaaacaagatcaggaaaaagaacggcaaaatctgcagtcaaaattgcagttgatatggttaaagaaaaattaatttctaaaaaagaagctgtgttaagagttgatccaaattctttagatacacttttgcaccctactttgaatgagaaaagctcaattaatgtaatagcaaatggattaccagcatcaccaggtgcagccagtggtaaagttgtatttacatcagaagaggctgaaagactaactgcgatgatgcaagatacaattttggtaagagtagagacatcaccagaagatatacaagggatgcatgctgctaaaggaattttgacagctagaggaggaatgacaagccatgcagcggttgtagccagaggtatgggcagaccatgtgtatcaggatcaagtgaaattgatataaactatgaaaataaatcttttaaaacttctacaatggaaattaatgaaggggatgtaattactatagatggttcaactggaagaattattgccggaggggtttcaactgtgaagccagaaatatctggtgatttttcaaaattaatgtcttgggctgataattttaggaaactgaaagtaagaacaaattcagagacaccaaaagatactaaaactgcgaaagatttcggagcagagggtatggactatgcagaactgaaca

SEQ ID NO: 258540 - DNA, 877 bp, Unknown
  Bacterial polypeptide expressing nucleotide sequence isolated from the Sargasso Sea
ttagttagagtagaaacttcacctgaggacatacacggaatgcatgcagcaaaaggaatattaacctcaaggggaggcatgacaagccatgcagcagtagtcgctcgaggcatgggaaggccttgtgtttcaggatcaagcgaaattgatattaattatgaaaaaaaaatatttaaaactaaatctatagagataaaagaaggtgatttaattacaatagatggatctacaggaaaaattattcaaggagaagttccaaaaataaaacctgaaatttcaggagatttttcaaaattaatgagttgggctgatagttttagaaaactaaaagtaagaacaaattctgaaacttcattggatactaagaccgcaagagactttggggcagaaggaataggtttatgtaggacagaacatatgttttttgatgaagaaagaattttgtctgtaagagaaatgatactttcaaaaactacagaagatagaaataaagcattagagaaacttttaccccatcaaaagaatgattttattgaaatatttaaaattatgagtggtctacctgttacagtcagactattagatcccccattacatgaatttcttccgagaactgaaaaagaaattattgaagtatcaaataaattaaaattacctattaaggaagttcaatctagaattagtgagcttcatgaacaaaatccaatgttgggacatagaggttgtagattaggtatttcttttccagaaatttatgaaatgcaatgtagagcaatatttgaagctctgacagatttaaagtcaaaaaaaattaaatctgcttttccagagataatgataccattagtttcaactgaagctgaaataaaaattatga

SEQ ID NO: 258541 - DNA, 883 bp, Unknown
  Bacterial polypeptide expressing nucleotide sequence isolated from the Sargasso Sea
actggttgaaaaaaataacctttggatgctacaaactagatcaggtaaaagaacagcaaaagcagcaataaaaattgcagtagatatggttaaggaaaaattaatttcaaaaaaagaagctcttttaaggatagatccaaatacacttgatacattattacatcctacattagatgaaaaagtaaaaaaggaaattattgcatctggattaccagcttctcctggtgcagccagtggaaaagttgtttttacagcggatgaagcagaaaaacttagtgaaatgatgcaagatacgatattagttagattggaaacatcacctgaagatatacacggcatgcatgccgcgaagggaattttaactgcaagaggaggcatgacaagtcatgctgctgtggttgctagaggtatgggaagaccatgcgtctcaggatcaagtgaaataattattgattatgagttaaaacaatttaaagctggcgatacaactattaaagaaggcgaaataattacaattgacggcggtagtggaaaagtgatgaaaggacttgttccaacggttcaaccagagatttctggctatttctcaacaattatgaagtggtctgatgaatttagaaaattaaaagtaagaacaaatgcagagacagaagctgatagcaaaacagcaatagaatttggagcagagggtataggattgtgtaggactgagcatatgttctttgatgaagagagaattttatcagtcagacaaatgattttatcaaaatctaaggatgacagaaatagtgctttagataaactcttaccatatcaaaagcaaagatttaaaaaaatttttaggatcatgaaaagggttgccagtgacagtaagattgcttga

SEQ ID NO: 258542 - DNA, 919 bp, Unknown
  Bacterial polypeptide expressing nucleotide sequence isolated from the Sargasso Sea
tctagatacaaaaactgctagagacttcggagctgaaggaattggcttatgtagaactgagcatatgttttttgatgaagatagaattctttcagtaagagagatgattttatctaaaactattgatgacagaaataaagctttggctaaacttcttcctcatcaaaaaaaggattttactgaaatttttgaaattatgagtggcttaccagtaactgtaaggttgttggatccacctttacatgagttcttacctaaaaacgataaagagataagcgatctcagcaatgttacaggtctacatgtaaacgaaattaaatctagaactgaagaattacatgaacacaacccaatgcttggacacagaggatgtagattaggaatatcttttccagaaatttatgaaatgcagtgcagagcaatttttgaggctctaatagattgtaaaaaaagaaaacttaagtccactatgccagaaataatgatcccacttgtttcaacagaggcagaaataaaaatcatgaaagacttagttattagggtagcaaaaaaagttcagaacgaacacaaaactaaagtaaattttttggttggaacaatgattgaattaccaagagcagcaataaaagcaaaagatatagcaaaacatgctgaattttttagttttggaacaaatgacttaacccaaacaacttttggtatcagcagagatgacagtggaaagtttttgaacgattatatagaaaataaaatatttgatattgatcctttcatttcgattgatgatggtgttggcgacttaattgaaattgcaactttaaaaggaaaaaaacaaaataaaaatattaaacttggtatttgtggtgagcatgggggagatccaaaaagtattaatttctgttcccaggactggattaaa

SEQ ID NO: 258543 - DNA, 913 bp, Unknown
  Bacterial polypeptide expressing nucleotide sequence isolated from the Sargasso Sea
gcttctccaggagcagtaagtggtaaggttgtattttcttctaatgaagcggaaagattaaatggcatgatgcagaataccattttggtcagaattgaaacttcaccagaggatatacacggtatgcacgcagcgaaaggaattttgacctcaagaggtggaatgacaagtcatgctgccgtagttgcgagaggtatgggtcgaccatgtgtttctggatcaagcgaaattgatattaactatgaaaaaaaaatattcaaagcttcaaaagttgaaattaaagaaggagatataattacaattgatggatcaacaggtagaattattttaggagaagttccgaccgttaaaccagaaatttctggagatttttcaaagttaatgggatgggcagataattatagaaaactaaaagtaagaactaactccgaaacaccacttgatacaaaaacagcaagagactttggggcagaaggtataggtctttgcagaacagagcatatgttttttgatgaagacagaattctgtcagtaagagaaatgattttatctaaaacaaaagaagatagaagcaaagcacttacaaaaattttaccacatcaaaaaaatgattttattgaaatttttaaaattatgaatggtttaccagttactgtaagattgttagacccaccattgcatgaatttttacctaaaaatgaaaaggaaataaaaagtgtatcagatgctctagatatctctactaatgaagtagaatcaagaattacagagttgcatgaacacaatcctatgcttggtcataggggatgtagattaggaatttcttttccagaaatttacgaaatgcaatgtagagcaatttttgaagcattagttgagtgtaaaaataaaaaatataaatcaataatccaga

SEQ ID NO: 258544 - DNA, 978 bp, Unknown
  Bacterial polypeptide expressing nucleotide sequence isolated from the Sargasso Sea
aatgaaatatacgggtgagtatttaattaatgctcaaggtgaagatgttgtggctggtacaagaacacctcaatatattactaaaaaggctagacaaaatgctaaagtaaaagaattatcaatggaagaatctatgccaaaagtttttaaagaacttcaaaaaattttaaaaaaattagagatccattacaaagatatgcaagatgtagaatttacagttgaaaatagcaaactatggatgcttcaaacaagatcaggaaaaagaacagcaaaatcagcagtcaagattgcagttgatatggttaaagaaaaattaatttctaaaaagaaagctgtattaagaattgaccctaactctttagatacacttttgcaccctactttggatgaaaaaagttcgattaatgtaatagcaaatggattgccagcatcaccaggtgcagccagtggtaaagttgtatttacatcagaagaggctgaaagattaaccgcaatgatgcaagatacaattttagtcagagtagagacctctccagaagatatacaaggaatgcatgctgctaaaggaattttgaccgctagaggaggaatgacaagtcatgcagctgttgttgcaagaggtatgggtagaccatgtgtatcaggatctagtgaaatcgatataaactatgaaaataaatcttttaaaacttcttcaatggagattaaagaaggagacatcataactattgatggctcaactggaagaattattgctggaagtgtttcaacagtcaagcctgaaatatctggtgatttttccaagttaatgtcttgggcagatagctttaggaaattaaaagtaagaacaaattctgaaaccctaaaagatactaaaatagcaaaaaattttggcgcagagggcattggattatgcagaactgaacatatgttttttgatgaagaacgaattctgtctgtcagagaaatgatattatc

SEQ ID NO: 258545 - DNA, 900 bp, Unknown
  Bacterial polypeptide expressing nucleotide sequence isolated from the Sargasso Sea
tttttgaaaatatgggagagaattgtgctactggagttgcctttacaagaaacccttcaactggtgagaatagattttttggagagtatctgatcaatgctcaaggagaagatgtagttgctggaagcagaacacccagatacataacaaaaaaagcaaaagaagaagcgggtgcaaaagataaatctatggaagagacaatgccaaaagtttttcaagaattaaaaaaggtatttgtgaaattagagaaacattatagagatatgcaagatattgagtttacagttgagaaccataaattatggatgctacaaacccgcaatggaaaacgtacggctaaagcagcaattaaaattgctgtagatatggtgaaagaaaaactgatttcaaaaaaagaagcaattttgagaatagaccctgatacattagacacacttcttcatcctactttagatgaaaaggttgaaaaaaaagtaatagcaaaagggttgcctgcatcaccaggtgcagctagtggtaaggttgtctttactgcagatgatgctgaaaaaatgaataaccaaaaagaggatacaatattagtcagagttgaaacttcaccagaagatattcatggcatgcatgccgctaaaggaatattaactgccagaggtggaatgacaagtcacgcagctgtagttgcaagaggtatggggcggccttgtgtttctggttctggagaaataaatatagattatgaatccaaagaatttaaaacaggtgatctaattgttaaggaaggtgacattattacaattgatggcggttcaggaaaagtaatgaaaggccaagttccaactgttaaacctgatatttctggatatttttcaacaaataatgaaatgggcagatcagtttaga

SEQ ID NO: 258546 - DNA, 930 bp, Unknown
  Bacterial polypeptide expressing nucleotide sequence isolated from the Sargasso Sea
gtgtgtttctggttcaagtgaaattacaatcgattatgaattaaaacaatttaaagctggtgatgtgattattaaagaaggagatattgttactatagatggtggaagtggaaaagtaatgaaaggactagttcctactgttcaaccggaaatatctggatatttctccacgataatgaaatgggctgatgagtttaggaaattaaaagtaagaacaaatgctgaaacagaggcagatagcaaaacagctagagagttcggcgctgaaggaattggcttatgtagaacagaacatatgttttttgatgaagaaagaattttatctgttagacagatgattttgtctaaatcaaaagaggatagaaatagcgcgctagataaacttctccctcatcaaaagaaagactttaaaaaaatatttaaaatcatgtcaggtttacccgttacagtaagattactagatccaccacttcatgagtttctaccaaaagctgacaaagacatagaggaagtagcaagatccttaaatttatcagcgaaagaagttaaagatagaatatcagaacttcatgaggaaaatcctatgcttgggcatagaggatgtagactaggtatttccttcccagagatttacgagatgcaatgtagagcaatatttgaagcaatagttgaattaaaaaaacaaaaagttaaagcagcttttgtagaaataatgataccgttggtttcaactgagtctgaattaaaaattttaagagctttagttaataaaattgctaaagaaatagaaaaagaaaataaattaaaacttgagtatatggttggaaccatgattgaattgccgcgtgctgctttaccagcaaagtctatctcaaaacatgctgactttttcagttttggaacaaatgatttaacacaaacaacctttgg

SEQ ID NO: 258547 - DNA, 861 bp, Unknown
  Bacterial polypeptide expressing nucleotide sequence isolated from the Sargasso Sea
ttttgatgatgacagaattctgtcagtaagagaaatgattttatctaaaacaaaagaagatagaagcaaagctcttgcaaaacttttaccacatcaaaaaaaagattttattgaaatttttaaaattatgaacggtttaccagtcactgtaagattgctagatccaccattgcatgaatttttacctaaaaatgaaaaagaaataaaaagtgtatcagacgctttagagctctctactattgaagtagaatcaagaattacagaattgcatgaacacaatcctatgcttggtcataggggatgtagattaggaatttcttttccagaaatttacgaaatgcaatgcagagcaatttttgaagcattagttgaatgtaaaaataaaaaatataaatcaataattccagaaataatgattcctttagtctcaacagaggcagagattgaaataatgaaaaatttagtaaatcgagttgctaataaagttcaaaaagaaaataaaattaaaatagattatcttgtaggaacaatgattgaattaccaagagcagctcttaaagcaaaagatattgcaaaacatgctgatttctttagttttggaacaaatgatttaacacaaactacattcggaattagcagagacgatagtggaaaatttttaaatgactatattgaaaataagatatttgatgttgatccatttatttctattgatgaaggagtaggtgatttaattgaaatagccacacaaaaaggcaaaaaacaaaataaaaaaataaaactaggaatttgtggtgaacacggtggagatccaaaaagtattaatttttgttccaaaacaggcttggattatgtttcttg

SEQ ID NO: 258548 - DNA, 957 bp, Unknown
  Bacterial polypeptide expressing nucleotide sequence isolated from the Sargasso Sea
gacactgatttagatgaaaatgactgggatggactaattgaagatttcaaaagaacagtcaaggaaaaagcaaatagagattttccacaagatgttaatgaacagttgttaggagcaatcagtgcagtatttttgtcttgggatagtaagagagcaaaagtctatagaaaattaaaccatatacctgcagattggggtacagcagttaatgttcaatcaatggtttttggaaatatgggtgatgattgtgcaacaggtgttgtttttacaagaaatccatcagatggtgaaaatgaaatttatggagaatatttaattaatgcacaaggagaagatgtcgtggctggcacaagaacaccacaatacataactaaaaaagctaggcaaaatgcaaaagttaaagctccatcaatggaagagtctatgcctaaagtttataaacaacttcataagatcctaaaaaaattagaaaagcattacaaagatatgcaagatgtagagtttacagttgaaaataaaaagctgtggatgcttcaaacacgttctggaaaaagaactgcaaaatctgcagttaaaattgcagttgaaatggttaaagaaaaattaatctcaaaaaaagaggctgtgttaagaattgatccacattcacttgatacacttcttcatccaactctagatgaaaaaagcacaacaaatgtaattgcaaatggcttgcctgcatcaccaggtgctgcgagcggtaaagttgtattcacatctgaagaagcagaaaggttaacatctatgatgcaggacacaatattagttagagtagaaacatcacctgaagatatacaaggaatgcatgcagccaaaggaatcttaactgcaagaggtggaatgacaagccatgcagcagtagtagcaagaggaatgggaaggccttgtgtttcagggtcgagtgaaattgatatcaat

SEQ ID NO: 258549 - DNA, 832 bp, Unknown
  Bacterial polypeptide expressing nucleotide sequence isolated from the Sargasso Sea
aaagtatttattcaattaactaaaattttaaaaatattagaaaaacattataaagacatgcaagatgtagaatttactgttgaaaatcaaaaactttggattctgcaaactagatcgggaaaaagaactgcaaggtctgcagttaaaattgcaatagatatggaaaaagaaaagttaatttcaaaaaaacaagcaatactaagcatagaaccaaattctttggacacacttcttcactccacacttgatgaaaatagtagcattgaagttattgcaaaaggtttaccagcatcacccggtgctgcaagcggcaaagcagttttttcttctgatgaagcagaaaggttaaatggaatgatgcaagatactattttagtaagaatagaaacttctccagaggatattcatggaatgcatgccgcaaaagcgattttaacttctcgaggaggaatgaccagtcatgctgctgtagttgcaagaggcatgggaagaccatgtgtttccggttctagtgaaattgaaattgattatgaaaataagttattcaaaacaaaaaattttatcgttaaagaaggcgatataattacaatagatggatccacaggaagggtcattctagggaaagtcaagacagttaaacctgaaatttcaggtgattttttaaaattaatgaattgggctgatcaatttagaaaattaaaaattagaactaactccgaaactcctttagatactaaaatagcaagagactttggagcagaaggaattggactatgtagaactgaacatatgttttttgatgaagaaaaggattttatcagtaagagaaatg

SEQ ID NO: 258550 - DNA, 874 bp, Unknown
  Bacterial polypeptide expressing nucleotide sequence isolated from the Sargasso Sea
tcagaagatgatagggctaaagctttagaaaagttattaccacaccaaagaaaagattttatagaaatatttaaaattatgaatggccttcctgtaactgtaagattattagatcctcctttacatgaatttttaccaaagaataacaaagaaattgatgatgtagctcgttcgttaaatttgaatataaaagaaatagaaacaagaattaatgaactacatgaacaaaatccaatgttagggcatagaggttgcagattaggaatttcattcccagaaatttatgaaatgcaatgtagagcaatttttgaagctttagctgaatgtaaaaataaaaaatataaatctattttaccagaaataatgataccattggtttcaacagaagcggaaataaaaattatgaaagatttagtaataagagtagctggaaaagttcaaagagaaaaaaaagttaagttaaattttttagtaggcacaatgattgagcttccgagggcagctttaaaagcaaaagaaattgctaaacatgctgaattttttagttttggaacaaatgatttaactcaaactacatttggaattagcagagatgatagtggcaaatttttaaatgattatattgaaaacaaaatatttgacatagatccatttatatcaatagatgatggcgtgggagatctaattcaaattgcttcaactaaaggaaaaaaacaaaacaaaaagcttaaattaggtatttgtggtgaacatggaggtgatccaaaaagtataaatttttgttctaatataggcttggactatgtttcttgttctccatatagggttcctattgcaagattagcagcggctcaatcacaaataaagaaataat

SEQ ID NO: 258551 - DNA, 874 bp, Unknown
  Bacterial polypeptide expressing nucleotide sequence isolated from the Sargasso Sea
ttggatggattaatacaaaattttaaagatattgtaaaaaaaaaaacaaataaaaattttccacaagatgtaaacgagcaattatggggagcaatcaaagcagtttttttgtcatggaatagcaaaagagcaaaaacttacaggaaaataaatcatataccagagcactggggcaccgcaataaatgttcaatctatgatatttggaaatatgggcgacgattgtgcaacaggtgtagcttttaccaggaatccatctacaggaaaaaaggaaatttttggagaatatctaattaatgctcagggagaagatgtcgttgctggaaccagaactcctgaaaatattttctctatgaataaatctatgccaaaaatttttgcacaattaaaaaaaatttttaaacaattagaaactaaatatagagatatgcaagatatagaatttacagttgaaaataataaattatggatgttgcagacaagatcaggaaaaagaactgcaaaggctgcaattaaaattgcagttgatatggttaaagaaaaattaattacaaataaagaagcaattttaagaatagatccaaatacgcttgatactttgttgcaccccacattaaatgaaaaagctgaaaaaaaagtaatcgcatcaggtcttcccgcatctcctggagctgcaagtggaaaagttactttttctgcagatgaagccgaaagattgaaagaacaaatgcaagatacaatattagtgagaattgaaacttcaccagaagatattaatggaatgcatgcagctaaaggtattcttacggctagaggaggaatgacaagtcatgcagctgttgtggcaagaggtatgggaaaaccctgtgtatctg

SEQ ID NO: 258552 - DNA, 853 bp, Unknown
  Bacterial polypeptide expressing nucleotide sequence isolated from the Sargasso Sea
gtaagattagagacttctcccgaagatattcatggtatgcacgctgccaagggtattttaactgcaagaggaggaatgacaagtcacgcggctgtagttgcaagaggtatgggcaggccttgtgtttctgggtctagtgagatcactatagattatgaggcaaaacaatttaaagctggtgatgtaattataaaagagggtgacataatcacaatagatggtggaagtggaaatgtaatgaaggggttggttccaactgttcaaccagaaatatctgggtatttctctactataatgaattgggctgacgaatttaggaagcttaaagtaagaaccaatgctgagacagaagcagatagtataactgcaagagaatttggtgctgagggtattggtttatgtagaactgagcatatgttttttgacgaagaaagaattttatccgtaaggcaaatgatcttatctagatcaaaagaagatagaaacagtgcgttggaaaaacttttgccctttcaaaaagaagacttcaaaaaaatatttagaattatgtcaaagctcccggtcactgtaagactattagacccaccacttcatgaatttttacctaaagcagataaagatattgatgaggttgcaagatcattaaatttatcatcaaaagaaattaaagaaagaatatcagaacttcacgaagaaaatcctatgcttggtcacagaggatgcagacttggtatctcatttccagaaatttatgagatgcaatgtagagcaatttttgaagctatagttgaaattaaaaagtcaaaagcaaaacctgctattgtagaaattatgatacctcttgtttcgactg

SEQ ID NO: 258553 - DNA, 834 bp, Unknown
  Bacterial polypeptide expressing nucleotide sequence isolated from the Sargasso Sea
tttaaagctggtgatattttaattaaagagggtgatataatcacaattgatggcggaagcggtaaagttatgaaaggtagagtgccaactgtccaaccagaaatttcaggttacttttcaacaataatgaaatgggcggatcaatacagaaaattaaaagttagaactaatgctgaaacagaaaaagatagtaaaacagcaagagatttcggagcagaagggataggtttgtgtaggacagaacacatgttctttgatgaggaaagaattttatcagtaagacaaatgattttatctaaatcaatagaggataggaaaagtgctttggaaaaaattttaccttatcaacgagaggattttaaaaagatttttaaagttatgtcaggtctgcccgtaacagtaagattgcttgatccacctcttcacgagtttttaccaaaagctgaaaaagatatagatgaggtcgcaagatctttgaacttatcatcaaaagaaataaaagatagaatttctgaactacatgaggaaaatccaatgttaggccacaggggatgtaggctcggtatttcctttccagaaatttatgaaatgcaatgcaaagcaattttcgaatcaattattgaattaaaaaaagaaaaaataaaatcagctgaagttgaagttatgataccgctagtttctactgatttagaattaaaaatattaagagatttagtcacaaaaattgctagccaaattgaaaaagaaaaccaaattaagttaagatacactgttggaactatgattgaattaccacgcgcggctttacaagcaaggtccatatcaaaatatgct

SEQ ID NO: 258554 - DNA, 919 bp, Unknown
  Bacterial polypeptide expressing nucleotide sequence isolated from the Sargasso Sea
agaactgcgaaatcagcggtaaagattgcagttgatatggttaaagagaaactaatttcaaaaaaagaggctgttttgagaattgacccagatacattagacactttacttcatcctacattagatgaaaaaagttcaataaatgttattgccaatggtttacctgcttcaccaggtgctgcaagtggaaaagtcgtctttacctctgaagaggctgaaagactgactggtatgatgcaagatacgattttagttagagtggaaacgtcaccagaagacattcaaggaatgcatgcagctaaaggaattttgactgcaagaggtggaatgacaagtcacgcagctgttgtcgcaagaggcatgggaagaccttgtgtttctggttcaagtgaaattgatattaattatgaaaataaatcattcaaaacagcatctttagaaattaaagaaggtgaaattattacaattgatggatctactggtagaattatatcaggaagtgttgcaacagttaaacctgaaatttcaggtgacttttcaaaactaatgtcatgggcagatagttttagaaaattaaatattagaactaattcagagacacccaaagatactaaaacagcaaaggattttggagcagagggaattggactttgtagaaccgaacatatgttttttgatgaggaaagaattttgtcagtccgtgaaatgattttatcaaaaactaaagaggatagagcaattgcgcttgaaaaacttttgcctcatcaaaaaaaagattttgtagaaatttttaaaattatgaatggtctgccagttactgtaagattgttggatcctcctttgcatgagtttttaccaagaacaagcaaggaaattgatgaagtcgcaaatgtagtaggactatcaacaaaagaagttg

SEQ ID NO: 258555 - DNA, 883 bp, Unknown
  Bacterial polypeptide expressing nucleotide sequence isolated from the Sargasso Sea
catgttctttgatgaagagagaattctttctgtcagacaaatgattttgtctaaatcaaaagaggatagaaatagcgcgttagataagcttctaccttatcaaaaagaagactttaaaaaaatatttaaaattatgtcaggattaccagttacagtaaggttattagatccaccacttcatgagtttttaccaaaagctgacaaagacatacaagaggtagcaagatctttaaatttaccagcgaaagaggttaaagatagaatatcagaactgcatgaggaaaatcctatgcttgggcatagaggatgtaggcttggtatttctttcccagagatttatgagatgcaatgtagagcaatatttgaagctatagtcgagttaaaaaaacaaaaagtaaaagctgcttttgtagaaataatgataccgttggtttcaactgagtccgaattaaaaattttaagagctttagtaaataaaatagctagcgaaatagaaaaagaaaaaaaattaaaacttgagtatatggttggcaccatgattgaattgccgcgtgccgctttacaagctaaatctatctcaaaacatgctgattttttcagctttggaacgaatgatttaactcaaacaacatttggaataagcagagatgactcaggtaaattcttaaacgattatattgataataaaatttttgatgtagatccatttgtaagtattgatcaaaatggagtaggtgagctagtggaaatagcttcttcaagaggaagaaagacaaataagaatattaagttaggtatttgcggtgaacacggtggcgatccaaagagtattgagttttgttctagaacaggattaaactatgtttcctgctctccattcaga

SEQ ID NO: 258556 - DNA, 865 bp, Unknown
  Bacterial polypeptide expressing nucleotide sequence isolated from the Sargasso Sea
ttgtgtttctggatcgagtgaaattgacatcaattatgaaaataagtcatttaaaacatcatcaatagaaatcaaagagggagatataataacaatagacggatcaacaggaagaataattgaaggtagtgttgctaccgtaaagcctgaaatatctggtgatttttcaaaattaatgtcttgggccgatagttatagaaaattaaagattagaacaaattcagaaactccaaaagatactaaaactgcgaaggattttggtgctgaaggtattggactttgcagaactgagcacatgttttttgatgaagagagaattttatctgttagggaaatgattctttctaaaaccaaagaagacagagccaaagctttagataaactcctaccacatcaaaaaaaagactttactgaaatttttaggattatgaatggcttaccagttacagtaagattgttagatcctccattacatgaatttttaccaagaacaaataaagaaattggcgaattagcagaaattgttaatcttacagtaaaagaagttgaaacaagaattgaggaacttcatgaacaaaacccaatgctaggtcacagaggttgcagattagctatatcatttcctgaaatatatgagatgcaatgtagagcaattttcgaagcattatgtgagctgaaaaaaaataaaattaagtcagcttttcctgaaataatgatacctctggtttctacagaggctgaaattaaaataatgaaagacttagtcaaaagaatagcaagcttggttcaaaaagaaaataaattaaaaatagactttatggttggaacaatgattgagcttccaagagcagctataaaggcaaaa

SEQ ID NO: 258557 - DNA, 817 bp, Unknown
  Bacterial polypeptide expressing nucleotide sequence isolated from the Sargasso Sea
tatagatatttttaaaattatgagtggattaccagtcacagttagattgttggacccaccgttacatgaatttttaccacgtacagaaaaggaaattaatgaggttgctagtatagttaatcttccaattaaagaggttgagtcaagaattgaagaacttcatgagcaaaatcctatgttaggtcatagaggatgtcgtctgggaatatcttttcctgaaatttatgaaatgcaatgtaaagcaatatttgaagctttggtttaccttaaaaaaaataaaattaaatctgcatttcctgaaataatgatacctttagtatctacagaggctgagattaaaataatgaaagaattagtaattagaactgctagtcaagttcaacaagaaaataaattgaaaatagagtttttagtaggaacgatgattgaattacctagagccgcaataaaagcaaaggagatcgctaagcatgcagaattctttagttttggaacaaatgatttaactcagactacttttggaatcagtagagatgatagtggtaaatttttaaatgattatatagaaaacaaaatattttctgttgatccatttgtttcaatagatgaaggagtttcagatttagttgaaatagcagtcgaaaaaggaagaaaacaaaacaaaaatctaaagcttggtatctgtggagaacatggaggagaccctcatagtatatctttttgttctaatgtgggattgaattatgtttcttgttcaccttatagagttcctgttgcaaggttagctgccgctcaagctgaaattaaaaaaaattaa

SEQ ID NO: 258558 - DNA, 796 bp, Unknown
  Bacterial polypeptide expressing nucleotide sequence isolated from the Sargasso Sea
aaaagaggatagagctaaagctcttgcaaagttactacctcatcaaaaaaaagattttattgaaatttttaaaattatggaaggattgccagtaacagtaagactattagatcccccattacatgaatttttacctgtctctgataaagagattttagaagttgctgatgtagtaggagtagatattaaagaagttaaatcaagaatatcagagctgcatgagcaaaatcctatgctaggacatagaggatgtagattaggtatttcctatccagagatatatgagatgcaatgtagagcaatttttgaggcattagtggaattaaaaaataaaaaaattaaagctgcatttccagaaattatgatacccctggtttctacagaagctgaaataaagattatgaaaaatttagttcaaaacacagcaataaaagttcaaaaagaaaatgctataatattagattatttagttggaactatgatcgaactgccaagagctgcaattaaagcaaaagaaatagctaaacatgctgaattttttagttttggtactaatgatttaactcaaacaacatttggaattagtagagatgatagtgggaaattcttaaatgattatatcgataataaaattttttctatagatccttttgtctcaattgatgaaggagttgaagatttaattaaaattgctgtatctaaaggaaaaaaacaaaataaaaatataaagttgggtatttgtggtgaacatggaggcgatccaaaaagtattaatttttgttcaaaagttggactt

SEQ ID NO: 258559 - DNA, 772 bp, Unknown
  Bacterial polypeptide expressing nucleotide sequence isolated from the Sargasso Sea
tagtaaaacagctagaaaatttggtgctgaaggcataggcctttgtagaacagaacatatgttttttgatgaagagagaattttatcagtaagacaaatgattttatctagatctatagaagatagaaatcatgctttgtcaaaattattgcctcatcaaaaagatgattttaaaaagatatttaaagttatgtctggtttacccgtaacagtaagattactggatccacctttacatgagtttttgcctaaagctgacaaagatatggaagaagttgcaagatctttaaatttatcctcaaaagaaattaaagatagaattgcagaacttcacgaagaaaatccaatgttgggacatagaggatgtaggcttgggatttcatttccagaaatttatgagatgcaatgtgaagctatttttgaagcattagttgagttaaataaagaaaaaataaaagcagcgtttgttgaaataatgataccattagtatcaacagatacagaattaaaaatcttaagaactttagtaaaaaaaatagcaaaaaaaattgaattaaaaaataaaactaaattagattatatagttggaacaatgattgagttaccaagagccgctctacaagctaaatcaatatcaaaatacgcagactttttcagttttggaacaaatgatttaacacaaactactctaggtataagtcgcgatgactcgggtaaatttttaaatgattatatcgacaataaaatttttgaaattgatccatttgtaagc

SEQ ID NO: 258560 - DNA, 928 bp, Unknown
  Bacterial polypeptide expressing nucleotide sequence isolated from the Sargasso Sea
tttgatgaagtgggctgataaattgagaagattaaaagttaggacaaatgctgaaacaccaaatgatgctaaaacggcaattaagtttggtgcagaaggtattggcttgtgcagaactgagcatatgttttttgatgaagatagaattaatgttatgaggcaaatgatattagcagaagatagtaatgaacgggaaaatgctcttgataagcttttaccaatgcaaagaaaagattttgaggacctttttttaataatgaaaggccttccagtcacaattagattgcttgacccacctctgcatgaatttttgcctaataatgagaaagatatgatttcgctttctacaacaacgggaataagtttagagaaaatcaaagaacaatcactcaaattgcatgaggccaatccgatgcttggtcacagagggtgtaggctggctgtaagttaccccgaaatatgtgaaatgcaatcaaaggcaatatttgaagcggctgttaatattcaaaaaagaataaatcaaaaagttaatgtagaaataatgataccacttgcgtcaacttcaaaagaaattgatgtatgcaaggaaataatagataaagtagcttctacaatcacaataaaaatgaaagaaaaaattgattatttagtaggtactatgattgaattgcctagagcagcgctttgtgcagatcaattggcttcatctgctgatttttttagttttggaacaaatgacttaacacaaacaacttttggtataagtagagatgatataggaaattttttaaataagtatctagaagacggtatttttcaaaatgacccttttatttcaatagataaagaggctgttggttcattgttaaaaattggaattaaaaagggaaaagaaacaaacaaattcttaaaattaggtgtttgtggg

SEQ ID NO: 258561 - DNA, 751 bp, Unknown
  Bacterial polypeptide expressing nucleotide sequence isolated from the Sargasso Sea
ttaggaagtgtaccaacagtaaaaccagagatatctggagatttttctaaattaatgagttgggccgataacattagaaaattaaaagtaagaacgaattctgaaacacccctagatacaaaaatagcaagagattttggagccgagggaattggtctttgtagaacagagcatatgttttttgatgaggaaagaattttgtcagtacgagaaatgattttatcaaaaacccaagacgatagggctaaagctcttttaaaactcttaccacatcaaaaaaaagactttatgcaaatttttaagattatgcacggtcttcctgttacagtaagattacttgatccaccactacatgaatttttaccaagatctgaaaaagaaatttcagaagttgcaaatgttgtaggtgcagatttaaatgaagtaaaatcaagaattgatgaacttcatgaacaaaaccctatgttaggacatagaggatgtaggttaggtatttcttttccagagatttatgaaatgcaatgccgcgcaatttttgaagcattatctgaacttaaaaaaaacaagcaaaaatttgcctttccagaaattatgataccacttgtttcgactgaatcagagattaaaataatgaaagatttagtaattcgaattgctgggcaagtagagagagagaataaaattaaagtagactatttagttggtacaatgattgaattgccaagagcagcaattaaagcaaaagatttag

SEQ ID NO: 258562 - DNA, 861 bp, Unknown
  Bacterial polypeptide expressing nucleotide sequence isolated from the Sargasso Sea
acaaggcattactaaagctattacctcaccagaaaaatgatttcattgaaatatttaaaattatgagtggattacctgttacagtaagattattagatccgccacttcatgaatttctccctaagactgaaaaagaagtaaatgaggtagcaaatctatttaaattgtctaaaaaagatatagaagcgagagtcaacgaattacatgaacaaaatccaatgcttggacatagaggatgcagactaggaatttcttttccagaaatttatgaaatgcaatgcagagcaatatttgaagcactaacagatttaaaaaaaaataaaataaaatcagcatttccagaaattatgattcctttggtttcaactgaattagaaataaaaattatgaaagaattagttataaaaattgcagaagaagtgcaaaaaaataataatataaaaataaattacttagttggaacaatgattgaattacctagagcagctattaaagccaaagatattgcaaagcatgctgatttttttagttttggaacaaatgatttaactcaaacaacttttggcattagtcgagatgatagtggaaaatttttaaatgattatattgaaaataaaatttttgaaattgatccttttatttcaattgatgaaggtgttggagatttaattaaaatagcatgtgaaaagggtaaaaaacagaaaaaatcaattaaattaggaatttgtggagaacatggaggagatcctaaaagtatttatttttgttcaaaggcgggtctagactacgtttcttgctcaccttatagagttccagtcgcaagactagcagcagctcaagctttttttaaaaaaagttaat

SEQ ID NO: 258563 - DNA, 894 bp, Unknown
  Bacterial polypeptide expressing nucleotide sequence isolated from the Sargasso Sea
gatggaggagacgatgccgggcgtcttccaacaactttgcgatatccgcgagatattagagaagcactaccgcgacatgcaggacatcgagtttacagtccagaagaataatctctacatgctacagacacgctctggaaagcgaacggcaggcgcggcgatccggatcgcggttgagatggagaaagaaggtctgattgataaagtggaagcagtatgcagggtcgatccggcggctcttgatcaactactgcaccctcgtctcgatcctaatgcggtccgggaagtcctagcaaaaggtttgccggcctcaccgggtgcggcgtctggccaggtttatttcagcgccgacgaggtggaagcagcagcatcacgaggtgaaaagaccatattggttcgcgtcgagacgagtcccgaggacatacacggcatgcatgcggcacaaggaattttgacggcgcgcggcggtatgactagccacgcggcggtagtcgcgcgcggcatgggtcggccttgtgtcgttggcgctggtgagttggtaattgactaccctaaaaaggttatgttggctggcaatgtcaccattgcagcgggtgagaagatcactatcgatggagcagcggggcagattattcggggtgaggttgccaccatacaaccagaattatctggcgattttgctactttaatgtcttgggcggataagattcgaaccttgggcgtgcatgcaaatgctgatacgccggaagatgcgcggacagcgcgggaatttggcgcagagggtattggactttgccgaaccgagcacatgttttttgaggctgagcggattgtggcgatgcgggagatgatccttgcacaagatgaggtcggtcgccgtgcggcgctagcgaa

SEQ ID NO: 258564 - DNA, 834 bp, Unknown
  Bacterial polypeptide expressing nucleotide sequence isolated from the Sargasso Sea
gaatgtttttaagcaattatgtaaaattttgaagaatttagaaaaatattataaagatatgcaagatatcgagtttacagttgagaaaaacaaactttggatattacaaacaagatctggaaaaagaacagctaaatctgcagttaaaattgcagttgagatggttaaagaaaaattaatttcaaaaaaaaatgctgttacacgaatagatcctcattctttagatacactcttacatccaactttggatgaaaaaagtaaaataaatattatagcaaaaggtttgccagcttctccaggagcagcaactggaaaagtagttttttcatctgatgaagctgaaagacttaacgaaatgatgcaggatacaattttagttagagtagaaacttctcctgaggatatacatggaatgcatgcagcaaaaggaatattaacttcaagaggtggaatgacaagtcatgcagcagtagtcgcaagaggaatgggaagaccatgtgtttcaggttcaactgaaattgatataaattatgaaagaaaaatttttaaaactaaatctttagaaattaaagagggtgatttaattacaatagatggttctactggaagaattattcaaggagaagttccaaaaataaagcctgaaatttcaggagatttttctaaattaatgaaatgggcagataaattcagaaaattaaaagtaagaacgaattctgaaacctcactagatacaaaaactgcaagagattttggagcagaaggaataggcctatgtagaacagagcatatgttttttgatgaagaaagaattttgtctgtaagggaaatgat

SEQ ID NO: 258565 - DNA, 879 bp, Unknown
  Bacterial polypeptide expressing nucleotide sequence isolated from the Sargasso Sea
aaaaaagtaatcgcaaaaggtttacctgcatctccaggtgcagcgagtggaaaagtagtgtttactgccgacgaagctgagaaaatgaagaaccaaaaagaagatacaatcttagtaagagttgaaacctcacccgaagatattcacggaatgcatgctgctaaaggcattttaacagcaagaggcggaatgacaagtcacgccgctgtagttgctcgaggaatgggaagaccttgtgtttcaggatcaggtgaaatcaatattgatcaagaaaataaagaatttaaagttggagaccttacaattaaagaaggagagataataacgattgatggaggaacaggtaaagtaatgcaaggattagttcctactgtaaaacctgatatttcaggatacttctctacgataatgaagtggtcagaccagtttagaaaattaaaaattaggacaaattctgaaactccacaagatacaaaaatggcaagaaattttggggctgaaggaattggtctatgcagaacggaacatatgttttttgatgatgagagaattttgtctgttagacaaatgatagtatctaaagatttagatgatagaaaagtagctctagataaacttctccctcatcaaaaaaatgattttaaagaaatttttaaaatcatgaaaggtttgccggttacagtaagacttttggatccacctttacacgaatttcttcctaagtctgaaaaagatatggaagaactggcaagatcactaaattcaggagttaaagaaattaaaaacagagttgcggagttacatgagcttaatccaatgcttggacatagaggatgtagacttggtatttctttcccagaaatttatgaaatgcagtgt

SEQ ID NO: 258566 - DNA, 881 bp, Unknown
  Bacterial polypeptide expressing nucleotide sequence isolated from the Sargasso Sea
tcaagaagacagagctaaagctcttaaaaagctcttaccacatcaaaaagatgattttgttcaaatttttaaaataatgcaaggactccccgtgacagtaagattactagatccaccgttacatgaatttttgcccaaatctgataaagaaatttttgaagtagccgatgttgttggagtagacaaaaaagagttaatatccagaatagacgaacttcatgaacaaaatcctatgctaggtcatagaggttgtagactgggcatttcctatccagaaatttatgaaatgcaatgtagagctatttttgaagctttatcagatttaaaaagaaaaaaacaaaagtcagctttacccgagattatgataccacttgtttctactgagacagaaattaagattatgaaagatttagtgataaacacggcaagaaaagttcaaaatgaaaataaagttaaaatagaatttttagttggtacaatgatagaattaccaagggctgcaattaaagctaaagatatcgctaaacatgctgaattttttagttttggaactaatgatttaactcagactacctttgggattagcagggatgatagtggaaaatttttaaatgactatattgataacaaaattttcaatatagatccgtttgtgtcaatagatgagggagtaaaagatttaatagaaatagcagtagaaagaggaaaaaagcaaaataaaaaaattaaacttggaatttgtggtgaacacggaggagatccagagagtattcgattttgctcaaatattggacttaattatgtatcctgttcgccttatagggtgccaatagctcgattagcagctgcacaagcagaacttaagaaaaaattattataat

SEQ ID NO: 258567 - DNA, 772 bp, Unknown
  Bacterial polypeptide expressing nucleotide sequence isolated from the Sargasso Sea
gatgatgcaagatacaatacttgttagagtagaaacttcaccagaggatatccatggcatgcatgctgcaaaaggtattttaactgctcgtggaggaatgactagtcatgctgcagttgttgcaagaggtatgggaagaccatgtgtatctggttcaagtgaaattgatattaattatgaacaaaaaatatttagaacttcgtcaaatgtagaagtaaaagagggagatgtaattacaattgacggatctacaggtagggtaatcttagataaagttccaactataaagccagagatctcaggtgacttttcaaagttaatgagttgggctgatagttacagaaaattaaaagtaagaacaaactctgagacccctcttgatacaaaaacagcaagagaatttggagctgaaggtattggtctttgtaggactgagcatatgttttttgacgaggatagaattttgtctgtaagagagatgatcttatctaaaactatagaggatagaaataatgctttggcaaaattattacctcatcaaaaaaatgactttatacaaatttttgaaataatgaacggtcttccagtaacagttagattacttgatccacctttacatgaatttttaccgaaaaatgacaaagaaattggcgacctaagttcagtaacaggtttaaatgctaatgaaatacgatctaggacagaggaattgcatgaacataatccaatgctcggacatagaggttgtagactaggcatttcttttccagaa

SEQ ID NO: 258568 - DNA, 771 bp, Unknown
  Bacterial polypeptide expressing nucleotide sequence isolated from the Sargasso Sea
tatacatggaatgcatgcagctaaaggaattcttactgcaagaggaggtatgacaagtcatgccgcagttgttgcacgaggaatgggaagaccatgtgtttcaggatcaagtgagataacaattgattatgagctaaaacaattcaaagctggggaaataattgttaaagagggtgatattattactatagatggtggtagtggaaaagtaatgaaagggttagttcccactgttcaaccggaaatttctggttacttctctacaataatgaaatgggctgatgaatttaggaaattaaaagtaagaacaaatgctgaaacagaggtagatagcaaaacagctagagagtttggcgctgagggaattggtttatgtagaacggagcacatgttctttaatgaagagagaattttatctgttagacaaatgattttgtctaaatcaaaagatgaccgaaatagtgcgcttgataaacttttacctcatcaaaaagaagactttaaaaaaatatttaaagttatgtcaggtttaccggttactgtaagattattagatccaccacttcatgagttcttaccaaaagctgaaaaagatatagaggaagtagcgagatctttaaatttatcagcgaaagaggttaaagatagaatagcagaacttcatgaggaaaatcccatgcttgggcatagaggatgcaggcttggaatttctttcccagagatttatgagatgcaatgtaaagcaatatttgaagccatagtcgaattaaa

SEQ ID NO: 258569 - DNA, 874 bp, Unknown
  Bacterial polypeptide expressing nucleotide sequence isolated from the Sargasso Sea
ggggtagtttttacaagaaatccatcggatggaaaaaaggaaatatatggtgaatatcttattaatgcgcaaggtgaagatgttgttgctggaacccgaacaccacaacacataacaaaaaaagcaaaaaaatttgcaagacaaaatcttccttctttagaagagtcaatgccttcaattttttatcaattgaaaaccatacttttaaaattagaaaaatattacaaggacatgcaagatgtagaatttactattgaaaataaaaaactttggattttgcaaacaagatctggaaaaagaactgcaaaatctgcagttaaaattgcagtagatatggttagtgaaaaattaattactaaaaaggaagctgtattgagaatagaacctgacactttagatacattactccatccaactttggatgaaaaagcagatatagaggtcattgggaaagggttgccagcctctcctggtgcagcgagtggaaaagtagtttttgattcagatgaggcggagagactaaataacatgatgcaaaatacaatcttagttagaattgaaacttcgccagaggacattcatggaatgcatgcagctaaaggtatactaacagcaagaggaggtatgaccagccatgcagcagtagtggcaaggggcatgggcagaccttgtgtgtcgggatctagtgaaattgaaatagattataaaaataaattatttaaaactaatgataaagaaataaaagaaggtgatctcattacaattgatggatcaaccggcaggataatagttggagaagtaaaaactgttaaaccagaaatttcaggaaatttttctaaattgatgaattgggcagatagttttagaaaataaa

SEQ ID NO: 258570 - DNA, 798 bp, Unknown
  Bacterial polypeptide expressing nucleotide sequence isolated from the Sargasso Sea
agatggctcgactggaagaattattgctggaagtgtctcaactgtaaaaccagaaatatctggtgatttttctaagctaatgtcttgggctgacaaatttagaaaattaaaagtaagaacaaattccgagacacctaaagatactaaaacagcaaaagattttggtgcagagggtataggactatgtagaactgaacatatgttttttgatgaagaaagaattttgtctgtaagagaaatgatattatctaaaactaaagaagacagattaatagcattagaaaaattgttaccgcatcaaagaaaagattttatagatatttttaagattatgagtggattaccagtcacagtaagattgttggacccaccattacatgaatttttaccgcgtacagaaaaggaaataaatgagattgctaatatagttaatctcccagttaaagagattgagtcaagaattcaagagctacatgagcaaaatcctatgttaggtcatagaggctgtcgtctgggaatatcttttcctgaaatttatgaaatgcaatgtaaagcaatatttgaagctttagcaaaccttaaaaaaagtaaaattaaatctgcgtttcctgaaataatgatacctttggtgtctacagaggctgagataaaaataatgaaagatttagtaattagaactgctagtcaagttcagcaaaaacataaattgaaaatagaatttttagtcggaacgatgattgaattacctagagctgctataaaagcaaaggagattgctaagcatgcagaattctttag

SEQ ID NO: 258571 - DNA, 899 bp, Unknown
  Bacterial polypeptide expressing nucleotide sequence isolated from the Sargasso Sea
gatgagttggtcagataagtacagaaaacttaaaattagaacaaactcagaaacacctcttgatacaaaaacagcaagagattttggtgcagagggaattgggctttgtagaacagaacacatgttttttgatgaggaaagaattctttctgtcagacaaatgatattatctaaatctagaagtgacagagataaagctttatctaagcttttacctcatcaaaaaaaagattttatagaaatatttaaaataatgaatggattgcctgttacagtgagattgttagatcctcctttacacgaattcttaccaaagaacgaaaatgaaatttcttatgtagctaaatcactagatttaccagttaaagaagtagaagatcgaattagggaactacatgagcataatccgatgcttggtcatagaggttgcaggttaggaatttcttttcctgaaatttatgagatgcaatgcagagcaatttttgaagctctagttgaatgtaaaaataaaaaaattaaatctattttaccagaaataatgatcccactagtttcaacagaagcagaaataaaaataatgaaagatttagtgattaaagttgcaaaacaagttcaaaatgaaaataaagcaaaaataaaatttttagttggcacaatgattgaacttccaagagcagcaataaaagcgcaagatatagcaaaacacgctgaattttttagttttggaactaacgatttaactcaaactacatttggaattagcagggatgatagtggaaaatttttaaatgattatattgaaaataaaatatttgatattgatcctttcatatctatagatgatggagtaggagatttaattgacattgctacagcaaaaggaagaaacaagaataaaa

SEQ ID NO: 258572 - DNA, 868 bp, Unknown
  Bacterial polypeptide expressing nucleotide sequence isolated from the Sargasso Sea
atggtatttgggaatatgggtgatgattgtgcaactggtgtagtatttactagaaatccatcggatggcataaaagatatctatggagagtatttaatcaatgctcaaggagaagatgttgttgcgggtactcgtacacctcaacatattacaaaaaaagcaagaattaattctaaacaaaaacaattatcaatggaagaagcgatgccctcagtttacaagaagcttaatggaattttactaaagttagagaaatattataaagatatgcaagatgttgaatttacagtcgaaaacaaaattttgtggatgcttcaaacaaggtcaggaaaaagaactgctaaatcagctgtaaaaattgcagtggatatggttaaagaaaaattaatatctaaaaaggaagctgtactcagattaaatccaaattctttagatactttattgcacccaactttggacgatgatgaaaaaattaatgtaatagcaaatggattacctgcatctcctggtgcagcaagtggaaaagtagtttttaattctgatgaagcagaaagattaaatggcatgatgcaaaatactatattagtaagagttgagacatctcccgaagatattcatggaatgcatgccgcaaaggggattcttacagcaaggggtggaatgacaagtcatgcagcagttgttgcaagagggatggggagaccttgcgtttcaggctctagtgaaattgaaatagactatgaaaataaaatatttaaaactaaaaataatattgtcaaagaaggtgacttaattacaattgatggttctacgggaagaataatactaggagaagtaaaaactattaaaccagaaaatatctggtgat

SEQ ID NO: 258573 - DNA, 952 bp, Unknown
  Bacterial polypeptide expressing nucleotide sequence isolated from the Sargasso Sea
gtaagaacaaattcagagacaccaaatgatactaaaactgcaaaagattttggtgctgaaggtattggactttgtagaactgaacatatgttttttgatgaagaaagaattttgtctgtaagagaaatgatattatcaaaaacaaaagaggatagagcaatagcgttagaaaaattattaccacatcaaaaaaaagattttatagaaatttttaaaattatgagtggcttaccagtgacagtaaggctgttagacccacctttacatgaatttttgccacgaacaaataaagaaattaatgaggttgccagtatggtcaaacttcctgttaaagaggttgaatcaaggatagaagagcttcatgagcaaaatccaatgttaggacatagaggctgtaggttaggaatatcttttccagaaatttatgaaatgcagtgcagagcaatattcgaagctttagcagaactaaaaaaaagtaaaacaaagtccgcatttcctgaaataatgataccattagtatctacagaggcagagattaaattaatgaaagaattagttattagaactgcaagtgaggtacaaaatgaatctaaggtgaaagtaaaatttttggttggcacaatgattgaattacctagagctgcaattaaagcaaaagaaatagcaaaacatgctgaattttttagttttggaacaaatgatttaactcaaactacttttggaataagtagagatgatagtggaaagtttttaaatgattatttagaaaataaaatattttccacagatccatttgtttcaatagacgagggtgtgtcagatttaattgagatagctgtagagaagggcagaaaacaaaatagtaaattaaaattaggaatatgtggtgagcatggtggcgatccacagagcatattcttctgttcaacagctgggttaaattatgtatcat

SEQ ID NO: 258574 - DNA, 793 bp, Unknown
  Bacterial polypeptide expressing nucleotide sequence isolated from the Sargasso Sea
acaattcttagctgggcacaaaatacaaaacaattaggaattcgagcaaatgctgatactccagatgcagcaaaattagcaagacagtatggagcacaaggaattggactatgtagaacagagagaatgtttaacgagtcagacagaatcggattatttgttgaaatgattatggcagaatcacaagaagagagaaacaaagtactcaaaaaattacaagaattacaaaaaagtgacttcattggaattctaaaagcaatggaaggatacaaagttacaattagattgttagatccaccattacacgaatttttaccaaatcctgaagaattgaaagataaaatgaataaagaaaatgacaaaagcaaaaaaactcaacgtgttttagatagagcacgtgaattagctgaaattaatccaatgatgggacatagaggagtaagagttgcaattacatatccagaaatatacaaaatgcaaattaccgctgtatttgaagccgcagcagagcttgcaaagaaaaaggttaacgcaaaaccacagattatgattccacaagtaggaagtttagcagaattaaactatatcaaatcaatttatgacgatgtaaaaaaagagattgaacaaaaatacaagaaaaaattcaagataaactttggaaccatgctagaagttgttcgtgcatgtcttacatcagatgaattagcagatacggcagagtttttcagctttggaacaaatgatctaacacaggcagtatttagtttcagtagagaggatgcagaaggaaaat

SEQ ID NO: 258575 - DNA, 906 bp, Unknown
  Bacterial polypeptide expressing nucleotide sequence isolated from the Sargasso Sea
aatgaattggtctgatgattttagaaagttaaaaattagaactaattcggaaacaccaatggatagtaaaactgctagagaatttggtgcagagggtattggcttgtgtagaactgaacatatgttttttgacgaagaaagaattttatcagtaagagaaatgatattgtcaaaaacaattgaagatcgatctaatgcactcaaaaaattattaccacatcaaaaaaaagatttcattgaaatatttaagataatgaaaggtttacctgtaacagtaagattacttgatccacctcttcatgaatttttgccaaaaagtagtattgaaattaatgatgttgcagtttcactaaatattcctgttaaagaacttgaagtaagaatttcagaacttcatgaacaaaatcccatgctaggtcatagaggttgtagattagcaatttcatttcctgaaatttatgagatgcagtgtactgcaatatttgaggctttagtggaatgtaagaaacaaaaaattgagtcaacaatgcctgaaatcatgatacctttagtttcaacagaagcagaaataaaaatcatgaaagatttagtcatcagagttgcaaaaaaagttcaagatgtgaataaaattaaaattgattttttagttggaacaatgattgaattaccaagagcagcaataaaggcaaaagatattgctaaacacgctgaattttttagttttggtactaatgacctaactcaaactacatttggaattagtagagatgatagtggtaaattccttaatgattatatcaataacaaaatttttgacattgatccctttgtatccattgatgatggagttggagacttaataaaaattgcaactgacaaaggcagaaaacaaaataaaaaaataaa

SEQ ID NO: 258576 - DNA, 760 bp, Unknown
  Bacterial polypeptide expressing nucleotide sequence isolated from the Sargasso Sea
ctttggagaattcctaattaatgcacaaggagaagatgttgtagcgggtactagaactcctcaatacatcactaaaaaagcaaaaaaagactcaggatctaaagatccttcaatggaagaggctatgcctaaagtttataaagaacttgcaaaggtatttcttaagttagaaagacattataaagatatgcaggacattgagtttacagttgaaaataataaactttggatgttgcaaaccagatctggaaaaagaacagccaaagctgcaattaaaattgcagtggatatggtcaaagagaaattgatttcaaaaaaagaagcagtcacaagaattgatccaaatactttagatactttattacatcctactttagatgaaaaagctgagaaagagataattgcttcaggattaccggcatcaccaggagctgcaagtggtaaagttgttttcactgctgatgaagcagagaaacttaacgggatgatgcaagatacaatattagttaggttagaaacctcaccagaagatatacatggaatgcatgcagctaaaggaattcttactgcaagaggcggtatgactagtcatgctgcggttgtagcacgaggaatggggagaccgtgtgtttcaggttcaagtgaaattacaatcgattatgagttaaaacaatttaaagctggaaacataactattaaagagggagatattattactatagatgggggcagtggaaaagtaatgaaaggattagttcca

SEQ ID NO: 258577 - DNA, 973 bp, Unknown
  Bacterial polypeptide expressing nucleotide sequence isolated from the Sargasso Sea
ttagatacacttttgcaccctactttagatgaaaaaagttcaattaatgtaatagcaaatggattgccagcatcaccaggtgcagccagtggtaaagttgtatttacatcagaagaggctgaaagattaaccgcaataatgcaagatacaattttggtcagagtagagacctctccagaagatatacagggaatgcatgctgctaaaggtattttaacagcccgaggaggaatgaccagtcatgcagcggttgttgctagaggtatgggaagaccatgtgtgtcaggatcaagtgaaattgatataaactatgaaaataaatcttttaaaacttcttcaatggagattaaagcgggagacataattacaatagacggttcaactggaagaattattgctggaaatgtttcaacagtgaaaccagaaatatctggcgatttttcaaagttaatgtcttgggctgacaattttagaaaattaaaagtaaggacaaactcagagacaccaaaagatactaaaacagcaaaagactttggtgcagaagggattggattatgcagaactgaacatatgttttttgacgaagaaagaattttgtctgtgagagaaatgatattatctaaaacaaaagaagacagatcaatagcattacaaaaacttttaccgcatcaaagaaaagattttatagacatttttaaaatcatgagtggattaccagtaacggttagattgttggatccaccattacatgaatttttaccacgtacagaaaaggaaattaatgagattgctaatatagttaatctttcagtaaaagaggttgagtcaagaattgaagagctccatgagcaaaatcctatgttaggtcatagaggttgtaggctaggaatatcttttcccgaaatttatgaaatgcaatgtagagcaatatttgaatcgttagcacatttaaaaaaaagtaaaattaaatctg

SEQ ID NO: 258578 - DNA, 886 bp, Unknown
  Bacterial polypeptide expressing nucleotide sequence isolated from the Sargasso Sea
tgataaagcaaggaaattaaaaattagaactaactcagaaacaccatacgatagcaaaatcgcaagagaatttggagctgaagggattggattatgtagaacagaacatatgttttttgacgaggaaagaattttatcggtaagacagatgatactctctaaatcaaaggaggatagagataaggctttagaaaaattattgccacatcaaaaaaatgattttattcagatatttaaaattatgagtggattaccagtcacagttagattattagacccacctttacacgaatttttacctaaaaacaaaagcgaaattgatgatgttgctaaatcacttagtttatcaaatgaagaagttcaaactagaattgatgaattacatgaacaaaatcctatgcttggacatagaggatgcagattaggtatatcttttccagaaatttatgaaatgcaatgtaaagcaatattcgaggctttaattgaatgtaaaaatcaaaaaataaaacctatcatgccagaaataatgatccccttagtttcaacagaagcagagataagaattatgaaagaattagtaattagaattgcagctgaaattcaaaataaaaataggacaaagataaaatttttagttggaacaatgattgaacttccaagagctgctttaaaagcaaaagatatagctaaacatgcagaattttttagttttggaacaaatgatctaacccaaacaacgtttggaataagtagagatgatagtggaaaatttcttaatgattatattgaaaataaaatatttgacattgaccctttcatatcaattgacgatggggttggtgatttaattcagtttgcagcctcaaatggaaaaaaacaaaaataa

SEQ ID NO: 258579 - DNA, 796 bp, Unknown
  Bacterial polypeptide expressing nucleotide sequence isolated from the Sargasso Sea
atgagtggacttccagttacaatcagacttttagatccacctttacatgagtttttacctaaaaatgaaaaagaaatttctgatatttcaaaatctttaaatttatcaattaaagaaatcgaaggaagaattaatgaattgcatgagcaaaatcctatgttaggccatagaggctgtagactgggtatttcttttcctgagatttataaaatgcaaattcgagctatatttgaagcactagtagaatgtaaaaaaaataaaataaaatcaattatgcctgaaataatgatcccactagtgtcaaccgaagtagagataaaaataatgaaagatttagtgattaaagttgcaagagaagtgcaaaatgaaaataaaactaaaattaaatttctagttggtacaatgatagaacttcctagagctgcaattaaagcaaaagatattgctaagtatgcagaatttttcagctttggtactaacgatcttacacagactacattcggaattagtagagatgatagtagtaaatttttaaatgattatatagaaaataaaatttttgatattgatccatttatttcaattgatgatggagttggtgatttaattgaaatggcagttactagaggaaaaaaacaaaataaaaaaattaagttgggtatatgcggggagcatggtggagatccaaggagtatagagttttgtgctaaagttggtttagattatgtttcttgttctccttacagagtccctgttgctcgtttagctgctgcgcaggcccagctaaaaaagtaat

SEQ ID NO: 258580 - DNA, 880 bp, Unknown
  Bacterial polypeptide expressing nucleotide sequence isolated from the Sargasso Sea
atgggagacgactgtgcaactggtgttgtttttactagaaatccatcagatggtgaaaacgaaatttatggagaatatttaatcaatgcacaaggagaggatgttgtggctggaacaagaactccacaatatataactaaaaaagctagacaaaatgctaaagttaaagcttcatcaatggaagagtctatgcctaaagtttataaacaactttataagatactaaaaaaactagaaaagcattacaaagatatgcaggatgtagagtttacagttgaaaataaaaagctgtggatgcttcaaacacgttctggaaaaagaactgcaaaatctgcagttaaaattgcagttgatatggttaaagaaaaattaatttcaaaaaaagaggccgtgttaagaattgatccacactcacttgatacccttcttcatccaactctagatgaaaaaagcacaataaatgtaattgcaaatggcttgcctgcttcaccaggtgctgcgagtggtaaagttgtattcacttctgaagaagcagaaaggctaacatccatgatgcaggatacaatattagttagagtagaaacctctccagaagatatacaaggaatgcatgctgctaaaggaatattaactgcaagaggtgggatgacaagccatgcagcagttgtagcaagaggaatgggaaggccttgtgtttctggatcgagtgaaattgacatcaattatgaaaataagtcatttaaaacatcatcaatggaaatcaaagaaggagatataataacaatagacggatcaacaggaagaataattgaaggtagtgttgctaccgtaaagcctgaaatatctggtgatttttcaaaaattaatgtcttgggctgat

SEQ ID NO: 258581 - DNA, 2158 bp, Unknown
  Bacterial polypeptide expressing nucleotide sequence isolated from the Sargasso Sea
tgtacttttagatactgaccttgaaacgagcgattgggaagcgttaattagagattttaaaaatgttgtaaaacaagagaccaaaaaggattttcctcaaaatgtggaggatcaattaattaatgcagtctcttcagtatttttatcttgggaaagcaatcgagcaaaaacttacagaaagatcaatcgaataccttccgattgggggactgctgtaaatgtacaatcaatggtttttggcaatatgggagataaatgtgcaactggagtaacttttacaagagacccatctaatggaaataatgagatatatggtgaatatttggttaacgcccagggagaggacgttgtagcaggtacaagaacaccacaatatattactaaaagatcaagacttaaatcaaataataaaggtatgtcgttagaagaaaatatgccaaagatatttaaacagctaaaaaaaattttaaaatctttggagaagtattacaaagatatgcaagatgtagagtttactatagaaaacggaaagctttggatacttcagacaagatcaggtaaaagaactgctagatcggcaattaaaattgcagtagatatggttaaagaaaagttaataacaaaaaaagatgcgttattaagaatagaccctggatcgcttgataatttattacatccttccttagatgaaaaagccgaaatgattataattgcaaatggattacctgcttcaccaggtgcatcaagtgggaaagtagttttttcatctgatgaggctgaaagacttaattctatgatgcaagatacaatattggtaagagtagagacttctccagaggatataaatggcatgcatgcggctaaaggaatattaacctcaagaggaggcatgacaagtcatgcagcagttgtggctagaggtatgggtagaccatgtgtttcaggttcaagcgagatagaaattgattataacaaaaaagtttttaaggctaataacagaactgtaaaagaaggagaaattataacaatagacggatcctctggaagagtaattttgggagaagtcaaaactattaaacctgacatatctggagattttcttaaagttatgaaatgggcagacaaatatagaaaacttaaaataagaacaaattctgaaacaccatctgatactaaaactgcgagagaatttggagcagagggaattggtctttgcagaactgagcatatgttttttgatgaagatagaattttatcagttagacaaatgatactttcaaaatcaaaaaatgatagagatttagctttgtctaaacttttaccttatcaaaaaaaagactttattgaaatattcaaaattatgaaaggtttaccagttacagtgagattattagatccaccattacacgagtttttaccaaaaactaaagaggagattgtaggagttgcaaactctttaaatatttcttataaagaagtagatcaaagaatacaagagttacatgaacaaaaccctatgcttggacatagaggttgtagattggcaatatcttttccagaaatttatgaaatgcaatgtaaggcaatatttgaagctttagtcgaatgtaaaaaaaataacattaaatctataattcctgaaattatgatacctttagtgtctactgaggctgagataaaaataatgaaaaatctagttattaaaatagcaagagaaattgaagataaaactaaagttaaaattaattttttggtaggtacaatgatagaattacctagggcagcaattaaagcaaaagaaatagcaaaacatgcagaattttttagttttggtactaatgatttaacacaaacaacatttggaataagcagagatgatagtggaaaatttttaaacgattatattgaaaacaaaatttttgaagttgatccatttgtttcaattgatgacggggttggtgatcttatagaatttgctgcaaaaaagggtaaaaaacaaaataaaaaaattaagctgggtatttgtggtgagcatgggggagatccaaaaagtataaatttttgttcaaaaaccggcctagattacgtttcttgttctccttacagagttcctgtagcaatattagccgcagctcaagctgagttaaaaaataaataa

SEQ ID NO: 258582 - DNA, 1220 bp, Unknown
  Bacterial polypeptide expressing nucleotide sequence isolated from the Sargasso Sea
ttctggatcaagtgaaatagaaattgattatgaaaacaaattattcaaaacaaaaaataaagtaattaaagagggagaactaattacaattgatggttcaacaggcagaataattattggagaggtaaaaacagttaaaccagaaatatcaggtgatttctcaaaaataatgagttggtctgatgattttagaaaattaaaaattagaactaattccgagacgccattagatagtaaaactgctagagaatttggtgcagaaggtattggtttgtgtagaactgaacatatgttttttgacgaagaaagaattttatcagtaagagaaatgatattatcaaaaacaattgaagatcgatctaatgcactcaaaaagctattgccgcatcaaaaaaaagattttattgaaatatttaaaataatgagaggtttaccagtaacagtaaggttgcttgacccaccacttcatgaatttttgccaaaaagtaataacgaaattaatgatgttgcagtttcactaaatattcctgttaaagaacttgaagttagaatttccgaacttcatgaacaaaatcccatgctaggtcacagaggttgtagattagcaatttcattccctgaaatttatgagatgcagtgtactgcaatttttgaggctttagtagaatgtaaaaaacaaaaaattcaatcaactatgcctgaaattatgattcctttagtttcaacagaagcagagataaaaattatgaaagatttagtcattagggttgcaaaaaaagttcaagatgaaaataaaattaaaattgaatttttagttggaacaatgattgaattgccaagagcagcaatcaaggcaaaagatatcgctaaacatgctgaattttttagttttggaacaaatgatttaactcaaactacatttggaattagtagagatgatagtggtaaattccttaatgattatatagagaacaaaatttttgatattgatccttttgtatcaattgatgatggagttggggacttaataaaaattgcaactgataaaggcagaaaacaaaacaaaaaaattaaacttggaatttgtggtgagcatggtggagatcctaaaagcatagaattttgtgcaaaaactggattagattatgtatcttgttcaccttacagagttccagttgcaagattagcagcagctcaagctcaaataaaaaaaaattaaa

SEQ ID NO: 258583 - DNA, 2653 bp, Unknown
  Bacterial polypeptide expressing nucleotide sequence isolated from the Sargasso Sea
atgaaaaaatttattttcaatttcaaatctagagaagtaaaaaagataaaatttcctaaaaatattttaggaggtaaaggtacaaacctttcagagatgggtaggatgggtcttccagttcctccaggctttacaatttccactgaagtttgtgaattattttataaaaataataaaaagttaaattcaaaagttttaaaagaaataaataaagagattaagattattgaaaaggatactggaaaaaaatttggagattttaataatcctttgcttgtgtcggttagatctggagcaagagtgtctatgcctggtatgatggatacaattttaaatttaggtttaaatgataaaactgttatttctttagcgaaaagtacctcgaatcttagatttgcaagagacagttacagaagatttattcaaatgtactctaatgttgttttaggaatagaaaaccataattttgaggaacttattgaaaattataaattaaccaaaggtgttttattggatactgatctagacgaaaatgattgggatggattgattaaagattttaaaaaaataataaaagaaaaaacaaaaaaagaatttccacaaaatgtaaatgatcaactaataggagcaattagcgctgtatttttgtcttgggaaagccatagggcaaaaatttacaggaaattaaatcatataccgtcaaattggggaactgcagtcaatgttcaatctatggtttttgggaatatgggtgaagattgtgcaacaggcgtagtattcactcgaaatccatctgatggatcaaataatatttatggcgagtatttgataaatgcacaaggagaagatgtagttgccggtacaagaacacctcaacatataacaaaaaaagcaaaaaatagtgcaaaatcaaatcttgcctcaatggaagaaactatgccggtagtttttaaacaattaaaaaatatactaaaaaaattagaaaatcattacaaagatatgcaagatgttgaatttactgttgagaaaaaaaaactttggatgcttcaaacaagatcaggcaaaagaactgctaaatctgcagtaaaaattgcagtagatatggttaaagaaaagttaatttcaaaaaaagaagctgttttaagaattgaacctagctcattagatactttgttacatccaactttagatgaaaaggagaatataaatgtaatagcaaaaggtttaccagcatcaccaggcgcagctagtggtaaagtcgtttttacttctgaagaagctgaaagattaaatggaatgatgcagagcacaattttagtgagagttgaaacttcaccagaggatatccatggtatgcatgcggccaaaggaattttgacagctagaggtggtatgacgagtcatgcagcagtagttgctaggggaatgggaagaccttgtgtttcaggttcaagtgaaattgaaattgattatgtaaataaattattcaaaaccaaaaccaaagagataaaagaaggagatcttataactattgatggttcaacaggaagaataatttttggagaaataaaaactgttaagccagaaatttcaggtgatttttccaaattaatggtatgggcagacaatttcagaaaattaaaaattagaacaaactcagaaactccagcagacagtaaaactgctagagaatttggtgcagagggaattggtttgtgtaggacagagcatatgttttttgatgaggaaagaattttatctgtgcgagaaatgattttatcaaaatcaaaagaggatagagcagttgctcttgcaaaattattacctcaccaaaaaaaagactttattgatatttttaaaattatgaatggtctcccagtcactgtacgtttactagatccacctttacatgaatttttaccaaaaagtactaaagaaataaatgaagttgcttcatctcttaataccccaattaaagaattagaacttagaatatctgaacttcatgaacaaaatccaatgctaggacatcgtggatgtagactaggaatatcttttccagaaatttatgaaatgcagtgtagagctattttcgaagcgttaattgattgcaaaaagaataaaattaaatctactatgccagagattatgattccacttgtttcaactgaggcagaaattaaaataatgaaagatcttgtaattaaggtagctaaattagtacaaaaagaaaataatataaatatagactttttagttggtacaatgattgaacttccaagagcggctattaaggcaaacgatttagcaaaacacgcagaattttttagctttggaacaaatgatttaacccaaactacatttggtattagtagagatgatagtggaaaatttctaaacgattatatagaaaataaaatttttgagattgatccttttgtttctattgatgatggtgttggagatctaataaaaattgcaaccaaaaaaggaaaaaaacaaaataaaaaaattaaattaggtatttgtggtgaacatggaggagatccaaaaagtatacatttttgtgttgaaactggattggattatgtatcttgttctccttatagggttcctattgcaagattggcagctgcacaggcacaaattaaaa

SEQ ID NO: 258584 - DNA, 1228 bp, Unknown
  Bacterial polypeptide expressing nucleotide sequence isolated from the Sargasso Sea
ttaggatatccagttccatctggatttactatttctactgaagtttgtgatttattttataaaaataatagaaaaattaccccgaatatattgaatcagataaaagctgaaataaaaaatattgaaaaagattcaggtaaaaaatttggagatttaaaaaatcccttattagtttctgttagatcaggcgctagagtttcgatgcctggtatgatggatacaattttaaatttaggattaaatgataaaacaactttggcactcgctcaaaaaacctcaaatttaagatttgctaaagatagctatagaagattcattcaaatgtattctaatgttgtattgggagttgaaaactacaattttgaagagcttatagaaaattataaactaacaaaaggagttttattagataatgagctggatgaaaatgattgggatggattaataaaagattttaaaaatgttgtgaaagaaaagacaaaaaaagaatttcctcaagatgttaatgaacagcttataggagcaatatctgcagtatttttgtcttggcaaagcaacagagcaaaggtttatagaaaactcaatcaaatatcttcagattggggaacggcggttaacgtacagttaatggtatttggaaatatgggtcaagattgtgcaactggtgtagtttttacaagaaacccagcgacaggctcaaatgaaatttatggagaatatttaattaatgctcaaggagaagatgttgttgcaggaacaagaaccccacaacacataacaaaaaatgctagaattgaagccaaggttaaagaagagtcaatggaagagtctatgccgaaagtttttaagcagttaataaaaattttaaaaaatttagaaaaatattatacagatatgcaagatgttgagtttacagttgaaaataataaactttggatactacaaacaagatctggaaaaagaacagctaaatctgctgtaaaaatcgcagttgatatggttaaagaaaaattaatttcaaaaaaaaatgctataatgagaatagatcctcattcgctagataaacttttacacccaactttagatgaaaaaagcaagataaatgttattgcaaaaggtttgccagcttctcccggtgcagcaagtggaaaagtagttttttcttctgatgaagcagaaagacttaatgatatgatgcaagatacaattttagttagagtagaaactt

SEQ ID NO: 258585 - DNA, 1292 bp, Unknown
  Bacterial polypeptide expressing nucleotide sequence isolated from the Sargasso Sea
aaggattttaacctcaagaggtggaatgacaagtcatgcggcagttgttgcaagagggatgggaagaccatgtgtatctggatcaagtgagatcaatatagattatgaaaaaaaattatttaaaaccaatcagatccaaattgcagaaggtgaaataataacaattgatggatctactggaagaataatattaggtgaagttaaaacagtaaaacccgaaatatctggtgacttttcaaaattaatgaaatgggctgataattttagaaagcttaaaattagaactaattctgaaactccaatagatacaaaaacagcaagagattttggtgctgaaggcattggactttgtaggacagagcatatgttttttgatgaagatagaattatgtctgtcagggaaatgatattatctaaaaccacaaatgacagaagtaaagctttagcaaaacttttacctcatcaaaaaaaagattttattgaactttttaaaattatgaatgggcttccagttaccgttagacttttggatcctccgctacacgagttcttaccaaaaaatgaaaaagaaattaaagatgtatctgacgctcttggattaaggatttctgagattgagtcaagaataggtgaattacatgagcataatccaatgttgggacatagaggatgtagattagcaatctcttttcctgagatttatgaaatgcaatgtagagcaattttcgaggctttaattgaatgtaaaaataaaaaaattaaatcaattattccagaaattatgatccctttagtttcaacagaggcagaaatagaaattatgaaaaatcttgtagatagagtagcacaacaggtaaataaggaaaataaaactaaaatagattaccttgttggtacaatgattgaattaccaagagctgcaatcaaagcaaaagatatagcaaaacatgctgatttcttcagttttggcacaaatgatttaacacaaacaacttttggcatcagtagggatgatagtggaaaatttttaaatgattatattgagaataaaatttttaatattgatccctttgtatccatagatgaaggtgttggcgatctaattgaaattgcaaccataagaggaagaaagcaaaataaaaaacttaaattaggcatttgtggtgagcatggaggagatccaaaaagtatcaatttttgttcaagcgctggacttaattatgtatcatgttcaccatatagagtgcctatagcaaggcttgcagcagctcaagcacaaattaaaaaataaa

SEQ ID NO: 258586 - DNA, 901 bp, Unknown
  Bacterial polypeptide expressing nucleotide sequence isolated from the Sargasso Sea
ttggagaacttactattaaagaggggggatattattactattgatggaggaacaggaagagtaatgaaaggtttggttcctacagtcaaaccagatatatcaggttatttttctacaataatgaagtgggctgatgaatttagaaaactaaaagttagaactaatgcagaaacaccacaagataccaaaatggcaagaaattttggtgcagaaggaattggtttgtgcagaacagaacatatgttttttgacgatgaaagaattctctctgttagacagatgattttatcaaagcatttagacgataggaaaacagccttagacaagcttcttccccaccaaaaaaaagattttaaggaaatttttaaaattatgaaaggcttgcctgtaacagtaagacttttagatccacctttacatgaatttttgcctaaaacagaaaaagatatggaagaagtagcaaggtctttaaatttaggtgtaaaggaaattaagaatagggttacagaattacacgaactcaaccctatgttaggtcatagaggatgtagacttggtatttcatttccagaaatttatgagatgcaatgcaaagcaatatttactgctctcatagaatgtaaaaaagagaaaatacaatctataatacctgaaataatgatacctttagtttcaacagaagatgaacttggattaatgaggaaattagtaaataaagttgctgatgaacttcaaagacaacataaaacaaaaattaactattatgttggtacaatgatagaattaccaagagcagctttgagagcagcaccaatatcaaaatatgcagatttctttagttttgggactaacgatttaacccaaacaacatttggtattagtcgtgatgactctggaaaat

SEQ ID NO: 258587 - DNA, 811 bp, Unknown
  Bacterial polypeptide expressing nucleotide sequence isolated from the Sargasso Sea
aatatttaaaattatgagtggattaccagttacagttagattattagatccacctcttcatgagtttttgcctcgaacagataaagagattaatgaagtcgcaaatattgtaaatctttcagtgaaagaagttgaatctagaattgatgaattgcatgaacaaaatcctatgttaggtcataggggatgtagacttggaatatcttttcctgaaatatatgaaatgcaatgtagagcaatatttgaagctttagctgagctcaaaaaagaaaaaattaaatctgcctttccagaaattatgatcccattagtgtctactgaagcagaaataaaaattatgaaagatttagtaattagaattgcaagcgaagttcaaaaagaacataaattaaaaattgagtttatggtaggtacgatgattgaacttcctagagcggctataaaagccaaagatattgcaaaacatgctgaattttttagttttggaactaatgatttaactcaaactacatttggaataagcagagatgatagtgggaaatttttaaacgattatttagataataaaattttttcaattgatccatttatttcgatagatgatggagttagagatttaataaaaattgctgttgaaaagggaaaaagtcaaaataaaaatataaaacttggaatttgtggcgaacatggtggtgatcctaacagtattttattttgctcaaaagcaggattaaattacgtttcttgttctccgtacagagtacctgtagcaagactagctgctgcacaagccgaattaaaaaataaataa

SEQ ID NO: 258588 - DNA, 2647 bp, Unknown
  Bacterial polypeptide expressing nucleotide sequence isolated from the Sargasso Sea
catgaataaatgggtttataattttggagctggcaatgcggaaggagacgctagtcataaaaaccttctaggaggtaaaggtgccaatttagctgaaatgaataatattggtataccagtgcccccaggattaaccataactacagaagtatgtaactattattatgacaatagccaagaatatcccaaagaactagatgatcaattaaatgtagccttaaaaaatatagaaaaaattactggtatgctttttggtgatcctaaaagaccattgttattatctgtaagatctggtgcaagagcttctatgcctggtatgatggataccgttttaaatttaggattaaatgatgatactgtagagggtttagctactgaaagtggtgatgaaagatttgcttatgatagctatagaaggtttatacaaatgtatggagatgttgttttagaaatagactctttagaatttgaagaaattatagaaaatcaaaaagaaatagaccatataacattagatactgaggttacagcccaatcttggaaagttatttgtaaaaattttaaagatttagttaaagaaaaaacaggaaatgtttttcctcaagagccagttaaacagctatggggtgcaataagtgctgtgtttaactcttggatgaatcaaagagcaattacatacagaaagttaaatgatatcccgcaatcttggggtactgcagttaatgtacaagctatggtatttggcaatatgggggaagattgttgtacaggtgtggcctttacaagaaatccatctactggtgaaaatagttattatggtgaatatttaataaatgctcaaggagaagacgtagtagcaggaataagaactcctcaaaatcttactattaaagaaaaagaagaacagaattcagatgctttatcaatggaagaatctattcctcaaatttatcaagagttagttagtatttttgaaaaactagaagcgcattatttagatatgcaagatatagaatttactgttcaaaaaaataaattatggatactgcagacaagatctgggaaaagaacaactactgctgcagtaaaaatagctgttgaaatgcaaaaaaaaggtctaataagtaaagaaattgctgtatctaggattgatgcattaggtttagatcaattgcttcatcctactttggaccctaaagctgaaaagttaattattgcccgcggtctgccagcctctcctggtgcagcatcgggtaaagtagtatttaattctgaagaagctgtcgaaatgtccaaaaatggtgaagaagttatccttgttagaatggaaacaagcccagaagatattcatggaatgcatgccgcaaaaggaatattaaccagtagaggtggcatgacaagccatgctgcagttgtagcaagaggaatgggaagagcatgtgtagctggtgcaggagatatcttaatagatcatgaaaataatatgttttctgttggagatgtaactgtacattctggagaagttatcaccattgatggaagtttaggagaagttattaaaggagatgttcctactattatgccagaactttctaaggatttttctgagttaatggaatgggcagaccaaattagatcattaaagattagatcaaatgcagaaactccaatagatgtaaaaacagccttagaatttggtgcagaaggaataggcttatgtagaacagaacatatgttttttgataatgaacgaatacttgctgtcagagaaatgatattttctgatagcgaaaaagatagaagaaaagcattagaaaaaatatttccgatgcaaaaaaatgattttgtagagatatttaaattaatgaaagaattgccagttacaattaggcttttagatcctcctttgcatgaatttttacctaaagaagaagaagaactaaaagaattagcaaatatgctgaacaaagatatgtcttatgttcgttcaaggtctctacaattagaagagcagaatccaatgttaggccacagaggttgtagacttggtgtaacatttcctgaaatatatgaaatgcaggttaagtctatatttgagtcatcaatagaggtatctaaaagtattaacattgaaattaaacctgaaataatgattccattaattataagtgaaaaagaatttatatattttaaaaaattagtagaaaatacagctatgaatataaaagaaaaatatggagatactcctaaataccttcttggtacaatggttgaactacctagagcagcactcaatgctgagagtatagcttctcatgcggatttctttagttttggtacaaatgatttaactcaaactacacttggaataagtagagatgattgcgccaaattcttaccagattatattgagaataatatatttgataatgatccctttatttcgatagatgaaagtggagtgggtaagttagtatcaaacgctgtgaaagatggattaaaaacaaataaagaaataaaattaggtatctgtggagaacatggcggagatccaaagtctatagatttttttcataacataggacttgattatgtttcatgctcaccttatagagttccaattgcaaggttagcagccgcacaagca

SEQ ID NO: 258589 - DNA, 1378 bp, Unknown
  Bacterial polypeptide expressing nucleotide sequence isolated from the Sargasso Sea
atgaataaactaattttaaattttaagtcgaaagatacacaaaaaattaaagatccaaaaaattttttgggtggaaaaggtgctaacctttcagaaatgggaagaatgggacttccagtaccaccaggatttacgatttctactaaagtttgtgaagttttttataaagataaaaagaagttaaattctaaattaattagtcaaattaaaaaagagttaaaagtaattgaaaaggatgtatcaaaaaaatttggagacctaaaaaatccacttttattatctgtaagatctggggccagagtttcaatgcctggcatgatggatacaattcttaatcttggtttaaatgataaaactgtaattgctttaacgaataaaacttcaaatggtagatttgccaaagatagctacagaagatttatacaaatgtatggtaacgttgtaatgggtgttgaaggttaccattttgaggaattaatagaaaattataagctaactaaaggagtgttactagatactgatttagatgaagacgattgggatggactaataaaagattttaaaaatgttgttaaagaaaaaacaaataaagaatttcctcaagatgttaatcaacaattactaggtgcgataagtgcagtatttctttcttgggagagtaaaagagcaaaagtttacagaaaattaaatcagataccttctgaatggggaactgcagtgaacgtacagtcaatggtatttggaaatatgggaaatgattgtgctactggtgtagtttttacaagaaatccttctgatggatcaaacgacatttatggagaatatttgattaatgctcaaggtgaagatgttgttgctgggacaagaacaccacagtacataacaaaaaaagcaaaaaaagaggctaaagttaaggaagcatccatggaagagtcgatgcctaaagtttattcggaattatttaagatcttaaaaaaattagaaaaacactataaggatatgcaagatgtagaatttacagttgaaagtaataaactctggattttacaaactcgttcaggaaaacgaacatcaaaatcagctgtgaagatagcagtagatatggttaaagaaaaattaatttcaaaaaatcaagctatattaagaattgacccaaattctttggatacattgcttcatccaactttagatgaaaaaagttcaattcaagtaattgcaaatggtttacctgcatcacctggtgctgcaagtggtaaagtagtcttttcttcagaagaggctcaaagacttaatgacatgatgcaagatactattttagtaagagtagaaacatctccagaagatattcaaggaatgcatgcagctaaaggaatttaac

SEQ ID NO: 258590 - DNA, 1618 bp, Unknown
  Bacterial polypeptide expressing nucleotide sequence isolated from the Sargasso Sea
atgaaaaaattagtatttaatttcaattctaaagaagtaaaaaaaatcagacaaaaaaataacattttaggcggcaagggagcaaatctcgttgaaatgggcaatttgggatttccagttccatcaggattcactatatctacagaagcctgtgaattattttataaaaacaataaaaaaattgtaagccctttattaaatcaaataaaaaaagagataaaaattatagaaaaccaatctggaaaaaaatttggtcatttagataaccccttattagtttctgtaagatccggagcaagagtttcaatgccaggaatgatggatacgattcttaatttagggctaaacgataaaacaacagaggccctagcaaaaaagacaaaaaataccagatttgcaaaagatagttacaggagatttattcaaatgtacgggaatgttgtaatgggagttgaaaattataattttgaagaattaattgaaaattataaacttacaaagggagtattgctagacacagatcttaatgctgatgattgggacggtttaattaaagattttaagaatattattaaagagaaatcgaataaattttttcctcaaaatgttaatgatcaattaaaaggagcaatctcggcagtatttttatcttggcaaagtaaaagagctaaaacttatagaaaaataaataatataccgtctgaatggggtacagctgtaaatatacaatgtatggtttttgggaatatgggtaacgattgtgcaactggagttgtttttacaagaaacccttcaaatggaactgatgaggtttatggtgagtatttaattaatgctcaaggagaagatgttgtcgctggaacaagaactccacaatatattacaaaaaaggctagaaaaaattccagttcaaaaactaagtccatggaagagtcaatgcccaagattttcaaaaagctgaataaaattttaaaaacattagaaaagcattatagagatatgcaagatgttgaatttacagtagaaaatcaaaaactatggatcttacaaacaagatcaggaaaaagaacagtaaaatctgccgttaaaattgctgtagatatggtcagagaaaaattaatttccaaaaaggaagcagtgttaagaataaacccaaatacattagattcacttttgcaccctactttagatgaaaaaagtaaaatacaagttattgcaaaaggtttgccagcttctccaggtgctgcaagtggtaaagtagtattcacctcagacgaagctgagagattgaatgacatgatgcaaaatacaattttggtaagagttgaaacttcacctgaagacatacatggaatgcatgcagctaaaggaattcttacatcaagaggtggcatgactagtcatgccgctgtagttgcaagaggaatgggacgtccatgtgtttctggatcaagtgaaatagaaatagattatgaaaataatttatttaaggcgaacggtcgtgaaattaaagaaggacaaataataactatagacggctcaactggtagaattattttaggagaagttaagactgttaaacctgaaatgtccggtgatttttctaaattaatgagtt

SEQ ID NO: 258591 - DNA, 1762 bp, Unknown
  Bacterial polypeptide expressing nucleotide sequence isolated from the Sargasso Sea
ttgcaaactcgaaagaaagttccatgtgaagaaaatatgcctcaaatctttaaagaattaaaaaaaattcttaaaattttagaaaaacattataaagatatgcaggacgttgagtttacagttgaaaatcaaaaactttggattttgcaaactagatcaggcaaaagaacagcaaaatcttcagtcaaaattgcagttgatatggttaaagaaaaaataatttcaaaaaaacaagcaattttaaggatagatcctaatactttagaaactcttttacatccaagtttagatgaaaaaagtgaactgaatgtaatagccaaaggtctaccagcatctccaggagctgcgagtggaaaagtagttttttcatcagaagaagcagaaagactcagtggtgttatgcaaaatacaattttagtaagaatagaaacttctcctgacgacattcatggaatgcatgcagcaaaaggaattctaactgctagaggaggaatgactagccacgcagcggttgtagctagaggaatgggaagaccttgtgtatcaggttctagcgagattgatattgattatgagaataaattatttaagacaaaaaactatgaaattaaagaaggcgatgtaattactattgatggatcgacaggtagaataattttaggaaaagttaaaacaattaaaccagagatttctagtgatttttctaaagttttaaattgggcagatagtttaagaaaattaaaaattagaacaaattctgaaactccacttgatagcaaaattgctagagaatttggtgccgaaggtattggcttgtgtagaacagagcatatgttttttgaagaagagagaattctttcggttagacaaatgatactgtcaaaatcaaaacaagatagggataaagctcttgctaagttgttacctcaccaaaggagtgattttgttgaaatatttaaaataatgaatggattgccagttacagtaaggttgttggatccacctttgcacgaatttttaccaaaaaatgatattgaaataaatgatgtagctaaatcacttaatttatctaccgaagaagttagagtaagaactggtgagctccatgaacataatccaatgcttggacatagaggatgcaggttaggaatttcgtttcctgagatttatgaaatgcaatgtaaagcaatatttgaagctctagtcgagtgtaaaagcaaaaaattaaaatctattatgccagaaataatgattccattagtttctactgaggccgaaataaaaattatgaaagatttggtaattagagtggcaagacaagttcaagatgaaaataaagttaaaataaattttctagtaggtacaatgatagaacttccaagagcagctttaaaagcaaaagatattgcaaaacatgcagaattttttagtttcggaactaacgatctaacccaaacaacatttggaattagcagagatgatagtggaaagttcttaagtgattacttagaaaataagatttttgatatagatccgttcatatcaattgacgaaggagttggggatttaattgaaattgcaactttaagaggaaagaaacaaaataaaaaaattaaactaggaatatgtggagagcatggaggagatccaaaaagtattcatttttgttctaaaacaggtttggattatgtttcttgttcaccttatagagttcctgttgcaagattatcagcagctcaagctgaaattaaaaagaattaaa

SEQ ID NO: 258592 - DNA, 2668 bp, Unknown
  Bacterial polypeptide expressing nucleotide sequence isolated from the Sargasso Sea
atgaaatatgtttatttctttggtgatggaaaagcagatggaaaagcggatgataaaaatatgttaggaggaaaaggagccaatcttgctgagatgaccagccttaagataccagtcccccctggatttacgttaacaactaatttatgtatggattatttaaatgacggcgtataccctgatgaattagaaaatgaagtacaaaatgcaattgaaaaagtagaatcaattatggatcagaaatttggagatccagaaaatcctcttttagtttctataaggtcaggagcaagacaatcaatgcccgggatgatggaaactgttttaaatgtaggtttaactgataaaactattcctggtctaattaaaaaaactgacaacccaagatttgtttatgatgcataccgtcgtttgatcactatgtattctgatgttgttatggaaaagtctgaaggagttgatcccgagcctgggcagggcatacgagaacagctagaggaaattatggatcatatgaaaagggagcggggtgttatagatgatactgaattatctgctgatgatttaaaagagttgtgcagccagtttaaaaagaaggttaatgaaactcttggaagtgaatttcctgatgacccctctttacaactttggggtggaatatcagctgtgtttaaatcctggtctgggaagcgcgctgttaactatagaagaatagagaacattccaaatgaatggggcaccgcagttaatgttcaaacaatggtgtttggaaatatgggcgaaaattcagcgacaggagttgcttttactagaaaccctgcaacaggtgaaaacgttttttatggtgaatggttaatcaacgcgcaaggagaagatgttgttgctggtatacggacaccttatcctttaaatagtagcactaaaaccgcagagacaaatgaattaccagggcttgatcaatcaatgccggaagtatataaccaattagattctataagattaaaattagaaaaccattatcgtgatatgcaggacattgaatttactatacagaatggaaaactgtggatgcttcaaactcgagttggcaaacgaaatggcggtgcggcaattcgaatagcatgtgaaatgcaatctgaaaacctaatttcaagcgacgaggcaattttgcgagtatcacctgatcaacttgatgaaattatgcattcaatggtggacccctcatccgaaaaagaagcagaattattagcaaaaggtctaccggcgggcccaggcggaggagttggccaggttgtgttttcagcagatactgctgaagaatgggctaagaaagggcttgatgttattttagtaagaaacgaaacttcgcctgaggatgtgcatgggatgcatgcggcaaaagcaatcttaactgctaagggaggcatgacatcacatgctgcgttagtagccaggggatgggggaagtgctgtatcgttggttgctccattctacaaataaactatactgataaccaaatgctgataaatgatgaaataataaaagaaggcgattggctaaccttaaacggatcaacaggtaaagtgtataaggggcaattaagccttattgaacctgatctgagttccaacaagtattatggaatattaatggaaatgactaatagcgtaaaaagactaggtattagagcaaatgctgaaagccctaatgatgctaaacaagctcgagagtttggagcaaaaggtattggcctgtgccgaacggaacatatgttttttgatccagaaagaattcttgctgttcgggaaatgattatagcaacagaagtttcaaaacggcgtgaagcaattatgaaattactaccattccaaagagaagactttaaaggaattttagaagcaatgtctccttaccctgtcaccatacgattgctagaccctccacttcatgagtttatgacattaaatgatgaacaaaaaaatgaattagcaaaggaattaagtatctctttggatgccctggaaaatagaattagaggtcttgaagaattaaatccaatgttagggcatagagggtgccgcttaggaattgcatacccagaaataactgaaatgcaatcacgagcaatatttgaagcaacagcagaattaataaaagagaatgttgaagttgcccctgaagtgatgatcccattagtagggacatataaagaatatgagcatcaagaagcgcttgttcgaaaaatagcagaagaagtgaggtcagaatctggagaaaatttttcatatttagttggaacaatgattgagcttccaagagctgctcttacagcaaatgaaatagcagataaagctgagttttttagttttggcacaaatgatttgacgcaaacaacttatggttttagtcgtgacgatataggcggcttcttacctgaataccttgaaagaggaattttagagcatgatccatttcaaagcctagatcaaactggagttggacagcttgtacaaatgggcgtagaaaaaggtagagaagtgcgaagtgatttaaaaataggtatatgtggagaacatggaggagatcctgaaagtattagtttttgtaatcgcattggcttagactatgttagttgttcaccttttcgtgttccaattgctagacttt

SEQ ID NO: 258593 - DNA, 1648 bp, Unknown
  Bacterial polypeptide expressing nucleotide sequence isolated from the Sargasso Sea
agaaactatgccaaaagtttttaaacaacttaaaaaaatattatctactttagaaaaacattataaagatatgcaagatgttgagtttactgttgagtgtaaaaagctttggatgttacaaaccagatcaggaaaaagaactgcaaaatcgtcagtaaaaattgcagtagatatggtcaaagaaaaattgatctctaaaaaagatgcaattttaagaattgatccaaattcattagatacacttctacatcctacgctagatgaaaaaagtgatattaatgtgattgcaaaaggattgcctgcttcaccaggagctgttagtggcaaggtagttttttcctctgaggacgcagaaagattaaatggcatgatgcaaaattctattttagtcagagtagaaacatcaccagaagatattcatggaatgcatgctgctaaaggaattttaacatctaggggtggaatgacaagtcatgcagcagttgttgccagaggaatgggtagaccttgtgtctctggatcaagtgaaataagtatagattatgaaaataaattatttaaagctggtaaaattgaggtaacagaaggtgaggtcattacaattgatggatctactggaagaataatattaggcgaagttcaaactgtaaaaccagaaatatcaggcgatttttcaaaattaatgggttgggctgataattttagaaaattaaaagtaagagccaattcagagactccaattgatacaaaaacagcaagagactttggtgccgaaggcataggactgtgcagaaccgaacatatgttttttgatgaagatagaattatgtccgtcagagaaatgatattatcaaaaaatacaagtgatagaaataaagctttagcaaaacttttgcctcatcaaaaaaaggattttatagaattatttaaaataatgaacggtctcccagttactgtgagattattagatcctccattacatgagtttttaccgaaaaatgaaaaggaaattaaagatgtttctgatgcacttgagctaacactcacggaaattgagtcacgaatagttgaattacatgagcacaatccaatgttagggcatagaggttgcagattggcaatttcttttcctgaaatttatgaaatgcaatgccgagcaatttttgaagctttaattgtatgtaaaaacaaaaaaattaaatcaattattcctgaaattatgatccctttggtttctacagaagcagaaatagaaataatgaaaaatttggttgatagagttgcagatcaagtaaaaaaagagcataaaacaaaaatagattacctagttggtacaatgattgaattaccaagagctgcgataaaagctagagatatagccaaacatgctgactttttcagctttggaacgaatgatttaacccaaacaacttttggtatcagcagagatgatagtggtaaatttttaaatgattatatcgaaaataaaatttttgatattgatccatttatatcaatagatgaaggggtgggagatctaattgaaattgccactataaaaggaagaaaacaaaacaaaaaacttaaattaggtatttgtggagaacacggtggagatccaaaaagtatcgatttttgctcaactatg

SEQ ID NO: 258594 - DNA, 2647 bp, Unknown
  Bacterial polypeptide expressing nucleotide sequence isolated from the Sargasso Sea
catgaataaaaaactcatttaccaattttcttccaccaaaactgaaggtgacaaatccatgctggatttacttggaggtaaaggagcaaatttagcagagatgtcaaccctaggaattaatgtcccgcctgggtttacagtaacaacagaggtttgtaattattttatagagaacaagtcttttccagataaatttgatagtgaattagaaaaagcattagctaacttagaaaaaataacaaaaaagaaatttaatgatgataaaacgcctctcttattatctgttagatcgggaggaaaagtatcaatgccaggaatgatggattctattttaaatattggaattaatgacaaaaatgtagatgctttggcatctaattttaatgatgaaagatttgcgcttgattcatatcgtcgcttaattcaaatgtatgcaaatgttgttctagaaattgatatggataggtttgaagccattattgataataaaaaaaggatcgatggagttgaaaaagataatgattttgattccgaacaattgagttggattattgatgcttttaaaaccactgttgaaagatttgctggaaatccttttccacaagaccctgtcattcaactcaaaggggcaattgaggcggtatttaaaagctggctaaacaaacgagctgttgcttatcgaaaaattaataatatacccaacaattggggtactgggacaacgattcaatctatggtttttggaaatttaaatgaatcctcaggaacgggtgttgcttttacgaggtttccgtctacaggaaaaaacaaattgtacggggagtatttaatgaatgctcaaggagaagatgttgttgcaggaacaagaacaccttatcctataggaaaacatgaaaagaacactcaaccctcccttgaagaagaaaacccagctctatttaatgaaataaaatctattggagataaattagaaactcactataaagatgcacaagatattgagtttacaattgaagatggagaattatttattcttcaaactagaaatgcaaaaagaacagcccaagcaagtgtaaaaattgcagttgatatgcataatgaaaaaatactaagtaaacaagaagcaatcaatatgattgatgcagatcagattacctcagttctccacccccagtttgtagactcagctagtaaaaaattgtttgaaaaaggtttaaatgcctcacccggagctgctgtaggtgaaatagtttttgatccagaaaaagcggagattgaagctgcaaggggaaaaaaagtcattttagttagagatgaaacaagtccagaggatataagtggaatgtttgcatcagtaggaatattgacaacaaaaggtggtatgacaagccatgcagccgttgttgcgagaggaatgggcaaaccatgcatagttggagcagaaaatctgaaaattgacaaagatgaaagaaaaatatcaaatgatcaaataactatcgaagaaggtgatttaatttcattagacggatctactggtgagatttttcttggggaagttgagttagagtctcctaaattaacggacgaattcaatattttgatggcatggtgtgatgattttaaaaaactttcaattagagcaaatgcagaaacaataaatgacacaaccaagtctttagagtttggtgctgatggaattggtttatgcagaacagaacatatgttttttgagggtgaaagaatacttcctatgagagagatgattatggcaaacaataagcaaggtagaaagagagcattaaataaaattattgattttcaaataaatgattttgttgaaatatttaagcttttaaaagataaacctataactgttcggctacttgatccaccaatgcatgaatttttaccaaaaagtgatattgaaatttctgagttagctaactctttgagagtttcaccagcatatgtttcagaagttttatcgaggattagtgaaagtaacccaatgttaggtcatcgaggtgtacgtttaggtttaagctatccagaaatctataagatgcaagttgaggcaatttttaaagctagttatgaaattcatcaaaaagaaaagatcagaatcaaacctgaaataatgattcctttaataatgaatgcaagtgaatttacaaaaatgaaaaaaattataaccaaaaaaattgaaagcttgaagaaagaaacagacttcaattttgaatatttcataggaactatgattgagttaccaagtgctgccttgaattcatcggaaattggagaacatgcagattttttttcatatggaacaaatgatttaactcaaacaactctcggtttatcaagggatgacgcatctaaatttttaaacgaatatgtagaaaaaaatatttttgacgttgatccttttattacaattgatgaaaatactgtgggaaatttagtcgcttcatctgtagtagctggaaaaaaagtaaataaagatatcaaaataggtgtttgtggtgaacatgcgggagatccaaaatcaatcaaatttctcaatacattggatattgattatatttcttgttcaccttttagaattccaactgcaagattagctgctgcacaagcagaaatatcttaa

SEQ ID NO: 258595 - DNA, 2359 bp, Unknown
  Bacterial polypeptide expressing nucleotide sequence isolated from the Sargasso Sea
atgaaaaagaacgttttttattttggtaataagaaatcagacggtagcggtaaaatgaaagatgtccttggaggtaaaggtgcaggccttgctgaaatgactgaaataggaattaatgtgccccctggattcacaatctcaaccaatgtatgtgggattttttataaaaataaaaagcgtactccgctagatatttccaaagaaataaaaacaaacctgttaaaactagaaaagatgacaaaaaaagggttaggtgatacaaaaaaccctttacttgtttctgtaagatcaggagcaatgttctcaatgccaggaatgatggatactatacttaatttgggtttaaatgataagaccgtaataggactagcgaaaaaaactaaaaatcctaggtttgcatgggacgcttatagaagatttattcagatgttttcagatgtagtactgaatgtagataaagatttatttgaaaacattcttgaggcacacaaaaaaaagaagaaggtagtgcatgatattgatttgaatgaatcagctttaaaatctttggttttagaatataaaaaacttgtaaagacaaaaacaaaaaaggcttttcctcaagatcccttagagcaactagataaagctatcgacgcagtatttttatcctggaacaataaaagagcaatcttttacagaaaaaaatatgacatacctgatgatatcggcacagctgttactgtccaatctatggtttttggaaatatgggaaatgattgtggaacaggcgtaggatttaccagagaccctttatcaggtgaaaaagaattatttgcagaatatcttcttaacgcacaaggggaagatgtagtcgctggaataagaactccaaaacatatcaaagctatgaaaagagaaatggggaatgttcataatcaaattgtaaatacagcaaagattctggaaagacattttaaggatatgcaagattttgaattcactattgaaaacgaaattctttacttacttcaaacacgttcaggaaaaagatctggtattgcagcggcaaaaattgcctgcgatatggtcaaagaaagtttgataaccaaaaaagaagcaataagcagagttgaaccagaacatttagaacaatttttatttcctatttttgacccagatgataagaaaaaatttaatgttctaacgaaaggcttgggggcatcgccaggagctgctacagggagagtagctcttgatgcacaaacagctgttgagcttagcaaattaggaaaaagagttgtgttagttaccaaagaaacaagtcctgacgatattcatggaatgtccgctgcagctgggcttcttactgccagaggtggcagaactagtcatgcagctgtcgtaggaaggcaaatgggtaaggtttgtgtagttggggctgaagaaattaaagtggacttagataacaggactttttctgtattagatgaggttatacaagaaggggattacatatctatagatggttttgaaggtaaagtatacaagggagatataccagttgtagcgtcagaagttatacaagtcatgcagggtaatatgaaagaacttgcatctgaaagatatttaattttttcaacaatattaaaatgggcagattctttcaagagacttaaaattagaactaatgcagatgtgcctagtgacgctgaagtagcaataaaatttggtgctgagggaattggattatgtagaacggagcatatgttctttgcacaggatagaatcaaaataatgcaagatatgatcctttcaacagacataaaagatagagtaaaacatttagataaacttcaaaaaatgcaaaaggatgatttcataggactttttactgctatgaaaggttttccttgcacaataagattgcttgacccgccattacatgagttcttgccaagaagagaagatttgatgttagaagtaaaagaactggaaatattgaaggatgataaaaagaagctagatgaaaaaaggcatcttttagaaagagttgaagagcttcatgaatttaatcctatgttgggtctaagaggttgcagactcggaataacaatgccagaaataacttctatgcaagcaaaagcaatatttgaagctgcgattgaggtatcaaaaaaaggaattaaagtagttccggagattatgattcctttagttggtatggtaaccgagtttaaaatacaaaaggatataatcaacaaggtagctaaagagactttggggaagaagaaaattacatatcttgttggtaccatgatagaagttccaagggcaaccacagttgcagaccagattgctaaagaagctgaattcttct

SEQ ID NO: 258596 - DNA, 2662 bp, Unknown
  Bacterial polypeptide expressing nucleotide sequence isolated from the Sargasso Sea
atgcctaaatacttgtttagttttggagacaaaaaaacaaaaaaaatattaaattccaaaaatattttggggggaaaaggagcaaacttagctgaaatggctagacttggattgcctgtacctccaggctttacaatttctacagaattgtgtgcagttttttataaaaataaaaaaaaattaaccccaaaaattttcaatgaaattaagaaagaattaaaaaaaattgaatcaataactaaaaaaaaatttggtgacaattcaaatccattgctagtatccgtaaggtccggctcaagggtttctatgccaggtatgatggatactattcttaatttaggtctaaacgataagacagtcgaggcattatcaaaaaaaacctctaacgaaagatttgcaaaagatagttatagaagatttatacaaatgtatggaaacgtcgttttagggatcgaaagccatctttttgaagagataatagataactataaattaactaagggagttttaatggatacggaattaaactctgaagattgggacggtcttataaaaaattttaagggtttaatatttgaaaaaacaaagaaaaattttccccaagatgtttatgaacaactctttggggctattaaagcagtatttttatcttgggagagtaaaagggcaaaaaattatagaaagtttaatcatataccaggagattggggaacagcagttaatgtccaatccatggtatttggaaatatgggagatgattgtgctactggagttgcattcacaagaaatccatcaacgggtgagaataaattttttggagaatatttaattaatgctcaaggagaagatgttgtggctggtagtagaactccaaggtatatcacaaaaaaagcaaaagaagaggctggagcaaaagaagagtctatggaagaaactatgccaagagtttttaaagaacttaaaagtatatttgtaaaattagaaaaacattatcgggatatgcaagatattgaattcacagtagaaaataacaaactatggatgctgcaaacaagaaacggaaagagaactgcaaaagcagcaattaaaattgcagttgatatggttaaagaaaaattaatttctaaaaaagaagcaattttaagaatagacccaaacactctagatacacttttgcatccaacattagatgaaaaagtaaataaagaggtaatagcgaagggtctaccagcctcacctggcgcagctagtggcaaagtagtttttagtgctgacgaggctgagaaaatgaataatcaaaaagaagatacaattttggttagagtagaaacgtcaccagaagatattcatggtatgcatgctgctaaaggaatattaaccgcaagaggcggaatgacaagccacgctgctgtagtagctagaggtatggggagaccatgtgtttcaggttctggagaaattaatatcgattatgaaacaaaagaatttaaagtaggagatttaagtatcaaagagggagaagttataactattgatggaggaacaggcagagtaatgaaaggtctagtcccaacagtcaaacctgatatttcaggttacttctcaactataatgaaatggtcagatgaatttagaaaactcaaaataagaacgaatgctgaaacaccacaagacactaaaatggctagaaatttcggcgcagaagggattggtttatgtaggactgagcatatgttttttgatgatgagagaattctctcagttagacaaatgattctttcaaaaagtctagatgacagaaaaattgctttagaaaaactgttacctcaccaaaaaaatgattttaaagaaatttttaaaattatgaagggtttgccagtaaccgtaagacttttagaccctcctctacacgagttcttgcctaagacagataaagatatggaggaagtagcaagatcattgaatctgggcgttaaagaaattaaaaatagagtagcggagttacatgaacttaaccctatgcttggacatagagggtgtagattgggtatctcttttccagaaatttacgaaatgcaatgcagagctattttcagtgcattaattgaatgtaaaaaagagaatattaaatcaattataccggagataatgatacctttagtttcaacagaagacgagcttgggataatgagaaaattagttaacagggttgctgatcaacttcaaaaagaaaataaagttaaaataaattattttgtaggcacgatgatcgagcttcctagagcagcgttaagagctgcaccaatatcaaagtatgccgatttttttagttttggaactaacgatttaacacaaactacatttggtatcagcagagatgactcaggaaaatttttaaatgattatattgatcataaaattttcgatgaagatccatttgtaagtattgataaagacggcgttggtgaacttgtcaaaattgcatcacaaagaggaaaaaaacaaaacaaaaaactaaaattaggaatttgtggtgaacatggaggagatcctagaagtatcgaattttgttctaaaaatggattgaattatgtttcttgctcaccatttagagttccgattgcaagacttgcagcagcacaagctgagctcagaagataat

SEQ ID NO: 258597 - DNA, 2611 bp, Unknown
  Bacterial polypeptide expressing nucleotide sequence isolated from the Sargasso Sea
ctgccaaaaaatattctcggtggcaaaggtgcaaatctttctgagatgggaagaatgggactacctgtaccccccggttttacaatatctacagaggtatgtgaattgttttataagaataaaaaaaaattagacaaaaaaatacttaatgaaataaataaagaattaaaatctgttgaaaaagactcaagaaaaaagtttggagatataaaaaatcctcttctagtttctgtaagatctggagctagggtttctatgcctggtatgatggatacaattttaaatctaggtcttaatgataatacagtaatagcacttgcaaaaaaaacttcaaatttaagatttgcaaatgatagttataggcgttttattcaaatgtattctaatgttgtattgggagtcgaaggttatcactttgaggatataatcgagaattataagttaacaaaaggagtattattagatacagaattagacgagtatgactgggaagctttgattaaagattttaagaacattgtaaaagaaaaaacaaaaaaagaatttcctcaaagtgtaaaagaacaactggtgggagcaataagtgctgttttcttatcttgggaaagtaatagagctaaagtctatagaaaattaaatcatataccatctaattggggtacagcagttaatgtacaatcaatggtttttggaaatatgggaaatgattgtgcaactggtgtagtgtttactagaaatccatcagatggatcaaaaaatatatatggagaatatttaataaatgcgcaaggagaggacgttgttgccggaactagaacaccacaacatattacaaaaaaagctagagttgaatcaaaagaaactcttaagtcaatggaagaggcaatgccagcgacttacaagcaactaaagaatattttaactaaattagaaaaacattacaaagatatgcaggatgttgagtttactgttgaaaataaaaaactttggatgcttcaaacacgctctggaaaacgaacagctaagtctgctgttaaaattgctgtagatatggttaaagaaaagttgattaccaaaaaagatgcaatattacgaatagacccaagttctttagatactttgctccatccaactttagatgataaagcaaacttagaagtaatagggtcgggcttacccgcatcgcccggtgctgcaagtggaaaagttgtttttacgtctgaggaggctgaaagacttaatagtatgttgcaaagtacaatattagttcgtgtagaaacttcaccagaggatatacatggtatgcatgcagcaaaaggaatacttacctcaagaggaggtatgacaagtcatgctgcagtagttgctagagggatgggacgaccatgtgtttctggatctagtgaaatagaaattgattatgaaaataaattattcaaagcaaacaataaagtaattaaagaaggccaagtaattacaattgatggttcaacaggtagaataatctttggtgaagttaaaacagttaaaccagaaatatcaggtgatttctcaaaaataatgagttggtctgatgattttagaaaattaaaaattagaactaattcagagacaccattggatagtaaaactgctagagaatttggtgcagagggcattggtttatgtagaactgaacatatgttttttgacgaagaaagaattttatcagtaagagaaatgatattatcaaaaacaattgaagatcgatctaatgcactcaaaaagttattaccacatcaaaaaaaagattttattgaaatatttaggattatgaaaggtttgcctgtaacagtaaggttacttgacccacctctacatgaatttttgccaaaaagtaaaaatgaaattaatgatgttgcagtttcactaaatattcctgttaaagaacttgaagttagaatttcagaacttcatgagcaaaatcccatgctgggtcatagaggttgtagattagcaatttcattccctgaaatttatgagatgcaatgtacagcaatttttgaagctttagtagaatgtaaaaaacgaaaaattcaatctacaatgccagaaatcatgatacctttagtttcaacagaaacagaaataaaaatcatgaaagatttagtcatcagggttgcaaaaaaagttcaagatgagcataaagttaaaattaattttttagttggaacaatgattgaattgccaagagcagcaataaaggcaaaagatattgctaaacacgctgaattttttagttttggaattaatgatttaactcaaacaacatttggaattagcagagatgatagtggtaaatttctaaatgactatattgagaacaaaatttttgacattgatccttttgtatcaattgatgatggagttggagacttaataaaaattgcaacagataaaggcagaaaacaaaacaaaaaaataaaacttggaatttgtggtgagcatggaggagatcctaaaagtatagagttttgtgcaaaaactggattagattacgtatcttgttcaccttacagagttccaattgcaagattagcagcagctcaagctcaaataaaaaaaaattaaa

SEQ ID NO: 258598 - DNA, 1858 bp, Unknown
  Bacterial polypeptide expressing nucleotide sequence isolated from the Sargasso Sea
agcaaaagagcgaaagtttacagaaagttgaatcaaattccttctgaatggggaacagctgttaatgttcaatctatggtttttggaaatatgggtaatgattgtgcaacaggagttgtcttcactagaaacccttcagatgggtcaaatgatatttatggagaatatttgattaatgctcagggagaagatgttgtagctggaacaagaactccacagtacattacaaagaaggcgagaaaagaggcaaaagttggtgatgcatctatggaagagtcgatgccagaagtatatcacgaattatataaaattttaaaaaaactagagaaacattataaggatatgcaagatgtagagttcactgttgaaagtaataaactttggatattacaaactcgatctggaaaaagaacatcaaaatcagcagtaaaaattgctgttgatatggttagagaaaagttaatcaataaaaacgatgctgttttaagagttgatcccaactctttagacacacttttgcatcctactttagatgagagaagttcaatcaaagttatagcaaacggtcttccggcttctcctggtgcagtaagtggaaaagtagtttttagctcggaggaggctgaaagattaaatgatatgttgcaagatacaattttagttagagttgaaacttctccagaagatattcaaggaatgcatgctgcgaagggaattttaacttcaagaggaggtatgactagtcatgctgcagttgtagctaggggaatgggaagaccttgtgtttctggttcaagtgaaattgaaattaattacgataaaaaagtctttaaaacatcttcggctgagatcaaagaaggtgaaacaattactattgatggttctacgggaagaataattttaggtacagttccaactataaaacctgagatatcaggagatttttcaaaattgatgagctgggctgataaaattagaaaacttaaagtacgaactaactctgagactcctctagacactaaaacagccagagattttggtgcggagggaattggactttgtaggaccgaacatatgttttttgatgaggaaagaattttatcagtacgagaaatgattttatcaaaaacgctagatgatagatctaatgctttaaaaaagattctaccacatcaaaaaaaagattttatggagatatttaagattatgcatggtcttccagttactgtaagattattagatccaccattacatgaatttttaccgaaatctgataaagaaatttctgaagtagctaatgttgttggatcagacaaaaaagatattgaaagcaggatagaagaacttcatgaacaaaatccaatgttaggacatagaggttgtagacttggcatttcatttcctgaaatttatgagatgcaatgtagagcgatattcgaggctcttgcagacttaaaaaaaaacaaacaaaaatttgcttttcccgagataatgattcctttagtttcaaccgaagctgagattaaaataatgaaagatttagtaatcaatactgcaagaaaagttcaaaaagaaaataaaacaaaaattgaatttcttgtgggtacaatgattgagttacctagagcagcaattaaggctaatgatattgcgaaacatgctgaattctttagttttggcaccaatgatttaacacaaacaacttttggaataagtagagacgatagcggtaaatttttaaatgattatatagataataagatttttactattgatccgtttgtatccattgatgacggagtgaaagatttagtcgaaatagcagtttctaaaggaaaaacacaaaataaaaaaatta

SEQ ID NO: 258599 - DNA, 2647 bp, Unknown
  Bacterial polypeptide expressing nucleotide sequence isolated from the Sargasso Sea
tatgagtaataaactgatatttcaattttccaataaaaaaacagatggcgatcaagctatgtcagacctgctcggcagcaaaggagcaaacttagccgagatgagtaaaattggaatcaatgttccaccaggttttactattacgacagaagtctgtaattactttatagaaaataaagagatgccgaaaaattttgataaagagcttgaggcttctttaaaaaaacttgaagagtattcaggaaagaaatttggaatttcagacaatccattattactttctgttagatcaggtggcaaaatttcaatgccggggatgatggattctatattaaatattggattaaatgatgaaaacgtagagcatctttcaaaggtatttaatgatgaaaaatttgctcttgattcatatcgaagacttattcaaatgtatggcaatgttgtcttaggtatagaacacactaggtttgaagctgttttaaataacaagaaaaggattgataatattgactcagatagtgatttcaatccacaacaacttaagtggataatagatgcttataaaaatacagtagagagattttcaaattcaccttttccacaagacccgcatgaacaattaactggctctatagaggctgtgtttaaaagctggttaaacaaaagagcagctacatatagaaagattaataatatacccgacacacttggaactggagcaacaattcaaactatggtatttgggaatttaaatgaaaagtctggtacgggagttgcctttactaggtttccttcaacaggaaaaaatgagttatatggtgaatatcttatgaatgctcaaggtgaggatgtagttgcaggcttgagaacaccatttcctattggcaaacacgaaaagaacaaagaactttctttagaagaagaaaatcctaaattatttaaagatataaaagatatagcaaataaattagaaaatcattataaggaagttcaggatattgaatttactattgaaaatgatattctttatcttcttcaaacaagaaaagcaaaacgaacagcacaagcaagtgtcaaaatagcagttgatatgcataaagaaaagaaagttactaaaaaagaagccttaaatatggtcgatgctgatagtattactgctattttacatccacaatttattgatgaacaaaaaaagaaaatttttggaaaaggactaaatgcttcacctggtgcagcttttggtgaaattgtatttgatgcggataaagcagaagaagaagccaacaaaggaagaaatgtgattttggtaagagacgaaaccagtccagaagatattcatggcatgttctcttctgttgcaatcttgactactaaaggagggatgacaagtcatgctgcagtggttgcaagaggtatgggtaagccatgtattgttggagcagagactttatcaataaactattctgaaaaaactatttctagcaaagaaaaaaccttagaagaaggagatttaatatcattagatggctcagcgggagaaatatacataggggaacttaaacttgagccacctacattatctgaagagttcaatactttaatggattggtgtaatgaattcaaaagacttgaaattagagcaaatgcggagacaactattgatacagccaaagcacttgaatttggagcagaaggcattggtctgtgcaggacagaacatatgttttttgaaggagaaagaattcttcctatgagagaaatgataatgtcggatagtaaacaaggaagaaaaagagcattaaaaaaattaataaactatcaaatatctgattttgagtctcttttcaaattacttaatgaaaaaccaataacagtgagattgttagatcctccaatgcatgaatttcttcctaagagtgatttagagatttctcagcttgcaaatgagataggagtatcaccaatgcatgttaatgagattctcatgagactttcagaaagtaatcctatgttaggacataggggagtcaggctaggtttaagttatccagaaatttacgagatgcaagtagaggcaatatttagggcagttcatttagtttttgaaaatgataattttaaagtcactccagaagtaatgatacctttagtgatgaacagtaatgagttatctgaaatgaaagatattctgaaaaaaaagattaaaaaaattgagaaagaactgaattataactttgactacacaataggaactatgattgaactgccaagtgctgctcttagttcttcagaaattgcaaaagatgctgatttcttttcatttggaacaaatgatttaactcaaactactttaggtctttcaagagatgacgcttcaaagtttttaggtgaatatgttgaaaagcaaatttttgatatagatccatttgtttccatagatccatcaaccgttggtcgacttgtagaactctcttctaatgatggaaagaaagctaataagtcattaaagataggtgtatgtggtgagcatgcaggtgatccaacttctattttttacttaaatactttaaatattgactatatttcatgttcaccatttaggattcctgcagctagattggcagcagctcaatctgaaactaaataa

SEQ ID NO: 258600 - DNA, 1546 bp, Unknown
  Bacterial polypeptide expressing nucleotide sequence isolated from the Sargasso Sea
caaaaaatatttaggaggcaaaggtgcaaatttatcagaaatgggaaggatgggtttacctgtcccacctggatttacgatttctactgaagtttgtgatttattttataaaaataaaaagcaattaaagcctaaaattataaatgaaataaatagagagttaaaaaatattgaaaaagattctggtaaaaaatttggagatttgaaaaatcctttgttgttatctgtaagatctggcgcgagagtatccatgccaggaatgatggatactattttaaatcttggactaaatgacaaaactgtgattgctttagcaaataaaacatcaaatatgagatttgcaaaagatagttatagaagatttatacaaatgtatgcaaatgttgttatgggtgttgaaagttataattttgaagaattaattgaaaattacaaacttacaaaaggtgttttgttagacactgatttgggtgaagatgattgggatggattgattaaagactttaaaaatattgtaaaagaaaaaacaaaaaaaaattttcctcaaaatattaatgaacaattgctaggtgcaattagtgcagtctttttgtcatgggagagtaacagagcaaaggtttacagaaaattaaatcatataccttcagagtggggaactgcagtaaatgttcagtccatggtttttggtaatatgggtgttgattgtgcgacaggtgttgtgtttacacgtaatccatccaatggaatcaatgaaatctatggtgaatatttaataaatgctcaaggagaagatgttgttgcagggacaaggacgccccaacatataactaagaaagctagaaaagacgcaaaagaaacacttctttcaatggaagagtcaatgcctagagtttacaaaaatctaaaaaatattcttataaagcttgagaaacattataaagatatgcaggatgtggagttcacagtcgaaaataataagttgtggatgttgcaaactagatcaggaaaaagaactgcaaaatcatcagtcaaaattgctgtcgatatggaaagagaaaaactcatcacgaaaaaagaggctgtgcttagagtacaaccaaattcattagatactttgcttcatccaactttagatgaaacagcgaatttagaagtaatagccaaaggccttcctgcttctccaggagcagctagtggaaaagtagtatttacatctgatgaggctgaaagattaaatggaatgatgcaaaatacaatcctagtaagagtagaaacatcacctgaagatatcaatggaatgcatgcagctaaaggaattcttactgcaagaggagggatgaccagccatgctgcagtagttgcaagaggaatgggtagaccttgtgtatctggctcaagcgaaatagaaatagattaccaaaataaaatttttaaaacaaaaaattatgaaattaaagagggtgatttaattacaattgatggatcaactggtagaattataaaaggagaggttaaaactgttaaacccgaaatttcgggagatttc

SEQ ID NO: 258601 - DNA, 937 bp, Unknown
  Bacterial polypeptide expressing nucleotide sequence isolated from the Sargasso Sea
gacatcaattatgaaaataagtcatttaaaacatcatcaatggaaatcaaagagggagatattataacaatagacggatcaacaggaagaataattgaaggtagtgttgctaccgtaaagcctgaaatatctggtgatttttcaaaattaatgtcttgggctgatagttatagaaaattaaagattagaacaaattcagaaactccaaaagatactaaaactgcgaaagattttggtgctgaaggtattggactttgcagaactgagcacatgttttttgatgaagaaagaattttatctgttagggaaatgattctttctaaaaccaaagaagacagagccaaagccttaaataaactcttaccacatcaaaaaaaagactttactgaaatttttaagattatgagtggcttaccagttacagtaagattgttagatcctccattacatgaatttttaccaagaacaaataaagaaattggcgaattagcagaaattgttaatcttacagtaaaagaagttgaaacaagaattgaggaacttcatgaacaaaacccaatgctaggtcacagaggttgcagattagctatatcatttcctgaaatatatgagatgcaatgtagagcaatttttgaagcattatgtgaacttaaaaaaaataaaattaagtcagcttttcctgaaattatgatacctctagtttctacagaggctgaaattaaaataatgaaagacttggtgaaaagaatagcaaacatggttcaaaaagaaaataaattaaaaatagactttatggttggaactatgattgagcttccaagagcagctataaaggcaaaagaaatagcaaaacacgcagaattctttagtttcggaacaaatgatttaactcaaactacttttggaataagcagagatgatagtggaaaattttaaa

SEQ ID NO: 258602 - DNA, 1227 bp, Unknown
  Bacterial polypeptide expressing nucleotide sequence isolated from the Sargasso Sea
cttgtgtatcaggatcaagtgaaattgatataaactatgaaaaaaaatcttttaaaacttcgacaatagagataaaggaaggagacctaattactattgatggctcaactggaagaattattgctggtagtgtttcaactgtgaagcctgaaatatctggtgatttttctaagttaatgtcttgggcagacaactttagaaaattaaaagtaagaacaaattctgagactccaaaagatactaaaactgcaaaagattttggtgcagagggtatagggttatgtagaactgaacatatgttttttgatgatgaacgaattttgtctgtaagagaaatgatattatctaaaacaaaagaagacagagcaaaagcattacaaaaacttttaccacatcaaagaaaagattttatagaaatttttaaaatcatgagtggattaccggttacagttagattgttggacccaccattacatgaatttttaccacgtacagaaaaggaaattaatgaggtcgctagtatagttaatcttccaattaaagaggttaagtcaagaattgaagagctacatgagcaaaatcctatgttaggtcataggggatgtcgtctgggaatatcttttcctgaaatttatgaaatgcaatgcaaagcaatattcgaggctttagcttacctcaaaaaaaataaaattaaatctgcatttcctgaaataatgatacctttagtatctacagaggctgaaattaaaataatgaaagaattagtaattagaactgctagtcaagttcaacaagaaaataaattgaaaatagaatttttagttggaacgatgattgaattacctagagcggcaataaaagcaaaggagattgctaagcacgcagaattctttagttttggaacaaatgatttaactcagactacttttgggataagtagagatgatagtggtaaatttttaaatgattatttagaaaacaaaatattttctgttgatccttttgtttcaatagatgaaggagtttcagatttagttgaaatagcagtagaaaaaggacgaaaacaaaacaaaaatctaaagttaggtatctgtggagagcatggaggagatccacatagtatatctttttgttcaaaagcaggattgaattatgtttcttgttcaccttatagagttcctgtcgcaaggttggccgccgctcaagcagaaattaaaaaaaattaaa

SEQ ID NO: 258603 - DNA, 1685 bp, Unknown
  Bacterial polypeptide expressing nucleotide sequence isolated from the Sargasso Sea
tatgaaaaaatttatatttaattttaactcaaaaaatgtaaaaaaaataaaatttccaaaaaatatattaggcgggaagggttcaaatctttcagaaatgggaagaatgggcctgccagtgccaccaggttttacaatttcaacagaggtttgtgatttattttttaaaagtaaaaaaaaattaaattcaagaattttaaaagaaataaataaagagttaaaaattattgaaagagactctggaaaaaaatttggagatttaaaaaatccattacttgtttcagtaaggtctggagcaagagtatcaatgcctggaatgatggatactattttaaatctaggtttaaatgataaaacggttatttctttagcaaaaagtacatcaaatatgagatttgcaaaagatagttatagaagatttatccaaatgtattcaaatgtagtcctaggaattgaaaattataattttgaggagcttattgaaaattacaaattaacaaaaggggttttgcttgatactgatttagatgtaagtgactgggacggactaataaaagattttaaaaatataataaaagagaaaacaaaaaaagaatttccccaaaatgtgaatgatcaactaattggtgcaatcagtgcagtatttctttcttgggaaagtcatagagcaaaagtttatagaaagttaaatcaaataccttcagaatggggaactgcagtcaatgttcaatcaatggtatttggaaatatgggtaaagattgttctactggtgtggtatttacaagaaatccttctgatggttctaatgaaatttatggtgaatatttaattaatgcccaaggagaagatgttgtagccggaactagaacccctcaatatattactaataaagctaaaataaatgcaaaaacaaaacttccttctatggaggaagctatgccatctgcttttaaaaaattaaaaaaaatactaacaaaattagaaaatcactacagagatatgcaagatgttgaatttacaatagaaaaaaataaactttggatgcttcaaactagatctggaaagagaacagctaaggctgcagttaaaattgcagtcgatatggtaaaagaaaaattaatttcgaaaaaagaggcagttttgaggatagagcctaattcattagatagtttgcttcacccaactttagacgaaaaagaaaccctaaatattattgcaaaaggtttaccagcatcacctggtgcggcgagtggtaaagtcgtttttacatctgatgaagcagaaagattaagtggcatgatgcaaaatactattttagtaagaattgaaacatctcctgaagatattcatggtatgcacgcggcaaaaggaattttaactgctaggggaggtatgactagccacgcggctgttgtcgcaagaggaatgggtagaccttgcgtatctggatctagcgaaatagaaatagattattcaaagaaaatttttaagactaaaagtaaagagattaaagaaggagacatcataacaattgatggttcaactggaagaataatttttggagaagtaaaaacagttaagccagaaatttcaggagatttttcaaaattaatgaagtgggcagataattttagaaaattaaaaataagaactaattctgagactcctttggatagtaaaatag

SEQ ID NO: 258604 - DNA, 766 bp, Unknown
  Bacterial polypeptide expressing nucleotide sequence isolated from the Sargasso Sea
tccacctcttcatgaatttttacctaaaaatgaaagtgaaattcaagaagtatcaaattctctagaattatcggttaaagaagttcagtctagaattgatgaattgcacgaacacaaccctatgcttggccatagaggatgcagattgggaatttcttttcctgaaatatacgaaatgcaatgtaaggcaatttttgaagcactaattgaatgtaaaaaaaaaaaatataaatcaataattccagaaataatggttccattagtatcaacagaagctgaaattaaaattatgaaaaatttagtaagtcgagttgccaacgaagtacaaagaacaaataaagtaaaaattaattatttagtaggaacaatgattgaactaccaagagcagccttaaaagcaaaagatatagcaaagcatgcagatttttttagctttggaacaaatgatttaacacaaacaacatttggaataagtagggacgattcaggaaaatttttaaatgattatattgaaaacaaaatttttgaaattgatccatttatttcaattgataaagttgttggtgaattaatagaaatagctgtaattaaagggagaaaacagaataaaaaaattaaattaggcatatgtggagaacatggtggtgatccaaaaagtatatttttctgcgctaaaacaggtttaaactatgtttcttgctctccatatagagttccagttgcaaggcttgctgctgcacaagctcaaattaatggaaaaagttaa

SEQ ID NO: 258605 - DNA, 1276 bp, Unknown
  Bacterial polypeptide expressing nucleotide sequence isolated from the Sargasso Sea
atgacaagtcatgcggctgttgttgcaagaggtatgggtagaccatgtgtatcaggatcaagtgaaattgatataaactatgaaaataaatcttttaaaacttcttcaatggagattaaagaaggagatgtaattactattgatggctcaactggaagaattattgctggaagtgtttcaactgtgaagcctgaaatatctggtgatttttccaagttaatgtcttgggcagatagctttaggaaattaaaagtaagaacaaattctgagaccccaaaagataccaaaacagcaaaagattttggtgcagagggtattggattatgtagaactgaacatatgttttttgatgaagaacggattttgtctgtaagagaaatgatattatctaaaacaaaagaagacagatcaatagcattacaaaaacttttaccgcatcaaagaaaagattttatagatatttttaaaatcatgagtggattaccagtcacagttagattgttggatccaccattacacgaatttttaccacgtacagaaaaggaaattaatgaggttgctagcatagttaatctccctgttaaagaggttgagtcaagaattgaagagctccatgagcaaaatcctatgttaggtcatagaggctgtcgtctgggaatatcttttcctgaaatttatgaaatgcaatgcaaagcaatatttgaagccttagcatatctaaaaaaaaacaaaattaaatctgcatttcctgaaataatgatacctttagtatctacagaggctgaaattaaaataatgaaagaattagtaattagaactgctagtcaagttcaacaagaaaataaattgaaaatagaatttttagttggaactatgattgaattacctagagcggcaataaaagcaaaggagattgctaagcatgcagaattttttagttttggaacaaatgatttaactcaaactacttttggaattagtagggatgatagtggtaaatttttaaatgattatttagaaaacaaaattttttctgttgatcctttcgtttcaatagatgaaggagtttcagatttagttgaaatagcagtagaaaaaggaagaaaacaaaataaaaatcttaaattaggtatttgtggagagcatggaggagatccacatagtatatctttttgttctaaagcaggattgaattatgtttcttgttcaccttatagagttcctgttgcaaggttggcagctgctcaagctgaaattaaaaaaaaattaaattaaa

SEQ ID NO: 258606 - DNA, 1012 bp, Unknown
  Bacterial polypeptide expressing nucleotide sequence isolated from the Sargasso Sea
taaagggattttaactgctagaggaggtatgacaagccatgctgcagtagttgcaagaggaatgggtagaccatgtgtttcaggttcaagtgaaatagatataaattatgaaaaaaaaacatttaaaacttcatcagttgaaattaaagagggtgagattattactatagatggatctactggtagaattatttcaggaagagttgctactttaaaacctgaaatttctggagatttttctaaattaatgtcttgggcagataattatagaaaattaaatattagaacaaattcagaaacaccaaaggatactaaaatagctaaagattttggagccgaaggaattggtctgtgtaggaccgaacacatgttttttgatgaagaaagaattttatcagtaagagagatgattttatctaaaacaaaagaaggtagagcaaaagcacttgaaaaactacttcctcatcaaaagaaagatttcatggaaatttttaagataatgagtggtatgcctgttacagttagattattagatcctcctcttcatgaatttttgccacgttcagataaagaaattaatgaagttgctaaggttattggtactcctataaaagaaatagaatcaagaatagaagaattgcacgaacaaaaccctatgctaggccatagaggttgtaggcttggaatttcttttcctgaaatctatgaaatgcaatgtagagctatatttgaagcactagcagaccttaaaaaaaataaaataaaatttgcatttccagaaattatgattccattagtttctactgaggctgaaataaaaattatgaaaaatttagttattaatgtcgctagagaagttcaaaaacaatataaattaaaaatagaatttttagtaggaactatgattgaacttccaagagcagcaattaaagcaaaagaaatagcaaaacatgctgaattttttagttttggaacaaatggacttaacacaaactacttttgtataagcaga

SEQ ID NO: 258607 - DNA, 1498 bp, Unknown
  Bacterial polypeptide expressing nucleotide sequence isolated from the Sargasso Sea
ccaaactctctagatacacttttgcatcttacattggatgaaaaaagctcaattaatgtaatagcacatggcttaccagcatcaccgggtgctgcaagtggtaaggttgtatttacatctgaggaggctgaaagactaacagcaatgatgcaagatacaattttagtcagagtagagacctccccagaagatatacaaggaatgcatgctgctaaaggaattttgacagctagaggaggaatgacaagtcatgctgcagttgttgctagaggaatgggtagaccttgtgtgtcaggatcaagtgaaattgatataaactatgaaaacaaactttttaaaacttcttcaatggaaattaaagaaggagatataattactatagatggctcaactggtagagttattgctggaagtatttcaactgtaaaaccagaaatatctggtgatttttcaaagctaatgtcttgggcagatagttttagaaaattaaatgtaaggacaaattcagagacaccaaaagatactaaaacagcaaaagactttggtgcagagggtattggactttgtagaactgagcatatgttttttgatgaagaaagaattttgtctgtaagagaaatgatattatcaaaaacaaaagaggatagagcaatagcattagaaaaactattaccccatcaaaaaaaagattttatagatatatttaaaattatgagtggattacccgttacagttaggttgttagatccaccactacatgaatttttaccaagtacaaacaaagaaattaatgaagttgctaacatagttaatattccagttaatgaagttatgtcaagaattgaggagcttcatgaacaaaatccaatgttaggtcatagaggttgtcggttaggaatatcttttcctgaaatttatgaaatgcaatgtagagcaatatttgaagctttggcagaacttaaaaaaaataaaatcaaatctgcatttcctgaaataatgatacccttggtatctactgaagcagaaataagaataatgaaagatttagtaatcagaactgcaagccaagttcaaaaagaatataaattgaaaatagaatttttagtaggtacgatgattgaactgcctagagcagcgataaaagcaaaggaaattgctaaacatgctgaattttttagctttggaacaaatgatttaacacaaactacttttggaataagcagagatgatagtggaaaatttttaaatgattatttagagaacaaaatattttctgtagacccttttgtttcaatagacgaaggtgtttcagatttagtccaaatagcagtagaaaaaggaagagagcaaaataaaaatctcaaattaggtatctgtggagagcatggaggtgacccaaatagtatatttttttgttctaaagtaggattaaattatgtttcatgctcaccttatagagttcctattgctagattagcagccgcacaggcagaactca

SEQ ID NO: 258608 - DNA, 2409 bp, Unknown
  Bacterial polypeptide expressing nucleotide sequence isolated from the Sargasso Sea
ccggagcaagacagtctatgcctggtatgatggaaacagtgttaaatattggacttacaagtaaaaccattccaggactaatcaaaaaaactggtaatccaagatttgtctatgatgcatatagaagactgattacaatgtacgcagatgtagtaatggaaaaagcagcgggtattgaaccaaaagatggcgttggaataagacaaaaacttgaacaccatttagattcatataaatctgaaaatggtctcaaaggcgatactgatctatctgaagaggattggaaaaatgtaattgatatatttaagaatgaaataaaatcttctcttggtgcagagtttcctgatgatgctgacgctcaattatggggtggaattgaagctgtttttaaaagttggaatggtgcaagagcaataagctacagaagaatagaaaatataccagaggaatggggtaccgctgttaatgtccaaacaatggtctttggaaacacaggagaagaatctgccactggtgttgcatttaccagaaacccagcaactggtgaaaataaattttttggagaatggcttactaacgcacaaggagaagatgttgttgcaggtcttcgcactcctaaccccctaaatgaagacacaaagacagaagatactagtcacctcccttctttgcaggatactatgccagagatttatgatgaattatttgagataaaaaatagattagaaaaacattactccgacatgcaagatattgaattcaccatccaagaaggaaaactttggatgctccaaactagggttggaaaaagaaatggtgttgctgcaataaaaatggctgtagatatgtttaacgaaaatatgatagacaaaaaaactgccattatgagagtaaatccaaatcagttagatgagctacttcatccagcattagataaagcaagtgaaaatagcgccaccaaattaacaaaaggacttcctgcaggtccaggtggtgcaaaaggtagagtggtctttacagctgacgatgcggaagaatggaaaaataaaggtgaaaaagttattcttgtaagagaagaaacttcgcctgaggatgtccatggtatgcacgctgctgaagcaatattgacagctcgaggaggaatgacttcacacgcagcgctagttgcaagaggctggggtaaatgctgtattgttggttgtaatgaaataaacatttctgtagagaataaacaattatcagttggtgatgtagttgtcaaagaaggtgattggataacaatgaatggcaccattggagtggtatatctaggccaattagatctaatacctgctgatccagatagaaatgaagaatataaagaattaatgacatgggcagatgaaataagaaagctaaaaataagaacaaatgctgaaagtccagaagatgcaaaacaagctataaaatttggagctgaaggaataggcttatgtagaacagaacatatgttctttgatgaaacaagaattttagcaatgagaaagatgatattagcagataatgatgaagatagaagagatgctgtcatgggacttcttccgttccaaaaagaagactttaaaggcactttagaagctatggaagggaaaccagtaacgattagattacttgacccgcctttgcatgagttcatcaccttagatgatgaacaaatcaaagaactagctaacaatattggtatcgatagttctattgttaatcaacgtatttctagtcttcacgaacttaatccaatgttagggcaccgtggatgtagacttggaatcgcataccctgttattacagaaatgcaagcacgtgcaatcttagaggcagcagctgagcttacaaaaaatggtttaaatgttttaccggaaataatgatcccattagttggaacggttacagaatatgttgaccaggaaaaaatcgtgcgaaaagtcgcctcagaagtcgaaagtaaatatgatatgaagttaaattatttagttggtacgatgatcgagcttcctagagcatgtttaactgctgatgagattgcagagcatgcagaatttttcagctttgggacaaatgatctcactcaaaccacatatggttttagtagagatgacattggttcatttttgccagaatatctagatagtaacattctacctggagacccatttcaaagtttagatgttaaaggtgtcggtaaattagtatctatggcagttaaatatggtagagatgttaatccttcgattaaaataggtatttgtggcgagcacggaggagaccctaactcaattcatttttgtaaaaataatggattagattatgtgagctgctctccatatagagttcccatagcaaggttatcagccgcgcaagctgaattatagt

SEQ ID NO: 258609 - DNA, 835 bp, Unknown
  Bacterial polypeptide expressing nucleotide sequence isolated from the Sargasso Sea
catcagaaaaatgatttcaaagaaattttcaaaattatgaaaggtttacctgtaacagtgaggcttttagaccctccgttgcatgagtttcttcctaaaacagataaagatatggaagaggtagcaagatcacttaactcgggtattaaggaaataaaaaatagagttgcagaattacatgaattaaatccaatgttaggacacagaggttgtagacttggtatatctttcccagaaatttatgaaatgcaatgtagggctattttcacagcgttgattgaatgtaaaaaagaaaaaatacaatctgtaatacctgaaataatgataccactagtatcaactgaggacgaacttggaataatgagaaaattagttaacagagtagccgatgaggttcagaaggagaaaaaaataaaaataaattattttgttggtactatgattgaactaccaagggcagcattaagagcagcacctatatcaaaatatgctgatttctttagctttggaactaacgatttaacgcaaactacatttggaattagtcgagatgattctggaaaatttttaaatgattatattgatcataaaatttttgaggacgatccatttgttagcatagacaaagatggtgttggtgaactagttaaaatcgcatctgaaagaggaaaaaaacataacaaaaaacttaagctaggaatttgtggggaacatggaggcgatcctagaagtattgagttttgttccaaagcaggattaaattacgtttcttgttcaccatttagagttcctattgcaagattagcagctgctcaagctgagctacgaaggtaat

SEQ ID NO: 258610 - DNA, 1903 bp, Unknown
  Bacterial polypeptide expressing nucleotide sequence isolated from the Sargasso Sea
actgtgcactggcgtagtttttactagaaatccatctgatggagccaaaaatatttacggagaatatttaataaatgcacaaggcgaagatgttgttgctggaaccagaacaccacaacatattacaaaaaaagctagagttgaatcaaaagaaactcttaagtcaatggaagaggcaatgccaaaaacatacaagcaactaaaaaatattttagttaaattagaaaaatattacaaagatatgcaggatgttgagtttactgttgaaaacaaaaaactatggatgcttcaaacacgttctggaaaaagaacagctaagtctgctgttaaaatagctgtagatatggttaaagaaaaattgattactaaaaaggatgcaatattacgaatagaacctagttctttagatactttgcttcatccaactttagatgagaaagtaaacttagatgtaattgggacaggcctgcccgcgtcaccaggtgctgcaagtggaaaagttgttttcacgtctgaggaagctgaaagactaaatagtatgatgcaaagtacaatattagttcgtgtagaaacttcaccagaagatattcatggtatgcacgcagcaaaaggaatacttacctcaaggggaggcatgacaagtcatgctgcagtagttgcaagggggatgggaagaccatgtgtttctggatctagtgaaatagaaattgattacaaaaataaattattcaaaacaaataatagagtaattaaagagggagaaataattacaattgatggttcaacaggcagaataattattggcgaggtaaaaacagttaaaccagaaatatcaggtgatttctcaaaaataatgagttggtctgatgattttagaaaattaaaaattagaactaattcagaaacaccattggatagcaaaactgctagagaatttggtgcagagggtattggtttgtgtagaactgaacatatgttttttgaagaagaaagaattttatcagtaagagaaatgatattatcaaaaacaatagaagatcgatctaatgcactgaaaaagctattaccacatcaaaaaaaagattttattgaaatatttaagattatgaaaggtttaccagtaacagtaaggttacttgacccaccactacatgaatttttgccaaaaaataataatgaaattaatgatgttgcagtttcattaaatattcccattaaagaacttgaaattagaatttcagaacttcatgaacaaaatccaatgttaggtcatagaggttgtagattggcaatttcattccccgaaatttatgagatgcaaagtactgcaatttttgaagctttagtggaatgtaaaaaacaaaaaattcaatcaactatgcctgaaataatgattcctttagtttcaacagaagcagaaataaaaattatgaaagatttagtaattagggttgcaaaaaaagttcaagatgagaataaaattaaaattgattttttagttggaacaatgattgaattgcctagagcagcaataaaggcaaaagatatcgctaaacacgctgagttttttagctttggaacaaatgatttaactcaaactacatttggaatcagtagagatgatagtggtaaatttcttaatgattatatcgagaacaaaatttttgacattgatccttttgtatcaattgatgatggggttggagacttaataaaaatagcaactggaaaaggcagaaaacaaaacaaaaaaattaaacttggaatttgtggtgagcatggtggagatcctaaaagtatagaattttgtgcaaaaactggattagattatgtttcttgttcaccttacagagttccagttgcaagattagcagcagcccaagctcaaataaaaaaaaattaa

SEQ ID NO: 258611 - DNA, 1198 bp, Unknown
  Bacterial polypeptide expressing nucleotide sequence isolated from the Sargasso Sea
atcgataactataaattaactaaaggtgttctgcaggacactgaactaaattctgaagattgggatggactaattaaaaatttcaaaaaattaattaaagaaaagacaaacaaaagttttccccagaatgtttacgaacaacttttcggcgcaattagtgctgtatttttatcctgggagagtaaaagagcaaaaacttatagaaaattaaatcatattccagatgagtggggaactgcagtaaatattcaatcaatggtctttggtaacatgggaaatgattgcgctactggtgtagcttttacaagaaatccttcaactggagaaaacaaattttttggggagtatttaattaatgctcaaggggaggatgttgtagcaggtagtagaacccctagatacatcacaaagagagcaagggaagatgcaggagcaaaagagagatcaatggaagaaacaatgccaaaagtttttcaagaactaaaaaatatatttttaaaattagaaaaacactataaagatatgcaagatattgagtttactgtagagaacaaaaaattatggatgttacaaactcgaaatggaaagcgaacagctaaggcagcgatcaaaatagcggtagatatggtaaaagaaaaattgatttcaaaaaaagaagcaattttaagaatagatgctaatacacttgatactcttttgcatcctacattggacgatagggctgaaaaaaaagtaatcgcaaaaggtttgcctgcatcaccgggagctgctagtggtaaagtagtttttacagcagatgaagctgagagaatgagcaatcaaaaagaagatacaattttagtaagattagaaacatcacctgaggatattcacggtatgcatgctgctaaaggaatattaactgctagagggggaatgacaagtcatgctgctgttgtagctcgaggtatgggtagaccgtgtgtttcaggttctgctgaaattaatatcgattatgaaagtaaagaatttaaagttggagacttggtaatcaaagaaggtgatactattaccattgacggggggtcaggaagagtaatgaaaggaatagtcccaactgtgaaaccagatatctctgggtatttttcaacaataatgaaatggtcagatgattttaggaagctaaagataagaactaactcagaaacacccaaagata

SEQ ID NO: 258612 - DNA, 981 bp, Unknown
  Bacterial polypeptide expressing nucleotide sequence isolated from the Sargasso Sea
gagattttggtgcggagggaattggactttgtaggaccgagcacatgttttttgatgaggaaagaattttatcagtgcgagaaatgattttatcaaaaacgctatatgatagatctaatgccttaaaaaagatactaccgcatcaaaaaaaagattttatagaaatattcaagattatgcatggtcttccagttactgtaagattattagatccaccattacatgaatttttaccaaaatctgataaagaaatttctgaagtagctaatgttgttggatcagacaaaaaagatattgaaagcaggatagaagaacttcatgaacaaaatccaatgttaggacacagaggttgtagacttggcatttcatttcctgaaatttatgagatgcaatgtagagcgatatttgaggctcttgcagacttaaaaaaaaacaaacaaaaatttgctttccctgagataatgattcctttagtttcaaccgaaaccgagattaaaataatgaaagatttagtaatcaatactgcaagaaaagttcaaaaagaaaataaaacaaaaattgaatttcttgttggtacaatgattgagttacctagagcagcaattaaggctgatgatattgcgaaacatgctgaattctttagctttggcactaatgatttaacacaaacaacttttggaataagtagagacgatagtggtaaatttttaaatgattatatagacaataagatttttgctattgatccctttgtatcaattgatgacggagtgaaagatttagttgaaatagcggtttctaaaggaaaaaaacaaaataaaaaaattaaattaggcatatgtggtgaacatggtggcgatccaaagagtattaaattttgttcaaaagctgggcttaattatgtttcctgttcaccttacagagttcctatagctagattagcagcggcacaggctgagcttacgaaaaataaaaattaaa

SEQ ID NO: 258613 - DNA, 1381 bp, Unknown
  Bacterial polypeptide expressing nucleotide sequence isolated from the Sargasso Sea
ctttcaaacaattctcagttgggcacaaagtactaaacaattgggaattcgtgctaacgcagatacaccagatgcagcaaaacttgcaagacaatatggagcacagggaattggattgtgcaggacggagaggatgtttaacgaagcagacaggattggattgtttgttgaaatgattatggcgcaatcagaaaatgaaagaaatcaagtattaaagaaactacaagaattacaaaaaagtgacttcattggaatcttaaaggcaatggaaggatacaaagtcacaatcagactattagatccaccactgcatgaatttttgccaaatcctgaagaactgaaagaaaagatgactaaagaaaatgataacagtgaaaagacaaaacgtgttctagatagagcacgagaattagcagagataaatccaatgatgggacatagaggagtaagagttgccatcacatatccagaaatatacagaatgcaaattactgcagtttttgaagctgcagcagaacttgcaaagaaaaaggttaatgcaaagccacagataatgattccacaggtaggaagtttagcagaattaaattatatcaaatcaatttatgatgatgtaaaaaaacagatgcagcaaaaatacaagatgaaatttaagataaactttggaacaatgttagaagttgttcgtgcatgtttaacatctgatgagttagcagatactgcagaatttttcagttttggaacaaacgacttaacacaggctgtatttagtttcagtagagaagatgcagaaggaaaattccttccagaatacatggagaaagaactcctagaaacaagcccattccaatcaattgatgttaatggagtagggcatcttatgaaaattggaattaagcaaggaagagatatgaaaaaagacttggaaattggaatttgtggagaacatgggggagatccaaattcaattaaattctgtcattctgcagatgtatcatatgttagcgcatcaccacatagaattcctatagcaattgttgcagccgcacaagcatcaattgaacaaaaaaaatcaaaatctaaaagaagaaataatttcattttacccagcattagaaataaccctagtgaaattacaatttatgtaggatcaaacctatattgcacttggaaattaatagtcgtatggcagcaatgtgcttcaattgtaaacaagatattgaaaatcatgattctcataaatcaagataattgtctaactgcattatctaagagacttgaatcaatggaaaatgtcttgcaagtaccaaatgatgacgaggcattagattacttctctaacactaaacttggagaagcaagtagaatgggctcaaaataa

SEQ ID NO: 258614 - DNA, 1286 bp, Unknown
  Bacterial polypeptide expressing nucleotide sequence isolated from the Sargasso Sea
aactataagttaacaaaaggagtattattagacacagaattagatgagtatgactggcaagctttaattaaagattttaaaaacatcgtaaaagaaaaaacaaaaaaagatttccctcaaaatgtcaatgaacaattgataggagctataagtgctgtttttttatcttgggaaagccacagagcaaaagtctatagaaaattaaatcaaataccgtctaattggggtacagcagttaatgtacaagcaatggtttttggaaatatgggaaatgattgtgcaactggtgtagtctttactagaaatccatcagatggatcaaaaaatatttatggagaatatttaataaatgcgcaaggagaggatgttgttgctggaactagaacaccacaacatattacaaaaaaagctagagttgaatcaaaagaaactcttaagtcaatggaggaggcaatgccaaagacatacaatcaacttaaaaatatattaatcaaattagaaaaacattacaaagatatgcaggatgttgagtttacagttgaaaataaaaaactttggatgcttcaaacacgctctggaaaacgaacagctaaatctgctgtaaaaatagctgtagatatggttaatgaaaagttgattactaaaaaagatgcaatattacgaatagagccaagttctttagacactttgcttcatccaactttagatgagaaagcaaacttagaagtaattgggtcaggcttacccgcatcacccggtgctgcaagtggaaaagttgtttttacatccgaggaggctgaaagactaaatagtatgatgcaaagtacaatattagttcgtatagaaacttcgccagaggatatacatggtatgcatgcagcaaaaggaatacttacctcaagaggaggtatgacaagtcatgctgcagtagttgctagagggatgggacgaccatgtgtttctggatctagtgaaatagaaattgattatgaaaacaaattattcaaaacaaacaataaagtaattaaagagggagaaataattacaattgatggttcaacaggcagaataattattggcgagataaaaacagttaaaccagaaatatcaggtgatttctcaaaaataatgagttggtctgatgatttcagaaaattaaaaattagaactaattcggagacgccattagatagtaaaactgctagagaatttggtgcagagggtattggtttgagtagaactgaacatatgttttttgaggaggaaagaattttatctgtaagaga

SEQ ID NO: 258615 - DNA, 1245 bp, Unknown
  Bacterial polypeptide expressing nucleotide sequence isolated from the Sargasso Sea
ttgcaagaggaatgggtagaccttgtgtatctggctcaagcgaaatagaaatagattaccaaaataaaatttttaaaacaaaaaattatgaaattaaagagggtgatttaattacaattgatggatcaactggtagaattataaaaggagaggttaaaactgttaaacccgaaatttcgggagatttttctaaacttatgagctgggctgacaaatttagaaaactaaaaattagaactaattctgaaacacctcttgacagtaaaactgctagagaatttggagctgaaggaataggtctttgtagaacagaacatatgttttttgatgaagagagaattttatctgtaagagaaatgattttatcaaaatcaaaagaagatagggctagtgctttaaagaaactacttccttttcaaaaaaaggattttattgatatctttaaaattatgaatggtctacctgttacagttagattattagatccaccacttcatgaatttttaccgaaaaatcaaaaagaaattagcgacgtagcagatgctttaaacatcaaaagttctgaattagagggtaggataacagaacttcatgaacaaaatccaatgcttggtcatagaggttgtagattaggtatatcattcccagaaatatatgagatgcagtgtactgcgatttttcatgcattagttgaatgtaaaaagctaaagataaaatctattattccagagatcatgatacctttggtatcaactgaagcagaaataaaaataatgaaagatttagtaattagagttgcaaaagaagttgaaaataaaactaaaacaaaactaaattttttagtaggtacaatgattgagctaccaagagctgcgatcaaagcagatgatatatctagacacgcagaattctttagttttggtacaaatgatttaacacaaacaacttttggaattagcagagatgatagtggcaagtttttaaatgattatattgataataaaatcttcaatgttgatccatttgtttctatagatgaaggagttggcgatttgatagaaatagcaacaaaaaaaggcagaaagataaacaaaaaaatcaaacttggtatatgtggtgaacacggaggcgaccctaaaagtatcgaattttgcgcacgagctggtttagattatgtatcttgttcaccttatagagtacctattgcaagacttgctgctgctcaagctcaattaaaaaaataaa

SEQ ID NO: 258616 - DNA, 1358 bp, Unknown
  Bacterial polypeptide expressing nucleotide sequence isolated from the Sargasso Sea
taaagtgaaaaaaaaagtaatagcaaaaggcttaccagcatcaccaggagctgccagtggcaaagtagtttttacagcggatgaggctgagaaaatgagcaatcaaaaagaagatacgattttagtaagattagaaacatcgccagaagatattcatgggatgcatgctgcaaaaggaatattaactgcaaggggaggaatgacaagtcatgccgcagttgttgctagaggtatgggaaggccatgtgtctcaggttctgccgaaattaatatcgattatgaaagtaaagaatttaaagttggagacctagtaatcaaagagggcgatactataactattgatgggggatcaggaaaagtgatggaaggaatagttccaactgtaaaaccagatatttcaggatatttttcaacaataatgaaatgggcagatgattttagaaaattaaaaattagaactaattcagaaacacctcaggatacaaaaattgccagaagctttggagcagaaggtattggactatgtagaactgaacatatgttttttgaagaagaaagaattttatctgtgcgacagatgatagtatcaaaagatttagatggaagaaggatagctttagaaaaattgttaccttatcaaaaaaacgattttaaagaaatattcaaaattatgaaaggtttaccagttaccgtaagacttttagatccaccactacatgagtttcttccaaaaacagataaagacatggaagatttggcaagatcacttaacttaggggttaaagaaattaaggatagagtagcagaacttcatgaattaaatcctatgcttggtcatagaggatgtagacttggaatatcttttcctgaaatttacgaaatgcaatgcagagcaatttttacagctttaattgagtgtaaaaaagaaaaaatacaatctgtaataccagaaatcatgataccccttgtttctactgaggacgagattggtataatgagaaaattagtagatgaggtagccaagaaagttcagaaagaaaacaaaattaaattagaatactttgttggtacaatgatcgaattaccaagagcagcactaagagcagcgcctatatcaaaatatgctgacttttttagttttggaacaaatgatttaacacaaactacttacggtataagccgcgatgattctggaaagtttttaaatgattacttagatcataaaattttcgataccgatccattcgtaagcattgataaagatggagtaggtgagttggtcaaaatcgcgaccgaaagaggaagaaaaaataatagaaaacttaaattaggaatttgtggagaaccatggtggtgat

SEQ ID NO: 258617 - DNA, 1782 bp, Unknown
  Bacterial polypeptide expressing nucleotide sequence isolated from the Sargasso Sea
tgatgaatggggaacagctgtaaatgttcaagctatggtctttggaaacatgggtagtgactgtgctactggagtagcttttacaagaaacccatctacaggcgagaattctttctttggggaatatttaattaatgctcaaggtgaggatgtcgttgctggcacaagaacaccacaatatattacaaaaaaatcaaaaaaagaatcaggttcaaaagaactgtcaatgcaagaagcaatgccgcaagcttataaggaattagaaaaagtttttataaaattagaaaaacattatagagatatgcaagacattgaatttacagttgaaaacaataaattatggatgcttcaaacaagatctggaaaaagaactgctaaagcaggaattaaaattgctgttgatatggtaaaggaaaaattaatttcaaggaaagaagcaatactaagaatagatccaaatactattgatacacttttacatcccactttagatgacaaagttgaaaaagaaataatagcatctggtttacccgcatcacctggtgcagcgagtggtaaagttgtttttaccgctgatgaagcagaaaaattaaataatatgatgcaagatacaattttggttagattagaaacatcaccagaggatattcacggaatgcatgctgcaaaaggtattttgactgctagaggtggaatgaccagtcatgctgctgtagtcgcaaggggaatgggtcgaccatgtgtttcgggatcaagtgagataacgattgattacgagaataaacaatttaaagcaggcaacgaaattataaaagaaggtgaaatcataacaatagacggggggagcggcaaggttatgaaaggcttagttccaacagtaaaacctgaaatttcaggatatttttcgacaataatgaaatgggcagatggattcagaaaattaaaaataagaactaatgcggagactgaaaatgacagcaaaactgcaagagatttcggtgcggagggaatagggctttgcagaactgaacatatgttttttgacgaagatagaatattatcagtaagacaaatgattctctcaagatcaaacgatgatagaagtcatgcattgtctaaacttttaccttaccaaaaggaagattttaaaaaaatctttaaagtaatgtcaggcctacctgttactgtaagattattagatccaccattacatgaatttttacctaaggcagataaagatgttgacgaagtagctagatccttaaatttagcatctaaagaaattcgagatagaatatcagaactacatgaggaaaatccgatgcttggccacagaggttgtagactaggtatatctttccctgagatttatgaaatgcagtgcagagctattttcgaggcaataattgaacttaaaaaagagaaaataaaatctgcttttgtagaaattatgattccattggtttcaattgaatctgaattaaaaataatgcgatcattggtaaatcgagtagctaaagaaattgaaacaaaaaataaagtaaaattagattacactgttggtacaatgattgaattacccagagcagcgctacaggcaaaaaatatctctaaacacgcagatttttttagttttggtactaacgatttaacccaaacaacatttggtataagcagagatgactctggtaaatttttaaatgattatattgataacaaaatttttgatgtagacccgtttgtgagcattgatcaaaatggagtaggagaattagtcgagat

SEQ ID NO: 258618 - DNA, 1349 bp, Unknown
  Bacterial polypeptide expressing nucleotide sequence isolated from the Sargasso Sea
agaaaagcactataaagatatgcaagatgttgagtttactgtagaaaataaaaaactttggatgcttcaaaccagatctggaaaaaggaccgcaaagtcagcagttaaaattgcagtagatatggtaaaagaaaaattaatttcaagaaaagaagctattttaagaattgatccaaattctttggatacacttcttcatccaactttagatgaaaaaagtgagataaatgtaatagcaaaaggattacctgcatctccaggtgcagttagcggaaaggttgtcttctcatcagaagaggcagaaaggcttaatggcatgatgcaaaatactattttagttagagtcgaaacatcaccagaggatatacatgggatgcatgcagctaaaggtatcttgacttccagaggaggaatgactagtcatgccgcagttgtagcacgaggaatgggaagaccgtgtgtttctggatcaagtgaaattaacatagattacgaaaataaattatttaaaactgatcaaattcaagtcacagaaggagaaataattacaattgacggttccagtggaagaataatcctaggagaggttcaaactgtcaaaccagaaatatcaggcgatttttcaaaattaatgagttgggctgacagttatagaaaattgaaagtaagaactaattccgaaactccaattgatactaaaacagcaagagactttggagcagaaggtattggactatgtagaacagagcacatgttttttgacgaagatagaattatgtctgttagagaaatgatattgtctaaaacaacaaatgatagaaataaagctctagcaaaactacttcctcatcaaaagaaagattttacagaaatatttaaaataatgaacggtctaccagttacagtaagacttttggaccctccgttacatgagtttttgccaaaaaatgaaaaagaaataaaagatgtttctgatgcacttggattaacggttacagagattgagtcacgaataggtgagttacatgaacataatccaatgttgggacatagaggatgtagattggctatttcttttcctgagatttatgaaatgcaatgcagggcaatttttgaagctttaattgaatgtaagaatatgaaaattaaatcaattattccagaaattatgattcctttagtttcaaccgaagctgaaatagaaataatgaaaaatttggttgataaagttgcagatcaagtaaaagctgaaaataaaacaaaaattgattacctagttggcacaatgatagaactaccgagagcagccataaaagctaaagacatagctaaacatgctgactttttta

SEQ ID NO: 258619 - DNA, 860 bp, Unknown
  Bacterial polypeptide expressing nucleotide sequence isolated from the Sargasso Sea
tatcgctttagaaaaactcatgccacatcaaaaaaatgattttaaagaaatatttaagactatgtatggattacctgtaacagtaagattactcgatccgcctttacatgagtttttaccaaaatcagagaaagatgttgaagaagtagcaagatcattaaatttaggtgctaaagaaattagagacagaattgcagagcttcatgagcaaaatccaatgttaggtcacagagggtgtagacttggtatatcttttccagaaatatacgaaatgcaatgcaaagctatttttgaagctttagtagaatgtaaaaaagaaaaatctaaatctgctattgctgaaattatgattcctcttgtttcaactgacttagaactaaaaatattaagagatcttgttaacagagtagctaaagatgtgcaaaataaaaacaaggtaaaaattgaatatattgttggaactatgattgagctaccaagggctgcgttacaagcaaaggctatatctaaatatgcagattttttcagctttggtacaaatgacttaacacaaactacacttgggataagtagagatgactctggaaaatttttaaatgattacgtagaccataaaatttttaataaagatccatttgttagtattgatgaagatggtgtaggcgaacttgtagaaattgcgtcaaatagagggagaaaacaaaacaaaaaattaaaattaggaatttgcggagaacatggcggggatcccaaaagtatagagttttgttctaagttaggattaaattatgtttcttgctcaccatttagagtccctgttgctagacttgctgctgctcaagcacaattaagaagataat

SEQ ID NO: 258620 - DNA, 1303 bp, Unknown
  Bacterial polypeptide expressing nucleotide sequence isolated from the Sargasso Sea
gctgctgctaaaggaatattaactgcaagaggtgggatgacaagccatgcagcagttgtagcaagaggaatgggaaggccttgtgtttctggatcaagtgaaattgacatcaattatgaaaataagtcatttaaaacatcatcaatggaaattaaagagggagatataataacaatagatggatcaacaggaagaataattgaaggtagtgttgctaccgtaaagcctgaaatatctggtgatttttcaaaattaatgtcttgggccgatagttatagaaaattaaagattagaacaaattcagaaactccaaaagatactaaaactgcgaaggattttggtgctgaaggtattggactttgcagaactgagcacatgttttttgatgaagagagaattttatctgtaagggaaatgattctttctaaaaccaaagaagacagagccaaagccttagataaactcctaccacatcaaaaaaaagactttactgaaatttttaagattatgaatggcttaccagttacagtaagattgttagatcctccattacatgaatttttaccaagaacaaataaagaaattggcgaattagcagaaattgttaatcttacagtaaaagaagttgaaacaagaattgaggaacttcatgaacaaaacccaatgttaggtcacagaggttgcagattagctatatcatttcctgaaatatatgagatgcaatgtagagcaattttcgaagcattatgtgagcttaaaaaaaataaaattaagtcagcttttcctgaaataatgatacctctggtttcgacagaggctgaaattaaaataatgaaagacttagtcaaaagaatagcaagcatggttcaagaagaaaataaattaaaaatagactttatggttgggacaatgattgagcttccaagagcagctataaaggcaaaagaaatagcaaaacacgcagaattcttcagttttggaacaaatgatttaactcaaactacttttggaataagtagagatgatagtggaaaatttttaaatgattacatagaaaataaaatattttctattgatcctttcgtatcaattgatgaaggggtttcagatttagttgagattgctgttgcaaaaggtaagagccaaaataaaaagatcaaactagggatatgtggagagcacggaggtgatcccaaaagtatttctttttgtgcgaaagtaggacttaattatgtttcttgttcaccttatagagttccagtcgctaggttagctgcagcacaagcagagttaaaaaaataac

SEQ ID NO: 258621 - DNA, 2662 bp, Unknown
  Bacterial polypeptide expressing nucleotide sequence isolated from the Sargasso Sea
gatggtaaaagtagtatttagttttgatgataaatctgccaaaaaattgaagaataaaaaaaatattttaggtggaaaaggagcaaaccttggtgagatgggtagattaggtttacctgtcccccctggatttactattacaacagatgtttgcgatcttttttataaaaataaaaaaaagttacctaataaagtaatacaaaatattgagttagaacttaaaaatattgaaaagaaaactaaaaaaaaattcggcgatcttaagaatccattactagtatcagttagatcaggggcgagaatttcaatgcctggaatgatggacacaattttaaatcttggacttaatgataaaacagtagaatctttaaaaaagaaaacatcaaacggaagatttgctaaagatagctacagaagatttatacagatgtatagtaacgtagttttgggagtggaggggcatttattcgaagagttaattgataattacaagttaaccaaaggggttttactggacacagatctagatgaaagtgattgggatggtttaattactaattttaaagacctagtaaaaaaagaaaaaaaaattatttttccccaagatgttaaagaacaattattgggggcaatcaacgctgtatttttatcttgggatagccaaagagcaaaaacttatagaaaattaaatcagatccctgatcattggggaacagctgtaaatgtccaagctatggtttttggaaacatgggtatcaattgttcaacaggtgttgcctttacaagaaatccttcgacaggagaaaattctttctttggagaatttttaattaatgcacaaggtgaagatgttgttgcaggtacaagaactcctcaatacatcacaacaaaagcaaaaaaagaatcaggatctaaatacccttcaatggaagaagctatgcctaaagtttataaagaacttgcaaaagtatttcttaagttagaaaggcattataaagatatgcaagacatcgagtttacagttgaaaataataaactttggatgttgcaaacaagatctggaaaaagaacagccaaagctgcaattaaaattgcagtggatatggttaaagagaaattaatttcaaaaaaagaagctataaaaagaattgatccaaatactttagatactttactacatcctactctagacgataaagttgagaaagaggtaattgcttcggggttgccggcatctccaggagctgcaagtggtaaagttgttttcactgctgatgaagcagagaaattaaacgggatgatgcaagatacaatattagtgaggttagaaacttcaccagaagatatacatggaatgcatgcagctaaaggaattcttactgcaagaggtggcatgactagtcatgctgcggttgttgcaagaggaatgggaaggccgtgtgtttctggttcaagtgaaattacaatcgattatgaattaaaacaatttaaagctggtgatgtgattattaaagagggagatattgttactatagatggtggaagtggaaaagtaatgaaaggactagttcctactgttcaaccggaaatatctggatatttctccacgataatgaaatgggctgatgagtttaggaaattaaaagtaagaacaaatgctgaaacagaggcagatagcaaaacagctagagagttcggtgctgaaggaattggcttatgtagaacagaacatatgttttttgatgaagaaagaattttatctgttagacaaatgattttgtctaaatcaaaagaggatagaaatagcgcgctagataaacttctcccttatcaaaaagaagactttaaaaaaatatttaaaatcatgtcaggtttacccgttacagtaagattattagatccaccacttcatgagtttctaccaaaagctgacaaagacatagaggaagtagcaagatccttaaatttatcagcgaaagaagttaaagatagaatagcagaacttcatgaggaaaatcctatgcttgggcatagaggatgtagactaggtatttccttcccagagatttacgagatgcaatgtagagcaatatttgaagcaatagttgaattaaaaaaacaaaaagtaaaagcagcttttgtagaaataatgataccgttagtttcaactgagtctgaattaaaaattttaagagctttagttaataaaattgctaaagaaatagaaaaagaaaataaattaaaacttgagtatatggttggaaccatgattgaattgccgcgtgctgctttacaagcaaagtctatctcaaaacatgctgacttcttcagttttggaacaaatgatttaacacagacaacctttggaataagccgggatgactcaggaaaatttttaaacgattatattgataataaaatttttgatgtagatccatttgtaagtattgatcaaaatggagtaggtgagcttgtagaaatagcttcttccagaggaagaaagacaaataaaaatattaaattaggtatttgtggtgagcatggtggtgatccaaaaagtattgaattttgttctagaacaggactaaactatgtttcctgttctccatttagagttcctgttgccagacttgcagctgcacaagcagaactatctaaataa

SEQ ID NO: 258622 - DNA, 819 bp, Unknown
  Bacterial polypeptide expressing nucleotide sequence isolated from the Sargasso Sea
ttattgatatttttaaaataatgagtggtttaccggtaacagtaagattattagatccaccattacatgaatttttaccacgtacaaacaaagagattagcgaggttgctaacacaattaatcttccagttaaagaggttgagtcaaggattgaagaacttcatgaacaaaatccaatgttaggtcacagagggtgtcggctaggaatatcttttcctgaaatttatgaaatgcaatgtagagcaatatttgaagccttagcagagcttaaaaaaagtaaaataaaatccgcttttcctgaaataatgatacctttagtttctactgaggctgaaataaaaattatgaaagatttagttgttagaactgcaagtctagttcaaaaagaatataaattaaaaatagaatttttggtaggcacaatgatcgagttgcctagggcagcaatcaaagcaaaagaaattgcgaaacatgcagaattttttagttttggaacaaatgatttaacacaaactacttttggaattagcagagatgatagtggaaaatttttaaatgattatttagaaaacaaaatattttcagttgatccttttgtttctatagatgagggcgttgaagatttaatcaaaatagcagttgaaaaaggcaaaagtcaaaataaaaaattaaaacttggaatatgtggtgaacacggtggagacccacatagtatatctttttgtgctaaagcaggattaaattatgtttcatgttcaccttatagagttccagttgcaagattagctgctgctcaggctgaactaaaaaaaaaataaa

SEQ ID NO: 258623 - DNA, 2346 bp, Unknown
  Bacterial polypeptide expressing nucleotide sequence isolated from the Sargasso Sea
attgagcgaaatgacacgcctaaaattaccggtgccaccaggatttacaattacaacagaagtttgtaacaagtattacgataatggaagaaagcttccaaaagacgtcatgccagcagtaatgaaaaatattgtaaaaatggaaaaaaagacagggaagaaatggaattcaactaaaaacccactattggtttcagttcgttccggagctgcaatttctatgccaggaatgatggatacaattttgaatttagggttaaatgaaaaaactgtagaaggatttgcagtacaaacaaaaaatcccagattctcatgggactcttatagaagatttatccaattatttggaaaagtcgtctttggagtaaatgatgaaaaatttgatcatgtgttagattctgcaaaaagtaaacagggagtaacagacgatagtaaactaaacgtagaatcactcaaaaaaattgttaaagagtataagaaaatttgtgaaaatcatacaaaaagaaaattcccagatacaccaaatgaacaattaggattggcaatagaagcagtgttcaaaagttggatgggtgaaagagctgttgtatatagagagaaaaatggaattaccaaggacattgcaaatggcactgcagtaaatgttgttacaatggtatttggaaatatgggagatgatagtgcaacaggagttgttttcacaagaaatggacataatggaaaacgagaaatagaaggagaatatctcaccaacgctcaaggcgaagatgttgttgcaggtgtaagaactggaaaaaatgtagaattattaaaaaaagagatgccaaaatctcataaagagttaagcaatgcatgtgaaaaattggaaaaacatttcagagaaccacaagacattgaatttacaattgagcaagggaaattttatctcttacaaacaagaactgcaaaaatgagtgcaggtgcacttgtaaaaacttcagtagacatggtaaaagaaaaattaattgataaaaatagatcactgactagaattccagcacaacaactagaagcattacttcacagaacaatggatgaatcaaaggtaaaagaccataaacaactagcaaaaggtattgcagcctcacctggtgctgcaagtggaatagcaatttttgatgttaaaaaagcaattgaactaggagaagcaggaaaaaaggtaattttgattagaaaagaaacaaaacctgaagacgtaccagcatttttctcagcagaaggtattctgacaagccttggcggaaaatcatcacatgctgcaattgtatcaagaggaatgggcaaaccatgtattgtgggatgtgcagaattaaaaattaattatgaaaataatacatgtactgcaaatggtattacagtaaaagaaaatgaaatgatttcaattgatggtagtataggcacagtattaattggagaagtaccaacagtcgagccaaaagttactaaagattttcaaacaattcttagctgggcacaaaatacaaaacaattaggaattcgagcaaatgctgatactccggatgcagcaaaattagcaagacagtatggagcacaaggaattggactatgtagaacagagagaatgtttaacgagtcagacagaatcggactatttgttgaaatgattatggcagaatcacaagaagagagaaacaaagtactcaaaaaattacaagaattacaaaaaagtgacttcattggaattctaaaagcaatggaaggatacaaagttacaattagattgttagatccaccattacacgaatttttaccaaatcctgaagaattgaaagataaaatgaataaagaaaatgacaaaagcaaaaaaactcaacgtgttttagatagagcacgtgaattagctgaaatcaatccaatgatgggacatagaggagtaagagttgcaattacatatccagagatatacaaaatgcaaattaccgccgtatttgaagccgcagcagaactttcaaagaaaaaggttaatgcaaaaccacagattatgattccacaagtaggaagtttagcagaattaaactatatcaaatcaatttatgatgatgtaaaaaaagagattgaacgaaaatacaagaaaaaattcaagataaactttggaaccatgctagaagttgttcgtgcatgtcttacatcagatgaattagcagatacggcagagtttttcagctttggaacaaatgatctaacacaggcagtatttagtttcagtagagaggatgcagaaggaaaattccttccagaaatatatggaaaaagagctcctagagaccagtccattccaatcaatcg

SEQ ID NO: 258624 - DNA, 1438 bp, Unknown
  Bacterial polypeptide expressing nucleotide sequence isolated from the Sargasso Sea
cttacccgcatcaccaggtgctgcaagtggaaaagttgttttcacatctgaggaggctgaaagattaaatagtatgatgcaaagtacaatattagttcgtgtagaaacatcaccagaagatatacatggtatgcatgcagcaaaaggaatacttacttcaagaggtggtatgacaagtcatgctgcagtagtagctagaggaatgggaagaccatgtgtttctggatctagtgaaatagaaattgattatgaaaataaattattaaaaacaaataacagaattattaaagagggagaaataattacaattgatggttcaacaggtagaataattattggagaggtaaaaacagttcaaccggaaatatcaggtgatttctcaaaaataatgagttggtctgatgattttagaaaattaaaaattagaactaattcagagacaccaatagatagtaaaaatgctagagaatttggtgcagagggtattggtttgtgtagaactgaacatatgttttttgacgaagaaagaattttatcagtaagagaaatgatattatcaaaaacaattgaggatcgatccaatgcactcaaaaagctattaccacaccaaaaaaaagattttattgaaatatttaagattatgaaaggtttaccagtaacagtaaggttacttgacccaccactacatgaatttttaccaaaaagtaataatgaaattaatgatgttgcagtctcactaaatattcccattaaagaacttgaaattaggatttcagaacttcatgagcaaaatcccatgctaggtcatagaggttgtagattagcaatttcattccctgaaatttatgagatgcaatgtacagcaatttttgaagctttagtagaatgtaaaaaacaaaaaattcaatctacaatgccagaaatcatgatacctttagtttcaacagaagcagaaataaaacttatgaaagatttagttataagggttgcaaaaaaagttcaagatgagaataaaattaaaattgattttttagttggaacaatgattgaattgccaagagcagcaataaaggctaaagatatcgctaaacatgctgaattttttagttttggaactaatgatttaactcaaactacatttggaattagtagagatgatagtggtaaatttctaaacgattatattgaaaacaaaatttttgacatcgatccttttgtatcaattgatgatggagttggagacttaataaaaattgcaactgataagggaagaaaacaaaacaaaaaaataaaacttggaatttgtggtgagcatggtggagatcctaaaagtatagaattttgtgcaaaaactggattagattacgtttcttgttctccttatagagttccagttgcaagattagctgctgctcaagaacaaataaaaaaaaattaa

SEQ ID NO: 258625 - DNA, 1369 bp, Unknown
  Bacterial polypeptide expressing nucleotide sequence isolated from the Sargasso Sea
catgatgcaaaatacgattttagtaagagtcgaaacttcaccagaagatatacatggcatgcatgctgcaaaaggaattttaaccgcaagaggtggaatgacaagccacgctgcagtagttgcaagaggaatggggcgcccatgtgtttctggttcaagtgaattagaaattgattatgaaaataacttatttaaatctaatggatatgaaattaaggaaggagatttgataacaattgatggttcaactggtagaataattttaggagaagtaaaaactgttaaacctgaaatttcaggagatttttctaaattgatgagttgggcagatagttttagaaaattaaaaatcagaacaaattctgaaacacctttagacagcaaaatagcaagggattttggagctgaaggaattggtttatgtagaactgaacacatgttctttgatgaagatagaattttgtcagttagagaaatgatactttcaaaatcaaaagaagaccgtgctaaagctttagaaaaattactaccacatcaaaaaaatgattttatagaaatatttaaaattatgaatggacttccagttacagttagacttttagatccaccactacatgaatttttacctaaaagtgctacagaaattaatgatatttctaaatctttaaatttatcaattaaagaaattgaaggaagaatcgaagaactacacgagcaaaatcccatgttgggtcacagaggatgtagactgggtatttcttttccagaaatttacgaaatgcaaattagggcaatattcgaagctttagtagaatgtaaaaaaagaaaaattaaatcaactatgccggaaataatgataccacttgtctcaaccgaagctgaaataaaaataatgaaagaactggttattaatattgccagaaaagtacagaatgaaaataaaactaaaatcaaatttctagtaggtacaatgattgaacttccacgagccgcaataaaagctaaagaaattgcaaaatatgcagaattttttagttttggaactaacgacctaactcaaactacgtttgggataagtagagacgatagcggcaaatttttaaatgattatatcgaaaataagatttttgatattgatccttttatatcaattgatgatggagttggagatttaattgaaatagctgtgactagaggaaaaaagcaaaacaaaaaaattaaacttggaatttgtggagaacatggaggagacccaaaaagtatagaattttgttctaaagttggattggattatgtttcttgttctccttatagagtacccgttgcacgtttagcagctgctcaagctcaattaaaaaaaataatctaa

SEQ ID NO: 258626 - DNA, 1909 bp, Unknown
  Bacterial polypeptide expressing nucleotide sequence isolated from the Sargasso Sea
ggagataattgtgcaactggtgtagtttttacaaggaacccatcagatggaagtaaagaaatatatggtgaatacttgattaatgctcaaggcgaagatgtagttgcaggcacaagaactccacagcatataactaaaaaagccagaataaaatcaaaggaaaaattaacttcaatggaagaatctatgcctttaatttttaggcacctgaaaaaaatattattgaaattagagaagcattataaagacatgcaagacgttgaatttacagtagagaataaaaaattatggatattacaaacaagatcaggaaaaagaacggcaaaatctgcagtaaaaatagccacagatatggttaaagaaaaattaatttcaaaaaaagatgcattattaagaattgagccaaattctctagacactttgcttcaccctactatagatgaaaaaagcaatatagaagtaatcgcaaaaggattgcctgcatcaccaggggcagcaagtgggaaagttgttttttcctcagatgaagctgaaagacttaatgatatgatgcaaaatacaatattggttagagtcgaaacatccccagaagatatccatggtatgcatgctgccaaaggtatattgactgcaagaggaggcatgacaagtcatgctgcagtagttgctagaggaatgggtcgtccatgtgtttctggttcaagcgaaatagaaatagattatgaaaaaaaattatttaagacaaacggttatgaaattaaagaaggagatttaataacaattgatggttctacgggtagaattattctaggagaagtaaaaactgttaaacctgaaatatcaggtgatttttctaaattaatgagttgggcagataattttagaaaattaaaagtcagaacaaattctgaaacgcctttagatactaaaatagccagagattttggagctgaaggaattggcttatgtagaacagaacacatgttctttgaagaagaaagaattttgtcagttagagaaatgatactttcaaagtcaaaagaagatcgagcaagtgctttaagaaaattactaccgcatcaaaaaaatgattttatcgaaatttttaaaattatgaaaggactacccgttactgttagacttttagatcctccattacatgaatttttacctaaaagctcaacagaagttgcttatgtttcaaaatctttaaatttatcaattaaagaagttgaaggaagaattgatgaattacatgaacaaaatccaatgctgggccatagaggttgtagattaggcatttcttttcctgaaatttatgaaatgcaaactagagctatatttgaagcattagtagaatgtaaaaaaagaaaaatcaaatcaactatgcctgaaataatgattcctctagtttcaacagaatctgaaataaaaataatgaaagagttagtaattaaagttgctagagatgttcaaaatgaaagtaaaactaaaataaaatttctagttgggacaatgatagaacttcctagagcggcaattaaagcaaaagatattgcaaaacatgctgaattttttagctttggaactaatgacctgacacaaactacatttggaattagcagagatgatagtggtaaatttctaaatgattatttagaaaataaaattttcgatatcgatccatttatttcaattgatgatggagtaggtgatttaattttaatagcagcaactaaaggaaaaaaacaaaataaaaaaattaaacttggaatttgcggcgaacatggaggagatccaaaaagtatagaattttgttctaaagctggtttagattatgtttcttgctcaccttatagagtgccaattgctagattagctgcggcacaagctcaattaaaaaaatagg

SEQ ID NO: 258627 - DNA, 1682 bp, Unknown
  Bacterial polypeptide expressing nucleotide sequence isolated from the Sargasso Sea
attagagaagcattacaaagatatgcaggatgttgaatttacagttgaaaataaaaaactttggatgcttcaaactagatcaggaaaaagaacagctaagtcagctgtaaaaattgctgttgatatggtcaaagaaaatttaatttcaaaaaaagaggcagtattgagagttgaaccaaattctttagatactttgcttcatccaactttagatgaaaaatcaaatatagaaataattacaaagggattgccggcatcaccaggtgcagcaagtggcaaagtagtatttacatcagacgatgctgaaaggctaaacgcatcaatgcaaaatgctatattagttcgagttgaaacttcacctgaagatattcatggcatgcacgcagctaaaggcatattaactgcaagaggaggtatgaccagtcatgcagctgttgtggctagaggaatgggaagaccttgtgtatctggctcaagtgaaatcgaaattgattatgaaaaaaaattatttaaagttcaagatagagaaataaaagagggagatttaataactattgatggatctactggtagaataattctaggtgaggtaaaaactgttaaaccagaaatttcaggagagttttctaaacttatgaattgggctgacaattatagaaaactaaaaatacgaacaaattcagagacacctgttgatagtaaaacagcaagagactttggagcagaaggaataggtttatgcagaactgagcatatgtttttcgatgaagagagaatattatcagttagagaaatgatactatcaaaaacaaaagatgatagattattagcactttcaaaattattgccatatcagaaaaaagattttattgatattttcaaaattatgaatggtttgccagtaacagtcagattattagaccccccattacatgaatttttaccaagaacagataaggaaataggtgaagttgcaagctcgttaaatattccaattaaggaattaaaggtaagaatcaccgaacttcacgaacaaaatccaatgcttgggcacagaggttgtagacttggaatatcttttcctgaaatttatgaaatgcagtgtagagcaatttttgaagctttggttcaatgcaaaaaacaaaaagttaaatcaataataccagaaataatgatacctttagtttcaaccgaagctgaaataaaaattatgaaagatttagtgataaggactgcgaaacaggttgagagtgaaaaaaaaataaagttaaattttttggtaggtacaatgattgaattgcctagagctgcgataaaagcaaatgatattgccaaacatgcagaattttttagttttggcactaatgacttaacgcaaactacgtttggtattagcagagacgatagtggtaaatttctaaatgattacattgaaaataaaatatttgacatagatccttttgtatcaattgacgaaggagtaggagacttaattgaaatcgcttctgaaaaagggcgaatgcaaaataaaaaaataaagttaggtatatgcggagagcatggaggagacccaaaaagtattgaactttgtgctaaaataggactaaactatgtttcgtgttctccttacagggttccagtagcaagattagctgctgctcaagcgcaattaaaaaaataaa

SEQ ID NO: 258628 - DNA, 919 bp, Unknown
  Bacterial polypeptide expressing nucleotide sequence isolated from the Sargasso Sea
ttatttggtgcaataaaagctgtatttttatcttgggagagtaaaagagcaaaaacatatagaaagtttaatcatataccgagtgagtggggtacagcagtgaatgttcaatcaatggtatttggaaatatgggtaatgactgtgctactggagtagcttttactagaaatccatcaaccggagaaaataaattctttggagaatacttaattaatgcccaaggagaagatgttgtggctggaagcagaacaccaagatatataacaaaatatgcaaaagaaaatgcaggttcaaaagatgagtcgatggaagaaactatgccaaaggtttttaaagaattaaaaaacgtatttattaaattagaaaaacattatcgagatatgcaagatattgaatttactgttgagaataacaaactttggatgttgcaaacaagaagtggtaagcgcacagcaaaagcagcaattaaaattgctgtagatatggttaaagaaaagctgatttcaaaaaaggaggctattttaagaatagatccaaatactttagacacacttttgcatccgactcttgacgaaaaggtaaaaaaagaagtaatagcaaaaggtttgccagcttccccgggtgcagcaagtggaaaagtagtttttagtgctgatgaagcagaaaatatgaataatcaaaaagaagatacaatattggtaagagttgaaacttcaccagaagatattcacgggatgcatgctgcaaaaggaatattaacagccagaggaggtatgacaagtcatgcagctgtagttgctagaggaatgggaagaccttgtgtttcaggttcaggagaaatcaatatcgattatgaatctaaagaatttaaagttggagaacttactattaaagaggggggatattattactattgat

SEQ ID NO: 258629 - DNA, 948 bp, Unknown
  Bacterial polypeptide expressing nucleotide sequence isolated from the Sargasso Sea
aaattatgcaagagatgattcttgcaacttcattgaaagatagagttatacatttggataaacttttacaaatgcaaaaaaaagattttataggtctctttacagcaatggatggcttaccttgcacaattcgtttacttgatccccctcttcatgaattccttccaaaacgtgaagatttaatgttagaaattaaggaaatggaaattaatggagcgccctcaaaagaactaaaagaaaaaagagatttattagaacgtgtagaagaacttcatgaatttaatccaatgcttgggctccgaggatgtaggcttggaataacaatgcctgaaataaccagaatgcaagcaagagcaattttcgaagctgctttagtagtatcaaaaaagagaattagagttaaccctgaaattatggttcctttggtaggaatggtgtccgaaataaaatttcagaaagatattattttgcaagtggcaaaagaagttctaggtaagaaaaaattgaattatatggtaggaacaatgattgaagtaccaagagctacagctgttgctgatgaaatagcaaaagaagcagaattcttttcctttggaacaaacgatttaactcagacagtttttgcttattcgcgtgatgactctggaaaattcattaatacatatatggatacaaaagttgaacttagcggaaaaacagttgagattctcgaaagagatccttttacaagcattgatattgatggcgtaggagaatttatgaaattaggacttgaaagaggtaagtcaaccagaaagaatctgaaagtagggatttgtggtgagcatggtggtgatccaaattctatagacttctgtcataaaattggtctggactacgttagctgttcaccttttagagttcctattgcgaggcttgctgcagcaagaattgctcttaaagattaat

SEQ ID NO: 258630 - DNA, 2098 bp, Unknown
  Bacterial polypeptide expressing nucleotide sequence isolated from the Sargasso Sea
atgaaaaaacttattttaaactttaattctaaggatagtaaaaaaattaaaaatcctaaaaactttttaggaggaaaaggtgctaatctttctgaaatgggaagaatgggtcttcctgtgcctcctggttttacaatatccacaaaagtttgcgaaattttttataaggataaaaaaagattaaataaaagtttaatttctcaaattaaaaaagaattaaaattaatcgaaaaagatgtttctaagaaatttggggacttaaaaaatccacttttattatctgtgcggtctggtgcaagagtatcaatgccaggtatgatggatactattctaaatctgggtcttaacgataaaacagttaaagctttagcaattaaaacttcaaatggaagatttgctaaagacagttatagaagattcattcaaatgtacggtaatgtggtaatgggtgtagaaggttatcattttgaggaattaattgaaaattataaacttacaaaaggtgttttgttagatacagatttagatgaaagtgattgggatggactaattgaagattttaaaagaacagtaagagaaaagacaaaaaaagattttcctcaagatgtttacgaacaattgctaggagcaataagcgcagtatttttatcatgggaaagtaatagagcaaaagtttatagaaaactaaatcaaatcccagccgagtggggaactgctgtaaatgttcaatcaatggtgtttggaaatatgggtgatgattgcgcaacaggagttgtgtttacaagaaatccatccgatggatcaaatgaaatatatggtgaatatttaattaatgcacaaggcgaagatgttgtagcgggcacaaggactcctcaatatatcacaaaaaaagctagacgagatgctaaagtaaaagaattatcaatggaagaatctatgcctaaagtttttaatgaacttaaaaaaattttgaaaaaattagagatgcatttcaaggatatgcaagacgtagagtttacagtcgaaagtaataaactttggatgcttcaaacaagatcaggaaaaagaacagcaaaatctgcagttaaaattgcagttgaaatggttaaagaaaaattaatttcaaaaaaagaagctgtattaagaattgacccaaactcactagatacacttttgcaccctacattggatgaaaaaagttcgattaatgttatagcaaatgggttgccagcatcaccaggtgcagccagtggtaaagttgtatttacatcagaagaggctgaaagattaaccgcaatgatgcaagatacaattttggttagagtagagacctctccagaagatatacaaggaatgcatgctgctaaaggaattttgactgctagaggaggaatgacaagtcatgcagctgttgttgcgagaggcatgggtagaccatgtgtatcaggatcaagtgaaattgatataaactatgaaaataaatcttttaaaacttcttcaatggagattaaagaaggagatgtaatcactattgatggctcgactggaagaattattgatggaagtgtttcaacagtaaaacctgaaatatctggtgatttttccaaattaatgtcttggtcagacagctttaggaaattaaaagtgagaacaaattctgagaccccaaaagatactcaaacagcaaaagattttggtgctgagggcattggattatgcagaactgaacatatgttttttgatgaagaacgaattttatctgtgagagaaatgattttatctaaaacaaaagaagacagagcaatagcattacaaaaactattaccatatcaaagaaaagattttatagatatttttaaaatcatgagtggattaccagtcacagttagattgttggacccaccattacatgaatttttaccacgtacaaaaaaggaaattaatgaggttgctaatatagttaatctcccagttaaagaggtagagtcaagaattgaagaactacatgagcaaaatcctatgctaggtcatagaggatgtcgtctaggaatatcttttcctgaaatatatgaaatgcaatgcaaagcaaatatttgaa

SEQ ID NO: 258631 - DNA, 1226 bp, Unknown
  Bacterial polypeptide expressing nucleotide sequence isolated from the Sargasso Sea
tttgactaagtttgtttattcttttgggcaaaattctaccgatggtaatgctgaaatgcgtgatcttttaggcggaaaaggcgccaacttggcagaaatgtcaagtattggtatacctgtccctccgggttttacaattactaccgatgtttgttcttactataacgataacagtaacaactttccaaaagaacttgaaaaacaagtctgggaggccattgcttcaattgaggaacagataggcagtaaatttggtgatccagagaatcctcttttagtaagtgttaggtctggagcaagagcctctatgccaggaatgatggatacagttttaaatcttggattaaatgataaaacagtttcaggtttggcgtcacaaagtggcgatgagcggttcgcttacgatagttaccgtcgtttcatccagatgtatggtgatgtggttctcggggttgagcattataactttgaggagatgctggccgatcacaagcagggtaagggtgttagtatggatacagaactcactgtatctgatttgaaacaaatagtttcagcttatagtgaaattgtagagaaacatattggcaaaccgttcccagaagatccgacagaacaactatggggagcaattgcagctgtttttggtagttggatgaatgaaagggccaaggtatataggggtcttcacaatatccctgatgactggggaactgctgtaaatgtccagtctatggtttttggaaatatgggtagtagttcaggtactggagtttgctttactcgcaatccgtctaacggtcataacgtgttttacggagagttcctcattaatgctcagggagaggatgttgttgcaggtataaggaccccacaaccactaactaatgccgaaaagaattcaagtaataatgagttaccttcactggaggaggtaatgcctaaaatttttgcagaattatgtgaagttagaaaaagtttagaaaatcattatagggatatgcaggatatcgaatttactattcagagagataaactatggattttacaaactcgaaatggaaagaggacagctagagcaggtctttccattgccgttgatttggctgagtctggacttatttctacggaggaagctattaataggattgacccaatagctctagatcagctgttacaccctactttggatccaaatgcccccagaaatgttttgggtagggggt

SEQ ID NO: 258632 - DNA, 1309 bp, Unknown
  Bacterial polypeptide expressing nucleotide sequence isolated from the Sargasso Sea
cacccgggttttacaatatctacagaggtatgtgatttgttttataagaataaaaaaaaattaaataaaaaaatacttcatgaaataaataaagaattaaaatttattgaaaaagacacaggaaaaaaatttggagatataaaaaatcctcttctagtttccgtaagatctggagctagggtttctatgcctggtatgatggatacaattttaaatctaggtctaaatgataacacagtaatagcacttgcaaaaaaaacttcaaatttaagatttgcaaatgatagttataggcgttttattcaaatgtattctaatgttgtattgggaattgaaggttatcactttgaggatataattgagaactataagttaacaaaaggggtgttactagacacagaattagatgagtatgattgggaagctttaattaaagattttaaaaatatcgtaaaagaaaaaacaaacaaagattttcctcaaaatgtaaaagaacaactggttggagctataagtgctgtttttttatcttgggaaagtcatagagcaaaagtctatagaaaattaaatcaaataccatctaattggggtacagcagttaatgtacaatcaatggtttttggaaatatgggtaatcacagtgcaactggtgtagtttttactagaaatccatcagatggagctaaaaatatttacggagaatatttaataaatgcgcaaggagaggatgttgttgctggaactagaacaccacaacatattacaaaaaaagctagagttgaatcaaaagaaactcttaagtcaatggaagaggcaatgccagcgacatacaagcaactaaaaaatattctaaataagttagaaaaacattacaaagatatgcaggatgtggagtttactgttgaaaataaaaaactttggatgcttcaaacacgctctggaaaacgaacagccaagtctgctgtaaaaattgctgtagatatggttaaagaaaaattgattactaaaaaggatgcaatattgagaatagaaccaagttctttagacacattacttcatccaactttagatgagaaagcgaaattggaagtaattgggtcaggcttaccagcgtcacctggtgctgcaagtggaaaagttgttttcacatctgaagaggctgaaagactaaatagtatgatgcaaagcacaatattagttcgtgtagaaacttcaccagaagatatacatggtatgcacgcagcaaaaggaatacttacctcaagaggaggtatgacaagtcatgctgcagtagttgctagagggatgg

SEQ ID NO: 258633 - DNA, 1731 bp, Unknown
  Bacterial polypeptide expressing nucleotide sequence isolated from the Sargasso Sea
aatgtcaaagttaatatttggttttggtgataaaaaagcaaaaaaaatacccaattcaagaaatattttaggcggcaaaggttctaatctagctgaaatggcaagacttggattgccagtacctccaggttttaccatttcaactaagatgtgtgaaattttttataagaataataaaaaattaaataaaaaaattaagattgagataaaaaaagaactaaaaaaaattgaagcgaagactaggaaaaagtttggtgataataataatcctttattgatatctgtgagatctggttcaagagtttctatgcctggaatgatggacactattcttaatttaggtcttaacgacaagacagtagaagctttatcaaaaaaaacagaaaatgacagatttgccaaagatagttacagaagatttattcaaatgtacgctaatgttgtaatgggtgttgaaacataccacttcgaagagatgattgataattataaattaacaaagggtgttctacaagacactgaacttaattcggaggactgggaaggtttaattaataattttaaaaaattaattaaggaaaaaactaataaaaattttcctcaagatgttaatgaacaattatttggtgcgattaatgctgtgtttttatcttgggaaagtaaaagagcaaggacctataggaaattaaaccaaataccaggagattggggcacagcagttaatgtccagtctatggtatttggaaatatgggtgatgattgcgctacgggtgtagcttttacgagaaatccgtctaccggggaaaataaattttttggagaatacttgatcaatgctcaaggagaggatgttgtagcaggtagcaggaccccgagatatataacgaagagagcaagagagaaagctggtgttaaagaaaaatcgatggaagaaactatgccaaaagtttttagtgaattaaaaaaaattttcctaaaactagaaaagcattataaagacatgcaagatatagagttcacagttgaaaataaaaaattatggatgttacaaacccgaaatggaaaacgtactgcaaatgctgctttaaaaattgcagtagatatggtcaaagaaaaattgataacaaaaaaagatgcaattttaagaatagatccaaacacacttgacacacttttacaccctacattagatgataaagttgaaaaaaaaataatagcaaaaggtttgcctgcatctccaggtgctgctagtggaaaagtcgtttttacggctgatgaagctgagagaatgcaaaatcaaaaagaggatacaattctggtgagagtagaaacatcgcccgaggatattcatggaatgcacgcatcaaaaggtattcttacggcacgaggcggaatgacaagccacgctgctgtagttgccaggggaatgggtaggccttgtgtttcaggctcagcagaaatcaacatagattatgaaagtaaagaatttaaagttggtgatttagttattaaagaaggtgacactattactatagatggtggatcaggtagagtgatgcaaggagtaataccaactgttaaaccagacatatcaggatatttttcaacaattatgaagtgggcagatgattttagaaaattaaaaattagaactaattcagaaacaccacaagacactaaagtagcaagaagctttggcgcagagggtattggcttatgtagaaccgaaca

SEQ ID NO: 258634 - DNA, 1709 bp, Unknown
  Bacterial polypeptide expressing nucleotide sequence isolated from the Sargasso Sea
ttatttggtgcaataagtgctgtttttttatcttgggagagtaaacgtgcaaaagtttacagaaaactaaatcaaatcccgagtaattgggggacagctgttaacgttcaatcaatggtatttggaaatatgggcaatgattgtgctacaggagttgtttttacaagaagtccttcagatggaacaaattatatttatggagaatatttaattaatgctcaaggagaagatgttgtagctggcacaagaactcctcaatacatatcaaaaaaatcttgcaaagatatttcatctgaaaaaaaatctatggaaaggttaatgccaaatacatttaaacaattaaaaaaaatattaaataaattagaaaagtattatagagacatgcaagatgtagagtttacagtcgaaaacaataaattatggatgctccaaacaagatccggaaaaagaacagcaaaatctgccgtaaaaattgcagttgacatggttaaagaaaagttaattacaaaaaaagaagcagttttgagaattgatcctaatttattagataatcttctacatccaactcttaatgaaaaaaaagaaattaacgtaatagcctctggattgccagcatctccaggagctgcaagtggaaaggttgtgttctcatctgaggaagctgaaagactaaacaatatgatgcaagatacaattttagttagaattgaaacttctccagaagatattcacggaatgcatgcatcaaaagggatattaacttctcgaggtggaatgactagtcacgcagctgttgttgccagaggaatgggaagaccttgcgtttctggctcaagcgaaatcgatataaattatgaggaaaaaatttttagaacttcaaatattgaagttaaagaaggagatataataactatcgatggatcgactggtcgaatcatattaggagaagttgaaacaattaaaccggagatatcaggaagtttctcaactttaatgtcttgggctgataaatttagaaaactaaaaattagatctaactctgaaactcccttagatacaaaaatagcaagagactttggcgcagaaggtataggattatgtagaacagagcatatgttttttgatgaagaaagaattctatctgttagagaaatgatactttccaaaacaaaggaagatagaaataaggcccttcaaaaactcctaccacatcaaaaaaaagattttatagaaatatttgaaataatgggaggtttgcctgtcacagtaagacttttagacccaccgttgcatgaatttttacctaaaagtgaaaaggaaatcgaagacgtttcttacgctttacgaatatcccaaaaagaagttatttcaagaattgacgaacttcatgagcacaatcctatgctaggtcacagaggttgtagattaggaatatctttcccagaaatatatgaaatgcaatgtaaagctatatttgaagcattaatagagtgtaaaaataataaaaaaaaactgattttacctgaaataatgattccgttagtttctacagaagaggaaataaatattatgaaagatcttgtaaatcgagttgctaagaaaatacaagatgaaaataaagtaaaaaataattatttagttggaacgatgattgaattaccaagagcagctttaaaagcgagggacattgcaaagcatgctgatttttt

SEQ ID NO: 258635 - DNA, 1204 bp, Unknown
  Bacterial polypeptide expressing nucleotide sequence isolated from the Sargasso Sea
caagcaattttaagaatgaccccaaatggattagatgcacttttgcatcctactttagatgaaaaaagtaatatagatgtaattgctaaaggtttgccagcatcaccaggcgcagcaagtggaaaggtagttttttcatcagatgaagcagaaagacttaatggaatgatgcaaaatacaattttagtaagagtagaaacatcaccagaagacattcatggtatgcatgctgcaaaaggaatattaacttgcaggggtggaatgacaagccatgccgcagttgtagccagaggaatgggtagaccgtgtgtttctggttctagtgaaatcgaaatagattatcaaaataaaatttttaaaacaaaagggcatgaagtaaaagaaggggatgttattactattgatggttcgactggaaggatcattttaggcgaggttaaaactataaaaccagaaatttctggggatttttcaaaagttatgcgttgggcagacggatatagaaaattaaagataagaactaactcagaaacaccaatggatagcaaaacagcaagagaatttggagcagaaggaattggtttatgtagaacagaacatatgttttttgatgaagagagaattttattggtaaggcaaatgattttatcaaaatcaagtgatgataggagtatagcattaagtaaacttttgccccatcaaaaaaaagatttcatagaaatatttaaaataatgaacggtctaccagtcactgtaagattattggatccacccttacacgaatttttacctaaaaataacgtagaaatcggagatgtagcaaaatcactaaatttgacagttcaagatattcagctaagaatttcagagcttcatgagcacaacccaatgcttggacatcgtggttgcagattaggtatttcttatcctgaaatttatgagatgcaatgtaaagcaatatttgaagcactagtagaatgtaaaaagaaaaaatataaatctatattgccagaaataatgattcctttagtttcgacagaggcagaaataagaattatgaaggatttagttatcagagttgcaagagaagtccaaaataaaaataacacaaaaataaattttttagttggtaccatgattgaacttccaagagcagcaataaaagcaaaagaaattgcaaagcatgcagagttttttagtttgg

SEQ ID NO: 258636 - DNA, 1284 bp, Unknown
  Bacterial polypeptide expressing nucleotide sequence isolated from the Sargasso Sea
ttctgcagatacagaaattgatgcctctgactgggatggattaattgaaaattttaaaaaattaataaaagaaaaaactggtaaaaattttcctcaagatgttaatgaacaattaattgaggcaattagctcagtatttagatcttgggaaagtcaaagagcaaaaacttacagaaaactaaatagaatacccgatgaatggggaacagctgtaaatgttcaagctatggtctttggaaacatgggtagtgactgtgctactggagtagctttcacaagaaacccgtctacaggtgaaaattcatttttcggagaatatttaattaatgctcaaggcgaggatgtggttgctggcacaagaacaccacaatatattacaaaaaaatcaaaaaaagagtcaggttcaaaagaactgtcaatgcaagaagcaatgcccaatgcttataaagaattagaaaaagtttttataaaattagaaaaacattatagagatatgcaagacattgaatttacagttgaaaacaataaactatggatgcttcaaacaagatctggaaaaagaactgctaaagcaggaattaaaatcgcagttgatatggttaaggaaaaattaatttctagaaaagaagcaatactaagaatagatccaaataccattgatacacttttacatcccactttagatgacaaagttaaaaaagagataatagcatctggtttacccgcatcgcctggtgcagcgagtggtaaagttgtttttactgctgacgaagcggaaaaattaaataatatgatgcaagatacaattttggttagattagaaacatcaccagaggatatccatggaatgcatgctgcaaaaggtattttaactgcgagaggtggaatgaccagtcatgctgctgtagtcgcaaggggaatgggtcgaccatgtgtttcgggatcaagcgagataacaattgattatgagaataaacaatttaaagcaggcaacgaaattataaaagaaggtgaaatcataacaattgatgggggaagcggcaaggttatgaagggcttggttccaacagtaaaacctgaaatttcaggatatttttcaacaataatgaaatgggcagatggattcagaaaattaaaaataagaactaatgctgagactgaacaagatagcaaaacagctatagattttggtgcagaaggaatagggttatgtagaactgaacacatgttttttgatgaagatagaatattatcagtaagacaaatgattctttctagatcaaa

SEQ ID NO: 258637 - DNA, 1462 bp, Unknown
  Bacterial polypeptide expressing nucleotide sequence isolated from the Sargasso Sea
agaaaaacattatagagatatgcaagatattgaatttacggttgaaaataataaactgtggatgcttcaaacaagatctggaaaaagaactgctaaagcgggaattaaaattgcagttgatatggttaaggaaaaattaatttcaagaaaagaagcaatactaagaatagatccaaacactattgacacacttttacatccaactttagatgataaagttaaaaaagaagttgtagcatcaggattgcctgcttcacctggtgcagcaagcggcaaagttgtttttaccgctgatgaagcagaaaaacttaataatatgatgcaagatactattttagtaagattagaaacatccccagaagatatacatggaatgcatgcagccaaaggtatattaaccgctaggggtggaatgaccagtcatgctgctgtagtcgcaagaggaatgggtcgaccatgtgtttcaggatctagcgagataacaattgattatgataacaaacaatttaaagcaggtaacgaaattataaaagaaggtgacatcataacaatcgatgggggaagtggtaaagttatgaaaggtttggttccaacagttaaacctgaaatttcaggatatttttcaacaataatgaaatgggcagatgaatttagaaaattaaaaattagaactaatgcagagactgaacaagatagcaaaacagccatagattttggagcagagggaataggactatgcagaactgaacatatgttttttgatgaagatagaatattatcagtaagacaaatgattctctctagatcaaatgaagatagaaatcacgcgctatcaaaacttttaccttatcaaaaagaagattttaaaaaaatctttaaagtaatgtcaggcttacctgttacagtaagattgttagatccaccacttcatgagtttttacccaaggctgataaagatgttgatgaggttgcaagatctttaaatttagcttccaaagaaattagagatagaatagcagaattacacgaggaaaatccgatgcttggccatagaggttgcagattagggatatcttttcctgagatttatgaaatgcaatgtagagctatttttgaagcaataatagaactaaaaaaagagaaaataaaatctgcttttgtagaaattatgatcccattagtttcaacagaatctgaattaagaataatgcgttcattagttaatcgtgttgctcatcaaattgaaaaacaaaacaaagctaaattaaattatatcgtaggtacaatgattgaattacctagagccgctttacaagctaaaaatatttctaagcatgcagattttttcagttttggcaccaatgatttaactcaaaccacttttggtattagcagagatgactctggtaaatttttaaatgactatatagataataaaatcttcgacattgatcctttgtaa

SEQ ID NO: 258638 - DNA, 2393 bp, Unknown
  Bacterial polypeptide expressing nucleotide sequence isolated from the Sargasso Sea
atgttcttgtgcaaaaggagcaaacctttccgagatgggaagaatggggctacctgtgccccctggttttacgatatctactgtggtatgtaatttgttttacaagaatgaaaaaaaattaaataaaaaaatactcaatgaaataaataaagaactaaaattaattgaaaaagactcaggaaaaaaatttggagatataaaaaatcctctcttagtttctgtaagatctggagctagggtttctatgcctggtatgatggatacaattttaaatctaggcctaaatgatagtacggtaatagcacttgcaaaaaaaacttcaaatttaagatttgcaaatgatagttataggcgttttattcaaatgtattccaatgttgttttaggaatcgaagcttatcactttgaggatataatcgagaactataagttaacaaaaggagtattactagacacagaattagatgagtatgactgggaagctttaataaaagatttcaaaaatattgtaaaagaaaaaacaaaaaaagattttcctcaaaatgtcaaagaacaactggtgggagctataagtgctgtttttttatcttgggaaagtaacagagcaaaagtctatagaaaattaaatcaaataccgtctcattggggtacagcagttaatgtacaatcaatggtttttggaaatatgggaaatgattgtgcaactggtgtagtgtttactagaaacccatcagatggatcaaaaaatatttatggagaatatttaataaatgcacaaggagaggatgtagttgctggaactagaacaccacaacatattacaaaaaaagccagagttgagtcaaaagaaactcttaagtcaatggaagagacaatgccagagacatacaagcaacttaaaaatattttaaataagttagaaaaacattacaaagatatgcaggacgttgagtttactgttgaaaataaaaaactttggatgcttcaaacgcgctctggaaaacgaacagcaaagtctgctgttaaaatagctgtagatatggttaaagaaaagttgattacgaaaaaagatgcaatattgcgaatagaaccaagttctttagacactttgcttcatccaactttagatgagaaagcaaacttagaagtaataggtttaggcttacctgcatcacctggtgctgcaagtggaaaagttgttttcacgtccgaggaggctgaaagactaaatagcgtgatgcaaagtaccatactagttcgtgtagaaacttcaccagaagatatacatggtatgcatgcagcaaaaggaatactgacatcaagaggaggtatgacaagtcatgctgcagtggttgctagaggaatgggacgaccatgtgtttctggatctagtgaaatagaaattgattatgaaaataaattattcaaaacaaaaaataaagtaattaaagagggagaactaattacaattgatggttcaacaggcagaataattattggagaaataaaaacagttaaaccagaaatatcaggtgatttctcaaaaataatgagttggtcagatgattttagaaaattaaaaattagaactaattccgagacaccattagatagtaaaactgctagagaatttggtgcagaaggtattggtttgtgtagaactgaacatatgttttttgacgaagaaagaattttatcagtaagagaaatgatattatcaaaaacaattgaagatcgatctaatgcactcaaaaagctattgccgcatcaaaaaaaagattttattgaaatatttaaaataatgagaggtttgccagttacagtaaggttgcttgacccaccacttcatgaatttttgccaaaaagtaataacgaaattaatgatgttgcagtttcactaaatattcctgttaaagaacttgaagttagaatttcagaacttcatgaacaaaatcccatgctaggtcacagaggttgtagattagcaatttcattccccgaaatttatgagatgcagtgtactgcaatttttgaggctttagtggaatgtaaaaaacaaagaatacaatcaactatgccagaaattatgattcctttagtttctacagaagcagaaataaaaattatgaaagaattagtcataagagttgccaaaaaagttcaagatgaaaatagaattaaaattgattttttagttggaacaatgattgaattaccaagagcagcaatcaaggcaaaagaaattgctaaacatgcagaattttttagttttggtactaatgatttaactcaaactacatttggaattagcagagatgatagtggtaaatttttaaatgattatattgaaaataaaatttttgatattgatccttttatatcaattgatgatg

SEQ ID NO: 258639 - DNA, 1426 bp, Unknown
  Bacterial polypeptide expressing nucleotide sequence isolated from the Sargasso Sea
agcaaaagagctaaaacgtaccgtaaattaaatcaaatacctggtgattggggtaccgctgtaaatgttcaatctatggtttttggcaatatgggaaatgattgtgcaacaggtgtagcttttacaagaaacccatcaactggcgaaaataaattttttggtgagtatttaataaatgctcaaggagaggacgttgtggctggcagtagaactccaagatatattacaaaaaaagccagaaaagatgctggtgcgaaagaaagttctatggaagaaacgatgcccaaggtttttaaagaattaaaaaatatatttatcaaactcgaaaaacattacaaggatatgcaagatatcgagtttactgtagaaaataataaattatggatgctccaaacacgtaatggaaaacgtacagctaaagccgcaattaaaattgctgtagacatggttaaagaaaaattaatttcaaaaaaagaagcaattttaagaatagatcctaatacacttgattcacttttacatcctactttagatgataaggtagaaaaaaaagtaattgcaaaaggtttaccagcatctccaggagctgctagtggtaaagtagtttttacggctgacgaagctgaaagaatgaaaaatcaaaaagaggatacaattttagttagactagaaacatcaccagaagatatccacggaatgcatgctgcaaagggaatattaaccgcaagaggaggaatgacaagtcatgcagctgtagttgctagaggaatgggtagaccatgtgtttctggttcagcagaaataaatatagattatgaaagtagagaatttaaagttggagatttggtgatcaaagaaggtgatactattaccatcgacggagggtcaggtaaagtaatgcaaggcattgtaccaactgtaaaaccagatatctctggatatttttcaacaataatgaaatggtcagatgattttagaaaactaaagataagaactaactcagaaacaccaaaagatacaaaaatggcgagaaattttggagcagaaggtattggtctttgcagaactgaacatatgtttttcgaggaggaaagaattttatccgtaagacaaatgattgtgtcgaaagatttagatggtagaaaagttgctttagaaaaattattacctcatcaaaaaaatgactttaaagaaattttcaaaatcatgagaggtttacctgtaactgtaagacttctggatcctccattacacgagtttcttccaaaaacagacaaagatatggaggctttggcaaggtcacttaatttaggagttaaagaaattaaagacagagtggccgaactccatgaattaaatcctatgctcggtcacagaggatgtagacttggaatatcttttcccgaaatttatgaaatgcagtgta

SEQ ID NO: 258640 - DNA, 2662 bp, Unknown
  Bacterial polypeptide expressing nucleotide sequence isolated from the Sargasso Sea
aatgtcaaaatttatatttagctttggagacaaaaagactaagaagatatctaattccagaaatattttaggaggcaaaggatcaaacctcgcggaaatggctagactaggtttgccggttccaccaggatttaccatttcaacagaaatgtgtgaaatattttatagaaataaaaaaaagctttcccctaaaacatgtatggaaataaaaaaagaattaaaaaaaattgaggctaaaacaaaaaaaaaatttggtgacaatataaatcctttattgatatctgtaaggtctggctcaagagtttcaatgcctggaatgatggatactatactgaatttgggcctgaatgataaaacagtagatgctttatctaaaaaaacatcaaacaaaagattcgcgaaagatagttatagaagatttatacaaatgtatgcaaatgttgtaatgggtgtagaaagccatcttttcgaggaattaattgataactataaattaacaaaaggtgttttgtcagatacagaattaagttttgaggattgggatggtttaattaaaaattttaaaaatttaataagcgataaaacaaataagaattttccacaggatgtatacgaacaactcttcggagctatcaaggcagtatttttgtcatgggaaagcaaaagagcaaaaacttatagaaagttaaatcatataccaggacactgggggacagccgtaaacgttcagtccatggtttttggaaatatgggagacaattgtgctactggagtagcatttacaagaaatcctgcaactggtgaaaataaattttttggagaatatttaattaatgcacaaggtgaagatgtggtagcagggagcaggacaccaagatatataacaaaaaaagcaaaagaaaatgctggcgcaacagaagcctccatggaagagacaatgccaaaagtttttaaagaattaaaaaatatatttgtaaaattagaaaaacattacagagacatgcaagatattgagtttacagttgagaataaaaaattatggatgctgcaaacaagaaatgggaaaagaacagctaaagcggcaattaaaattgcagtagatatggtaaaagaaaagttaatttctaagaaagaagcaattttaagaatagatccaaatactcttgatacacttcttcacccaactttagacgaaaaaattgaaaaaaaaataattgccaaaggtttacctgcttccccgggagcggctagtggaaaagtagtatttaccgctgatgaagctgagaggatgaatacacaaaaagaagatacaatattagtcagagttgaaacctcaccggaggatattcatggtatgcatgccgccaagggtatcttaacctcaagaggagggatgacaagccacgccgctgtggttgctagaggaatgggtcgtccctgtgtttctggatctggtgaaataaatatagattacgatgcaaaagaatttaaagcaggagatcttaccattagagagggagacgttataacaattgatggcgcatcaggcaaagtaatggagggtttagttccaactgtaaaacctgacatatcaggctatttctcaacaataatgaaatggtctgatgaatttagaaaattaaaaataagaacaaatgcggaaacgccacaagacacaaaaatggccagaaactttggagcagaaggtataggtttatgtagaactgaacacatgttctttgatgacgagagaattttatcagtaagacaaatgattttatcaagacatttggatgatagaaaaattgcattagataaattgctcccttatcaaaaaaatgattttaaagaaatttttaaaattatgaagggtttgcctgtaacagtaagacttttagatccgccattacacgagtttcttcctaaaacagataaagacatggaagaagttgctagatcactaaatttaggagttaaagaaataaagaatagagttgcagaattacatgaactaaatcccatgttaggacacagagggtgcagacttggaatttcctttccagaaatctatgaaatgcaatgtagggcaatttttactgcacttatagagtgtaaaaaagaaaagattcagtccatcataccggagataatgatacccttggtttcaacagaagatgaacttggaataatgagaaaattagttaatcgtgttgcccaagaggttcaaagggaacataaagtaaaaataaattattttgttggtacgatgatcgagttacctcgtgcagcacttagagcagccccaatatctaaatatgctgatttttttagttttggaactaatgatttaacacaaacaacattcggcataagccgtgacgactcaggaaagttcttaaatgactacttagaacataagatttttgatggcgatccgtttgtcagcatcgacagagatggcgtaggagagctggttaaaattgcatcacaaagaggaaaaaaacagaataaaaaacttaaactgggaatttgcggagaacatggcggagacccaagaagtatagagttttgttctaaagctggattaaattatgtatcctgctcacctttcagagtcccaattgcaagattagcagcagcacaagccgcacttaggagataa

SEQ ID NO: 258641 - DNA, 1594 bp, Unknown
  Bacterial polypeptide expressing nucleotide sequence isolated from the Sargasso Sea
aggtcagaaaaaagtgtgaaagctgtagttcagcttgcggtagatatggtctcaaatagatttataacaaaaagggaagctttgatgaaggttgatcccttggctttaacagattacctccatccacaaatagtggagacagaagatcttaaagtaatatccaaggctgtttcggcaagcccaggagcagcaacgggaaaaatagtttttaattcaaacctagctttagagttaacatccagtggtgaaagcgttattttagtaatgactgaaacaggacctgaagatgtcaaaggtatgcaagtttctaaaggtgttttgacggttaggggtgggatgacatctcacgcagctttaatagctagaggattaggaattccgtgcgttgtaggagcagtagatcttagaattaatcttgtagataaaaaattatacttgaaggccgggcaaacactttcagagggtgaagagattactattaacggcactactggagatataatagagggcgaatgtgagacaaaagcccctgaattaacaggtgcattttcggatcttctaagttgggcggatgacaatagaagtcttaaggttagagcaaatgctgatacacctaaagatgcagccctagcaaagaaatttaatgttgatggaataggtttgtgcaggactgagcatatgttctttaagaaggaaaggcttctaataatgcaagaaatgatttttgcagaggataaagagcaaagattctcatcattagataagcttttgccaatacagagaaaagatttcattcaactttttgaagtaatgagtgggcagcctgttgccattagacttctagaccctccgcttcatgagtttttgccaaaagacactgaacaattatcaattctagcaaaaaaaataggtgtggaattcaaatatatttcacgtcgtagccgagaattaaaagaggtcaaccctatgcttggtcaccgaggtgttaggttaggtattaccatgccagaaatttatcaaatgcaagttagagcaatttttgaggcaacatcacacgtactaaaatcagggacaggtttagttatcccagagataatgtttccattagtttcggctaataaagagattcagctattaagtaagatgattcgagaaattgcggaagaagtttatgttaatcatggtgtggaatttagctacaaaattggtgcaatgattgaaacccctagagctgccttaagggcgggagagattgctgagtcaacggattttattagctttggaaccaatgatttgacgcaaatgacttatggcttaagtcgagatgattcaggaaagtttttgaacgaatatattaacgctgaggtatttaatgaagatccatttttatctttggatcaggtaggagttggagaattaataagactagcttctacaagaggtaaaaaatcaaataaaaacttatcagtcgcattatgtggggagcatggcggtgacccaaaatcaattttttattgcaagatgctaggcttaaactacgtttcatgttctccttttagagtgccaatagcaaggttagcagcagcacaagcag

SEQ ID NO: 258642 - DNA, 1020 bp, Unknown
  Bacterial polypeptide expressing nucleotide sequence isolated from the Sargasso Sea
acaattactaggtgcgataagtgcagtatttctttcttgggagagtaaaagagcaaaagtttatagaaaattaaatcagataccttctgaatggggaactgcagtaaacgtacagtcaatggtatttggaaatatgggaaatgattgtgccactggtgtagtttttacaagaaatccttctaatggatcaaatgatatttacggagaatatctgattaatgctcaaggtgaagatgttgttgctggcacaagaacgccacagtatataactaaaaaagcaaaaaaagaggctaaagttaaagaatcatccatggaagagtcgatgcctaaagtttattcagagttatttaaaatcttaaaaaaattagaaactcattataaagatatgcaagatgtagaatttacagttgaaaataataaactctggattttacaaacacgttcagggaaaagaacatcaaaatcagctgtaaaaatagcagtagatatggttaaagaaaaattaattacaaaaaatcaagctatattaagaatcgacccaaactctttggatactttacttcatccaactttagatgagaaaagttctattcaagtaattgctaatggtttacccgcatcacctggtgctgcaagcggtaaagtagttttttcttcagaagaagctcaaaggttaaatgatatgatgcaagatgttatattagtaagagtagaaacatctccagaagatattcaaggaatgcacgcagctaaaggaattttaacagctagaggaggtatgactagtcatgcagcagttgttgcaagaggaatgggtaggccttgtgtttctggttctagtgaaattgatatcaattatgaacaaaaaatttttaaaacttcatctaccgaagttaaagaaggtgatataattaccatagatggttctactggaagaattattataggagatgttccaactgtaaaacctgaaatttcaggagatttttcaaaattaatgagttgggctgacaatgttag

SEQ ID NO: 258643 - DNA, 946 bp, Unknown
  Bacterial polypeptide expressing nucleotide sequence isolated from the Sargasso Sea
ctttgtaggactgagcatatgtttttcgatgaagaaagaattttatctgtaagagaaatgatattatcaaaaacccaagaagatagagctagagctcttcaaaaacttttaccacaccaaaaaaaagattttattgaaatatttaagatcatgcatggacttccagtaacggttcgattacttgacccacctttgcatgaatttttaccaaaatctaataaagaaatttcagaagttgcaaatgttgttggaacaaatgtgaaagaattagagtctagaattgaagaattacatgagcaaaatccaatgttaggtcatagaggttgtagattgggtatttcatttcctgagatttatgaaatgcaatgtagggcaatttttgaagccctgtcagaccttaaaaaaaaaaaactaaaatttgcatttcctgaaataatgataccactagtatcaacagaagctgaaataaaaatcatgaaagatcttgtaattaatactgcaaaaaaagttcaaaaggaaaaaaatgttaaaatagaatttttagttgggaccatgatagagctacctagagcagcaataaaagcaaaagatatagcaaaacacgctgagttttttagttttggaactaacgacttaactcaaactacctttggaattagtagagatgatagcggtaaatttttaaatgattatattgataataaaattttttcgatagatccatttatttcaatagatgagggagttaaggatttagttaaaatagcagttgaaaaaggacaaaaacaaaataaaaaaattaaattaggtatttgtggcgagcatggtggggatcctgaaagtatttatttttgctctaaagttggacttaattatgtttcttgctctccatatagagttccaatagctagactagctgctgctcaggctgaaataaaaaaataaa

SEQ ID NO: 258644 - DNA, 1783 bp, Unknown
  Bacterial polypeptide expressing nucleotide sequence isolated from the Sargasso Sea
aaatgcaatacggggagattggggtacagcagttaatgttcagtctatggtatttggaaatatgggtaatgattgtgctacgggtgtagcttttacaagaaatccatctaccggggaaaataaattttttggagaatatttaatcaatgctcaaggagaggatgttgtagcaggtagcaggacaccgagatatataacgaagagagcaagagagaaagctggtgttaatgaaaaatcgatggaagaaactatgccaaaagtttttagtgaattaaaaaaaattttcttaaaactagaaaaacattataaagatatgcaagatatagagtttacagttgaaaataaaaaactatggatgttgcaaactcgaaatggaaaacgtactgcaaatgccgctattaaaattgcagtagatatggttaaagaaaaattgataacaaaaaaagatgcaattataaaaatagatccaaacacacttgacacgcttttacaccctacattagacgaaaaggttgaaaaaaaagtaatcgcaaaaggtttacctgcatctccaggagccgcaagtggtaaagtagtttttacagcagatgaagctgaaagaatgagtaatcaaaaagaagatacaattttagtaagattagaaacatcgcctgaagatattcacgggatgcatgctgctaagggtatattaactgctagaggcggaatgacaagtcatgctgctgttgtcgctcgaggtatgggtagaccatgtgtttcaggttcagctgaaattaatatcgactatgaaagtaaagaatttaaagttggagacttggtgatcaaagaaggtgatactattaccattgacggagggtcaggaagagtaatggagggaatagtcccaactgtaaaacctgatatctctgggtatttttcaacaataatgaaatggtcagatgattttagaaaactaaagataagaactaactcagaaacaccaaaagatacaaaaatggcgagaaactttggagcagaaggtattggcttgtgtagaactgaacatatgttttttgaggaagaaagaattttatctgtaagacaaatgatagtgtcaaaagatttggacgggagaaaaattgctttagagaaattattacctcatcaaaaaaatgattttaaagaaatattcaaaattatgaaaggtttaccagtaactgtaagactcttagacccaccattacatgaatttcttccaaaaactgataaagacatggaagatttggcaagatcacttaacctaggtgtaaaagaaattaaagatagggtggcagaactgcacgaattaaatcctatgcttggacacagaggatgtagacttggaatatctttccctgaaatttatgaaatgcaatgtaaagcaatttttacagctctaattgagtgtaaaaaagaaaaaatacaatccgtaatacctgaaattatgatacctcttgtttctacagaagatgagcttggcattatgagaaaattagtagacgaagtagccaagaaagttcaaaaggaaaataatcttaaattagaatactttgttggaacaatgatagaattaccaagagcagcattgagagcagcgcctatatcaaagtatgctgacttctttagttttggtacaaacgacttaacgcaaaccacgtatggtataagtcgtgatgactctggaaaatttttaaatgattacctagatcacaaaatttttgatactgatcctttcgtaagtatcgataaagacggagtaggggag

SEQ ID NO: 258645 - DNA, 1391 bp, Unknown
  Bacterial polypeptide expressing nucleotide sequence isolated from the Sargasso Sea
tgatatagcagagcagtgggcaaaaaagggtctggatgttattttagtgcggaatgaaacttcacctgaagatgtgcatggaatgcatgcagcaaaagcaattctaacggctaagggtggtatgacatcccacgctgctctggtagctagagggtggggaaaatgttgtatcgtaggctgctccgctttacaaataaattattctgagagtgaaatgcgtatagatgataaaattattaaagaaggtgattggctaactctaaatggttcaactggtaaaatttataatgggcaattaaaccttattgagcctgacttgagttcaaataaatattatggaatattaatggatatgactgatagcgtaaaaagacttggtatccgagcaaacgcagaaagccctgatgatgcaaaacaagcacgtgactttggagcaaaaggtattggtctttgtaggactgaacatatgttttttgacccggaaaggattcttgctgttagagaaatgattatagctaccgaagtttcaaaacgccgtgaagccattatgaaattattaccattccaaagagaagatttcaaaggaattttagcagcaatgtctccttatcctgtaaccatacgattgttagacccgcctcttcatgagtttatgacattaaatagccaacaaaaagatgaattagcaaaggaactagacatctctttagaagccttggaaaatagggtcagaggccttgaagaattaaacccaatgcttggacatcgggggtgccgtttaggcattgcatatccagaaataaccgaaatgcaatctcgtgcaatatttgaggcaaccgctgaattaatgaaagataaaatagaggtagcgcctgaagtaatgataccgttagtagggacttataaggaatatgaacatcaagaagaaattgttagaaaagtagcagaagaagtacgggaagaatctggagaaaacttttcttatttagttggcactatgattgagcttccaagagccgccctaacagcaaatgaaatagctgataaagcagaattttttagttttggtacaaacgatttaacgcaaacaacttatggttttagccgcgatgatataggaggctttttacctgaataccttgaaaagggaattttagatcatgatccatttcaaagcttagaccaaactggcgttgggcaacttgttcaaatgggtgtagaaaaagggagggaagtacgaaatgatttaaaaattggtatatgtggtgaacacggtggagaccctgaaagtattagtttttgtaatcgcattggcttagactatgtaagttgttcaccttttcgcgttccaattgctaggctttctgctgcgcaagctgaactaaaataag

SEQ ID NO: 258646 - DNA, 1372 bp, Unknown
  Bacterial polypeptide expressing nucleotide sequence isolated from the Sargasso Sea
gattgtgcaacaggagttgtttttacaagaaatccctctgatggattaaatgaagtttatggtgagtatttaattaatgcacaaggcgaagatgttgttgcaggcacaagaacccctcaatatatcactaaaaaagctaggcaagatgccaaagtaaaagaattatcgatggaagagtccatgccaaaagtttttaaagaacttcaaaagattttagctaagttagagaagcactacaaagatatgcaagatgtagagttcacagttgaaaataacaaactatggatgcttcaaacaagatcaggaaaaagaactgcaaaatcagcgataaaaattgcagttgatatggttaaagaaaaattaatttctaaaaaagaagcagtattaagaatcgatccaaactctttagatacaatgttacatcctactttggatgaaaaaagttcaattaatgtaatagcaaagggtttacctgcatcgccaggcgcagccagtggtaaagttgtcttcacatctgaggaagcagaaagattaactgctatgatgcaagatacaattttagtaagagtagagacttctccagaggatatacaaggaatgcatgctgctaaaggaattttgactgcgagaggaggaatgacgagtcatgcagcagttgttgctagaggcatgggtagaccgtgtgtgtcaggatcaagcgaaattgatataaattatgaaaacaaatcttttaaaacttcttcaatggtgatcaaagagggagatataattaccatagatggctcaactggtagaattattgctggaaacgtatcaactgtaaaaccagaaatatcaggtgatttctcaaaattaatgtcttgggcggatagttttagaaaattaaaagttagaacaaattctgagacaccaaaagatactaaaatagcaaaagattttggtgcagagggaataggactttgtagaactgagcatatgttttttgacgaagaaaggattttatctgtaagagaaatgatattatcaaaaacaaaagaggatcgggcaatagcattagaaaaacttttaccacatcaaaaaaaagattttatagaaatatttaaaattatgaatggattacctgtaacagtaaggttgctggacccacctctgcatgaatttttacctcgtacaaataaggagattaatgaggttgctaggatatttaaccttccagttaaagaggttgagtctaggattgaggaacttcatgagcaaaacccgatgctaggtcatagaggatgtaggctaggtatatcatttcctgaaatttatgaaatgcaatgcagagcaatatttgaagctttagcagaactaaaaaaaataaaataaa

SEQ ID NO: 258647 - DNA, 694 bp, Unknown
  Bacterial polypeptide expressing nucleotide sequence isolated from the Sargasso Sea
agcaccctggccgccgcgttctggccgaagaaggtcatcgtgcgcctgtcggacttcaagtccaacgaatacgccaacctgatcggcggcaagctgtacgagccggaagaagagaacccgatgctcggcttccgtggtgcctcgcgctacatcagcgagtcgttccgcgactgcttcgagctggagtgccgcgcactgaagaaagtgcgcaacgagatgggcctgaccaacgtcgagatcatggtgccgttcgtgcgtaccctcggcgaagccagccaggtggtcgagctgctggccagcaatggtctgtcccgtggtcaggatggcctgaaggtcatcatgatgtgcgagctgccgtccaacgccctgctggccgatgagttcctggagttcttcgatggtttctccatcggttccaacgacctcacccagctgaccctgggcctggatcgtgactccggcatcgtcgcgcacctgttcgatgaacgtaacccggcggtgaagaagctgctggccaatgccattgccgcctgcaacaaggcgggcaagtacatcggcatctgcggtcagggcccgtcggaccacccggacctggcgcgctggctgatggagcagggcatcgagagcgtgtcgctgaacccggattcggtactcgacacctggttcttcctggccgaggcccaaccggcctaag

SEQ ID NO: 258648 - DNA, 754 bp, Unknown
  Bacterial polypeptide expressing nucleotide sequence isolated from the Sargasso Sea
gaagaaatcagcgatatgattgccggttacgagtcgcctaaagagttctatatccagaaactggtagaaggtatttcaactatcggtgcggccttctcgccagagaaagtgattgtgcggatgtctgactttaagtccaacgaatacttcaacctggtaggtggttatcagtacgagccggacgaagaaaacccaatgctgggtttccgtggtgccagccgttacgtctcagaagatttccgcgactgtttcgcgcttgagtgtgaagccattaaacgtgtacgtaatgtgatgggcttaaccaatgttgagatcatgatcccattcgtacggactgtggaagaaggtcgtcaggttatagagctactggcagagcaagggcttaagcaaggcgaaaatggcctgcgcgtaattatgatgtgcgaactgccgtctaacgcgttactggccgatcagttcctcgatatcttcgatggtttctcgattggttctaacgatatgacgcagcttaccctgggtctggaccgtgactcaggcctgattgctcacttgtttgaagagcgtaatgatgcagttaaagcactgctttctatggcaattcaggcggccaaaaaacgtggtaagcacgtgggcatctgcggtcagggcccatccgatcacgaagacttcgctgcgtggctggtagagcagggcattgactcagtatcgctcaacccggataccgtagttgaaacactggttatacctggctgaa

SEQ ID NO: 258649 - DNA, 670 bp, Unknown
  Bacterial polypeptide expressing nucleotide sequence isolated from the Sargasso Sea
tttttatcccaagactgttatcgtccgtttatcggacttcaagtcaaatgaatataaaaaactgataggcggggttgagtacgagccggacgaggaaaatcccatgctagggtttagaggagtttctagatatttatccaagcaatttcatgatgcattttcgatggaatgcgaagccttaaggtttgttagaaaggatatgggacttgataatgtcgaagtaatggttccttttgtaagaacgctttcacaggctaaaaaagttatttctcttttggagacacatgggttaaaaagaggtgacaatggtctgcgtattatcatgatgtgtgaagttccatctaatgcaattttggcctatgaattcctagaatattttgatgggttttccattggttctaatgatttaacgcaactcagtttagggttggacagagacgccggtgatgaaatattagcggcagattttaaagaaagcgaccttaccgttaaaaggctcattattcaggccatcgaggcatgcttttcggaaaataaatacgttggtatttgtggtcaaggcccatcagatgatcctgatttcgctcactggttgatggataaaggaatttcttcattgtctttaaatcctgatacgataattgatacctggaagaaactagagcaataa

SEQ ID NO: 258650 - DNA, 979 bp, Unknown
  Bacterial polypeptide expressing nucleotide sequence isolated from the Sargasso Sea
ctatggccggccgatggacatcgagtgggccaaggacgggcaggatggcaagctctacatcgtgcaggctcgcccggaaaccgtgcgcagccgccaggaggccaacaccctcgagcgttttgccctcaagcaagcgggcaaggtgctgatcgaggggcgtgccatcggccacaagatcggcgcgggcccggcgcgggtcatctcctccatcagccagatggacgaagtacagcccggcgacgtgctggtcaccgacatgaccgacccggactgggagcccatcatgaagcgggcctccgccatcgtcaccaaccggggtgggcgtacctgtcatgccgccatcatcgcccgcgaactgggcattccggcggtagtgggttgtggtgatgccaccaaacgcatcgaaccgggccagctcattaccgtctcctgtgcggaaggggataccggcttcatctacgacggcgaactcgacttcgacgtggcggtgaccgaggtgggcaacatgccgcgtctgcccatcaagatcatgatgaacgtcggtaacccggacagagcgttcgactttgcccagctgccgaatgccggcgtcgggctggcccgcctcgagttcatcatcaaccggatgatcggggtgcaccccaaggcgctgctggaattcgaccagcagagccccgagctcaaggccaccatcggcaagatgatcgccggctacgagagcccgcgcgagttctacgtcgccaagctgaccgagggcatcgctaccctggccgccgccttctggccggagcgggtgatcgtgcggatgtcggacttcaagtccaacgagtacgccaacctggtgggcggccgtgactacgagcctcacgaagagaacccgatgatcggttttcgtggcgcgtcgcgctacatcgccgacagcttccgcccctgtttttgcctcgagtgcgaggcgatcaagcgggtgcgtgatgtcatg

SEQ ID NO: 258651 - DNA, 1332 bp, Unknown
  Bacterial polypeptide expressing nucleotide sequence isolated from the Sargasso Sea
tttctttaaaagaaaattctgaaatattaattacaggcagaagtatcggacaaaaaattggggcaggtatcaccaaaataatcgatagtccaaagaatatggatagagtaaaagaaggcgatgttttagtagctgatatgaccgatcctgattgggagccagttatgaaaagagcatctggcattataacgaatagaggagggagaacttgtcatgcagctataattgcacgtgagcttggtattcctgcgatagttggaacgaataatgctacaaatattttaaattcgggctcacctgttactgtttcttgtgctgaaggagaattagggaaggtttataagggaaaattggattatgagataaaagagtatgaaatatccaagctcccaaaaattcctgtcaaaattatgatgaatgtcggcaatcctgataaagcttttagtttctcaagaataccgaacgagggagtaggattagctaggcttgaatttattattaataaaatgataggcatccatccaaaggctttaattcaatactcaaaagttgataaatcaacaaagagattgattgataaaaaaatgtatggatataaagatcctataaatttttttatatcaaaactgtctgaagggatagctacaattggagcagccttcaataacaaacctgttattgtgagaatgtctgattttaaatctaatgaatatgcaaatttaatagggggtaaacagtttgaacctaaagaagaaaatccaatgcttggatttcgtggagcaggtagatatgtatccgaggcctttaaagattgttttcaattggaatgtgaggcatttaaaaaagttagaaatgagatgggtttaaaaaatgtccaacttatgattccatttataagaacattgaaagaggctaaagatgttattaatttgcttgaattaaatggtttaaaaagaggtaaagacggactaaaaataattatgatgtctgaacttccatcaaatgctcttttagcagattcatttttaaaatattttgacggaatgtctataggctcaaatgatatgacacaacttacattaggcttggatagagattcttctctagtagcagatgttttcgatgaaagagatgacgctgtaaaaatcatgctttcactttcaattgatgcttgtttgaagaagggtaaatacattggaatttgtggacaaggtccctcagatcatccagatttagcagactggttactaaagaaaaatatccaatcgatgtctttaaatcctgatacagttattgatacttggtttaagcttgcgggggaaaaaatttaaa

SEQ ID NO: 258652 - DNA, 1479 bp, Unknown
  Bacterial polypeptide expressing nucleotide sequence isolated from the Sargasso Sea
ccgtcattatcgaaaagcactacgagcgtccgatggacatcgagtggggcaaggacggccgcgacggcaagatattcatcctgcaggcgcgtccggaaacggtgaagagccaggccacgggcaaggccgagcagcgcttcaagctgaagggccaatcgaacgtgctggctaccggccgcgcgatcggccagaagatcggcgcgggtccggtgcgcgtgattcacgatccgtcggaaatggaccgtgtgcagccgggcgacgtgctggtggccgacatgaccgacccgaactgggagccggtgatgaagcgcgcatccgcgatcgtcacgaaccgaggcggccggacctgccatgcggcgattatcgcgcgtgagttgggcgtgccggccgtggtcggttgcggcgatgcgacggacgtgctgaaggaaggctcgctcgtgacggtctcttgcgccgaaggcgacgaaggcaagatctacgacggtctgctcgaaaccgaagtcaccgaagtgcagcgcggcgaactgccgccgattccggtgaagatcatgatgaacgtcggcaatccgcaactggccttcgacttctcgcaactgccgaacgcaggcgtgggtctggcgcggctcgaattcatcatcaacaacaacatcggcgttcatccgaaggcgattctcgagtatccgaacatcgatcaggacctgaagaaggccgtggaaagcgtggcgcgtggccatgcatcgccgcgcgcgttctatgtcgacaagctgaccgagggtatcgcaacgatcgcggcggcgttctatccgaagcccgtgatcgtgcgtctgtcggacttcaagtcgaacgagtacaagaagctgatcggcggttcgcgctacgagccggacgaagaaaacccgatgctgggcttccgtggcgcatcgcgttacatcgccgacgacttcgccgaagcgttccagatggaatgcgtcgcgctgaagaaggtgcgcgaggagatgggcctcgacaacgtcgagatcatggtgccgttcgtgcgcacgctgaagcaggcggagcgcgtggtcgggctgctggagaagttcggcctgaagcgcggcgagaagggcttgcgcctgatcatgatgtgcgaagtgccgtcgaacgcgattctcgccgaagagttcctgcaattcttcgacggtttctcgatcggttcgaacgacctgacgcaactcacgctcggcctcgaccgcgactcgggcatggaactgctggcagtggatttcgacgaacgcgacccggcggtgaagttcatgctcaagcgcgcgattgaaacctgcttgcgtctgaacaagtacgtcggtatctgcggccagggtccttcggatcatccggacttcgcgcagtggctgaccgatgaaggcatcgcgtcgatctcgctgaacccggattcgatcatcgagacgtggcagcaactggcgaaatcgctgaagaagtaat

SEQ ID NO: 258653 - DNA, 1146 bp, Unknown
  Bacterial polypeptide expressing nucleotide sequence isolated from the Sargasso Sea
aatgcatcgtattcagtctggcgatgtattggtatcagacatgaccgatcctgactgggaaccggttatgaaaaaagcatccgctatagttacaaatcgtggtggaagaacctgtcacgccgcaataattgcaagagaactgggtatcccagccgttgtaggatgcaataatgcgactgaaagtataattgataacggtgcggtaacagtcagttgtgctgaaggtgacgaaggctacatatatgatgggatacttgatttcgaagagactcatatcaatgtcagttcattaccggatattccagtaaaaataatgatgaatgttggtaaccccgatagagcatttagcttctcatcaatacctaatcatggggttggtttggctagactagagttcataattaatcggatgatagggattcatcctaaggctttaattgagtatgacagcatgaataaatcactaaaagcagaaattgatgaacagatggcaggatatcatgatcccatgtcattttttgttgataaacttgctgaaggtgtctcaacaattgctgcagcttttgcacccaaacctgttattgtgagaatgtcagatttcaaatcaaatgaatatgctaatttaatcggtggcgaaaacttcgagcctaatgaagaaaacccaatgattggttttaggggtgccgggagatatcttgcagaaaattggcgagattgctttgatcttgaatgcgaggcaataaaaaaagttagaaatgaaatgggattaaaaaatgttcaactcatgattccatttgtaaggacggtaaaacaggccagcgaagtaattgatcttttggctgaaaatgaattgaaacgcgatggtgatttaaaaatcatcatgatgtcagaattaccatcaaattctatattagcagaagagttcctagaatttttcgatggaatgtctataggatccaatgatatgactcaacttacacttgggcttgatagggactccagtcttgtttcagatatctttgacgaaagagatcaagctgttaaaaaaatgcttgaaatgtcgattgatgcatgtcaaaagagtggaaagtatattggtatatgcggtcagggaccatcagattatcctgatcttgcagcttggct

SEQ ID NO: 258654 - DNA, 766 bp, Unknown
  Bacterial polypeptide expressing nucleotide sequence isolated from the Sargasso Sea
cagcgtcgagaagcgcatcgccggttacggtgatccggtcgatttctacgtcgagaagctggtcgagggtatcagcaccctggccgctgccttctggccgaagaaggtcatcgtgcgcctgtcggacttcaagtccaacgagtacgccaacctgatcggcggcaagctgtacgagccggaagaagaaaacccgatgctgggcttccgtggtgcttcgcgctacatcagcgaatccttccgcgactgcttcgagctggaatgccgcgcgttgaagaaagtgcgcaacgagatggggctgaccaacgtcgagatcatggtgccgttcgtgcgtaccctgggtgaggcctcgcaagtggtcgagctgctggccagcaatggcctggctcgtggtcaggacggcctgaaagtcatcatgatgtgcgagctgccgtccaacgccattctggccgaggagttcctcgagttcttcgacggcttctccatcggctccaacgacctgacccagctgactctgggcctggaccgtgactccggcatcgttgcccacctgttcgatgagcgtaaccctgcggtgaagaagctgctggccaatgccatcgccgcctgcaacaaggccggcaagtacatcggcatctgcggccagggcccgtctgaccatccggatctggccaagtggctgatggagcagggtatcgagagcgtgtcgctgaacccggactcggtactcgacacctggttcttcctggctgaggctcagcccgcctga

SEQ ID NO: 258655 - DNA, 2170 bp, Unknown
  Bacterial polypeptide expressing nucleotide sequence isolated from the Sargasso Sea
ctggaggcttgggctgtgcaagaatacgtactttggtatcaagaactgggcatgcatgatgtgggtcgcgtaggcggcaaaaatgcatcattaggcgagatgatttcaaacctggcgaacgccggtgtgcaggtgccgggaggttttgctaccaccgccgaggcatttaatgagtttctagagcaaagtggcctagaagcgcgtatccacgaagtcttagactcgttagacgtagatgacgtaaacgcactgaccgaagcgggtaagaatatccgccagtggatcatcgacacacctttccaaggaaagctagaagaagaaatcaaaactgcgtttgtcacattacagggtgatgcaggtgaagaagcgtcatttgcagtgcgttcatcagccacggctgaagatatgcctgatgcgtctttcgcaggtcaacaagagactttcctaaacgttaaaggctatgaagccgtgcttgtggcaattaagcacgtgttcgcatcgctatttaacgaccgcgctatttcatatcgcgttcaccaagggtacgaccacaaaggcgtggcgctatctgcaggcattcaacgcatggtgcgtagtgatatcgcatcatcgggcgttatgtttactatcgatacagagtctggctttgaagacgttgtatttattaccagctcatttggtttaggtgaaatggtggtgcagggtgcggttaaccctgatgagttctatgttcacaaaccaacacttgataaaggcctgcctgctatcgttcgtcgtaaccttggtagtaagctgactaaaatggtgtactcagatgatgaagcacacggtaagcaagtgtctattgtcgatattgatgcagctgacagcaaaaccttctcgttgactgatgacgaagtaatggagcttgctaaacaggcgcagatcattgaaaaccactacaagcgtcctatggacatcgagtgggcaaaagatggcgcagacggcaaactttacattgttcaggctcgccctgaaacggtacgcagccgtgaagactcacagagcatcgagcgattccagttgaaaggtcaaagcaacattgtttgtgaaggccgtgcaattggtcacaaaatcggtgctggtgtagcgaaagtgcttgattcaattgaagagatggacaaaatccaggcgggtgatgttctggtaactgacatgacagaccctgactgggaacctatcatgaagaaggcgtctgctattgttaccaaccgtggtggccgtacttgtcacgcggcaatcatcgcgcgtgagttaggtattccagcggttgtgggttgtggtaacgcgactgacactatcaagaacggcgacaaaattactgtgtcttgtgctgaaggtgacactggttttatctacggtgacgaactagagttcgacgtagtgacgtcacgcattgacgcaatgcctgacctaccgctgaaagtcatgatgaacgtgggtaaccccgaccgcgcatttgattttgctcgcttgccaaacgcaggtgttggtcttgcgcgtcttgagtttattatcaaccgcatgattggtgtgcaccctaaagcactacttaatttcgacagccagcctgaagagttgaaagaagaaattagcgatatgattgcaggctacgagtcgcctacggaatactacatcgagaaattggtggaaggtatttcaaccattggcgctgcattctcgccagagaaagttattgttcgtatgtcagatttcaaatcgaacgaatacttcaacttagtgggcggttatcaatacgagccagacgaagaaaacccaatgttgggtttccgtggtgcaagccgctacatctctgaagatttccgcgattgttttgcccttgaatgtgaagccataaagcgcgttcgcaacaaaatgggcttgaccaatgttgagatcatgatcccgtttgttcgtacattagaagaaggtcgtcaagttatcgagcttcttgaagagcagggacttaagaaaggtgaaaatggccttcgcgttatcatgatgtgtgaactgccatcaaacgctttgcttgctgataagttcctagacattttcgacggtttctctattgggtctaacgacttaacgcagttaaccctaggtctagatcgcgacagtggtcttatcgcgc

SEQ ID NO: 258656 - DNA, 2257 bp, Unknown
  Bacterial polypeptide expressing nucleotide sequence isolated from the Sargasso Sea
cctggcggttttgccaccacagcttatgcctttaatcaatttcttgaacagagtggtcttaacgagcgtatttatcaagtgttggatggtctcaacgttgatgacgtaaacgccttggccaaagctggtgcgcaaattcgccaatgggtgattgatacaccatttcaaaccgaattcgaacacgcaattcaaacatcttatcaacagctgcaacacggttgtgctgaagatgtctcctttgcagtgcgttcctcagccacagcggaagatatgcctgatgcatcctttgcgggtcagcaggaaacgtttttaaacgtacgtggttatgctcaggtgattgaagccattaagcacgtatttgcgtcattatttaacgatcgtgctatttcgtaccgtgtgcatcagggttatgaccatcgtggtgtagctttgtctgccggtgtgcagcgtatggtgcgctcggatttatccgcctctggtgtgatgttcagtattgacactgaatcaggttttgaagatgtggtctttgttacctcatcttacggtttaggtgaaatggtggtgcagggtgcagtcaaccctgacgagttttatgtgcacaagccaacggtgatggctggtcgtcctgcagttgttcgtcgtaacttaggcagcaagttactgcagatggtgtactccaaagatttaactcatggcaaacaggttgttgttgaagatgtgcctgtagcaaatcgtcagaagttttcactgacggatgctgaagtgcaggaattggcgaaacaagccattatcattgaaaaacactacggccgtgctatggatatcgaatgggccaaagatggtcaggacggtaagctgtatatagttcaggcccgccctgaaaccgtacgtagccgcgaagacagcaacgaaatggaacgcttccagctgcaaggcacagcacccatagtggttgaaggtcgcgctattggtcataaaattggttcaggcaaagccaaagtgctggccagtatcgcagatatggatcaaatccagcctggtgacgtgctagtcactgacatgacagacccggactgggaacctatcatgaaacgcgcttcagctattgtcactaaccgcggtggccgcacttgtcacgctgcaattatagcccgtgaactggggatcccggccgtagtaggttgtggtgatgccaccaagaaaatcaaaaatggccaggacgtgacagtgtcctgcgccgaaggtgacacgggttttgtctacgacggtattttaggttttgacgtgatgacttcacgtgtagatcaaatgccagcgctaaagatgaaaatcatgatgaacgtgggcaacccggaacgtgcattctcctttgccaaattacctcatgcaggcatagggttagcccgtctggaatttattatcaaccgtatgattggtgtgcatccaaaggcgctactgaatttcgatgcccagagtgacgagcttaaagcaacgatcagtcagatgatggctggctacagctcacctgtagagttttatgtgggtaagctaacagagggtatttctactttggctgcagctttctcgccagagcgggtaatagtgcggatgtccgactttaagtcaaacgaatacgctaaccttattggtggtcagcagtacgaaccgcacgaagaaaatccgatgataggtttccgtggcgcatcacgttatatttcggcagatttccgtgattgttttgcgatggaatgtgaagccttaaaacgggttcgtaatgaaatgggctttactaatgttgaagtgatgatcccattcgttcgcacgctggaagaagctaaggcagtgattgaactcttagaagctcatggcttgaaacgcggtgaaaatggcttaaaagtgattatgatgtgtgaattgccatccaactgcttgctggctgaagagttcctggagtactttgatggtttctccatcggctccaatgacttaactcagctgactttaggcctggacagagacagtggtttaatagcgcatctgtttgatgaacgtaacccggctattaaaaagctgttgtctatggcgattcaaaccgccaaagctaaaggcaaatacgtcggtatttgtggtcagggcccttcagatcatgaagactttgcggcatggctgatggatcaaggcatcgattctgtgtcattaaaccctgatacagtattggaaacctggttgtatctggctgagaaatacggtcagtaaa

SEQ ID NO: 258657 - DNA, 1372 bp, Unknown
  Bacterial polypeptide expressing nucleotide sequence isolated from the Sargasso Sea
gtgcgtagccgcgaagatagtaatgaaatggagcgcttccagctgcaaggcacagcgccaatcgtggttgaaggtcgcgccattggccataaaattggttcaggcaaagcgaaagtgctggccagcatagcggatatggaccaaatccagccgggtgatgtgttagtcaccgacatgacagacccagactgggaacctatcatgaaacgcgcttctgctattgtcaccaaccgtggaggccgtacttgccacgccgctattatcgcgcgtgaattgggtattccggctgtggtgggttgtggtgacgccactaaaaaaattaaaaatggtcaggatgtgacagtgtcctgtgcagaaggcgacacaggttttgtctacgaaggtattttaggttttgacgtgatgacctctcgtgttgaccagatgcctgcgcttaagatgaaaatcatgatgaacgtgggtaaccctgaacgtgcattttcttttgctaagttaccccacgctggtattggtttggctcgtctggaatttatcatcaaccgtatgattggtgtgcatccaaaagccttgctgaactttgatgctcaaaccgacgagcttaaagcgaccatcagtcagatgatggccggttacagttcgccagttgagttctatgttggtaagctggtggaaggtatttcaacgctggcagcagccttctcgccagagcgggtgatagtgaggatgtccgacttcaagtcgaatgaatacgctaatctggtgggtggtcgtcagtatgaaccacacgaagaaaaccctatgattggtttccgtggtgcatcacgttatatctctgaagacttccgtgactgttttgctatggaatgtgaagccttaaagcgggttcgtaatgagatgggctttactaatgttgaagtgatgatcccattcgtccgtacattggaagaagcgaaagctgtgattgaactgctggaagctcatggtctgaaacgcggtgataatggcttaaaagttattatgatgtgtgagctgccatcgaactgcttattggcagaagagttcctagagtactttgatggtttctccataggctcaaacgacttaacccagctgactttaggtctggatcgcgacagtggcttaattgctcatctgtttgatgaacgtaacccggcaattaaaaagctgttgtctatggcgattcaaacagcgaaagccaaaggcaaatacgtgggtatttgtggtcagggcccttcagatcacgaagatttcgcggcatggctgatggatcaatgcatcgattctgtgtcattaaaccctgatacagtattggaaacctggctctatctggcagaaaaatacggtcagtaag

SEQ ID NO: 258658 - DNA, 468 bp, Unknown
  Bacterial polypeptide expressing nucleotide sequence isolated from the Sargasso Sea
gatgcttgataaaaaaatagatgaccaaaccatccgactaacacagttatctcatggaggtggttgcggctgtaaggtttcgccttctattcttagagaaatgttgtcaaagttacctccacaggcttcccaacccgaattactccttggatttgataagaacgacgatgctgccgtctacaaaataaaccaagaacagggggtggtggctaccactgatttctttatgcctattgtcgatgatccatttgaatttggacggatagctgctaccaatgccctgtctgatgtctattcagtgggcggaagtcctatcatggccttagctattgccggcttcccaacagaaaagatgtcagttcaacagatacaggaaattttaggtggtggggcaaaagcatgcgaggacgcaggtataccgatagctggaggacatactattgatgcacccgagccgatttacgggct

SEQ ID NO: 258659 - DNA, 910 bp, Unknown
  Bacterial polypeptide expressing nucleotide sequence isolated from the Sargasso Sea
ggtgacccaaatatgtcagatatgaaatgtttggggtgtggatcaaaaacaacatgggaagctctcaaccttgcaatccaaaaaaataaaacaccctcatctctagtcaatattaatagtgatgcaagtgttataaaggtaaaaaaaggacttgaaattgttcaatctgttgatttgatttcagccatagtcaatgatccatatgaattatctagaatctctttattacatgcaatttctgatttgattgcttctgcagcaactccttattctacagaagcaatttttattttgcctcctgccattgaaaaaattcagtctagagtaatttctgagctcttggaaggcattcaaagtacacttgcagatcacaaaatgaaactaactggtggacatacaatagagggtaaagaattacaagttggatttgccgttactggattcagaaaccataattttaagtttaatggacctgttataggagacaatcttattttgacgaaaaaactcggcattggttcaatattagcaggacaaatgagacaattagctaatcacaaagattatttgaaagctctgaagataatgaatgaatcaaataaatgggctggcgaaattttcataagaaataatgtttcatcaatgactgacatcacaggatttggtttggctcgtcatgcattaaatttagctaatccctatgggataaatattaattttaatagtttgcctatactttctggcgccatagagttgattcataagggcgtcaattcttctttggctgattctaatagaagggctgtaaatttctcattcattaaaaaaaatgacccaaaaaatattttctttgatccacagacaggtggaggacttttagcatcaattagtgatcaaaatctagataaaa

SEQ ID NO: 258660 - DNA, 790 bp, Unknown
  Bacterial polypeptide expressing nucleotide sequence isolated from the Sargasso Sea
accgctttgcatgcctgctcagatctttgggcttgtggggtgcctgttgcccacgcccaagcactggtcaccatcccccaggcagcgagcaaccagcaggaggacctgttgttgcagaccttggcgggcgtgcgctcagttctgcagccccaaggggctgcactgattggtggacacaccctgcaatcgcgagagccaccggatctcgacaggcccctcagcttgcagctcagcttggcgctggtgatcaatggccgtcagcacgagagtcaaaccacttggggcaagggacctttgcaagctggcgatgccttgctgctcacgcgcgggatcggttctggcgtgttgtttgcagctgccatggccggtgctgcggctcctaggtggatcgaggttgcattgacccaaatgcagcgttcccaggcaccgcttctccctgtgctgcgtcagcacggttgccatgcctgcaccgacatcactggtttcggattgctgggccacctcaacgagatgctggaggcctctgccactggtttgcaggtggttttggatgctgaggccgtgccggctttctctggtgcccttgagctgctggctcagggttggcgcagcagcttggctccggcgaatgggagagccctgcagcgttggccgcgcttgcagggtgtgagggctgaattgctcgtggatccccagacctgtggccccctcttggtggctttgccccaggagcaggctggtgcctgtgtacaaagcttggagcgtttggggtggcttgatgcaacggtga

SEQ ID NO: 258661 - DNA, 856 bp, Unknown
  Bacterial polypeptide expressing nucleotide sequence isolated from the Sargasso Sea
tccggtcgggctgcagaatatgctggataaactgaagcaggaaaataatcccaatgttctcgtgggttttgataccaacgacgatgcaggggtgtatctggtgaatctggaactggcagttgtttccacggtcgatttcatcaccccacctgtcgatgatcccttcatcttcggtcaaattgcagcggccaattcacttagtgacatctatgccatgggcggaactccatttggatgtttgaacctggtaggctttccttctgacaagttggggccggaagttttggaagggattcttgccggcgccatggaacgtgtccagactgcaggcgctgcgttgttgggaggacatagcactgaggatgaggagccaaagtttggaatggccgtcaatggtttcgtcgatccgaaaaaaatctggcggaatcaaggcgctttaccaggagaccacctgatcctcaccaagcctcttggaagtggagtgttgttcaatgccaacctcaaagggtgggtctctgagaaagccctccaggattgtacccgccaattgattgagttgaacaaaacatctgctgaaatactgaaaaaatatgaggtccatgctgcaaccgatattactggtttcggcctgacgggccatggtttggaagttgcccagggttccggagtctcccttgaaatcaaattcgaatcgctatccgtttttcaagaagctttggaaatgtatgaaaaagggatgactaccggagttaatgcctcaaaccgaagtttggtcgagaatcatattgaaatgccagactcactttcgatttccaagcaggaaatcctcttcgatccccaaaccagtggaggcctc

SEQ ID NO: 258662 - DNA, 893 bp, Unknown
  Bacterial polypeptide expressing nucleotide sequence isolated from the Sargasso Sea
gctgcagacgatggactccatcgatccggacgcgtcgatggcctgccgaggctgtgccgccaagctggcagcctctcccctgaccgcggcccttgccgagtcggggctcaactccgctgcgcagcaaccggaggatgccgctgaactgctgccagcgggaactgcaggctcaagctggcttcagagcgtcgatggctttccagctctgctcagcgacccgtggcgaaacgcccgattgaccgctctgcatgcctgttccgacctctgggcttccggagccatggtgaccaatgcccaggcggtgatcaccgttccggccctgtcgagcccgctgcaatccgagctgctgcgccagaccctgtctggcctgcaatcggcactggaacctcagggagccgcactgatcggcgggcacaccctggaggcccgtcatccgaccccggcaccggcctcgctcgggatgcaggtgaccctctgcgtcaatggtcaggtccggcggaaacacaccggaaccggctggagcaaacgaggcctgcggcatggcgaccgactgctgctcagccgtcctctcggcaccggcgtgctgttcgctgccgcgatgcagggggctgccgacgccgaggatcttgaccgtgccgagcgcatgatgggctcaagccagcaccccctcctggaggaactgctccgcgaggaaacggaacaggaggagctgcatgcctgcaccgacatcaccgggttcggcctgctcggacatctcggtgaaatgcttgacgacgactgtcgcctgcaactggatgccgtgatgatccccagcctgaacggcgctctggaactgctggaggccggtcactgcagcagcctggcccctgcgaaccgcagtgcctggcgctggc

SEQ ID NO: 258663 - DNA, 440 bp, Unknown
  Bacterial polypeptide expressing nucleotide sequence isolated from the Sargasso Sea
tgctgtttcgtcaatgacgcaactcaacgatattgcttcacaggtcgcagtatcagcgggtgcttcgggagggaccgatgttactggatttggattactcggccaccttggaaaaatggctttgacatctaacgttgacgctgtactagatgttggaaatattgcgtttcttccaggtgcgaaacaatatgcagaagatggggtaataccgggtggaacgcgacgtaatctagcatgggttgaagaccagttagacgctggctcatatgacgaaactgatttgttgttactggcagacgcacagacatcaggcggtctcatattcggggtagaaaaaaccaagtctgttgaggcttgcgcagaactgaacgaacgtggcgttaccgcaatggttgtaggtgaaacgcatgaaggaaaagggacaatacgtcttcgataac

SEQ ID NO: 258664 - DNA, 804 bp, Unknown
  Bacterial polypeptide expressing nucleotide sequence isolated from the Sargasso Sea
agcaagaattgttatatcaagttttggaaggtattaattctgctttaactatccaaggtgcaaatctcataggtgggcatacattagaatcaagaaaaatatctgaagagcctttttccttaggaatagaaagctcattaactgtaaatgggattattgatgataaaaaatatttttggcataagggaggaatgaaaaatggagatgaaattttaattagtcgacctttgggaactggaattattttttctgcatttatgaatggtcaagtaaaaccttatatacttgataatgtcttaaaagaaatgaataaaagtcagcatgagattgtcaattatattaatcaattaacaaatctaaatccacgctcaaaaattgttaatgcatgtactgatataactggatttggtttgctaggtcatttgtcagaaatgttggaatctacaaatagtgatcaattaaagatgaattcagaaccatttaaagtcactcttgaactggataatataccattatatgatggcgtaaaagaacttttagataaaggttttgaaagcacttttgcccctgcaaatcaaatttttttaaaaaatattgatggagataaaaacttaaggtttgagctcacatctaattattcttcctctaatagatccttttataatgccatgctaaaaatcttagtagacccacaaacttgtggccctttggttgtttgttgttcatcgatttattcagaaaaacttatacagcacggaccttggattaaaataggttttatttccgaaataaatacttattaaa

SEQ ID NO: 258665 - DNA, 406 bp, Unknown
  Bacterial polypeptide expressing nucleotide sequence isolated from the Sargasso Sea
aatgctcaactcaaatttaaatgcagcaaatattattagaaaagataatataacagcaataaccgatgtaacaggttttggtttagctcgtcacactcttaatttaaccaaaccatttggtgcaaaattaaatataaaaaatattcctgtaatctctggtgctcttgaacacttatctaataatatttactcatcattggcattttcaaataaaaaggcaataaattttacaagtaaaatttcgaaacaagaccacattatttttgacccccaaacaagtggtggattattagtttctgtaaatgaatttaaagctaatcaaattttagcaaaattgaaaaaaaagagtaatcatgcatcaataattggtgaagttattgaaaatcaagaaataattttaaattaa

SEQ ID NO: 258666 - DNA, 400 bp, Unknown
  Bacterial polypeptide expressing nucleotide sequence isolated from the Sargasso Sea
gaagattttgatatacatgcagcaacggatataacagggtttggttttgctggacattctctggaaatggttcaggaagaaaagcttacattgaatttttctttgaacaaaattcctttttatagagaagcaagtcaaatgtatctgaatggtttcactacaagggtgaataaaattaatcgtgaaatggttgaacagcactggtctttccctcatggaattaagactgagaaacaggaactgttacttgacccgcagaccagtggaggacttttatttgctttaccggaagaccaatccggctcagttttaagtgctcttaaaaaagcgggggtcactgcctcaaaacaagtgggattcgttagcagtttcaacaattctaagcttattttcagctaag

SEQ ID NO: 258667 - DNA, 403 bp, Unknown
  Bacterial polypeptide expressing nucleotide sequence isolated from the Sargasso Sea
aatggatgattttgatatacatgcagcaactgatataacaggatttggatttgctgctcatgctctggaaatggttcaagacaatgatttgacattaaattttaatctaaataaaattccttgttatagagaagcaagtcaaatgtacattaatggtattactacaagggcgaacaaaatcaaccgtgaaatggttgaaaaacattggtgtttccaaaacgaaactaggccagaacaacaagaattgctacttgatccgcagaccagtggaggtcttttgtttgctgtcccgaaaaaccaatcagacttagttataagtacacttcataatgcaggagttacggcatctaaacaagttggctttgtgagtaaatttaataatgtgaagctgatctttagctag

SEQ ID NO: 258668 - DNA, 550 bp, Unknown
  Bacterial polypeptide expressing nucleotide sequence isolated from the Sargasso Sea
ggggcggagattctcgtgaaacacggggcgacctcgtgcacggacgtcaccggcttcgggctcctcggtcatctcgtggagatgtgcaagggctccagcctggcggccgtgctcgatctcgacgcgttacccatcctagacggtgcggaggaatgcctgaagttgggaatcacgtcctcgttgcagcccgcgaacgtgcgcctgtcgcgagccgtggcgaaccaggaagaaatctccgggaacccgagatacccgctcatctacgacccgcagaccgccggaggtttgctcgccgcggtcgataaggacaaggccgaagcgtgcgtcgcggcgctgcgcgaggctgggtacccgaccacgtgcgtcatcggcgagacgttcgcgcatcttccagcggtggcgagcgcgccggagcaggtggtgtacgtgcaggatgccgcgcatcggttcgcgtcgacgggcgagggcgacagtctcgtgcaaccggtgacggtggagaactgcgacaccggggcgtgcgacttgccctccaagttcacgtcgacttgag

SEQ ID NO: 258669 - DNA, 394 bp, Unknown
  Bacterial polypeptide expressing nucleotide sequence isolated from the Sargasso Sea
gcaagctttcaacccaagcgcggtgacagatgttacaggatttggactcattgggcatcttatggaaatgtgtaaaaatagccgggtaacagcagaaattaatttttctgatattaagtttcttcctggagccattgagttagctaatgatggtattatgccaggtgggtcaaaacgaaatttagaatattcagaaaaattcgtagagtttagtaacgaactatctgatacacagaaactattagcttgcgatgctcaaacatcaggtggtttattaatatctttacctgatgatgaggcagatgaatttatcaaagctcttgacagcagtaatgcatccaaaataggaaatataattaatcaagatagtaatattatttcagtaaatccttaa

SEQ ID NO: 258670 - DNA, 435 bp, Unknown
  Bacterial polypeptide expressing nucleotide sequence isolated from the Sargasso Sea
aatccatgaaaatgttaaataaaaacgcagcagaaacattgcaagatttcaacccaaacgcagtgacagatgttacaggatttggactcatcggccatcttatagaaatgtgtaagaatagccaggtaacagcagaaattaatttttctgatattaagtttcttcctggaaccattgagctagctaatgatggtattatgccaggcggatcaaaacgaaatttagaatattcacaaaaattcgtagagtttagtaacgaactatctgatctacagaaactattagcttgcgatgctcaaacatcaggtggtttattaatttctttacctgatgatgagacagatgaatttatcaaagctcttaacagcagtagtgcatccaaaataggaaatataattaatcaaggtagtaatattatttcagtaaatccttgat

SEQ ID NO: 258671 - DNA, 787 bp, Unknown
  Bacterial polypeptide expressing nucleotide sequence isolated from the Sargasso Sea
ctggtgcagagcctggatttctttcccgcctttatcgatgagccttacctgttcggccgtatcgccgcgctgcacagcctcagcgacgtgtacgccatgaatgcccaaccccattcggctctggccaacatcaccctgccctggcaccacccgcgactgcagagccgggacctgcaacggatgatggcaggcgcggttcgcgagctgaatgccgcaggctgcaccctggtaggtgggcacaccatcgaagggccacagatggccgccgggttcaccgtcaatggccaggcagacccagcacagctctggcacaaacacggcgcccgtgacggcgaccgccttatcctcaccaagccgctgggtagcggggtgcaattggccgccttgatgcaggttagccgcgagccgagctccgcgttccacggcccctggctggacaccaccctgcgccatcttctgatcagcaaccatcttgctcagcaagcgctacaggggataccggtaaatgcctgcaccgacatcaccggctttgggctgctgggtcatctctatgaaatcagccagcaaagccaagttagtctgtccgtggactgccacaaggtccccttgctacccggcacgctctcgttaattgagcagggtgtggccagcactcttagtgacgccaatcgccaaatactggtgcactgccaacagcaacaaccagtggccgaagcattactcaccgcgctgtgcgacccgcaaaccgctggggggttgttattttgcctgcacgctgactatgcca

SEQ ID NO: 258672 - DNA, 789 bp, Unknown
  Bacterial polypeptide expressing nucleotide sequence isolated from the Sargasso Sea
cgacgatgcgggcatatacaagctgtccgaagaccaggcaatcgtcgtcacagcggacatcatcaccccgcccgtggacgacccgtataccttcggccagatcgcagcggcaaattcactgagcgatgtttacgccatggggggaagtccgctgacctgcctaaatctcgcaggtttcccaagcaacgaattgggtgaagaggtcttgcacgggatcatcgagggggcgctgagcaaaatcgacgaagcaggtgccgtactcgccggggggcatacgatggaagacgaggaaccgaagtttggcctggcagtcacgggaatcgttgacccgaaaagctactggccgaacgctggcgctcggaccggtgatctgctggtactcacaaagccgatcggaagtggcgccctgttcaacggcaacctcaagggatgggtgtccgcgactgcactgaagagttgcatcgaaaccatcacgactctgaatcgactcggagccgagatcgcaagggaatttgacatccacgcggctacagacatcacgggattcggtttggctgggcacactctggagatggctcagggatcgcaggtgtgtattgacctcaatgtcagtgaaattccgcttatgagcgaagcactagacatgtatgagaagggcgttacaactggagtcaataaagagaacaaaaacctgatcgaaggtcacgtctcgttcgacgcgtctgtatctaacacacaccaagaactcatggtagatccgcagacaagcggggggcttttggtcgcctt

SEQ ID NO: 258673 - DNA, 810 bp, Unknown
  Bacterial polypeptide expressing nucleotide sequence isolated from the Sargasso Sea
cttggcggaagtattgcgtccattacaaactaccttttctgactttgaagattctgacttaattgtgggtctagacgaatctgatgatgcagctatttatgcagtgtcagacgatcttgcggtcatacagactattgattttttccctcctgtagtcgatgacccttttctatatggtgctattagtgcagcgaatgcgttgtcagatatttatgccatggggggtgatgttaaatttgccctgaatgttgctggttttcctgatgatcttgacaaagaaattttaagtgaaatattcagaggtggtggtgaaaaagtaaaggaagctggtggtgtaattgttggtggtcataccataattgatcgtgagccgaaatatgggttgagtgtaacaggatttgtacatccaaaaaaaatttttcgtactaatggtgccagaccgggagatgtgttgctgctgaccaaacccattgggacaggtatcgctctcacggctaaacagaatgatatgtataatgtggatgaagtaattaaatcgatgcttctactcaataaagacgtcgctgtgttggcacgaatgtatgatgtatcagccatgacagatatcacaggctttggattggctgggcattgcttagaaatggcaaaatctagtgatgtaaagttggttatcaatgctacccatgtccctgtttttgtaggtatttttgatttaatttctgacggtataataactggtggaggaatgcggaatcttgatcaactcagtgaaggggtacataattttgcggaagaaaatcatgaaaacat

SEQ ID NO: 258674 - DNA, 911 bp, Unknown
  Bacterial polypeptide expressing nucleotide sequence isolated from the Sargasso Sea
ctggcgttgatcagtactggcgataaatatgcggtggcttcacgtggtaacttttatgctgcaggcgcctggctatggcggtggaaagacttcattgaccgacgcttcatggcgaagttcaacgatttacctgctatggaagacaacgcaagttcgccggttcattctaaagtagcgctagcgggcgaggaagctcagcaggctatttcagcaatcgctatgcgctgcggcggctgtggtgcaaaagttggtgcctcaacattaaatagagcactaagtgtcttgcggccagtggagcgcgacgatgtagtgatcggcttacatgctcctgatgatgctgcggttgttcgcgtgcctcatggcaaagctgtggtacactcagttgacttctttcgttcatttattgatgacccctatatctttggacaaatcgcggcgaaccatgccctcggcgatatctttgcgatgggcgccgaagcacagtcttcgaccgctattgcaactgttccacaaggcctcgaatccaaagtagaagacaccctgtttcaaatgatgtcgggcgctatcgatgtcctcaatgatgccaactgcgccctagttggaggccacaccggcgaaggccaagaacttgcattgggcttcgctattaatggtctgattgatgatcgatcggataagataatgcgtaaagggggtatgtgtcccggtgacgtcttgatcctgacgaagcctatcggcaccggtactttgtttgccgcgcacgctcgcctcgaggctaagggtcgttggatagacgatgctctacaatcaatgcgccactcgaatcgtttggcggctgaatgcatccgtcggttcggggcaactgcttgcacagatttgacaggatttgggttgctggggcacttggttga

SEQ ID NO: 258675 - DNA, 930 bp, Unknown
  Bacterial polypeptide expressing nucleotide sequence isolated from the Sargasso Sea
aataaattagatttaatagaaactaaatcagatgaccctattgatataggattattaaattctagtaaaactttaatacaaagtgtagatggattcccttctttaattagtgatccatggctaaatggcaggcttttggcttttcattcttgctctgatgtatgggcatgcggaggatctgtgatttctgcacaatcagttgttaacttgccatccatacccaatgatttacagcaagaattgttattccaagtattggaaggtattaactctgccttaaatattcagggagcaaaacttataggtgggcatactttagaatcaagaaaaatatttgaggagcccttctctctaggaattgaaagctcattaactgtaaatggaattattgctgataaaaaatatttttggtctaagggaggaatgaaaaagggagatcaacttttaataagccgccctttggggactggagttattttttctgcatttatgaatggccaagtaaaacctgatctaattgactctgttttacaagaaatgaataaaagtcagcatgtaattgtagattatattaatcaattaccaaagataaatccaaactcaaaagttgttaatgcatgtacagacataactggatttggtttgcttggtcatttgtcagaaatgttggaatctacaaatagtgatcaattaaagatgaatttagcacccttgaaagtagttcttgatctggaaaatataccattatatgatggtgtaaaagaacttgtagataaaggttatgaaagtactttagccccttcaaatgaaatttttttaaaaaatattaatggagataaaaacttaagatttgagctaacctctaatgatttttcatcaaatagatcgctttataatactatgctgagaattttagtagacccacaaact

SEQ ID NO: 258676 - DNA, 583 bp, Unknown
  Bacterial polypeptide expressing nucleotide sequence isolated from the Sargasso Sea
caccctcacggtgaacggcaacagcccccaatcgccctggctgaaaacaggactgcgcccaagagatgccctgctgatcagtcgccccctgggcaccggggtgctgtttgcaggggccatgagtggcgccaccagggcggctgatctggatactgcacttcagaccatggcccgcagccagcacacgctgcttgaccagatcgagccgatccgcggaagcattcacgcctgcaccgacatcaccggtttcggcctgcttgggcatctgggcgaaatgctccagaacagtccaggactgaccatcgaactggagggttctgccatcccggcataccccggtgcacttgagctgttcgaacgcggcatctccagcacgctggccccctcgaaccgtgctgcctggcgatggctcgaaggcccggttcagctaagagaccacgcgtccccggccttgctcgaactgctggtggacccacagacctgtggccccttgctgctggcctgcaccagcaaagccgccgctcaactcactcggaacggcccatggcttcagatcggcaacgcaacagccgcgcatgactga

SEQ ID NO: 258677 - DNA, 514 bp, Unknown
  Bacterial polypeptide expressing nucleotide sequence isolated from the Sargasso Sea
ctgctgctgagccgtcctctgggcaccggcgtgctcttcgctgccgccatggcgggtgcctgctcacccgaggccctcgacacggtgcttcagcagatggccagcagtcagcaccggttgctggatcaactcgagccccatcgccaggcgattcacgcctgcaccgatgtcaccggattcggactgctcgggcatctgggggaaatggtgctaagcagctccccactgcggatcacccttcaaaccgacaatattccggcgtaccccgatgcaatggatcgattggctcagggctatgccagcagcctggcaccggccaaccgcaaaagctggcactggctggatggggcgatccaactggatgaggcaccctcgcaagcgctgctggagctgctggtggatccccagacctgcggcccattgctgctggcctgtcctgagaccacagcgcattccctcatggtcgaggggccgtggatcccgatcggcaacgcaacagccgaccatggctgag

SEQ ID NO: 258678 - DNA, 1195 bp, Unknown
  Bacterial polypeptide expressing nucleotide sequence isolated from the Sargasso Sea
agctgcctggatcacccgctgcgcccctggcggccgcagcgcgaggcactgcagctgatcggcgatcagcagggccgggcctgggcacgccggggacgctggcagctgggaccctccagatggctctggcagtggaagcgacggatcgaccgacgcttcatggcgggtttccgcagcagcgagccgatgactgcatcagaaccgatggcctgccgggggtgcgcagccaagctgccggcacagcccctcgcagccgccctggaccaggccgggctcagcgggccaccggaggatgcggcacgcatcgagggcgatccgccgctgctgcagagcgttgatgggtttccggcgctggtcagcgacccctggctgaacggtcgactcaccacccttcatgcctgctccgatctctgggcgagcggtgccagggtcgacagcgcccaggcgatcgtgaccctgcccgtgctggaggcggcggagcagcaggaactgctggtgcagacgttgtgcggtgtgcgatcggtgctggaggagcagcaggcgcagctgatcggaggacacaccttggaatcccgcagtgaaccgccgcactgccccagcctgggagtgcagctgagcctctgcgtcaacggtcgcagcgcttccccctggagcaaggggggaatcgcccacggtgatgtgctgctgttgagtcgccccctgggcaccggcgtgttgttcgctgctgcgatggcgggtgcctgccagcccaaggctttggacaccgtgctcctgcagatgtgccgcagtcagcaccgattgctggatcaactggagccccatcgccaggcgattcacgcctgcaccgatgtcaccggcttcggcctgctcgggcatcttggggaaatgctggcgagcagctcccccctgcgagtcaccctttggaccaaccgcattccggcataccccacggccatggatcgcttggctcagggctatgccagcagcctggcgccggccaaccgccgcagctggcaatggctggatgggcccatccaactggatgagtcaccttcgcaggcactgcttgagctgctggtggatccccagacctgcggtcccctgctgctggcctgtccagaaaccacagcgcagaccctcacagccgagggcccctggatcccgatcggcaacgcaacagccgaccatggctgag

SEQ ID NO: 258679 - DNA, 802 bp, Unknown
  Bacterial polypeptide expressing nucleotide sequence isolated from the Sargasso Sea
ccttggggatattttcgccatgggcggcgatccgcagaccgcgctggcggtcgcgaccgtgcccttcggcatcgaatccaaggtagaggatacgctgacccagatgatgagcggcgcgatggagatcctgaacgatacgaactgtgctctggtcggcgggcataccagcgaagggccggaactaagcctcggtttcgccgtcaacggcctgatcgacagggacaagatcatgcgtaagggtggcttgaagcccggcgacaagctagtcgttactaagcccatcggcaccggcaccctgtttgccgccgacatgcgtcacaaggcgaagggccgctggatcgcgtccgcgctagatcacatggtgatgtcgaatcggctaggcgcccaatgtctagtcgagcacggcagccgcgcggcgaccgacatcaccggtttcggattgttaggccatctggttgaaatggtacgtgcatccgaagtcgacgtggtgttggacttgaattccgtgccgctgatggatggggccgaggacacggcgaaagccggcatcctgtcgtcgctccagcctcagaacgtgcgtttgcggcgcgccgtggctaatcccgaggaggccggcaaagaccctcgctatcccctgatctacgatccgcagaccgctggcggcctactcgccagtgtgccggccgaaaacgccgatgcctgcgttgcggggctgatagaacttggttacgcacgcaccatgattgtgggcgaagtgttagagcagtcggagcgcctggagccgattacggtgcgggtttag

SEQ ID NO: 258680 - DNA, 655 bp, Unknown
  Bacterial polypeptide expressing nucleotide sequence isolated from the Sargasso Sea
tctcttatcggagggcactcagcagaatccgaagatttaacttttggattgtgtgtcaatggctttgcgacgcgagataaggtgcttcgcaaaagtggcatggagaaagacgatgtgctgattttgacaaaacctttgggcactggaaccttgcttgcagcagatatgcgttcgaaagcttcacacttccatatgcagaacgctttgaacgagatgacaatgtcaaaccaggcggcatcatcgatcttttcaagaataaaggcaactgcatgcacagatattacgggttttggcctggccggacacctgatagagatgctagtcaaagacaatgtcgaggtatcaatcactttaaacgacataccaattatggatggcgcattaaacagtttgaaacaggggattttcagctcactccacgcggataatcgggcagtctcttcctatatttcagaccagcgcaatctggaaaagacagcccaatacgaaatactttttgatccccaaacatcgggaggcttgcttgcaagtataccttctgaattcgccgaaatatgtctaaatcagttattagacgcggggtatcagggcgctaaagttattggccaggtatccaatatcaacacagacgagccaaagattttcatcgaataag

SEQ ID NO: 258681 - DNA, 523 bp, Unknown
  Bacterial polypeptide expressing nucleotide sequence isolated from the Sargasso Sea
tattacaaagcctttaggaaacggaatattgatctcagcagcaaaaaattcaaagatagatttatcagaacatccaaactgcttaaaatttatgacagaactaaataaaattgcttcagaaattgcggtagatatgaatatcgaagcatgcacagacataacaggatttggtttaattggtcacctgaaaaatatacttagagctagtaatgtttctgcaaagatagatttcgcaaatatacctatattagatagtgttaaaaaattatcttctgaagaaaattggtcatcaggtttaataaataatgagaaagccttagagcataacattatttggaataaatcaatttcagaatcagaaaagaaaatcctttttgatcctcaaacatctggagggctactctttactgtagataaatcaaagtctattgaatttcaaaggaaattatcaaaaaataatttggaggtcagtaaaattggaataactgttgaaaaaactaactatgaaatagaatttttataa

SEQ ID NO: 258682 - DNA, 631 bp, Unknown
  Bacterial polypeptide expressing nucleotide sequence isolated from the Sargasso Sea
attgggtggtcatagtattgacgataaagaaccaaagtatggcttttctgtaacagggattattaaagacaatcctttgcttaacaacagcatctcggataaagatagcctctatataacaaaaccactaggcataggaatcatagcaacagcaattaaaaaagatattgcatcagaggaagaaattttagaagctacaaatactatggttggactcaacaaagaggcacttaggtttgcaaaagatcataatgcaaacgcactaacagatataacaggttttggcttgcttggtcacttatcagaaatgataagagatacaaagctatcggcagaaataaactcggagaagatccctgtaatcaacggagtaaaagagcttcttggaaaagacatatatccctcaggtagtcaaagaaactttgcttctgtaaaagataagctaatttacaaaattgaagatgaaaaaattaaactattttgtgatgctcaaacaagcgggggattattgatttctctccctagtaattcagcaattaatcctaaagaagttaaacaaacttacggaattgatatttgggaaataggcgaaataaatactaaatataatgaaaagataaatattatttaa

SEQ ID NO: 258683 - DNA, 538 bp, Unknown
  Bacterial polypeptide expressing nucleotide sequence isolated from the Sargasso Sea
gctgaaattggagatgcattggtcctaacgaaaccattaggcacaggaatcatagctacagctataaaaaaaggattagcatctgctagcgctatagatgctgcaattgatatgatgactacattgaacaaacaatctgctgaaacacttaaggaatttaatgttaatgccgttacagatgtgaccggatttggccttcttggacatttaaaagaaatgtgtgatggtagtcaagtttcagcagaaatacagttttctcaacttatatttttaccatccgttatggactatgcaaattcaggtataattccaggagggacaaaaagaaatctagattatttaaaccggtatgtttctttcgataaacgaattagcaatactgaaaaacttctaacagcagatgcacaaacctcaggcggactattagtatctctacccattgaggaagccaaattattcatccaaaaaatgaatggttctagttttataataggaagaataaaagaaaaaaactcttttttaattaaggttaaataat

SEQ ID NO: 258684 - DNA, 550 bp, Unknown
  Bacterial polypeptide expressing nucleotide sequence isolated from the Sargasso Sea
gatatttatgcaatgggtggcaaaccattatttgcattgaatatactaggcttcccagtaaacgattttcctaaggaaatagtttcaaaaatcttacaaggtggggctgataaagcaagtgaagctggtatctctattgttggcggacatagtattgatgataaagaacctaaatatggattagttgtaactggtgaagtcttaaaagatgatcttatacaaaataaaggagctaaaccaggagatgtattattattaacaaaaccccttggaacgggaattattagcacaggaattaaaaaggaaaaagcaaatccagattcaataaagcaagcggaagactctatggcaactttgaataaacttgcgggttcaatattatcaaaattttcagttaatgcagctacagatgtaactggttttggattgcttggtcatgccgcagaaatgtgcaaaagtagcaatgtatcttttgagattaattataatgatataaaattcttttctggtgtaaatgaattggccaaacaagatattgtccctggtggct

SEQ ID NO: 258685 - DNA, 694 bp, Unknown
  Bacterial polypeptide expressing nucleotide sequence isolated from the Sargasso Sea
gtggtcagaatcggcgaataacggtggctgggtagtagcaggcggccacacagttgacggacccgaaccgatgtatggaatgtctctagtaggtgaaatcgacgagaatgccgctctcaccaatagcggcggacgcgaagggcaagcattggttttgaccaaaccactaggaacaggcctgcttgctactgctctcaaacgttccgaaccagaggcaatccaagatggaggccgactacaacagatctacacagcgggtgtgcgtgagatgacgcgactcaatgcagctgctgctgaagccgcccttcaagccgaagcgtcagccgccactgacgtcaccggcttcggactgcttggacatttacacgagttagtttccgccagtggactgtctgcgttcattgagagcgaggtcgtaccgaggttgcctgatgttgctgatctcgttgacgaaggctttgtagctggaggtaccgaaaggaatcttgactatttagagccccacttgtcaggcgggtcaccgactgaccgtctgatcatgtgcgatgctcaaacttccggcgggcttttgttttcttgcgatccggccgcagctatggaagccgtgactgagttgcgaaatggcggtcatatggcagcagtgatcggcgggctggaaagcggcacgccaggacaaataactcttagaaactga

SEQ ID NO: 258686 - DNA, 825 bp, Unknown
  Bacterial polypeptide expressing nucleotide sequence isolated from the Sargasso Sea
aggtgttattgatattggtaatgagatcagagtatttcagactgtagacttttttactcctatattagataacccatttgattggggaaaagttgcagccgctaacgcattatctgatatttatgcaatgggcggaaccccaatatcttccttacaacttgtttcatggccaagagaagatttaagttttgaaatattgtctgaggttttaaaaggtggtttagagatcatgcaaagtgctggttgtaacatcattggaggacacagtatcgacgacaaagagccaaagtatggttttgctgtaacaggaataatcaatgatgttatttataaaaaaagaaatcttcaagtaggcgataaactttttttgactaaacctttaggttccggaattatctcttctgctataaaaaagaatatagcaagtgaaaaagcggtatctgaagtaactgaagtaatgacaacactaaatgacaaagcactagaagctgccaaagaattaaatgcaaatgcaataacagatgtcacgggttttggactattagggcacttaattgaaatgattggagattctgaagtgacagtaaatatatattcagataacgtacccgtcattgaacacgcaaaagaatatttcaacaatggggtttatccttctgggtctaaaagaaattttgattcagctaaagaaaatataatttatagcgatgatcaagaatcttttgtaaaaattttatcagatgctcaaacaagtggtggtttactaatttcagcaccaaatgataattcaattgatttagatgatatatctgacaggcttggatc

SEQ ID NO: 258687 - DNA, 715 bp, Unknown
  Bacterial polypeptide expressing nucleotide sequence isolated from the Sargasso Sea
gatgcaaacaaaccagttaactcatattttggcaggcgcgttgctggcacatagtcaagctggcgtgcgcgtggttggcggtcatacaagtgagggtggtagtttgtctgttggctttgccataaccggcttcaccgacaaattaccagctgaaattatactgaataaagatgaagatttacggatcattttgaccaaaccactcggaatcggtgtgatcatggccgcgcaaatgcaaatgcgagtaaacgctaactcggttgatgatgctattgctactatgtaccagagcaacaggcaggcggcagatatttttatgcaaaataatattatcgcggcaactgatgtaactggatttggtttggctagacatgcgcaaaatctagcggtgcgtgcaggcatttcaggatgcgcgattgatcttgacgcattgcctcttttggctggtgtaacgcgtctctttgatgctggaataaaatctagcctacatgagcaaaaccaactcgctgtgaccatccacgatgataagactcagtatgaaagccgcagagctgttctttttgatccccagactagtggtggtctactcggggtgtttagattaaaggatgccgaaaatgcattaagcgcgctggtcaagacaggccataaggcggcggcgatcggtcagcttgacagacaatttgttggtatcaagttgacaaacgggagataa

SEQ ID NO: 258688 - DNA, 529 bp, Unknown
  Bacterial polypeptide expressing nucleotide sequence isolated from the Sargasso Sea
catgaccgatacgcccacgcccaccagcagctcgccccgcctcaccagcctgtcgcacgggggcggctgcggctgcaaaatcgcccctggcctgctcgccgacctgctcaagcgcagcgcgccgctgccgttctttcccgatctgctggtcggcaacgataccgccgacgacgccgccgtttataagctgaacgacgagcaggcgatcgtcgccaccaccgacttcttcatgccgatcgtcgacgacccgttcgacttcggccggatcgccgccaccaatgcgctgtcggacgtctacgcgatgggcggcaagccgatcatggcgctggcgatcgtcggcatgccgatcaatgtgctgccgcacgacgtgatcgccgccgtgctgaagggcggcgagtccgtctgcgcggaagccggtattcccctcgccggcggccattcgatcgactcggtggaaccgatttatggcctggtggcgatcggcgtggtcgatccgcggcgtgtcaaacgcaatgccggtgcccgagcg

SEQ ID NO: 258689 - DNA, 458 bp, Unknown
  Bacterial polypeptide expressing nucleotide sequence isolated from the Sargasso Sea
ctctcaattaagtattgatacggctgttgaagtaatgagcatgctgaacaaaaatgcggtagataaacttgatggcttagatgtaaatgctgttacagatatcacaggttttggacttttaggtcacctaaaagaaatatgcgagaatagcaatgtatcatccgaaataaacttcaatgatattgaattccttccagaagttatagagcttgcagaatcagggataatggctggaggtacacgacgtaacttagaatatgcaaaagaatttgtacaattcgatcatcacctaggtaatcttaaacagctcctttctgctgatgctcagacatctgggggtcttcttatctctctgccaagaaaagatgctgaatcttatgttgaaaaaatgggcacttcatcaagaataattggacagattgttgataaaagcagtttcttcataaaagtaaattaat

SEQ ID NO: 258690 - DNA, 760 bp, Unknown
  Bacterial polypeptide expressing nucleotide sequence isolated from the Sargasso Sea
ggcaaaaccactttttgtcctaaatcttgttggatttccgagacatctgctgaccgagggaatcctggacgaaataatacggggggcgtcagccgtgacgtcatcggtgggggtgccaactcttggtgggcacagcattgacgacgccgagccaaaatacggacttgtcgcaatcggtgaagttgatcctaccctaatggtgactaacgcctcggctggggcgggagatgcgctggtactgaccaagccgatcggttctggtgtaatcgcgacagcaatcaagaatggtgaggcccctgaaaatgtcatcaaaagtgccgtcggcttcatgactcaactgaatgccgatgctgctaatgtcatggtcaccaacggggtcacggcagcgacggacgtaacaggattcggactcctagggcaccttcgaggccttatgcgcgcctcaaaagcatctgcgaaactgaacgccaacgcggtcccggtgttaccaggagcgaagatgcttgcagaagctggtcatgtacccggtggatcaaagcgtaacctcgcagacctagcatctgacgtgcacttctcgccctcggtagacgaagtgacgaagatccttttgtctgatgctcagacgtcaggtggtcttttgatgtcagttccccaagagatactcaaggacgttgagaacggcctagaaaaaacatcatgcacagctgcggttattggtcgtgtagtccaaggtcaagccggcacgatcgaagtcatctag

SEQ ID NO: 258691 - DNA, 555 bp, Unknown
  Bacterial polypeptide expressing nucleotide sequence isolated from the Sargasso Sea
tatagttcaaagtgtagattttttttcacctattgttgatgatccatatcaatttgggcaaattgctgcagcgaatgctttgtcagatatatacgcaatgggtgcaaagcctctttttgcattaaatattgtaggcttccctatcaacgaacttcccaaagaagttttatcatctattcttaaaggtggttcagataaagctgaagaagctggtatacctatagttggtggacacacaattgatgacaaagaaccaaaatatggtttagttgtaacaggtgaagttaaaaaatcaagattgatcaaaaattctggagctcaagaaggagatgccttggttcttacaaagcctttgggatctggtatcatatctacagccataaaaaatgaaatagcttcaaaagaaatgatcaatgacgtaactaactgtatgagcactctcaatgcttttgctggcgaattgatgcatgaattttcagttaatgcttctacagatataacgggttttggacttctcggccacctatacgaaatgtgtaaagcaagtaaggtaac

SEQ ID NO: 258692 - DNA, 460 bp, Unknown
  Bacterial polypeptide expressing nucleotide sequence isolated from the Sargasso Sea
aaagatgaagatagccaaattgcagtgaatgcgatgtgtcagctcaatagcataggcgccaaaattgctaagattaaaggcgtgaacgccctcaccgatgtcactggttttgggcttgcaggccacctattagaagtgtgtcaaggcgctaagctcaccgccaaacttaatctggatgcggtgccactcttgccccgcgccctcgactatctagcgcaaggctgtattcccggtggcacccatcgtaactacgacagttatggcgaacacttacccacacttaccgatcatcaaaaagccattttgtgtgacccacaaaccagtggcggtttgttagtagcggtgtcgagtgaggccgaagcagaactggtggcactacttaatgcccatcagattgagcccatctgtattggctcgctagaaacgcccacctccaccgccaatgtggtgctgtgttaat

SEQ ID NO: 258693 - DNA, 871 bp, Unknown
  Bacterial polypeptide expressing nucleotide sequence isolated from the Sargasso Sea
aaagctataattcaaaccgttgatttttttactccaattgttgatgacccattctcttttggagaaatagcagcagcaaattctttgtctgatatttatgccatgggaggaaaacctttgtttgcattaaatattgttgcttttcctaaaaatcttaacaaagatattttagttaatattctcaaagggggggaatcaaaatgtagtgaagctaaaattccaattttaggtggacatagtatttatgatgatgaaccaaaatatggtttggttgtgacaggagaaattaaaccaaatgaaataatttcaaatgataatgcaaaaattgatgaatcgatagttttaaccaaaccaattggaaccggaataatttcaactgccattaaaaaagatgtcattaataaaaaaaatatggatttggcgatttcaattatgaaaaatttaaattcaaaatcttcagaattaatgaaaaaatataatgcctctgctgctacggatgtaacgggttatggtttggttgggcacctaattgaaatggctaaaggtagtaaactaacagcaaagataaagtttaataaaataaattttattgatggtgtaaaaaatttagttgaaaaaaatattgttcctaacggaacaaaaaggaacttagagttttataaaagtagtatgatatataaatctaaactaactcataatgataaattgttgctttgtgattcgcaaacttcaggaggtctattgatatcaataccaaaaaaaaatgtgtctagttttataaatgagtgtaataaatcatcattatataatgcagtagaaattggatatttcacaaatttaaatgaaaataagtttttaatcatagaataaa

SEQ ID NO: 258694 - DNA, 562 bp, Unknown
  Bacterial polypeptide expressing nucleotide sequence isolated from the Sargasso Sea
ggcatgatgcccggggacaggctgatcctgaccaaggcattgggtacgggaaccctgttcgctgctgacatgcagcagaaggccaagggtcgctggatccaggacgctttgaaaagtatgctgttgtcaaatcgggtggcggcgtccttggtttatgaacacggcgcgacggcgtgcacggacattaccggctttggtttgctcgggcatatggtggagatgattcgcccgtcggaagtggatgtggatattcacatggaccggttgccgatcttagacggcgcggaagagaccgttgagatgggcattttgtcgagcctgcagccagctaatatccgcctgcgccgcgctattcgaaaccgtgaggatgcggtgcaatcgaaccggtttccactgatgtttgacccgcagacgtctggcggcctattggccagcgtaccggcggctcaagcggacacctgcgttgaagcgttgcacgcggctgggttcatggcagcggcggtggttggcgaggtgaagcccgaaagcgaacacttggagccagtgatgctcctcaactgac

SEQ ID NO: 258695 - DNA, 928 bp, Unknown
  Bacterial polypeptide expressing nucleotide sequence isolated from the Sargasso Sea
gctgccgtctggcggctagacgacaaccgctccctggtggtcactgcggacttcatcacaccggtcgtcgatgacgcccggacatggggtcgggtggcagcggctaacgcggtgtccgacgtatatgccatggggggccggccactgctggccctcaacctcgtggggtggaacagcgaggagctgtcgaccgaactcttgggagatgtcctgcttggagcgcaggacgtcgccgacgcgggcgggttcgtcatcgccggtggccacaccgtcgacgacccggagcccaagttcggcctggccgtcgtgggcgaagccgaccccgaccggctgctaaccaacgccggattccgcgctggagacgtgctggtgttgacaaagccactcggggtgggtgtgatcaccacggccattaaacggggcgatgctccggccgaggtggttgatgcagcggtggcctcgatgaccaggcttaacgacgaggccgccagggtggccttggccgtcggtgccaccggggccaccgacgtgaccggcttcgggttgctcggtcaccttgggcgcgccatggctgagtcgagcgttgacggcgtggtcgaggtatcgatggtgcctctgctgcccggtacccgggaattggccgaatcaggggcagtgcccggtgggagtcgccgaaacctagcgtgggcggaagatctgctggaccggggactggatcggggtgaccacggtgagttggaagctctgctgatggctgatgcccagacatcagggggcttggtcttcggggtctcctccaatcggatcgatgaggcaatggccgccctgttggcgaccggccacacagcagcggttatcggacatgtcctgtcaccggcggaagagttgtcggcagacagcgggaccgcccgcctcaggctgacctagg

SEQ ID NO: 258696 - DNA, 619 bp, Unknown
  Bacterial polypeptide expressing nucleotide sequence isolated from the Sargasso Sea
tattgatgacaaagaaccaaaatatggttttgctgtaacaggtatcgttaatgaaaaaatctatacaaaaacgaatattaaaaatggagataaactttttctaaccaagcctctaggttctggaattattgcaaccgcaataaaaaaaggcgttgccgatgaagaagcaataaatcaggtaacaaatgtaatgacaaccctaaatgatgcaggccttgaagtcgcaaagcacctcaatgcaaatgcaattacagacgttactggttttggacttcttggccacctcagtgagatgttgattgatgaaaaattatcagcaaatttgatattcgataaagttccaatcattgagtttgcaaaaaattattttcatagtggcatttatccatcaggaagccaaagaaattttgactcagtaaaagactttatctcattcgaggatcaagacgaggcacttttattagcagatgctcaaaccagtggaggattattaatttctgcacctgctgaaacagatatagatttgatagaaattgaaaaaatatatggagtttttctaaaagaaattggaaatataactgatagatataatcaaaaaataaatattattagtagttga

SEQ ID NO: 258697 - DNA, 916 bp, Unknown
  Bacterial polypeptide expressing nucleotide sequence isolated from the Sargasso Sea
ggtggtattaggatttgaaggcgctgatgatgcacctgcaataaaaattaatgatggtaaattattagtacaaactgttgatttttttacgccagtagtagataacccttacgattttggccagatctcagctgcaaattcactttcggatatttacgcaatgggtgcagacccattgtttgcactcaatatcgctggattccccattaaggatttaccaaaatcaatgctcacagaaattctacaaggtggagcggacaaagctaacgaagcggggatacctattgttggtgggcactctatcgatgacaaagaaccaaagtatggtttggtagtaactggcgaaattcatgaaaaaaaaatgtggaaaaattcaggtgcacaaccaggtgactatgtagttttgactaaacctcttggcaccggagtgatagcaactgctatcaaaaaaggaagagtttcagataaatcaattaatgcagcagtaacttgtatgtctatgctaaataaaaatgcagcaaatggtttgaaagaacttaatgttcatgcagcaacagatgtgacgggctttggattgttaggacacttggcagaaatatgtaaaggaagtaacgtttctgcagaaatttatttttctgaactagattttcttccgtcagtacttaaactagccgaatcaggtattattccaggaggaacaaagcgtaattttgaatatttaaaaagtgatataatatttaatcctaagctcaattctatcgaacaacttctaacctgcgatgcccaaacatctggcggattacttgtaacgctacccccagaagatgcagagacttatgtcagctcaatttgcagtgatgcaaaaattatcggtcatatctcagataaaaaatctaccctaattaaagttacttga

SEQ ID NO: 258698 - DNA, 687 bp, Unknown
  Bacterial polypeptide expressing nucleotide sequence isolated from the Sargasso Sea
tagagaaaattcaaagtcgtttaatctcggaactattaagtggggctactcaagaatttaattctcataatataaaattaaatggtggacacaccagtgaaggagaagaattgcaagtaggattttgcattagtggaattaggcccaaaagttttaaatcgaaagcaccaaaagtaggggataaattaattttaaccaagccacttggtacaggggttatactagcagccaacatgagactaaaaattaatcctattgaatataaaaacacaattgaaacaatgctcaattcaaatttaaatgcagcaaatattattagaaatgagagtatatcagctataacagatgtaacaggttttggcttagctcgtcatacacttaatcttaccaaaccgtttggagctaatttaagtatcaaagatattcctgtactttctggtgcgcttgaacacttgtctaataatattcactcatcattggcattctcaaataaaaaagcaataaattttacaagtaaaatttcgagacaagatcacattatttttgatcctcaaacaagtgggggactattagtttctgtaaataaagttaaagccaatcaagttttagaaaaattaaaaaaaagtaatcaccatgcttcaataattggtgaagttattgaaaaatatgaaattatattaaattaga

SEQ ID NO: 258699 - DNA, 1957 bp, Unknown
  Bacterial polypeptide expressing nucleotide sequence isolated from the Sargasso Sea
gaaacgtatgacaggtctcaaactgaaattgatttgttgaatttatgtaaattttcaaattcaaggctcgttattgataaagttattggtttagatttagatgagaaactagtaattcttgaaaatagggcaccaattatttttgacacattatcaataaattcaggaggggaaccaaatctaggctacattaaaggtgctaatgaattcagcattcctataaaaccaatctctaagttagtaaaaattattgatgttataaaagaaaagataaaaaagttaaatggaatatctatttctgttgttggaggaggagctggaggaatagaattagctttagcgctaacacagtatttaaaaacaaaacaaaatattaaagaatttaaagttaatctaatttcaaaaggccagtatttagctaaggcaaaaaataaaatttctcaaaatactattttaagttttttaaaaaataataatatcaacgtcatattaaacgaagaagttattgaatttggtgaaagtttcataaagacttcaaaaggaactataataaattcaaaatttaattttttagtcacaccaatttctgccccaacatggatatctgaaactggattaagattggataattcaggatttattagagtaaataaatttttacaaacatctaatgaaaacatttttgcatctggtgatgtaagctcttttgagaataaaaatctcccaaaagcaggtgtctatgctgtaagacaagggccaattttatataaaaacttaagagcaaaaattttaaattatagtttgacaagttttaaacctcaaaactcttttttgtcattaataggcaatggtaaagatgaagctattttttcatggaagggcatctcatttaaaagcaagtttgcttggatgcttaaaagatatattgatgaaagctttatgaaaaaatataatcatttgaatttaatgaagatggaaagtattcaacctcatccaaaattaatttcaaaagagaacaaaggagaccctgctttagaaaaaatcagatgcctaggttgtggagcaaaagccccatggacttctctaaataacggaattaattctgttgtagataatttaaattcaaagagtaataaattaaataatgtcacaattaccagtgacgccaccattatagaagtacctagtggtaacaatctagtacagtcagttgatctaatttctgctattgtaaatgacccttataccctttcaagaattgctgcaattcatgcaatatctgatgtactatctgcaagtgcgacacctatgaacgctgaagctatttttatattgcccccaggcttacagaaaattcaaagtcgtttaatctcggaactattaaatggagcttcttatgaatttaattctcataatataaaattaaatggcggacacactagtgaaggagaagagttgcaagtaggattttgcataagtggaattaggcccaaaagttttaaatcgaaagaaccaaaagttggagataaattaattttaaccaagcctcttggtacaggggttatattagcagccaacatgagactaaaaattaatcctattgaatataaaaacacaattgaaacaatgctcaattcaaatttaaatgcagcaaatattattagaaatgaaaatatatcagctataactgatgtaactggttttggtttagctcgtcatacacttaatcttaccaaaccatttggagctaatttaagcatcaaagatattcctgtactttctggtgcacttgaacacttgtctaataatatttgctcatcgttggcattctcaaataaaaaggcaataaattttacaagtagaatttcgaaacaagatcacattatttttgatcctcaaacaagtggaggactattagtttctgtaaataaaattaaagccaatcaagttttagaaa

SEQ ID NO: 258700 - DNA, 436 bp, Unknown
  Bacterial polypeptide expressing nucleotide sequence isolated from the Sargasso Sea
tatggcaactttgaataaacttgcaggttcaatattatcaaaattttcagttaatgcagctacagatgtaactggttttggattgcttggtcatgccgcagaaatgtgcaaaagtagcaatgtatcttttgagattaattataatgatataaaattcttttctggtgtaaatgaattggccaaacaagatattgtccctagtggctcaaaaagaaatttatcgtatgcaaaacaatatacaaatttctctgattcaatttctcaaatagaaagattgatggttgcagatgctcaaacatcaggagggttattaatctcattgcccaaagataatgttaataatttccttgaatattataatagcaaatcgactattcctgcttttcagattggctctgtaaatgcaagaaaaaagtctttgattaccatttcataa

SEQ ID NO: 258701 - DNA, 688 bp, Unknown
  Bacterial polypeptide expressing nucleotide sequence isolated from the Sargasso Sea
gcacgcgaagtgatccggggtggccgcgccgtgtgcgatgaagccggcattccgctggcgggcggtcactcgatcgatgcgccggaaccgattttcggcctggccgtgaccggcctggtgagcaaggccaacatgaagcgcaacgataccgccacggctggttgcaagctgtatctgaccaagccgctgggcatcggcatcctcaccacggcggagaagaaggccaagctgcgcgatgcggacgttggcctggcgcgtgactggatgtgcaccctgaacaagcccggcagccgttttggcaagctcgccggcgtgcgcgcgatgaccgacgtcaccggcttcggcttgcttggccacctggtggaaatggccgatggcagcggcctgagtacccgtgtcgagttcgcccgagtgccgcgtctggccagtgtcgaacactatctggagcagggctgcgtaccgggtggtaccttgcgcaatttcgacagttacggcgacaagatcgcgccgctgcccgagctggccaagctcctgctgtgcgacccacagaccagcggcggtctgctgatcgccgtggcgccggaaggcgaggccgagttcctcgccgtgtccgccgaactggggctgagcctggcgcccatcggtgagatggtcgagcgacagcgttacgcggtcgaggtgctctgat

SEQ ID NO: 258702 - DNA, 679 bp, Unknown
  Bacterial polypeptide expressing nucleotide sequence isolated from the Sargasso Sea
catgtcagattccccagttacactccctgaatcaatcaagctaacagaatatagtcatggtgctggttgcggctgtaaaatttcccctaaagtattaagcactatcttagcctcacagctccccgtatttaccgatccaaatctgctggtcggcaaccaaagccgcgatgatgccgcggtatacaaactcaatgatgagattggcattatcagtaccacagatttttttatgccaattgttgacgatccattcaccttcggtcgtatcgcagcgaccaatgcgatcagtgatatttatgctatgggcggcacgcctatcatggcgattgcgattttaggttggccaatcaataaactacccgccgaaatcgcacaacaagtagtcgatggcggcagacaagcctgcatggaagcagggatcatgctagccggaggtcatagcatagatgcacccgaacctatttttggtctcgcggttactgggcaaattgccttaagtgatttaaaacagaatgatacggctaaagcgggcgatcgtttatatctcactaaacctatcggcattggtattttaaccacagcgcaaaaacagaaaaaactccacgatgaagatagtctcattgcggtcaatgccatgtgccaaactcatagcataggcaccaagattgcaaaaaattaa

SEQ ID NO: 258703 - DNA, 532 bp, Unknown
  Bacterial polypeptide expressing nucleotide sequence isolated from the Sargasso Sea
atgcgatcagaggacatacgccttacccaatacagtcacggcgcaggatgcggctgcaagatcgcacctgacgtgctgtcccgcattctggcagaggcggacggcggagcccccgcaaacgctttcccgtcactactggtgggccatcagtcgagagacgatgccgcagcagtaatcctcgatgaggatcgagcggtgctctccacgacggattttttcatgccgatcgtcgacgacccctatgactttggtcgcatcgccgccactaatgccatatcagacatctacgcgatgggtggcacccctcaactggctatcgccattctgggatggccaatcgaaaagcttgcacccgagatcgcaaatcaggtagtacaaggtggtcgggatgtctgcgcgcagctgggcttcccgcttgctggcgggcacagcatcgatgctcccgaacccatttttggcctcgccgtcaccggcaccaaggcgcgagcgcacctcaaacagaatgatgccgcttgcgctcacgatctgttga

SEQ ID NO: 258704 - DNA, 865 bp, Unknown
  Bacterial polypeptide expressing nucleotide sequence isolated from the Sargasso Sea
tggtcctgatgatctaacccaggttctgggtaaagtagtacaaaagaaagattctcgagtgattgttggatatgataattccgatgatgccgccgttatacgcctgcaaggtgataagtttattattcagaccgttgatttttttacacccattgtagatgacccatatatgttcggccaaatagcggcagctaattctatttcagatatttatgcaatgggtggcaaaccattatttgcattgaatatactaggtttcccagtaaacgattttcctaaggatatagtttcacaaatcttacaaggtggggctgataaagcaagtgaagctggtatctctattgttggcggacatagtattgatgatagagaacctaaatatggattagttgtaactggtgaagtcttgaaagatgatcttatacaaaataaaggagctaaaccaggagatgtattattattaacaaaacctcttggaacgggaattattagcacaggaattaaaaaggaaaaagcaaatccagattcaataaagcaagcggaagactctatggcaactttgaataaacttgcaggttcaatattatcaaaattttcagttaatgcagctacagatgtaactggttttggattacttggtcatgccgcagaaatgtgcaaaagtagcaatgtatcttttgaaattaattataatgatataaaattcttttctggtgtaaatgaattggccaaacaagatattgtacctggtggctcaaaaagaaatttatcgtatgcaaaacaatttacaaatttcgctgattcaatttctcacatagaaagattgatggttgcagatgctcaaacatcaggagggttattaatc

SEQ ID NO: 258705 - DNA, 872 bp, Unknown
  Bacterial polypeptide expressing nucleotide sequence isolated from the Sargasso Sea
cgaagatccgaacgttcttgttggcccaccacaggggacgacgctgccgtttaccggatcaccgatgatcgtgcattggtggtaaccgccgatttcttcacgcccatagtcgacgatccatacgactttggacgcatagctgccacaaacgcactctcggacatatacgcaatgggggcaaagccactttttgtcttaaatcttctaggatttccccgacatctgctgaccgaggggatcctagacgaaataatacgaggggcgtctgccgtgacatcgtcggtaggggtgccaactcttggtggacacagtattgacgacaacgagccaaaatacggacttgtcgcaatcggtgaagttgatcctacccaaatggtgactaacgcctcggctagggtgggagatgcgctggtactgaccaagccgatcggttctggtgtaatcgcgacagcaatcaagagcggtgaggcccctgaaaaggtcatcaaaagtgccgtcgacttcatgactcaactgaacgctgatgccgctagtgtcatggtctcttacggggtcacggcagcgacggacgtaacagggttcgggctcttagggcaccttcgaggcctcatgcgcgcctcaaaaacatccgcgaaactgaacgccgatgcggtaccggtgttaccaggagcaaagatgcttgcagaagctggtcatatacccggtggatcgaagcgtaacctcgcagacctagcatctgacgtgcacttctcgccttcgatagacgaagtaacgaagatcctcttggctgatgctcagacgtcgggtggtcttttgatgtcagttcccgaagagagactcaaggacgttggggacggcctagcaaaaacatc

SEQ ID NO: 258706 - DNA, 810 bp, Unknown
  Bacterial polypeptide expressing nucleotide sequence isolated from the Sargasso Sea
agtgattgttggatatgataattccgatgatgccgccgttatacgcctgcaaggtgataagtttattattcagaccgttgatttttttacacccattgtagatgacccatatatgttcggccaaatagcggcagctaattctatttcagatatttatgcaatgggtggcaaaccattatttgcattgaatatactaggtttcccagtaaacgattttcctaaggatatagtttcacaaatcttacaaggtggggctgataaagcaagtgaagctggtatctctattgttggcggacatagtattgatgatagagaacctaaatatggattagttgtaactggtgaagtcttgaaagatgatcttatacaaaataaaggagctaaaccaggagatgtattattattaacaaaacctcttggaacgggaattattagcacaggaattaaaaaggaaaaagcaaatccagattcaataaagcaagcggaagactctatggcaactttgaataaacttgcaggttcaatattatcaaaattttcagttaatgcagctacagatgtaactggttttggattacttggtcatgccgcagaaatgtgcaaaagtagcaatgtatcttttgaaattaattataatgatataaaattcttttctggtgtaaatgaattggccaaacaagatattgtccctggtggctcaaaaagaaatttatcgtatgcaaaacaatttacaaatttcgctgattcaatttctcaaatagaaagattgatggttgcagatgctcaaacatcaggagggttattaatctc

SEQ ID NO: 258707 - DNA, 649 bp, Unknown
  Bacterial polypeptide expressing nucleotide sequence isolated from the Sargasso Sea
atgaagtcagagggcatacgccttacccagtacagtcatggcgcgggatgcggctgcaagatcgcacccgacgtgctgtcgcgtattctggcagagaccgatggcggggcctcaaacgccacgtttccttcactactggtagggcatcaatcgagagacgatgcggcggcggtcatcctcgatgaggatagagcggtgctctccacgacggattttttcatgccgatcgtcgacgatccttatgactttggtcgcatcgccgccaccaatgccatttcggacatctacgcgatggggggcacccctcaactggctatcgctattctaggatggccaattgacacgctggcacccgaggtcgccaatcaggtagtacaaggtggtcgggatgtctgcgcgcagctgggcttcccgcttgctggggggcacagcatcgatgcgcccgaacccatttttggcctcgccgtcaccgggactgtggcgcgagcgcatctcaaacagaatgatgccgcttgcgctgacgatctgttgatactgactaaaccgctcgggattggcattcacaccaccgctgagaaacagggcaaattgcagacggcgcatcgaggcctcgcaactgaactgatgtgtcaatccaatcaagtcggcg

SEQ ID NO: 258708 - DNA, 628 bp, Unknown
  Bacterial polypeptide expressing nucleotide sequence isolated from the Sargasso Sea
ggcggccactccatcgacgcccccgagccgatcttcggcctggccgtgaccggcctggtcgccaagcgcaacatgaagcgcaacgataccgccactgctggttgcaagctgtatctgaccaagccgctgggcatcggcatcctcaccacggcggagaagaaggccaagctgcgcgatgcggacattggcctggcgcgtgactggatgtgcaccctgaacaagcccggcagccgttttggcaagctcgccggcgtgcgcgcgatgaccgacgtcaccggcttcggcctgcttggccacctggtggaaatggccgatggcagcggcctgagtgcccgtgtcgagttcgcccgagtgccgcgtctggccagtgtcgagcactatctggagcagggctgcgtaccgggtggcaccttgcgcaatttcgacagttacggcgacaagatcgcgccgctgcccgagctggccaagctgctgctgtgtgacccgcagaccagcggtggcctgctgattgccgtggcgccggagggcgaggccgagttcctcgccgtggccgccgagctggggctggatctggcgcccatcggtgagatggtcgagcgacagcgttacgcggtcgaggtgctctgat

SEQ ID NO: 258709 - DNA, 892 bp, Unknown
  Bacterial polypeptide expressing nucleotide sequence isolated from the Sargasso Sea
tatgtcttccattcgtctgacccaatacagccacggcgctggctgcggctgcaaaatctctcccaaggtgctcgacaccattctcaagagccagatcccgggctttgacgacccgacgctggtggtcggcaacagcagcaaggatgacgcggccgtggtcgatatcggcaacggtcagggtatcgtctccaccaccgacttcttcatgcccatcgtcgatgatcccttcaccttcggccgcatcgccgccaccaacgccatcagcgacatctacgccatgggcggcaaacccatcgtcgccatcgccatcctcggctggcccatcaacaccctggcgccggaagtggcccagcaggtgatcgacggtggccgtcaggtgtgtcacgaagcgggtatttctctggccggcggccacagcatcgatgcccccgagcccatcttcggcctcgcagtgaccggtatcgtgccgctcaatgccatcaagcagaacgacaccgccaaggtgggtgacaccctctatctgaccaagccgcttggcatcggcatcctcaccaccgcccagaagaagggcaaactcaaaccagaacacgagcagctggcccccaacgccatgtgcaccctcaacaagattggccagcgctttgccgagctgcccggcgtacacgccatgaccgacgtgaccggctttggtctggccggccatctgctggagatgtgcgaaggttccggcgtcagtgcccgcctgaacttcaaggcgctgccgctgctggacgaggtggattactacctgagcgagggctgcgtaccgggcggtaccctgcgcaacttcgactcctatggtgacaagctggacgccatggatgatcgcacccgcaacatcctgtgcgacccg

SEQ ID NO: 258710 - DNA, 727 bp, Unknown
  Bacterial polypeptide expressing nucleotide sequence isolated from the Sargasso Sea
tttaggctggccagtaagtaaattaccgccagagctggcgcagcaggtgctggaaggcgcccgccaaacctgcaaagcggctggcattatgctggccggcggccacagtattgatgctcccgagccgatatttggtctggccgttaatggccgggtgtcgatagagcagctaaaacgtaacgacaccgccaaagctggcgacaggttgtatttaaccaagccgcttggcgtgggcattttaaccaccgcacaaaagcagaaaaaactgctgccagagcatgccatactggcgcgcgatactatggtgcagttaaaccgcatcggtgccgatattgcgaaaattgacggcattcacgccatgaccgatgtaaccggctttggtctgttagggcatctattggaaatgtgtgaaggcagcgggctttatgccgaacttgacagccatgccgtgccggtgctgccttttgtgccggactatattgccaaaggttgcattcctggcggcagcggccgcaattttgccagctatggtggtaaagtatcaccattaagcagtgagcagcaggctttgctgtgcgatccgcaaaccagcggcggcttactggtggcggtcagccctcaggccgaagcggcctttattcatctggcggtggcttacgacttggcactgcaacccattggtgaactaaaagcccgtggccgtggtcatcgcattcgtgtgcgttaa

SEQ ID NO: 258711 - DNA, 1060 bp, Unknown
  Bacterial polypeptide expressing nucleotide sequence isolated from the Sargasso Sea
catgtcgaattgtgcagtatctccaaccgatagcattaaactcaccgaatatagtcatggtgccggttgcggctgtaaaatttcccctaaagtactgaccaccattcttgcctcgcagctgcctgtatttaccgatcctaatctgctggtcggcaatcagagtcgcgatgatgcggccgtgtataagctcaatgatgagattggcattatcagtaccactgatttttttatgcccattgttgatgacccctttacctttggccgcattgctgccaccaatgcgattagtgatatttacgccatgggcggcacgccgatgatggcgattgctattttaggctggccaatcaacaaattgcctgccgaaatcgcgcaacaagtggttgatggcggtcgtcaagcctgtatggaagcaggcattatgctggctggcggtcatagcatcgatgcacctgaacctatctttggccttgcggtcacagggcaaatcgcccttacggatttaaaacaaaacgacacagctaaaactggcgatcgtttgtatctcacaaaaccgattggcattggcattcttaccacggcacaaaagcagaagaagctaaaagacgaagatagccacattgcggtgaatgccatgtgccagctcaatagcgtaggcgctaagatcgctaagatcaaaggcgtaaacgccctgacagatgtcactggctttggccttgcaggccatctgctcgaaatgtgccaaggcgctaaactcaccgccaaattaacactcgatgcagtgccgctcttacctcgcgccctcgactatcttgcgcagggttgtgttcccggcggaacccaccgtaactacgacagttatggcgagcacttacccactctaaccgattatcagaaagccattttgtgtgacccacaaaccagtggcggcttgttagtggcggtatcgaatgaggccgaagcagaactggtggcactgcttaatgcccatcaaattgagcctatctgcattggttcgttagaaacgcccacctccaccgccaatgtggtgctgtgttaa

SEQ ID NO: 258712 - DNA, 1060 bp, Unknown
  Bacterial polypeptide expressing nucleotide sequence isolated from the Sargasso Sea
catgtcgaattccgctgtatcttccgccgatagcattaaactcacagaatatagtcatggtgccggctgcggctgtaaaatttcccctaaagtactgaccacgattcttgcctcgcagctgcctgtatttaccgatcctaacctgttggttggcaatcaaagccgtgatgatgcagccgtttacaagctcaatgatgaaatcggcattatcagtaccaccgacttttttatgcccatcgtagatgacccctttacctttggtcgtatcgccgcaaccaatgctattagcgatatctacgccatgggcggcacgcccatgatggcgattgcgattttaggctggccagtgaacaaactccccgccgagatcgcgcaacaagtggttgatggtggccgtcaagcctgcatggaagccgggataatgttggccggtggtcatagtatcgatgcgcctgagccaatctttggccttgcggtcacagggcaaatcgccctgacggatttaaaacaaaacgatactgcaaaagctggcgatcgcttgtatctcactaaacctatcggtattggcattctcaccacggcacaaaagcagaagaagctcaaagacgaagatagccaaattgcggtgaatgcgatgtgtcaactcaatagcataggtgccaaaatcgctaagattaaaggcgtgaacgccctcaccgatgtcactggttttgggcttgcaggccatctattagaagtgtgtcaaggagccaaactcaccgccaaacttaacctcgatgccgtgccactcttaccgcgcgcccttgactatctagcacaaggctgtattcccggtggcactcatcgtaactacgacagttatggcgaacacttgcccacacttaccgatcatcaaaaagccattttgtgtgacccacaaaccagtggcggcttgttagtggcagtgtcgagtgaggccgaagcggaactggtggcactacttcatgcccatcaaattgagcctatctgtattggttcgttagaaacgcccacctccaccgccaatgtggtgctgtgttaa

SEQ ID NO: 258713 - DNA, 643 bp, Unknown
  Bacterial polypeptide expressing nucleotide sequence isolated from the Sargasso Sea
tatgtctgatacttttgccattaaactcactgaatacagccacggtgcaggttgcggctgcaaaatatcaccccaggtgctggataaaattctgcaatccagcctgacattttcagaccccggtttgctggtaggtaatagtagcaaagatgatgctgcagcctatgctttaggcgatggcacagccattctcagcaccaccgatttttttatgcctatcgttgatgatgccttcgattttggccgtattgccgcgaccaatgctattagcgatatttatgccatgggcggcaagccattgctggcgatcgctattttgggttggcccgtcaacaggttaccacctgagttggcacaacaggtgcttgaaggtgcgcgccatacctgcaaagacgctggcattgtgctggccggtggccacagcattgatacccctgaaccgatatttggcctggcggttaccgggcgggtagatatcaactatttaaaacgtaataacacggccaaagccggagacagactgtatctgaccaaaccgctcggcattggtattttaactaccgcgcaaaaacaaaagaagttacagcacaaccacagcgacatagcgcgtgacaccatggtacagctgaaccgtatggcgccg

SEQ ID NO: 258714 - DNA, 1039 bp, Unknown
  Bacterial polypeptide expressing nucleotide sequence isolated from the Sargasso Sea
tatgtcttccattcgtctgacccaatacagccacggcgctggctgcggctgcaaaatctctcccaaggtgctcgacaccattctcaagagccagatcccgggctttgacgacccgacgctggtggtcggcaacagcagcaaggatgacgcggccgtggtcgatatcggcaacggtcagggtatcgtctccaccaccgacttcttcatgcccatcgtcgatgatccctttaccttcggccgcatcgccgccaccaacgccatcagcgacatctacgccatgggtggcaaacccatcgtcgccatcgccatcctcggctggcccatcaacaccctggcgccggaagtggcccagcaggtgatcgacggcggccgtcaggtgtgccacgaagcgggtatttctctggccggcggccacagcatcgatgcccccgagcccatcttcggcctcgcggtgaccggcatcgtgccgctcaatgccatcaagcagaacgacaccgccaaggtgggcgacaccctctatctgaccaagccgcttggcatcggcatcctcaccaccgcccagaagaagggcaagctcaaacccgagcacgaacaactggcccccaacgccatgtgcaccctcaacaagattggccagcgctttgccgagctgcccggtgtgcatgccatgaccgacgtgaccggctttggtctggccggccatctgctggaaatgtgcgaagggtccggcgtcagtgcccgtctggacttcaaggcgctgccgctgctggacgaggtagattactacctgagtgagggctgcgtaccgggcggtaccctgcgcaacttcgactcctatggcgacaagctggacgccatggatgatcgcacccgcaacatcctgtgcgacccgcagaccagcggcggcctgctggtagccgtcggtaaagaaagtgaagccgagctccttgccattgccgcacaggcagggctgaccctctcccccatcggccagctgcaggcccgcaccggcaaccagttcatcgaggttgtccaatga

SEQ ID NO: 258715 - DNA, 1066 bp, Unknown
  Bacterial polypeptide expressing nucleotide sequence isolated from the Sargasso Sea
catgaccgaagccacccaagcccagcctgccgttccgcgcctcacgagcctgtcacatggcggcggctgcggctgcaagattgcgccgggcgtgctgtccgagctgctgaagcgcgcgacgccgcccgcgctgttcccggatctgctggtcggcaccgagacgtccgacgacgcggccgtctaccgcctcaacgacgagcaggcgatcgtcgcgaccaccgacttcttcatgccgatcgtcgacgatccgttcgacttcggccgcatcgccgcgaccaacgcgctgtccgacgtctatgcgatgggcggcaagccgatcctcgcgctcgcgctggtcggcatgccgatcaacgtgctgccgcacgagacgatcgcggccgtgctgcgcggcggcgaatcggtgtgcgcggacgccggcatcccggtcgcgggcggccattcgatcgattccgtcgagccgatttacgggctcgcggcgatcggcgtcgtgcacccgtcgcgcgtgaagcgcaatgcggccgcgcgcgcgggcgacgtcctcgtgctcggcaagccgctcggcgtcggcgtgttgtccgccgcgctgaaaaagaaccagctcgatgccgatggctatgcgcagatggtcgcgacgaccaccaagctgaaccggccgggcgccgaactcgccgcgctgccgggcgtgcatgcgctgaccgacgtcacgggcttcgggctgctcggccatacgctcgagctggcgcgcggcgcgcacctcaccgcgcgcgtgcactatgcgtcgctgccgtggctcgcgggcgtcgaggcgttcgtcgccgatggcgtgttcaccggtgcgtcgggccgcaactgggccgcgtacggcgcggacgtgcaactggccgctacgctgccgcccgtcgcgcaggcgctgctgaccgacccgcagacgtcgggcggcttgctggtcgcgtgcgcgccggaggccgtcgacgacgtgctcgcatgcttccgtgccgacggcttcgaccgcgcgggcgtgatcggcgagatggtggacgggcctgcgcgcgtcgacgtcgcgtga

SEQ ID NO: 258716 - DNA, 373 bp, Unknown
  Bacterial polypeptide expressing nucleotide sequence isolated from the Sargasso Sea
tatgactataaaatcatctcaagaactcgttgaaaacgctttacaagagataaaaacattatctgttgatgatgcattaaaactagttcaagaagataaatgtaatttagttgatataagagatatcagagaattagacaaagaaggtagaatacacaattcagcacatataccaagaggcatgttagagttttggatggatccacaaagtgcttattttaaaaatggtaaaattgatatgaaaaaagaaatagtcctattttgtgcaggtggtttgagatcagctttagctaccaaatcgttgaaggatatgggttacaaaaatgtatcacatattgatggcggtttctcctcaatgaaaaataaaggtttc

SEQ ID NO: 258717 - DNA, 943 bp, Unknown
  Bacterial polypeptide expressing nucleotide sequence isolated from the Sargasso Sea
ggcagacctcactcagaaggacaaaatgtttgagccaaggacggatggtcaagtactggggattaactatgacagcttggagatggtgtggtacttgagtgaggagaagatggggagcatcatggagctgatcgaaaagttgagagaggagggggaggggacggcaagagagatcaagaaattgtgtggaaaactggtggatatcagggacctggtggaaggagccaagtattacttggctcacctgattatggcagcgaatgtgtttactgagaaggaagatatggagaaaatggttcaggttgaggaatggcttgagaaggacctctgttttttctccatggtgttgccagtttattcgaggaggactgagttacaggatccggacaagagagcaatggcaggatcaccaaaagcttatacagatgcggctggtggaagcaggacaaatgttggtcggggagtgggaattcttgtggagaacaagatttggacttatgttccgtgggggaggagaatcaacgaggggtggagagcatatgatgggaagagcttggcacataaaatgtctgcttgggagctggttgggcctctcttggttgtgtcatgcactgggaacgtcctgtccgggaagcaggtggagatttttgtggacaacgatggcagtgtgaggatgtggaacaagggatggaccaccaagtgcgacttgtgtaacactatactcttggccatccaccagattagtgctgcactggatattgaggtattcgtaagcggcattgcacggtgcagcacatttgaggcggatgcagctgatgcgcttagcaagtgtgacctggagagattctggaggctggctccaggggcagaggtggtccccagagaggtgccgggagcgttgctcaggtggttggagaacccagtggccggacaggaggctcgg

SEQ ID NO: 258718 - DNA, 295 bp, Unknown
  Bacterial polypeptide expressing nucleotide sequence isolated from the Sargasso Sea
gcgctggagcaaatagagcagcataaagctgtggtggtggatattcgtgacgagcaaagttatgcctctggtcatattgccggttcattccatttaactaacggcagtctgaatcagtttatgcaacaaactgactttgaaactccggtggtggtggtctgttatcacggaaattccagtcagggcgccgctcagtatctggcacaacaaggttttgaaaccgtctttagtatggatggtggttttgaagcctggcgttcacaattgccttttgtcactgaatctcatgattaaa

SEQ ID NO: 258719 - DNA, 331 bp, Unknown
  Bacterial polypeptide expressing nucleotide sequence isolated from the Sargasso Sea
atgagcgaattcaagcgtatttccccccaacaggcgcaggagctgcgcacccagggcgccgtcgtggtcgacattcgcgacccgcagagcttcgccaatggtcatatcagcggctcgcgtcacctggacaatcactcgctgcatgatttcatcagccacgccgacctcgacgcgccattgatcgtctcctgctaccacggcaactccagccagagcgccgcagcctacctggtcggtcagggtttctccgaggtgtacagcctcgacggcggtttcgagctatggcgcgccacctacccaagcgagaccgcgcaaagttccgaagaataaa

SEQ ID NO: 258720 - DNA, 313 bp, Unknown
  Bacterial polypeptide expressing nucleotide sequence isolated from the Sargasso Sea
atgacaacattctcacacattagcgtaaacgacgtggctaactttgaaggcaacgtcaccattgtggatattcgcgatcctcaatcgtttgctaatggccatatgcccaatgcggcaccgctaaacaacgacaactttggtacgtttattgaccaaacacccaaagatatcccagtggttgtggtgtgttatcacggcgtgagcagccagcaggctgcccaagtgattgctcagcaaggctttgaaaccgtttatagtatggacgggggctttgaagcgtggcgacaggcgaacccggtagtaaccgaatagc

SEQ ID NO: 258721 - DNA, 328 bp, Unknown
  Bacterial polypeptide expressing nucleotide sequence isolated from the Sargasso Sea
atggatcagtttgaatgtattaatgtcgaagaagcgcatcagaagctgcatcaggggagcgcggtgttggtggatatccgcgatccgcaaagctatgcgatgggtcatgccccgcaggcgtttcatctgacgaacgacacgctggggtcgtttatgcgcgagcatgatttcgacaccgccgtattggtgatgtgttatcacggcaacagcagtaaaggcgcggcgcaatatcttcttcaacaaggctatgacgcggtttacagcgttgatggcggcttcgacgcctggcatcgacattttccggcagaagtggcatacggtttgtaag

SEQ ID NO: 258722 - DNA, 313 bp, Unknown
  Bacterial polypeptide expressing nucleotide sequence isolated from the Sargasso Sea
atgacaacattctcacacattagcgtaaacgacgttgcaaactttcaaggtgacgtaaccattgtggatattcgcgatcctcaatcgtttgctaatggacacatgcctaatgcagcgcagctgaacaacgacaactttgcagcgtttatcgaccaaacgcccaaagatatcccagtggttgtagtgtgctaccacggcgtaagcagccagcaggcggcccaagtgattgcacagcaaggctttgaaaccgtttatagtatggacggtggcttcgaagcatggcgactggcaaatccagtagtcacggcatagc

SEQ ID NO: 258723 - DNA, 325 bp, Unknown
  Bacterial polypeptide expressing nucleotide sequence isolated from the Sargasso Sea
atggaccagtttgcccatatcagtgcccatgatgcccaccagaagcttgccgccggtgcagcccgcctcgtggatattcgcgacccccagtcgttcgagacggcccatgcggtcggcgccttccacctcaccaacggcaccctggtgcgtttcatgaacgaggtggacttcgataccccggtgatcgtgatgtgctatcacggcaacagcagccagggcgccgcccagtacctgctgcaacaggggtacgatgaggtctacagcctggatggcggcttcgaggcgtggcgcagggagttcccgatccaggcgggcgacgcatgat

SEQ ID NO: 258724 - DNA, 762 bp, Unknown
  Bacterial polypeptide expressing nucleotide sequence isolated from the Sargasso Sea
ataccggcctgcggaaactgatcaccaaaataatttaagtggggaagtaaggaccgactgggttctagacgaggtgcggtcactttttgatctttcatttaatgaccttctatttaaggctcaaaatatccacagagtttggttcaatcctaataaggtgcaaatgagcacccttttatcaataaaaacgggcggttgtccggaagattgtgggtattgtagtcagagtgtcaaatttgacactggtcttgatgcgagtgccctgatgaaggttgaagaggtgcttaaagctgcccggcaggcgaaagacggtggggccaccagattttgtatgggtgcagcatggagaaatcccaaggatcgcgatatggaggccatttgcgcaatgattgagggggtcaaatccttgggaatggagtcatgtgcgacactaggcatgcttacagctcaacaagcggaggaacttaaagcagctggcttagactactacaatcataatattgatacttctcgccgctactataaggaaattatttcgaccaggacaatggacgaccgtatcgagaccctaaattatgttaggagtgctggtttaaatgtttgttgcggtggaattgttgggatgggtgagtcgcgggacgataggatagatatgctacatgctcttgccactatggccttacatccccagagcgtgccgatcaatatgctcgttagagtagaaggtacaccgctgggggaatctaataatttggactcatt

SEQ ID NO: 258725 - DNA, 592 bp, Unknown
  Bacterial polypeptide expressing nucleotide sequence isolated from the Sargasso Sea
catggccaatgcaaccttctccgccccccagcccatccagatccatcgccccgtccctgcgccggccgtacagggtgagtggtcggtcgaggccatccaggcgctgctcgataagcccttgatggacctgctgtttgaggcgcaaaccgtgcaccgccagcactggcccgcgggcgacatcgaactggccacgctgctgtctgtgaaaactggcggctgccctgaaaactgtggctactgcccgcaggcggccgagttcgacacgggcgtgaaagccgaaaaactcatggaagtggatgaggtggtgcgcgccgcccaggccgccaagaacgcaggtgccacccgcttttgcatgggcgccgcctggcgtgcgcccaaggaccgcgacattgaaaaagttagcgcgctgatcggtgccgtgaagggcctgggcctgcagacctgcgccacgctgggcatgctcgagtcgcaccaggcgcaggccctcaaggacgccgggctggactactacaaccacaacctggacaccgcgcccgagtactacaccgacgtggtgagcacacgcgcttaccaggaccggctggacacgctg

SEQ ID NO: 258726 - DNA, 799 bp, Unknown
  Bacterial polypeptide expressing nucleotide sequence isolated from the Sargasso Sea
tgtgcttactggtcctcaagcagcacgctatcaaaccggcttacaacgcgaaaaactcatgaacgttaacgacgtacttaagcaagcgaaacaagcaaaaaaagaaggatctagtcgcttctgtatgggggcagcatttagagaagtaaaagacaaccaagattttgaagatattttaagcatggtttctggtgtgaaagagctaggcatggaagcgtgttgcacattaggaatggtcactgaagcgcaagcaaaacgactcaaagaagcaggcttaacagcctataatcataatctagatacatcagaagaacactataaaaaagtaatcagtacacgtggatactctgatcggctaaatacgattgccaatgtagctaaagctggtatttctgtctgttgtggaggcattatcggcctcggagaggggccagaagatcgcttgaaactcattgagactctagcaaacctagagacgcctcctgaaagcattcccatcaatacactggtacctgtaaagggaacgcctttagaaaagcaagaacccgtagatattttcgattggattaaaattatcgccattacacgcattgccattcccaaagctagaattcgcttaagtgcaggaaggcttgatcttagtaaagaaggccaagcgtttgcatttatggcaggggccaattcaatttttgcaggtgaaaaactgcttacaactggcaatcccgtatgggaagaagataataaattgcttgaaaaactgaatattaaaagccctaaagccgttttagaacctgcataa

SEQ ID NO: 258727 - DNA, 667 bp, Unknown
  Bacterial polypeptide expressing nucleotide sequence isolated from the Sargasso Sea
gccgcctggcgcgcgcccaaggaccgcgacatcgaaaaaatgaacgtgctgatcagcgccgtgaaggggctgggcctgcagacctgcgccacgctgggcatgctgcagccgcaccaggccaaggcactgcacgacgccgggctggactactacaaccacaacctggacaccgcacccgagtactaccaggacgttgtcagcacccgccaataccaggaccggctggacaccctggccgccgtgcgcaacgccggcatcagcgtgtgctgcggcggcatcatcggcatgggggaaaccgaggtccaccgcgccgggctgattgcccagcttgcgaacatggagccctaccccgagtccgtccccatcaacagcctggtgcgcgtacccggcaccccgctggccgacagcgagcccgtcgatccgctggatttcgtgcgcgtgattgccgtggcccgcatcaccatgccccaggcccgcgtgcgcctgtcggcaggtcgccagcaactgggcgaggcggtgcagaccctgtgcttcatggccggtgccaattccatcttctacggcgacaagctgctggtcaccggcaaccccgatgccgacgccgaccgccaactgctgcacaagctgggactgcacggcctacaaacccagacatccgccgcctgaa

SEQ ID NO: 258728 - DNA, 647 bp, Unknown
  Bacterial polypeptide expressing nucleotide sequence isolated from the Sargasso Sea
catgggcgtcgtgcgccacgactggaccaacgaggaggtcgaggcgctgtacaaccgccctctgctcgacctggtgtacgacgcggcgtccgtgcaccgcgcgaaccacgacccgaggcaggtccagcagtgcacgctgctctccatcaagaccggcgggtgccccgagacgtgcaactactgcgcgcagtcctcgtcgtggaaggaggacacgggactcaaagccgagaagctcatgggcgccgacgacgtgttggccgcggcgaaacgcgcgaaggaggcgggatccaccaggttctgcatgggcaccgcgtggcgcgggccgagccaggtgggcaaaggccaattcgagcgagtcctcgggatggtgagcgaggtccgagacatggggatggaggtgtgcgccacgctggggatgctcaaccacgaacaggcgcggcagctgcgcgaggcggggctcaccgcgtacaaccacaacgtggacacctccccggagttctaccccaaggttaccacctcgcgcaactacgaagatcgtctcaacaccatcgccgccgtgagggaggcgggcatcagcgtgtgctgcggagggatcctgggtctcggcgaggaggagaaggaccgcgccagcatgctccgcgtcctgg

SEQ ID NO: 258729 - DNA, 545 bp, Unknown
  Bacterial polypeptide expressing nucleotide sequence isolated from the Sargasso Sea
tgaatcaggccttgatttttataatcataatttagatactagtgaaaaattttatagcaaaataattagtacaagagaatatcaagaaagaattgatacaatcaataacgtaaggcaaactggcatgtctgtttgttgcggtggaataattgggatgggtgagactagagaacacagagcagaattgattgccaatctttctgatctaaatccatatcctgagtcagtcccaataaatcatttgattccagttaaaggaacaccactagagaaacaacagggagttgatcccatagagtttgtgaagacaatagcaatttccaggattatgatgccaaaatctagagtaagactatctgccggaaggcaagaacttggtaaaagcattcaagcaatgtgctttattgcaggtgcaaattctatttttataggcgacaagctacttaccacagcaaaccctgaaactcacgacgatttgaaattattagcagaattgggactgaagcctaaaattaactcaatttcgagtgagactaactgctaat

SEQ ID NO: 258730 - DNA, 946 bp, Unknown
  Bacterial polypeptide expressing nucleotide sequence isolated from the Sargasso Sea
tatgaataaaaaaatcgccaactggtctttggaagatatagaggcgctatatcacctgcctttcaatgatctcatatataaagctcagactattcatcgtgagaatcatgatccgaacaaaatccaagtatcaacactgatgtcaattaaaacaggagggtgtcctgaggactgcaagtattgttctcaaagtattaaatataataccgaagttgagattgaaaaattactttctgttgaagacgtagttgcacaagctagggctgctaaagactctggggcctcaagattttgtatgggggctgcttggaggaaccttaatgatagtaatctctctaaaataaaagatatggtaaaggcagttaagaatctaaacttggaaacttgtttaacactgggaatgctgaaaaaagagcaagctgaatcactcaaagagtgtgggttagattactataatcataatctagatagctcggaagaatactacagtaaagttgtatcaacgagaacttatagagatagattagacaccctcagctatgtcagagatgctggtatcaaagtctgcacaggtggtattctgggtttaggtgaagaaaatattgacagattaaaactcattgaagttctctgtaatatggaagagcaaccagagtctgtaccaatgaataaactagtaaaaattgaagggaccccttactcagataatgaaaatgttgataactttgattttataaaagtaatcgcaatagcacgaataactatgcctaaaacttatgtaagactgtcagccggaagagatactatgaatgatgaaatgcaagcattatgtttttttgctggagcaaactctatattttatggggatgagttgttaacaacaaaaaattcttcaatcaatcacgacaaaaacctcttagataaacttagaatcaaaactatctaa

SEQ ID NO: 258731 - DNA, 448 bp, Unknown
  Bacterial polypeptide expressing nucleotide sequence isolated from the Sargasso Sea
atgtcgcagttgcaagttcgtcatgattggaagcgggaagaaatcgaagccttatttgcgctgccgatgaatgacttattatttaaagcacacagtatccaccgtgaagtgtacgatcctaacgaagtacagatcagccgattactgtcgatcaaaaccggtgcttgtcctgaggattgtaaatattgtccgcagagtgcgcgttacgacactggccttgaaaaagagcgcctattggcgatggaaaccgtattgaccgaagcacgcagtgctaaagccgcgggcgcttcacgtttctgtatgggcgccgcttggcgtaacccgaaagataaagacatgccatacctcaagcaaatggtgcaagaggttaaagccctcggcatggaaacttgtatgaccttaggtatgttaagtgccgaacaagccaatgagttggccgatgcaggtc

SEQ ID NO: 258732 - DNA, 412 bp, Unknown
  Bacterial polypeptide expressing nucleotide sequence isolated from the Sargasso Sea
catgaacgagattagaaataattggaccttagaagaagtaagtgacctgtttaaaaaagatttaaattatcttttattcaatgctcacaccctgcataaaaaatatcataatgaaaatgaagtacaaatgtgcactttattatcaattaaaacaggtggttgccctgaggattgtggttattgttcacaaagtattcatagcgatcagcctatggagccaactaaattaatgagccttgaagaagttaaacaaaaagcgttagatgcgaaagagaatggatctatgagattttgtatgggagccgcctggagaaagccttccaataaaaacttagaaagagtaattgaaatgataaaagttgtgaaaagtactgggcttgaagcatgcgttacactaggaatgttaacaaaa

SEQ ID NO: 258733 - DNA, 733 bp, Unknown
  Bacterial polypeptide expressing nucleotide sequence isolated from the Sargasso Sea
cggcggctgccccgaggattgcggttactgttcgcaaagcgcgtcagcggaaagcgacgtgaaggccgagaagctgatggacgtgcaagccgtgctggcggcggcggccgaggccaaggcggcgggctcgcagcgtttctgcatgggcgcggcctggcggtcgccgaaggagcgcgacatggacaaggtcgtcgccatggtcgagggggtgaaggccatggggctggagacctgcatgacgctggggatgctcgatgcgccccaggcgcagcgtctggccgaggcgggtctcgactattacaaccacaatatcgacacctcgcccgaaaactacgccaacgtcatcacgacgcgctgcttcgaggaccggctggagacgctgtccaacgtgcgcgaggcggggatttcggtgtgctgcggcgggatcgtcggcatgggtgagacgcgcggcgaccgcgtcggcttcgtccatgcgctcgccacgctgccgcgccatccggaaagcgtaccggtcaatgcgctggtcccggtcaagggcacggtgctgggcgacatgctggccgatacgccgctggcgcggatcgacgatatcgagttcgtccgcaccgtcgccgtcgcgcgcatcaccatgccgatgagcatggtccgcctgtcagccgggcgcgagagcatgtcggcggcgacccaggccttgtgctttatggcgggcgcgaactcgatcttcatccggtga

SEQ ID NO: 258734 - DNA, 718 bp, Unknown
  Bacterial polypeptide expressing nucleotide sequence isolated from the Sargasso Sea
cctcactcaaagcaatctaaaaaaagtcaaagaaatggtcagggaagttaagagcctaggattagaaacctgtgttactctgggaatgttaacaggttctcaggctaaagaattgaaggatgttgggctagattattataatcataatcttgatacatcagaagagtattataaaaaagttgtaacgacaagaacctatcaagataggctgaatacattacaacatgtcagagatgcaggcgtgaaagtatgcagcggaggtatacttgggctaggtgaagaaaatatagataggattaaactcatacaagtccttgcaaatttagaaactcaacctgagtcagtaccaataaatcgactagtaagagttgagggcactccatattatgaaaataatgatgtggatgaatttgactttattagagtaattgccttggcaagaattgctatgcctaaatcgtatgttagactctctgctggaagggacacgatgaatgatcatatgcaatctttatgtttcttagctggtgctaattctattttttatggtgaagagctgcttactacaaaaaactcaaccattaaacacgatcaagatcttctcagaaagctaaaaattaaaaccatgtccttggataacttatcaaatgactcagaagatataaatattaaagaaaacaagctagaaaatattaatatagcaataaaaaatatctaa

SEQ ID NO: 258735 - DNA, 585 bp, Unknown
  Bacterial polypeptide expressing nucleotide sequence isolated from the Sargasso Sea
taaaggacactggacttgaaacatgtatgactctaggcatgctcacaaaagagcaaagtgaaaagttaaaagatgccggacttgattattataatcataatatagactcaagtgaagaattttactccaagattatcactactcgcaaatttcaagatcgcttagatacattaaaaaacgtacaagattcaggtctcaatgtatgctccggaggtatcgtaggtatgggcgaaactcgcgaagatcgcgccaaaatgctcataatccttgctaacatgaaaaaacacccaggatcagttcctatcaacatgctagtcagggtcaaaggcacccctcttgaagatgctaaaacagtcgatgaatttgaatttgtcagaactatcgctgctgcaagaataatgatgccaaaatcaacagtaaggctatcagcaggtcgcgaacaaatgaatgagcaaactcaatcattagcttttcttgccggtgctaattcaattttttatggcgataaacttctcactacatcaaacccggaggcaatagccgataaaaagctatttaccaaacttgggatcgaatcatgttaaa

SEQ ID NO: 258736 - DNA, 421 bp, Unknown
  Bacterial polypeptide expressing nucleotide sequence isolated from the Sargasso Sea
acgatatcaaatgtgcaatcggcaggcatgaaggtttgttgtgggggtattgttggcataggggaaaaggaaagtgatcggatagactttttgaaaaccttggcaaacctaaacccacaacctgaatccgttccaataaatatgcttgtaaaagtaaaagggacccccttggcggattctccagaagtagacccaatagagtttgtgagaacaatcgctgtagctcgccttcttttacccaactcctacgtaagattatcggccggacgaagcgagatgagcgatgaattacaggctttgtgtttttatgctggcgctaattctattttttatggagaggaacttttgacaacagaaaaccctgcttttctaaaagaccaagagttatttgaaaagcttggtctaagggccagtaaataaa

SEQ ID NO: 258737 - DNA, 665 bp, Unknown
  Bacterial polypeptide expressing nucleotide sequence isolated from the Sargasso Sea
ttgtatgggagccgcttggagaaagccttccaataaaaacttagaaagagtaattgaaatgataaaagttgtgaaaagtactgggcttgaagcatgcgttacactcggaatgttaacaaaacaacaagctagcatgctaagtgacgctggattggattattataatcataatattgacacttcggagaattattacaaagaaataataacaacaagaacatttcaagacagaattgatacgcttgacaatgtaagggaagcaggtgtgaaggtttgctctgggggaattattggcatgggtgaatcgagtgaagataggttaagttttttaattgcattatcaaatttggaaaaacatcctgagtctgttccaatcaatacgttagtgccaattaaaggaactaaattatttaattcagctggggttgatgaaattgactttataaagatcatttgtttagcaagaattatgatgcctaaatcttacgttagattatctgctggtagagaatcaatgcctaaatcaatgcaagctttatgtttttttgccggagcaaactctattttttacggtgaagagcttcttaccactccaaataatccagtagagaaagataaaaaacttttaaacgatttaggaattagcctacaatcatcgaattaaa

SEQ ID NO: 258738 - DNA, 798 bp, Unknown
  Bacterial polypeptide expressing nucleotide sequence isolated from the Sargasso Sea
gttgccctgaggattgtggttattgttcacaaagtattcatagcgatcagcctatggagccaactaaattaatgagccttgaagaagttaaacaaaaagcgttagatgcaaaagagaatggatctatgagattttgtatgggagcggcttggagaaagccttccaataaaaacttagaaagagtaattgaaatgataaaagttgtgaaaagtactgggcttgaagcatgcgttacactcggaatgttaacaaaacaacaagctagcatgctaagtgacgctggattagattattataatcataatattgacacttcagagaattattacaaagaaataataaaaacaagaacatttcaagacagaattgatacgctcgacaatgtaagggaagcaggtgtgaaggtttgttctgggggaattattggcatgggtgaatcgagtgaagataggttaagttttttaattgcattatcaaatttggaaaaacatcctgagtctgttccaatcaatactttagttccaattaaaggaactaaattatttaattcagctggggttgatgaaattgactttataaagatcatttgtttggcaagaatcatgatgcctaaatcctacgttagattatctgctggtagagaatcaatgtctaaatcaatgcaagctttatgtttttttgctggagcaaactctattttctatggtgaagagcttcttaccactccaaataatccagtagagaaagataaaaaacttttaaacgatttaggaataagccttcaatcatcgaattaaa

SEQ ID NO: 258739 - DNA, 1048 bp, Unknown
  Bacterial polypeptide expressing nucleotide sequence isolated from the Sargasso Sea
atgtctgcagttttaccacttcgtcacaactggactctggctgaagtaaacgccttattcgctttaccttttaatgacttagtctttcaggcccagacggtgcaccgtcagttttttaaacccaatgaagtgcagatcagtactttattgtcgattaaaaccggcgcttgtgctgaagactgtaaatattgcccgcaaagcggccattacaatacaggccttgagcgtgaacgtttgctggaagtggaaaaagtactcactcaggctaaagctgcaaaagacaaaggcgccagccgtttttgcatgggcgcggcctggagcaatccgaaacaacgcgatatgccgtttctgatggaaatggtgaaaggcgtcaaagaaatgggcttagaaacctgtatgacgctgggtaagctcgatgcaggtcaagcgcaggagttaaaacaggccggtttagattactacaaccataacctggatacctcgcctgagttttacggtgaaattattaccacccgtacttatcaggacagattagatacgctgcagcatgtgcgtgatgccggtatgaaagtctgttgtggtggcatagtgggcatgggcgagtcggcaaacgacagatccgcacttttaatgcagctcgcgaatttgccagagcacccacaaagtgtgcctattaatatgctggtgaaagtgcagggtacgccgatggaaaacgtcgaagacttagatggctttgagtttatccgcaccatagcggtggcgcgtatcatgatgcctcaaagccatgtgcgtttatctgctggccgttcccgcatgaatgagcaaatgcaggcgctgtgtttcctatctggtgcgaactcaatcttttacggcgataaattactgactacagaaaacccggaagctgatgccgatatgttgttattcgctaagctcggtattaatccggaacagcgccacgatgtatcagacgaagcccatgaagcggctttagccgatgccattaaagagcaaaataccccttcattgttccatagcgcggtttaag

SEQ ID NO: 258740 - DNA, 709 bp, Unknown
  Bacterial polypeptide expressing nucleotide sequence isolated from the Sargasso Sea
ctgggcgtcgtgtacaacgattggacgaagagggaagttgaggatctgtacgcgcgtccgctgttggatctcgtgcacgatgcggcgaaaacgcacaggatgcatcacgacgcgcgacaggtgcaacagtgcacgctgctgagcatcaaaaccggggggtgtcccgagacgtgtaattactgcgcgcagagctcgtcgtggaagggggagacgaagttgaaggcggagaagttgatgggggtcgaggaggtgctcgaggcggcgaaacgagcgaaagatgcggggagcacgaggttttgcatggggacggcgtggcgaggaccgagccaagtcggcgcggggcaattcgaacgcgtgttggagatgacgaaggaggtgcgggacatgggcatggaggtgtgcgcgacgttggggatgttgacgccggaacaggctgtgaaattgaaggatgcgggattgacggcgtataatcataatttggatacgagtcccgagtattacgataaagtgacgtcgagtcgcaagtacgaggatcgtttgaacacgatcgccgccgtgcgcgaggctggaatctcggtgtgctgcggagggatcctcggtttgggcgaggaggagtcggatcgggcgagtctgatgacggtgttggcgacgcttcccgaacatccagagagcgtgcccatcaacgcgttggtgcccgtcgacgggacgc

SEQ ID NO: 258741 - DNA, 949 bp, Unknown
  Bacterial polypeptide expressing nucleotide sequence isolated from the Sargasso Sea
atgagtgacgaagtgaaaaagaaatggggtttggatgagttagagacaatttacgattctccatttaatgatctgatatggaattctcataacattcatagaaaatatcatgaccctaatgctgttcagatatctactttaatgtccattaaaacaggcggttgtccagaagactgcaagtattgctcacaaagcataaaatatgatacgagcctcagtttagaaaagtttttatctgttgatgaagttagagaacaagccataatagctaagaataatggagcatctagattttgtatgggtgctgcatggagaaatctaaaagactctaatcttcaaaaaataacagacatgataaaagaagtaaaaaaacttgggatggaatcttgtgtaactcttggtatgataacagacgttcaagcacaagctctcaaatcagctggactagactactataatcataatcttgatacctcaagagagtattatgagaaagtagttacaacaagaacttaccaggatagactagatacgttacaaaatataagagatgcggggatcaaagtttgctgcggcgggatacttggtctcggagaagagaaaatagacagaattaaacttattcatgtattagcaaatcttgaagaacatcccgaatctgttcctatcaatcaacttgttaaggttcagggaacaccttattttgataataccaatgtagatgaatttgatttcatcagaaccattgcgctcgcccgaatagcgatgccgaaatctatggtaagactatcagctggacgagattctatgaatgatcaaatgcaggcattatgtttttttgcgggtgctaattctatattttatggggaggagttattgacaaccaagaatgcagacgttaatcatgatcgagtgctcttaaaaaaactcaaaattaatccctcttaaa

SEQ ID NO: 258742 - DNA, 862 bp, Unknown
  Bacterial polypeptide expressing nucleotide sequence isolated from the Sargasso Sea
tcgattaaaaccggcgcctgcccggaagactgtaaatactgcccgcaaagcgcgcgctataaaaccggtctggaatcggagcgcctgatggaagtggaacaggtgctggagtcggcgcggcaggcaaaaaatgccggatcaacgcgcttctgcatgggggccgcctggaagaaccccaacgatcgcgatatgccgtatctggagcaaatggtcaaaggcgtcaaagcgttagggctcgaatcctgcatgacgctcggcaccttgaccgacagccaggcgcagcgtctcgcgggagccgggctggactactacaaccataacctggacacctcgccggaattctacggcaatatcatcaccacccgcacctaccaggagcggctggataccctcgacaaagtgcgtgacgccgggattaaggtctgttccggcgggatagtcggcttaggcgaaaccgagaaagatcgcgccggcctgctgctacagctggctaacctgccgacgccgccggagagcgtgcctatcaacatgctggtcaaagtgaaaggcacgccgctggccgataacgacgatgtcgatgctttcgattttatccgcaccattgccgtggcgcgcatcatgatgccgacctcgtacgtgcgtctttccgccggccgcgagcagatgaacgaacagacccaggcgatgtgctttatggccggggcgaactcgattttctacggctgcaagctgctgaccacgccgaacccggaagaggacaaagatctgcagctgttccgcaagctgggccttaacccgcagcagacggcggtgctggaaggggataacgaacagcagcagcgtctgaacaggcgctgctcaa

SEQ ID NO: 258743 - DNA, 569 bp, Unknown
  Bacterial polypeptide expressing nucleotide sequence isolated from the Sargasso Sea
cacccgcacctatcaggaccggctcgataccctggagcatgtgcgcggcgccggcatgaaggtctgctccggcggcatcgtcggcatgggcgagcaggcaaaagatcgggcgggcctcttgatggcgctggccaatctgccgcgccacccggagagcgtgcccatcaacatgctggtcaaggtgaagggcacgccgctggagaaccaggagaacctcgatccgttcgaattcatccgcaccatcgccgtggcacggatcatgatgccggcctcccacgtgcgcctctccgccgggcgggagaagatgaacgagcagatgcaggccatgtgctttatggcgggggcaaattcgattttttatggctgcaagttgctgaccaccccgaacccggacgaaaacagcgacatgcagctgttcaagcggctcggcattcgccccgcccagcgggcccagaagccggatcaagtacaagaagaggagctgctggccgaggtgagtcgccagagcgagcccgccgaaatgttttatgacgccacccgcccccgtgcaggggccgcgcggtcatgaa

SEQ ID NO: 258744 - DNA, 746 bp, Unknown
  Bacterial polypeptide expressing nucleotide sequence isolated from the Sargasso Sea
gctaacttcaacccaaatgaagtgcaaatttctactctgttatcaattaaaactggggcatgcccagaagattgtaagtattgcccacagtcagggcactataaaaccgacttagagcgcgagcgccttattgaagtagaaaaagtagtagagcaagcgcgtttagctaaacaaaaaggtgcaacacgtttttgtatgggcgctgcgtggtcagatccaaaagacagagacatgccttacatttcgaaaatggtaaaagaagtaaaagagcttggccttgaaacctgcatgacgctgggcaaactcacaaacgaaaaagcccacgaactcagcagtgcaggtttagattactacaaccataatcttgatacatcacctgaatactacgagcaaattatatcaacccgtacctttgaagatcgattgaacaccatagatcatgtacgcgatgccggtatgaaagtctgttcaggcggtatagttggtatgggcgagcaagcagccgaccgttatgggttacttatgcaattggctaacttgccacaacagccagaaagtgtacctattaatatgctagttaaagtaaaaggtaccccacttgaaaacgttgacgatttagaccattttgagtttatacgcactattgctactgcacgaataatgatgccacacagctatgtacgtttgtcggcagggcgtaatgccatgaacgagcaaatgcaatcaatgtgtttttttgcaggtgc

SEQ ID NO: 258745 - DNA, 674 bp, Unknown
  Bacterial polypeptide expressing nucleotide sequence isolated from the Sargasso Sea
gatgagcgcaactgcagcaatcgccacccgccacgactggagcctcgccgaggttcgcgcgctgttcgagcagcctttcaacgacctgctgttccaggcgcaaagcgtccatcgccagcacttcgaccccaaccgcgtacaggtctcgaccctgctgtcgatcaagaccggcgcctgcccggaagactgcaagtactgcccgcagtccggccactacaacaccggcctggacaaggaaaagctgatggaagtgcagaaggtgctggaggcggccgccgaggccaaggccatcggctccacgcgtttctgcatgggcgcggcctggaagcatccgtccgccaaggacatgccctacgtgctggaaatggtgaagggcgtgaagaagctcggcctggaaacctgcatgaccctcggtcgtctcgaccaggagcagacccaggcgctggccgaagcagggctggactactacaaccacaacctcgatacctcgccggagttctatggcaacatcatcaccacccgcacctacggcgaacgcctgcagaccctggcctacgtgcgcgaggcggggatgaagatctgttctggcggcatcctcggcatgggcgagtcggtggacgatcgcgctgggttgctgatccagctggcgaatctgccggagcacccggagagcg

SEQ ID NO: 258746 - DNA, 1090 bp, Unknown
  Bacterial polypeptide expressing nucleotide sequence isolated from the Sargasso Sea
atgaatgctgttaccgcgggcgctcacgcccttcgtcacgactggaccctcgccgaggttcaggccctgtttgccctgccattcaacgatctgctgttccaagcccagaccgtccaccgcgcccatttcgatccgaacgaagtacaggtgagcaccttgctttccatcaagaccggtgcctgcccggaggattgcaagtactgtccccagagcgcccgttatcacaccggccttgaggccgagcggctgatggaggtggagaaagtgctggagcgggcccgcgaagccaaggccaacggctcgtcccgcttctgcatgggggcggcctggcgcaaccccaaagagaaggacatgccctatatcctgcgcatgatcgaggaggtgcgcgggctcggcatggagacctgcatgacgctcgggatgctcaccgccgatcaggcggcgcgcctcggggccgccggccttgactactacaaccacaacctcgacacctcgccggagttttacggcgacatcatcaccacccgcacctatcaggaccggctagataccctggagcatgtgcgcggcgccggcatgaaggtctgctccggcggcatcgtcggcatgggcgagcaggcaaaagatcgggcgggcctcttgatggcgctggccaacctgccgcgccacccggagagcgtgcccatcaacatgctggtcaaggtgaagggcacgccgctggagaaccaggagaacctcgatccgttcgaattcatccgcaccatcgccgtggcacgcatcatgatgccggcttcccacgtgcgcctctccgccgggcgggagaagatgaacgagcagatgcaggccatgtgctttatggcgggggcaaattcgattttttatggctgcaagctgctgaccacccccaatccggacgagaacagcgacatgcagctgttcaagcggctcggcattcgccccgcccagcgggcccagaagccggaccaggttcaagaggaggagctgctggccgaggtgagccgccagagcgagcccgccgaaatgttttatgacgccacccgcccccgtgccggggccgcgcggtcatgaa

SEQ ID NO: 258747 - DNA, 1054 bp, Unknown
  Bacterial polypeptide expressing nucleotide sequence isolated from the Sargasso Sea
aatgtcgcagttgcaagttcgtcatgattggaagcgggaagaaatcgaagccttatttgcgctgccgatgaatgacttattatttaaagcacacagtatccaccgtgaagtgtacgatcctaacgaagtgcagatcagccgattactgtcgatcaaaaccggtgcttgtcctgaggattgtaaatattgtccgcagagtgcgcgttacgacactggccttgaaaaagagcgcctattggcgatggaaaccgtattgaccgaagcgcgcagtgctaaagccgcgggcgcttcacgtttctgtatgggcgccgcttggcgtaacccgaaagataaagacatgccatacctcaagcaaatggtgcaagaggttaaagccctcggcatggaaacctgtatgacccttggaatgttaagtgccgagcaagccaatgagttggccgatgcaggcctcgactactacaaccacaatttagatacctcgcctgaatattacggcgatgtgatcacgacccgcacttatcaaaaccgtttagataccttaagccacgtgcgtgcatcgggcatgaaagtttgctctggcggtattgttggtatgggcgaaaaggccactgaccgagcgggtttattgcaacaattggcgaatttgcctcagcatcccgattctgtccccattaacatgttggtcaaagtggcgggcacccccttcgaaaaactcgatgatttagatccgctggaatttgtccgtaccatcgccgtggcgcgtattttaatgcctaagtcccgtgtgcgtttatcggcgggccgtgaaaacatgactgacgaactgcaagctatgtgtttctttgcgggcgcgaactcgattttctacggctgcaagctgttgactacgccaaaccctgaagaaagtgatgatatgggcctattccgccgtctgggcttacgtcctgagcagggcgctgccgcgactatcgatgatgaacaagctgtattagccaaagctgcggctcaccaagataaagcctcggcacctttttatgatgcggcggcgctttaa

SEQ ID NO: 258748 - DNA, 1054 bp, Unknown
  Bacterial polypeptide expressing nucleotide sequence isolated from the Sargasso Sea
atgtcgcagttgcaagttcgtcatgattggaagcgggaagaaatcgaagccttatttgcgctgccgatgaatgacttattatttaaagcccacagtatccaccgtgaagtgtacgatcctaacgaagtgcagatcagccgcttactgtcgatcaaaaccggtgcttgtcctgaggattgtaaatattgtccgcagagtgcgcgttacgacactggccttgaaaaagagcgtctattagcgatggaaaccgtgctcacagaagcgcgcagtgccaaagccgcgggtgcttcgcgtttctgtatgggcgccgcctggcgtaacccgaaagataaagacatgccataccttaagcaaatggtgcaagaggtgaaagccctcggcatggaaacctgcatgaccttagggatgttaagcgccgagcaagccaacgagttggccgatgcgggccttgattattacaaccacaatttagatacctcgcctgaatattacggcgatgtgatcaccacccgtacctatcaaaaccgcttagataccttaagccatgtgcgcgcatcgggcatgaaagtctgctctggtggtattgttggcatgggcgaaaaggccacagaccgggcgggtttattgcaacaactggcgaatttacctcagcatccggattctgtgcccattaacatgttggtcaaagtagcgggcacccccttcgaaaaactcgatgatttagatccgctggagtttgtccgtaccatcgccgtggcacgtattttaatgcctaagtcccgtgtgcgtttatcggcgggccgtgaaaacatgactgacgaactgcaggctatgtgtttctttgcgggcgctaactcgattttctacggctgtaagttattgactacgccaaacccagaagaaagtgatgatatgggcctgttccgccgtctgggcttacgccctgagcagggcgcagccgcgactatcgatgatgagcaagcagtattagctaaagctgcggctcaccaagataaagctgcgtctcagttttatgatgcggctgcgctataac

SEQ ID NO: 258749 - DNA, 454 bp, Unknown
  Bacterial polypeptide expressing nucleotide sequence isolated from the Sargasso Sea
atgctatcaactcccatactactagactatcaatcttcgactccttgctctaaagatgtcgttgattctatgaaacctttttggagtgagatattttctaaccctgcaagcaaatctaatttggcggggattaacgcaagcgctatattggaagcctcaagagaaaaaatagaacaaagtttatttcttaagaataaaaaagttatttttacaagtggggcaactgaatctaataacttagccttattaggttttgctagaaatttctataaagaaacaggaaattatggacatattattaccttaaaaacagagcataaagctgttttggagcccttaaaccaactaaaaaaagaaggatttatggttacagaaattaatcctgagaaagatggcttaatttcattagaacaattcaaaaaaaatataagagaagatacatttctggttagtg

SEQ ID NO: 258750 - DNA, 693 bp, Unknown
  Bacterial polypeptide expressing nucleotide sequence isolated from the Sargasso Sea
aatgagaacttatttagattacaattctactgcgccgctaagaagtgaagctaagcaggcaatgatagaagcgatgaatgttttgggaaatccctcatctgttcatttagagggtcgagctgcgaagaatttgattgaaaatgctagattaaaaattgcagaggcgattggtgcagttggagctgatataatatttacatctggagcaacagagtcagcagcattggccctctcagggcgaaatataatgtgctcaagagtagaacatgaagctgttagcagttggtgtcgtaccaaactttctactgaccggaatggaatggttgatatcgataagcctgagtattcggcacttcaagttgctaattctgaaactggaataatacaaaaaagtgttaagggaatttggctttctgatatgacccaagcttttggaaaagtccctttagcttataattggtatggttgtgattgtgcaatgatttctgcccataagatcggtggtcccaaaggtattggggctttgattttgaaaagaggaacagatttggccgctcttatcaaaggcggcggacaggagatgggccgacgatctggaacggaaaatgtgttaggtatcgccgggtttggagccgctgctgaagcggctcaaaaagacttagttaaaggtgaatgggaaaagatttcagaatt

SEQ ID NO: 258751 - DNA, 699 bp, Unknown
  Bacterial polypeptide expressing nucleotide sequence isolated from the Sargasso Sea
ggcagcgcaagtttgtggacgagttcaacgcgctcaagcagggcggccacggccatgtgacggtgggtgccatcaccgggtcggccgcgcatgtgctggtggcgtcggtggtggaaatccagcgcctgcggcccctcttggtcatcaagatcctggagcagagcagcgaccagctcatcgcctggttggccgaacgcaagatcgatctgatgatcggccgcttcaccaccgaggaccagcgcagccagttccactacgagcacctgtccgccgagccgctgcacgtggtgggcgggcagcaccacccgctgcgcggcgccaccgacctgtcgctcaccgagctggcgcactggccgtggattctgtaccccgcctccacggccgtgcgcaaggtgtcggacgacctgtttggcggcgcgggcctggcgctcacggcgggggtggtggagacgccgtccttcttgtttgcgctggagctgatgaacaccacgcacatgatgtcgctgcagcctgccgcgctgatccagaaatacgtggaccggggcctgctctcgcgcatccccgtagagctgccggaccgcatgcccagctatggcctcatcacccgcctgggcgagccgcccacgccctcggcccaggcctttatcgacgtgctgcgtgaaacggcgggggtggcgccggacgttttgggcgagtaac

SEQ ID NO: 258752 - DNA, 784 bp, Unknown
  Bacterial polypeptide expressing nucleotide sequence isolated from the Sargasso Sea
atggatataaatcggcctatatatttagacaaccaatcgacaacacctgttgatccaagagtaataaaagaaatagtgccttactataatgaaaaatttggcaacgaaggaagtcaaactcatttatatggatgggaggctaaagaatctgttgatatagctaaagagcatattgcaaaattaataaattgcaatatggatgagatatattttacaagcggtgcaacagaatctatcaatataacattaaaaggctctgcatactctgagaaaaataaaaaaaaacacattattacctttgcaacagaacataaagctacacttgatgtatgtgaaaacttagaatctgatggatataccgttacttatatacctgtaaataaggatgggaaaattaatttaactacaattgaaaattcaattaccgaagaaacattcttaataacagttctgcatgctaataatgaaattggaaatatatatcctattgatgaaattggtattgtttgcaaaaattacgatatactattccatgttgatgccgcacaatcaattggaaaaattgaattagatatgtctaatagcaatatagattttttatctttctccagccataaaatgtatgggccaaaaggcattggaggactatacattagaaataaaaatccaaaaatcaatctaaaacctttaatacatggtggaggacaacaaaatggaatacgcccaggtacaatggctattcaaaatattgttggcttgggaaggcatgccaaattcaaaacaa

SEQ ID NO: 258753 - DNA, 490 bp, Unknown
  Bacterial polypeptide expressing nucleotide sequence isolated from the Sargasso Sea
atgaaaccaatatatttagactgtaacgcaacaacacccattgaagatgaagtcagggatattatgactcggtacctcgcatctgaatatggaaatgctggcagtcgaacgcatgtatttggccaagaggcaaacaaagctgttgaggacgcaagaaggcaagtagctgaagttgtctctgctgagaaagatgagttgatcttcacaagcggtgcaaccgagagcaataatatagccatattaggcctacaaaaatttgccattgaatcgggtaagaaccacatcatcagttcatcgattgagcataaagcggttctggaacctttggaatatttatctaaaaatggttttgaaataacccttgtagatgtagacgaatctggtgttgtagatcctaaaaatattgaagctgcaattgaaaaaaataccttaatggttagcctgatgcatgtgaataacgaacctggggaccattcaaccgatcgatgag

SEQ ID NO: 258754 - DNA, 920 bp, Unknown
  Bacterial polypeptide expressing nucleotide sequence isolated from the Sargasso Sea
atgaagcagccgaaaaatcactgggggaatccttcaagcccacactgggcaggacgtgatgccaagatacttcttgaagagtcacggaatagcctggccaaatcattaggagttgaacctcgtgaaattatattcaccagcggtggttctgaaagcaacaatgctgtacttagacagttgacgttagtgtcagaaaaacagcacctaatcacttccaaaatagaacacccttctgttctggaaacctgtagaattattgctaaacagcccaacatatcgctaacagaactccctgtcgattcttcaggattaattgatccagaatcgctgcaagatgtgatactttctcaaacctctttaatttctttaatgactgcaaacaatgaaacaggatgcttgcagcccattgaagaattatgtaagatcgcacgtgaaaatgaaattatgtttcactctgacatggtacaggcaactggtaaaataaaatttaatttaaatgaatctggaattgattttgcctcgataacttctcacaaaattggcggaccgcgaggaataggactactttatgccaggcaaggaactaactttgaatcccttttaactggaggtaaacaagaaagagtaagaagggcaggaacagaaaatgttacacttgccgtaggctttgcaaaggctcttgaatggtatttggaaaatcagaacagacttcaaaaacaaaatactcatttcagggaaaaagttttagataaaatagggtccattgatggtttttttaaaaacactaacttggataacagccttagtcatactttaaactttggttttagtggtataagtgcagaaagtcttttgatctcacttgatatggatagaattgcagtttcaacaggctctgcatgttcatcaggtgctatgga

SEQ ID NO: 258755 - DNA, 554 bp, Unknown
  Bacterial polypeptide expressing nucleotide sequence isolated from the Sargasso Sea
tatgaaactgccaatatatcttgattataatgctacgacacctgtcgattcgagagttttagaggaaatgattccatatttctccgaatcatttggaaatgctgcaagccggaatcactcttttggatggcaagtagagaaagtggtagaaagttcaagggaattgataggaaaatcaattggtgctgacggtaaggaaattatttttaccagcggagctactgaatccgacaatatagctattttaggggttgcagaattttataaaaataagggtaaacatattattactagtttgattgaacacaaagcagttattgatccttgtcacgctttggagcaaaaaggttacgaaattacttttcttgaagtagacaaatttggttgtattgatctaaatcaattggcagattctataagagaagatactattttagtttcacttatggctggaaataatgaaattggtactatcaatccgatagaaaaaataggcagaattactcgtgataagggtgtactttttcatacggacgcaactcaaggagtaggga

SEQ ID NO: 258756 - DNA, 433 bp, Unknown
  Bacterial polypeptide expressing nucleotide sequence isolated from the Sargasso Sea
gatgctatcaactcccatactactagactatcaatcttcgactccttgctctaaagatgttgttgattctatgcaacctttttggagtgagatattttctaaccctgcgagcaaatctaatttggcgggcattaacgcaagtgctatattggaggcttcaagagaaaaaatagaacaaaatttatttctgaagaataaaaaagttatttttacaagtggggcaacagaatctaacaacctagctttattaggttttgctagaaattattgcagaaaaacaggaaattatggacatattattactttaaaaacggagcataaagctgtacttgaaccactaaaccaactaaaaaaagagggatttatggttacagaaattaatcctgaagaagatgggcttaatttcagaagaaaagattcaaaaaaaatataa

SEQ ID NO: 258757 - DNA, 553 bp, Unknown
  Bacterial polypeptide expressing nucleotide sequence isolated from the Sargasso Sea
tatgaaaaataatgactatttatatttagaccatgcagcatcaacgcctatgcgaaaaacagctattgctgagtatgtaaatgcagaaagttttgggtttgctaattcatcaggaggtcacaaattatctagagattcaaaaaatttattagaagattcaagagagaaaattgcttcattactcgatgttgcacctggtgaaattatattcacaagtggcggaacagaagctgataattggacaataaaatcattatttagttctaataaacttgaagagaaccttgtgacttcaaatatagaacatgaagcagtacttgcatcagcagaatgggtttcatcacttggtcatgaagtaagttatgcaaaatcaaacaacgtaggattagtcgaaaaagatgagttcttgaatcatgtaaataagaaaacaattgttgcatcgttaatgtggggaaataatgaaacgggggtaatccagccaataagtcaaatttctaaagccattaaatcagctaatgaatcaacattgtttcattcagatgtgttcaaggaa

SEQ ID NO: 258758 - DNA, 349 bp, Unknown
  Bacterial polypeptide expressing nucleotide sequence isolated from the Sargasso Sea
atgccagtttatttagacaacaatgccacaacaccactgcgaaaagccgcaaggacagagatgcttggtgcgatggggccgccagcgaacccctcatcagttcatggctttgggcggaacgcacgtttgcttgttgagtcggcacgtgagtcggtggccactctggctggatgtcatcaagcaaatgtcgtctttaccagtggtggcactgagagcaataatctggtgctggcacagtacgaccatgtaatcaccagtgcgattgagcatgactccgttcgccatgcacatgatcgttgccaggttattgctgttgaccagaatggaatcattgaccttgatcaactgg

SEQ ID NO: 258759 - DNA, 903 bp, Unknown
  Bacterial polypeptide expressing nucleotide sequence isolated from the Sargasso Sea
aaaccaaatcaaatcatattcaccagcggaggtacagaagcgaataaccatgttttatggtctcgtttaggacagaaaaataatcatgttgttaccgatgagattgaacatcctgctgtattaaaagttcttcaaaacctctcatcaattggtttggagcacgatctggtatctgtcgatgataaaggatgtgtatctataaatgaaattgaactggcaatttcagaaaaaacgggactagtttccgttatgctggcaaataatgaagttggaactatacaaccaattcaaaaaattgtcgagatcgcaaacaaacaggaagttttagtgcatacagatgcggttcaatgcttagggaaaatgctaatcaatgtagttgaattagacatagatttcttaagtctttctgctcacaagttttatggtccaaaaggcataggtattctttttgttaaagattgttctgttttgtcctcttttatcattggagcaaatcaagaaaatgcactaagagccggtaccgaaaatattgcatccattgcaggaatgggacttgctgcagaattagctacattagaattagaaaaccacatacaacatttgactgaattagagacccagtttaaaattgggctcacttcttttttcaaggatgcaatatttaatggcgaccctaaaaataaactacctggacttataagcgtttctttcccagggtttagatctgatatcctgatgacaaagcttgatcgtgcaaatatggctgtctcaagtggctctgcctgtggttcaggtaatattaaaccatcagatattttatcagcaatgggcattgatgaggaaaccaatatctccacccttcgtattagttttgggacttctaatacttgtgtagaagtagat

SEQ ID NO: 258760 - DNA, 488 bp, Unknown
  Bacterial polypeptide expressing nucleotide sequence isolated from the Sargasso Sea
cctatttgtctcaaacacaattaagaataccctaagacccttgatgagcggtgggggccaagaacaaaatctaagatcaggaactctatcacctgctttatgtgttggtattggtgaagcttgtaaagatttaaataaaaatatagaaaaatattctaagcattttaagaatataaaatcagtattattatcagaattgaataaatctaaaattccatttaatatcaatggaagtattgagaaaagaattccaaataatcttaatatttcaattaaaggaaaagttgctgagcaactatttaactttatgcctcacattgctttatcaagtggctctgcctgtacctctggcacaatagaaaggtcacatgttttatctgcaatgaaacttgataataataggatagatggatcatttagaataagtgctggaagagatacaactaaagaagaagttaaacaattgattaaaagcttaaataaataat

SEQ ID NO: 258761 - DNA, 737 bp, Unknown
  Bacterial polypeptide expressing nucleotide sequence isolated from the Sargasso Sea
attgaaaataaacgaagattttaaaaaggaaattgctaatttaactttatataatgaattacctattaaaggtttgaacaaatcggttatcgaagataattttaaacaaatgattacaaggggaagtattgattataagggtggaaaggtatcaggggcaacttattccaagaatgaagatttggataatatgttaacaatattatttaaatatttcaataagtctaatcctttacatacaaatatatatccggcagttaggaagatggagaatgagtgtatttctgtaatgttaaaattatttaatggtgacgaaaatacttgtggagtatttactagtgggggcactgagagtattttaatggcgtgtaaaacctatcgggatttaggaagaaaaaaaggtattagtaacccagaaattattgtttctaatacagttcattgtgcttttaataaagcttgtaagtattttaatattaacttggtttctataccttgtttatataatggagaatttgacataaaaaagttgaaaaagaaaataaatggaaatacaattttaatagttggttctacaccaagttataatttaggaataatagatccaatagataaattaaatactattgctttaaagtacaaaataccattgcatttagatgcttgtataggagcatttttaattaatttttctgaatataattatggtttttcactttctggtgttactagtatct

SEQ ID NO: 258762 - DNA, 595 bp, Unknown
  Bacterial polypeptide expressing nucleotide sequence isolated from the Sargasso Sea
catgagcatttatttagactataacgctaccactcctcttagagatgaagttaaaaaagagatgctggatatattggggcctcccttgaatgcttcttcagttcattcttttggcagacaagctaaaacccatcttgaaaatgcaagaacagcaatttctaattttgttaatgccaatagtgatcaaataatttttacttcaggtgggactgaagctaactcgatgattatgcagatttttaaaagaccgttaattagttcaattgaacatgtcgcagtgatagcttcatctaaaaaccctaattttatagatgttgatagtaatggtttagtaaaaattgatgaccttgagtttaaaataaaaaaatttaatcctgatataatttctataatgtgggcaaataatgagacaggtgttattcagcctatcaaagatattgtaaaaattgcaaaaaaatataaagtttatatccattgtgatgcagttcaagctctaggaaaaatagatattgattttagagcctctggtttaaatagcttagctatttcatctcacaaaattggagggccagttggagttggagctttattatag

SEQ ID NO: 258763 - DNA, 397 bp, Unknown
  Bacterial polypeptide expressing nucleotide sequence isolated from the Sargasso Sea
gatgactacatatttagatttcaacgcaactacccccgtactgccagaagtagcagatttaatttacaaactaatggtagaggaatacggaaatgccggaagcagaactcattcattcggtgccaccgcaaaacaggctgttgaaaaagcaaggaagcagttagcagatgtagttaacgctgataagtcagaggtcatttttacaagcggcgccacagaaagtaacaatattgcgattctgggcttaaaagagtacgccgaaaagaataacaagaagcacatcatcactaccgccattgaacacaaagcggtacttgaacctattgaaaaccttgtgagccatgggttcgaagtcacttacatcaaacccgatcagtctggagtgattgatgtagaa

SEQ ID NO: 258764 - DNA, 874 bp, Unknown
  Bacterial polypeptide expressing nucleotide sequence isolated from the Sargasso Sea
tatgcaaaagagaatatatttagattggaacgcttcaagcccactgtctaaaaatgcttttttagcgatgaaaagtacttttgaaaattttgctaatccatcttcatctcattatgagggtagggccgcaaagaaagctatagagaaggctcgagataaaatagcagaaataattggtttaaatacacgttttaatattatttttacctctggtgctacagaatcagctgcaatggttttacatcataaaaatttaaattgtgcacccattgagcatgaatgtgtaaaagtttggtcatgttcaaaccttgttgtaaatgaaaatggtaaagtaatggttgatgacccaccaaattcaactttgcagtcagccaattcagaaacgggtattattcaacagcttcctaatggaatttattttactgatgcagcacaagcatttggaaaaatttttacagatttttctaaatttgattttcaattttcatcaatatcttctcacaaaattggaggaccaaaaggtataggtgctttgatagtaaaagatataaatgaattaaattcttttataaagggtggtggacaggaatttggtaaaagatcaggaactgaaaatttaatgaatattcagggatttgcaaaatctattgaagacagaatatttgaaattaattcagggaaatgggacaaaatcaaatcaaatcgagattatttggaagaaatgatattgaatgaaagttatgagacccttattgtaggcaagaaagttaatagattgccaaacactagtttttttattacaccaggttggaaaaatgatctgcaggttgctacacttgacttagaaggtttttctgtttcctctggaatggct

SEQ ID NO: 258765 - DNA, 682 bp, Unknown
  Bacterial polypeptide expressing nucleotide sequence isolated from the Sargasso Sea
aacgagataggaaccgttcaaccaataagtgaattagcgtctattgcaagcgaacataatatcccattccactcagacacagttcaagcgctaggcaaaattccattattagttaatgaactaaattgtgattttttaagtttctctgctcacaaattctacggacctaaaggggttggctttttatataaaaagaagttaaaagaaattaaatctttaaccattggaggtagccaggaaagtggttatcgcgcaggaacggaaaatatttccggcattgtaggtttggcggttgcaactaaattaattagagaaaatttacctaaacgtatagaccacttgaaacatcttgaaaaaagatttaaagaaaatttaaataatataaattctaagattttttacaatggtcatcctgaaatacgcgtccctggcctaattagcatgactattcctggataccgtagcgatattatgatggcaaaattagatagagaaaatttagaagtttcaagcggatccgcttgtggctctggctcaataaaaccatcaaaggtcttgcgagagataggccataaggatgatattaatgtttgtacacttagaatcagctttggtagagacaactcttcagaagatattgatcgacttgcaaatgcaatgattagtataattaatgagtaag

SEQ ID NO: 258766 - DNA, 589 bp, Unknown
  Bacterial polypeptide expressing nucleotide sequence isolated from the Sargasso Sea
aatggatatttatcttgaccatgctgctagtacaccagtacgagaagaagttatccaagcaatgctgccatggctttcgaaccacccaggcaacccttctggctcccatcggttagcacgtgaagcaaggcgagctatagatgatgcgagagacaatgtggctgctttattagatgcagaacctggcgatgttatttttactagtggaggaactgagtcagacaatttggcaatagatggagttctaggtgccaaaggaggacgggctatatgctctgcggttgaacatccagcagttctggaaccagttagagactctggaggaataatcgcccctacagatgcaactggaaggatagatttcgagaatttatctttccttttggattcaatcgctgatatttctttggtctcgataatgatggtaaataatgagacaggagtcattaatgacattgacatgattgctgatctgataacagaaaaatctcctgaaagctttattcatacagatgcagttcaagcgacttcttggttggatgttgccgaattatcgaaaaaagcacatttaattagcttacagggcaca

SEQ ID NO: 258767 - DNA, 193 bp, Unknown
  Bacterial polypeptide expressing nucleotide sequence isolated from the Sargasso Sea
atgcatccaaagaataccccgattttgtttggccaaggcggagctgaaagtgagtttttaaatgactttacgtctggcagattacaccatacttggctaatcacagggcccaagggcattggaaaggcaaccctggcataccgaatagatagatttgttttatcaaaggagcgtatcacagaaccaaggtgag

SEQ ID NO: 258768 - DNA, 911 bp, Unknown
  Bacterial polypeptide expressing nucleotide sequence isolated from the Sargasso Sea
atgccgctaagaagtgaagctaagcaggcaatgatagaagcgatgagtgttgtggggaatccctcatctgttcatttagagggtcgagctgcaaagaatttaatcgaaaatgctagattgaaaattgcagaagcgattggtgcagttggggcagatatcatatttacatctggagcaacagagtccgcagcactggccctctcaggacgaaatataatgtgttcaagagtagaacatgaagctgttagcagttggtgtagtgccagacttttgactgaccggaatgggatggttgatattcataagcctgaacattccgcacttcaagttgctaattctgaaactggaatcatgcaagaaagtgttaagggaatctggctttctgatatgacgcaagcttttgggaaaatccctttggcttataattggtatggttgtgattgtgcgatgatttctgctcataagatcggtggtcccaaaggtattggggctttggttttgaaaagaggaacagatttggcctctcttatcaaaggtggtggacaggaaatgggtcgacgatccggaacggaaaatgtgttaggtatcgttgggtttggggccgccgctgaagcggctcaaaaagacttagttaacggtgaatgggaaaagatttcagaatttagaatgattctagaaaatatgattgaagaattctcagatgttcctattttagtaggtaaggattctaaacgattgcctaacacaagttgttttataacgcctggatggaaaggagaaactcaagttatgcaaatggaccttgagggaattgcggtatcttctggttctgcttgttccagcggaaaagtgaagcctagtgatgtgcttaaagaattgggttattctgaaagagaggcctcttgcgcatt

SEQ ID NO: 258769 - DNA, 880 bp, Unknown
  Bacterial polypeptide expressing nucleotide sequence isolated from the Sargasso Sea
atgaaaaatcaagactatttatacctagaccatgctgcatcaacaccgatgcgtaaatctgctttggataaatatatagaagcagagagctttggttttgctaattcttcaggaggacataaactttctagaaattcaaaaaatttactagaagattctcgagaaataattgcagaattattagattctgctcctagtgaaatcgtttttacaagtggtggaaccgaagcggataattggacaattaagtctttatttgattcaaaacaaccaaataataatctagtaacttcaaatattgaacatgaggcagttcttgcctcagcagaatggatatcctcaaacggttttcaaactaaatatgctaagtctgatgaaaatgggtttgtaactaaggatgaatttataaaacaaattgatgatgaaaccaaagttgcatcgttaatgtggggaaacaatgaaacaggagtcatccaaccaataaaagatatttctaaagaattaaaatctatcaactcatcaacactttttcattcagatgttgtccaaggcattatctcagataatgttgattttcatagaaatggaattgaaagtgcagcaatatctgctcacaaaattggaggccctaaaggtgttggagctatgtttgtaaataataaatttaagttacccagctttttacatggtgggaaacaagaacttgagagaagggcagggacagtggatgtacccggcatagcagcatttgctacagcattgcaggaacaacaaagaagatttgatgaagaagttggtttgatgaacgatgaaaggtcaatttttgaagacaaacttaagaatgcattaagtgtagagattataggagagtcaatgaaga

SEQ ID NO: 258770 - DNA, 712 bp, Unknown
  Bacterial polypeptide expressing nucleotide sequence isolated from the Sargasso Sea
acctcgtcaccactcgcctttgaccaccaggccacgacgccctgtgcggcggacgtcgtgcgtgcgatggcgccctattggagcgaacagtgggggaacccctccagtcgccagaaccggctcggactcacagcctcagcggcggtgaacctggcccgtcggacgctggcggaagccctggcggtgaaaccggaacagattgtgttcaccagcggtgccacggaggccaacaacatcgccctgctgggacgtgcccgccgatgtggcgctcctggccatgtcatcagcgtgcgcagcgaacatcacgccgttctcgatccactggcgcagctacagcgggagggattccgcatcacactgctccaacccggttccgatggcctgattacaccggatcagctgctgcatgccctgcgacccgacaccctgctggtctcggtgatggcagccaacaatgaaatcggtgtgctgcagcccctcaaggccttctctgccctctgccggccgcgtgggatcacgctccacagcgatgcagcccaggccttcgggcacatcccctttcatcccgatgccctcggactggatctggtcagcctgagcgcccacaagctgtacgggcccaagggcattggtgcgctcgtggtcggtgtgggtgtggagctggaccctctgcagtgggggggaggccaggaacatggccttcgccccggca

SEQ ID NO: 258771 - DNA, 783 bp, Unknown
  Bacterial polypeptide expressing nucleotide sequence isolated from the Sargasso Sea
aatgagagcttatttagattacaattctactatgccgctgagaagtgaagttaagcaggcaatgattgaagctatgaatgttgtgggcaatccctcatctgttcatttagagggtcgagctgcgaagaatttaatcgaaaatgctagattgaaaattgcagaggcgattggtgcagttggagcagatatcatatttacatctggagcaacggagtctgcagccttggccctctcaggacgaaatataatgtgttcaagagtggaacaccaagctgttaacagttggtgcagtgccaaacttccgactaaccggtatggaatggttgatatcgataagcctgaacactccgctcttcaagttgctaattctgaaactggaataatacaagaaagtgttaagggaatatggctttcagatatgacgcaagcttttggaaaaatccctttggcttttaattggtatggttgtgaatgtgcgatgatttctgctcataagatcggtggccccaaaggtattggagctttaattttgaaaagggggacagatttggccgctcttatcaaaggtggtggacaagagatgggccgacgatctggaacggaaaatgtattaggtatcgttggttttggggccgccgctgaagcggctcaaaaagacttagttaatggtgaatgggaaaagatttcagaatttagaatgattctagaaaatatgattgaagaattctcagatcttcctatcttagtaggtaaggattctaaacgattgcctaatacaacttg

SEQ ID NO: 258772 - DNA, 476 bp, Unknown
  Bacterial polypeptide expressing nucleotide sequence isolated from the Sargasso Sea
aatgctatcaactcctatactactagactatcaatcttcaactccttgctctaaagatgttgttgattctatgaaacctttttggagtgagatattttcaaacccttcaagcaaatctaatttggcgggtatcaacgcaagcgctatattggaagcctcaagagaaaaaatagaagaaaatttatttcttaataataaaaaggttatttttaccagcggggcaacggaatctaataatctagctttattaggttttgcaagaaattaccacaaaaaaacagggaattatggacatattattaccttaaaaacggagcataaagctgtactggagcccgtaaaccaactaaaaaaagagggatttatggttacagaaattactccggaaagagatggcataatttcagaagaacagttcaaaaagaatattagagaagatacatttatggttagtgtcatgatggcaaataacgaaa

SEQ ID NO: 258773 - DNA, 955 bp, Unknown
  Bacterial polypeptide expressing nucleotide sequence isolated from the Sargasso Sea
tactacacagttagacaaacgcgttttagaagagatgattccttttatggttcaaaattatggaaatccatcttcaattcataagcacggtagagaagtcaaagcttcagtagaaaattctagaaataaaatcgctgatattttagatgtaactcctggagaaatattttttacttctggaggtactgaggcagataatacatttttaataaacgccatatattcaagaaaaataaaaatagcaataacatcaaaaattgagcatcatgctgttttacatacattagaggatcttgaaagaagaaatattataaagattttgtatgttgacattgattctaagggtcatatagattatgatcatttagaaaaattaatttcatctaatcctaaatcaattgttagtttaatgcatgggaataatgaaattggcaatattaccgaaatagaaagagttgcagaaatgtgcactaaaaatgattctatttttcattctgatacagtacaaacaatcggtcattttaacattaacctttcatccaaaaatattcattcaatagttggttcagcccacaaatttcatggacctaaagggataggttttatgtatatcaacaataagataaaaataccgccatatattataggcggttcacaggaaagaaatatgagagggggcacagaaaatgtttctgggattataggtttatctaaagctctagaaataacaatagaagaaaaagacaaaacaaaaaaacatattgaaaatttaaaattcaatatgattgatatgttgaagaaaaacattaagaacttaatatttaatggagattgtgataatctcaaaaaaagtttatatcatgtattaagcttatctattcctaaaattgaagataaacagatgtttttattcaatttagatattaataaaatttcagtttctgcaggaagtgct

SEQ ID NO: 258774 - DNA, 343 bp, Unknown
  Bacterial polypeptide expressing nucleotide sequence isolated from the Sargasso Sea
aactaagatactaagagattatttctataaaaatcttaaaaaaaatattaaaaatatttttataaatggacatactgtcaaaagacttccagctaatttaaatatttcaataccgggtataaattcagagaaattgataaataatttaaaaaaaactgtgatttcttctggttcagcgtgcactagtaacaatattgaagcttcatatgtgttaagtggtatgggtttatcaaaagaagtagttaactcatctataaggataggtataggaagatatactacaaagaaagatattaataatgctattaaagatattactgatactgttaaaaagttgagataa

SEQ ID NO: 258775 - DNA, 775 bp, Unknown
  Bacterial polypeptide expressing nucleotide sequence isolated from the Sargasso Sea
acaccgctgcttccccaggcacgagaggcctggctggacgcttctgctgttgctggtaatccatcgtccctgcatgcgtccggtcgtgctgctcgcaggatcgtggaacaggctcgtgagtccatcgccgacgatctgcgcacgcgaccctcggcagttgtgttcacctccggtggaaccgaatccgacaacctcgccgtcaaggggctctggtgggcccgtcgggcgcggctgggtgtcgccgatgcgatcgtggccgcatcggcgatcgagcaccacgccgtcctcgaccctgtcgaatggctcggcaagcacgaaggtgcggacgtgcggtggattccggtcgatgcatccggccgagtcgaggtggatttcatcgatcatctgttgtcgtcggcggcggagagaacggcgctgctgtcggtcatgtgggcaaacaacgaggtgggcaccgtccagcctgtccgagagatagcggcagcgtgccgcagcgcgggtgtgcccttccacaccgacgcggtccaggcgctcggccaaatccctttggatctgtccgaggtcggtgcgacggccgtgaccattagcggacacaaggtaggtggcccgttcggcatcggagccttggtcgtcgacccgtacgagaacctcgttgccgtgtcacacggtggtggtcaggagcgagatattcgatccggcaccttcgatgcgccggctgccgccgccttcgccgtcgcggtgcatcttgcggtcgaggagcaggctgcacgcgccgcgc

SEQ ID NO: 258776 - DNA, 777 bp, Unknown
  Bacterial polypeptide expressing nucleotide sequence isolated from the Sargasso Sea
caactggtgttcaccagtggtgccaccgaagccaacaacctggccttgctgggccatgctcgagccaggggcagcggtcatctgatcagcgtagccacggaacatcacgccgtgctcgatccgctccaacaactgcagcgggaaggtttcagcgtcaccctgctgaccccaggccccgaggggctgatcacccctgagcagctgaggcaggcgatcacccccgagacgcagctggtgagcgtgatggcggccaacaacgaaatcggggtactgcaacccctgacggccctggccgcggtgtgccgcgaccacggagtcacccttcacagcgacgccgcccaggccttcggtcatatccccctggaaccggatgccatgggagttgatctattgagcctcagcgcccacaagctttatggccccaaaggcgtcggcgcgctggtgatccgagacggaatcaccctgcaaccactgcaatggggtggtggccagcaggcaggactcagggccggcaccttgcccacggccctgattgtcggcttcgctgccgccgtgcagctggccatgcaagaccgagagcaacgccagcagcgactggcggcgttgcgggatcagctctgggctgacttgcagcgcaagatccctggcgtgcgcatgaacggagctctggccccgcggcttgcccacaacctcaacatcaccctgcccggggtgagcggcagccgcctgcagcgcgccctcaagccccagctcagctgcagcagcggctccgcctgc

SEQ ID NO: 258777 - DNA, 558 bp, Unknown
  Bacterial polypeptide expressing nucleotide sequence isolated from the Sargasso Sea
aatgctatcaactcccatactactagactatcaatcttcgactccttgctctaaagatgttgttgattctatgaaacctttttggagtgagatattttccaaccctgcaagcaaatctaatttggcagggattaatgcaagcgctatattggaagcctcaagagaaaaaatagagcaaaatttatttcttaagaataaaaaagttatttttacaagcggggcaactgaatctaataacttagccttattaggttttgctagaaatttttataaaaagacaggaaattatggacatattattaccttaaaaacagagcataaagctgttttggagcccctaaaccaactaaaaaaagagggatttatggttacagaaattaaccctgagaaagatggcttaatttcagaagaaaaattcaaaaaaaatataagagaagatacatttctggtgagtgttatgttggcaaataacgaaataggagttatccagcctgtagaggctatttcaaagatatgtaaatcgcgaggaataacttttcactctgattttgcacaatg

SEQ ID NO: 258778 - DNA, 184 bp, Unknown
  Bacterial polypeptide expressing nucleotide sequence isolated from the Sargasso Sea
tatgaaaagcaaagctatatattttgattatgcagcaacaactcctgttgacccaagggtcgctaaaaaaatgcatgaatgtttattgttggatggcaattttggcaatcccgcatcaagatctcatgaattcggctggaaagcagaagaagttgttgaaaaagcaagattacaggtggcagaa

SEQ ID NO: 258779 - DNA, 543 bp, Unknown
  Bacterial polypeptide expressing nucleotide sequence isolated from the Sargasso Sea
tatggaatgtgaaagaatatattttgattacaatgcttcatccttaataaggaaggaggcgttcaatttacttgaagaaattaatttttcttatggtaatccatcttctgttcatgaagagggaagatcaatgagagatttaattgagacatcaagagctaatgttgctaaatcaataaatacgaacgagaaaaacgtcatttttaccagcgggggtactgaagcaattgatattgccttaaatcaaaaccctggaagaataataatcaattcaactgaacacatagcagtatttgaagcagcaaaggatacaggttccaaaattgaaatattggaggttgattataatggcatagttgatcttgataatctagaaacaatgctatcaaaaggccctgcgcttgtatgtataatgtttgcaaataatgaaactggagtaatacagccaatagaaaaaatatctgaaattgttagaaagtataatagttatttattctgtgatgctgttcaagcatatggaaaaataaaaattaattttgatca

SEQ ID NO: 258780 - DNA, 770 bp, Unknown
  Bacterial polypeptide expressing nucleotide sequence isolated from the Sargasso Sea
cgttcaacccgaaacgtgtttcatttcggtcatggcggcaaataacgaaaccggaaccgtccagcccttccgggaactggcccggattgccagggagcgccaggttccgtttcattccgattgtgtacagtatgcgggtaagtgtgagttggatctcgaaagcagcgggctcaattacgcgactctgaccgcccacaaactgggaggtccaaaaggaatcggtctgctttatatccgtgaaggatccccgttttctccactgatcaccggaggaggccaggaacggagccttcgtgcaggaacggaaaatgttgcgatggcttgtgctttcgcagagtgtttcgaatggttttgcagcaatcgttctgaactggaaagccggtggttggctttgaggaaaaagttgttggattcacttgaagacgtggaacacggctttgttttgggaactcccgatgagagtctgccgaacaccctcaacctcgggtttcagggaatcagtgctgaaagcctgttaatatgccttgatctcgatgggatcgcagtttcctcgggttccgcctgttcttcaggagcgatggaagccagtcatgtattactggccatgggatattcccatgagcaggcaaaatcgtcgctgaggatcagcatgggatggaatacttccgaagaagatattgaggcattgttgcggcaattgattcatcatgtgaagaggctaactcccatttctgggaaatcggattcaaacatccaaattcctgaaccag

SEQ ID NO: 258781 - DNA, 948 bp, Unknown
  Bacterial polypeptide expressing nucleotide sequence isolated from the Sargasso Sea
aatgaatgtctactttgataatgcagccacaacaaaggtaagagacgaagtaatagatgatatttcaaatgtattaaaggattgttttggcaacccctcatccactcactcttttggaagatcagctaagtcatatattgagacatcaagaaagtcaattgcaaaaattataaattgtgatccagcagaaataatatttaattcaggtggaacagaatctgataattcaattctaaaatgtgtagtaaaagatttggggataaagcatattatttcatcaaaaatagagcatcatgcagtaacacataccctaaatgatcttgaattacagggtgttaatgtccattatgttaaactatccaaaaatggtaatatagacattgataatctagaacatctattaagttttaatgatgagcctaaactagtaaccttgatgtatataaataatgaaataggaaatattcttgatataaaaagtgtatcagatttatgtcaaaagtataactcactttttcacactgatgcagttcaggctgtaggtcattacaagattgatttaaaatctattaaaattgattttctatcgtcagcaggccataaatttcatggtcctaaaggggtaggttttacctacataaataaattaacaaaaataaaatcatttatctgtggtggtccacaagaaagagggttaagagctggaactgaatctgttcataatattgtaggaatgacaaaggctcttgaaatagcagatagaaatatggaacaagaagctaaatatgttttgtcaataaaagaatacatgattaaaagcttaagaaaattgtttcctgatattcattttaatggagaatctggagatattcaaaaaagtacatatactattttaaatgtttgtttttctatatctaacgacaaagcagctatgcttgatttttacct

SEQ ID NO: 258782 - DNA, 693 bp, Unknown
  Bacterial polypeptide expressing nucleotide sequence isolated from the Sargasso Sea
tatggtgttcaggcagttgctttttaggaaagacccgggacatttattggtctcctcggtggaacacccctcggtgcttgaaaccgccaaatggctgacccgcaaaaacaatctgagtctcggcatccttccggtggaccaatcggggaaggtcctagaagcctccatggaagttgccgctcaacccgaaacctgtttgatttccgtcatggcggcaaataatgaaaccggaaccgtccagcccttccgggaactggcccggattgccagggaacgccaggttccgtttcattccgattgtgtgcagtatgcggggaagtgtgagttggatctcgaaagcagcgggctcaattacgcaactctgaccgcccacaaacttggaggtccaaaaggaatcggtctgctttatatccgtgaaggatccccgttttctccactgatcaccggaggaggccaggaaaggagccttcgtgcaggaacggaaaatgttgcgatggcttgtgctttcgcagagtgtttcgaatggttttgcagcaatcgttctaaactggaaagccggtggctggttttgaggaaaaagttgttggattcacttaaagacgtggaacactgctttgttttgggagctcctgatgatagtctgccgaacaccctcaacctcgggtttgagggaatcagtgctgaaagcctttt

SEQ ID NO: 258783 - DNA, 466 bp, Unknown
  Bacterial polypeptide expressing nucleotide sequence isolated from the Sargasso Sea
tatgaaattgcccatttatcttgattataatgcaactactcccgttgatccaaaagtaatggatgcgatggtgccttactttaccgaatcatatggcaatgctgccagccgcaatcattcatttggatggcaagtcgaaaaagttgtagatgattcgcgtgaattaattggcaaattaattggtgcaggaggaaaagaaatcgtttttaccagcggagccacagaatcgaacaatctggcaattctgggagtcgctgaattttataaaaaaaaaggaaaacacattatatcaagcccaattgaacataaggcggtaatcgatccttgtcatgccttagaacagaacggatacgaaattacatttcttgatgtagataaacatggttgcatagatctgaaacaactggaagaatcaatccgtcaagatacaatattagtttctttaatggcaggaaacaacgaaatt

SEQ ID NO: 258784 - DNA, 681 bp, Unknown
  Bacterial polypeptide expressing nucleotide sequence isolated from the Sargasso Sea
atcctatgaaggaaatctctaatatttgtaaaaaaaataatgtatggctacatactgatgcggcacaagcagtgggaaatatcgatgtaaaagtaaatgatttaggtatagatttaatgagtatttcaagccataaattgtatggtcctaaaggtattggctgcttatttgtcagaagaagacccagaataaggttgcttccacaaattgatggaggaggtcaggaaagattattacgttcagggacattacctacacctcttatagtgggttttagtgaagcaatgtataaagcaaatataaatctaaataataatattattaagctaaagtttctaagagacagacttcataaccattttattgagtttgataaaaatataaaactaaatggaacggatataactaagaaccgcttaccaaataatttaaattattttgtaaatggagttaatgcactagaattaacagaatctctcggaaattatgtggcattttcaacagggtcagcttgctcgacaggaaatattgaaccttcttatgtcctatcatctataggattgaaaaaagaagaagcattatcatcatttaggatttcagttggattagaatctacaaaagaagatattgataaagctgctaaaattatttgtaataaaataagtttattgcgaaaataaa

SEQ ID NO: 258785 - DNA, 772 bp, Unknown
  Bacterial polypeptide expressing nucleotide sequence isolated from the Sargasso Sea
gggattatgatttctaatgatatagaatctgcaataaaacaaaatacaaaattaatctcgattatgtatgttaataatgagattggctctgtaaatccaatcggaaacatcgttgaagttgctaagaaaaataatattaaagtacatacagatgcagtgcaaataatcggcaaacagcccttagatatcaaaaaaatagatgttgactttttaagtatagctgcacataaatactatgggccaaaaggcattggagcattattcgttaaatccgggaatatattagattcggttttacaaggtggaggacaggaaaaaaatctccgacctggtacagaaaatatttctggtattgttggcatgggtttagctacacaaatagcaattcaaaatgtagttgaaaactcaaaaaaaatattagatttagaaaatgcatttataaatgcattaaatgaaaaaaaaatcaattacaaactgaatggaaaatgtagaataccaggaattcttaatattacttttcccgctatacttgggcagacactagtaatgaaattagatttaaatggagttgctgtttcatttgggtctgcatgttcatcaggcacacctaagccttcagaagttttactaaacctaggactaactagcgatgaggcattaagaacaattagaatctcaattggcaaatttcatacagataatgatatttatgatttagtgagtatgttgaatgaaatactatgtaatgaatatgaaaaggatactgcataat

SEQ ID NO: 258786 - DNA, 698 bp, Unknown
  Bacterial polypeptide expressing nucleotide sequence isolated from the Sargasso Sea
tgaaattggaattattcaacctatgaaggaaatctctaatatttgtaaaaagaataatgtatggttgcatactgatgcggcacaggcagtgggaaatatcgatgtaaaagtaaatgatttaggtgtagatttaatgagtatttcaagccataaattgtatgggcctaaaggtattggctgcttatttgtcagaagaagacccagaataaggttgcttccacaaattgatggaggaggtcaagaaagattattacgttcaggaacattacctacgcctcttatagtgggttttagtgaagcaatgtataaagcaaatataaatctaaataaaaacattattaagttaaagtttctaagagacagacttcataatcattttattgagtttgataaaaatataaaactaaatggaacggatataaataaaaaccgcttaccaaataatttaaattattttgtaaatggagttaatgcattagaattaacagaatctcttggaaattatgtggcattttcaacaggatcagcttgctcaacaggaaatattgaaccttcttatgttctatcatctataggattgaaaaaagaagaagcattatcatcatttaggatttcagttggattagaatctacacaagaagatattgataaagctgcaaaaattatttgtaataaaataagtttattgcgaaaataaa

SEQ ID NO: 258787 - DNA, 475 bp, Unknown
  Bacterial polypeptide expressing nucleotide sequence isolated from the Sargasso Sea
atgctatcaactcccatactactagactatcaatcttcgactccttgctctaaagatgtcgttgattctatgaaacctttttggagtgagatattttctaaccctgcaagcaaatctaatttggcggggattaacgcaagcgctatattggaagcttcaagagaaaaaatagaaaaaagtttatttcttaagaataaaaaagttatttttacaagtggggcaactgaatctaataacttagccttattaggttttgctagaaatttctataaaaaaacaggaaattatggacatattattaccttaaaaacggagcataaagctgttttggagcccttaaaccaactaaaaaaagagggatttatggttacagaaattaatcctgagaaagatggcttaatttcagaagaacaattcaaaaaaaatataagagaagatacatttctagttagtgtcatgttgcaaataacgaaat

SEQ ID NO: 258788 - DNA, 246 bp, Unknown
  Bacterial polypeptide expressing nucleotide sequence isolated from the Sargasso Sea
atcttaatatctcaattaaaggaaaagttgcagaacaattatttaattttttaccaaattttgcattatcaagtggatcagcctgtacatcaggtactatagaaagatctcacgttttatcagcattaactaatgatgagtcgagaatagatggatcatttagaataagtacaggtagagatacaactaaggaagaaattaaaaaattaataaaaactttaataaatgttataaaagtaaaatgaa

SEQ ID NO: 258789 - DNA, 628 bp, Unknown
  Bacterial polypeptide expressing nucleotide sequence isolated from the Sargasso Sea
atgaatgtctattttgataatgcagcgacaacaaagataagagatgaggtaattgacaatatgtcaaatgtattaaaggactgttttggtaatccttcatctactcattcgtatggaagatctgcaaaatcttatattgagacatcaagaaagtcaattgcaaaaattctaaattgcgatcctggtgaaataatctttaattctggtggaacggagtcagataactcaattttaaaatgtgcagtgaaagatctaggtgtaaagcatattatttcttcaaaaattgagcatcatgcaattacacataccctagaagagttaaaaatacaaggcgtaaatgtcaattatgtaaaattatctgaaaatggaaatgtagatattgataatctagagtacttattgagttccaatgatgaacctaaacttgtaaccttaatgtatattaataacgagataggtaatatactagatgtaaaatatgtatcagatttatgtcaaaagtataattcattttttcataccgacgctgttcaagctgttggtcattataaaattgatctaaaatcaattaatattgattttttatcatcagcagctcataagtttcatggtccaaaaggggtagggt

SEQ ID NO: 258790 - DNA, 780 bp, Unknown
  Bacterial polypeptide expressing nucleotide sequence isolated from the Sargasso Sea
gttgcaataaagacgggcaggtagatatcaatgaatttttagataaatgcaacaaagatacagctattgcttctctaatgtatgcaaacaatgaaactggggtagttcaacaaatagaaaaaatagctaaagaggtaaaaattaaaaattcagatattttatttcactcagatgtagttcaagcagtttcttcagaaaaactagattttcataaattagggattgatagcgcagcagtttcagggcataaaataggtggtccaaaaggaattggaattatgtttttaagttcaaaatataaacttcctaactattttcatggtggaaaacaagaattagagaaaagagctggaacggtaaacgtttcaggtgtagctggccttgctgctgctctgaaggaacatcaagacaattttgataatgaaaagaaaagaatacttcaagaaagagaaatatttgaaaatgaactaaaaaatgccctagaaataaaaattgttggtgaaaaaattgatcgattatgtcacatttcaaatatacaatttaagagtgttaattcagaaacattaatggttgcacttgatctaaaagggttaggtgtttcaagaggttctgcatgtgcaagtggtgctcaaaaaccttcccatgtattagttgctatgaatgtccctgatattgacgtaaatagtcatctacgttttagctttggctggaatactaaagagggtgatgggaaatatgcatcagaaattgtaataaatacggtaaaggaaattctatgag

SEQ ID NO: 258791 - DNA, 253 bp, Unknown
  Bacterial polypeptide expressing nucleotide sequence isolated from the Sargasso Sea
gtttcttcaggatcagcgtgcacttctgcaagcctggagccgtcttatgttctacgtgccctgggagttggtgatgatctagcacattcatcaatccgtgtcggaatgggaagattcactaccgttgaagaagtagattacgcagctgaaaaaatgatagttgcagtgaaaaggctccgtgaaatgtctccgctatatgagatggtcaaagacggagtggatttgtcaactgtacaatggacatcccattaaa

SEQ ID NO: 258792 - DNA, 448 bp, Unknown
  Bacterial polypeptide expressing nucleotide sequence isolated from the Sargasso Sea
atgcattgcgtgagatggggagcgtctgtggccgctgcgccgatctacctcgatcatcaggccaccacgccgtgtgatccggcggtggttgaagccatggcgccttggtggagtgatggctttgctaatccctccagccgcagtcaccgccccgggctggaggctgcagcccagctgaccctcgcccgtgagcgtttggcctgttgcttaacggttcctgccgacgcggtggtgttcaccagcggggccaccgaagccaacaacctggccatcaagggtctctgtgaagcgcggctaacgcgggggcgccacatcgtcacggtggccaccgagcaccgagcggtactcgacccctgccgctatctgcaaagcctcggctttgagctcacggtgctgccggtgcagtccgatggtttgctcgatctctatgccttggcggctgccctaa

SEQ ID NO: 258793 - DNA, 869 bp, Unknown
  Bacterial polypeptide expressing nucleotide sequence isolated from the Sargasso Sea
catgatctaccttgatcataatgccaccactccactccttcctcaggtaaaggaaaccttaaaggagttgtttgggggggaatacggcaatccttccagcccctaccacaccggcagaagggcccgggatctgttggaagaatcccgtcaccgtcttgcagaactgctgggagccaaaccctccgagctgattttcaccagtggaggcagtgagggaaacaatatggtgctcaggcagttgctttttagggaagacccgggacatttattggtctcctcggtggaacacccctcggtgcttgaaaccgccaaatggctgacccgcaaaaacaatctgagtctcggcatccttccggtggatcaatcggggaaggtcccagaagcatccatggaagcagccgttcaacccgaaacatgtttaatttccgccatggcggcaaataacgaaaccggaaccgtccagcccttccgggaactggctcagattgccagggaacgccaggttccgtttcattctgattgtgtgcagtatgcggggaagtgtgagttggatcttgaaagcagcgggctcaattacgcgaccctgaccgcccacaaactgggaggtccgaaaggaatcggcctgctttatatccgtgaaggatccccgttttctccactgatcaccggaggaggccaggaacggagcctgcgtgcaggaacggaaaatgttgcgatggcttgtgctttcgcagagtgtttcgaatggttttgcagcaatcgttctgaactggaaagccggtggctgggtttgaggaaaaagttgttggattcacttgaagaagtggaacactgctttgttttgggaactcctgatgagagtctgccga

SEQ ID NO: 258794 - DNA, 735 bp, Unknown
  Bacterial polypeptide expressing nucleotide sequence isolated from the Sargasso Sea
tatgaccgaacgcatatacctcgattacaacgcgaccgcccggattcgtccggaagtcatctcaaccatggcggaaaccatggcgtcagtgggcaacgcgtcatcggttcatagcgccgggcgggccgcccgaaaggccgtggaaaccgcccgaaagcaggtctccgcccttgtcggtgcgcaaccggatcaggtgattttcaccagtggcggcaccgaagccgataaccaggccatggccggtaccgatcctgaacgtaccttagtctgtgctatcgaacacccggccgttctggatgcgagccccacggcgaagcgtttccctgtagatgcctccggggtggccgatctggcggcgctggaccgactgctctcagagacgccggaaccacaacttgtcgctctgatgctggcaaacaacgaaaccggcgtcctgcagccggtgcgcgaagccgcgaaaatcgtccacaaatacggggcacggcttcactgcgacgcagtccaggcggtcgccaagattccggtcgattttcaggcccttgggaccgacacaatggcgatgaccggccacaagtttggaggaccgcagggaatcggcgccctgatcgttcgcgacagagataccgtcgactgcctgatgcgaggcggcggacaggagaacgggctgcgcggcggtacggaaagcgttgccttgatagccgccctgggaacagccgccggaatcgccctggaccg

SEQ ID NO: 258795 - DNA, 1150 bp, Unknown
  Bacterial polypeptide expressing nucleotide sequence isolated from the Sargasso Sea
gatggataacaatatttatctagatcataacgcaacttcaccattgctaccagaagcgcagacagctatgaataatgcatctgggaggtctataggtaatccctcaagcccacattgggcaggacgagatgcgaagatacttctagaagaatcccgtgaaagcctagccaaatcattaggtgccgagcctcgtgaaattatatttacaagcggtggctctgaaagcaacaatgcggtgctccgacaattgatattagcttcaggggagcaacacctaatcacctctacgatagaacatccttcagttctggaaacctgcagaattctcgcaaaacaaccgaatatttcgcttacagaactaccggtagatacttcaggattaataaacccggaatcactaaaaaatgaaatactttcccaaacgactttaatttctttgatggctgcaaacaatgaaacaggatgcatgcaacccatcggggaattatgcaagattgcacgagaacacgaaatttcttttcacaccgacatggtgcagacatcaggaaaaataaaattagatttaaataaatctggaattgattttgcctctgtaacttcccacaaaataggaggaccccgtggcataggcttgctatatgctaggcaggggacatcttttgaatcccttgtaactgggggtaaacaagagagagttagaagggcagggacagaaaacgtgacactagccgtaggctttgcaaaggcacttgaatggtatttgaaaaatcaggatagactacaaaaacaaaatacgcatttcaggaaaaaagttttagacaaaataagtaacattgatggtttttttcaaaacactaacttggatcaaagtcttcaacatactttgaactttggttttagtggtataagtgcagaaagtcttttgatttcccttgatttggatggagttgcagtttctacaggctcagcatgttcttcaggagccatggaggaaagccatgtgctaatggccatgggaaggtcgagagccgaagcaaaatcaagtctaagagttagctgggggtggtcaacaaaagaagatgaaatagattattttctggagaaaattacccatcatattcaacgtcttaggcataaacaactaaactga

SEQ ID NO: 258796 - DNA, 877 bp, Unknown
  Bacterial polypeptide expressing nucleotide sequence isolated from the Sargasso Sea
aatgctatactttgatcatgcagctacgacacctgtccatcctgaggttattaaaaaaatggatcaagtgtcaaagcgtgattttggcaacccttcaagtgtttactcttctgggagggctgcaaaatcagtagttgaactagcgcgaaatgaaatcgcaaatatgattggcgcaaaaccctcagaaatttattttactggaagcgggactgaatcaaataatattgtattatggtctttattgtaccaagaaaaaaagcatgtaattacatcagcaattgagcatccggcagtattaaaagttttggatgaattgagtttttttggtatttcatatgatattttaccggttgatagcactgggctagttaatccatcggatttgaaatcagttattcgaaaagatactgcattggtttcgataatgtatgttaataatgaagtaggaactattcagccaattgaagatttaattgatattgcaaaatctttttcaatcccatttcattctgattgtgttcaagcggtaggaaagcttccaatttctataaatacaattgaagcagattatatgagcttctcagcacataaattttatgggcctaaaggaatcggatttttatacaaaaaggaaggtaaccatttaaagcctttaataataggcggtagtcaagaaagcaatttgcgtgctggaaccgaaaatataagcggtattgcaggtttaggggttgctgctcaattagtcaatacaaatttaaatgatagaattaagcatttgttacaactagaagattattttaaaacaaaactaactaatcagcatccagaaataatttttcatggtaaccactcaaaacatgtacctggtttatgtagt

SEQ ID NO: 258797 - DNA, 1159 bp, Unknown
  Bacterial polypeptide expressing nucleotide sequence isolated from the Sargasso Sea
gctgtcacgccgtcctgttgcctttgatttccaggccaccacgccctgttcggctcaggtggtggaggcgatggcgccctactggagtgaggaatggggcaatccctccagccgtcagcaccgcctcggactcaccgcttcagcggctgtgaacctggcccgcaggcagatcgcggatgccttggccatcacgccccagcggctggtgttcaccagcggtgcaacggaagccaacaaccttgcgctgctcggccatgcccgagccctggggagcggccatctgatcagcgtggccaccgaacaccacgcggtgctcgatccgctgcatcaactgcagcgcgagggatttgccgtcacgctgctgcaaccgcgcgcggacgggctgatcgatccgcagcagctgcgtgcggcgatcacccccgacacccggctggtcagtgtgatggccgccaacaacgaaattggcgtgctgcaaccgctggcggagctggcttcggtctgtcgcgaccacggcatcgccttgcacagcgatgcggcccaggccttcggtcacatccctctcgagcccgatgccctgggcgttgatctgctgagcctcagtgcccacaagctctatggccccaagggaatcggtgctctggtgatccgagagggtctgggacttcaacccctgcaatggggcgggggccaggaggcgggcctgagggccggcaccctgcccaccgccctgatcgtgggttttgcaaaggctgcccagctggccatggccgatcgggaagaacggcagcagcggctggcaggactgcgtgatcaactctgggagggcgtgcagcagcgcctccccggcgtactgctcaatggggccctgcaaccacggctgccccacaacctcaacgtcaccctgcccggtgtgagcggcagccacctgcatcgcgccctcaaaccgcaactcagctgcagcagtggctcggcctgcagcaacggcgccccctcccacgtgcttcaagcgatcggccgttcgcgcgccgaagccgaagcctccctgcggctgagcctggggcgcgacaccacagcagacgacgtccaccaggcagtgatcgccgtgggtgaggccgtcgctgcagcccagcgcagatctacctacgttcagctcgactga

SEQ ID NO: 258798 - DNA, 805 bp, Unknown
  Bacterial polypeptide expressing nucleotide sequence isolated from the Sargasso Sea
tatgggatttaatgtaaattttgtttcatgcgacggcgaaggagtcacaaatattgatgaatttaagaagtctattaatgcaaacactctaatagcttcagtaatgtacgcaaataacgaaacaggagttgtccaacctattcaagaaatgtcaaaaatagtaaaggacatcaatccaaatgcattatttcattcagatgtagtacaagctgttgctaccaaaaaattaaactttcataatcttggaattgaaagtgctgctatttcaggtcacaaaattggcggacccaaaggtattggtgttatgtttttaaagactggatataaaattcctagcttcttacatggtggaaaacaagaactcgaaagaagagcaggtacagtaaacgtttctggtgttgctggattagctgcagctcttaaagaacaacaaaacaatttagaaaaagatgttgaattaattgaaaatgaaaaaacaatatttgaaaataaccttaaagagaatattgaattaagagtagttggagaaaatgtagagagattgtgtcatatatctaatatacaattcaaagatataaattcagaaacattaatggtggctttagatttaaacggaatgggagtttcaaggggctcagcatgtgcgagtggtgcacagaaaccatctcacgtactagaagctatgaaagttgatgaacaagttattaataatcatcttagattcagctttggttggaatacacaaaagggtgatggtgaaaagtgtgctgaaattgtcgaaaagactataaaggaactgtcatga

SEQ ID NO: 258799 - DNA, 1138 bp, Unknown
  Bacterial polypeptide expressing nucleotide sequence isolated from the Sargasso Sea
aatgaatgtatattttgataatgccgctaccacacaagtaagagatgaagttataaaccaaatttcagatatacttaaagattgttttggaaatccatcttctacacattcctttggaagaacagcaaaatcttacatagaaagctcgagaaaaaaaatctctgaaattttaaattgtgaaccgagtgaaataatatttaattctggaggtacagagtctgataactcattactcaggtgttccgttaaggatcttggtataaagacaattatatcttctaaaattgagcatcatgcaatcactcatactttagatgaacttaaaaaagaaggagttgaggttaaatatgtagatctagatgataaaggagaaattaattataatcatcttgaggaattattaagtgaagatagtaatcaaaaacttgtcactctaatgtatattaataatgaaattggaaatatactagatgttgataaggtgtcaggtttatgtaaaaataataactcattatttcatactgatgcagtgcaagcagttgggcattacgaaattaatctagaagaaaccaaaattgactttttatctgctgctgcgcataaatttcatggccctaaaggtgttggtttttcttttatacgaaagacatcaagattaagtccttttatatgtggaggtcctcaggaaagaggtcttagagctgggactgaatctgttcataatattgttggtatgaccaaagctctagaagtttcatgtgataaaattaatcaagaatcaaaatatattcgttcaattaaagaatacgctattaatgagattaaatcaatttttccaaaaattcattttaatggcctttctggtaaccttgataaaagcacatacacaattcttaatgtttgttttcctctagacagtgaaaaaggatctatgttagattttcatcttgatcttaatggaattgcttgttcaaagggaagcgcatgccaatcaggaagttctagtggctctcatgtattaaatgaaatacaaactgatgaattaaaaaagtacccctctgtaagattctctttttctcattataacacaaaaaaggaagttgattatttgatagaaacaataaagagcttaagctaa

SEQ ID NO: 258800 - DNA, 1115 bp, Unknown
  Bacterial polypeptide expressing nucleotide sequence isolated from the Sargasso Sea
cgctacaacgcctatagacccatctgtactatcactaatgagtgaattaaatcaaaaaatgtatgggaacccttctagtgtatatgatttgggaagaaatgcaaaaaatataattgaaatagcaagaaggcagtttgcagaatcaataaactgtgaacccaaagaaattatatttactggtggcggaagtgaagcaaacaatattgtactttggaatatgcttcatcaaaaaagaaaccatgtaattacatcttctattgaacatcccgcaattcttttagtattaaaagaattagaaaaattaggagtaacgcatacaattatacctgtcgataataacggaaatgttaatcctgatgatattaaaaataatattactcctgatactgggttaatcacaattatgatggcaaataatgaagtagggactattgagcccattgaagatattgcaattattgcgaaagatcatgatatattatttcattctgatgcaatacaggtattaggaaagctacctgttgacgtaaagaagctcaatgtggatatgatgagcttttcagcacataaattttatggtcctaagggtgtaggtgctttatttttaaaaaacggggtcaatattaagccaatgataattggtggtagccaagaaaaaaagatgcgtgcaggaacagaaaatgtaagcggtattgctgggttagggcttgcagctgaaattgcgagaaaatctacaaatgaggtttgttctcatttagtaaaattagaaaatcattttagaaataggatattggaaataaatcatgatataatttttaatggaaatttaaaaaataatcttccaggattaattaatctaacaattccaaatatttctagtgatctcttactaattcatctagataagcaaggaatcgcaatttcaaatggatctgcttgttcatcaggaacaattagcccctcccctattttaaaagcgatgggtgtttctgataaaaacaatttagagtctatacgaataagtgctggaaaacataataccattgatgaagtcgataaactgttagattctattgcttcatcaattatgactatccgaaagaattcctcatgaa

SEQ ID NO: 258801 - DNA, 829 bp, Unknown
  Bacterial polypeptide expressing nucleotide sequence isolated from the Sargasso Sea
ctggatgcctgcgctgcaacgccccttgctgaggggcttgggcaacggatgcttgattaccaacagcaggcttgggcgaatccctcgagcttgcatccggcgggccttgctgctgccgagttgctggaacgcagcaggcaacgcttgctggagttgttggattgccccaatggccaggttgtcttcacctcaggtggcaccgaagccgacaacttggccctgttcggaatctgccgcagccaaccacccggccgtctgttgatttcagcttttgagcatgcggccattggccgcagcgccgagcagttgcgcgccgagggatggcaggtggagatcctgcccgtggacagccatgggcggatcgacctggaggcactcgaaggcttgttggttccaccgacgcgcctcgtcagcgtggcgtgggctagctcagagctgggtgttctgcagcccatcaaagcgatcagctgcctgtgccagagggccggtgtgcccttgcacagcgatgcggtgcaggtggtgggtcaactgcccgctgcgcagctgttgcctttgccggtggatttactgagcatcagcgcccacaaatttcagggcccccggggagtaggcgctctggtgatgccagagcccaaggctctgcaaccacagctgcttggcggcggccaggaatcaggcctgcgatcaggaacggaatccccctggctggtggcggcgatggtggatgccctgggcgatcgcctcaaccaacaaccgcagttggctgaagcgatggctgagctgcgcgatgacctttggcagcagcttgccgccgtgaaggcatcgagcg

SEQ ID NO: 258802 - DNA, 322 bp, Unknown
  Bacterial polypeptide expressing nucleotide sequence isolated from the Sargasso Sea
atgccaatatatttagattattgttcaacaactccagtaaatcagagggtttctgacttaatgcaacgactatttgttgaagattttggaaactccggtagtcgaactcacctgcatggagcgaaagctaaacaagaagtttctttggcaagaaatcagatagcagaagtacttacatgtgagccccttgaggtagtctttacatcgggtgcaactgagtcaaataatatggcaattcttggtttagaagaatacggaaataaggaaaataaaaagcatatcattactacatcaatcgaacataaagctgtaatagaaccta

SEQ ID NO: 258803 - DNA, 544 bp, Unknown
  Bacterial polypeptide expressing nucleotide sequence isolated from the Sargasso Sea
tatgaaattgcccatttatcttgattataatgcaactacacccgttgatccaaaagtagtggatgcgatggtcccttactttacggaatcatatggcaatgctgccagccgcaatcattcatttggctggcaagtcgaaaaagtggtggatgactcgcgtgagttgattggcaaattaattggtgcaggaggaaaagaaatcgtttttaccagtggagctacagaatcgaacaatctggcaattttgggagtcgctgaattttacaaaaaaaaggggaaacacattatatccagcccaattgaacataaggcggtaatcgatccttgtcatgccttagagcagaacggatacgaaattacatttcttgacgtagataaacatggttgcatagacctgaaacaactggaagaatcaatccgtcaagatacaatattagtttctttgatggcagggaataacgaaattggcactctcaatcccatcagggaaataggtcagataactcgaaacaaagaggtgttttccacactgatgcaacacaat

SEQ ID NO: 258804 - DNA, 1090 bp, Unknown
  Bacterial polypeptide expressing nucleotide sequence isolated from the Sargasso Sea
ttggagaggaatacggcaatccatccagcccctacctcaccgtggcgaagggctcgggatttgttggaagaatcccgtcaccgtcttgcagaactgctgggagccaaaccctcagagttgattttcaccagtggaggcagtgagggaaacaatatggtgctcaggcagttgcttttttgggaagacccgggacatttattggtctcctcggtggaacacccctcggtgcttgaaaccgccaaatggctgacccgcaaaaacaatctgagtctcggcatccttccggtggatcaatcggggaaggttccagaagcatccatggaagttgccgctcaacccaaaacctgtttcatttccgtcatggcggcaaataacgaaaccggaaccgtccagcccttccgagaactggctcggattgccagggagcgccaggttccgtttcattccgattgtgtgcagtatgcggggaagtgtgagttggatctcgaaagcagcgggctcaattacgcgaccctgaccgcccacaaactgggaggtccaaaaggaatcggtctgctttatatccgtgaaggatctccattttctcccctgatcaccggaggaggccaggaacggagccttcgtgcaggaacggaaaatgttgcgatggcttgtgctttcgcagagtgtttcgaatggttttgtagcaatcgttctgaactggaaagccggtggttgggtttgaggaaaaagttgttggattcacttgaagccgtggaacattgctttgttttgggaactcccgatgagagtctgccgaacaccctcaacctcgggtttcagggaatcagtgctgaaagcctgttaatatgtcttgatctcgatgagatcgcagtttcttcgggttccgcctgttcttcaggagcgatggaagccagtcatgtattactggccatgggatattcccatgagcaggcaaaatcgtcgctgaggatcagcatgggatggaatacttccgaagaagatattgaggaattgtcacgacaattgattcatcatgtgaagaggctaactcccatttcaggaaaatcggactcaaacatccaaattc

SEQ ID NO: 258805 - DNA, 1153 bp, Unknown
  Bacterial polypeptide expressing nucleotide sequence isolated from the Sargasso Sea
tatggatggtgcggctactatgccaactgatccagaagtgattgaatcaatgttggcttgcctcaataacaaggagttattcgcaaacccatcatctgttcatgcctcaggaagggatgcaatgcacaaaattgagaaagcaagagatcagatttcgacacttataaatgcaaacaaagaagatttaatttttacatcaggtgcgaccgagtcaaataatctagcaataataggctctgcaaaattccgtgctaatcacggtaaacatctcattaccatgaccactgagcataaagcggtatcgggaccgtttgattatcttgaggaagaaggtttcgaagtaactagattgcgacctggtactgatgggttactggatactaaacagctaaaaaaagcaattcgcgaagacactcaattggtctcgattatgcatatcaataatgaaattggggcgattcaaaacattttcgagatagcatcggtatgtgagggtcagggtgttctctttcactgtgatgccgcccaatctgttggcaaaatttctattgatctaaaaaaactcccaatagatttactgtctatttctgcccataagttttatggtcctcagggtattggggcgcttttcattagagaggctcataaagtaaaattactgccaatcactcatggaggcgagcaagagatgtgggtgagacctggaacactcccgttacaccaaataatcggttttggtattgccgcaaaattagcgatgaccagaatgagagaagatctaatattaatggaagatttgagtaaccacttctttgaaaaaattagaaatttaccagatattttccttaatggttcagataagagcagatacccagggatcgtcaatattagagctcctggagtaaatggagaaagtctgttgctactgcttgagccattgtgtgttgcacaaggatcagcttgtaattcaaaaaatagtgagccatcacatgttctaagagagttaggtctaaatgatcatgagatacagtcctcaatcaggtttagcttcacaagagataccacacgggatgatgtcgattttgcccttgaaaaatacatcagtgcggttaaccaactcagaaaaaattatccaaacaatatcaatgagtga

SEQ ID NO: 258806 - DNA, 1150 bp, Unknown
  Bacterial polypeptide expressing nucleotide sequence isolated from the Sargasso Sea
atggataacaatatttatttagatcataacgcaacttcaccattgctgccagaagcgcagacagcaatgaatgatgcagctggaaagtctataggtaatccctcaagcccacactgggcaggacgtgatgctaaaatacttctagaagaatcacgtaacagcctagccacatcattaggtgccgagcctcgtgaaataatatttacaagcggtggatcggaaagcaacaatgcggtactcagacaattgatagtagcgtcaggcgagcagcacttaatcacctctacgatagaacatccttcggttctggaaacctgcagaattctcgctaaacaaccaaatatttcgctaacagaactacctgtagattcttcaggattaataagccctgaatcacttaaagatgaaatactttctcaaacgactttaatttctttgatggctgcaaacaatgaaacaggatgtatgcaacccatcagagaattatgtcagattgcacgagaacacgaaatttcttttcacaccgacatggtgcagacaacaggaaaagtaaaattagatttaaataaatctggaattgattttgcctctgtaacttcccacaaaataggaggaccccgtggcataggcttgctttatgctagacagggtacttcctttgaatcactggtaactgggggcaaacaggagagagttagaagggcagggacagaaaatgtaacacttgccgtaggctttgcaaaggccctagaatggtatttggaaaatcaggaaagactccaaaaacaaaatactcatttcagggaaaaagttttagacaaaataagtaacattgatggtttttttcaaaacactaacttggatcaaagtcttcaccatactttaaactttggttttagcggtataagtgcagaaagtcttttgatttcccttgatttagatggagttgcagtttctacaggctcagcatgttcttcaggagcaatggaggaaagccatgtgctattggccatgggaaggtcgagagccgaagcaaaatcaagtttaagagttagctggggatggtcaacaaatgaagatgaaatagattattttttggataaactgacccatcacgttcatcgtcttagtaataaacaactaaactgaa

SEQ ID NO: 258807 - DNA, 2212 bp, Unknown
  Bacterial polypeptide expressing nucleotide sequence isolated from the Sargasso Sea
tctggataataatgcgactacccctgtgttggcttgtgcagcgcaagctgtgcaacatacgatgcagcagtgttttggcaatccaagcagcagtcacagtactggtattaaagccaaggtcgagctggaaaccaccagacaattggctcgtcagctcgttggcgcaggttccggcgatattgtttttacttcaggggcgactgaaggcattcaaagttctattttctccgctttgttgcatgcccgaatgtccggcaaaacgggcccagcttatactttgctttatggtgcgactgaacacaaagctgtgcctcagagcctggaacactggaatcatgtattacagttaggcgccaggattaaagctattcctgtggatcaacatggtgtactggattttgagtttatccgcactgaactgccgaatacgttgctgatttgcactatggcagcgaataatgaaaccggtgtaaagcaggatttagtggctttacagcaacttattcgtagcgtagcgccgcaagtgctgtggatggtggattgcgtgcaggcgcttggcaaaatgccattgcagcttgagcacatgacgatagactacgcaccttttagtggccataagctgtatgcgcccaaaggtattggctttttatatgtgcgcgaaggcacgccttatcagccgctgctggccggtggtggtcaggagagtggtttacgttcaggaacggaaaacttgcctggtattgctgcattaaaagcgatttttcagcaattgaaattaaaagaggactcagtttttcagtcagagccacaactttgggcttaccgcgaacaactgctatcggcattacgtcgtgtgtttcctgatttagtccttaatagcgacaaaccttatatagtacctaccaccatcaacttttctgtaccgggttttgccagcaaagacattatggatttgtttgacgctgcaggtattagagtcagctcgggttcggcttgtagctctaaaattccgaccagttttgtgctcaacgctatgggtttacctttgtggcgtagtcagggcgcgattcgtttatcttttggccctgcaatgactgtgggggagtgtcagcaggcttgtcaggctattttggcattaaaaactgtagtgaactcctgttgtctggtgttaagtgatgccagcagtacagagctgcagccagtgactggtttagtgcagttaaaacatgaagatttatgcagctatttactggtatcagctgacacctcggaagtcattattatcgacgctgtgttgcctctggccagccggattgctcagttggtgcagggacatcagttcaaagtgcgggctattttagatacccatgtacataaagatcatccctcagcgcggcctgagctggcgaccttattagctgatttactggataaggtaccgaccgatgtgttgggttggcctctagccgcaccgctgttacaaatgggagcttatcagttggaaagtctggctacgccgggccatagtcctgaagctgtgactattgttgtcaggcagcaccatcagcaaaaatttgcttttgtcggcgattttattttgccaggtggtacaggacgactggatctgccaggtggagacacaaaggcctttcgtctgagtttaagggctttagatcagaaacttgaatctcataccttgttattgtccagccatgattatgcccagcgttttttcacccgttgggatctgatgctgcaggagcagcctgtattgcagcaggtgctacataccgaagctacaccagagttgtggttaagcgatttacagcgtcagacacaatggttgcaacaacaggccgggcatttttgtggggtagtggaagtctgtgcttctgatgcgaccgctgtgattgataaacatcagatcgctgccttgatacaacagcaccccaacttacaaatctgggacgtgcgtgaaccccatgaacaagccgcaggtgctttgtctgtgtacttacctgatttagtctgtaaggaagttcctttatctgcactggtgcagcaggttaccgagcaacagactgctacccctcagcccttgttgctggtctgccgttctggtaatcgtagtttattggcagcaaaagtactgaatagagctgggtttgatttggtgtttaatttaaaaggtggagtcgcgctgttagcctga

SEQ ID NO: 258808 - DNA, 400 bp, Unknown
  Bacterial polypeptide expressing nucleotide sequence isolated from the Sargasso Sea
atgcaaaagcctgctacccggccacaagaaatttatctggataataatgctaccactgcggtattaagctgtgcggcagaagctgtgcaacatacgatgcagcagtgttttggtaatccgagcagtagtcacagcacaggtattaaagccaaagtcgagctggaaactaccagacaattggcgcgccagctgattggtgcaggctctggtgatatcgtctttacctctggtgccactgaaggtattcagagttctattttctccgctttgttgcatgcccggctcgaaggaaaaaccggaccagcttttagcttgttgtacggcgctactgaacacaaagccgtgcctcagagtctaaacactggaatcatgtattacagctgggcgccactattaaagc

SEQ ID NO: 258809 - DNA, 769 bp, Unknown
  Bacterial polypeptide expressing nucleotide sequence isolated from the Sargasso Sea
gttgatagcactggactagttaatccatcggatttgaaatcacttattcgaaaagatactgcattggtttcgataatgtatgttaataatgaagtaggaactattcagccaattgaagatttaattgatattgcaaaatctttttcaatcccatttcattctgattgtgttcaagcggtaggaaagcttccaatttctatcaatacaattgaagcagattatatgagcttctcagcacataaattttatgggcctaaaggaatcggatttttatacaaaaaggaaggtaaccatttaaagcctttaataataggcggtagccaagaaagcaatttgcgcgctggaaccgaaaatataagcggtattgcaggtttaggggttgctgctcaattagtcaatacaaatttaaatgatagaattaagcatttgttacaactagaagattattttaaaacaaaactaactgatcaacatccagaaataatttttcatggcaaccactcaaaacatgtacctggtttatgtagtatcgccattccaaaccacaaaaatgaagctgtattagcaaagcttgatcgcaaaggaattgaagtgtcaaatggatcagcctgctcatctggtgttgtaggactgtctccaattttgagcgcgatgggtattaaagatttagccaatcaatcaacgattagaataagctttgggcgtgaaaatacaatagcggatgtgtccaaattaattgaatctttaagtgaaattttaaatgactgaa

SEQ ID NO: 258810 - DNA, 247 bp, Unknown
  Bacterial polypeptide expressing nucleotide sequence isolated from the Sargasso Sea
tatgaagcttcctatctatttagattatgccgccaccacgccagttgatccgcgagtcgcggaaaaaatgttccaatacatgacgatggatggcatcttcggtaacccagcatcacgttctcaccgttatggctggcaagcggaagaagcggtggatgtggcgcgcagccaagtggctgatctgatcaatgccgatcaccgtgaaatcgtgtttacctcagggtgcaaccgaatcaaaacaacctag

SEQ ID NO: 258811 - DNA, 614 bp, Unknown
  Bacterial polypeptide expressing nucleotide sequence isolated from the Sargasso Sea
cctttcctctgatttcgcacaatgtttaggttatatcgagttagacaatcttttatcagatgtaaatatgataacgatgagttctcacaaaatatatggtcctaaagggataggacttcttttgattgatgaagaaattaatcttgagcctttaattgttggaggaggtcaggaatatggtttcaggtctggtacattacctcttcctttagtagttggcttcgctaaagcaatagagatagcagtttttaatcaaaaaaataatgctgagaaattgcttttgtatagaaataaccttttagagggtttgttaggaaataattctggtttattaattaatggctccatagaaaaaagattacctcaaaatttaaatttgactgttttggatttaaacggagcaaagtttcataaacttttaaaatccaaaataatttgttctagtggatctgcatgcagtaatggtgaaccatctcacgttttactagcattaggtagatcttttaaagaagcagaatcttcaataaggctaagtattggattaagcactaattcaaaagagataaaagaagcaattcatattcttacaaatacagtcaaatcattacgttaga

SEQ ID NO: 258812 - DNA, 1006 bp, Unknown
  Bacterial polypeptide expressing nucleotide sequence isolated from the Sargasso Sea
agagaagcggtagccggtttaatcaatgcaaatccaggagaaattctatggacatcaggtgcaaccgagtcaaataatatggcaattgtgggcttccatcaatttcaatacaagggccaatccatgagatttttaagttctcatatggaacataaatccgtcatagagagtatgcactcgatcaaggaccttggatcaaatgtgtgctttattcagcccaatgagcacggtcgaattgatattgaaacatttgtcaatcagatggagaaagacgtcatttatgtaagttgcatgcatgttaataatgagactggcttgatcaatgatattgaggagattggaaaatattgcagaaaaaatgaaattatttttcatgttgatgcagctcaaagcataggaaaaatacccatcgatgttaaaggcatgtgtattgatctcatgtcaatgtctgcacataaagtctatggaccgaagggcgttggcgcgctctatatcaataaagatacagttggtcgaataaagtcaattatccttggaggaggtcaggagagaggaatgcgctctggcactttgcctacacatcagattgctggaatggctgcagcttataatctttcgaaagaaagaatggatgacgattataaacacattaagcaatgcagagacgtttttttaaaaacgatctcgaacattgacggatggaaactcaatggtgcagataagtattcttatccaggtattatcagcatttgttttcccgatttgtattcagaaagtttgatttatgcaatggaagattttgcaatctcgaggggttcggcgtgctcatcagatcatgatgaaccgtcgcatgttttaaaaagcatgggactacttgatcatgaaatcaatggaaccatccgtatcagctttggacgcaatacaactttaaatcaagcggaatcagcagcatctgagcttatgaaagcagtatcacatcttagaaacctaaagggaggaaattgat

SEQ ID NO: 258813 - DNA, 652 bp, Unknown
  Bacterial polypeptide expressing nucleotide sequence isolated from the Sargasso Sea
gaatgaaattgtatttcatgtggatgcagcccaaagcattggaaaaatacccatcgatgttgacgagatgtgtattgatctcatgtccatgtctgcccataaggtttatggccctaaaggggttggcgctctatacatcaataaaaaaagcgttggtcgagtcaaatcaatcattgtcggaggaggtcaagagcgggggatgcgctcaggcactcttccaactcatcaaattgttggaatggcaacggcctataaagtttcaaaacaaagaatacatgaagatttagagcacattacgcaatgtcagaattcatttctaaaaaggctatcgaatctcgatgattggaagatcaatggctcgaaggatcatagttatccaggaatattgagcatctgttttccggatttatattccgaaagtttgatttatgccatggaagattttgcaatttcaagagggtcggcctgttcttcggatcatgatgagccctcgcatgttttaaaaagtatgggcctagccgattatgagatcaatggaacaattcgtatcagttttggaagaactacatccatccgacaagccgagctagcagcatccgaactgattaaagcagtattgcatctgaggaaactcaagaggggttatcaatga

SEQ ID NO: 258814 - DNA, 433 bp, Unknown
  Bacterial polypeptide expressing nucleotide sequence isolated from the Sargasso Sea
aatggcatctgaagccgaacgcttaatcggattgcgtcaaagacttttagaccgtttaaactcagaactcgattatatttttctgaatggccatcccacagaaagacttcctaataacctgaatgtaagttttggttacgtggaaggtgaaagtttaatgatgggagtaaatgaactcgctgtttcttcaggttcagcttgcacttctgccagcttagaaccatcttatgttctccgtgctctgggtgttggtgatgacctggcacattcatcaatacgcatcggaatgggaagatttacaaccattgcagaaatagattacgcagcggataaaattatagcagcagtgaaaagacttcgtgaaatgtctccactatatgaaatggtcaaagaaggagtggatttgactacagtacaatggacatctcattaa

SEQ ID NO: 258815 - DNA, 283 bp, Unknown
  Bacterial polypeptide expressing nucleotide sequence isolated from the Sargasso Sea
tatgtctgataagatttttttagattaccaatcaacaactccggtatcaaaggaagtcttagagaagatgatacctttcttttcggaaaacttcggcaatcctcactcaaataatcatgaattcggcataatggcaaacaacgtagtcgaagaggctaggggaaatgttgcaaacttaattaatgcacaaaaatcagagattatttttacatcaggcgcaactgaaagcaataactttgcaataaaaagtattgctaataatttttttgagaaagattgccaa

SEQ ID NO: 258816 - DNA, 306 bp, Unknown
  Bacterial polypeptide expressing nucleotide sequence isolated from the Sargasso Sea
gttttgcctatgtggagggagatcatttaattatggctttgaaagatatagctgtatcttcagggtcggcttgcacctctgcaagtttagaaccatcctatgttcttagggcacttggaagaaaagatgagcttgcatcaagctcaattcgtttttcttttggaaggtttaccactgaagaagatgttgattatacattatctttaattaaccatgctgttgatagactaagagagctatctccattatgggaaatgtatctagatggaattgatttagatacagttgaatggcaaacccattaaa

SEQ ID NO: 258817 - DNA, 913 bp, Unknown
  Bacterial polypeptide expressing nucleotide sequence isolated from the Sargasso Sea
tatgatttatttagataacgcggcttctacgcctacagatgaaagtataatatcaaaaatgatgccttacttccatcagaaatatgcgaatcctcattcaacaactcatattgaaggtttaaatgcatcaaaagatatagaacactacagacaaatcattggagaatattttgatgtggaagctgattgtgtagtgtttactagtggtgctactgaagcaaataacttagcaataataggtgcaatgaaagcagcaataaaatcaaattcaaatagaaaaaaagtactttgctcaagtattgaacataagtgcgtattagaaagtattatgtcttctaaagagtatggatttagttatgagttcatacctgttaaagaaaatggaaaaatagatttagataattttaaaagaatgatagatgaagaaatattgttagttagtgctatggctacaaacaatgaaacaggtatagatttacagatagaagaaataggtgaactttgtaaggagaaagatattttatttcacacagatgctgctcaagcattacatcataaaaaaattagtatggcagaactagctatagatttctgttcaatttcagcacataaaatttatggtcctaaaggaataggagctcttatttgtaatcatgagtctatcaaaaaattacagccactaatgttaggaggttatcaagaagcaggattaaggtctggtactatgcctacacatttagttgtaggactaggtgaggctataaaattattagatatgaataaagatacttatttaaaaaatatgataaatctaaaagacaaatttattgatttattaaaagcttctaatctcaatttttctataaattctcttgaggcagaacatcctggattgttaaacttatacttgaag

SEQ ID NO: 258818 - DNA, 312 bp, Unknown
  Bacterial polypeptide expressing nucleotide sequence isolated from the Sargasso Sea
agctcaaacatatggtaaaattgatttagatgttaattctatgaatatagatttattatcagcatcagctcataaaatatatggtccaaagggtgttggttttctttatgctagaaaaaaaaataaagaaattaatttatttcctcttatttcgggtggtggtcaagaatttggaatgagatcaggaacaacgcctgttcccttaattgttggacttgcagaggcatcaaaaataagttttaatcaattattaaaagagcaaaaaagaattaaatcattaagagataatttcttaaatcgaataattcagca

SEQ ID NO: 258819 - DNA, 779 bp, Unknown
  Bacterial polypeptide expressing nucleotide sequence isolated from the Sargasso Sea
aatttcatctatactaaatgtcagtccacaagagattatttttacatctggaggaacagaatctgataatatgttgttaaggtctgcagtagaggatttaaacatcaaaactatcatcagtactaaaatagaacaccatgcaatcttacacgcattagactatctagaaaagaagaatgtttctatagtttatcttccagttgacaaaaatggagaattcaaataccaagatttagagaaagctttatcattggataattccaaaaaattagtttcactaatgcatgttaataacgaaattggtaacaagattgatttagaatatatatctaaaatatgtcaatctagcgaagtcttgttgcacacggatgcagttcaaagtataggtcattatgaagttgatttgactaaattaaaggttgattttttgtcagctgcagcccataaatttcatggcccaaaaggtattggtttctcatttgtgagaaaaaattctggtttaaatccttttattcttggtggctcgcaagaaagaggtcttcgagctggaacagaatctgtgcacaatatagtcggtatgtccaaggcacttgaattggcatatgaaaatttagaagaagaaagtaaatatataagaaatttaaaaaattatgcaatctcaaaaataaatgaattcattccagaatcacattttaatggaaattgtgacaaagatgaaaaaagtgcatataatcttattaatgtaaacttacctataagttctgaaaaaaaagatcttt

SEQ ID NO: 258820 - DNA, 315 bp, Unknown
  Bacterial polypeptide expressing nucleotide sequence isolated from the Sargasso Sea
cttgatttatttagataatcactcaactactccagtagataaaagggttcttaaaaaaatgcttccctatttttcaattaaatataataatccacattcacaggttacgtctcataataaaaatattataaaagagattaatattgcgagatcaaatattgcaaaattaataggtgctgaaaaagacgaaattatttttacatctggagctacagaatcgaataatttagctattaaaggattaaaaaaccaaatattaagaggtagaaatcattttataactttaaatactgaacataaatgtattttagaggg

SEQ ID NO: 258821 - DNA, 237 bp, Unknown
  Bacterial polypeptide expressing nucleotide sequence isolated from the Sargasso Sea
ggtctgcatgcacttcagcgagctggaaaccttcctatgttcttagagcgctgggaaggaaagatgagctagcccatagctctattagattttcttttggtagatatactactgaaaaagatgtaaaggaaactgctttgcttgttaaatcctcagttgaaagattgagagaaatctctcctctgtgggaaatgtatcaagatggagtagatttagataaaatagagtgggcttaat

SEQ ID NO: 258822 - DNA, 610 bp, Unknown
  Bacterial polypeptide expressing nucleotide sequence isolated from the Sargasso Sea
atgagcacacgatctaccatttatttagattacgcatcgactacacctgttgaccctagagttgcatctaaaatgatggaatttttaacacctgatgggcaatttggtaatcctgcatcaagatctcataggtttggttggaaagcagacgaagcagtagaagaagctagatctcatgttgctaatctcgttaattgtgatccaagagaaattgtttggacttctggtgctacagaagcagacaatctagcaattaaaggcgttgctaggttttataaatcaaaaggtaatcatgttattacgtcaaaaattgaacataaagcagtattagatccatgcagacaattagaaagagaggggtttgaagttacttacttagacccaaatgataaaggtgttattgatccagaagatgtaaagtcagcaataaaagatacaacaattttaatctccattatgcatataaataatgagctaggtactgttaataatatttcaaaaattggagaaattgctagggaaagaagcatattttttcatgtagatgctgctcaaagcaccggtaaaactctaattgagttagaaaaaatgcaaattgatttaatgtctt

SEQ ID NO: 258823 - DNA, 643 bp, Unknown
  Bacterial polypeptide expressing nucleotide sequence isolated from the Sargasso Sea
atgctatcaactcctatactactagactatcaatcttcaactccttgctctaaagatgttgttgattctatgaagcctttttggagtgagatattctctaatccttcaggcaaatctaatttggcaggtattaacgcaagcgctatattggaaacctctagagagagaatagaacaaaatttatttctaaaaaataaaaaagttattttcacaagtggggcaacagaatctaataacttagccttattaggttttgctagaaatttctataaaaaaacaggaaattatggacatattattaccttaaaaacagagcataaagccgttttagagcctctaaatcaactaaaaaaagagggatttatggttacagaaattaatcccgaaaaagatggcttaatctcagaagaaaaatttaaaaaaaatataagggaagatacatttatggttagtgttatgttggcaaataacgaaataggagttattcagccaattaagaatatttcaaatatctgcaaatcgagaggaattacctttcactctgattttgcacaatgtttgggttatatcgagttagataatcttttattagatgtaaatatgataacgatgagttctcataaaatatatggtcctaaaggga

SEQ ID NO: 258824 - DNA, 391 bp, Unknown
  Bacterial polypeptide expressing nucleotide sequence isolated from the Sargasso Sea
acttttagatcgtttaaactcagaacttgattatatttttttgtatgggcatccaactgaaagacttccgaataatctaaatgtaagttttggctacgtggagggggaaagtttgatgatgggagtaaatgagcttgctgtttcctctggatcagcttgcacctctgccagtctggagccatcttatgttctgcgtgcattaggagttggtgacgatctggcgcattcatctatacgtatcggaatgggaaggttcaccacagtagaagaaatagattatactgcggaaaaaatgataagtgcagttaaaagacttcgtgaaatgtctccactatatgaaatggtcaaagacggagttgatttgtcaaccgtacaatggacatcccattaa

SEQ ID NO: 258825 - DNA, 685 bp, Unknown
  Bacterial polypeptide expressing nucleotide sequence isolated from the Sargasso Sea
atcaatttgtttagatgcaggcgtactatttctagttgatgcatgccagtcgtttagtaagctgaatattaatgttagagatatgaacattaatttactggctgcgaccggccataaaatttacggtccaaaaggtatagggtttttgtatgtaagtcaaaaaagtccaaagattaaactgaaaatgcagattgatggtggtgggcacgagcgaggatttagatcgggaactttacctgtaagccaaatagtaggtcttggtaaagctgttcaaatttcggataaagaaaaagaaaaagaaaataagcgtcttgaggttttaagagataaattacaccttgctatttctgattctcatccggagattattttaaatggatccaatagtaaaaggttacctcataacctcaacttatgttttcctggattaaatgccgaaagtatcataatgaagatgagaggtgtggcatgttctaccggctcagcatgtagcagtgctaatttaaaaccatcgcatgttatgaaagctataggtagggataatgagttagctcattcagccatacgatttagcctaggtagatttaattcagaatctgatatagttaaggctattgatataattaataatgcgattagtttattaaaaaaaagaagagaaaatcgcaacaaaagaatatcatag

SEQ ID NO: 258826 - DNA, 927 bp, Unknown
  Bacterial polypeptide expressing nucleotide sequence isolated from the Sargasso Sea
tgaccagcctacaagcccaaaaccactacgagataattttcacctccggggcaaccgagtccattaacttatgtctaagtgggcttgcccatacctaccgaaaacaaaaaaaccacgtgattagctttgctactgaacacgcagcaaccctaatgtgtttggagaatcttgccaaaaatggctttgagattaccattcttccggttcaagcatctggacatatcgattacgatttgcttagccagcatattaagccgacaacgcttatgatatccgctgtacatgttaataatgaaatcggcgtaatacacaaccctgcccaactgtctgccatagcaagtaggcacggtgtactactacatctggactgtgcccaaaccattggtaaggcaccacttgacttgcaaagctctgcaccagacttcgtcagcctatctgcacataaagtttatggaccaaaaggcataggtgctctgttgcgtcgtaaacagctcaaacgcaagctcacgccactcttatttggccagacactttataacctctatcgacctggtaccttacctacccctcttattgttggtatgcagtcagcttttgcacttgctcaaaatgagtttgctgatcgtattgatacagtacacacactacacgagctgtttgttaagcacttgcctgacactgtcacctggcatggtgatagaaaatctcgcgtaccgcataacattaatgtttctctccccctctctgcaagcacggatgacattcgagagctatgcgacaccttcacactatcgcaagcatctagctgtagcaaccacaccagttcgcatgttctgcgagcaatcggtgttgaacaagcatccatgcagcgtgctttgcgtattagcctaagccataccacgcgacaatctgatgcaaggaactaat

SEQ ID NO: 258827 - DNA, 932 bp, Unknown
  Bacterial polypeptide expressing nucleotide sequence isolated from the Sargasso Sea
gcaacaacaccaatccacccagaagtcgctgaaaaactagactatataaatagagaacattatgctaatccctctagtatttataatcagggaagaaaggcaaaatctctaattgaaaatgctagaaaacaggttgcagacgcaatcggtgcaaaatctgatcaaatattttttactagtggtggtactgaagcaaacaaccaagtgctgtggaactcaatagaaaatgataaaaaacacataattgcgtcatcgattgaacaccccgccgtaataagagtaataaataaaattagatcttttggaatcacagcctcccttgcttctgtagatgaagatggtacagtggacatagattctattctaaaattagttaatgacgatactggattggtaagcataatgctcgctaataatgaggtagggactatccagccaatcaaagaaattgctaagaaaattacacaacttaatattccttttcacactgatgcagttcaggctcttggtaaaatccctgtagatgtggcctcactggggatagattatctaagtttatcagcacataaattctatggccctaagggaataggggctctttatataaaaaacaaaaaaacattaaaatcattaattattggaggcgagcaagagtttggtctaagagggggaacagaaaatattgctggtattattggaatgggaatcgctgcagaaatagctgcaaaagatatagatagttgctattctcatttaaagcatttggaagactattttttggcaaaactacattcaatttcttctaacttcattcgtaatgggaaattcattaattgcctaccgggtttgatcagtatatcctttaaaggacataggtcagatgtactaatggcaaaacttgacagaaaaacattgcagtctcaaatgggtca

SEQ ID NO: 258828 - DNA, 460 bp, Unknown
  Bacterial polypeptide expressing nucleotide sequence isolated from the Sargasso Sea
aaagccatcgagctcgccatggaagaaatttcgtcggaagctgagaggcagatcgggttgaggcaacatctttacaagcgtctgaccgacgaactcgattatgttttcctgaacggtcatccgacggaaagacttcccaataacctcaacatcagcttcggatacgtagagggagaaagtctgatgatgggaatcagtgaaatcgcggtttcatccggttcggcatgtacttccgcgagtcttgagccttcgtacgttctccgttcgatgggagttggtgatgatctggctcattcttcggtacgttttggatttggacgttacaccaccatggaggaagtgaattacgcagccgaaaaagtgattggtgcggtcaagcggctccgggaaatgtcacctctctatgaaatggtgcaggagggggtagacctttcaaaagtcacttggacctctcattgac

SEQ ID NO: 258829 - DNA, 318 bp, Unknown
  Bacterial polypeptide expressing nucleotide sequence isolated from the Sargasso Sea
gatgagcacacaatcaacaatttatttagattacgcatcaacaacacctgttgacccaatagttgcatctaaaatgatggaatttttaactcctgagggagaatttggcaatccagcatctagatctcatcgttttggttggaaggctgatgaagcagtggaagaggccagatctcatgttgcaaatcttgttaattgtgatccaagagagattgtatggacctctggagcaactgaagcagataatctagccataaagggtgttgcaagattttataaatcaaaaggaaaccacataattacttcaaaaattgaaca

SEQ ID NO: 258830 - DNA, 411 bp, Unknown
  Bacterial polypeptide expressing nucleotide sequence isolated from the Sargasso Sea
aatgaatacttattattttgattatgcttctactactccagttgattcattggtagtagataaaatgaaagaatgtttatcagtcgacggagcctttggtaactctggatctagatcacatgtttttggctggaaagctgaagaattggttgaggaggctcgaggaaatgttgctaatttaattaactgtgatcccagagaaataatttggacttctggagctactgaatcagataacttagcaataaaaggtgcagcatatttttactctgataaaggcaaacacattattacttctaaaattgaacataaagccgttttagatgtatgtagacaacttgaaagcgaatcttatgaagttacttatttagagccaaacaatgacggaattattacgcctgagtctgttga

SEQ ID NO: 258831 - DNA, 735 bp, Unknown
  Bacterial polypeptide expressing nucleotide sequence isolated from the Sargasso Sea
tatgactttgtatcttgattataacgcttctgctcctattatttctgatgtagtggatataatgaatgaatctattggtattataggtaatccatcatctgttcacgcttcaggaagagcagcaagaaaagcaatagaggattctagagaaataattagtgaaacgatagatagcaatccacaaaatatcatttttacatcaggagctacagaagctaatactctcgcattaaactgttcaaaagcaatgcaaacatttatttcttctatagaacatgactcagttttaaagcaaaatatcaatgcaaaactaattcctgtaacttcagaaggtattattgatatagagtttttagagagtaatttaagaaaatcgactgaagataatatttttgtttcagttatggcagtaaataatgaaacaggaataattcagccattagaagatatatctagaatatgtaaagaaaataacgctattttacatgttgatgctgttcaagctattggaagaatagatatatctatgactaaacttaacatagatttgcttactatatcatctcacaagataggaggaccaaaaggtataggatgtttagcaattagtgataaagtttatacagtgttatctccaattattatgggaggcgggcaagagagaggttttagaggcggtacagaggcagtaaatcaaattattggttttggagctgcagctaaatatgcccaaaa

SEQ ID NO: 258832 - DNA, 823 bp, Unknown
  Bacterial polypeptide expressing nucleotide sequence isolated from the Sargasso Sea
gttttggagcccctaaacaaactaaaaaaagagggatttgtggttacagaaattaatcctgagaaagatggcttgatttcagaagaacaattcaaaaaaaatataagagaagatacatttctggtaagtgtcatgttggcaaataacgaaataggagttatccagcctgtagagaatatttcaaagatatgtaaatctagaggaataacctttcactctgattttgcacaatgtttaggctatatcgagatagacaatcttttatcagatgtaaatatgataacgatgagttctcacaaaatatatggtcccaaagggataggacttcttttgattgatgaagaaattaatcttgagcctttaatttttggaggaggtcaggaatatggtcataggtctggtacattacctcttcctttagtagttggctttactaaagcaattgagatagcagttttcaatcaaaaaaataatgctgagaaattaagtttgaatagaaataaccttttagaaggtttgttagaaaataattctggtttattaattaatggctccatagaaaaaagattgcctcacaatttgaatttgactgtattggatttaaacggagcaaagtttcataaacttttgaaatctaaaataatttgttctagtggatctgcatgtagtaatggtgaaccatctcatgttttactagccttaggcagatcttttaaagaagcagaatcttcaataaggttaagtattggcttaagcactaattcaaaagatataaaacaagcaattcatattcttacaaatacgatccgatcattacgataaa

SEQ ID NO: 258833 - DNA, 442 bp, Unknown
  Bacterial polypeptide expressing nucleotide sequence isolated from the Sargasso Sea
attgaggaaatggcttctgaggcagaacgcttaaccgggttgcgtcaaaggcttttagaccgtttgaactcagaacttgattatatttttctgaacggccacccaactgaaaggctgccaaataaccttaatgtgagttttgggtacgttgagggtgaaagtttgatgatgggagtgaatgaacttgctgtttcttcaggatcagcctgcacttctgcaagcctggagccatcttatgttctaagggccctcggagttggtgacgatctagcacactcatcaatccgtatcggaatgggaagattcactaccattgaagaagtagattacgcagcagaaaaaatgataactgcagtgaaaagactgcgtgaaatgtctccgctatatgagatggtcaaagacggagtagatttgtcaactgtacaatggacatcccattaaa

SEQ ID NO: 258834 - DNA, 334 bp, Unknown
  Bacterial polypeptide expressing nucleotide sequence isolated from the Sargasso Sea
atgagtatttatttagactgtaatgcaacaactccaactgaacctgaggttgtagaaaaaataaaacaatatttaactactgactttggtaacgaaggttcacacactcattcatacggttctactgctaaaaaagctgttcaagaagcacgagatcaaatagttgatttagtaaatgcatcaagaaatgaaattatttttacaagtggtgcaaccgaaagcaacaatattgcaatccttggtttaaaagattttggtattgaaaataataaaaagcatatcattacttcatcaattgaacataaggcagtcctagaaccaatagatgaataaa

SEQ ID NO: 258835 - DNA, 245 bp, Unknown
  Bacterial polypeptide expressing nucleotide sequence isolated from the Sargasso Sea
gggctctgcttgtacctcagcaagcttagagccatcttacgtcctaaggcttcttggcctcaaagatgagcttgcccatagctctattagatttgctatcggtaggttcaccaccgaagaagaggtagaatacacgatcaacttggtacgagattcagttgaaaagcttagaacactctctcccttatgggacatgtataaagatggagtggatatggattccatagagtgggccgaaggataaa

SEQ ID NO: 258836 - DNA, 501 bp, Unknown
  Bacterial polypeptide expressing nucleotide sequence isolated from the Sargasso Sea
aatgcaaatatattttgataatgctgctacatctcctttgagaaaagaagtaatagaatctattaataaagtattattagaaacttatggaaatccatcttccaaccactcctttggtagaaaagcaaagactttaattgaaaactctagaaaaattatagcatctgaattaaatgtaagtccacaagagattatttttacatctggaggaactgaatctgacaatatgttattaaggtctgctgttgaggatttagatgtcaaaactatcatcactaccaaaatagaacaccatgcaattttacatgcattagactatctcgaaaaaaagaatatttctatagtttatctacctgttgataaaaacggagaattcaaatacaaagatctagaaaatgctttgtcatttgatgattctaaaaaactagtttcactgatgcatgttaataacgaaattggtaacatgattgatttagaatatgtatctaaaatatgccaatc

SEQ ID NO: 258837 - DNA, 451 bp, Unknown
  Bacterial polypeptide expressing nucleotide sequence isolated from the Sargasso Sea
tatgatatatttagataatcactccacaacaaaagtagataatagagtatttaaaaaaatgataccctacttcatagaaaaatttaataatcctcactcacaaaatacaattcacaatcgtgatataataaaacaaatctctaatgctagaagtcaaattgcgaagcttataggagctaaaaaagaagaaattatttttacatctggagctactgagtcaaataatttggcaatcaagggattaaagaatcatgttttaagaggaaaaaatcactttatatctcttaatactgaacataaatgtgttttggaagctttaagaaaactcgaaattgaaggagctaaagttactatattaaaagtaaaaaaaaatggtttgatagatcctttggatattcaaaagagcatacagaaaaataccctattagttaccattatgatggcaaataat

SEQ ID NO: 258838 - DNA, 697 bp, Unknown
  Bacterial polypeptide expressing nucleotide sequence isolated from the Sargasso Sea
gttaataatgaaattggaaatatattagatattaataaagtatccgatttatgtagaaattataactcactatttcatacagatgcagttcaggcggtaggacatttcaagattgacttaaaagaaacacaaattgactttttatctgctgctggacataaatttcatggacctaaaggcgtaggattttcttttattcgaaagacatcaagattaagtccttttatttgtgggggacctcaagaaagaggtcttagggctggaactgaatcagttcataatattgttggtatgactaaagcgcttgaagtatcttatgaaaaaattaatgaagaaacaaagtacatcacttcaataaaggaatatgcaattaatgaacttaagtcaatttttccaaaaattcattttaatggcttatctggtaaccttgagaaaagtacatatacaattcttaatgtttgttttcccttagatagtgaaaaaggatctatgttagattttcatcttgatcttaatggaattgcttgttcaaaggggagtgcttgtcaatctggaagtactaatggttctcatgttctgaatgaaattcaaactgatgaattgaaaaaatatccatctgtaagattctctttttctcattataacacaaaaaaggaagttgactttttgatagaaacaatcaagaatctcagttaag

SEQ ID NO: 258839 - DNA, 516 bp, Unknown
  Bacterial polypeptide expressing nucleotide sequence isolated from the Sargasso Sea
tatgagcatttatttagactgtaacgcaaccactccaattgaacctgaagttgtagaaaaaataaataattacttaactaaagattttggaaatgaaggatcacatactcatgagtacggttcagttgcaaaaaaagcagttcaagaggcaagagataatatcggaggcttaatagacgcttcaagaaatgaaataatatttacaagtggagcaaccgaaagtaataatattgcaatattaggacttaaagattttggagaaaaaaataataaaaaacatattattacaacctctattgagcataaagctgtattagagccaattgaagaattaaaaaaaattggttttgatgtagatattttaaaagttgatcaatcaggaaggattaatcctaaagatttaaaagataaacttaaaaaagataccttactaatttcagtgatgagcgttaataacgaaactggggtaattcaaccaattaaagaaatctgtgatttaattaaagaccatgattg

SEQ ID NO: 258840 - DNA, 796 bp, Unknown
  Bacterial polypeptide expressing nucleotide sequence isolated from the Sargasso Sea
aaagagggatttatggttacagaaattaatcctgagaaagatggcttaatttcagaagaacgattcaaaaacaatataagagaagatacttttatggttagtgtaatgttggcaaataacgaaataggagttattcagcctctggaaaatatttcaaagatatgtaaagcaagaggcataacttttcactctgattttgcacaatgtttaggttatatcgagttagacaatcttttatcagatgtaaatatgataacgataagttctcacaaaatatatggtcctaaaggaatagggcttcttttgattgatgcagaaattaatcttgagcctttaattgttggaggaggtcaggaatatggtctcaggtctggtacattacctctacctttagtagttggctttgctaaagcaatagagatagcagtttttaatcagaaaaataatgctgagaaattacttttgcatagaaataaccttttagagggtttgttagaaaaaaattctggtttattaattaatggctccatagaaaaaagattacctcacaatttaaatttgactgtattggatttaaacggagcaaattttcataaacttttaaaacctagaataatttgttctagtggatctgcatgcagtaatggtgaaccatctcatgttttactagccttaggtagatcttttaaagaagcggagtcttcaataaggttaagtattggattaagcactaattcaaaagatatcaaacaagcaattcatattctcacaaatacgattaaatcattacgttaga

SEQ ID NO: 258841 - DNA, 655 bp, Unknown
  Bacterial polypeptide expressing nucleotide sequence isolated from the Sargasso Sea
ttgcatcaaatttcagaaatatgcagatcaagagaaattattctccattctgattacgcacaatgtttagggtttattgagttagatagccttgactcattagcaaatatgttaacaataagttcacataaaatatatggccccaaaggtgtaggattgcttttgattgatagggatattgagcttcaacctttaattttgggaggtgggcaagaatttggatttcgatcaggaacattaccattgcccttaattgtaggctttactaaagcaatagaaatagcagttttaaatcaaaaaaaaaatattaagaagtttctttttcatagagatactcttctgaaaggattgttaatcaataattctggtttagaagttaatggttcaatgatagaaagattacctcataatttaaatttgacagtgctacatgtaaatggtgcaaaatttcacaaaaaattgaaatctaagatcatttgttctagtggatcagcatgtagcaatggtgaaccttctcatgttttacaagctataggcagatcatttaaagaagcagaggcctcattgagattaagtattggcttgatgactactaaagaagatatagaaaaatctattcagataattacagatactataaaatcattacgttaaa

SEQ ID NO: 258842 - DNA, 961 bp, Unknown
  Bacterial polypeptide expressing nucleotide sequence isolated from the Sargasso Sea
agactcaagagaaaagattgctggattatttaatgcagcaccaggtgaaatcatattcactagcggtggtacagaagcagacaattggacaatcaaatctttatttgaatcaaaaaagcctgatgataatcttgtaacttcaaatattgagcacgaggctgttttagcatcggcagaatgggtatctataaatggatatcaaactaaatatgctaagtctgatgaaaatggattcgtatccaaagatgaatttttaaaccaaatagatgacaacactaaagttgcttcattaatgtggggtaacaatgaaacaggtgttatccaacctgtaaaagatgtttctaaagaaataaaatcagtaaattcatctactctttttcattcagatgttgttcaagggattatttcagatagtattgattttcatagaaatggcattgaaagcgctgctatatctgctcataaaattgggggaccaaaaggagtaggtgcgatgttcataaataataaatacaaattacctagctttctgcacggaggcaaacaagaacttgaaagaagagcaggaactgtagacgttcctggcatcgcagcatttgcaaccgcccttgaagaacaacaaagtagatttgatgaagaagttggtctaatgaagaatgaaagaacaatttttgaagaaaagcttaagaattcattaaatatagaaattgttggagattcaatgaataggcttccacacataagcaatgttcaatttaaaaatcttaattctgaagtacttttaattcaattagatctaaatggtcttggcgtttcacgaggatctgcatgtgcaagcggtgctcaaaaaccatctcacgtattagaggctatgaatataaatcctaaatttataaatagtcatttaaggtttagttttggctggacaacaaaagctggagatggaagcaaagctgcagaa

SEQ ID NO: 258843 - DNA, 199 bp, Unknown
  Bacterial polypeptide expressing nucleotide sequence isolated from the Sargasso Sea
atgactaacgaaataaatttacctatctacatggattatgcatctaccacgccggtagatccaagggttgcgcaaaaaatttctgatcacttaacattggatgggaattttggaaatccagcctcacgatctcataaatttggatggaaagctgaagaggctgttgaagaagcaaggtctcatgtagcaaacttggtta

SEQ ID NO: 258844 - DNA, 893 bp, Unknown
  Bacterial polypeptide expressing nucleotide sequence isolated from the Sargasso Sea
gaaatttatctcgataacaatgctactacgccagtgttgccagtggccgcgcaggctgcaatgcacacaatgcagcgtggtttcggtaatccaagcagcagtcacgctaccggtattaaagccaaagccgagttggaaagtacgcgggcccttgccaggcagctgatcggtgccagtaccggggacatcgtgtttacctcaggtgccactgaaggcattcaaacctctattgtttcagcactaatggctgcgcgcgagcggggattaacaggcgccaaaacgttgctgctgtatggggctacggaacataaagctgtgccggaaagcctgaaacactggaataaggtattgcagcttgatgcaacggtaatggctattcccgttaaccagcatggcgtactcgattatgactttatccgcgctaatctggcttccgcggtaatgatttgcactatggcggcaaataatgagacaggcgtaaaacaagatctggctgcgctggagcagttgatccgtagtgttaatccaacagtgtactggatggttgattgtgtgcaggcactggggaagatggcgcttaacattgcccaaaccagtattgattatgcgccgttcagtggacacaagctttacgcacccaaaggtattggttttttatatgtacgccgcggcgcaccttatcagccttttattgcaggcggaggccaggaaagtggtttacgttccggcactgaaaacctgccgggtatcgctgcattacatgcagtgttcagtgagctggctaaaaagcaggggtcggtatttcaagccgaagcagtactgtggcaataccggcagcaactgatttcagccttaaagcaggtgttcccggcgctcgagctcaacagctctga

SEQ ID NO: 258845 - DNA, 246 bp, Unknown
  Bacterial polypeptide expressing nucleotide sequence isolated from the Sargasso Sea
aatgttaaaaaaaatatacttagattatcaagcaacaactcctgtttctaaggaaatactagaaaaaatgattccttatttttctgataattttggaaatccacattcaaataaccattcatatggaagaagtgcatctgaagctgtcgaagaagcaagagaaaatattgctaatctaattaattctaacaaggaagaaataatttttacaagtggagcaactgagtcaaataattttgcaattaa

SEQ ID NO: 258846 - DNA, 857 bp, Unknown
  Bacterial polypeptide expressing nucleotide sequence isolated from the Sargasso Sea
aaaatctcggtcaatcattgaaaatgcaaggaatcaagttgcaaattctatttctgcaaaccctgagcaaattatttttaccagcggtggaactgaatcaaataaccatgtcctttggtctcttctaaataatcatcatcgtcatgttgtttccaataaaattgaacaccctgcaatattaaaggtacttcattttctaagccagcatggactaaaatatgatcttgttggcgtattgagcgatggtattgtttctgttgaaaaaattgaaaaggcaatcctgcctgatacttctcttatttctttaatgcttgccaacaatgaaattgggactatacaacctattaaagatgtcgttgaaattgcgaaaaagtataacgtattagtccataccgatgcagtgcaatgcctagggaagatggaagtaaatgttttagatcttggagttgattttttaagcctatctgcacacaaattttacggtcctaagggaattggaattttgtatgctaaagatccgaaaaaactatcatccttcattattggtggtggacaagaaagaggccttcgagcaggaacggaaagtatatcggcaattgctggaatgggtcttgctgctgagcattgtgtagagtcattaagtgggaaacgcgagctacttattaaacttgaaaaaaggttgaagtctggaatcaataaattttataaaaaagcaatctataatggtaatcaatccaaaaagttaccaggtctaattaatatctcatttccaaaaaatcaatctaatattataatggcaaaactagatagagatggtattgcaatatctaacggaccagcatgtggctctggagatg

SEQ ID NO: 258847 - DNA, 913 bp, Unknown
  Bacterial polypeptide expressing nucleotide sequence isolated from the Sargasso Sea
actactcctcttagagatgaagttaaaaaagagatgctaaatgtaatggggcctcccttgaatgcttcttcagttcattcttttggcagacaagctaaaacccatcttgaaaatgcaagaacctcaatttctaattttgttaacgccaatagtgatcaaataatttttacttcaggtgggactgaagccaactcgatgattatgcagatttttaaaaggccgttaattagttctattgaacatgacgcagtgatagcttcatccaaaaaccctaattttatagatgttgatagtaatggtttagtagaaattgatgaccttgaggttaaaataaaaaaatttaatcctgatataatttctgtaatgtgggcaaataatgagacaggtgttattcagcctattagagatattgtaaaaattgcaaaaaaatataaagtttatatccattgtgatgcggtccaagcgcttggaaaaatagatattgattttaaagcttctggtttaaatagcttagctatttcatctcataagattggagggccagttggtgttggagctttaattgtaaatgatccttataatttaaatccaattatttttggtggaggtcaggaaagaggtcacaggtcagggactgaaaatttgattggaattgttggttttggaagtgcagcaagaaaaatttttttggataatactgagattaataatattatgtcattgcaaaaaaaattcgaaaaacttattaaaagtaaattgcccaatataaaaatttttggtgaaaatgttccaagattacccaatacaacctgtgtttacatgcctcacatgaatgcagatgcacaagttattgcaatggacttggagggattttctgtctctgctgggtcagcttgctcttctggaaaggtca

SEQ ID NO: 258848 - DNA, 352 bp, Unknown
  Bacterial polypeptide expressing nucleotide sequence isolated from the Sargasso Sea
tatgaagaacataaataacatatattttgattatcaggccactacaccggtagatccgagagttctcgaaaaaatgttaccatatttttcagatatatatggaaacccacattctagaaaccattcatacggatggtttgctgaggaagctgtcgaaatggctagagaaaacgtcgcaaaaataataggtgctaaccctaaagaaattatatttacatctggagctacagaatctaataatctagcaattaagggtcttgcagagttttatggagataaaaaagatcacatcattacttgtgttactgaacataaatgtgttttggaatcttgcaaatatctatcagagaaa

SEQ ID NO: 258849 - DNA, 769 bp, Unknown
  Bacterial polypeptide expressing nucleotide sequence isolated from the Sargasso Sea
ctggataaccatgcaaccactcgagttgaccccgacgtggttgaatcgatgattccgtggtttacagataactacggaaacgcaggcagtggcacgcatgcgatgggaatagaggcacgtgatgctgtggaggcagcaaggcaacgtgtggcgcaatcagtcggcgcgactcctcgagagattgtttttaccagtggagcaactgaaagtatcaacttggcgatggtcggcgcggtaagtcgtcagtcaatgaaacagtgtgttgtccccgaaacagagcatgcagccgtcctcgatgtggctgatcaactcgagaggcaaggcctctctgtttgtcggttgccagttgcaacaaaagagagcaaagctcctggttcccttgatctcgaccgtcttgatgagatggtctggtcggggccagctcttgtttcggttatgttcgcaaataatgagatcggcttggtgcacccaatttcagacattgctgacattgtgcatgcccatggtgctttgcttcatgtcgactgtgcacaggcaattgggaattgttctttggatgtaactgcacttggtgctgacttagctagtttctcagcgcacaagtgtcatggcccaaaaggagttggtgctctgtatgttcggcgacaagaacgaaatgtaaggattgatccacaggtttatggcggtggtcaggaacgcggcattcgaagcggaacactgaacgtgccgggtaaagttggaatgggtcgtgcttgcgaacttgcaggcg

SEQ ID NO: 258850 - DNA, 550 bp, Unknown
  Bacterial polypeptide expressing nucleotide sequence isolated from the Sargasso Sea
tatggattatgcagcgacgactcccgtagatcggagagttgccaaattaatgtctggtttcctggattttgacggatcttttggtaatccagcttctagaacacacatttatggctggcaagcagaagaggccgttgaaaatgcaagggttcaggttgcaaagataataaatgccgatcctagggaaatcatttggacttcgggtgcaactgaatccgataatttggcgataaagggagttgcccaactatctgataagaagcacattatcacgagtaaaatcgaacacaaggcggtgctggatacttgtcattttcttgaagagcagggttttgaaatcacctttttgacaccggattcttctggttgctgtagcgcgcagcaggtacaagaagcagttaatgaagacacttttttggtatcgctaatgcatgtcaataacgaattgggcgcgataaatgatatttttaagataggggaagtctgtcgtaaaaacgggttgttatttcatgtagatgcggctcagagttttgggcagttagcgatagat

SEQ ID NO: 258851 - DNA, 1147 bp, Unknown
  Bacterial polypeptide expressing nucleotide sequence isolated from the Sargasso Sea
tatgaaaaataaagactatttatatttggaccatgcagcatctactccgatgcgtaaagcagctattacagaatatgtaaatgcagagagctttggttttgctaattcttcaggaggtcacaaattatcccgagattcaaaaaatttattggaggattcaagagaaaaaattgcttcgttactagatgttgcacctggtgaaattatattcacaagtggtggaacagaagctgataattggacaataaaatcgttatttagttctactaaacttgatgagaaccttgtgacttcaaatattgaacatgaggcggtgcttgcatcagcagaatgggtttcatcactcggtcataaagtaaattatgcaaaatcaaataatgaaggattggtcgaagaagatgagttcttagatcatgtaaatgagaaaacaattgttgcatcgttaatgtggggaaataatgaaacgggagtaatccagccaataagtcaaatatctaaagctcttaaatcagctaatgaatcaacattatttcattcagatgttgttcaaggaataatctcagaaaatattaactttcataactctggtattgaaagcgcagctatatcagctcataagattggaggacctaaaggggtcggagcaatgttcatcaacaataaatacaaattgccaagttttttacatggtggtaaacaagagcttgaacgaagggcaggtacagtcgatgtgccaggtatagcttcttttgctgcagctttggaggaacaacaaaataaatttgatgaggaagttggaatgatgaaagaagaaagagaaatctttgaagataaattaaagaactcattagaagttgttattgttggagactccattaacaggcttcctcatataagcaatattcaatttgctgatattaattctgaagtacttttaatcgaacttgacttaaatgggcttggtgtctcaagaggatccgcctgtgcaagtggtgctcaaaaaccttctcatgttcttgaggctatgaatgtagatgaaaaatttataaataatcatctaagattcagctttggttggtcaaatcaaaaaggtgacggttctaaggcagcagatattgttattaaagcagttcagggcatgaagtga

SEQ ID NO: 258852 - DNA, 814 bp, Unknown
  Bacterial polypeptide expressing nucleotide sequence isolated from the Sargasso Sea
tatgacaacgtatctagattttgcttctacgacaccaatggcgccagaggtcattgaaaagatgcacgccgtaatgaaagaggattcattcggcaatccttcatccctggatcatgaatttggactcgcagcaaacaaaattgtggaaagatccagagccgaggtagccgacctaatcaatgcaaatcctgatgagattctgtggacttctggggcaactgagtccaataatttggccattgtgggttttcatcaatttcaatataaaaaccaagcaatgagtttttttacgtctcacctcgaacataaatcagtcatagagtgtatggactcaatcgaggcactgggatcaaaagtgagctttattaaacccaatgaaaaaggtcgaatagacctgaaaacactttcagatcaagtggacgaagatgccgtatttgtgagttgcatgcatgtcaataatgagactggaatcataaatgacattgaaaagattggaaaatattgcagagagaatgaaattgtatttcatgtggacgcagcccaaagcattggaaaaatacccatcgatgttgacgacatgtgtattgatctgatgtccatgtctgcccataaagtttatggccctaaaggagttggcgctctatacatcaataaaaagagcattggtcgagtcaaatcaattattgtcggaggaggtcaagagcgggggatgcggtcaggcactcttccaactcatcaaattgttggaatggcaacggcctataagctttcaaaacaaagaatgcatgaagatttagagcacatcacgcaatgt

SEQ ID NO: 258853 - DNA, 1159 bp, Unknown
  Bacterial polypeptide expressing nucleotide sequence isolated from the Sargasso Sea
catgaaaacctatcttgattttgcttcgacaacgccaatggcatcagaggtcattgagaagatgcatgctgttatgagcgaagcatcatatggtaacccctcatctttggatcatcagtttggattgtccgccaataagattgtagaagaatcaagagaatcggtagccagtttaatcaatgcaaatccagatgaaattctatggacatcaggtgcaaccgagtcaaataatatggcaattgtgggcttccatcaatttcaatacaagggtcaatccatgagattcttgagttctcatttggaacataaatccgtcatagaaagtatgcactcgatcaaggatcttggatcaaatgtgtgctttattcagcccaatgagcacggtcgaattgatattgaaacatttgtcaatcagatggaggaagatgtcatttatgtaagttgcatgcatgttaataatgagactggcctgatcaatgatattaaggagattggaaaatattgcagaaaaaatgaaattatttttcatgttgatgcagctcaaagcataggaaagatacccatcgatgttagagacatgtgtattgatctcatgtcaatgtcagctcataaagtctatggaccaaagggcgtgggcgcgctctatatcaataaagatacagttggtcgaataaagtcaattatccttggaggaggtcaggagagaggaatgcgctctggcactttgcctacacatcaaattgctgggatggctaaagcatatgatctttcaaaagagagaatggatgacgaccataaacacattaagcaatgtagagatatttttataaaaacaatctcgaacattgatggatggaaactcaatggtacagataaggacgcttatccaggtatagtcagcatttgttttcccgatttgtattcagaaagtttgatttatgcaatggaagattttgcaatctcgaggggttcggcgtgctcatcagatcatgatgaaccgtcacatgttttaaaaagcatggggctacttgatcatgaaatcaatggaaccattcgtatcagctttggaagaaatacaacattaaatgaagcggaatcagcagcatctgagcttataaaagcagtatcacatcttagaaacctgaagggagaaaattga

SEQ ID NO: 258854 - DNA, 1020 bp, Unknown
  Bacterial polypeptide expressing nucleotide sequence isolated from the Sargasso Sea
ctagaaattcaaagaatttattagaagattctcgagaagtaatttctgaattattcaattctgctcctggtgaaatcatatttacaagtggtggaactgaagcagacaactggacgattaagtcattatttgattcaaaaattacaaatagtaatcttgttacttcaaatatagaacatgaggcagttctagcttcagcagaatgggtatcctcaaatggttttcaaactaaatatgctaaatctgatgagaatgggtttgtaactaaggatgaatttataaatcaaattgatgatgagaccatagttgcatcgttaatgtggggaaacaatgaaacaggagtgattcaaccaataaaagatatttctaaagaattaaaatctaccaattcatcaaccctttttcattcagatgttgttcaaggcattatctcagacaatgtagattttcataaaaatggcattgaaagtgcagcaatatctgctcacaaaattggaggcccaaaaggtgttggtgcaatgtttattaatagtaaatacaaattacccagctttttacatggtggaaaacaagaacttgagagaagggcagggacagtagatgttcctggtatagcagcatttgcgacagcactgcaagaacaacagacaagatttgatgaagaagttggtttgatgaacaatgaaaggctaatttttgaagataaacttaagaattcattaaatgtacaaatcataggagagtcaatgaatagacttccacatataagcaatatacagtttaaggatattaattctgaagtgcttttaattcaattagatctaaatggacttggagtttcaagaggttctgcttgtgcaagtggtgcacaaaaaccatctcacgtgctagaggctatgaatgtagactctaaatttataaataatcatttgaggtttagttttggatggacaacgcaagctggtgatggaaacaaagctgcagagatagtcataaaatctgtaaaggaaataaattgag

SEQ ID NO: 258855 - DNA, 219 bp, Unknown
  Bacterial polypeptide expressing nucleotide sequence isolated from the Sargasso Sea
tagaaccttcttatgttcttagggctttaggaaggcctgatgagttagcacatagctcaattagattctcttttggtagatttactaccccagaagaagttaaaatggtagcggaaacaaccaagagggtggttggacaacttaaagaattgtcacctttatgggatatgcatcttgacggtgttgatcttgaaaaagttgaatgggcaccccattaaa

SEQ ID NO: 258856 - DNA, 1147 bp, Unknown
  Bacterial polypeptide expressing nucleotide sequence isolated from the Sargasso Sea
tatgaaaaataaagactatttatatctagaccacgcagcatcaactccgatgcgtaaatctgctatcacagaatatgtaaatgcagaaagctttgggttcgcaaattcttcaggaggtcacaaactatctagagactctaaaaatttgttagaagattctagagaaaagatcgcttcactacttgaagttgctcctggagaaataattttcacaagtggaggaacagaagctgacaactggacaataaagtcattatttggagccactatatctgatgaaaatcttgttacttcaaatattgaacatgaagctgttcttgcatctgcagaatgggtttcttcacttggtcataatgtaaattatgcaaaagcaaataaaaaagggatagtagaagaagatgaatttctaagccatgtaaatgagaaaacaattgttgcatcgttgatgtggggaaataatgaaactggagtaattcaaccaataaaaaaattatctaaatctattaagtcaataaattcaacaactctatttcattcagatgttgttcaaggaattatctctgagaatattaattttcataattctggtattgaaagtgccgcaatatctgctcataaaattggcggacctaaaggtgttggagcaatgttcattaatagtaaatataaattaccaagttttttacacggtggtaaacaagagctagaaagaagggctggtacagtcgatgttccaggcatagcttctttcgcagcagcactggaggagcaacaaaataaatttgatgacgaagttggaatgatgaaagaagaaagagatatctttgaaaataaattaaaaaactcattagaagttgttattgttggagactccattgaaaggcttcctcatataagcaatattcaatttgctgacattaactctgaagtactcttgatagaacttgatttaaatgggcttggtgtatcgagaggatctgcttgtgcaagtggtgctcagaaaccatctcatgttcttaaggcgatgaatgtagatgaaaaatttataaacaatcatttaagattcagctttggttggtcaaatcaaaaaggtgacggttccaaggcagcagatattgttatcaaagcagctcaaggtatgaaatga

SEQ ID NO: 258857 - DNA, 1117 bp, Unknown
  Bacterial polypeptide expressing nucleotide sequence isolated from the Sargasso Sea
atgactttgtatcttgattataacgcttctgctcctattatttctgatgtagtagatataatgaatgaatctattggtattataggtaatccatcatctattcatgcttcaggaagggcagcaagaaaagcaatagaggattctagagaaataattagtgaaacgatagatagcaatccacaaaatatcatttttacatcaggagctacagaagctaatactctcgcattaaactgttcaaaagcaatgcaaacatttatttcttctatagaacatgactcagttttaaagcaaaatatcaatgcaaaactaattcctgtaacttcagaaggtattattgatatagagtttttagagagtaatttaagaaaatcgtctgaagataatatttttgtttcagttatggcagtaaataatgaaacaggaataattcagccattagaagatatatctagaatatgcaaagaaaataacgctattttacatgttgatgctgtacaagctattggaagaatagatatatctatggataaacttaacatagacttgcttactatatcatctcacaagataggaggaccaaaaggtataggatgtttagcagtaagtgataaagtttatacagtgttatctccaattattatgggaggtggacaagagagaggttttagaggcggtacagaagcagtaaatcaaattattggttttggagctgcagctaaatatgcccaaaaatttagtttgtcaagtactctaacttctagagatttactagagaaaaatgtattatcaatgataccagattctataattataggtaaaaattctcctagagtatcaaacacgtcattaatagcgtttaaaaatatctcagcagaaagtttagttatagctttagatattgaagggtatgaagtaagctcaggttcagcgtgctcttcaggtaagatagctgcaagccatgttttaagagcgatggggataaatgaaagtttggttaaaggtgcaattagaattagtttatgtagaagtttaaataaaagtgaaatattatctttttgcactattttaaaaagagtaattaatcaattattaagaaaaaagaaaattatttaat

SEQ ID NO: 258858 - DNA, 190 bp, Unknown
  Bacterial polypeptide expressing nucleotide sequence isolated from the Sargasso Sea
ggccttaaagatgaattagctcatagctccattagatttggaattggtcgtttcactaacgaagaagaggtagaatacacaatcgaactagttagagattctgttgagaaattaaggaaactttctcctttatgggacatgtataaggatggcgtggacttagattcagtagaatggatggcaacatagc

SEQ ID NO: 258859 - DNA, 1072 bp, Unknown
  Bacterial polypeptide expressing nucleotide sequence isolated from the Sargasso Sea
tatgaaaaaatctgaatatctttatctagaccatgctgcaactactccgatgcgagaagttgcaatcaaagcatttattgatgctgaacacgaagggtttgcaaattcttctgggggacacaacttatctagaaaagcaaaaaatatattagaagaatcaagagaaacaatttcatctatttttgaggttgcacctaatgagataatatttactagtggaggaacagaagcagataactggagtatcaagtcattatttaataaagagacagattctaatgctaatttggttacttcaagtattgaacacgaagcagtccttgcttcagctgagtggattaaagataatgattttacagtaacatttgcagaatgtttagaaactggagaattagataaaaataactttcttaatgccataaataagaacacaattgtagcttctgcgatgtgggctaataatgaaactgggataatccaacccattaaagagctaacaaaggaggtaaagaaaataaattcagatactttattccattcagatgttgtccaggcagtcgtttcagctaaacaaaattttcatagtgaaggaatacagagtgcagcaatatcagcccataaagttggcggcccaaaaggagttggggcaatgtttctaagtaatgaatttaaattaccaagtatgctccatggtggtaagcaagaacttgagagaagagcaggaacagtaaatgttgcaggagtagcatctttcgctgctgctctccaagaacaacagaataattttgatgacgaaattgccataatgatgaatgagaaatcagagtttgaagaaattgtaaaaaacaattttaaagtaaaaattattggggaaaatgaaaaacgtttagctcatattagtaatattcaatttgaaaaagtaaattcagaagtattaatggtagatttagatttaaatggattgggtgtttcaagaggatctgcttgcgctagtggtgctcaaagaccatcacatgtccttgaagcaatgggaattaaaaaagaatatattaataacccacttgagatttag

SEQ ID NO: 258860 - DNA, 1153 bp, Unknown
  Bacterial polypeptide expressing nucleotide sequence isolated from the Sargasso Sea
gatgaaaaaaatttattttgataatgctgcaacaacacaaataagtaatgaggttattgctgttatttccgacgtaatgaaaaataattttggaaatccatcttcaactcattcatttggaagaagttctaaatcattgttagagctttcaagaaaatatatagccgaaaaactaaatgttttaccctcagaaatcatttttacaagtggaggaacagaatcaaataacatgattattaaatcggctgttgaatctttgggagttaaaagaattatttcaactaaaattgaacacaaggccgttttaaactcagttgagactatatcaaaaaataaaaaactttctcttgattttcttgatgttgatgaaaatggaaatccagataaaaatcaactcaaagaacttcttgaaaattctgatgaaacgactttagttagcttaatgcatataaataatgagattggtacaatgatagatttgaatgagtatggtaaattatgtgaatcaaataatgccttttttcacagtgatactgttcaaaccattggacattataatctggacttgagtaaaacaaaaattgactttataacatgctcagctcacaagtttcatggaccaaaaggagttggttttatttatgtaaaaaatggtacaaatttactaccactaattgagggaggctctcaagaaagaggattaaggggtggaactgaaagtatacacaatattgctggtttgaaaaaggcttttgaatcgtcatataatagccttgaaaaagattctaaaaatgtttataaaataaaagaacattttaccaactctattaaaaaatctattcctaacagcaaaataaatggtaatttttcaaaaaataattcctcatatgcaattctaaatatatgtctcccaatctcagttgaaaaaaagactttattaaacttcaaattagatttagctggcattgcatgctctggtggtagcgcatgccaatcaggaagtcaaagaccatctcatgttctctcagaaatacaaactgaaaacgatattaaaaagatctctttaagattttctttctctaaatttaatacgattgatgaggtagattatgtagttgattttttgaaaaagtttgtcgatgagaattgctaa

SEQ ID NO: 258861 - DNA, 1020 bp, Unknown
  Bacterial polypeptide expressing nucleotide sequence isolated from the Sargasso Sea
tggaaagatccagagccgaggtagccgacctaatcaatgcaaatcctgacgagattctgtggacttctggggcaactgagtccaataatttggccattgtgggttttcatcaatttcaatataaaaaccaagcaatgagtttttttacgtctcacctcgaacataaatcagtcatagagtgtatggactcaatcgaggcactgggatcaaaagtgagctttattaaacccaatgaaaaaggtcgaatagacctgaaaacactttcagatcaagtggacgaagatgccgtatttgtgagttgcatgcatgtcaataatgagactggaatcataaatgacattgaaaagattggaaaatattgcagagagaatgaaattgtatttcatgtggacgcagcccaaagcattggaaaaatacccatcgatgttgacgacatgtgtattgatctgatgtccatgtctgcccataaagtttatggccctaaaggagttggcgctctatacatcaataaaaagagcattggtcgagtcaaatcaatcattgtcggaggaggtcaagagcgggggatgcggtcaggcactcttccaactcatcaaattgttggaatggcaacggcctataagctttcaaaacaaagaatgcatgaagatttagagcacatcacgcaatgtcagaattcatttttgaaaaagctctcgaatctggatgattggaagatcaatggctcgaaagagcacagttatccaggaatattgagcatctgttttccggatttatattccgaaagtttgatttatgccatggaagattttgcaatctcaagagggtcggcttgttcttcggatcatgatgagccctcgcatgttttaaaaagcatgggcttggtcgatgatgagatcaatggaaccattcgtatcagttttggaagaactacatccattgagcaagccgagctagcagcatccgaactgattaatgcagtattgcatctgaggaaactcaaggggggttctcaatgaa

SEQ ID NO: 258862 - DNA, 1120 bp, Unknown
  Bacterial polypeptide expressing nucleotide sequence isolated from the Sargasso Sea
catgaaactttcggagaaatttaaaaaatcgatttatcttgactacaatgcaactactccactacgaccagagtcaagaattgcgatgatcgacgttctcggaaatcctggaaacccctcctcagtacatgcgatggggaggcaggctaaaagcgcaattgaatgtgctcggtcacaaattgctgactttgttggtgctagcccagaaaatgttatttttacaagtggggggacagaagcagatattctcgcacttaaaggtagtggcccttcgcaaatactaatttccagtatagagcatgacgctgtcttagctgcggtgcctgaggctagccgcatcatggtgtctgaggatggattagtgaatttaaatcatttgagaacgttattaaaggagacaaccaaaccgagtttaatttctgttatgtgggcgaataatgaaacgggcgctattcagcctatagaggaaatcacggcgctcgcgtcagatgtcgatgcactggttcacgttgatggcgttcaggcactcgggaaaatacctattgatttctcaaattctggtatagatatgctgtctgtttcggctcacaaaattggtggcccaactggcgtgggagctttgatgattagagacagccttcctgtgaaaccacttttggtagggggtggacaggaacgaggcagacggtctggaactgaaaacctttcagggattgtcggttttggtgctgccgcgaaagcctgtaaaacgcaaccgggagaaaatctagaagttacacagttacgggacatgtttgagaaaactattttggaaaaagcgttgggcgctaagataattgcccaaggggtagcgcggttaggtaatactagtgctatttttatgcccggtttaaacgcagaaacgcaggtgatggcttttgatttggctggaatagcggttagtgcaggagccgcctgttcatctggtaaagttaagcaaagccacgtattaaaagcaatgaatctacctgatgaactgataaacaatacaattcgtattagttttggttggcaaaatacgcatgaagatgtagatcaactcattgaggtttggttaaaactttataaagaatcaaactaa

SEQ ID NO: 258863 - DNA, 1150 bp, Unknown
  Bacterial polypeptide expressing nucleotide sequence isolated from the Sargasso Sea
atgaaaaaatctgaatatctttatctagaccatgctgcaacaactcctatgcgggaaattgcaatcaaggcttttattgatgctgagcacgaagggtttgcaaattcttctggaggacataacttgtctagaaaagcaaagaatatattagaagaatctagggaaataatttcatcaatttttgaggttgctccaaatgagataatatttactagtggaggcacagaagcagacaactggagcattaagtcattatttaataaaggtatagaatctaattctaatttggttacttcaagtattgaacatgaagcagtccttgcttcagctgagtggattaaagataatgattttccagtaacatttgcagaatgtttaaatactggtgaattagataaaaatagttttctgaatgccgtaaatgaaaatacaattgtagcttctgcgatgtgggctaataatgaaactgggataatccaacccattaaagaactaactaaagaagtaaaaaaaataaattcaaatactttattccattcagatgttgtacaggctgttgtttcagccaaactaaattttcatagtgaaggaatacagagcgcagcaatatcagcccataaagttggaggtccaaaaggagttggagcaatgtttataagtaatgaatttaaattaccaagcatgcttcatggtgggaaacaagagcttgagagaagagcgggaacagtaaatgttgcaggagtagcatctttcgctgctgcattgcaagaacaacaaaataattttgatgacgaaatttctataatgatgaatgaaaagtcagagtttgaagaaattgtaaaaaacaattttaaagtaaaaattattggagaaaatgaaaaacgattggctcatattagtaatattcaatttgaaaaagtaaattcagaagtattgatggtagatttagatttaaatggactaggtgtttcaagagggtctgcttgtgctagtggcgcacaaagaccatcacatgtccttgaagcaatgggtattaagaaagaatatattaataaccacttgagatttagttttggatggtcaacaggacttggagaaggtaaaaaagcagctgagattctattaaattctttggagaagatttcatgag

SEQ ID NO: 258864 - DNA, 491 bp, Unknown
  Bacterial polypeptide expressing nucleotide sequence isolated from the Sargasso Sea
tatgaaacctctgtattttgattacgcttctactacccctgttgatcagagggttatagaaaagatgaagtcttgtttatccatcgatggaaattttggaaatcctggatcaaggtcacatgcttttggatggcaggccgaagagcttgttgaagaggctagaatcaatgttgctgaacttttaaattgtgatcctcgcgaaataatctggacttctggagctactgagtcggataacctagctattaaaggtgctgcatatttctataaagataagggtaaacatattattacctcaaaaatagaacataaagctgttctagacacatgtagacaactagaaagtgaaggattcgaagtcacctatcttgaaactaatgataagggtctggtttctctagaatctgttgaaaataacctgagagatgacacatctttagtaagtttaatgcacattaataatgaaattggtgttcttaacgatatagagg

SEQ ID NO: 258865 - DNA, 480 bp, Unknown
  Bacterial polypeptide expressing nucleotide sequence isolated from the Sargasso Sea
tatgcaattacccatttacctagattatgcctctactacacccgcagaccctcgagtggttaagaagatgcaagaatgcttatctcttgatggaaattttggaaatccagcatcaagatcacatgcttttggttggaaggctgaggaggcaactgaagaggctcgacaacatgttgcagatttggttaattgtgatcccagagaaattgtttggacctccggtgctacagaatctgacaatctagcgattaaaggagcagctagattctacaagactaaaggaaatcacatcataacctcaaaaatagaacataaagctgttcttgatagttgcagacaattggaaagagaaggctttgatatcacttacctcgatccagacagcaatggaataatatctccagaccttgttaaagaatcattaacagacaagacgattttagttagcttaatgcacataaataatgaaattggagtcgt

SEQ ID NO: 258866 - DNA, 916 bp, Unknown
  Bacterial polypeptide expressing nucleotide sequence isolated from the Sargasso Sea
atgaaccatcctatctacatggactatgctgccaccaccccgattgatggaagagttgcgaaattaatgtccagatatatggatattgagggtgtttttggtaacccggcgtccaggactcatgaatttggttggcaggcggaagaagcagttgaaaatgcacgtgttcaggtggctaaagtacttaatgctgatccgagggagatagtttggacttctggggctactgaatccgataatttggcgataaaaggcctagctgaaaagactgacaaaaatcatattataaccagtgagatagagcacaaggctgtactagatacttgccactttttggaagaaaaggggttcaacgtgacctatttgcaacctgacgctaaaggctgttgtagtgcagatcaggttgaaagagcgctgacagatgaaaccttcatcgtttctttaatgcatgtaaataatgaactgggcgcaatcaacgatatcgcaaagattggaaagctttgcagtaatcgggatgtagtttttcatgtagatgctgcccaaagttttggaaaaatacctattgatgtccgcgctatgggaattgatatgatttctatctctgctcacaaaatatatggtcccaagggcataggtgtgctgttcgtcaacagagaatcaaatatcggtttacagccgatgattcacgggggaggacacgagtttggaatgcggtctggaacactggcaactcatcaaatcgtgggtattggagaggctgcagagcttatgtatctggagggtagaaaggactttgacgctcatcttcgttttcgggaaattttattttccaatctaaatcaaattcctgacattcaaatcaacagcgatttagaaaaatccatcccttcgattattaatgtaagtttcgccgacg

SEQ ID NO: 258867 - DNA, 828 bp, Unknown
  Bacterial polypeptide expressing nucleotide sequence isolated from the Sargasso Sea
ttgatctgaaacagttggaagcctcaatccgggaagacacggtcctggtttccttgatggctggcaacaatgaaatcggaaccctgaatcctctcaaggagattggtcagatgacccgtgagcggggggtactttttcattgtgatgcaacgcaaggggtggggaagattccgattgatgtggaagcaatgaacatcgacctcctatcgatgacggcccacaagatctatggtcccaaaggaatcggagcattgtacgtcagacgtaaaaaacctcgggtccgcatcactccgatcatgtttggaggcggccatgagcgagggtttcgttccggtaccctgaatgttccaggaatcgttggttttggaaaagccatcgagctcgccatggaggaaatttcgtcggaagctgaaaggcaaatcgggttgcggcaacatctttacaagcgtctgaccgacgaactcgattatgttttcctgaacggtcatccgacggaacgacttcccaacaacctcaacctcagcttcggatacgtcgagggagaaagtctgatgatgggaatcagtgaaatcgcggtttcatccggttcggcgtgtacttccgcgagtcttgagccttcgtacgttctccgctcaatgggagttggtgatgatctggctcattcttcggtacgttttggatttggacgttacaccaccatggaggaagtgaattacgccgccgataaagtaattggtgcggtcaagcggctccgtgaaatgtcgcctctctatgaaatggtgcaggagggggtagacctttcgaaagtcacttggacctctcattgac

SEQ ID NO: 258868 - DNA, 396 bp, Unknown
  Bacterial polypeptide expressing nucleotide sequence isolated from the Sargasso Sea
gatgagcacacaatccacaatttatttagactacgcatcaacaaccccagttgaccctagagtagcatctaaaatgatggagtttttgactcctgagggagagtttggaaatcctgcttcacgttcacatcgatttggatggaaagctgatgaagctgttgaagaagcaagatctcatgttgcaaatttagtcaattgtgatccaagagaagttgtctggacgtctggtgcaacagaagcagacaatttggctataaaaggcgttgctagattttataagtctaagggcaatcacattattacttcaaaaattgaacataaagcagttttagatccatgcaggcaactggaaagagaaggtttcgaagttacttatctcgatccagatgataaaaa

SEQ ID NO: 258869 - DNA, 486 bp, Unknown
  Bacterial polypeptide expressing nucleotide sequence isolated from the Sargasso Sea
gatgagcacacaatctacaatttatttagattacgcatcaacaacaccagttgaccctagagttgcatctaaaatgatggaatttttaactcctgaaggtgaatttggaaatcctgcatccagatctcatcgttttggttggaaggctgatgaggctgtagaaaaagctagatctcatgttgctaatcttgttaactgtgatccaagagagattgtttggacttcaggcgctactgaagctgataatttagccattaaaggtgttgctagattctataaatcaaaaggtaatcatataattacttcaaaaatcgagcataaagccgttttagatccttgtaggcaattagaaagagaaggatttgaagttacatatttagatccagatgaaaaaggtattattagtccatcggcagtcaagtcagcaattaaagatacaactattcttgtttctataatgcatataaataatgagctcggcacaat

SEQ ID NO: 258870 - DNA, 879 bp, Unknown
  Bacterial polypeptide expressing nucleotide sequence isolated from the Sargasso Sea
agagtagcatctaaaatgatggagtttttgactcctgagggggagtttggaaatcctgcttcacgttcacatcggtttggatggaaagctgacgaagctgttgaacaagcaagatctcatgttgcaaatttagtcaattgtgatccaagagaagttgtctggacgtctggtgcaacagaagcagacaatttggctataaaaggtgttgctagattttataagtctaagggcaatcacattattacctcaaagattgaacataaagcagttttagatccatgcaggcaactggaaagagaaggtttcgaagttacttatctcgatcctgatgataaaggtgtcataagtccagaagcagtaaaggcagcaattaaggattcaactgttctagtttcaattatgcatattaataatgagcttggaactgtcaatgacatatcaaagattggtgatgttaccagagataaaggaattttctttcatgttgatgctgcccagagtacaggtaaagtgaatattgacctagaaaaaatgtcagttgatcttatgtccttttctgctcataaaacatatgggccaaaaggtgttggcgcattatatgtaagaagaaaacctagagttagacttgaggctttaatccatggcggtggtcatgaaagaggtatgagatctggaaccttagcaactcatcaaatcgtaggcatgggcgaagcattccgcttggctagtaaagaaatggaagaagatcacaaaaaaatctctaaatatcatgaaagatttttagataaagtaaaagaaattgatcatgtatatattaatggtgatcttaataataaagttccaaaatattttaaatgtaaagctttatttttgttgaag

SEQ ID NO: 258871 - DNA, 388 bp, Unknown
  Bacterial polypeptide expressing nucleotide sequence isolated from the Sargasso Sea
tatgaagcttcctatctatttagattatgccgccaccacgccagttgatccgcgagtcgcggaaaaaatgttccaatacatgacgatggatggcatcttcggtaacccagcatcacgttctcaccgttatggctggcaagcggaagaagcggtggatgtggcgcgcagccaagtggctgatctgatcaatgctgatcaccgtgaaatcgtgtttacctcaggtgcaaccgaatcaaacaatctggcgatcaaaggcgtagcgcacttctacaataagaaaggcaagcacatcatcaccagcaagactgaacataaagcggtactcgatacctgccgtcagcttgagcgtgaaggttttgaagtcacttacttagagccagatgctaac

SEQ ID NO: 258872 - DNA, 667 bp, Unknown
  Bacterial polypeptide expressing nucleotide sequence isolated from the Sargasso Sea
atgagcacacaatcaacaatttacctagattacgcatcaactactccagttgacccaagagtagcatcaaaaatgatggaatttttaactcctgatggtgagtttggtaatcctgcttcaagatcacacagatttggatggaaggctgatgaagctgttgaagaagcaaggtctcatgtttcaggtcttgtaaactgtgatccacgagaaattgtttggacatctggtgctactgaagctgataatcttgcaatcaaaggtgttgcaaggttttataaatcaaaaggcaatcatattattacatctaagattgagcataaagctgtcttagatccttgcagacaattggaaagagaagggtttgaagttacttatcttgatccaaatgaaaaaggtgtgataactcctgacgttataaaatctgcaattcaagaaaatacaatacttgtttctattatgcacatcaataatgagcttggcacagtgaatgacatcgaaaaaattggaaacatcaccagagataatggaattctttttcatgttgatgctgcacaaagcacaggaaaaataaatatagatttaaagaatttgaatgttgatttaatgtctttttctgctcacaaaacatatggtccgaaaggtattggagctttatatgttagaagaa

SEQ ID NO: 258873 - DNA, 775 bp, Unknown
  Bacterial polypeptide expressing nucleotide sequence isolated from the Sargasso Sea
gatatcaattatgcatattaataatgaattaggcaccatcaatgaccttagcggtattggaaaaattgcgcgtgaaaaaggtattttctttcatgttgatgctgcacaaagcactggaaaaattgatatagatttaagctctcttcctgttgatttaatgtccttttcagctcataaaacatatgggcccaagggaatcggagccttgtttgttcgaagaaagcctcgagtaagaattgaagctcaaatccatggaggtgggcatgaaagagggatgagatctggaacgctgccaacacatcaaatagttggaatgggagaagcatttagaattgcaaaagaagaaatgaataatgataagaaaagaattcaatccttgcatgacaagttctataaatctatttcaaatattgaagagatatatgtaaatggagatattgaaaacaaagtaagtaatattttaaacattagctttgcttatgttgaaggagaatccttaatcatggctttaaaagatattgctgtttcctcaggatcagcttgcacatcagctagtttagagccatcctatgtgttgagggcgcttggaagaaaagatgagcttgcatcaagttctattcgcttttcgtttggaagatttaccactgaagaagatgtggattatacgttgaatttaatcaaccatgctgtagatagattgagagagctatctccgttatgggaaatgtatttagatggaatcgatcttgatacagttgattggcaaacccactaa

SEQ ID NO: 258874 - DNA, 469 bp, Unknown
  Bacterial polypeptide expressing nucleotide sequence isolated from the Sargasso Sea
tttgagtataccaatttatttagattactcttctacaactcctgttgacaagagagttgcctccaaaatggcagattgtcttacacttgatggtgcttttggtaatccagcatcacgatctcattcatttggttgggatagcgatcaattagtcaaaaatgcacgtaaacatgttgcagatctgattaaatgtgataccagagaaatcatatggactagtggagcaacagaatcaaacaatttagcaatcaaaggggcagcacatttttataaatctaaagggaatcatcttataactttaaccactgaacataaggctgtcttggatacaatgagacagttagagtctgaaggattttcagtaacatatcttaatccagaaccaaatggtcttgtagatctaaataagcttaagtcagccatcactgaccagacactcctaatatctatcatgcatgttaataatgaa

SEQ ID NO: 258875 - DNA, 849 bp, Unknown
  Bacterial polypeptide expressing nucleotide sequence isolated from the Sargasso Sea
tttggattacgcttctacaactcctgttgatccaagagtagctaccaaaatgatggaatttttgactccagatggtgagtttgggaatcctgcgtcaaggtcacacaaatttggctggaaagctgacgaagccgttgaacagtcaagatctcacgttgcaaacttggtaaattgtgatccaagagaaattgtatggacttctggggctactgaggcagataatcttgccataaagggcgttgcgagattttataaatctagaggaaatcatattattacctcaaaaattgaacataaagcagttttggatccatgcagacaacttgaaagagaaggttttgaagttacatatttggatccagatgataagggtgttataagcccaaaccaagtaaaatcagctattaaggactcaactgttcttgtttctataatgcatattaataatgaacttggaactattaatgatatagaaagaattggcgaaattactcgtgataatggaatattttttcatgttgatgctgctcaaagtaccggaaaaattcaaattgatttacaaaaaatgccagtcgatcttatgtcattttctgctcataaaacatatggaccaaaaggagttggtgccctgtatgttagaagaaaaccaagagtaagattagaagctctaatccatggtggtggtcatgaaagaggaatgagatcaggaacattagctactcatcaaattgttggtatgggagaagcttttcgaattgcaaaagaagaaatgaatgaagatcatggtaaggtaataaaattccatcaaaagtttttagagaaagttaaacgaatcgatcatgtttatat

SEQ ID NO: 258876 - DNA, 826 bp, Unknown
  Bacterial polypeptide expressing nucleotide sequence isolated from the Sargasso Sea
cgagaatgattgtcaaataataactgttacaacagaacacaaatgtgttctagagagctgtcacactctagatcaggaaggtttaaaggttcattacttaaatgttaatgatgatggcttagttgatttaaatgaattagaaaatttacttaaacaaaaaaaatccttagtttcaataatgcatgctaataatgaaacaggtgttcttcaaccaatcaaagaaataggcaaactttgcaaaaaatataattcaatattccactctgatgttgcccaatctttaggaactcaaaaagttgatgtagaggaaatgtgtattgatagtttgtccatatccgcacataaaatatatggaccaaagggtattggagctctttatatctcaaatgaaataaaaaattcacttagaccattgataagtggtgggggtcaagaaatgaaccttagaagtggaaccttatcaccagctttatgcgttgggttaggagaagcgtgcaaagatttaacaatcaatagagaaaaatattttcaacactttaaagaactaaaatcaaaactattatcagagttagttttgtcaaaattagattttgtaattaatggatctaatgagaaaagaatacctaataatttaaatatttcgataaagggaaaagttgcagaccagctatttaactttttaccaaattttgctttgtctagtggatctgcatgtacctcaggcactattgaaagatctcatgttttaacagctatgagatatgatgaaagtagagtagatggatctttcagaattagtactggaagagataccacaaaagacgat

SEQ ID NO: 258877 - DNA, 766 bp, Unknown
  Bacterial polypeptide expressing nucleotide sequence isolated from the Sargasso Sea
gatgagcacacaatctacaatttatttagattacgcatcaacaacacctgttgacccaatagttgcgtctaaaatgatggaatttttaacttctgatggagagtttggtaatccagcatccagatctcatcgttttggatggaaggccgatgaagcagtagaagaggcaagatctcatgtcgcaaatcttgttaattgtgatccaagagagattgtatggacttctggggcaactgaagcagataatctagccataaagggtgttgcaagattctataaatcaaaaggaaatcatatagttacttcaaaaattgaacataaggctgtactagatccttgtagacaattagaaagagaaggctttgaagttacatatttagatccagatgaaaaaggaattattagtgcatctgctgtaaagaatgcaattaaagatacaacagttcttgtttctataatgcatgtaaataatgagcttggaacagttaatgatattgcaaagattggtgatataactagaaaaaatggttctttttttcacgtcgatgctgcacaaagtaccggtaaggtcaaaattgatttagaaaaaatgccgattgatttgatgtctttttctgctcataaaacatatggaccaaagggtattggagccttatatgtaagaagaaaaccaagggtaagattagaggctttaattcatggcggcggtcatgaaaggggaatgagatcaggtacattagcaactcatcagatagttggaatgggc

SEQ ID NO: 258878 - DNA, 878 bp, Unknown
  Bacterial polypeptide expressing nucleotide sequence isolated from the Sargasso Sea
tttcgaagttacatatttagaaccagatgatggcggtattatttcaccggaagacataaaaagtgccctcaaagaaaatactattcttgtttcaataatgcatataaataatgaattaggaactataaataacataaatgagataggcaaaattgttaaaaataaaggagcgttttttcatgttgacgctgcacaaagcacaggtaaagttaacattgatttaaaagatgcacctatagacttaatgtctttttcagctcataaaacatatggaccaaaaggaattggagccctttatgtaagaagaaaacctagagtaagaatagaggcgttgttgcatggaggtggtcatgagagaggaatgcgctctgggacattagctactcatcaaatagtaggaatgggagaagctttcaggcttgcaaagttagaaatgaaaaaagatcacgagaaagttagtaaatttcataaaaaattcttagatgatgttggtaagattgaacacgtttacattaatggtgatgtaaaaaataaagttcctaacattctgaatgttagttttaattttgttgaaggagaatcattaataatgggacttaaagatattgcagtatcatctggatcggcatgtacgtcagccagtcttgaaccatcttatgtgttaagagctcttggaagaaaagatgaattggctcatagctctataagattttcttttggaagatttacaaatgatgatgaagttcaaagaaccttacaactattaaataatgtagttgagagattaagagaactctctcctctatgggaaatgcatttagatggtattgatttggatactgtagagtggacagcacataaattttgggaggaatgta

SEQ ID NO: 258879 - DNA, 656 bp, Unknown
  Bacterial polypeptide expressing nucleotide sequence isolated from the Sargasso Sea
tatgaaattaccaatttatcttgattataatgcaacttctcctgttgactctagggttttagaagagatgctccctttttttacagaatcatttggtaatgctgcaagtcgaaatcattcttttggttggcaggtagaggaagttgtagaaaatgctagagattcaatagggaatgctattggtgcagatggtaaggaaattatttttactagtggggctactgaatcaaataatatagccatttttggtgttgcagaattttataaaaataaaggtaagcatattataacaaacttgatagagcataaggcggtcattgatccttgtaatgccttagagcaaaaaggatatgatattacatttctcgaagttgataaatatggttgtattgatcttgctcaattagctgattctattagagaagacacaattttagtgtctctaatggctggaaataatgaaattggtacattgaatccaatcaaagaaattggagaaattactagagaaaatggagtcctttttcacactgatgcgactcagggtgttgggaaaatacccatcgatgtcgaagaaatgaatatagatctcctttcaatgacggcccacaaaatgtatgggcctaagggtattggagctttatacgttaggagga

SEQ ID NO: 258880 - DNA, 910 bp, Unknown
  Bacterial polypeptide expressing nucleotide sequence isolated from the Sargasso Sea
tatatggatattgagggtgtttttggtaacccggcgtcgagaactcatgagtttggttggcaggcggaagaagcagttgaaaatgcgcgtgttcaggtggctaaagtacttaatgccgatccgagggagatagtttggacttctggagctactgagtccgataacctggcgataaaaggcctagctgagaagactgacaaaaatcatattataaccagtaagatagagcacaaggccgtactagatacttgccactttttggaagaaaaagggttcaacgtgacatatttgcaacctgactctaaaggttgttgtagtgcagatcaggtagaaagagcgctgacagatgaaactttcatcgtttccttaatgcatgtaaataatgagctgggcgcaatcaacgatatcgcaaacattggaaaactttgtagtaatcgggatgttgtttttcatgtagatgcagcacaaagttttggaaaaataccgatcgatgtccgcgttctgggaatcgatatgatttctatctctgctcacaaaatatatggtcccaagggtataggtgtgctgttcgtcaacagagaatcaaatattagtttgcagccaatgattcacgggggaggacacgagtttggaatgcggtctggaacactagcaactcaccaaattgtgggtattggagaggctgcagagcttatgtatctggagggaagaaaggactttgacgctcatcttcgttttcgggaaattttattttccagtctaaatcaaattcctgacattaaaatcaacagcgatttagaaaaatccatcccctcgattatcaatgtaagtttcgctgacgttaacggagaaacactaatgtctgctctcgataatgtggcgctttcgagtgttcagctgcaactcagag

SEQ ID NO: 258881 - DNA, 697 bp, Unknown
  Bacterial polypeptide expressing nucleotide sequence isolated from the Sargasso Sea
attggtgaagtgactagagcagcggggattgtttttcatgttgatgctgctcaaagtgcaggtaaggtagagattgatttagacaaaatgaaagttgatttgctttcgttgtccgcgcataagatgtacggccctaaaggtattggcgctctttttgttagacgtaagcctcgaattcggttggaggcacagatccatggtggcggtcatgaaagaggaatgcgctccggtactcttgccacgcatcaaatagtcggcatgggtgaggcggccgagattgcaatggcagagatggtgtctgagagcaagcgtctggcatctttaagggaacgattttggtctgggattaaagatgttgaagctgtgcaggtgaatggtgattatcaccagcgcttacccggtgtattgaatgtaagtttcaactttgttgagggtgaatcactaatcatgtcgcttaaagatctcgcaatttcaagtggttcagcttgtacctcagccagtctagagccatcttatgtcttgcgagctcttggtttgtctgatgaattagcgcatagctctctaaggttcagttttggtcggtttaccactgaagaagatgtagaccttgcgttagggcaacttcttaattctgtggaaaagttgcgagagctctcgcctctttgggatatgtataaagatggaatagatttagata

SEQ ID NO: 258882 - DNA, 844 bp, Unknown
  Bacterial polypeptide expressing nucleotide sequence isolated from the Sargasso Sea
aaaagacggaaaagaattataactgcacaaaccgaacacaaatgcgtaatagaaacttgcaaacgactggaagccagcggatacgaacttatttttttacctgttaaagaaactgggcttctggatttcgaggccctagatgcctcagtcaatgaggatactttaatagtttccattatggccgctcataacgaaataggtgtacttcaggaaatcaccgccataggcgaactttgcaagaaacgaggggctctattccatacagatgctgcacaggctattggtaaaattccgctagacgtacaggccatgaatatagatttgatgagtatatcaggccacaaaatctatgggcctaagggaatcggagcgctttacatacgccggcgaccacgagttagaataaacccattaatagatggtggaggacaagaacggggcctcagatctggcaccttgtcaaccccgctttgtgtgggactaggagaagcatgtgaaatagcaaatcaaaatctaagccatgagcccgccagattgctggaattacgacagcgcctctacgaaggcataatatcagctattccaacaactcttttgcacggccatatacaacagcggctgccaggcaatcttaatatcagctttcctggtataggtagtgaccaaataatgtcggctatccccgaaattgcgttctcgagtgggtcggcatgcacatctaactccatcgagccatcctatgtcataaaggccctcggcgctcctgatgatgcggctcagggtgcaattcgttttggtttaggccgttttaacacccctgatgaaattgattactcccattaaa

SEQ ID NO: 258883 - DNA, 307 bp, Unknown
  Bacterial polypeptide expressing nucleotide sequence isolated from the Sargasso Sea
tatgaaaactaaagctatatattttgattatgcagcaacgacccctgttgacccaagggttgcaaagaaaatgcatgaatgtctgttgctagatggtaatttcggtaaccctgcttctagatcacatgaatttggttggaaagccgaagaggtggttgagaaggcgagattacaggtggcagatctgataaatgcagactcaagagaaatagtctggacttctggagctacagaatctgacaatcttgccataaaaggcgcagctaaattttacaaagatagaggcaatcacattatcacctctaaa

SEQ ID NO: 258884 - DNA, 859 bp, Unknown
  Bacterial polypeptide expressing nucleotide sequence isolated from the Sargasso Sea
tttgagttcctatctagaacctaatgagggtggtttgatttcacctgaagctgttttaaatgcaatcagagaggatactgtgctgatatcaattatgcatattaataatgaattaggcaccatcaatgaccttagcggtattggaaaaattgcgcgtgaaaaaggtattttctttcatgttgatgctgcacaaagcactggaaaaattgatatagatttaagctctcttcctgttgatttaatgtccttttcagctcataaaacatatgggcccaagggaatcggagccttgtttgttcgaagaaagccgcgagtaagaattgaagctcaaatccatggaggtgggcatgaaagagggatgagatctggaacgctgccaacacatcaaatagttggaatgggagaagcatttagaattgcaaaagaagaaatgaataatgataagaaaagaattcaatccttgcatgacaagttctataaatctatttcaaatattgaagagatatatgtaaatggagatattgaaaacaaagtaagtaatattttaaacattagctttgcttatgttgaaggagaatccttaatcatggctttaaaagatattgctgtttcctcaggatcagcttgcacatctgctagtttagagccatcctatgtgttgagggcgcttggaagaaaagatgagcttgcatcaagttctattcgcttttcgtttggaagatttaccactgaagaagatgtggattatacgttgaatttaatcaaccatgctgtagatagattgagagagctatctccgttatgggaaatgtatttagatggaatcgatcttgatacagttgattggcaaacccactaa

SEQ ID NO: 258885 - DNA, 885 bp, Unknown
  Bacterial polypeptide expressing nucleotide sequence isolated from the Sargasso Sea
gtatattttgattatgcctctacaactccagtagatcgcagagttgcggagaaaatgcacgaatgtcttcttttggacggcaactttgggaatcctgcctcacgatcgcatgaattcgggtggaaagctgatgaggcagttgagaaggctagattacatgttgcaaaccttgtaaaagcagattcacgtgaaatagtctggacttctggagcgactgaatcagataacttagcaattaagggtgcagcaagattttacaaagatagagggaaccacattattacctcaaaaattgaacataaagctgtattagatccttgccgtcaactggaaagagaagggtttgaaattacttatctggatcctgatgaaaacggtgtcatttcattggaaaacattcagaaacatgtaaaagactcaacaatacttctttcaattatgcatattaataacgagatcggagctgtaaacgatattgaagctataggtaagtttacgagagaaaacaatattatttttcatgttgacgctgcacaaagtactggtaaattgcatattgatttatcaaaactggatgttgatttaatgtctttttcaggacataaaacttatggtccaaagggaatcggagctctttacgtaagaagaaagcctagaattagacttgaagcacttattcatggcggtggtcatgaaagaggttttaggtctggcactttgccaacgcatcaaattgtcggtatgggtgaagcgttccgtattgcagaaaaggaaatggaaaaagacaacaaaaaaatcgcaacattggcagatttattttggaaagaagtttctggcatagaagaaatctatctaaacggaagctttaaaaataaaattcctaac

SEQ ID NO: 258886 - DNA, 631 bp, Unknown
  Bacterial polypeptide expressing nucleotide sequence isolated from the Sargasso Sea
aatggatacaaaatacctatttaaaagaaataatgtttggtgggttaagcttgccgtgccttcagtgcttagagctgaattaggatatgatttaaggaaatctactggccaaagtgatattgaaaaagccatcgctgcaagagaaaacattattacagagttaaagaaaaaatttatctctaaatctgagaacaaagaattcactaatgaagatttaaataataaagtaacttatcttgattatgcgtcaactactccagttgataacagggtagtagaaaaaatgaaagattgccttaccatagatggggcatttggaaatgctggttcaagatctcattcttatggatggaaggctgaagaattaattgaagaagccagactaaatgttgctaaattagttaattgtgatccaagagaaattgtttttacttcaggagcaactgaatcagataatttagctattaaaggcgctgcgcatttttataaaaataaaggaaaacacatagttacttctaaaattgagcacaaagccgttttggatacttgcagacaattagaaaaagagggctttgaagttacttacctagaaacagatgagttcggaaatatctctcctaaacaggttctg

SEQ ID NO: 258887 - DNA, 459 bp, Unknown
  Bacterial polypeptide expressing nucleotide sequence isolated from the Sargasso Sea
aatgtcagccagaatcaaagaccaaaaagctaaactaagtatacctatatatctcgactattcagcaacaacacctgttgatgaaagggtagcaaaaaaaatgtccgattgtctgacaaaagaagggacttttggcaaccctgcatctaggtcacatccttatggctgggacagtgaaaagttaatagatgaagcaagatctaatgttgcaaatttattaggagcagataaaagagaaattatttggactagtggtgcgactgaatcagataatctagcaattaaaggtgctgcatatttttataaggaaaaaggaaatcatcttattactctatcaactgaacataaagcagttttagatacaatgagatttcttgagtctgagggatttgaagtaacttacttggatccaaaagataatggactcctagatcttaatgatctaaaaaaagctataaa

SEQ ID NO: 258888 - DNA, 477 bp, Unknown
  Bacterial polypeptide expressing nucleotide sequence isolated from the Sargasso Sea
gatgaaaacaccaatttatttagactacgcatctacaacaccaattgataaaagagttgcagataaaatgtttgaatatatgacaatggatggtatgtatggaaatccagcctcaagatcccatagctttggttgggacgctgatgctgctgtaagtgaaagtagaaaacatattgctgatcttataaatgctgacccaagagaaatagtttggacaagcggcgcaacagaatcagataatttagcaattaagggtgcggcacatttttataagaaaaaaggcaagcacataattacagttaaaacagaacataaagctgtactcgatgcttgtagacaattagaaagggaaggctttgaagttacttacatagaaccaaaatctgacggtttgcttgatttaaataaactcgaagctgaaataagagatgatacagttttgatttcagtgatgcatgtcaacaatgaaattggtgt

SEQ ID NO: 258889 - DNA, 297 bp, Unknown
  Bacterial polypeptide expressing nucleotide sequence isolated from the Sargasso Sea
acgtcgaaggcgagtcgctgctgatgtcgctgaaggatatcgccgtttcgtccggttcggcctgcacctccgcgtcgctcgaaccttcgtacgtactgcgcgccctgggccgcaacgacgagctggcgcacagctcgatccgcttctccttcggccgcttcaccaccgaagaagaagtcgactacgccgcgcagaaagtctgcgaggccgtcaacaaactgcgtgagctgtcgccgctgtgggacatgtacaaagacggcgttgacatctccaagatcgagtgggccgcccactaag

SEQ ID NO: 258890 - DNA, 228 bp, Unknown
  Bacterial polypeptide expressing nucleotide sequence isolated from the Sargasso Sea
tttgaatggttgtcataagaataaggtaccaaacatcactaacgtaagctttgcttacattgagggagagtcactaattatggcactaaaagatgttgcagtatcgtctggttcagcatgtacatctgcaagtcttgagccctcatatgttcttagagctttaggaagagctgacgagcttgctcatagttcaataagattttcatttggaagattcactactgagaa

SEQ ID NO: 258891 - DNA, 271 bp, Unknown
  Bacterial polypeptide expressing nucleotide sequence isolated from the Sargasso Sea
gcattaaaagatgtagctgtttcatctggttcagcatgcacttcagcaagcttagaaccttcttatgttcttagggctttaggaaggcctgatgagttagcacatagctcaattagattctcttttggtagatttactaccccagaagaagttaaaatggtagcggaaacaaccaagagggtggttggacaacttagagaattgtcacctttatgggatatgcatcttgacggtgttgatcttgaaaaagttgaatgggcaccccattaaa

SEQ ID NO: 258892 - DNA, 889 bp, Unknown
  Bacterial polypeptide expressing nucleotide sequence isolated from the Sargasso Sea
catccatatggttgggacagtgaaaaattaatagatgaagcaagagtcaatgtagctaacttactaggcgctgataagagagagattatatggactagcggagcaactgaatcagataatcttgcaattaagggcgctgcatacttttataaggaaaaaggcaatcatctgattactctttcaacagagcacaaagcagtccttgatactatgagatttcttgaatctgaaggattcgaagtaacatatttagatccaaaagaaaacggtttactggatattgaagaattaaaaaaagccataaagtcaactactactgtaatatctattatgcatgtaaacaatgaaattggagttattcaagatcttgagtcgattggtaaaatatgtagagaaaataaaattgtatttcatgtcgatgcagctcaaagcccaggaaaagtagatatagatgtgaataaatttaatattgacttatgtgctctatcggctcacaaagcttatgggccaaaaggtatcggagctctatacgttagaagaaaaccaagaataagaatacaacctcagatgcatggtggtggtcatgagagaggctttagatctggaactttacccacacatcaaattgtcggcatgggcgaagcatttaaatacgcaaaacttgaaatggaagcagataacaaaaaaataaaaaaattaagggatatgctatggaatggtttgaaggatatggaagaaatatatcttaatggtgatttagatcaacgcattccaggtaatttaaatgttagttttaattttgtagaaggtgaaagtctcataatggctataaaggacattgctgtatcatctggctcagcatgtacatcagcaagcttagagcctagtt

SEQ ID NO: 258893 - DNA, 862 bp, Unknown
  Bacterial polypeptide expressing nucleotide sequence isolated from the Sargasso Sea
aactttggtaatcccgcatctcgatcccatgcttttgggtggaaagcagaagaggctactgaagaagctagacaacatgtagctgatttagtcaattgtgatcccagagaaattgtttggacttcaggtgcaactgaatctgataatttagcgattaaaggtgctgctagattctataaaactaaaggagatcacataatcacctccaaaatagagcacaaagccgtcttggatagctgcagacaacttgagagagaaggatttcaagtaacttatttagatcctgattcaaacggaataatctctccagatctagtaaaagagcacttaactgataaaactatcttggtatctctcatgcatattaataacgagatcggagtagtaaatgatattgaatctattggaaagattactagggaagccggcgtaatatttcatgtggatgccgctcaaagtacgggcaagcttcaaatagacttatcaactttggaggttgatttaatgtctttctctgctcacaagacttacggacctaaaggaataggtgcgatgtacgcgagaagaaagcctagggttagattggaagctcaaatacatggaggaggtcatgaaagaggtatgagatctggtactttagctacccaccaaatagtaggaatgggagaggcttttagaattgcaaagttggatatggaagaggacaacaaaagaattgaaagcttaaggaacaaattttgggacgcaattaaagacatggaagaagtttatcttaatggagatgagctttcccgagcgccaggtttcttaaatgtaagtttcaattatgttgaaggtgagtctctgataatggcactcaaag

SEQ ID NO: 258894 - DNA, 850 bp, Unknown
  Bacterial polypeptide expressing nucleotide sequence isolated from the Sargasso Sea
ttggttaattgtgatcctagagaaattgtttggacctccggtgctacagaatctgacaatctagcgattaaaggagcagctagattctacaagattaaaggaaatcacatcataacctcaaaaatagaacataaagctgttctagatagttgcaggcaattggaaagagaaggctttgatgtcacttacctcgatccagacagcaatggaataatatctccaaacctagtcaaagaatcaataacagataaaacgattttagttagcttaatgcacatcaataatgaaattggagttgttaatgacatcaaggctataggagaaataactagagaagccggcataatatttcatgtagatgccgcacaaagcacaggtaagcttccgattgacctttctgaacttaaagtagatcttatgtcgttttcagcacacaaaacttatggacctaaaggaataggtgctttgtacgcaagcagaaagcctagggttaggcttgaagctcaaattcatggtggcggacatgaaagaggtatgagatctggtactttagcgacccatcaaattgttggcatgggtgaggcttttagaatagcaaagctagacatggatgaggataataagagaatagaaaaccttagaaataagttttggaatgctattaaagatatggaagaagtctatttaaacggtgatgagatatctagggctcctggattcttaaatgtaagctttaattatgtagagggtgaatcactaataatggcccttaaagatatagcagtatcttccggttcagcttgtacttcagctagcttagagccatcttatgttctcagagctttagggc

SEQ ID NO: 258895 - DNA, 509 bp, Unknown
  Bacterial polypeptide expressing nucleotide sequence isolated from the Sargasso Sea
tatgaagcttcctatctatttagattatgccgccaccacgccagttgatccgcgagtcgcggaaaaaatgttccaatacatgacgatggatggcatcttcggtaacccagcatcacgttctcaccgttatggctggcaagcggaagaagcggtggatgtggcgcgcagccaagtggctgatctgatcaatgccgatcaccgtgaaatcgtgtttacctcaggtgcaaccgaatcaaacaacctggcgatcaaaggcgtagcgcatttctacaataagaaaggcaagcacatcatcaccagcaagactgaacataaagcggtactcgatacctgccgtcagcttgagcgtgaaggctttgaagtcacttacttagagccagatgccaacggcattattccgatggaacgtttagaagcggcgatgcgcgacgacaccattcttgtcagcatcatgcatgtgaataacgaaatcggtgtgatccatgatgtggatgccatcggtgagttat

SEQ ID NO: 258896 - DNA, 826 bp, Unknown
  Bacterial polypeptide expressing nucleotide sequence isolated from the Sargasso Sea
atgctatcaactcccatactactagactatcaatcttcgactccttgctctaaagatgttgttgattctatgaaacctttttggcgtgagatattttctaatcctgcaagcaaatctaatttggcagggattaacgcaagcgccatattggaagcttcaagagaaaaaatagaacaaaatttatttcttcagaataaaaaagttatttttacaagtggtgcaactgaatctaataacttagccttattaggttttgctagaaatttctataaaaaaacaggaaattttggacatataattaccttaaaaacggagcataaagctgttttggagcccctaaaccaactaaaaaaagagggatttatggttacagaaattattcctgagaaagatggcttaatttcggaagaacaattcaaaaaaaatataagagaagatacatttctggttagtgtcatgttggcaaataatgaaataggagttattcagcccatagagaatttttcaaaaatatgtaaatcgcgaggaataacttttcactctgatttcgcacaatgtttaggttatatcgagttagacaatcttttatcagatgtaaatatgattacgatgagttctcacaaaatatatggtcctaaagggataggacttctcttaattgatgaagaaattaatcttgagcccttaattgttggaggaggtcaagaatatggtctaaggtctggaacattacctcttcctttagtagttggctttgctaaagcaatagagatggcagtttttaatcaaaaaaataatgctgagaaattacttttacacagaaata

SEQ ID NO: 258897 - DNA, 912 bp, Unknown
  Bacterial polypeptide expressing nucleotide sequence isolated from the Sargasso Sea
tatggtcaaaccaatttatttggataatcaagcaactacaccaatcgatccagaggtaatggatgcaatgttgccttattttaaagaaaaatttggtaattcatccagcgtgcatcattcatatggttctgaatctaatgaggcagtagaaaaagctcgtacgattttagcttcaaccataaatgctcaaacaagggaaattattttcactagtggagcaacagaatcaattaatcttgcaataaaaggagtagctggtaattatgaacaaaaataccatattattacacaagctactgaacatagcgctgtattagatacttatagagcgattgaaaaaaaaggatgggagattactatccttcctgttaaatcaaatggtatggttgaaccaaatttagttcgtgacgcgattcagagtgatactgtattggtttctgtaatgcatgccaacaatgaaataggtactatacagcctcttaaaaagattggggacatatgtaaaagaaataagattttattttttgtagatgcgtgtcaatcctttgggaaattaaatatagatgttagagagatgaatatagatctattggcagctacggcacacaagttatatgggccaaaaggtattggatttctctatgcgagacaaactaatcctagagtaaacttggaaatgcagattgatggtggaggtcatgagagaggttttagatcaggtaccttaccagtaccattaatagtaggttttggaaaagccattgatatcagtttaaaaacaatgaaaacggaatatcaattcttaaggaaacttcgagatttattatatgatggaattgtcagccagcattcggacataattttaaatggtagttttgaaaatggtctaccaaacaatctaaatctatgttt

SEQ ID NO: 258898 - DNA, 611 bp, Unknown
  Bacterial polypeptide expressing nucleotide sequence isolated from the Sargasso Sea
gtctggtgcaacagaagcagataatttggccataaaaggtgttgccagattttataagtctaagggcaatcacattattacttcaaagattgaacataaagcagttttagatccatgcaggcaactagaaagagaaggtttcgaagttacttatctcgatcctgatgataaaggtgttataagcccagaagcagtaaaggctgcaattaaggattcaactatcctagtttcaattatgcatattaataatgagctgggtactgtcaatgacatatcaaagattggtgatgtcactagagataaaggaattttctttcatgttgatgctgcccagagtacgggcaaagtgaatattgacttagaaaaaatgtcagtggatcttatgtccttttctgctcataaaacatatgggccaaaaggtattggcgcactatacgtaagaagaaaacctagagttagacttgaggctttaattcatggaggtggtcatgaaagaggcatgagatctggaactctagcaactcatcaaatcgtaggcatgggcgaagcattccgcttggcaaataaagaaatggaagaagatcacaaaaaaatctctaaatatcatgaaa

SEQ ID NO: 258899 - DNA, 901 bp, Unknown
  Bacterial polypeptide expressing nucleotide sequence isolated from the Sargasso Sea
acaaattgctaaaatttgctcagttgacatctcggaaattatttttactagcggagcaactgaaagcaataacatagctttatttggattactggagcacgcaaaaaaattaggaaaaactcatattatctcaactatgattgagcacaaagcaattcttgatccattaaaggaaatagaaaatagaggttttgaagtaactcttgttaagcctgaatcatctggtcatattgatgttcgaaaaattattaaatctattaacagcaatacatttttaatttcatgtatgcatgcaaataatgaaactggttcaattaatgatatttctctaattggaaaactagccaaagagattgattctgaaattttcattcactcagattgcgcacaaacatttgcaaaaactaatttagatttcactgatccaaccatagacatgatttcatttagtgggcacaagtttttcggcccaaaaggtattggcggcttagtcactagaaaacgtaatgggatctcgctcccaatcaaacctattatgtatggaggcggtcaagaaagaggattgcgtccaggaactcagcctgtccatctaattgcaggaataggattagcggcagaattagcttttttagatcgacaaaactggactgaaaaatgtttaaaaataaaagatcaagccctcaaaacttttgatagtgaaggcacgaccatatatggaggagttggaagtgagacactacctaatacattatttatatcatttggaacgcacgctgaatcggtaattatatgtttaaaggatatagctgagattgctactggctcagcctgcacatcagaatcatattcgccaagccatgttttaacagctatgggtattgatgaggatcaagcaaaaaaa

SEQ ID NO: 258900 - DNA, 945 bp, Unknown
  Bacterial polypeptide expressing nucleotide sequence isolated from the Sargasso Sea
tatgaaacctttttggagtgagatattttctaaccctgcaaataaatctaatttggcggggattaacgcaagcgctatattggaagcctcaagagaaaaaatagaacaaagtttatttcttaagaataaaaaagttatttttacaagtggggcaactgaatctaataacttagccttattaggttttgctagaaatttttataaaaaaacaggaaattatggacatattattaccttaaaaacagagcataaagctgttttggagccccttaaccaacttaaaaaagagggatttatggtcacagaaattaatcctgagaaagatggcttaatttcagaagaacaattcaaaaaaaatataagagaagatacatttctggttagtgtcatgttggcaaataacgaaattggagttattcagcctctagagaatatttcaaagatatgtaaatcgaggggaataactttgcactctgatttcgcacaatgtttaggttatatcgagttagacaatcttttatcagacgtaaatatgataacgattagttctcacaaaatatatggtcctaaagggataggacttcttttgattgatgaagaaattaatcttgagcctttaattgttggaggaggtcaggaatatggtcttaggtctggcacattacctcttcctctagtagttggctttgctaaagcaatagagatagcagttcttaatcaaaaaaataatgctgagaaattacttttttatagaaataaccttttagaggggttgttaaaaaataattctggtttattaattaatggctccatagaaaaaagattacctcacaatttaaatttgactgtattggatttaaacggagcaaagtttcataaacttttaaaatctaaaataatttgttctactggatctgcatgtagtagtggtgaaccatctcatgt

SEQ ID NO: 258901 - DNA, 859 bp, Unknown
  Bacterial polypeptide expressing nucleotide sequence isolated from the Sargasso Sea
agtagtgcaacacatcaacacggttggtatgcaaatggtgccataaaaagagcccgaaaacaagtagctagagcaattaactgtgaagaatccgaaatcattttcacctctggtgctactgaaggaattaaccaagctattcgagcaatttaccaactttattacaaaaaaggaaatcatattgttgtatcaaaaacagaacataaagctgttttagatacaattcttgaattggaaaaaaaaggagcagaagtaacttatttagatgttaactctgaaggtttaattaatccttctgatttttcaaaagcgctgaaaacaaatacaattttagccacagttatgtgggtaaacaacgagacaggtgtaatccaaaacataaaagagctctcagaaaaagctcacgaaaaaaacatcccctttctatgtgatggtactcaagctattggaaaggtccctgtaaatatgcaagaaaataaaattggagtacttccaatttcagcacataaattctatgggccaaaaggagttggtgctttgtacataagaagaaaaaaaccacgaataactataggccctttaattactggtggtggtcaggaaaataaactcagagccggaacgttaaatactccaggaatcgtaggattaggggaagctattgaattggcaatagataaattagaagagaatacaaaacgcttaaaatttattaaaaaggagtttaaagattttttcttgaattataatgccatatttaatgaatcgaaagaaaacactagtaatcatatccttaacatcactcttcctggaataaaagcaaacaatctactaaaaaaaactagacatttgagttatt

SEQ ID NO: 258902 - DNA, 478 bp, Unknown
  Bacterial polypeptide expressing nucleotide sequence isolated from the Sargasso Sea
gatgagcacacaatctacaatttatttagactacgcgtctaccactcctgttgatcctagagttgcatccaaaatgatggaatttttaacacctgaaggtgaatttggtaatcctgcatcacgctctcacagatttggctggaaagcagatgaggccgttgaacaagcaagatcgcatgttgctaatcttgtaaactgtgatccaagagaaattgtatggacatcaggagctacagaagcagataatttggcaataaaaggagttgcaagattttataagtctaaaggaaatcacattatcacatcaaaaattgagcataaagctgtattagacccatgccgacagcttgaaagagagggttttgaagtcacatatctggacccagatgaaaagggagttattagtccaagcgcagtaaagtcggcaattaaagacacaacagtcctggtttcattatgcatattaataatgaggtag

SEQ ID NO: 258903 - DNA, 131 bp, Unknown
  Bacterial polypeptide expressing nucleotide sequence isolated from the Sargasso Sea
aacaaaggcgcagcgcatttctacaataagaaaggcaagcacatcatcaccagcaagactgaacataaagcggtactcgatacctgccgtcagcttgagcgtgaaggctttgaagtcacttacttagagcc

SEQ ID NO: 258904 - DNA, 641 bp, Unknown
  Bacterial polypeptide expressing nucleotide sequence isolated from the Sargasso Sea
gatcaccgcgaaatcgtttttacctcgggtgcaacagagtctagtaaccttgctattaaaggtattgcccatttttatcacaaaaagggcaagcacatcatcaccagtaaaactgaacataaagcaacgttagacacgtgccgtcagttagagcgtgaaggttacgatgttacctatcttgagccagaagccaatggcattatcccaatggaacgtttagaagcggccatgcgtgatgacactatacttgttagcattatgcatgttaacaacgaaattggcgtggtccatgatattaatgccatcggcgagttatgtcgttcaaaaggggttttcttccacatggacgctgcgcaaagcgcaggtaaattacctattgatgtgcaaaccaccaaagtcgatttgatctctatttctggccataagatgtacggccctaaaggtattggcgcgttatatgttcgccgtaagccacgtattcgtcttgaatcacaaatgcacggcggtggtcatgaacgtggtatgcgcagtggcacattagcgacgcaccaaattgttggtttaggtgaagctgccgctgtggctaagcaagacatggctgaagatggtgctcgtattactcgtcttcgtgacaagttatg

SEQ ID NO: 258905 - DNA, 829 bp, Unknown
  Bacterial polypeptide expressing nucleotide sequence isolated from the Sargasso Sea
gggtctcaccacgccggccatggttcaggcggcactgagagaagacacgattctggtcagtgtgatgcacgccaataacgagattggcgtggtcaacgatatcgccggcattggtcagatttgtcgggcagcgggagcgctactacatgtcgacgccgcacagggtgcaggcaaggtgcctctcgatatggagaccatgaaggttgatttgttgtcgatgtcggcgcacaagatgtatggccccaaaggggtgggtgcgctctatgtgcgccgcaagccgcgggtgcgcatcgaagcgcagatgcatggcggcggccacgaacgcggtatgcgttctggtacgctggcgacccatcagctggtgggctttggcgaggcggcacgcattgccaaagcggagatggcagatgaggctgcgcgcttatcggcactgcgtcatcgcttctgggacgcgatcaatgatatccctgaggtgcatatcaacggcgatcgcgatcagcggttaccgggggcgctcaacgtcagctttgcgttcgtcgaaggggagtccctgattatgtcgctgcgagatctggcgatctcaagcggttcggcgtgtacctcggccagccttgagccgtcctatgtattgcgggcgttggggttgaatgacgaattggcgcacagctcattgagattcagcttcgggcggtttacgaccgatgcagaagtggatcacgcggcgcagtctgtccgtcatgctgtagagaagttgcgcgagctgtcgccgctgtgggacatgtatcaggacggtgtagacctcaacacaattgaatgggcggcgcactag

SEQ ID NO: 258906 - DNA, 821 bp, Unknown
  Bacterial polypeptide expressing nucleotide sequence isolated from the Sargasso Sea
aatggttttgaattcaaatatatatttagattatcaatctactacaccagtggactctaaagttattgaagctatggagccatatttaaatattcactttgctaacccacattcaacagaacatgtaatgggtaaatttgtatctgatagtattgaagaatcaaggattaaaatttcaaaattaataaactgtgaatctagagaaatagtatttacttctggagctaccgagtcaaataatattgcaattaaaggagcagctaggttttataaggataaaaataaaaatgaaattattactattaatacagaacataaatgtgtaattgagtcttttcatagtttgattaaagagggatttaaggtagtcatactgccagttgaaaataatggaattttagatataaataaattaattaatgctatatcaaaaaaaactttattagtctctgttatggcattaaataatgaaattggagtcatccaacctttagaaaaaattggaaaattatgtaaagaaaaaaatatactatttcattcagattgtgcccaagctggaggtaaaataaaagttgatgtaaataagtttaacttagaccttctaagtttatcttctcataaaatgtatggtccaaagggtataggttgtctttatgtaagaagaaagccaagggttaggttagaccctctattttctggggggtttcaagaaaatggtattaggtcaggcacacttccatcacatttatgtgttggttttggagaagcagctagtatagctataaaaaatatgtcctctgacaatttaaaaattaaaaatt

SEQ ID NO: 258907 - DNA, 695 bp, Unknown
  Bacterial polypeptide expressing nucleotide sequence isolated from the Sargasso Sea
tatgtcagcaaataatgaaacaggggtaatgcagtctatagaagaaataggtaagctttgtaaaaaatataatgcaatttttcatagtgatattgcacaatcaataggtacacaagatattgatgttaaaaaaatgaatttagatgtatgttctatctcagctcacaagatttatggtccaaaaggaattggtgcattatatatttcaaataatattaaaaatactttaagaccattaattagtggtggtggacaggaaaaaaacctacgttctggtactctatctccagcactatgtgttggccttggagaggcttgtaaagatttaattaaaaataaaaaaaaatatgaccaacactttaaagaattaaaatcttttcttttatctgaattgataaaatctaaacttgaatttgatattaatggagatgttcaaaaaagaatccctaataatttaaatatttcaataaaaaatacaatttcagaacagctatttaattttatgcctcatatagctttatcatcaggtagtgcctgcacctcgggtactatagaaagatctcatgtcttaacagcaatgaatctagatgatgctagaatagatggatcttttaggataagttttggaaggcaaactactaaagatgaaattgccgaattgattaatagtattaataaaatttatgaaaattgat

SEQ ID NO: 258908 - DNA, 494 bp, Unknown
  Bacterial polypeptide expressing nucleotide sequence isolated from the Sargasso Sea
tatgaagcttcctatctatttagattatgccgccaccacgccagttgatccgcgagtcgcggaaaaaatgttccaatacatgacgatggatggcatcttcggtaacccagcatcacgttctcaccgttatggctggcaagcggaagaagcggtggatgtggcgcgcagccaagtggctgatctgatcaatgccgatcaccgtgaaatcgtgtttacctcaggtgcaaccgaatcaaacaacctggcgatcaaaggcgtagcgcatttctacaataagaaaggcaagcacatcatcaccagcaagactgaacataaagcggtactcgatacctgccgtcagcttgagcgtgaaggctttgaagtcacttacttagagccagatgccaacggcattattccgatggaacgtttagaagcggcgatgcgcgacgacaccattcttgtcagcatcatgcatgtgaataacgaaatcggtgtgatccatgatgtggatg

SEQ ID NO: 258909 - DNA, 777 bp, Unknown
  Bacterial polypeptide expressing nucleotide sequence isolated from the Sargasso Sea
acaatctacaatttatttagattacgcatcgaccacaccggttgaccctcgagttgcgaccaaaatgatggaatttctaactcctgaaggtgaatttggtaacccagcatcaagatctcataggtttggatggaaagctgatgaagcagttgaagaggcaagatctcatgttgcaaacttagtaaattgtgatccaagagaaattgtttggacttctggtgcaactgaagctgacaatttagctataaaaggcgttgctagattttataagtctaaaggtaatcatattataacctcaaaaattgaacacaaagctgtattagatccatgtagacagctagaaagggaaggatttgaagttacatacttagatccagatgaaaaaggagttgttagtcctagcgctattaagtctgcaataaaggattcgacagtgctcgtttcaatcatgcacataaataatgaactaggaacattaaatgatattgcaaaaataggtgaaattactagaaaatatggtgcattctttcatgttgatgctgctcaaagtactggtaaagttgaaattgatttagaaaaaatgccaatagacttaatgtcattttcagctcataagacatatggacctaagggcattggagctctttatgttagacgaaaacctagagttagattagaggccttaattcatggcggaggccatgaaagaggaatgagatctggcacacttgcaacacatcagattgtaggtatgggagaagcctttagaatagctaa

SEQ ID NO: 258910 - DNA, 634 bp, Unknown
  Bacterial polypeptide expressing nucleotide sequence isolated from the Sargasso Sea
attgatcttctctccatgactgcacacaagttttatggcccaaaaggaataggcgctttgtatgtacgacgaaaaaaaccccgtgttcgcttgtctcctataatgttcggaggaggtcatgaaagaggaatgcgttcaggcactcttaatgtcccaggaattgtaggttttgccaaggctctggagctatcagttgaggagatggcttctgaagcagaacgcttaacaggattgcgtcaaagacttttagaccgtttaaactcagaacttgattatatttttctgaatggtcacccaactgaaagacttccgaataacctaaatgtaagttttggctacgtggagggtgaaagtttgatgatgggagtaaatgagctcgctgtttcttcaggttctgcttgcacctctgcaagcctggaaccgtcttatgttctgcgtgccttgggagttggtgacgatctggcacattcatccatacgtgtcggaatgggaagattcaccactgttgaagaagtagattacacagctgaaaaaatgattgatgctgtgaaaaggctcagggaaatgtctccactatatgagatggtcaaagacggagttgatttatcaactgtaaaatggacatcccattaaa

SEQ ID NO: 258911 - DNA, 766 bp, Unknown
  Bacterial polypeptide expressing nucleotide sequence isolated from the Sargasso Sea
agcgaaatattttctaatccctcaagcaaatctaatttaggcggtataaatgcgagtgccatattagaagtctcaagagaaaaaatacaagaatatttatttctacaaaaaaagaaagtaatttttactagtggagcaacagaatctaataatttggctttgcttggttttgcaagaaattattataaaaaaacagaaaaatatggtcatattattactctgaaaaccgagcataaagctgtattagagcccttagatcaattaaaaaaagaaggattccatgttactgaaattcttccaaataaagacggtttaatttcagaggaaaaatttgttagttgtataagagaagatacatttttggtaagtataatgatggcaaataacgagataggtgttattcagcctttaaaaaaaatttcagaaatatgcggatcaagagacatcaccctccattctgactatgcacaatgtttaggttttttagagttagatagtcttgactcagtagcaaatatgttgactataagctcacataaaatatatggccctaaaggggtaggactacttttgattgatagggatattgagctccaacctttaattttaggaggagggcaagaatttggtttgagatctggaactttaccattacctttgatagtaggttttactaaagcaatacaaatagcagttttaaatcaaaaaaagaatgccgaaaaattgattttccatagagataaacttttaaaaggtttattagtta

SEQ ID NO: 258912 - DNA, 903 bp, Unknown
  Bacterial polypeptide expressing nucleotide sequence isolated from the Sargasso Sea
tggtggaaagccgatgaagcagttgaagaggccagaaataatcttgcaactttaattggttgtgatcctagagaaataatctggacatctggtgccactgaatctgataatttagcaattaaaggatcagcaagattctacaaaaataaaggcaatcatcttattacttcaaaaatagagcacaaagcagttcttgatccctttagacagctcgaggatgaaggttttgaagtcacctacttggaacctaattcatcaggcgaaattactgttgaacaagtgtctcaagcagttaatgaaaaaacaatattagtgtcactgatgcacatgaataacgagttaggaacaattactgacatagattcaattggagaattaactagaagtaagggaataatctttcatgttgatgcagctcagagtataggcaagattcctgttaatatgtcttcaaataaaattgatcttttatcaatttcagctcataaattttatggccctaagggtgtaggcgcattatttgttaggagaaaacccagagttagattagaaccattatttcatggaggtggtcacgagagaggttttagatctggtactttggctacacaccagatagtaggtttaggggaggcagcaagaatagctcatcaacaaatggatgatgacttaagaaagttagaaaatcttaaaagaattttttgggaagaagttcaagatattgaggaaatctatgtcaatggagattcaaaaaacaaattccctggcatattgaatatatcttttaattttgttgagggagaatccctcataatggctcttaaatcaattgcagtttcctcagggtctgcatgtacttcagcgagcttagaaccttcgtatgttcttagagcactggcagaa

SEQ ID NO: 258913 - DNA, 401 bp, Unknown
  Bacterial polypeptide expressing nucleotide sequence isolated from the Sargasso Sea
aatgaagttgccgatctacctcgattactccgcgaccactccggtcgacccacgcgtggcccagaagatggccgactgcctgctggtcgacgggaacttcggtaacccggcttcgcgctcccacgtcttcggctggaaggccgaggaagcggtcgagaacggtcgtcgccaggttgccgagctgatcaacgccgatccgcgcgaaatcgtctggaccagcggtgccaccgagtccgacaacctcgcactgaaaggcgtcgcgcacttctatcagaccaagggcaagcacatcatcacctccaagatcgagcacaaggcggtcctggataccgctcgccagctggagcgtgaaggtttcgaaagtcactaccttgagccaggcgaagacggcatcgtcaccc

SEQ ID NO: 258914 - DNA, 694 bp, Unknown
  Bacterial polypeptide expressing nucleotide sequence isolated from the Sargasso Sea
ttttgtaatccggcgtcacgttcgcacaagttcgctgggcaggcagaagaagcggtagaaattgcccgtgcgcaaattgccgaactggtcaacgccgacccacgtgaaattgtattcacttcaggtgcgactgaatcaaacaacttagctatcaaaggcgcagctcagttttaccataaaaaaggtaaacacctgatcaccgccaaaaccgaacataaagctgtgctggatgctatgcgcgctttggaacgtgaaggctttgaagtgacttatctggatgtggaagccaacggcttagtagacctgaataagttagaggctgctatccgtcctgataccacagtcatcagcatcatgttcgtcaacaacgaaattggtgtgatccaggatatcgccgctattggcgagttgtgtcgcagcaaaggtattatttttcatgtcgatgcggctcaggccacaggcaaagtggatatcgatttagagactttaaaagtggatctgatgtcgttctcaggccacaaaacttatggtccaaaaggcattggcgctttgtatgtgcgccgtaagccacgtattcgtttagaagcccagacgcacggcggtggtcatgagcgtggtatgcgttcaggcactttagctacccaccagattgtggctatgggtgaagctttccgtattgccaaagaagaaatgc

SEQ ID NO: 258915 - DNA, 673 bp, Unknown
  Bacterial polypeptide expressing nucleotide sequence isolated from the Sargasso Sea
aacggtcttttggatttggaaaaactaaaatctgcaattacagaacaaactttattagtatcgattatgcatgtaaacaatgaaataggtgtaattcaagatcttgaaagaattggagctctcctaagagagagaaagattttatttcatgttgatgctgcacaaagtccaggaaaggttgaaatcgatgttgataagttcaatgtagatttgttatcgctttctgcacataaagtatatggtccaaaagggattggtgcactctatgttagaagaaagccgagagttaggttagagtcacaaatgcatggtggtggacatgagagaggttttcgatctggcacattaccaacacaccaaatagttggtatgggagaggcttttaagatcgcgagagaagagatggaagatgataataaaagaataaaaaaattgagagataagttctggaatcaacttaaagatgtcgaagaaatatatctcaatggtgatcttgaaaatagaattccaggtaatctgaatattagtttcaactatgttgaaggcgagagtttgattatggcgatcaaagatattgcggtatcatcaggctcagcatgtacatctgctagcttagagcccagttatgtactcagagcacttggaagagatgacgagttagcacacagttcta

SEQ ID NO: 258916 - DNA, 811 bp, Unknown
  Bacterial polypeptide expressing nucleotide sequence isolated from the Sargasso Sea
ttttttactgaaatctatggcaatgcggctagccggaatcattcctttggttggactgctgaggaagggatttcgaaagcaagaaacatcatcggagaggccatcggcgctaccggaaaagagatcgtttttaccagcggtgccactgaatccgacaatatggcggttctcggtgtggcggaattttatcatgaaaaaggaaaacatatcatcaccagcccaatcgaacataaggcggtagttgatccctgccaggctctcgagcaaaaagggtatgaaataacttttctggatgtggacgaatacggaagaattgatctgaaacagttggaagcttcgatccgggaagacacggtcctggtttccttgatggctgggaataatgaaatcggaaccctgaatcccctcacggagattggtcagatgacccgtgaacggggggtgctttttcactgtgatgcaacgcaaggggtgggaaagattccgattgatgtggaagcaatgaacatcgacctactctcgatgacggcccacaagatttatggtcccaaaggaatcggagcattgtatgtcagacgtaaaaaacctcgggtccgcatcactccgattatgtttggaggcggccatgaacgagggtttcgttccggtacccttaatgttccgggaatcgttggttttggaaaagctatcgagctcgccatggaggaaatttcgtcggaagctgaaaggcagatcgggttgaggcaacatctttacaagcgtctgaccgacgaactcgattatgttttcctgaacggtcatccgacggaac

SEQ ID NO: 258917 - DNA, 835 bp, Unknown
  Bacterial polypeptide expressing nucleotide sequence isolated from the Sargasso Sea
atgagcacacaatctacaatttacttagattacgcatcgaccacaccggttgaccccagagttgcgaccaaaatgatggaatttttaactcctgaaggtgaatttggtaacccagcatcaagatctcacaggtttggatggaaagctgatgaggcagttgaagaggcaagatctcatgttgcaaacttagtaaattgtgatccaagagaaattgtttggacttccggtgcaactgaagcagacaatttagctataaaaggtgttgctagattttataagtccaaaggtaatcatattataacttcaaaaattgaacataaagctgtactagatccgtgcagacaattggaaagggaaggttttgaagttacatacctagatccagatgaaaaaggagttgttagtcctagcgctattaagtctgcaataaaggattcgacagtccttgtttcaatcatgcacataaataatgaactcggaacattaaatgatattgcaaaaataggtgaaattaccagagaatatggtgcattctttcatgttgatgctgctcaaagtactggtaaagttgaaattgatttagaaaaaatgccaatagacttaatgtctttttcagcccataaaacatatggaccaaaaggcatcggagctctttatgttagaagaaaacctagggttagattagaggccttaattcatggtggaggccatgaaagaggaatgagatctggcacacttgcaacacatcagattgtaggtatgggagaagcttttaggatagctaataaagaaatgaaaaaggatcacaaaaaaatatctaaatatcacgaaaagt

SEQ ID NO: 258918 - DNA, 265 bp, Unknown
  Bacterial polypeptide expressing nucleotide sequence isolated from the Sargasso Sea
tgaaaagtttttagagaaagtgaaggaaattgatcatgtttacataaatggcgttcttaataataaagttccaaatattttaaatgtaagttttaattttgttgaaggtgagtctttaataatgggattaaaagaccttgcagtttcttcaggctctgcatgcacttcagctagcttggaaccctcatatgttttaagggctttgggtagaaaagatgaattagctcacagctcaataaggttttcttttggaagatttacaagt

SEQ ID NO: 258919 - DNA, 868 bp, Unknown
  Bacterial polypeptide expressing nucleotide sequence isolated from the Sargasso Sea
caccagagaaataatttggacatcaggagctacagaatcagacaaccttgcgataaaaggtgcagcaagattttacaaaacaaaaggtaatcacattatcacctcaaaaattgaacataaggctgtcctagatccatgtagacagctagaaagagagggctttgaagtcacgtatttagaaccagatcagaacggagtaataagtgttgatcagattgagacagcaataactgataaaaccatcttggtctccataatgcatgtaaacaatgagttaggctctgtgaacgatattgaagcaataggcaagctcacccgatccaaaaatatcatctttcacgtggatgccgctcaaagtactggaaaagttgatattgatctgtctaaacttgaagttgatttaatgtcatttactgcaggaaaaacttatggaccaaaagggataggtgcattgtatgtttctagaaagccacgggtaaggctcgaagctttaattcacggtggaggccatgaacgaggctttagatcaggaacgctagctactcatcagattgtaggaatgggcgaagcatttaaaattgcaaaagaagaaatgaaagatgacaataaaaaaattgccaaactctcgaaaaccttttggaaaaagatctcttctattcctgaaatatttttaaatggctctttagataataaagttccaaacatcataaacgtaagttttgcatacattgagggtgaatcgcttattatggctcttaaagacgttgctgtttcatctggctcagcatgcacatcagctagtttagagccatcatatgttttaagagcacttggaagagcagatgaacttgcacacagctctataaga

SEQ ID NO: 258920 - DNA, 302 bp, Unknown
  Bacterial polypeptide expressing nucleotide sequence isolated from the Sargasso Sea
taattttgttgaaggtgaatctctaataatgggattaaaagacattgcagtttcatcaggctctgcatgtacatcagctagcttggaaccttcatatgtattaagggctttgggaagaaaagatgaattagctcacagctcaataagattttcttttggaagattcacaagtgatgatgatgtaaataatacattagatattcttggcaacgtcgtccatagactcagagagctttccccactttgggaaatgcatctcgatggaattgatttagatacagttgaatggaacgcacattagg

SEQ ID NO: 258921 - DNA, 601 bp, Unknown
  Bacterial polypeptide expressing nucleotide sequence isolated from the Sargasso Sea
ttatggcccaaaaggaataggtgccttgtatgtacgaagaaaaaaaccacgtgttcgtttatctcctataatgttcggaggtggtcatgaaagagggatgcgttccggtactcttaatgtccctgggattgtaggctttgccaaagcactggagctctcagtcgaggaaatggcttctgaagcagaacgcttaacaggattgcgtcaaaggcttttagaccgtttgaactcagaacttgattatatttttctgaatggtcatccatctgaaagactgccgaataaccttaatgtgagttttgggtacgttgagggtgaaagtttgatgatgggagtgaatgaacttgctgtatcttcaggatcagcttgcacttctgcaagcctggagccttcttatgttctacgtgcactgggagttggtgatgatctggcacattcatcaatccgtgtcggaatgggaagattcaccaccattgaagaagtagattacgcagcagaaaaaatgatagctgcagtgaaaaggctgcgtgaaatgtctccgctatatgagatggtcaaagacggagtagacttgtcaactgtacaatggacatcccattaa

SEQ ID NO: 258922 - DNA, 650 bp, Unknown
  Bacterial polypeptide expressing nucleotide sequence isolated from the Sargasso Sea
aatgaatttaccaatctatatggattatgcatctactacaccagtagatcctcgtgttgcgaaaaaaatatctgatcatcttacgctggatggcaattttggaaatcctgcttcacgttcacataagtttggttggaaagctgaagaggcggttgaagaggctcgatcgcatgttgcgaatttagtgaattgtgatccaagagaaattgtttggacttctggcgccactgaggcagacaatttagctatcaaaggtattgctaatttttataaaaagaatgggaggcatattattacctctaaaatagaacacaaagctgttcttgatccatgtagacagcttgaaagagatggttttgaagttacctatctagaacctaatgagggtggtttgatttcgcctgaagctgttttaaatgcaatcagagaggacactgtgcttatatcaattatgcatattaataatgaattaggcactatcaatgatcttagcggtattggaaaaattgcgcgtgaaaaaggtattttctttcatgttgatgctgcacaaagtactgggaaaattgatatagatttaagctctcttcctgttgatttaatgtccttttcagctcataaaacatatgggcctaaagggaattggagctttg

SEQ ID NO: 258923 - DNA, 877 bp, Unknown
  Bacterial polypeptide expressing nucleotide sequence isolated from the Sargasso Sea
gcttcaagatctcattcattcggttggcaggccgatgaggctgttgagctagcaagatcgcatgtagcaaaccttgttaattgtgatcctagagaaattgtttggacttctggagccactgaagcagataatttagctataaaaggaattgctaatttttacaaaacaaaaggtaaacatattattacttccaaaattgaacacaaagcagttctcgatccttgcagacaacttgaaagacatggttttgatgttacatatttagagccaaatgagggaggagttatcactccagaagctgtaaaagaggccattagggaagatactattctcgtttcgataatgcacataaataatgagttaggaacaatcaatgacatcgcttctattggtgagctaacaagagataatggaatattttttcatgttgatgctgcccaaagtaccggcaaagttaatattgatttatcaaccttaaaagttgatttgatgtcattctcagcccataagacatatggaccaaaaggtgtcggcgctttatttgttagaagaaaaccacgagtaaggattgaggctcagattcatggaggtggccatgaaagaggcatgagatctggaacgcttgcaactcatcaaattgttgggatgggagaagcttttaggcttgcaaaagaagaaatgaaaagtgattctgaaaaagtcactgaattccatgaatactttttagaagaagttaagaagatcgatgaaatatatattaatggagatatacaaaacaaagttcctaatattttaaatgtaagttttaattttattgaaggtgagtctttaatcatgggattaaaagatattgctgtttcatccaggttcagcatgt

SEQ ID NO: 258924 - DNA, 424 bp, Unknown
  Bacterial polypeptide expressing nucleotide sequence isolated from the Sargasso Sea
tatgggaaaggcagaagtgatcaacgtgccaatctatttggattacctgtcaacgacacctgttgacccgcgcgttgtcgaagcgatgacgcaatgcctatcgatggacggtgtgtttggaaaccctgcatcgcggtctcaccagtatggctggaaggcggaagaggcgattgaaaacgcccgctgtcaggtcgccgagttaattaacgcagaccctcgggagattgtatggacgtcaggggctaccgagtcagataatttggcgatcaaaggcgctgctcacttctatcagcgcaaaggcaagcatatcatcacatcgaaaatagagcacaaagcggtgcttgatacctgtcgtcagctcgaacgcgagggattcgaggtgacttacctagagcccaacgcggatggtctgacgacccccgaa

SEQ ID NO: 258925 - DNA, 802 bp, Unknown
  Bacterial polypeptide expressing nucleotide sequence isolated from the Sargasso Sea
atgcaattacccatttacctagattatgcctctactacacccgcagaccctcgagtggttaagaagatgcaagaatgcttatctcttgatggaaattttggaaatccagcatcaagatcacatgcttttggttggaaggctgaggaggcaactgaagaggctcgacaacatgttgcagatttggttaattgtgatcccagagaaattgtttggacctccggtgctacagaatctgacaatttagcgattaaaggagcagctagattctacaagactaaaggaaatcacatcataacctcaaaaatagaacataaagctgttcttgatagttgcaggcaattggaaagagaaggctttgatattacttacctcgatccagacagcaatggaatgatatctccagaccttgtgaaagaatcattaacagacaagacgattttagttagcttaatgcacataaataacgaaattggagtcgttaatgacatcaaggctataggagaaataactagagaagctggcataatatttcatgtagatgctgcacaaagtacaggtaagcttccaattgacctttctgaacttgaagtagatcttatgtcgttttcagcacacaaaacttatggacctaaaggaataggtgctttgtacgcaagcagaaagcctagggttaggctagaagctcaaattcatggtggcggacatgaaagaggcatgagatctggtactttggctacccatcaaattgttggcatgggtgaggcctttagaatcgcaaggctagacatggacgaggataata

SEQ ID NO: 258926 - DNA, 799 bp, Unknown
  Bacterial polypeptide expressing nucleotide sequence isolated from the Sargasso Sea
gtagcaaatgcaattaacgctgaagcatctgagattatttttaccagcagtggttcagaggctaataatttagtattatgggatgtcattcagcgaaggggtcagcatgtgattatttccagcatagaacatccttctgtttttgaaactgttaatgcgctaaagagtttaggcttatcagtaagtgaaattggtgtagatcattttggtagagtaagagtccatgatattgaagataagattaaaaatgaaactgctctggtggcaataatgactgctaataatgagacaggtacgattcaaccaattaatgaagttgcagccttatgcagagaaagaggaattcatttccatacagatgcggttcaagctctaggaaaaattaaagttgatttcactgaaaattataccagtacagctagtttctctgctcataaagtttatggccctaaaggtgttggagttctctacattcgaaaaggcaacaaattacatcctttagtttatggaggtagtcaagaaaaatccttaagagctggaactgaaaatgtccctggtatagtgggatttggattagcttgcgaactaattacagaaaatataaatgagcactcaagtcgagtcgaaaatctgcggaatatgatggttaatcgaattatatctgaatttccctcagggattattaatgggcatcctgaaaaacatctcccaggtgttttaagtgtcgtactcccaaaaatcgatgctcaaaccttattgattaaacttgatcttgatggatttgccgtatcaacaggcg

SEQ ID NO: 258927 - DNA, 685 bp, Unknown
  Bacterial polypeptide expressing nucleotide sequence isolated from the Sargasso Sea
atgagtactaaagttacattacctatatatatggactatgcctctacaacacctgtagatcctagagttgcaaaaaaaatatctgatcatttaactttagatggtaattttggaaatcctgcatcacgctctcataaatttggttggaaagctgaggagtctgttgaggaggcacgatctcacgtagcaaatttagttggctgcgacccacgggaaatagtttggacttctggtgcaactgaagcagataatttagccattaaaggaattgcaaacttttataaatctaaaggcaaacatattattacttctaaaatagagcataaagctgttttagatccgtgtagacaattagaaagagatggtttcgaggtgacctacttagagccaaacgaaggaggtctaataactgtcgaagcaattctagacgcaataagagaggatactattttaatttcaatcatgcacattaataatgaattaggcaccattaatgatcttgagagtattggtaaaatagctcgagaaaaaggaatattctttcatgtagatgctgctcaaagcactggtaaagttccaattgatttaagcactctaccagttgatttgatgtcattctcagctcacaaaacatatggcccaaagggagtaggagcgctattgtccgaagaaaaccacgcgtaag

SEQ ID NO: 258928 - DNA, 576 bp, Unknown
  Bacterial polypeptide expressing nucleotide sequence isolated from the Sargasso Sea
aatgtcagccagaatcaaagacaaaaaagctaaattaagtatacctatatatcttgactattcagcaacaacacctgttgatgaaagggtagcaaaaaaaatgtccgattgtctgaccaaagaagggacttttggaaaccctgcatctaggtctcatccttatggatgggatagtgaaaagttaatagatgaagcgagatctaatgtggcaaatttattgggagcagataaaagagaaattatttggactagtggtgcgactgaatcagataatctagcaattaaaggagctgcatatttctataaggaaaagggaaatcatctcattactctatcaactgaacataaagctgttttagatacaatgagatttctcgaatctgagggatttgaagttacttatctagatccaaaagacaacggactcctagatcttgatgaattaaaaaaggctataagaccaacaactactgtgatatctataatgcatgtaaataatgaaattggtgtaatacaagaccttgagtctattggtaaaatttgcagagagaataaaatagtatttcacgttgatgc

SEQ ID NO: 258929 - DNA, 664 bp, Unknown
  Bacterial polypeptide expressing nucleotide sequence isolated from the Sargasso Sea
tatgaaacagcctatttatctggattatgcggcgactacgccggttgatccggcggttgccgagaaaatggttgcctgcctgaccatggacggcaactttgccaaccccgcctcgcgctcgcacgtatacggctggaaggccgaagaagcggcagagaatgcccgtcgtcaggtggctgatctggtcggcgccgatccgcgcgagattgtctggacctccggtgcgaccgagtccaacaaccttgccatcaagggcatggcacatgcgctgagtgcgcgcggccgtcacctgattacctcgactatcgagcacaaggcggtgctcgactgcttcaagcagttggagcaggaaggcttcgaggtcacctggttgcaggctgacgcctccggtgtaataacgcccgagcagctgcgctcagcgctgcgcgaggacacggcgctggtctcgctgatgcacgtcaacaacgagatcggcacgatcaatgacattcgcgccctcggcgaggtggctcagggcgctggtgcggtgtttcatgtcgatgcggctcagtcgaccggcaagttgccgattgacctgaaaaacatgccggtcgacctgatgtccttcagtgcccacaagacctacggccccaagggcgtgggtgcactgtttgtgcggcgcggg

SEQ ID NO: 258930 - DNA, 848 bp, Unknown
  Bacterial polypeptide expressing nucleotide sequence isolated from the Sargasso Sea
aatgcatgaatgtttattgttggatggcaattttggcaatcccgcatcaagatctcatgaattcggctggaaagcagaagaagttgttgaaaaagcaagattacaggtggcagacctgataaatgcagattcaagagaaatagtttggacatctggagctacagaatcagataatctagctataaaaggcgcagctaaattctacaaggatagaggaaatcatattattacctctaaaatcgaacataaagctgtcttagatccttgtagacagcttgaaagagaaggttttgaagtaacttatctagatccgaacgaggatggtattgtaacggtagaacagctaaaaaaacacgtcaaagaaaacacaattttgatttcactaatgcatattaataatgaattaggatcaattaatgacattgaaaaaataggtaattttgcacgagaaaagaatattatttttcacgtagatgcagctcagagcataggaaaagtagacataaatttatctaaattgaatgtagatttaatgtcattctcagctcataagtgttacggacctaaaggcatgggcgccttatatataagaagaaagcctagagttagattagaagcactaatccatggtggaggccatgaaagaggtttcaggtcaggaacattagcaactcatcagattgttggaatgggagaagcctttaatctagctaaaaaggaaatggcaaaggacaataagaagattaagaaactctccgagttattctggaacgaaatatcagatattgaagaaatagtcctaaatggaaacaagaaaaataaagttgcaaatataacaaatgttagtt

SEQ ID NO: 258931 - DNA, 404 bp, Unknown
  Bacterial polypeptide expressing nucleotide sequence isolated from the Sargasso Sea
tgaattccatgaatactttttagaagaagttaagaagattgacgaaatatatattaatggagacataaaaaacaaagtgcctaatattctaaatgtaagttttaattttattgaaggtgagtctttaatcatgggattaaaagatattgctgtttcgtcaggttcagcatgcacttctgcaagtcttgagccatcatatgttttaagagcattaggcagaaaagatgaattagcgcatagctcaattagattttcatttgggagatttacttcaaaggacgatgtaagaaatactcttaagcttctttcaaatgtagttgagaggttaagggagctatctcctctttgggagatgcatcttgatggaattgatttagatacagtcgaatggcaggcacactaat

SEQ ID NO: 258932 - DNA, 703 bp, Unknown
  Bacterial polypeptide expressing nucleotide sequence isolated from the Sargasso Sea
atgagcacacaatctacaatttatttagactacgcatcaacaactccagttgaccccagagttgcgtctaaaatgatggagtttttgactcctgagggtgagtttggaaatcctgcgtctcgttcacatcgattcggatggaaagctgatgaagctgttgaagaagcaagatctcatgttgcaaatttggttaattgtgatccaagagaaattgtttggacttctggtgcaacagaagcagataatttggccataaaaggtgttgctagattttataagtctaagggcaatcacattattacttcaaaaattgaacataaagcagttttagatccatgtaggcaacttgaaagagaaggcttcgaagttacttatcttgacccaaatgataaaggtgttataactccagaagcagtaaaggcagcaattaaggattcaactgtcttagtttcaattatgcatattaacaatgagttgggaactgttaatgacatatctcagattggtgatattactagagataaaggaattttctttcatgttgatgctgcccagagtacaggcaaggtaaatattgatctagaaaaaatgtcagttgaccttatgtccttttctgctcataaaacatatggaccaaaaggtgttggcgcattatacgtaaggagaaaacccagagttagacttgaagccttaatccatggtg

SEQ ID NO: 258933 - DNA, 838 bp, Unknown
  Bacterial polypeptide expressing nucleotide sequence isolated from the Sargasso Sea
gatgataaaagtgtcataagcccagaagcagtaaaggccgcaattaaggattcaactgtcctagtttcaattatgcatattaataatgagctggggactgtcaatgacatatcaaagattggtgatgttactagagataaaggaattttctttcatgttgatgctgcccagagtacaggtaaagtgaatattgacctagaaaaaatgtcagtggatcttatgtccttttctgctcataaaacatatgggccaaaaggtgttggtgcattatacgtaagaagaaaacctagagttagacttgaggctttaatccatggcggtggtcatgaaagaggtatgagatctggaactctagcaactcatcaaattgtaggcatgggcgaagcattccgcttggctagtaaagaaatggaagaagatcacaaaaaaatctctaaatatcatgaaaaatttttagacaaagtaaatgaaattgatcatgtatacattaatggtgatcttaataataaagttccaaatattttaaatgtaagttttaattttgttgaaggtgagtcattaataatgggattaaaagatatcgcagtttcttcaggctctgcatgtacatcagctagtttggaaccttcatatgtattaagggccttgggtagaaaagatgaattagctcacagctcaataaggttttcttttggaagatttacaagcgatgatgatgtaaataatacattagatattcttggcaacgttgttcatagactaagagagctttctccactttgggaaatgcatctcgatggaattgatttagatacagttgaatggaatgctcattagg

SEQ ID NO: 258934 - DNA, 941 bp, Unknown
  Bacterial polypeptide expressing nucleotide sequence isolated from the Sargasso Sea
aaaaaatcatatcataacttgtgttactgaacataaatgtgtgttggagtcttgtagacatcttgatggtaaaggtttcgaggtaacatatttgccagttggaagtgatggtttgattgatttaaaagaattagaggactccataaccgacaaaacccttcttgtttcgataatgggtgtccacaacgagataggaattattcaacctctagaacaaattggacaaatctgtagaaataacaatgtattttttcatacagactgcgcgcaggctattggaaagattcctttagacgttgaaaaaatgaatattgatttaatgagcatttcaggtcacaaaatatacgcaccaaagggcgtaggtgctctttatattagaagaaagccaagagtaaggatttcatcaatgattagtggtggaggccaagaacgaggaatgaggtcaggcacattatctcctgccttatgtgttggactaggtgaggcttgtaatatatatttaaaagaaatggaaaaagagcataaaatgttgtcgaactttaaaaaaattatgttggacggtattagaagttcttgtaaagatgtatttcttaatggctctgaagaaaaaagggttccaggaaaccttaacttaagttttgcctatgttgaaggtgaatctctaatgatgggaattaagaatttagctgtttcatctggatctgcttgtacttctgcttcactcgaaccttcgtacgttctgaaagcacttggtgtcgaagaagaacttgcgcatacgagcttaagaataggatttggtagatttacaacagaaaatgatgtaagatatgctacagagacaattgttaatgaagttaaaaggttaagggaattaagtcctctttgggaaatggcccaagaaggagttgatataagcaaaattaaatgggcacaccattgat

SEQ ID NO: 258935 - DNA, 1024 bp, Unknown
  Bacterial polypeptide expressing nucleotide sequence isolated from the Sargasso Sea
atgaaagaatctatatattttgattatgcttcaacaactccggtagaccctcgagttgcaaagaagatgtttgcatacatgtcaaaagatggtcattttggaaatccagcatctcgttcgcatgcttacggttggaaagctgatgaagcagttgaaaaggcaagaactcaggtagcaaatctagtaaatgctgatccaagagaaatcgtttggacttcaggtgcaactgagtctgacaacttagctttgaaaggcgcagcaatgttctataaaacaaaagggaaacatataatcacttctaagattgaacataaagcagttctagacccttgcagacaacttgagcgtgagggatttgaagttacatatcttgacccagatcttaatggagaagttactctcgaaaatattagaaaacatgttagaaaagacacaattttaatttctataatgcacataaataatgaacttggagcggtcaacgatattaaaaaaattggtgatttcacaagaaaagaaggaataatttttcatgttgatgcggcacaaagcactggcaagttaaagattgatttgaataaattaaacgttgatttgatgtctttttctgctcataagacctatggccctaaaggtgtaggagctttatatgtaagaagaaagcctagaataaggctcgaggcactaattcatggaggaggccatgaaagaggttttagagctggtactttagccactcatcaggtagtgggtatgggcgaagcttttgcgttagctcaaaaagagatggataaagataacaaaaaaattaaggatttatcagataaattctggaaagaaatatcatctattgaagaaatctttttaaatggttgtcaaaagaataaggtaccaaacattactaacgtaagctttgcttatattgagggagagtcactaattatggcattaaaagatgttgcagtatcgtctggttccgcatgcacatctgcaagtcttgagccttcatatgtcctaagagcct

SEQ ID NO: 258936 - DNA, 889 bp, Unknown
  Bacterial polypeptide expressing nucleotide sequence isolated from the Sargasso Sea
catgtcagctaacactaaaaaaataaattctactttaagtattccaatatatttggattactcatcaacaacacctgtggataaacgtgttgctgataaaatgtcggagtgtctaacactagatggagcttttggaaatccagcttcaaggtcacactcttttggttgggatagcgaccatcttattaaaacagcacgagcaaatgttgctaatcttcttaaatgcgatagcaaagaaattgtttggactagtggtgcaaccgaatctaacaatcttgcaatcaaaggtgctgcacatttttataaatctaaaggtgatcatctaattacacttacaactgaacataaagcagttttagatactatgagacagttagagcttgaagggtacaatgtaacataccttgatcctgagccaaatggattagtagatcttaaaaaacttgaagatgccataacagagaaaactcttcttgtatccataatgcatgtaaataatgaaataggcgttatacaagatttggagagtattggtaaattatgtaaaaaacataaaatattatttcatgttgatgctgctcaaagcccagggaaagttgatattgatgtaaataaatttaatattgatttaatgtcattatctgctcataaagtctatgggccaaaagggataggagctttattcattagaagaaagcctagagtcaggttagaagctcaaatgcatggaggaggccatgaaagaggttttagatctggtactctaccaactcatcaaattgtaggaatgggagaagctttcagaattgcaaatgaagaaatggaagttgacaacatacgtataagaaaactcagagataaatttttggactcaactaaaagatgttga

SEQ ID NO: 258937 - DNA, 1231 bp, Unknown
  Bacterial polypeptide expressing nucleotide sequence isolated from the Sargasso Sea
atgaaaggggtgacgctgcgaggacggccgctgtatctggacatgcaggcgacgacgccgttggatccgagggtgctggacgccatgctcccttttttcaccgagcggtacgggaatccgcactcgagaacgcacatgtacggatgggagaccgaggacgcgatcgaaagggcgcggggggagttggcggcgctcatcggggcgaatccgaaggagatcgtgttcacgagcggggcgacggagtcgaataacatggcgctgaagggggtggcgcgcttttacggggaaaaaaagaggcacatcatcaccacgaccacggagcacaagtgcgtgttggattcttgtagacaactcgaacgggaggggtacgaggtgacgtacctgccggtgcgagagaacggtttggtggatttgaaggagctcgaagcggcgatgcgcgaggacaccgccgtcgtctccgtcatggcggtgaacaatgaaatcggcgtcattcagccgttgaaggagatcggagagctgtgccgttcgagaaagattttctttcacaccgacggcgcgcaagcgttgggcaaggtgcccgtcgacgtcaacgagatgaagatcgacttgatgtccatcagcggtcacaagttttacggccccaagggcatcggcgccctttacgtccgtcgacgtccgcgagttcgaatggaacccatcatcaacggtggtggacaagagcgaggtttgcgttcgggaactctcccgacgccgctcatcgtgggcatcggtgaagccgctcgagtggcgaaggaagaaatggagcacgacgaagcgcacgtcaagcgcttggcgaagcgattgatcgaaggaatcgaatctcgcgtcgaacacacgcagttgaacggtgatcgtgacgcccgttatccgggtaacgtgaacatgtcgttcgcgtacgtcgaaggtgagtccatgttgatgggactcaaggagattgcggtgagcagcgggagcgcgtgcacgagcgccagcctggaaccgtcgtacgtcctccgtgccctcggtgtgaacgaagaaatggcgcacacgtccgtcaggtacgggttgggtcgcttcaccaccgaagaagaggtggatagagccatagaggcgacggtgcgacaagtggagaagcttcgcgaaatgtcccctctctgggagatggttcaggaaggcatcgatctgaaaactatcgagtggactcagcactaaa

SEQ ID NO: 258938 - DNA, 1202 bp, Unknown
  Bacterial polypeptide expressing nucleotide sequence isolated from the Sargasso Sea
gatgagcacacaatccacaatttatttagactacgcatcaacaaccccagttgaccctagagtagcatctaaaatgatggagtttttgactcctgagggagagtttggaaatcctgcttcacgttcacatcgatttggatggaaggctgatgaagctgttgaagaagcaagatctcatgttgcaaatttagtcaattgtgatccaagagaagttgtctggacgtctggtgcaacagaagcagacaatttggctataaaaggcgttgctagattttataagtctaagggcaaccatattattacttcaaagattgaacataaagcagttttagatccatgcaggcaactggaaagagaaggtttcgaagttacttatctcgatccggatgataaaggtgtcataagcccagaagcagtgaaggcagcaataaaggattcaactgtactagtatcaattatgcatattaataatgagctcggaacagtcaatgacatatcaaagattggtgatgttaccagagataaaggaattttctttcatgttgatgctgctcagagtacaggaaaagtgaatattgacttagaaaaaatgtcagtggatcttatgtccttttctgctcataaaacatatgggccaaaaggtgttggcgcattatacgtaagaagaaaacccagggttagacttgaggctttaatccatggaggtggtcatgaaagaggcatgagatctggaactctagcaactcatcaaatcgtcggtatgggcgaagcattccgcttggcaaataaagaaatggaagaagatcacaaaaaaatctctaagtatcatgaaaaatttttagacaaagtaaaagaaattgatcatgtatatattaatggtgatcttaataataaagttccaaatattttaaatgtaagttttaattttgttgaaggtgagtctctaataatgggattaaaagacattgcagtttcatctggctctgcgtgtacatcagctagtttggaaccttcatatgtattaagagctttgggaagaaaagatgaattagctcacagctcaataaggttttcttttggaagatttacaagtgatgatgatgtaaataatacattagatattcttggcaacgtcgtccaaagactcagagagctttccccgctttgggaaatgcatctcgatggaattgatttagatacag

SEQ ID NO: 258939 - DNA, 382 bp, Unknown
  Bacterial polypeptide expressing nucleotide sequence isolated from the Sargasso Sea
ggatggtttgaaagatatggaagaagtatatttaaatggagatgaaaaccttagagcagcaggatttttaaatgtaagttttaattatgtagaaggtgaatctttaataatggctttaaaagatatcgctgtatcttctggttcagcttgcacttcagcaagcttagagccttcctatgtgcttagagctttgggactgaaagacgaattggctcatagttcaataaggtttggtattggtcgtttcacaaccgaagaagaggtagactacactatcgatttagttaaggactccgttgagaaactaagaaaactgtctcctttatgggacatgtataaggatggagtggatctagattctgttgaatggatggcaacgtag

SEQ ID NO: 258940 - DNA, 1216 bp, Unknown
  Bacterial polypeptide expressing nucleotide sequence isolated from the Sargasso Sea
catgaaacagcccatttatcttgattacaacgcaacgactccaaccgacccaagggtcgtagaggcgatgttgccattttttactgaaatctatggcaatgcggctagccggaatcattcctttggttggaccgctgaagaaggggtttcgaaagcaagaaacatcatcggagaggctatcggcgccaccggaaaagagatcgtttttaccagcggtgctactgaatccgataatatggcagttcttggcgcggcggaattttatcatgaaaaaggaaaacatatcatcaccagtccaatcgaacataaggcggtagttgatccatgccaggctcttgagcaaaaagggtatgaaataacttttctggatgtggatgaacacggcagaattgacctgaaacagttggaagcctcgatccgggaagacacggtcctggtttccttgatggctggcaacaatgaaatcggaaccctgaatcccctcacggagattggtcagatgacccgtgagcggggggtgctttttcattgtgatgcaacgcaaggggtgggaaagattccgattgatgtggaaacaatgaacatcgacctgctctccatgacggcccacaagatctatggtcccaaaggaatcggagcattgtacgtcagacgtaaaaaaccgagggttcgcatcactccgattatgtttggaggcggccatgagcgagggtttcgttccggtaccctgaatgttccggggattgttggttttggaaaagccattgagctcgccatggaggaaatttcgtcggaagctgaaaggcagatcgggttgagacaacatctttacaagcgtctgaccgacgaactcgattatgttttccttaacggtcatccgacggaaagacttcccaacaacctcaaccttagcttcggatacgtagagggagaaagcctgatgatgggaatcagtgaaatcgcggtttcatccggttcggcgtgtacttccgcgagtcttgagccttcctacgttctccgctcgatgggagttggtgatgatctggctcactcttcggtacgttttggattcggacgttacaccaccatggaggaagtgaattacgctgccgataaagtgattggtgcggtcaagcggcttcgtgaaatgtcgcctctctatgaaatggtgcaggaaggggtagacctttcaaaagtcacttggacctctcattga

SEQ ID NO: 258941 - DNA, 491 bp, Unknown
  Bacterial polypeptide expressing nucleotide sequence isolated from the Sargasso Sea
aatgcaactaccaatatatttagattatgcttcaacaactccagtagatccaagagttgtaaaaaagatgcaagactgtttatctatggatggaaactttggtaatcctgcttctagatcgcatgcttttggttggaaagctgaagaagctactgagcaggctaggcaacatgttgctgatttggttaattgtgatccaagagaaattgtttggacttctggagcaacagagtcagataacttggcaattaaaggatctgctagatttaataagtctaaggggaatcatataattacttctaaaatagagcacaaagctgttttagatagttgcagacaacttgaaacagaaggctttgaagtaacttaccttgatccaactgataaagggataataactccacagatggttgcagatgcaattactaatgaaactattttagtatcattaatgcatttaaataatgaaattggagtcattaatgatatcg

SEQ ID NO: 258942 - DNA, 1234 bp, Unknown
  Bacterial polypeptide expressing nucleotide sequence isolated from the Sargasso Sea
tatgaaacaaaataatagtttaactattccaatttatcttgactactcatccacgacgccagtcgacccaagagtggcagcgaagatgtcggaatgtttaactaaagagggtgtttttggtaatccagcctctagatctcattcattcggatgggaaagtgaaaaattaattgatgaagcgcgtggtcatgtcgctaaattaataaaagcaaataaaaaggagattgtttggactagtggtgcaactgaatcagacaacttggcaattaaaggtgcagcacacttttataaagaaaaaggtaaccatctaatcacacttacaactgagcataaggctgtccttgatactatgcgtcatttagaaaccgagggttttgaagtgacatatatgaatcctaaagataatggattggtagatattgatgagcttaagagcttaattaaaccaactactacagttatatctataatgcatgtaaataatgaaataggagtaatacaagatctagagacgataggaaaaatttgtagagataacaaaatagtttttcatgttgatgcagcacaaagcccaggtaaggttgatatagatgttgataaatataatatagatttattatctttatccgcacacaaagtttatggtccaaaaggcataggggctctatatgttagaagaaaacctagaatacgattacaaccccaaatgcatggtggcggacatgagcgtggctttaggtctggtacactacctactcatcaagttgtagggatgggagaagcttttaaaattgctgaagaagagatggaatctgataataaaagaatttctatattgagagataaattatggaatggtttgaattctattgaagagatttatcttaatggagatatgaagcaacgtattcctggaaaccttaatgttagttttaattttgttgaaggcgaaagtttaattatggcaattaaagatatggctgtttcatcaggttctgcctgtacctctgcgagtttagagcctagttatgtgcttagagcacttggcagaagtgatgagctagctcatagctcattaagaattagtataggcaagtatacaacagaagaagaaattgattattcagtttctctaattaaggaagctgttgcaaagttgcgagaactatcaccgctttgggaaatgtataaggatggaatagatttaaatagtgttaagtggtcagcgcactaa

SEQ ID NO: 258943 - DNA, 1216 bp, Unknown
  Bacterial polypeptide expressing nucleotide sequence isolated from the Sargasso Sea
tatgaagcttcctatctatttagattatgccgccaccacgccagttgatccgcgagtcgcggaaaaaatgttccaatacatgacgatggatggcatcttcggtaacccagcatcacgttctcaccgttatggctggcaagcggaagaagcggtggatgtggcgcgcagccaagtggctgatctgatcaatgctgatcaccgtgaaatcgtgtttacctcaggtgcaaccgaatcaaacaatctggcgatcaaaggcgtagcgcacttctacaataagaaaggcaagcacatcatcaccagcaagactgaacataaagcggtactcgatacctgccgtcagcttgagcgtgaaggttttgaagtcacttacttagagccagatgctaacggtatcattccgatggaacgtttagaagcggcgatgcgcgacgacacgattcttgtcagcatcatgcatgtgaataacgaaatcggtgtgatccatgatgtggatgctatcggcgagttatgccgttcaaaaggcattatcttccatatggatgctgcgcaaagtgctggtaaagtaccgattgatgtgcaacgcactaaagtagatctgatctccatttctggccacaaaatgtatggtcctaaagggattggtgccttgtatgttcgtcgtaaaccccgtatccgcttagaagcgcaaatgcacggtggtggtcatgagcggggtatgcgtagtggtactctgccaactcaccaaatcgtcggtttaggtgaagctgcggcgattgcaaaagctgaaatggcaacagatgacgcgcgtattgctaagctgcgtgacaaattatggaatggcattaaacacattgaagaaacctatatcaacggtgatatgactcagcgtgtgagtggcagtctcaacgttagtttcaactatgttgaaggtgagtcactgatgatggccttaaaagatttagcggtttcatcgggttcggcttgtacctcagccagtttagaaccgagctacgtgttacgtgcactgggcttaaatgatgaaatggcgcatagctcgattcgtttctctatcggccgttttaccaccgaagaagaaatcgaccacgctattgaagttattactcaatctattgataaattaagagaaatgtctccattgtgggaaatgtttaaagatggcatcgacctgaatcaggtgcagtgggcccatcattaa

SEQ ID NO: 258944 - DNA, 1096 bp, Unknown
  Bacterial polypeptide expressing nucleotide sequence isolated from the Sargasso Sea
aatggcaaaatgcctaaccctggatggcaactttggtaacccagcttctcgtagctatcgcttcggctggatggcagaagaagcggttgatgttgctagaaatcaaatcagcgacgcgattaattgcgaccctagagaaattgtttttacttcgggggccactgaatcgaacaatcttgctataaaaggcgtcgccgaaggttatgccaataaaggcaaacatatcattaccgttaacaccgaacataaagcggtgttggatacctgtgagttcttacaaagccaaggctttgaggttacctatcttgaagtattgccaaacggtttaattgatttaaatgatctcgaaaatgcgttgcgcgacgacactattttggtgtcggtgatgcacgttaacaatgaacttggggttatccaagacattcaagctattggccagctttgtcgtgacaaaggcgttctttttcatatagatggtgcgcaaagtgtgggcaaaattgccattgatttagctgagcttcctatagatttgctgtctatatcggcgcacaagatatacggcccgaaaggtatgggggcgctatatgtgcgtcgccgtcccaaaattaatctggtggcacaaattcatggcggtggccacgagcgcggcatgcggtcgggtacattagccacccatcaaattgttggaatgggtgaagccatcgcgctagcctcctcaaaaatggaagaggacagtgcgcgcatattagcgctgcgtgaatcgctgtggcagggccttcagcagctcgacgatgtctatttaaacggacacgccacacagcgaatcccaggcattctaaatgtgagttttgcgggtgtagacggcgaaagcttgatgatgggcttaaatgatattgccgtatcttcagggtcggcatgtacgtcagcgagtttagagccttcgtatgtgttaaaagcgattggccgcagcaatgaattggcacatgcaggaattagattcagcgtggggcgttttacgacccaagaagacatcgattacgtaatacaaaaagtagtggatgtaacaacaagactacgccaagcggtttcagcataa

SEQ ID NO: 258945 - DNA, 1159 bp, Unknown
  Bacterial polypeptide expressing nucleotide sequence isolated from the Sargasso Sea
catgaaaacctatcttgattttgcttcgacaacgccaatagcatcagaggtcattgagcagatgcatgctgtcatgagcgaagcatcatatggtaacccttcatctttggatcatcagtttggattgtctgccaataagattgtagaagaatcaagagaatcggtagccagtttaatcaatgcaaatccagatgaaattctatggacatcaggtgcaaccgagtcaaataatatggcaattgtgggcttccatcaatttcaatacaagggtcaatccatgagattcttgagttctcatttggaacataaatccgtcatagagagtatgcactcgatcaaggaccttggatcaaatgtgtgctttattcagcctaatgagcacggtcgaattgactttgaaacatttgtcaatcagatgaagaaggacgtcatttatgtaagttgcatgcatgttaataatgagactggcttgattaatgatattaaggagattggaaaatattgcagaaaaaatgaaattatttttcatgttgatgcagctcaaagcataggaaagatacccatcgatgttaaagacatgtgtattgatctcatgtcaatgtcagctcataaagtctatgggccgaagggcattggggcgctatatattaataaagaaactgttggtcgagtaaagtcaattatccttggaggaggtcaggagagaggaatgcgctctggcactttgcctacacatcaaattgctgggatggctaaagcatatgatctttcaaaagagagaatggatgatgatcataaaaacattaagcaatgcagagatatttttataaaaacaatctcgagaattaatggatggaaaattaacggtgcagataaggacgcttatccaggtataatgagcatttgttttcctgatttgtattcagaaagtttgatttatgcaatggaacattttgcaatttcgagaggttcagcgtgctcttcggatcatgatgagccgtcgcatgttttaaaaggcatgggtctgcttgatcatgaaataaatggaaccattcgtatcagctttggacgaaatacaacattaaatgaagcggaatcagcagcatctgagcttataaaagcagtatcacatcttagaaacctaaagggagacaattga

SEQ ID NO: 258946 - DNA, 1081 bp, Unknown
  Bacterial polypeptide expressing nucleotide sequence isolated from the Sargasso Sea
aatgtccagatatatggatattgaaggtgtttttggtaacccggcgtcgaggactcatgagtttggctggcaggcggaagaagcagttgaaaatgcgcgtgttcaggtggctaaagtacttaaagctgatccgagggagatagtttggacttctggagctactgaatccgataatttggcgataaaaggcctagctgagaagactgacaaaaatcatattataaccagtaagatagagcacaaggccgtactagatacgtgccactttttggaagagaaggggttcaatgtgacctatttgcaacctgactctaaaggttgttgtagtgcagatcaggtggaaagagcgctgacagatgaaaccttcatcgtttctttaatgcatgtaaataatgagttgggcgcaatcaacgatatcgcaaaaattggaaaagtttgcagtaatcgggatgttgtttttcatgtagatgctgcccaaagttttggaaaaataccgattgatgttcgcgctctgggaatcgatatgatttctatctctgctcacaaaatatatggccccaagggtataggtgtacttttcgtcaacagagaatcaaatatcggtttgcagccaatgattcacgggggaggacacgagtttggaatgcggtctggaacactagcaactcaccaaatcgtgggtattggagaggctgcagagcttatgtatttggagggaagaaaggactttgacgctcatcttcgttttcgggaaattttattttctagtctaaatcaaattcctgacattcatatcaacagcgatttagaaacatccatcccttcgattattaatgtaagttttgctgacgttaacggagaaacattgatgtctgctctggataatgtggctctttcgagtggttcagcttgtaactcagagttggtcgaaccttcttatgttttgaaagggataggtcttagcaatgagttggctgactctgcacttcgttttagtttcggccgttacacgatagaagaggaagttcaagctgtagggaaacaagttgcaaaagtagtaggggcattgcgtagctcatga

SEQ ID NO: 258947 - DNA, 1228 bp, Unknown
  Bacterial polypeptide expressing nucleotide sequence isolated from the Sargasso Sea
atgagcacaaaagtaacactaccgatttatatggattatgcatctacaacacctgttgacccaagagttgcaaaaaaaatatctgaccatttaactttagatggtaattttggaaatcctgcatcacgttcgcataaattcggttggaaggctgaggagtctgttgaggaagcaagatctcatgtcgcaaatttagttggctgcgatccaagagaaatagtctggacttctggtgctactgaggccgataacttagctataaaaggaatagcaaacttttataaatctaaaggtaaacatatcataacctcaaagatagaacataaagcagttttagatccatgcagacaactggaaagggatggttttgaagttacttacttagaacccaacgaggggggtcttataactgacgaagctattttgaatgcaataagagaagatactattttgatttcaattatgcatattaataatgaactaggcacaattaatgatttggaaagcattggaaaaattgctcgagaaaaaggaatattctttcacgtagacgcagcacagagtactggcaaagtaccaattgacttaaccactcttcctgtagatttaatgtcattttcagctcataaaacatatgggcccaagggagtgggagcattatttgttcgaaggaagccacgtgtaagaattgaagctcaaattcatggtggtggtcatgaaagaggtatgcgatctggcactttggctactcatcagattgttggaatgggagaagcatttaggattgcaaaagaggaaatggataaggatataaaaaaagtacagtcattacataacaagttttatgattctgtttccaagattgaggaaatctatgttaatggcgatatgaataataaagttagcaatatattaaatattagctttgcatatgttgagggagaatcattaattatggctttgaaagacattgctgtatcctcaggatcggcttgcacctccgcaagtttggagccatcctatgttcttagagcgcttggaagaaaagatgagcttgcatcaagctcaattcgtttttcttttggaagatttaccactgaagaggatgtagattatacattatctttgattaaccacgctgttgataggcttagagagttatctccattgtgggaaatgtatttagatggggttgatctagatacagttgaatggcaaacccattaaa

SEQ ID NO: 258948 - DNA, 1207 bp, Unknown
  Bacterial polypeptide expressing nucleotide sequence isolated from the Sargasso Sea
atgaaacctctgtatttcgattacgcctctactacccctgttgatcagagggtaatagaaaagatgaagtcttgcttatctatagatggtaattttggaaatcctggatcaagatctcatgcttttggatggcaggcagaagagcttgttgaagaagctagaattaatgttgctgaacttttaaattgcgatcctcgtgaaataatttggacctctggtgctactgagtcggataacctagctataaagggtgcagcatatttttataaggataagggtaaacatattattacttcaaaaatagaacataaagctgttctagatacatgcagacagcttgagagcgaaggattcgaagttacatatcttgaaactaatgaaaagggtctagtttctcttgaatctattgaaaacaacctaagagatgacacatcgctagtaagtttgatgcacattaataatgaaattggcgttctgaatgacatagatgaaattggagaattatgcagagataagggagttatatttcatgtcgatgcggcacaaagcgcaggaaaagttaacattgatctctcaaaattaaaaatagatcttatgtccttctcggcacataagatttatggtcccaaagggatcggcgcattgtatgttagaagaaagcctagaataagattacaaccactttttcatggtggaggtcaggagagaggtattagagcaggaacattaccaacacatcaaattgttggtatgggtgaggccttcaaattagctaattcagaaatgaaaaatgattttaaaaccatttcttcttttcgagatcttttgtggaatggattaaaagacatggaagaaatttacattaatggttgcttggaaactggatatcctggaatttttaatctttctttcaactttgttgaaggggagtctttaataatggctttaaagaacatcgcagtatcttctggttctgcttgcacttcggctagcctagagccgtcttatgtcctaagagccttgggtagacctgatgaattagctcatagctctattaggttttctttcggaaggttcactaaaaaagaggaagttgaatttacaattaaccttgttaaagattcggtttcccaacttagagaaatatctcctctatgggaaatgtatcaagatggcgtagatttagataaaatagagtgggcgtaaa

SEQ ID NO: 258949 - DNA, 1132 bp, Unknown
  Bacterial polypeptide expressing nucleotide sequence isolated from the Sargasso Sea
tatgtctgataagatttttttagattaccaatcaactactccggtatctaaggaagtcttagagaagatgatacctttcttttctgagaacttcggcaatcctcactcaaataatcatgaattcggcataatggcaaacaacgtagtcgaagaggctaggggaaatgttgcaaacttaattaatgctcaaaaatcagagattattttcacatcaggcgcaactgaaagcaataactttgcaataaaaagtattgctaataatttttttgagaaagattgccaaatcataacagttaaaacagaacacaaatgtgtattagaaagctgtcatactcttgatcaagaggggtttgatgtattttatttagacgttaatgaagatggtttgattaatttagatgagctagaaaatctacttaaaaaaagaaaatcattagtatcagtaatgtctgctaataatgaaataggcgttttgcaacctataaaagaaataggtaatctttgcaaaaaatataattcaatatttcactcagatgttgctcaatctttaggaacccaaaaaatagatgttgatgaattaaatattgatgctttatcaatatcagcacataaaatatatggaccaaaagggattggagcactttatatttcaaatgaaattaaaaactcacttagacctttgataagtggtggtggtcaagaaatgaacttgagaagtggaactttatcaccagcattatgtatcggacttggagaggcatgcaaagacttaaaatttaatagagaaaaatatgttcaacattttaaagaacttaaatctaaattattatcagaattggtaatttcaaaattagattttgttattaatggatcagttgaaaatagaattccaaataaccttaatatctctattaaaggaaaagttgctgaacaattatttaattttttaccaaattttgcattatcaagcggatcagcctgtacatcaggtactatagaaagatctcatgttttatcagcattaactgaagatgagtcgagaatagatggatcatttagaataagcacaggaagagaaacgacaaaggaagaaataaaatatcttattgaaagtttaagtaaattaaaatga

SEQ ID NO: 258950 - DNA, 595 bp, Unknown
  Bacterial polypeptide expressing nucleotide sequence isolated from the Sargasso Sea
atgagcagcgaaatcaatttaccaatctatatggattatgcgtctacaaccccagtagatccccgtgttgcgaaaaaaatatctgatcatcttacattagatggaaattttgggaatcctgcttcacgttcacataagtttggttggaaagctgaagaggcagtcgaagaggctaggtctcatgtagctaatttagtgaattgtgatccgagggaaattgtttggacttccggagctactgaagcagataatctagcaatcaaaggtatcgccaatttttatcaaaagaatggtaagcatattattacttccaaaatagaacataaagctgttctggacccatgcaggcaactagaaagagatggttttgaagttacctatttggaaccaaatgagggtggcttgattacacctgaagctgtgttaaatgcaatcagggaggacaccatcctaatctcaattatgcatattaataatgaattaggcactattaatgatcttagtggtattggaaaaattgcacgtgaaaatggtattttttttcatgtagatgcggctcaaagcactggtaaaacagctattgatctgagttctc

SEQ ID NO: 258951 - DNA, 753 bp, Unknown
  Bacterial polypeptide expressing nucleotide sequence isolated from the Sargasso Sea
tcggaaccctgaatcctctcacggagattggccagatgacccgtgaacggggggtgctttttcactgcgatgcaacgcaaggggtaggaaaaattccaattgatgtggaagcaatgaacatcgacttgctctcgatgacggcccacaaaatttatggtcccaaaggaatcggagcgttgtacgtcagacgtaaaaaacccagggtccgcatcactccgatcatgttcggaggcggacatgagcgagggtttcgttccggtaccctgaatgttccgggaattgttggttttggaaaagccatcgagctggccatggaggaaatatcgtcggaagctgaaaggcagatcgggttgaggcaacatctttacaagcgtctgaccgacgaactcgattatgttttccttaacggtcatccgacggaaagacttcccaacaacctcaacctcagcttcggatacgtcgagggagaaagtctgatgatgggaatcagtgaaatcgcggtttcatccggttcggcatgtacttccgcgagtcttgagccttcgtacgttctccgctcgatgggagtcggtgatgatctggctcattcttcggtacgttttggatttggacgatacaccaccatggaggaagtgaattacgcagccgaaaaagtgattggtgcggtcaagcgactccgtgaaatgtcgcctctctatgaaatggtgcaggagggggtagacctttcaaaagtcacttggacctctcattgac

SEQ ID NO: 258952 - DNA, 1225 bp, Unknown
  Bacterial polypeptide expressing nucleotide sequence isolated from the Sargasso Sea
tatgtcagagcaagttaaacctatttacttagactacgcatcgacaacaccagttgatgacagagttgcaaataaaatgatggagtttatgaaaatggatggccagttcggaaatcctgcttctagatcccattattatggatggactgcagagtcagctgtaagcgaagcaagaaaacatgttgctgacttagtcaacgcagaccctagagaaatagtgtggacgagtggtgcaactgaatctgataatctagcaattaaaggcgcagcacatttttatcaaaaaaaaggaaaacatgtaattactgtaaaaaccgaacacaaggctgttctagatgcttgtcgtcaacttgaaagagaggggttcgatgtaacttatttagagccaatgggaaatggcttactagatattcaagagcttaaaagtgaaataagagaggatactatcttaatatctgttatgcatgtcaataatgaaatcggcgtcattcaagatatagagtccattggaaatatttgcagagagaaaggtatcatatttcacgttgatgctgctcaaagtgctggtaagattcctatagaccttcaaaaattaaatgtcgacttaatgagtttttcagctcacaaaatatatggacctaaaggcataggtgcattatatgtttgtagaaaaccaagggttagattagaagctcaaattcatggcggtggacacgaaagaggtctaagatccggaacacttcctactcaccaaattgttggaatgggtgaggcttttagaattgctatgttagaaatggataaagattttcaacatattagttcattaaagcatcgtctatgggatgcattgaaagacatggaagaagtttatttaaatggtgacgaaaacgagaggtatcctggaatcatgaacattagctttaactttgttgaaggcgagtctttaatcatggcaacaaaagacattgcattatcaagtggttccgcctgcacatcggcttcactggaacctagttttgttcttagagcgattggaagatcagatgaattagctcatagctctttaagaatgtctattggaaggtttactacagaaagagaaatagatcataccgtagaggtagtaaaagtagcagtaaaaaaacttcgtgaattgtctccattatgggaaatgtacaaagatggaattgatataaacaagattgagtgggccgcccactaa

SEQ ID NO: 258953 - DNA, 1222 bp, Unknown
  Bacterial polypeptide expressing nucleotide sequence isolated from the Sargasso Sea
atgagcacacaatcaacaatttatttagactacgcatcaacaacacctgttgatccaatagttgcgtctaaaatgatggaatttttaactcctgagggagaatttggcaatccggcatctagatctcatcgttttggttggaaggctgatgaagcagtggaagaagccagatctcatgttgcaaatcttgttaattgcgacccaagagagatcgtatggacttctggagcaactgaagcagataatctagccataaagggtgttgcaagattctataaatcaaaaggaaaccacataattacttcaaaaatcgaacataaggctgtgctagatccttgcaggcaattagaaagagagggcttcgaagttacatatttagatccagacgaaaaagggattattagtgcatctgctgtaaaggatgcaattaaagatacaacagttcttgtttctataatgcatgtaaataatgaacttggtacagttaatgatattgcaaatattggtgaaataactagaaaaaatggtgctttttttcatgtcgatgcggcgcaaagtaccggtaaggtaaaaattgatttaggaaaaatgccaattgatttaatgtctttttctgctcataaaacatatggaccaaaaggtattggggccttgtatgtaagaagaaaaccaagggtgagattagaagctttaattcatggcggaggtcatgaaagaggcatgagatcaggaacattagcaactcatcagatagttgggatgggtgaggcatttagaatagcaaaagaggatatggaaaaagatagtttgaagatatcaaaaattcatgaaaagtttttagaaaaagtaaaagaaatagaccatgtttatataaatggagatttaaaaaataaagtgcctaatattttaaatgttagttttaactttgttgaaggagagtctttaataatgggtctaaaagatatagcggtatcttcaggttctgcatgcacatctgcaagcttggaaccgtcatatgttttacgggctttaggaagaaaagatgaattagcacatagttctattagattctcttttggaagatttactagtgatgatgatgtaaaaaatactttagatattttaggcaatgttgttcatagattaagagagctatcgccattatgggaaatgcacctagatggtatagatcttgataaagttgaatggaatatgcattagg

SEQ ID NO: 258954 - DNA, 1225 bp, Unknown
  Bacterial polypeptide expressing nucleotide sequence isolated from the Sargasso Sea
gatgatccaagacactctccacctgcccatctatatggattacagcgcgacgacgccggtcgacccgcgcgtggtcgacaagatggtgccgtacctgcgcgagcagttcggcaacccggcgtcgcgcagccacgcgtatggctgggacgcggagcgtgcggtcgaggaagcgcgcgagaacgtggccgcgctcgtgaacgcggatccgcgcgagatcatctggacgtccggcgcaacggaatcggacaacctcgcgatcaagggcgccgcgaacttctacaagggcaagggcaagcacatcatcacggtgaagaccgagcacaaggccgtgctcgacacctgccgcgagctcgagcgcgacggcttcgaagtcacctacctcgacgtgaaggatgacggcctgatcgacctcgacgtgttcaaggccgcactgcgcccggacacgatcctcgtgtcggtgatgcacgtgaacaacgagatcggcgtgatccaggacatcgagacgatcggtgaaatctgccgcgagaagggcatcgtgttccatgtcgacgccgcacagtcgaccggcaaggtcgcgatcgacctcgcgaagctgaaggtcgacctgatgtcgttctcggcgcacaagacctacggcccgaagggcatcggcgcgctgtacgtgcgccgcaagccgcgtgtgcgcatcgaagcgcagatgcacggtggcggccacgagcgcggcatgcgttcgggcacgctggcgacgcaccagatcgtcggcatgggcgaagcgttccgcatcgcacgtgaagaaatggcgacggaaaacgagcgcatccgcatgctgcgcgacaagctgctgcgcggcctgtcgcaaatcgaggaaacgtacgtgaacggcgacatggagcgccgtgtcccgcacaacctcaacatcagtttcaacttcgtcgaaggcgagtcgctgatcatggcgatcaaggacgtcgcggtgtcgtcgggctccgcgtgcacgtcggcgtcgctggagccgtcgtacgtgctgcgtgcgctcggccgcaacgacgagctggcgcacagctcgatccgcttcacggtcggccgcttcacgacggagcaggaagtcgacttcgtgatcaacctgctgaacagcaagatcgcgaagctgcgcgaactctcgccgctctgggaaatgcaccaggaaggcatcgatctgtcgacgatcgaatgggccgcacactga

SEQ ID NO: 258955 - DNA, 298 bp, Unknown
  Bacterial polypeptide expressing nucleotide sequence isolated from the Sargasso Sea
ttttgcctatgttgaaggtgagtcattgataatggccctaaaagatgtagccgtttcatccggttctgcatgtacttctgcaagccttgaaccttcatatgtgttaagagcacttggtaggaaagatgagttagcccatagctcaattaggttttcatttggaaggtttacttccaacgaggacgtagatcatactctttcaattctttctcatgcggtggaaagacttagagaactctcaccattgtgggaaatgcacttagacggagtcgatttagataaagttgaatggaattaa

SEQ ID NO: 258956 - DNA, 979 bp, Unknown
  Bacterial polypeptide expressing nucleotide sequence isolated from the Sargasso Sea
atgaaattaccaatttatttagattatgcatcaacaacgccagtagacccaagagtcttagaagtgatgaaaaaccatttatcattagaagggaactttggaaatccagcttctagatctcactcttttggctggaaggctgaagaggctgtagaggatgcaaggtttaaggtagcaagcttagtaaattgtgatactagagaaatcatatggacttcaggtgctacagaggctgataatttagcaattaaaggggtagcaaaattttataaatctaaaggaaatcatattattacttctaagattgaacataaggcagttttagatagctgtagacaattagagagagaagggtttgaggtaacgtacttagaccctgatgaaaatggattaatatcccctgacactgttaaaaatgtaattacagatagaacgattctagtttctttaatgcatatcaataatgagataggtgtaattaatgatattaaatctattggggagataaccagagagaaaggaataatttttcatgttgatgcagctcagagtaccgggaaagtaaaaatagatcttacagatcttaaagttgatcttatgtctttttctgcccataaaacgtacggaccaaaagggataggtgctttatacgtaagcagaaaaccaagagtaagattagaggcacagattcatggtggtggacatgaaagaggaatgagatccggaacattaccaactcatcaaatagtaggtatgggagaggcgtttcatattgctaatcaagaaatggaattagaagttgaaagaattaaaggtttgagagataaattttggaatggactgaaagatatcgaagaagtttatttaaatggagatttagaacaaagagctgcagggtttttaaatgttagcttcaattatattgaaggtgaatcattaattatggccttgaaggatatagcagtttcatctggatctg

SEQ ID NO: 258957 - DNA, 947 bp, Unknown
  Bacterial polypeptide expressing nucleotide sequence isolated from the Sargasso Sea
aatgacgtccccggagcaattgatgaataacgacactctccacctgcccatttacatggactacagcgcgacgacgccgatcgatccgcgcgtggtggacaagatgattccgtacctgcgcgagcagttcggcaaccccgcgtcgcgcagccaccaatatgggtgggacgcggaacgtgcggtcgaggaagcgcgcgagaacgtcgccgcgctggtgaacgccgacccgcgcgaaattatctggacctcgggcgcaacggagtcggacaacctcgcgatcaaaggtgcggcgcacttctacaagagcaagggcaagcacatcatcacggtgaaaaccgagcacaaggccgtgctcgatacctgccgcgaactcgagcgcgaaggcttcgaagtcacctatctggatgtcaaggaagacggtctgatcgacctcgagaagttcaaggccgcgctgcgcccggatacgattctggtgtcggtcatgtcggtcaacaacgagatcggcgtgatccaggacatcgaggcaatcggcgagattacccgggaaaagggcattgttttccacgtcgacgcggcgcaagccaccggcaagatcgagatcgatctgcaaaagctgaaggtcgacctgatgtcgttctcggcgcacaagacgtatggtccgaagggcatcggcgcgctgtacgtgcgtcgcaagccgcgtatccgcatcgaagcgcaaatgcacggcggcggtcacgagcgcggcatgcgttcgggcacgctggctacgcaccagatcgtcggtatgggcgaagcgttccgtatcgcacgtgaagaaatggcgacggaaaacgagcgtatccgcatgctgcgcgaccgtctgctgcgcggcctgtcggagatggaagaaacgtatgtgaacggcgacatggaaaagcgtgtcccgcacaacctgaacatcagcttca

SEQ ID NO: 258958 - DNA, 458 bp, Unknown
  Bacterial polypeptide expressing nucleotide sequence isolated from the Sargasso Sea
agaagcttttaggcttgcaaaagaagaaatgaaaattgattctgaaaaagtcactgaattccatgaatactttttagaagaagttaagaagatcgatgaaatatatattaatggagatatacaaaacaaagtgcctaatattttaaatgtaagttttaattttattgaaggtgagtctttaatcatgggattaaaagatattgctgtttcatcaggctcagcatgtacttctgcaagtcttgagccatcatatgttttaagagcattaggcagaaaagatgagctagcgcacagctcaattagattttcatttggcagattcactacaaaggatgatataagaaatacccttaagcttcttttaaatgtagttgacagattaagggagctatctcctctttgggagatgcatcttgatggaattgatttggatacggttgaatggcaggcacactaat

SEQ ID NO: 258959 - DNA, 255 bp, Unknown
  Bacterial polypeptide expressing nucleotide sequence isolated from the Sargasso Sea
cggtatcttcaggttctgcatgcacatctgcaagtttggaaccgtcttatgttttaagggctttgggaagaaaagatgaattagcacatagttctatcagattctcttttggaagatttacaagtgatgatgatgtaaaaaacactttagatattttaggcaatgttgttcacagattaagagaactatcgccattatgggaaatgcacctagatggtatagatcttgatacagttgaatggaatatgcattagg

SEQ ID NO: 258960 - DNA, 1216 bp, Unknown
  Bacterial polypeptide expressing nucleotide sequence isolated from the Sargasso Sea
catgaaactgcctatttaccttgattattcggcaacctgtccggtggacccgcgtgtcgcagaaaaaatgatgcagtgtctcaccatggatggcctgttcggcaatccagcttcccgttcccaccgctttggctggcaagccgaagaggcggtcgatctggcccgtaatcaagtggcagagctgatcggtgccgacccgcgcgagatcgtcttcacctccggtgcgactgaatccaacaacctcgccatcaagggcgttgcccatttctacgccggcaagggcaagcacatcgttacctccaagaccgaacacaaggcggtactggatacctgtcgccagctggagcgcgaaggctatgaggtaacttacctcgagccgatgcccaatggcctgttcaccctggaacagatcgaaggcgccctgcgtgatgacaccatcctggtcagcatcatgcacgtcaacaacgagatcggcgtggtgcaaaacatcgccgccatcggcgagctgtgccgctcccgcaagatcctgctgcacgtggatgcggtacagagcgtgggcaagatcccggtcgacgtggaagcgcttaaggttgacctgctctccatgtccgcccacaaggtatacggcccgaaaggcattggtgccctctacgtgcgtcgcaagccgcgtgtgcgcctggaagcccagatgcacggtggtggccacgagcgcggcatgcgttccggcaccctgccgactcaccagatcgtcggcatgggcgaagccttccgcatcgccaaggaagagatggtgagcgaaggtcagcgcatcatggccctgcgtcagcgtctgtgggacggcatcaaggatatcgaagaggtctacatcaacggtgacctggaacagcgggtgccgggcaacctcaacgtcagcttcgcctatgtggaaggggaatccctcattatggcgctgaaagatctggcggtctcttctggttctgcctgtacctcggccagcctggagccctcctacgtgctgcgtgcactgggcctgaacgacgagctggcgcacagctccatccgtttcagcatgggtcgcttcaccaccgaggaagagattgattacgcaatcaagcttatccgtgactccatcggtcgtctgcgcgagatgtctcccctgtgggagatgtacaaggacggcgtcgatctgaacacggtcgaatgggctcatcactga

SEQ ID NO: 258961 - DNA, 1219 bp, Unknown
  Bacterial polypeptide expressing nucleotide sequence isolated from the Sargasso Sea
atgaaaaacaaggctatatattttgattatgcagcaacaacccctgttgatccaagggtggctaaaaaaatgcatgaatgtttattgctggatggcaattttggcaatcctgcatcaagatctcatgaattcggttggaaagcagaagaagttgttgaaaaagcacgattacaagtagcagacttaataaatgcagattcaagagaaatagtttggacatctggagccacagaatcagataatcttgctataaaaggtgcagctaaattctacaaggatagaggcaatcacattattacttctaaaatcgaacataaagctgtcttagacccttgcagacagcttgaaagagaaggttttgaagtaacttatctagatccaaatgaagatggaattgtaacggtagagcaattaaaaaaacacgtcaaagaaaacacaattttaatttcactaatgcatattaataatgaattaggatctattaatgacattgaaaaaataggtaattttgcacgagaaaagaatattatttttcacgtagatgcagctcagagtataggaaaagtagacatagatttatctaaattgaatgtagacttaatgtcattctcagctcataagtgttacgggcctaaaggcatgggcgccttatacataagaagaaagcctagagttaggttagaagcgctaatccatggtggaggccatgaaagaggtttcaggtcaggaacattagcaactcatcagattgttggaatgggagaagcctttaatctagctaaaaaggaaatggcaaaggacaataaaaagattaaggaactttctgaattattttggaatgaaatatcagatattgaagaaatagtcctaaatggaaataagaaaaataaagttgcaaatataacaaatgttagtttttcctatgtagaaggagaatctctaataatggcattaaaagatgtagctgtttcgtctggttcagcatgcacttcggcaagcttagagccttcttatgttctcagggctttaggaaggcctgatgagttagcacatagctcaattaggttctcttttggtagatttactaccccagaagaagttaaaatggtagcggaaacaaccaagagggtggttggacaacttagagaattgtcacctttatgggatatgtaccttgatggtgttgatcttgaaaaagttgaatgggcaccccattaaa

SEQ ID NO: 258962 - DNA, 1216 bp, Unknown
  Bacterial polypeptide expressing nucleotide sequence isolated from the Sargasso Sea
atgaaattacctatttacctagattatgcctctacaactcctgccgatccaagagtggtaaaaaaaatgcaagattgtttatctcttgatggaaactttggtaatcctgcatctagatctcatgcttttggatggaaagcagaagaggctactgaagaagctaggcaacatgtagctgatttagtcaattgtgatcctagagaaattgtttggacttcaggtgcaactgagtctgataatttagcaattaaaggtgctgctagattctataaaactaaaggagatcacataatcacctccaaaatagagcataaagccgtcttggatagctgcagacaacttgagagagagggatttcaagtaacttatctagatcctgattcaaacggaataatctctccagatctagttaaagagaacttaactgataaaactatcttggtatctctcatgcatattaataacgagatcggagtagtaaatgatattgaatctattggaaagattactagggaagccggcgtaatatttcatgtggatgccgctcaaagtacgggcaagcttccaatagacttatcaactttggaggttgatttaatgtctttctctgctcacaagacttatggacctaaaggaataggtgcgatgtatgcgagaagaaagcctagggttagattggaagctcaaatacatggaggaggtcatgaaagaggtatgagatctggtactttagctacccaccaaatagtgggaatgggggaggcttttagaattgcaaagttggatatggaagaggacaacaaaagaattgaaagcttaaggaacaaattttggaacgcaattaaagacatggaagaagtttatcttaatggagatgagctatcccgagcgccaggtttcttaaatgtaagtttcaattatgttgaaggtgagtctctgataatggcactcaaagatatagctgtttcctccggttctgcatgtacatctgcaagccttgaaccttcgtatgttctcagggcactaggtttgaaagatgaacttgctcatagctcaataagatttgcaattggtaggttcacaactgaagaggaagtagaatatacaataaaccttgttagagattctgttgaaaaactccgaacactttcacctttgtgggatatgtataaagatggagtagacatggagtcaatagagtgggcagaaagttaaa

SEQ ID NO: 258963 - DNA, 382 bp, Unknown
  Bacterial polypeptide expressing nucleotide sequence isolated from the Sargasso Sea
tttgaaacaaatatatttagattatgcatcaactactcctgtagaaaaaggcgttgttaacaagatgacagattttatgtccttcgatgggaattttggaaaccctgcttccagatctcactccttcggatggaaagctgacgaagcagttgaagaggcaagaaataatctcgcaactttaatgggttgtgatcctagagaaataatttggacttcaggtgcaactgagtctgacaatttagcaattaaaggcgcagcaagattctataagaataaaggtaatcatcttgtcacttcaaaaatagaacacaaagcagttcttgatccctttaggcaacttgaagaagaaggctttgaagttacatatttggagcctaaattc

SEQ ID NO: 258964 - DNA, 1159 bp, Unknown
  Bacterial polypeptide expressing nucleotide sequence isolated from the Sargasso Sea
atgaaacctatttatttagattatcaatctactactcctacaaataaggatgtcttagaaaaaatgataccttatttttctgaagtatatggtaatccgcattcttcaaatcataaatatggtttaattgcacatgaggcaatagaaaacggaagaaaaaaaattgctaaagctattggttctcaaccagaagaaataatttttacttcaggagcaacagaatcaaataatttagcaattaaaggttcgtttttatatagacttaagaaacataatcgtaaaaaaatcattattgctgcaacagagcataagtgtgttctagaagctgccaattcattagcttccttaggtgccaaattaactataattaatgttaataacttaggagaaattaatttaaagcaactagagtctgaaatgagtgatgaagtagctttagtttctattatgttagctaataatgaaattggtattatacaacctattaaggaaatctctaatatttgtaataagaataatgtatggttgcatactgatgcggcacaggcagtgggaaatatcgatgtaaaagtaaatgatttaggcgtagatttaatgagtatttcaagccataaattgtatggtcctaaaggcattggctgcttatttgtcagaagaagacccagaataaggttgcttccacaaattgatggaggaggtcaggaaagattattgcgttcaggaacattacctacgcctcttatagtaggttttagtgaagcaatgtataaagcaaataaaaacctaaacaagaatattattcagttaaagtttctaagagacagacttcataatcattttatagagtttgataaaaatataaaactaaatggaacagatataaataagaaccgcttaccaaataatttaaattattttgtaaatggagttaatgcattagaattaacagaatctctcggaaattatgtggcattttcaacaggatcagcttgctcaacaggaaatattgaaccttcttatgttctatcatctataggattgaaaaaagaagaagcattatcatcatttaggatttcagttggattagaatctacacaagaagatattgataaagctgctaaaattatttgtaataaaataagtttattgcgaaaataaa

SEQ ID NO: 258965 - DNA, 1222 bp, Unknown
  Bacterial polypeptide expressing nucleotide sequence isolated from the Sargasso Sea
gatgagcacacaatcaacaatttatttggactacgcatcaacaacacctgttgatccaagagtagcgtcaaaaatgatggaattccttactccagaaggtgagtttggaaatcctgcatctagatcacatagatttggatggaaggctgatgaagctgtagagcaagcaagatctcacgttgcaaatcttgtgaattgtgatccaagagaaatagtttggacatctggagccaccgaagcagacaatttagcaataaaaggtgttgcaaggttttataagagtaaaggcaatcatataatcacttcaaaaatagaacataaagcagtcttagatccttgtagacaacttgaaagggaaggattcgaagtcacttatttagatccagatgatggaggagttatcagtcctgaagcagtcaagtctgctatgaaagactcgacaatcttggtttctattatgcacattaataatgaattaggcactttgaataacctaacagaaattggagagattgtaagagaaaagggtgctttttttcatgtagatgctgcacaaagtacaggaaaaacagaaattgatctcactaagatgccagtcgatctaatgtcgttttctgctcataaaacttacggccctaaaggaattggcgcattatatgttagaagaaaaccaagagtgagacttgaagctttaattcatggaggtggccatgagagaggaatgagatcaggtactttagcaacgcatcaaatagttggaatgggcgaggcttttagaatagcaaaaatagaaatggaaaaagatctcgcaaaagtaaatgcttttcataaaagatttctcgagaaagttgaagaaattgatcacatatacataaatggtgacctaaataataaagttccaaacattcttaacgtaagctttaatttcgttgagggtgagtctttgatcatgggattgaaagatattgcagtttcatcaggttcagcatgtacttcagctagtcttgagccttcatacgttcttagagctcttggaagaaaagatgaactcgcacatagttcaattaggttttcttttggaagatttacaagtgatgaagacgtagataatactttaaagattttaggaaatgtagttcatcgattaagggagctttcgccactttgggagatgcacttagacggtattgatttagatactgtagaatggaatacacattag

SEQ ID NO: 258966 - DNA, 1069 bp, Unknown
  Bacterial polypeptide expressing nucleotide sequence isolated from the Sargasso Sea
gatgagcacacaatccacaatttatttagactacgcatcaacaaccccagttgaccctagagtagcatctaaaatgatggagtttttgactcctgagggagagtttggaaatcctgcttcacgttcacatcgatttggatggaaagctgacgaagctgttgaagaagcaagatctcatgttgcaaatttagtcaattgtgatccaagagaagttgtctggacgtctggtgcaacagaagcagacaatttggctataaaaggtgttgctagattttataagtctaagggcaatcacattattacctcaaagattgaacataaagcagttttagatccatgcaggcaactggaaagagaaggtttcgaagttacttatctcgatccagatgataaaggtgtcataagcccagaagcagtaaaggccgcaattaaggattcaactgtcctagtttcaattatgcatattaataatgagcttggaactgtcaatgacatatcaaagattggtgatgttaccagagataaaggaattttctttcatgttgatgctgcccagagtacaggtaaagtgaatattgacctagaaaaaatgtcagttgatcttatgtccttttctgctcataaaacatatgggccaaaaggtgttggcgcattatacgtaagaagaaaacctagagttagacttgaggctttaatccatggcggtggtcatgaaagaggtatgagatctggaactctagcaactcatcaaattgtaggcatgggcgaagcattccgcttggctagtaaagaaatggaagaagatcacaaaaaaatctctaaatatcatgaaaaatttttagacaaagtaaatgaaattgatcatgtatacattaatggtgatcttaataataaagttccaaatattttaaatgtaagttttaattttgttgaaggtgagtctcttataatgggattaaaagatattgcagtttcatctggctctgcatgtacatcagctagcttggaaccttcatatgtattaagggctttgggaagaaaagatgaattagctcacagctcaataagg

SEQ ID NO: 258967 - DNA, 463 bp, Unknown
  Bacterial polypeptide expressing nucleotide sequence isolated from the Sargasso Sea
catgggcgaagcattccgcttggctagtaaagaaatggaagaagatcacaaaaaaatctctaaatatcatgaaaaatttttagacaaagtaaaagaaatcgatcatgtatacattaatggtgatcttaataataaagttccaaatattttaaatgtaagttttaattttgttgaaggggagtctctaataatgggattgaaagacattgcagtttcatcaggctctgcatgtacatcagcaagtttggaaccttcatatgtattaagggccttgggaagaaaagatgaattagctcacagctcaataaggttttcttttggaagattcacaagtgatgatgatgtaaataataccttagatattcttggtaacgtcgtccatagactcagagagctttccccgctttgggaaatgcatctcgatggaattgatttagatacagttgaatggaacgcacattag

SEQ ID NO: 258968 - DNA, 1222 bp, Unknown
  Bacterial polypeptide expressing nucleotide sequence isolated from the Sargasso Sea
atgagcaaaagtaaaccaatttatctagactatgcatctacaactcccgttgatgagagagttgctgaaaagatgttggaatatatgacattcaataataactttgggaatgcagcttcaagatctcattcattcggttggcaggctgatgaggctgtagagctagcaagatcgcatgtagcaaaccttgttaattgtgatcctagagaaattgtttggacttctggagccactgaagcagataatttagctataaaaggaattgctaatttttacaaaacaaaaggcaaacacattattacttccaagatagaacacaaagcagttctcgatccttgcagacaacttgaaagacatggttttgatgttacttatttagagccaaatgagggaggagttattactccagatgctgtaaaagaggctattagggaagatactatcctcgtttccataatgcacataaataatgaattaggaacaattaatgacattgcttctattggtgagttaacaagagataatggaatatttttccatgttgatgcagctcaaagcactggcaaagtcaatattgatttagcaactttaaaagttgatttaatgtcattctcagctcataagacatatggaccaaaaggtgtcggcgctttatttgttagaagaaaaccacgagtaaggattgaagctcagattcatggaggtggccatgaaagaggtatgagatctggaacgcttgcaactcatcaaattgttgggatgggagaagcttttaggcttgcaaaagaagaaatgaaaagtgattctgaaaaagtcaatgaattccatgaatactttttagaggaagttaagaagatcgatgaaatatatattaatggagatatacaaaacaaagtacctaatattttaaatgtaagttttaattttattgaaggtgagtctttaatcatgggattaaaagatattgctgtctcatcaggttcagcatgtacttctgcaagtcttgagccatcatatgttttaagagctttaggtagaaaagatgagttagcgcacagctcaattagattttcatttggcagatttactacagaagatgacgtaaggaataccctcaatcttctttcaaatgtagttgagagattaagggagctatctcctctttgggagatgcatcttgatggaattgatttggatacggtcgagtggcaagcacactaat

SEQ ID NO: 258969 - DNA, 1219 bp, Unknown
  Bacterial polypeptide expressing nucleotide sequence isolated from the Sargasso Sea
atgaaaactaaggctatatattttgattatgcatcaactactccagttgaccctcgtgttgcgaagaaaatgcatgaatgcctattattagatggtaattttggcaatccttcctcaagatctcatgaattcggctggaaagctgaagaagttgtagagaaagcaagattccaggtagcagacttaattaatgcagactcaagagaaatagtctggacttctggagctacagaatctgacaatcttgccattaaaggcgcagctaaattctataaagatagaggcaatcacattattacatctaaaatagagcataaagcagtattagatccttgtagacaacttgaaagagaagggtttgaagtaacttacctagatccagataaggacggagttgtaaccttagaagaaataaaaaaacacgttaaagaaacaacaaccttaatttcattaatgcatattaataatgaactaggctcaataaatgatatcggcaagataggagattttgcacgcgagaaaaatattatttttcatgtcgatgcagctcagagcataggaaagataaacatagacttatctaaattaaatgttgatcttatgtcgttctcggcccataaatgttatggacccaaaggtatgggtgctttatatataagaagaaaacctagagttagattagaagcactgatacatggtgggggtcatgaaaggggttttaggtctggaactctagctactcatcagattgttggaatgggagaagcctttagtttagtcaaaaaggaaatggcaagagataataagaaaataaaagagctttcagagttcttttgggatcaaatatcaggaattgaagaaatagtgctaaacgggaacaagaaaaataaagttgcaaatataataaatgtcagcttttcttatgtagaaggtgaatcgttaataatggcactaaaagatgttgctgtctcttcaggttctgcgtgcacatcagcaagtttagaaccttcctacgttttaagagctttgggaaggccagatgagttagcgcatagttcgataagattctcttttggtagatttactactaaagaagaagttaaaatggtagcagaaacaactaagcgggtggttggacaacttagagagttatcacctctatgggacatgtatcttgatggagttgatcttgaaaaagttgagtgggcaccacattaat

SEQ ID NO: 258970 - DNA, 1216 bp, Unknown
  Bacterial polypeptide expressing nucleotide sequence isolated from the Sargasso Sea
atgaagcttcctatctatttagattatgccgccaccacgccagttgatccgcgagtcgcggaaaaaatgttccaatacatgacgatggatggcatcttcggtaacccagcatcacgttctcaccgttatggctggcaagcggaagaagcggtggatgtggcgcgcagccaagtggctgatctgatcaatgccgatcaccgtgaaatcgtgtttacctcaggtgcaaccgaatcaaacaacctggcgatcaaaggcgtagcgcatttctacaataagaaaggcaagcacatcatcaccagcaagactgaacataaagcggtactcgatacctgccgtcagcttgagcgtgaaggctttgaagtcacttacttagagccagatgccaacggcattattccgatggaacgtttagaagcggcgatgcgcgacgacaccattcttgtcagcatcatgcatgtgaataacgaaatcggtgtgatccatgatgtggatgccatcggtgagttatgccgctcaaaaggcattatcttccatatggatgcggcacagagcgcgggtaaattacctatcgatgttcaaacgactaaggttgacctcatctctatctctggccacaaaatgtatggtccaaaagggattggtgctctgtacgttcgccgtaagccacgcattcgcttagaagcgcaaatgcacggcggtggtcatgagcgtggtatgcgcagtggtacactggcgactcaccaaatcgtcggtttaggtgaagcggctgctatcgcaaaagcggaaatggcaacggacaacgcccgtatcgccaagctgcgtgacaagttatggaatggcatcaagcacatcgaagagacgtatgtaaacggcgacatgactcaccgtgtgagcggtagcctgaacgtcagcttcaactatgttgaaggtgagtcgctgatgatggcattaaaagatttagcggtttcatcgggttctgcctgtacgtcagccagtctcgagccaagctacgtattacgtgcgctcggtttaaatgatgaaatggcgcatagctcaattcgtttctcaatcggtcgttttaccaccgaagaagaaatcgaccacgctatcgaaactattacacaatctattgataaattaagagaaatgtctccattgtgggagatgttcaaagatggcatcgacctgaatcaggtccagtgggcccatcattaat

SEQ ID NO: 258971 - DNA, 1222 bp, Unknown
  Bacterial polypeptide expressing nucleotide sequence isolated from the Sargasso Sea
aatgagtaaaagtaaaccaatttatttagactatgcatccacaactcctgttgatgaaagagttgctgaaaagatgctggaatatatgacatttaataataattttgggaatgctgcttcaagatctcattcatttggttggcaggctgatgaagctgttgagttagcaagatcgcatgtagcaaaccttgttaattgtgatcctagagaaattgtttggacttctggagccactgaagcagataatttagctataaaaggaataaccaatttctacaaaacaaaaggaaagcatattgttacttccaaaatagaacataaagcagttcttgatccttgtagacagcttgaaagacacggttttgatgttacatatttggagccaaatgagggaggggttgttactccagaagctgtaaaagaggctattagggaagatactatcctcgtttcgataatgcatataaataatgagttaggaacaatcaatgacattgcttctattggtgagctgacaagagataatggaatatttttccatgttgatgctgcccagagcactggcaaagttaatattgatttatcaaccttaaaagttgacttgatgtcattctcagcccataagacatatgggccaaagggagttggcgctttatttgttagaagaaaaccacgagtaaggattgaagctcagattcatggaggaggccacgaaagaggtatgagatctggaacgcttgcaacacatcaaattgttgggatgggagaagcttttaggcttgcaaaagaagaaatgaaaattgattctgaaaaagtcactgaattccatgaatactttttagaagaagttaagaagatcgatgaaatatatattaatggagatatacaaaacaaagtgcctaatattttaaatgtaagttttaattttattgaaggtgagtctttaatcatgggattaaaagatattgctgtttcatcaggctcagcatgtacttctgcaagtcttgagccatcatatgttttaagagcattaggcagaaaagatgagctagcgcacagctcaattagattttcatttggcagattcactacaaaggatgatataagaaatacccttaagcttcttttaaatgtagttgacagattaagggagttatctcctctttgggagatgcatcttgatggaattgatttggatacggttgaatggcaggcacactaa

SEQ ID NO: 258972 - DNA, 586 bp, Unknown
  Bacterial polypeptide expressing nucleotide sequence isolated from the Sargasso Sea
aaaggtattgggggccttatatgtaagaagaaacctagggtgagattagaagctttaattcatggcggaggtcatgaaagagggatgagatcaggaacattagcaactcatcagatagttggcatgggcgaggcatttagaatagcaaaagaggatatggaaaaagatagtttaaggatatcaaaaattcatgaaaagtttttagaaaaagtaaaagaaatagatcacgtttatgtaaatggagatttaaaaaataaagtgcctaatattttaaatgttagctttaactttgttgaaggagagtctttaataatgggtctaaaagatatagcggtatcttcaggttctgcatgcacatctgcaagcttggaaccgtcttatgttttaagggctttaggaagaaaagatgaattagcacatagttctattagattctcttttggaagatttactagtgacgatgatgtaaaaaatactttagatattttaggcaatgttgttcatagattaagagagctatcgccattatgggaaatgcacctagatggtatagatcttgataaagttgaatggaatatgcattagg

SEQ ID NO: 258973 - DNA, 980 bp, Unknown
  Bacterial polypeptide expressing nucleotide sequence isolated from the Sargasso Sea
taatttggcaataaaaggggttgcaagattttataaatctaaaggaaatcacattatcacgtcaaaaattgaacacaaagctgtgttagatccatgccgacaacttgaaagagaaggttttgacgtcacatatctggacccagatgaaaaaggagttattagcccaagcgcagtaaagtcagcaattaaagatacgactgttctagtttcaattatgcatattaataatgagttaggaactgttaatgacattgaagaaattgggaatataactagagataatggttcatttttccatgtagatgctgcacaaagcacaggtaaagttgatattgatcttgagaaaataaatgttgatttgatgtcattttctgctcataaaacttatggaccaaaaggaattggagctttgtatgtaagaagaaaaccaagagttagactagaagctttaattcatggaggaggacacgaaagaggcatgagatctggtacattagctactcatcaaatagtaggaatgggcgaggcatttcgtatcgcaaataaagagatgaatcaagattgcaataagatatcaaaatttcatgaaaagtttttagacaaagtaaaagaaatcgatcatgtttatatcaacggtgatctcgataataaagtccctaacattttaaatataagttttaattttgtagaaggcgagtcattaatcatgggtttaaaagacattgcagtatcctctggctctgcgtgtacatcagcaagtttagagccttcatatgttttaagagctttaggtagaaaagatgaattagctcatagctcaattagattttcctttggcagatttactagcgatgatgatgtcaataatactttggatatattagctaatgttgtctacagattaagagagctttcacctttatgggaaatgcatcttgacggcattgacttagatactgttgaatggaatgcacactagg

SEQ ID NO: 258974 - DNA, 1147 bp, Unknown
  Bacterial polypeptide expressing nucleotide sequence isolated from the Sargasso Sea
aatgctatcaactcccatactactagactatcaatcttcgactccttgctctaaagatgtcgttgattctatgaaacctttttggagtgagatattttctaaccctgcaagcaaatctaatttggcggggattaacgcaagcgctatattggaagcctcaagagaaaaaatagaacaaagtttatttcttaagaataaaaaagttatttttacaagtggagcaactgaatctaataacttagccttattaggttttgctagaaatttctataaaaaaacaggaaattatggacatattattaccttaaaaacggagcataaagctgttttggagcccttaaaccaactaaaaaaagagggatttatggttacagaaattaatcctgagaaagatggcttaatttcagaagaacaattcaaaaaaaatataagagaagatacatttcttgttagtgtcatgttggcaaataacgaaataggagttattcagcccatagaaaatatttcaaaaatatgtcaatcgagaggaataacatttcactctgattttgcacaatgtttaggttatatggctttagacaatcttttatcagatgtaaacatgataaccatgagttctcacaaaatatatggtcctaaagggataggacttctattgatggatgaagaaattaatcttgagcctttaattgttggaggaggtcaggaatatggtcttaggtctggcacattacctcttcctttagtagttggctttgctaaagcaatagagatagcagtttttaatcaaaagaataatgctgagaaattacttttttatagaaatgaccttttagaagggttgttaaaaaataattctggtttattaattaatggctccattgaaaaaagattacctcacaatttaaatttgactgtattggatttaaatggagcgaagtttcataaacttttaaaatctaaaataatttgttctagtggatctgcatgtagtaatggtgaaccatctcatgttttactagccctaggtagatcttttaaagaagcagaatcttcaataaggttaagtattggattaagcactaattcaaaagatataaaacaagcaatacaaattcttacacatacaatcaaatcattacgttag

SEQ ID NO: 258975 - DNA, 1213 bp, Unknown
  Bacterial polypeptide expressing nucleotide sequence isolated from the Sargasso Sea
gatgcaatcccgtccgatctacatggactacagcgcgacgacgcccgtcgatccgcgcgtggtcgacaaaatggtgccgttcctgcacgagcagttcggcaacccggcgtcacgcagccacagttacggctgggaggcggagcaggccgtcgaggaagcgcgcgcgcacgtcgccgcactgcttggcgccgacccgcgcgaaatcgtgtggacgtccggcgcgaccgagggcaacaacctcgcgatcaagggtgcggcgcacttctaccagggcaagggcaagcacctcgtcacggtgaagaccgagcacaaggccgtactcgatacgtgtcgcgaactcgaacgccaaggcttcgacgtcacgtacctcgacgtgcgggaagacggcctgctcgatctcgatgccgtgcagcaggcgctgcgcgccgacacgatcctggtgtcggtgatgctcgcgaacaatgaaacgggcgtgatccagccggtggccgagatcggcgcgctgtgccgtgcgcgcggcatcgtgttccattgcgacgcggtgcaggcggccggcaagattccggtcgacgtgaatgcgctgaacgtcgacctgctgacggtgaccgcacacaaggtctacggcccgaagggaatcggcgcgctgtatgtacgccgcaagccgcgcgtgcggatcgaagcgcagatgcacggcggcggccatgagcgcgggatgcgctcgggcacgctgccgacgcaccagatcgtcgggatgggcgaggcgttccggctcgcgaaggaagagatggcagaagaaagtcgccgtgtcggcgccttgcgcgaccggctgctggccggcctgtcgacgctcgacgaggtttacgtgaacggcgatctcagccgccggattccgcacaacctgaacgtcagcttcaatttcgtcgaaggcgaatcgctgatcatgggaatcaagggtgttgcggtgtcgtcaggctccgcatgtacatcggcatcgctggagccgtcgtacgtgctgcgcgcgctgggccgcagcgacgaactcgcgcacagctcgatccgcttcacgctcggccgcttcacgaccgaagccgaagtcgacagcgtgatcgcgcaggtgcgcgacacggtcggcaagctgcgtgagctgagcccactgtgggacatgcatctcgacggggtcgacctgaatacgatcgagtgggccgcgcactga

SEQ ID NO: 258976 - DNA, 394 bp, Unknown
  Bacterial polypeptide expressing nucleotide sequence isolated from the Sargasso Sea
tgaatactttttagaggaagtaaagaagattgatgaaatatatattaatggagatatacaaaacaaagtacctaacattttaaacgtaagttttaattttattgaaggtgagtctttaatcatgggattaaaagatatagctgtttcatcaggctcagcatgcacttctgctagtcttgagccatcatatgttttaagagcgctaggcagaaaagatgagttagctcacagttcaattagattttcatttggcagatttaccacaaaggatgatgtaggaaatactcttaagcttctttctaatgtagttgacagattaagggagctatctcctctttgggaaatgcatcttgatggaattgatttagatacggtcgaatggcaggcgcactaa

SEQ ID NO: 258977 - DNA, 827 bp, Unknown
  Bacterial polypeptide expressing nucleotide sequence isolated from the Sargasso Sea
catgaaacaacccatttatcttgattacaacgcaacgactccaacggacccaagggtcgtggaggcgatgttgccattttttactgaaatctatggcaatgcggctagccggaatcattcctttggttggactgctgaagaaggggtttcgaaagcaagaaacattatcggagaggccatcggcgctaccggaaaagagatcgtttttaccagcggtgccactgaatccgataacatggcagttcttggcgtggcggaattttatcatgaaaaaggaaaacatatcatcaccagcccaatcgagcataaggcggtggttgatccctgccaggctctcgagcaaaaagggtatgaaataacttttctggatgtggatgaacacggaagaattgatctgaaacagttggaagcttcgatccgggaagacacggtcctggtttccttgatggctggcaacaatgaaatcggaaccctgaatcctctcacggagattggtcagatgacccgtgaacggggggtgctttttcactgtgatgcaacgcaaggggtgggaaagattccgattgatgtggaaacaatgaacatcgacctcctctcgatgacggcccacaagatctatggtcccaaaggaatcggagcattgtacgtgagacgtaaaaaaccccgggtccgcatcactccgattatgtttggaggcggccatgagcgagggtttcgttccggtaccctgaatgttccggggattgttggttttggaaaagccatcgagctcgccatggaggaaatttcttcagaagctgaaaggcagatcgggttgaggcaacatc

SEQ ID NO: 258978 - DNA, 1222 bp, Unknown
  Bacterial polypeptide expressing nucleotide sequence isolated from the Sargasso Sea
gatgagcacacgatctaccatttatttagattacgcatcgactacacctgttgaccctagagttgcatctaaaatgatggaatttttaacacctgatgggcaatttggtaatcctgcatcaagatctcataggtttggttggaaagcagacgaagcagtagaagaagctagatctcatgttgctaacctcgttaactgtgatccaagagaaattgtttggacttctggtgctacagaagcagacaatctagcaattaaaggcgttgctaggttttataaatcaaaaggtaatcatattattacgtcaaaaattgaacataaagcagtattagatccatgcagacaattagaaagagaggggtttgaagttacttacttagacccaaatgataaaggtgttattgatccagaagatgtaaagtcagcaataaaagatacaacaattttaatctccattatgcatataaataatgagctaggtactgttaataatatttcaaaaattggagaaattgctagggaaagaggcatattttttcatgtagatgctgctcaaagcaccggtaaaactctaattgacttagaaaaaatgcaaattgatttaatgtctttttcagctcacaaaacatacggaccaaaaggaatcggagcgttatatgttagaagaaagccaagagtcagattagaggcgctcattcatggtggtggtcatgaaagaggtatgagatcaggaactcttgcaacacaccagattgtgggtatgggagaagcttttagaattgctaaggaagaaatggatactgatcataaaaaagtttcagaatttcataaaaaatttttagaaaaagtcaaagaaatagatcatgtttacattaatggagatcttgataataaagtacctaacattcttaatgttagttttaattttgttgagggcgaatcattaattatgggtctaaaagatatagcggtttcttctggttctgcatgtacatcagccagtctagaaccatcatatgttttgagagcattaggtagaaaagatgaattagcacatagttctataagattctcctttggacgatttactagtgatgaagatgttgaaaatacattggatatattaggaaatgtagttcataggctaagagagttatctcccttgtgggaaatgcatttagatggagttgatcttgataaagtagaatggaatttacattag

SEQ ID NO: 258979 - DNA, 1498 bp, Unknown
  Bacterial polypeptide expressing nucleotide sequence isolated from the Sargasso Sea
catgagcgacaccaccccgctgcactacctcgactacgccgccacgacgcccgccgatccgcgcgtgatcgaagcgatgacggcctgcctcggcttcgacggcatcttcggcaacccggcatcgagctcgcacgccgccggccggctcgcgaaagacaaggtcgagcaggcccgcgcgcaagtcgccgcgctgatcggcgcggacgccgacgagatcgtctggacgtcgggcgccaccgaatcgaacaacctcgcgctgaagggctatgcggaaaacgcgaccggcaagcgccacctgatcacgagccgcatcgagcacaaggccattctcgacacgatggcgaacctggcgaagcacggcgcgtcggtcacgttcctggcgcccacccgagacggcgaaatcaccgccgactcggtcgcggccgcgatcggccccgatacgggcctcgtgtcgctgatgctcgtgaacaacgagctcggcacgctgaccgatattggcgcaatctcgcgcatcgtgcacgacgcgggcgcgctgctccatgtcgacgccgcacaggcgctcggcaagacgccgatcgacgtgcgcgcgctcggcatcgacatgctgtcgatgtccgcgcacaaggtgtacggcccgaagggcatcggcgcgctgttcgtccgccgcgacatcgcgcaccggatcgccgctcagattcatggcggcgggcatgagcgcggcttgcgttcgggcacgctcgcgacgcaccagatcgtcggcatgggcgttgcatgcgaactggccgccgacaagctcgacggcgaagccgcacggatcgcggcgctcggcgcccgcctgacggacgcgctggtcgcacttggcgacgtcacgcagaacgcggccacggcacgccggatcccgcacacgctgagcctgacggtgaacacgccgggcttcttcccgttcatgctcggcgaagcgctcgccgtgtcgtcgacgtccgcatgcaactcgaccagcggcgcaccgtcccacgtgctgaccgcgatcggcctcgacgccgaaacggcgggccgcaccgtgcgcgtgagcttcggccgcttcacgacggagcaggacgtcgacttcgcgatcgcctgtttccgccacgcgatcgaacaatgtcgcgcgacggcggcgaacggcttctccgcgtcgcggcagatcacgccggccgacctgaaggcgatccgcaatgccggcttccgctcggtcatctgcaaccgtcccgacggcgaaggcgacgcacatccggcattcgacgaaatcgccgcggcggcccgcgaactgggcctcgaagcgcgctacctgccggtcgagcgcgacggcatcggcgatgcggagatcgacgcattcggtgagctgatcgacacgctgcagaagccggtgctcgcgtattgccgcagcggcagccgctccggcttgctgtggagccggctgtccgctcggcggacagccgaagccccggcctctgtctga

SEQ ID NO: 258980 - DNA, 950 bp, Unknown
  Bacterial polypeptide expressing nucleotide sequence isolated from the Sargasso Sea
aaaagttatttttacaagcggggcaactgaatccaataacttagccttattgggttttgctagaaatttctataaaaaaacaggaaattatggacatatcattaccttaaaaacggagcataaagctgttttggagcccctaaatcaactaaaaaaagagggatttatggttacagaaattaatcctgagaaagatggcataatttcagaagaacaattcaaaaaaaaaataagagaagatacatttctggttagtgtcatgttggcaaataacgaaataggagttattcagcccatagaaaatatttcaaagatatgtaaatcgagaggaataatatttcactctgattttgcacaatgtttaggttatatggcgttagacaatcttttatcagatgtaaacatgataacgatgagttctcacaaaatatacggtcctaaagggataggacttcttttgattgatgaagaaattaatcttgagcctttaattgttggaggaggtcaggaatatggtcttaggtctggtacattacctcttcctttagtagttggctttgctaaagcaatagagatagcagtttttaatcaaaaaaataatgctgagaaattacttttttacagaaataaccttttagaggggttgttaaaaaataattctggtttattaattaatggctccatagaaaaaagattacctcacaatttaaatttgactgtattggatttaaacggagcaaagtttcataaacttttaaaatctaaaataatttgttctactggatctgcatgtagtaatggtgaaccatctcatgttttactagccttaggtagatctcttaaagaagcagaatcttcaataaggttaagtattggattaagtactaattcaaaagatataaaacaagcaattcatattcttacaaatacgatcagatcattacgataga

SEQ ID NO: 258981 - DNA, 799 bp, Unknown
  Bacterial polypeptide expressing nucleotide sequence isolated from the Sargasso Sea
tgcgatgttttagttgaaaattttgcgcctggagctatggaacgcatgggattcggctgggaagagattcaaaaattgaacccacggatgataatggcttctgtaaaggggtttggtcctggaccatatgaagattgtaaggtctacgaaaacgttgctcaatgcgcaggtggcgcagcgtcaaccacgggatttttagacggaccgccaactgtgactggagcacagatcggcgatagtggaacagggctacacttagctctaggaattgtcacggcgttataccaaagacatgaaacgggtaaaggtcagcgggttcttgcagctatgcaagacggggtaataaatctgtgccgtgttaaacttagagatcagcagcgccttgccgctggcccgctcaccgaatattcacaatacggagagggtatagactttggcgagaccacacccagagcaggaaatgactcgggtggaggtcaaccagggaggatcttgaagtgcaaaggatgggaaactgatccgaatgcctatacttatttcataactcaagcggctgcttggcccaaaatatgtaaggcaataggcaagtcctcttgggtggatgatccagaatacgccacacccaacgctcggttgactaggttgaacgaagttttcgatgcaatagagagttggacgatgacaaaaactaaatttgaagttatgcaaatatgtaatccactagatattcccgttggtccaattctatccatgaaggaaatttcggaagaggaagcctacgagaaacgggaacaatagt

SEQ ID NO: 258982 - DNA, 722 bp, Unknown
  Bacterial polypeptide expressing nucleotide sequence isolated from the Sargasso Sea
tgggattgttacggctctttttcatcgtgaacactctggaaaaggtcagcgcgttgaatgtgccatgcaagatggggttttaaacttgtcacgtgtaaagctccgcgatcagcaacgactgacccgcggcccgctaaaggaatatagccagttcggtcaaggtattgaatttggggaagcgaccccccgtgccggcaatgattccggtggtgggcaacctggctggattcttaaatgtaagggctgggaaacagaccccaacgcatatgtatatttcatcacacaggcagctgtatggggaaatatctgtgacctgattgggaaatcagaatggaaggaagaccctgattatgccaagccatcggatcgacttgataagataaaaccaatttttgatgctatagaagaatggactatgaccctagataagtttgaggtcatgaatctttgcaatccgctgaatattccgtgtggacctattttatcaatgaaagagctagctgaagagacatccctgcgagaaacaggcaccattgttgaggttgatcacccggaacgtggcaaatatttgaccgttggcaatcccgtaaaactatcagactccccctccgaagttgaacgttccccattactaggggaacacacagaagaaattctaagaactgttgtcggtttgaccgatgaagagatagagggggcacgggaagagggagcaatataga

SEQ ID NO: 258983 - DNA, 1249 bp, Unknown
  Bacterial polypeptide expressing nucleotide sequence isolated from the Sargasso Sea
tatgagtaaagcactcgacggcgtgcgcattctcgatttcacccatgtgcaatcgggcccgacctgcacgcagttgctcgcgtggttcggtgcggacgtgatcaaggtagagcgggccggcgccggcgacattacgcgcgagcagttgcgcgatattcccgacgtggacagcctgtacttcacgatgctcaatcacaacaagcgctcgatcacgatcgacaccaagaatccggaaggcaagctggtgctcgaggcattgatccagaagtgcgacgtgctcgtggagaacttcgcgccgggcgcgctcgatcgaatgggctttacgtgggagcggattcaggaactgaatccgcgcatgatcgtggcgtcggtcaaaggcttcggcccgggtccctacgaggactgcaaggtctacgagaacgtcgcgcaatgcgcgggcggcgcggcttcgactaccggtttcgacgatgggccgccggtagtgaccggcgcgcagatcggcgacagcggcaccggtttgcatctggcgcttggcattgtcacggcgctgtatcagcgcacgcaaaccgggcgcggccagaaggtgctcgccgcgatgcaggacggcgtgcttaacctgtgccgcgtaaaactgcgcgaccagcagcggctcgaacgcaccggcgtgatgaaggaatatccacaatatccgaacgggacgttcggcgaagcggtgccgcgcgccgggaatgcttcgggcggcggtcagccaggctggattctgaagtgcaagggctgggagacggacccgaatgcgtatatctacttcatcacgcaggcgccggtgtgggcaaaaatctgcaatgtgatcggcaaggaagaatgggccaccgatccgaactacgcgaccccggccgcacgcttgccacatctgaaggacatctttgccgagatcgagcgctggaccatgaccaagaccaagttcgaggccatgcagattctgaacaaatacgacattccttgcgggccgattctgtcgatgaaggaaattgccgaagagccgtcgctgcgcaaaaccggcacgattgtcgaagtggatcacccgacccgcggcaagtacctgaccgttggcaatcctatcaaactgtccgacagcccgaccgaagtcaaacgctcgccgctgctgggtgaacacaccgacgaagtgatggctgaactcggctactcacccgagcagatcaacgcattgcggaccgccggcgcgatttga

SEQ ID NO: 258984 - DNA, 1105 bp, Unknown
  Bacterial polypeptide expressing nucleotide sequence isolated from the Sargasso Sea
gacgtcccaggagcggatagcttatattttacaatgcttaatcataataaacgctctctaaccttgaacacaaaaaatgaaacggggaaacgtattctagagagactaataaaaaaatgcgatgttttggtggagaattttgcacctggagctatggagcgtatgggctttggatgggagcagattcaaaaactgaacccacgtatgataatggcgtcggtaaaaggttttggacccggaccatatgaagactgtaaagtttatgagaatgtggcccaatgtgcgggcggcgctgcgtcaactaccggttttttagatggaccaccaactgtcaccggcgcacagatcggcgatagtgggacaggattacacctagcattagggatcgttacggctttataccaaaggcatgaaacgggtatagggcagagggttctcgcggccatgcaggatggcgtaattaatttatgccgtgtaaagcttagagatcaacaacgcttggcagcgggaccactaaccgagtattcacagtacggagagggaatagatttcggggataccacacctagggcaggaaatgattcgggcggagggcaaccaggaaggatacttaagtgtaagggttgggaaactgacccaaatgcctacacttatttcataacgcaagcagcggcgtggccaaaaatctgtaaggcaatcaacaaacccgcgtgggtggatgatccaaactacgccacaccaaacgcacgtttaactaggttgaatgaagttttcgatgcgatagaaagctggacgatgactaaaacaaaatttgaagttatgcaaatttgtaacccgttggatataccagtcggtccaattttatcgatgaaagagatttcaggagaagaaagtctcagggaaacaggaacgatagttgaaattgatcatcctgaacgaggaaagtatttgagcgtcgggtgcccagttaagttgtcagcatcacctgctgaagtgaaaagatctccacttttaggtgagcatacaaaagaaatattaaggagtgagcttggatatactgacaacgagctggacgagattttggagagcggtgcggtaggttaaa

SEQ ID NO: 258985 - DNA, 1015 bp, Unknown
  Bacterial polypeptide expressing nucleotide sequence isolated from the Sargasso Sea
tcaaaaatattcactaaacttattaaagaatgtgatgtgatggtcgaaaactttgctccaggtgctttagatagaatgggtttttcttgggaaaaaattcaggagataaatccaagaatgatctatgcatctgttaagggcttcggtccgggtaagtacgaagattgtaaagtttatgagaatgttgctcaatgtgcaggtggatcagcttcaacaacaggtatgcttggtgaagtcccgctagttactggcgctcaaataggagatagtggaacaggattgcatcttgcattaggaattgttaccgcattgtttcatagagaaaagtcgggaaaaggtcaaagagtgtctgctgctatgcaagacggtgttttaaatctttgcagagtaaaacttcgtgatcaacaaaggctctctagaggccctctaaaagaatactctcaatttggagagaatattccttttgatgacgctacgcctcgtgcaggtaatgactctggtggaggtcaaccaggaagaattctaaaatgtaaaggttgggagactgatcctaatgcctatacttattttattactcaagctgcagtttgggaaaaagtatgtgatgttattggaaaacctgaatggaaagaagacgagagttactcaacacctgcgcttagactgccaaaacttaatgaaatctttaataccattgaagcttggactatgactaagacaaaatttgaggttatggatatttgcaatcctcttgatataccagttggcccaatcctttctctaaaagagttggctgaagatcaaggactaagagataccaatacaatagttgaggtagatcatcctgaaagaggaaaatatttaacagttggcaatcctattaaattatcagactctccagcaaaagttgaaagatctccacttcttggagaacatacagatgagatactgaaggaattttgtcaaatgagcgaagatgaaattaaagctgtaagagaagccggagcagtataag

SEQ ID NO: 258986 - DNA, 763 bp, Unknown
  Bacterial polypeptide expressing nucleotide sequence isolated from the Sargasso Sea
cgcggcggcgctcggcgacagcaataccggcatgcatctggcgatcggcattctgactgcactgattggacgcgacaaaaccggcaagggccagaaggtcgccgtatcgatgcaggacagcgtgttgaacctgtgccgcgtgaaactgcgtgaccagcagcggctggagcgcgtgggctatctcgaggagtatccgcagtatccgcacggcgaattcagcgacgtggtgccgcgcggcggcaacgcgggcggcggcggtcagccaggctgggtgctcaagtgcaagggctgggaaacggatccgaatgcctacatctacttcacgatccagggccatgcgtgggagccgatctgcaaggcgctcggcaaacccgaatggatcgacgacccggcctacaagaccgccgaggcacgtcaaccgcatatcttcgagatcttcggcaccatcgaggcatggctcgccgacaagaccaaattcgaagcggtcgacatcctgcgcaagttcgatattccgtgtgcaccggtactgacgatgaaggaactggccaacgatccgtcattgcgcgcaagcggtaccatcgtcgaagtgccgcacaagaaacgcggcgcctatctgacggttggcagtccgatcaagttctcggacatgaagccggaggtcaccgcgtcgccgctgctcggtgaacatacggacgaggtgctggcaagtctcggctacagccagcaggatattttcaatctgcgcgaaatcaaagcggtttga

SEQ ID NO: 258987 - DNA, 496 bp, Unknown
  Bacterial polypeptide expressing nucleotide sequence isolated from the Sargasso Sea
tcagaaaatgggatgctaggtatggggcctttccctactaaggatcaagtagatgctgatttaataaatgctggcaagcagaccgttaccgagttggccagaacaagctactttaatagtgcagatagcttttcgatgatccgtggagggcacatagacatggcgattttaggggcaatggaagtatctgaaaagggtgatttggcaaattggatgataccaggaaaattagttaagggtatgggcggcgcaatggaccttgttgctggagtaaaacgagttgtagtgataatggatcatacaaacaagaatggtgagactaaattattaaataaatgcactttgcccttgacgggcagacaagttgtagatcgaattataacaaatttgggaatctttgacgttgtttcgggcggtctaaaaatagctgaaattgcgaaagacgtaaccttatcgcaaattgaaaagatgactgaggcacaattaataaattaga

SEQ ID NO: 258988 - DNA, 631 bp, Unknown
  Bacterial polypeptide expressing nucleotide sequence isolated from the Sargasso Sea
tttgccttggacaagagaagaaatgtgcagtattgcagcaatggagctaaaagatggttactattgtaatcttgggattggcatgccaacaaaagttgccaattatatacctgaaggggtaaatgtgacacttcaatcggagaacggcatgctcggaatgggtccattccccaaaaaaaaccaggtagatgccgatatcataaatgcaggaaaacaaacaattactgagcttcccgaaacttcgtattttgatagttcagactcatttgccatgataaggggcggtcatattgatctatccattttgggtgctttacaagtatcagaggaaggggatttagcaaattggatgatacctggaaagatggtaaaaggaatgggcggcgcaatggatttagtagccggcgttaagaaagtgcttattttgatggaacacaacgcaaaagatgggcaaccaaaactattaaaaaaatgtactttaccgctcactgggaagtcagttgtaaatacagttattactgatctcggtaaatttgatattttaccaaatggagtaaaaattaatcaagctgctccaaatgttggtatagatgaaatacgctccagaacagaagcgaccattattgattga

SEQ ID NO: 258989 - DNA, 643 bp, Unknown
  Bacterial polypeptide expressing nucleotide sequence isolated from the Sargasso Sea
atggcctggaatcgtgaccagatggccgcgcgcgcggcgaaggaactgcaggacggcttctacgtgaacctcggcatcggcctgccgacgctcgtagcgaaccacgtgccggaaggcgtcgaggtgtggctgcagtcggagaacggcctgctcggcatcggcccgtcgccgaccgaagacgaagtcgacgccgatctcatcaacgccggcaagcagaccgtcacgacgctgccgggctcgtcgatcttctcgtcggccgattcgttcgcgatgatccgcggcggccacatcaacctcgcgatcctcggcgcgatgcaggtcagcaagcagggcgacctcgcgaactggatgatccccggcaagatgatcaaggggatgggcggcgcaatggatctcgtcgccggcgtgaagcgcgtggtcgtgttgatggagcatgtcgcgaagggcgaccagcacaagatcctcgaggagtgcaacctgccgttgacgggtgtcggcgtggtcgacctgatcatcaccgatctcggcgtgatcgaggtgacgccgaacggcctgaaggtcctcgaactcgccgatggcgtgagcgtcgacgaaatcaaggcgaagacgggcgcaccgctcgacgtgagcgcggtgggctgag

SEQ ID NO: 258990 - DNA, 928 bp, Unknown
  Bacterial polypeptide expressing nucleotide sequence isolated from the Sargasso Sea
tgctgtatatatctctttaaatactatagctgaaggaaaagaggttattgtctcaagaggtcaattagtgaaaataggtggttcatttagaattccagatatgattgcaaagagcggatgtagacttgtcgaagttggaactacaaataggactcatattagtgattatgaaaatgcaataaataaaaacactggtgcaatactatgggtgcatacttcaaactatataatatctggatttacaaaagaggttaagatagaagagcttgttaccctagggaagaaaaaaagagtgctggtaatgactgatttgggctgtggtgaagtcctaaatctttctaaacaagggattcctacaaatatcattgttgaagatgttgtaaagaaagggtcctcagttactactttctctggcgataagctacttggcggacctcaaagtggaattattgttggtaaaaaaccattaattcaaaaaattaaaaataatccaattgcacgtacggtaaggtgtgataagtggactataagcttgcttgaagagacattgcgctcaacgcaaaaagaatcgataaaagacaacttgacgctttcacttttaatgtcaagtagaaaaaaaattcaaatgagggctgaaaaagtttttagattaattcctcctaaaatctttaaagattataaaatttctttagatgaaactcttgttgaagctggaagcggtactttgccctcagttaagtttgaatctgttgcatttagaattacttcaaaaaaatattcagcctctacaatatcttcacgcttcagaaatgcaaaacaacctgttgttggttttattaaaaataataatttctatttagactttaagtcaattattccttctcaagaaaagtttctcattctttcaattactgaagctttagattga

SEQ ID NO: 258991 - DNA, 434 bp, Unknown
  Bacterial polypeptide expressing nucleotide sequence isolated from the Sargasso Sea
aaaaaaaaacccacttaaacgcgcgttacgcgctgacaagctgaccttaaccatattgagcaaagtcttgagactctacgaggatcccgaaacattggatcaaaaactacctttactcaaaacactaaccatccctttgcctgagcttgaaaatcgcgccaaaaaactcaaatcagcatttggcaagaagttttcaatagaaatcagcaagagtgctgttcaaatcggaagcggagcactgcccgacagaacagtcgaaagcctcgctctagttgtagagcataaggaaatgaaaccagagaatcttttgtcaaaattgcgaacgctaagcacaccgattattggcaggattaaagaagatcgagtctggttagacttgcgaggcgccgaacctttggaggaactcagcaaggtcatcgaggagcttggatgat

SEQ ID NO: 258992 - DNA, 982 bp, Unknown
  Bacterial polypeptide expressing nucleotide sequence isolated from the Sargasso Sea
cactaatttgggtcgcgctccgttaaatattggaaatcgagacgaggcgttcaggttttcaaatcttgaattggatttagaaacaggagaacgcggttcgagacatgacaaaacatcaaaattaatcgctcgttcttgtggagcagagtcagcgttagtagtcaacaactgtgcttcggcagttcttctagtgattgcagcactggctcaaaaccgaggagttgcagtttcaagaagtgaattagtcgaaattggtggaggatttagaatccctgaaattatcgaacaatcaggagctaaattaatcgaagttggaacgactaatagaacacgacggaaagatttcgaaaaagcagtaaacaaaaatgaagtttcattagtgttgaaagttcatcaatccaattatcgaattgttggttttactgaaaccactgaaatttctgaaatgaaagatttaggaattcctcttttagctgatattggttccggattacttgatgcagcttgtccttggttggatgatggacctccaaaatggcttataggtgaacctgctgcacgtcaaagtttagaatcaggtgctgacatagtaactttttccggtgacaagttattcggcggaccgcaagccggaattatcgctggaaaaacagaattaattgatctttgtatgcaacatcctctttctagagcttttcgccccggcaacctgattatgtctgtacttcaggaagtaactctgtcttatttggaacgtgaaggatcttctattcctttttggaaaatggccaccacttcagtagatgaactatttgatagagcaaaaaatatagaaccaaaatttgctaccaaaacttttgccacccccggcggtggaactcttccaggggttgaaataccttctgctggtttacatttagagggtaaccatgttgaattctttcgtcagcaagatccacctattattttgccgtatggatga

SEQ ID NO: 258993 - DNA, 829 bp, Unknown
  Bacterial polypeptide expressing nucleotide sequence isolated from the Sargasso Sea
aatggaaaaaatatcaattaacgcccttgtaaatgaggtaatttctgatttacccagagagattttaatatacatcgctcaaaaccttaaagttgacaccctagaaaaaaatgaaattattgaatattttaaaaatgaagtttcttattattcggggaaagttcaaaaaaaagttataaattgtactgggacattattgcatactaatcttggaagatctcaaatagatacaaattattctggagaaagtacaaatatagaatttgatctttttaatcaaaaaagaggggttcgaaatgaatttttgaatgaatttatgagcctacttttaaattctgaggatgtttgttttgttaacaacaatgcatcttctttgtatataacgttaaaaacactgaagaatgaatttgaaattaatacagtaattatttcgcggggggaaataattgaaataggtggttcctacaggcttccagaaataattcaagaaactggattaaatatgatagaagtaggaactactaataagactcgattaaaagattatcaaaaagcattggaaaaaaataagaatagtttgatacttaaagtacatagatcaaactattcaatagaaggttttacagaagatgtcgatataaaagagcttagatctcttgcggacaaaaacgatgctttgttgctacatgacattgggagcggattagtaatctcgagaaaatttttggaaaaagaaaatatatcaatatttaatactgagcctacgatccaagagtctttggaagatggctctgatgtggttatgttttctggtgataactatttggtt

SEQ ID NO: 258994 - DNA, 799 bp, Unknown
  Bacterial polypeptide expressing nucleotide sequence isolated from the Sargasso Sea
aaagaagttggaactacaaacagaacacatatagaagattatgaaaatgctatttctgataaaactaaattgatactttgggtccacacaagcaactatgttgtaaagggtttcactaaagaagtccctttaaaaacattagttgatttaggaaacaaacacaaaataccggttcttgccgatttaggaagtggatcatttgttgacctcagtcaatcatatggttttactgaaaatccagtaaaatcttttgttaagcaaaacccagacataataacattttcaggagataagcttctaggtggtccgcaatcaggtttggtgatcgggaaaaaagaattaattgattctttgtctaaaaattctctttatcgcgctcttaggtgtgataaaatcacaataagcctaatggacgaaataatacgttcatatagatcaaaatcatttagctctgataatttttccttaaaaatgctcacttcgtcgagaaaatcattactttatagagcaaaaaaaatatattctggtctcagtccccgtacaattagaaagttgggaatttcaatcgaggaaagctttgtcgaagcagggagcggctctttgcccgaaaaaaaaatacccagcatagcacttaagtttaaaccggaaacggaaaatttaactgatttatcaaaaaaatttagatgcggccaaatacccgttgtaggatatatttcagcaggtaacttttacatagatttgaaagctgttctaccaaatcaattaaaaaaaataataatagcaatttcagaaatataat

SEQ ID NO: 258995 - DNA, 802 bp, Unknown
  Bacterial polypeptide expressing nucleotide sequence isolated from the Sargasso Sea
ttgattgaagttggtacaactaatcgaactcatatttatgattatgaaaatgcaataaactccaaaacaaaattacttttacaagtccacacaagcaattatgttgtaaaaggctatacaaaatcagttgaattgtcagacatggtagaattaggagaaaaatatcaaatccctgtaatgtcggattggggcagtggaactcttatagatatgaataattattttagatcaaatgaaatacctatcaaaaagataatgaaaacgagacctagcctcattacgttttcaggagataaattaataggaggtccacaatcaggtcttattgtcggtcaaagaaagtatattgaaatgttaaagaagaatactctatatcggacattgaggtgtaataaaataacaattgctctcttagaagaaatattaagatcatttaaaatagattctttcaaaaaatacaatctatcacttgagcttttaacaagttcgcaaaaagatttaaaaagcaaaggattattgatgcttgattcattgaaaaaacagcagattaaaaaattaaatataaagttaaaggattctgaagtagaggctggaagtggctcacttccagagaaaaaaattaaaagtgtggcgtttacgtttaaatctcaaaaatataaagcagaagaactagcttattttttcagaaatgcagactatcccgttgtaggttatattttaaatgatacttttcatattgatttaaaagctattattccaaatcaatttcaaaaattggttgaaactataaacaaattatgaa

SEQ ID NO: 258996 - DNA, 778 bp, Unknown
  Bacterial polypeptide expressing nucleotide sequence isolated from the Sargasso Sea
tatggataattatcctccttctgtaaatgaattagtggaagcccattccaactcagggatacctcggcctcttcttgtagaggaagtaagaagagcaatcgatgaagggaaatgggaaagtttagatgaaagggttgaaactctcagaaaattggcccttcaggaagtcattaatgcaactggtgtgcttttgcatacaaatcttggtcgtgcgtcctggccaacaactttctctggaaatccagtaaatcttgaacttgatttaagctcaggttctagagggtctcgacaagggtatttaggtcacttatttgcaaacttatgcgagactgaggcagcgatggttgtaaataactgttcatcagcggtgcttcttatcctttctgctttagcaaatgaaaagggtgtcgcaatttccagaggagaaatggtagaaattggtggaggttttagagttccagatgttcttgaattatctggtgcgtatctggttgaagtggggacaacgaataagacacgacgggaagattatgaaagatctattaacgctcaccgtgatgtttcaatgattatgaaaatccatcaatcaaactacaaaattgttggttttacagaatctgctgagatcagagaattgactgacctcggtgttcctctcgtagcagatataggatcgggattattagatgagaattgcttttggcttgaaagtggccctccccaattggcttattggagaacccaggtgctcgccaaacgctcgctgaaggagctgaca

SEQ ID NO: 258997 - DNA, 571 bp, Unknown
  Bacterial polypeptide expressing nucleotide sequence isolated from the Sargasso Sea
aatgcaattaagaaatatacctagtgtggaatctgtaataaaaactccagagttagatgcattgtctttagaatacccgagagaatggattatagatgtcatcagagagaaaatatccaataatcgtgaagatgtgcttgtaggcaaagatgttaaagatgctcaggctatttcgcgtgaagtggaaaaacatatacaaaaattaatagagtcaaaacctaaagaggtgataaatgcgacgggcgtaattattcacaccaatttaggaagggcacctttaagctcggcaagtgtcaaagcagctgttaactgcgcggctggatatagtgatttggaattagatctggagactgggaagagaggagggagacttggtactattaagtctctactgactcaattaacgggtgcagaagatgctttagtagttaataacaatgctgctgcattgcttctggcgttgtcagcactatgtattgggaaagaagtcattgtcccacgtagtgaagctattgaaattggaggaggtttccgtattccagacgtactagttcagagtggggcgaaatta

SEQ ID NO: 258998 - DNA, 373 bp, Unknown
  Bacterial polypeptide expressing nucleotide sequence isolated from the Sargasso Sea
aatgacaacaatcaatacaccaaaaaaaattccatctgtgaatattctaatgaatactccatctgtacagaaacttgttagcatgcacggtgtggttctagtcacgcgatgtgtgcaaagagtgttgataaatatacgtcagagtatattggccggcggatctacgaatatggatgcgctggtcgaattagtgttagcagagacagaccgcattttagctccatcgatccaaccagtttataatctgactggtacagtactgcataccaacctcggccgcgcccttttgcctgagtctgcaatacgggcaatggttaatgttgcccaacgtgcgagcaatgtagaatttgatttaaaaactggcaaacgtggg

SEQ ID NO: 258999 - DNA, 841 bp, Unknown
  Bacterial polypeptide expressing nucleotide sequence isolated from the Sargasso Sea
gctggtcgaggaagttaaatccaatcttcctagagaaataatagtttcaatagctcaaagttgtcttaacgaaaaaaaggacagtcagacaactattaagaaatttgaaaacgaaatatataaatatacattaaaagttcaaaaaaaagttatcaactgcactgggacattgttacatacgaaccttggaagagcacaaactgatattgactttaatggagaaagcacgaatgtggaatacgatattttgaataacagaagaggtgtgagaaatgaatttttaaatgagtctatgaacttgctcctaggttctgaagatgtttgctttgttaacaataatgcatcatcgctctatataacactaaagacattaaaaaatgtttatggtaaaaaatcactaataatttctagaggagaaataattgaaatcggtggatcttacagacttccagagataatccaagaaacaggcttaaaaatggtcgaggtcggaacaacaaataaaacaaaaataactgactacaagaaagctctaaaagataataaagattctttaattttaaaagtccatagatcaaatttttcaattgagggctttgtagaggaagtcaatttgaaggatttaaaatctttgaccgaaaaagaaaatagtattttaattcatgatcttggaagtgggttagttgcaagtagaaaatttctagaaaaagaaaatattgacatttttgatgacgagccaacagtgcaggaatcattgatacaaggtgtagatttagtcatgttttcaggcgataaactgtttggatctttacagtctggagtaatagctggagataaaaaa

SEQ ID NO: 259000 - DNA, 814 bp, Unknown
  Bacterial polypeptide expressing nucleotide sequence isolated from the Sargasso Sea
tatgactaaaaatttcagaaatataccaagtgttaacagtgtattagaatcagaaaagattcaatcattattaaaaatgtatagtactgaacttgtaactgaattgatcagaaaacatcttaatcagatcaggaaagatatcagtgaaaaagattctaaagtcaatgccgaagaaataattgaatttatttctaaaacaataaatgaacgttgggatgaatggcctaaaatcatattaaacgggacaggggtaatacttcacactaacataggaagatctccattaagtcataatgccattcaagctggcatcagagcagcaaatgggtatacaaacttagaaatcgatttatctacagggaaaagagggtctcgccaatcaaaagttcagaatttattatgtgatcttacaggggctgaatctgcaatcatagtaaataacaatgcaactgctgtaactttaggccttgcggcaatatcaaaaggtaaagaaataatcatatctcgttcagaatcagtagaaataggtggtggatttcgaataccggatgttttggaacaaagtggatctaccctaaaagaagttggaacaactaacagaacatatgcacaagattttaaaaatgccatttctcccaacactggtgccatcatgtcaatacatgcaagtaattttaaaattattggatttacatcaacaccatctaccaaagaactttcggaaataagccaaaatcacaacatcccattacttcatgacgttgggagtggttgtttgttagattctagtcaatttggattaacaaaagagcca

SEQ ID NO: 259001 - DNA, 913 bp, Unknown
  Bacterial polypeptide expressing nucleotide sequence isolated from the Sargasso Sea
agtaataataagtcgtggtgaacttatagaaataggtggttcttttagattgcctgatataatgaaaagtgcaaattgcattctaaaagaaataggaacaaccaacaggacaaattttagtgattatgaagaggcagttaaacccaagacggggttaatctttaaggcttattggagtaattttacaataaatgggtacaccaaaagtgttgatgaaaaaaatttagtaagtttgagtaaaaaaactaacttaccattagtcatagatttaggaagtggaacagctattgatttaagaaaaattggtttgaaatttgagcctacaccatatgaaaaacttaagctaggtgttgacttggtaacatttagtggcgacaaactaatgggtgggccccaatgtggaattattgctgggcgagctgatcttataaacaaaataaataaaaatgctatgaagcgagcaatgcgttgtgataaattcactattgcagcattatattcaattctgaagatttaccaagatccgaaaaaagcaattaaagaaattccaactcttagatttcttgatcgaaccaaagtggatattaaagaacaagctgaaagaatttattcaaaaattgagccgttctttcgacataaaatgaaagttaaaattattaattgctttagtcaaataggtagtggtgctctacctaatttatcaatacctagtgttggaatttgtttccaacaaaacactaagaaaaataatggattatttccaatgaaatttgctaaaaagcttcgaaaacttccaactccagttattggaagaattaatgatggagctttcgttttagatcttagatgtttggaaaaagatattgatcttatcaaaccgttgcagtctttaaaactggatgaggatttttga

SEQ ID NO: 259002 - DNA, 1357 bp, Unknown
  Bacterial polypeptide expressing nucleotide sequence isolated from the Sargasso Sea
atgaatctaaaaaaaatacctagtgtaaatgatctgcttatatcaaagaaattttcaaaaaaaaatataagaagagatctactaaaaaatataattaataaagagctagatttagtaagaaaaattctaaaaaatgatgatttagcaagtatttctaaagctgaaattgaatcaaatatattattaagaattgactcactcagtaattcgtatttaagaaaaatcatcaatggttccggtgtgattttacatacaaatttaggaagagccccattgtctaaaggtatttcaaagaatatttatgaagtaataagtaattatagcgatctagagatgaatataacaaccaaaactagaaactcaagattagacaatatatcaaagttactaaacttaattactggagctgaaaaagctgctgtatttaataataatgctttggcattaattgttactttagcaagcttaggtaagggaaaagaaatattagtttctaggtcagaatctattgaaattggaggtggatttaggataccagaaataattaaattatccggtttaaaaatagtagatataggaaccactaataaaacttatgttaaggattatgaagaaaatataacaaaaaatacagttggttttttaaaagttcataaatcaaactataaaatcaaaggttttactaacgaaatttctataaaagaattaagtgaactttctaaagaaaaaaatatacccctaattcatgatttaggttcaggaacattagtaaataccgagaaattcgacctcccctatgaacctactgttgttgatagtgtgaacaatggtgctgatattacattattttcttcagataaattacttggaggtcctcagtcaggaatagtgttgggtaagaaaaaattaattgaaaaaatcaattcatctcctttatcaagagctgcaagaattgataaattaaatttgagtatcttaaacgatactcttataaattatctaaagaatgattatcaagaaactatacctgtttggaatttaattaatttatctaaagattcattgaaaaaaagagctaatgatattattcataaaatccctaaaaacacatttacgatcagggaagatattaaatctacaattggaggggggactttcccagatacatttatagatagtgtcggtataagtataggcaaaacacataaaatttcagatttagaaaactatttactaaaccttagcaatccaatagtagggagaattgaaaatgatgagtttttgctagatttaaggactatttttgaagaatatgataattacttaattagcaacataaacaaatactttaagtaaa

SEQ ID NO: 259003 - DNA, 722 bp, Unknown
  Bacterial polypeptide expressing nucleotide sequence isolated from the Sargasso Sea
aattaaaggggttacaagcgctatctcggaaacagagcttagtgccttggcacgagaaaataaccttcagtttgtctctgatctcgggagcggaacattaatcgatatcgcaaaatatggtctcccgaaagagcctacggtttcggatgccttaaaggacggtgctgatgttgttacttttagtggagataaattactgggtggaccccaagcaggtttgattgttggcaaaaagagtctcattcaaaaaataaaacagaatcctctcaagcgggcacttcgggttgataaagtgacgattgctgcacttgcagaagttttaaagctatatactgatcccgatagacttccggaaagacttcccttactgaaaagcctagtcagagacccaaaagagattcaagaattagcagagaagcttttacctttttttgtcagagcgttagcttcagttgctgaagttacaattaaaccttgtaaaagtcagattgggagtggagcgcttccattggatttgttagaaagtagcagtttggtgttgaaacctttggctagtgaaggcaagacagacgttaaacttcagagcctcgctaaaaagtttcgaggattatcgactcctgtcgttgggcgtttgcatgatggtaagttgatatttgacctaagatgcttggaaaatgaatctgaattacttgatttacttaattcaacttcgtggagttagt

SEQ ID NO: 259004 - DNA, 873 bp, Unknown
  Bacterial polypeptide expressing nucleotide sequence isolated from the Sargasso Sea
tctcggacgtgctccccttccaaggatctttttgaaaaccttcttccacgtttatgttcgtattctaacctcgaatttgaactggaaaccggaaaacgcggatcacgggattcggtcctcagaaatctgttgaggaatctctcaggagcggaagaagcaatggttgtcaataacaacgcttctgccgttttcctaatgctccgagcccttactgaaggcaaagaggtgattgtttcaagaggagaattggtagaaattggaggctctttccgtatcccggacatcatgcgcgaatccggagcaatgctggttgaagtgggcaccaccaaccggactcgattttcggattatgagcaggccatttctgaaaatacagctgccattcttaaagttcatccgtccaattatatcattgaaggttttaccgaatcagttgagatccccaaacttgtggaacttgcaaaaaaacatgggctctattgttttcacgactggggaagcggcaccttttaccagtttgctcaaaaaggattaagaagttatcccactgcccaacaggaaacacagaaaggtatcgacattctctgtttcagcgctgacaaacttctgggctccgttcaagggggaatcattctaggccgtaaaaatccggtcgaaaagatgcgaaagcatcctctttatcgtgcactccgggctgataaggtaaccctggggctcttagagtccgtccttggagcttactttgaacctgagagtctgaaagaaaagattacaggaatcagattgcttgagagaagtaaggatgagattcgggatcaggtgaatcgaatgatggatgaaattcatcctgaatccaattcagaatggaaggtg

SEQ ID NO: 259005 - DNA, 616 bp, Unknown
  Bacterial polypeptide expressing nucleotide sequence isolated from the Sargasso Sea
tgagttagttgagattggtggatcatttcggctaccagacattatggctagggcaggtagtaaactggttgaagtaggtacaacgaatagaacgcatgcggaagattttgaaagggcaattagtaataaaactgcattattacttaaagttcataccagtaattttgagataaagggctttgttaatagcgtttcagaaaaaaaactatctgaaatcgcaattcggtatgatctcccttttattactgatttaggcagtgggacattaattgatatgtgtgcttataatttacctcacgagactacagtggtagaggcaataaaagctggagcagatttggttacgtttagcggtgataaactccttggtggaccccaagctggtataatagttggtcggcctgacttgataaataagcttaagctgaatgctataaatagagctgttcggcctgacaaaattactttagctgccctccaatccgtattacaactgtatatgaacccaagccgtctagaaacggaattacccctttttcgttggctcagccgtgacctattggatattaaacgcttggctaataaattaataaaaccgttacaaaagcattgcaag

SEQ ID NO: 259006 - DNA, 928 bp, Unknown
  Bacterial polypeptide expressing nucleotide sequence isolated from the Sargasso Sea
tttgaggaacctctcaggagcagaagaagcaatggttgtgattaacaacgcttctgccgttttcctaatgctcaaagcccttactgctggaaaagaggtcattgtttcaagaggagaattggtagaaattgggggttctttccgtattccggacatcatgcgcgagtctggagcaacgctggttgaagttggcaccaccaaccggactcgactttctgattatgagcaggccatttctgaaaatacagcagccattctaaaagttcatccatccaattatatcattgaaggttttaccgaatcagttgagatcccgaaacttgtggaacttgcaaaaaaacatggactctactgttttcacgactggggaagcggcaccttttaccagtttgctcaaaaaggattaagaagttatcccactgcccaacaggaaatacagaaaggtatcgacattctctgtttcagcgctgacaaacttcttggctccattcaggggggaatcattctaggtcgcaaaaatccggtcgagaagatgcgaaagcatcctctttatcgtgcactccgagctgataaggtcaccctggggctcttagagtcggtccttggagcttactttgaacctgagagtctgaaagaaaaggttacaggaatcaggttacttgagagaagtaaggatgagattcgggatcaggcgattcgaatgatggatgaaatttatactgaatccgatccggaatggaaggtgaaaattgaagaaaccgattccagaaccggaggaggtgctctcccggaactgcccctgccttcctgcgctttggtgattagtcacccagaattcaaggcacagcatatccaggattggctaagatcagagcccattccgatcattgtcagagttcaggaagaaagcgtatggctggatttccga

SEQ ID NO: 259007 - DNA, 855 bp, Unknown
  Bacterial polypeptide expressing nucleotide sequence isolated from the Sargasso Sea
attaacgaatataataaatgggacgggtattgtattacatactggttttgggagagcaccttttcaagcctctaccttagttaatcttgcaaaacgtatggaaggatatgtgaatctagaatttaatcttgaaaatggtaaaagaggtgataggcagaatcatgtaagggattatattaatgcgatatgtgaaagcgaatcttcattaattgtaaataataatgctgcagcggttatgttggcgataaatgaattagggaaaaatggtgaagtaatagtttctagagggcaattggtcgaaataggcggttcttttagaatccctgatataattaacaaaagtggttgcatattaaaagaagttggtacaacaaacagaactcatgagaatgattatgttagtgcaatttcaaataagactaaattaattttatgggttcatactagtaattatgttataaagggttttactcacgccgtttcattaaaaaaattagttacaataggtaaaaaatttaaaataccagttatggtagattggggaagtggctctttattagatatgagaaatttaaatgttgcaaatgaggtaaaaataagagaaataatgaaagttcagcctgatattttaaccttttcaggtgataagctaataggagggccacaatctggattgattattggaaagcaagaaataataacgtccctgcaaagtaatccaatatatcgtactataagatgtgataaaatcactataggattaatggaagaaactctaaggaattataaagctgaatcattttccaaagacaatttagcacttacactactcacaacttcgcgaaaaaaactatt

SEQ ID NO: 259008 - DNA, 627 bp, Unknown
  Bacterial polypeptide expressing nucleotide sequence isolated from the Sargasso Sea
gatgaaaacaaaagatcaacttttaaagcaatttaacttaaacgtcccctctattgacacaatttgtcgctggaaatctgtaactatcttttctgatgagtatgggaaacctctagttactgaaggtataaaagaaattattcaaggtttgcgagaagatgctaaacttgatccagaggcggctatcaaaagtcttaaagaggagtgtttaattgatctacttagaatttggctggaaagtctaactcagccttcgttaaaaccagtaattaacctaactggaaccgttcttcataccaatttgggtagagcctatttgccggaggtagcacttcaggctataaattctgtagcaaagggaccctccaacctggaatttgatctagagtctggtggcagaggcgaccgagatgctcacatggagagtatactttgtaaacttacgggcgcagaggcagccacagtagtaaataataacgcagcagctgtatttattgttgtaaatacccttgctaatagaaaagaagtaccagtatctaggggcgagttagttgagattgggggctcctttcgtctaccggatataattaaacgggctggtggcaaattggtggatataggtaccac

SEQ ID NO: 259009 - DNA, 508 bp, Unknown
  Bacterial polypeptide expressing nucleotide sequence isolated from the Sargasso Sea
atgacaaccgacatgcgttcactctacagccagcttcccgctatcgatcgtttattgcgcgatagcgccttcccagccttacgtgaatctcacggtcatacccgggtggttgacctgctgcgtcatatgcttgacgaagccagagatgcgattcgcgacacgcacgcgctcccggcatggtgtgaggactgggcgcaagaagccagcgcccggctggaacgagaatcgcaaagcgcgctgcgtccggtgattaacctgaccggaacggtgctgcataccaaccttgggcgagcgtcgcaggccgaagaagcgatcgaggcggtggtgcaagcaatgcgcacgccagtgacgctggaatacagcctggatgatgccggacgtggacatcgggatcgggcgctggcggatttactctgccgtctgacgggagcggaggacgcctgtatcgtcaataacaatgcggcagcggttttactgatgctggccgccacggccaacggcaaagagg

SEQ ID NO: 259010 - DNA, 804 bp, Unknown
  Bacterial polypeptide expressing nucleotide sequence isolated from the Sargasso Sea
atagagaaaatcatattgaaaaaaaattatgttcattgataggtgctgaagcagtaacaatagttaataacaatgctgcggcagtaatgttgatattaaatacacttgcaagacgaaaggaagtattaatcagccggggtgaacttatagaaattggtggatcctttagactaccagatatcatgaaaagctcggactgcatattacgggaaataggaacaactaatagaacaaattttagtgactatgaagatgcagttaacactaaaactggtttaatatttaaagcttattcgagtaattttacaataaatggttatacaaaaagtgtggatgaaaaagatttagttactttaagtcaaaaaacaaacctaccatttgttatagatttaggaagtggaagtattatagatttaagtaagatgggttttaaatttgagccaacgccatatgataaactgaggttaggtgttgatttagttacatttagcggcgataaattaatgggtggaccacaatgtggaattattgctggacgtttagatcttattaagaagataaacaaaaatgctatgaaacgagccatgcgttgtgacaaatacacaattgctgctttatattcactcctaaaaatttatcaaaatccaaaaaaagcaattgatgaaattcctactctaaaatttcttacccgaaaaaaagatgaaatcagagaacaagccgaaaggatatataacaaaatagaacctttattcagtgaacaaattaaagtaagaattattgattgttttagtcaaaatgggtagt

SEQ ID NO: 259011 - DNA, 877 bp, Unknown
  Bacterial polypeptide expressing nucleotide sequence isolated from the Sargasso Sea
caaggtgcgagcaatgtagagtttgatttaaaaacgggcaaacgtggtgatcgacataagcatgccgaaattttgatatgccaattgacaggagcggatgctgctctcgttgttaacaataacgctgctgctgttttgctgacgctaaactgcttagcccgtcgcaaagaagttcctgtttcacgaggcgagctgattgagattggtggatcgttccgaatgccagatatcatggcccgtgcaggttgtaagttagtcgaggttggtacaaccaatcgtacaaacgaagcagatttcgagtcagtaattagttctaagacagcgttaataatgaaggtgcatactagtaacttcgaaattaaagggttcaccgaaagtgttccagagagagagctttctaggattgcgcataaacacgacttgccctttattatagatttgggtagtggtacccttgtcgacctggagtcatataaccttcctcatgaaacaactgtgtctgatgcattgaaatctggcgctgatttggtgacctttagtggtgacaagcttcttggtggaccacagtcagggataattgctggtcgcagtgatttgataggaaaaatcaagcgaagcccgatgactcgggctatgcggcctgacaaagttaccttggctgctctgcaggctgttctttgtctgtatactgacactacacgtttggttaaagagttaccgactttgcgcctgcttacccgtgaccctgttgaaattgaaaagctagcgcaccgtctggcgaaggcacttcaggagtgtttagagctatgtgaagttacagttgagtcaacatatagtcaggtgggcagcggagcattgccggtcgataggctgcaaa

SEQ ID NO: 259012 - DNA, 826 bp, Unknown
  Bacterial polypeptide expressing nucleotide sequence isolated from the Sargasso Sea
catgggtgaatcattatctttcaaaaatatcccctctatcactgagtgtgacaaattccttataaatcaaaaactacctcatggtaagcaggtaagggaatatgtaatttcagttcttgataaagtgcgacaagaaatctcgaaagatagtagtgggacattttattctgataattcagaaataatgaaacgtgtagcagatgaagtacgaatccaatctgaaagtatcaaaagggttataaatgccacaggcattgttattcatactaatttaggcagagcacctctttcaaaagatttgattttgaagattttgccaaaaatatgttcgtattcaactttggaactcgacttgttaacaggcaaaagaggtatgcgtgattctagaatcagatctatgctacgcactctttctggagccgaagatgcaatggtcgttaataataacgctgctgcaacttatctaatgcttaagggcttaacaaaaagtcagcacgaaggatttttgcctgaagtaattgtttctagaggcgaattggtagaaataggtggatcatttcgagtccctgacatcatgagtgaagcaggggtaaaaatggtagaagttggtactactaaccgctgccgaatttcagattatgaaaaggccttcactaaaaacactgctgcaattttaaaagtacatccttcaaactataagatacttggttttacagaatcagttagtgtcaaaaatttgtccaaacttgcacattccagaggtattccatgcttctacgattggggaagtggaagtttttatcaatttaagaatagtagttgcgcg

SEQ ID NO: 259013 - DNA, 831 bp, Unknown
  Bacterial polypeptide expressing nucleotide sequence isolated from the Sargasso Sea
aaaaaagtagcagataaattagatgggtacgtaaaccttgaatttgatgttatcaataatattagaggggatagacagtcacatattgatcaacatatagcatcaatttgtggttctgagaggtcattaattgttaataataatgctgctgcggttctcctttccattaacacattagcctcaaattctgaagtgatttgttcaagaggacagattgttgaaataggtggttcttttcgcatttcagatatcattgaaaaaagcggtgcacttttaaaagaagttggctcaacaaacagaactcatttaaaagactatgaaaatgcaatttcaaaaaatacaaaattaatattatgggtccatacgagtaactacgttgttaaaggctacgccaaagaagtgtctttagaggaactagtaacacttgggaaaaaatatgatatccccgttatggctgattgggggagtggtacttttctatcattggaagactatggcgtaccatctgatttaccgattaggaatatagttgagaaaggtccagacctagtttccttttcaggggacaagatgctaggcgggccacaatccggtgtgatactaacttcgaaaaaaatattgaaaaaaattaaaacaaactctatttacaggacagtacgttgtgacaaaattacaattgctttattagaacaagtcattcgtacttatagaattcatggtttctcaaattttaatctagcacttagtctattgaccagatcgagagataaattgagagctctagcaaataatataataagagacctacctaaaaaaaatataaatcaatta

SEQ ID NO: 259014 - DNA, 869 bp, Unknown
  Bacterial polypeptide expressing nucleotide sequence isolated from the Sargasso Sea
aatgtacgagctgcgtgatctaccgggtgtggacgcactaatgaaggatgaaagcctggaagtcgccttacgcagatttggaccggctgccgtcaaacaagctatacgcgatatccaaagagaaatacgcaactcaaaaaaagtgcccgaatggtcaattgatccatcaggctatctatctccaatatttcaagcgttagattcgcaaacctacagaacaattttcaatctgaccggaactataattcatagcaatcttggcagagcactaattgacccctcaataatcgaagaaatcacaccccttctctctcgacctattaaccttgagtacaaccttgatacaggctctcgaggacaaagagatgcttttgttgaagctcaattatcaagactaacagggtgtgaagcggccgcgatagttaacaacaacgctgccgcattgatgctagttttaaacacttttgccctcggaaaatttgttcccgtctctcgaggcgaactcgttgagattggcgggagttttagactcccggaactaatgacaaaatccggctccaaccttattgaagtcgggacaactaacaaaactcatatagaggattttgaaagcgtggtggaagagtctgccatgctcctgaaagtacacccgagtaattatcatatctccggtttttcagaagaagtagaagcaaaagaactcgccaaacttgcgaactcgcagggtatccccagttgcgtggacttaggcagtggagcactaatcgatctatcgaaatggtcgctccccagcgagccaacaccgcaatccgtacttagccaaggcatcgatcttgtaacatttagcggcgacaaacttttgggtgctg

SEQ ID NO: 259015 - DNA, 583 bp, Unknown
  Bacterial polypeptide expressing nucleotide sequence isolated from the Sargasso Sea
atgacccaagtacccgatacaccccaagccctgtaccgcgcgctgccgtcgatggacagtctgctcgccgatgcggcgttagcccctttgctgcaacgctatggtaaagcagcagtaaaagcggtgctggatagccagttacgcacggcgcgcgagctgattgcccaggagcgacgtttacccgcttggtgtgctaatccggcgttattgaacggatatttggttgatcaattgtctaaggactatagccatagtctaaaacccgtgtggaacctcaccggaaccatcctgcacaccaatcttggccgtgcccagcagtctgaggcggccattcgggcggtgacctctgtgatgcgttatcccacgccgctagagtttgaattagccgccggtgagcgcggccatagagataatgccattagtggattaatccagcgcctaacaggcgctgaagcctgctgcgtggtgaataacaacgccgccgctgtgctgctgatgttgtcggcagtagccgcgggcaaagaagtgatagtctcccgcggtgagctggtggaaattggcggtgcctttcgcattccagaca

SEQ ID NO: 259016 - DNA, 853 bp, Unknown
  Bacterial polypeptide expressing nucleotide sequence isolated from the Sargasso Sea
tttgcgcaattatgcggaactgaatctgcaatggtagttaacaactgctctttagcggtcttactggttttatcggctctagcttctgagcgaggggttgcgatttctcgcggtgagcttgttgaaattggcggttcgttcagagttccggaaattctcgaactatcaggtgcataccttgtagaagtggggacaacaaataaaacacgcttagctgattatcaacgagctattgacgctcatcgcaatgtggctatggctctgaaggtccatcaatcaaattataaaattattggctttacagaagaaacggcagtagaagacctagcttcactagatattccccttgtcgtcgatatcggatccggtttattagactcgaattgcccgtggctgcgttcagatccacctacgtggcttgttggagagccggcagctaaacagacgcttcagagcggagctgatttggttactttttcatgtgacaaacttcttggcgggccgcaggcaggaattattgcaggtaaatcagatttgattaataaatgtcttagccacccttttgctcgtgtacttcgaccaggaagccacacgcttatttcgcttcaagatttagcccttcgctatcttcatcgtgatggcgatcaaatcccattttggaggatggcgtcagccaacctagaagaattaggtgcacgagcagaaagtatgaatgttggtgaggttgttagcgtgaattccattcctggaggaggaactcttccttcagttgttatcccttctattggattgaagttatcgggagatcgaagctgggaacttcgccgtgggtttgatagagggctgcctgtaa

SEQ ID NO: 259017 - DNA, 1206 bp, Unknown
  Bacterial polypeptide expressing nucleotide sequence isolated from the Sargasso Sea
aatagagcaataaataaatatcgaaataaaatcaaaaataatcagttatcaatgagtccctctgaattactttctaatatcactgaaatggttataaaagattcatctcaaagtcttgttaatattattaatggaacgggtatcgttttacacactgggtttggaagagctccatttgaatccaaactcctaaaaagtattgcaaagcgtttagagggttatgttaatctagaatttgatctggattctgggaaacgtggaaatagacaagtgcacataagacagcatttaagttcaatttgtggaagtgaatcatcgctatgcgtaaacaacaatgctgcttcagtaatgctatcaattaatgaaatggcttatggaggagaggtactagtatctagagggcaattagttgaaataggaggttcatttagaattccagatattatccaaaaaagtggtgcgaatctaaaggaggtggggacaacgaatagaacacatttcagtgattatgaaaaagcaatttcaaataaaaccaaactgattttatgggttcataccagcaactatgttgtaaaaggattcactcgttctgtcccattgtctgatctggttcaacttgggaaaagtaaaaatatacctgtaatggtagactggggaagtggagctatccttgatatgaaatcacttggtttggccaatgaaattccgattagaatgataatgagggacaaaccagatatcctaacattttctggggataaattaattggcgggcctcagtctggtattattattggaaaagaaaagttgataaatgcgatgcaaaaaaactcattgtatagagttcttagatgtgacaaaataactataggattattagaagaaattttaagatcataccgctctaattattttacaaaaagtaatttgtccctcagaatgctcacaacaaagcgaagtacgctcattaaccgtggtaaaaaagttattaatggattaacgataaaaaaaattaaggactttagcatatcacttgaaaattcaaaagtagaagcagggagtggttctttgcccgaaaatctaattgaaagtatggcattatcctttagtcataaaaatattccaccccatgagcttgctagaaaatttagaacaggcagaattcctgtagtgggctatattaaatcaaataagttttttattgat

SEQ ID NO: 259018 - DNA, 1297 bp, Unknown
  Bacterial polypeptide expressing nucleotide sequence isolated from the Sargasso Sea
atggaaaatatatcggtaaacaatttagttgaagaatttgaatcaagccttccaagagaaatctctatttcaatagcaaaaaatattttaaattcgaaaataagtaaagaaaatgcaataagtgaatataagaaaaatattggattactagaaaagaaaatacagagacaagttattaattgcacagggactttacttcatacaaacctaggaagagcccaaataaaccctcggtttacaggaggtgcttcaaatatcgaatatgacttagatcaacataaaagaggcgaaagaaacgaatatttaacttcttcaatgaatttattacttaactctgaaaatgtttgttttgttaacaataatgcagcagctttatttatcactttaagcacagtaaagaattcttctaacataaaaaatgtaattatctccagaggagaaattattgaaattggtggttcgtataggctccctgaaataatagaatctagcggattaaagcttcaagaagttggtacaactaacaaaacggacattaaagattatgagaaagctttgaagtctaacccggactccattctgcttaaagtacacaggtctaatttttcaattaaaggttttactaaagaggtgtctattaaagagcttaaaactctatctacaaaatataatgcacatctttttcacgaccttggaagtggtcttgtcattgatagaaattttttagaggcaaaagaaatagatatctttaacagcgaaccgactgttcaggagtcactggaagacggttcagatttggttatgttttcaggagataaattatttggctctgtgcagtcaggaataattgctggaaaagaaaacttagtcaaggagattaaaaatgatcctttatttagaacatataggtgttcacctttaattctttttgaattacaaaatacagttaataaatatatagataaaaatgaaatgtctatacctatttggtcttctttgttaatgaaatatgaagaacttctagcaagagtggacgatatttcaaaaaaaatatcaattgatcataaaatttttgatagtgagtctttgattggtgggggcacaatgcctgataaaaaacttttgactcctgcaattggtattccaagtaaaaatattgatgaagatttaagaatactatcaaatcaagaaatacctttaataccaaggatttcagaagataaaataataatagacgtaagaagctgtccagtagaagatgacgaaaaaataatagaattgctaaataaactatgac

SEQ ID NO: 259019 - DNA, 474 bp, Unknown
  Bacterial polypeptide expressing nucleotide sequence isolated from the Sargasso Sea
attgctccgagcccttactgcgggaaaagaggtgattgtttcaagaggtgaattggtagaaattgggggttctttccgtatcccggacatcatgcgcgagtccggagcaacgctgattgaagtgggcaccaccaaccggactcgactttctgattatgagcaggccatttctgaaaatacagcagccattcttaaagttcatccatccaattatatcattgaaggttttaccgaatcagttgagatcccgaaacttgtggaacttgcaaaaaaacatgggctctactgttttcacgactggggaagcggtaccttttaccagtttgctcaaaaaggattaagaaattatcccactgcccaacaggaaatacagaaaggtatcgatattctctgtttcagcgctgacaaacttctgggctccgttcagggaggaatcattctaggtcgaaaaaaaccggtcgagaagatgcgaaa

SEQ ID NO: 259020 - DNA, 963 bp, Unknown
  Bacterial polypeptide expressing nucleotide sequence isolated from the Sargasso Sea
gtagtgaatcttcactggttgtaaataacaatgccgcagccgtaatgcttgcaataaatgaattatcgcaaggaggagaagtagtcgtatcaaggggacaactagtagagattggtgggtcattcagaatccctgatataatagaaaaaagtggtgcaaggcttgtagaagtaggaacaactaatcgtacacatatcaaagattatgaaaatgcaattaccgataagaccaaacttattttatgggttcatacgagtaattatgtggtcaaaggctttacaaaacaggtgccattgaaaaagttaatagcaatagggaaaacatataagctacctgtaatggttgattggggtagtggtgcatttttagatatgaggtctcttgatcttgcagatgagaccccagttaacattcttatgaaatacggaccagatattttaaccttctcaggagataaattaataggaggaccacagtctggaataatcataggtaaaaataaatttatcaacttattacaaaaaaataccctctaccgtgtagtccgcagtgataaaatcactattggacttttagaacacacattgaggtcttataagtcaaattcctttacaaaagataatttttcactgaaaatgctcacgacttcttccaatacccttaaaaaccgtgggcaaaagattattaaatatcaatctaagactaaaattaaggctttggggattaagcttgaaccttcaaaagtagaggctggtagtggctctttacctgaaaataaaatcgatagcatggctctttcatttagaccacggtcaattaaggtcaatgagctgtcaaagatgttccgttgtggttctattccggtggtgggttatacttcagcaaatacgtattatattgaccttaaagcagttttgcctaaccagattactacacttgcaaaagccataaaagagatttgaa

SEQ ID NO: 259021 - DNA, 1363 bp, Unknown
  Bacterial polypeptide expressing nucleotide sequence isolated from the Sargasso Sea
attgccacaagtggaacagctgctgcagcaaccttttctcgccgggtttatcgaggcgctgagccgcccgctggtgacccaggcggtgcgcgacaccctgagtgaactgcgccagagtgagacgtttcgccagcacggcgtcaccgctgaacgccttgaagcgatgattgccaagcgctgccagcagcagttgcgccagcgtcagacccgggtgatcaacgccaccggcaccctggtgcacaccaatctggggcgctcgccgctaagtagtgatctgtgggacgaggtgcgcgacctcaacaccggttacaacaatctggagctggatctcgccaccggcaagcgcggcgggcgcaaggggctgatcgcccccctgctccgttgcctcacccaggccgaggattcgctggtggtcaacaacaacgccgcctccctcttcctgctgctgcaagaggtggccaaggggcgcgaggtgatcgtctcgcgcggcgaacagatccagattggcggcggctttcgcattcccgacattctggccctctccggcgccaagctggtggaggtgggcaccaccaatatcactaccgccaaggattacctggatgccatcaccgatcagaccgcgctggtgctgatggtgcacagatccaatttcgccattcgcggctttaccgaatcccccgacatcggcgagctggcccgcgccctgcccgagcacgtggtgttggcggtggatcagggctccggcttgactaccgaggagtttgcaccggatgaaacctcggtgcgccagtacatcaaggcgggcgcggacctggtctgctactccggcgacaagctcttggggggcccgcaagcgggcatcatcagtggccgcagtgaccttatcaagcggctggaaaaacaccccatgatgcgcaccttccgctcaagccgcatcattcactccctgctcgaacgcctgctcatccacaagctcaacaaatctcccgtcggtgagggcattgcccagcgagtcttaagcaacccggccgccatgcaggcgagagcctcccagctgatggcagccctgcccggctgctttgtgccggtccccgcccagctggtggtgggcggcggcaccttgccggacgagttctacccggcccctgcgctcgaatgcacagatccgcgcccggcccagcaactgctcgacgccctgcgggaattgccggtgccggtcatcgccaccgtgcgccagcagaaggtgctgctcaatatggccaccctgctgccagcggagatggatctgctgatcgcacaactcaaggaattactgctccccgccccgttaaatgcaacaaatgcgaccgaggagccctga

SEQ ID NO: 259022 - DNA, 555 bp, Unknown
  Bacterial polypeptide expressing nucleotide sequence isolated from the Sargasso Sea
aatggaacgagttgcagatgaagtccgtattcggtctgatagtgtcaaaagtgttataaatgcgacaggcattgttgttcatactaatttgggcagagcccctctttcaaaagatttgattatgaaggctcttccaaaactatgttcttattcaactttggaattcgacctagtaacagggaaaaggggaaacagagattccaaaataagaactatgctgcgtgttctctcaggtgcagaggatgcaatggcagtcaacaataacgctgctgcagtttatcttatgctcaagggattaacaataaatcagcaggaaggaattttgcctgaagtaattgtatcaaggggtgaattggtagaaataggcggatcatttcgagtacctgatataatgagggaagcaggggttaaaatgatcgaagtggggactactaaccgctgccatctttcagattatgaaaaggcaataaccaaaaatactgcagcaattttaaaagtacatccgtcaaataataaaattcttggttttactgaatctgtcagcgttgaaaattt

SEQ ID NO: 259023 - DNA, 1369 bp, Unknown
  Bacterial polypeptide expressing nucleotide sequence isolated from the Sargasso Sea
atgaatgaaacaacgctaaaagatttaccatcagtagataaagtattactttatataaaagataatatatatttgcatgataaatatataaaatatttaattaatagagaattagacttactgcgggtggatatcaaaaaaggggaaatatctaagacctccaaagaactttttgaatatgtagtcaaccaggtccaccttaaatcagcccctagtttaacgaatgtgattaatggtacaggtatagtcctacatacaggatttggaagagcgcctttctatgctcgcacattaaagaaaatcgcagatagaatggaagggtatgtaaatttagaattcgatctagtttctggaaagcgaggtgatagacaagcacatattagggagcatttaagtgctatttgcggaagtgaatctgcattagttgtgaataataatgcagctgctgtaatgctcgcaataaatggattagcacaagggggagatgtagttgtttctagagggcaattagtagaaataggtggttcatttagaatccccgatattattgaaaaaagcggtgcaaatcttgtggaagttggcactacgaatcgtactcatattcaggattatgagaaagcaattactaaaaagacaaaactaattttatgggttcatactagtaattatgttgtgaaaggttttaccaaaaatgtgccattaaatgaattggtcttaattggtaagcgatttaagattccagtcatggttgactggggcagtggtgctttattggatatgaggtctcttaaacttgcaaatgagattccggtgaataaaattatgaatagtgaaccagatatattaaccttttcaggggataaattaattggtggaccgcaagctggtgttattataggtaaaaacaaatatataaaattgttgcaaaaaaatactctctaccgcgttctgcgtagcgataaaatatctataggacttttagaacatacattaaggtcttataggtcaaattcatttacaaaagataatttttcacttaaaatgcttaccacatctcagaaaactttaaagaatcgtggtaaaaagatcatcgaatatcaatccaagaagaaaataaaacagttaggcattaatcttgagccttcaaatgtagaggctggaagcggttctttaccagatgataaaatagagagtatggctcttgcatttagacctcgggtaatgaaggtttatgacttggcaaaattattaaggtgtggctcaattccggttataggctatacgtcaagtaagacctattatattgatctaaaagcagtcttgcctaatcagattattaaacttgcaaaggctataaaagagatttgaa

SEQ ID NO: 259024 - DNA, 1372 bp, Unknown
  Bacterial polypeptide expressing nucleotide sequence isolated from the Sargasso Sea
tatgataaataagcaattaaaagaaattccttcaatatctcaagtattacttgagatagatcaaagtatatctttacataatagatatataaaaaatataattaactcagaaattaagttctacagaaaattagcaaaggataataagctaaattataatcgaagagatatcattaataaaataatactagaaattgaaagattagatatatcttcaattaaaaatataattaatggtacaggtatagtgttgcatactggtttagggcgtgctccaatatccaaaaaaataatagaacgggtctcagctaaattagagggctatattaatttagaatttgatttaataagtggaaaacgtggtcatagacaagatcatttatctagaatgtctaatgcaatttttggatcacaggctagtctattagtaaataataatgcttctgctgttctattagctcttaattccttggcagaaggaaaagatgtaattgtttcaagagggcaagaagttgagattggaggttcatttcgcataccagatataattcaaaaaagtcattctaaccttatagaagttggtactacaaacaggacgcatttatttgattatgaaaaagcaatatctgcatcaacgggggctattttatgggctcatacaagtaattatgtcgttaaaggttttacaaaacaagtgccattgaaagatctagctttattatcaaagaaaaaaagaattcctctagtagttgatttagggtctggaactattatttctacagatgatcataatttgccttctgagaaaaatattcaagaaatatcaaaaacaggtgctgatatcgtaactttttctggggataaattaattggaggtcctcaatgtggttttattattggtaagaaaaattatattaaaaagatttctgagaacccattacatagaacttatagatgtgacaaatggacaatagcacttatggaagaaacgctaaaaacttttcactcagaccaaaaattcgactcaagaaatctttctttaaaattacttacctcatcgagaaaagaattaatgaatagaggaaaaagaattattaataaaattcctaaaaacaagttgaaatctctagggattacactagaggaatctttagttgaggcagggagcggttcattaccattaaaatcaatccctagcgcagccctgaaatttattcctaaggaaatgtctgtatcatcattagcaaaagcttttcgtttaggtgcacaacctgtagttggatatacaaagagaaatatttattatattgatttaaaagcagtattacccagtcaaatagctaatttgattgaatcaattaagcaggtataa

SEQ ID NO: 259025 - DNA, 1363 bp, Unknown
  Bacterial polypeptide expressing nucleotide sequence isolated from the Sargasso Sea
atgcaattaagaaatatacctagtgtggaatctgtaataaaaactccagagttagatgcattgtctttagaatacccgagagaatggattatagatgtcatcagagagaaaatatccaataatcgtgaagatgtgcttgtaggcaaagatgttaaagatgctcaggctatttcgcgtgaagtggaaaaacatatacaaaaattaatagagtcaaaacctaaagaggtgataaatgcgacgggcgtaattattcacaccaatttaggaagggcacctttaagctcggcaagtgtcaaagcagctgttaactgcgcggctggatatagtgatttggaattagatctggagactgggaagagaggagggagacttggtactattaagtctctgctgactcaattaacgggtgcagaagatgctttagtagttaataacaatgctgctgcattgcttctggcgttgtcagcactatgtattgggaaagaagtcattgtcccacgtagtgaagctattgaaattggaggaggtttccgtattccagacgtactagttcagagtggggcgaaattagtggacataggaaccaccaacagaacgtatattcaggattaccaaaatgctatcacagaagatactggggcatttctgaaggcgcactccagcaatttcgtgataagtgggttcattcatgaggtggcggtatctgaattatctgcattaggtcgagaatttgaggtgccggtaatgcatgatgtaggaagtggagcatttatagatactaggaaatatggtcttgcctatgagcctactccacagagtagtgtatctgaaggggcagacctggttttcttttcaggagataagttattaggagggccgcaggcaggaatcatagtcggcaaggcaaaatacatatccattttggaaagacatcctatgatgagagctatccgtatggataagattaatctggctgcactgtcagcaactttagggcattacgtgaaaaatgaagctgaatccgagattcctgtgtggagaatgatatcagcagatcaagaagttttattgaacagattaaatatttggaaagatattaatcatgacaacttggaaattatcccttctgagtcagcaataggaggcggcagtcttccaggggagaccattccgactcatgttctgcgaattaataccgataaaatgtccctgaatgctatgcaaatccagtcacgattaaggcaatgccatgtaccaataatagttagaatagaagatgaagatgtgattattgaccctagaactgtgttgccagaaaatgacggacacataagtctgggcataaaatctattatcaactagt

SEQ ID NO: 259026 - DNA, 1372 bp, Unknown
  Bacterial polypeptide expressing nucleotide sequence isolated from the Sargasso Sea
aatgaaaaagaaagatttattaaatctaccatcagtatctgaagttttacttaaggtaaaaaaaacaaaatcaattaatattgaatatataaaatatataataaaagatgaaatcgcacaatttcgttcgcttgctaagcagggtaaactagaacttgaccgtaatcaaataatagaatttattttattaaagctatcaaaactatctgttgcaagtataaagcccgttatcaatgccactggtattattcttcatacaggccttggaagagctccaatcgataaaaaaataattaatatcgtatctaaaagactttcaggatatgttaatttagaattaaaccttgaaaccggtaagcgcggacaacgccaagaccatatttctggtcaaatagcatcaatagctggcgctgaagacgcgatagttgttaataataatgctgctgctgttttattatcgctaaatgaattagctgaaggtagggaggtgattgtatctcgaggtcaattagttgagattggtggatcatttagaattccagatatgataactaaaagtggctgtaaacttgttgaagtaggaactacaaacagaacccatattagcgattatgaaaaggccataaattctaatacgggtttaatattatgggtccatacttctaactacgttatttcaggttttacaaagcaggttgaaattgatgagttagttttattaggtaaaaaaagacgaataccggttatgtctgaccttggatgtggtgaggtattagatttatcaaataaaggcgtacccactaacatgttagtccaagatgtcgtgaaatccggttcaagcataacaacattttcaggagataaactacttggagggccacaatgtgggctaattgttggtaaaaagtcattaattaagcgaattaaggttaaccctattgcaagaaccgtaagaagcgataagtggaccttagcgctgcttgaagaggctctacgctccttaagaattgattcattaaaagataatttaacgctgtctttaatgacaacaactagaaatcaactacataagcgagccactaagaccttatcttatgtgtcaactaagattaaatcaagtcataatatctctattagggaaacgcttgttgaggcaggtagcggtacgcttcctggcgctacttttgaatccatagcatttaaaatcaactctaaaaactattcaagtgcaaagttatcatataaatttagaaattcaaaaaaccctattgttggctatatcaaaggcaatagctattacattgattttaaatctataattcccacacaggataaaatagtcatagaatcaattcttgaagtcttaggttaa

SEQ ID NO: 259027 - DNA, 1116 bp, Unknown
  Bacterial polypeptide expressing nucleotide sequence isolated from the Sargasso Sea
atacaggatttggaagagcacccttcagaggtgaagatttaaaaaaagtagcagataaattagatgggtatgtaaatcttgaatttgacgttatcaataatactagaggggatagacagtcacatattgatcaacatatagcatcaatttgtggttctgagagttcattgattgttaataataatgctgctgctgtgctcctttccattaatacattagcctcaaattctgaagtgatttgttcaaggggacagattgttgaaataggtggttcttttcgcatttcagatatcattgaaaaaagcggtgcaattttaaaagaagttggtacaacaaatagaactcatttaaaagactatgaaaatgcaatttcaaaaaatacaaaattattattatgggtccatacgagtaactacgttgttaaaggctacgccaaagaagtgtcattggcggaagtagtaacacttgggaaaaaatatgatattcccgttttagctgattggggaagtggtacttttctatcattggaagactatggtgtaccatctgatttaccgattaggaatatagttgagcaaggtccagacctagttgtcttttcgggagataagatgctgggcgggccacaatccggggtgatattatcttcaaaaaaaatattaaaaaaaattaaaataaactccatttacagaaccgtacgttgcgacaaaattacaatcgctttattagagcaagtcattcgcacttatagaattcatggtttctcaaattttaatctcgcacttagtctattgactagatcgagagataaattgagagctctagcaaataaaataataagagacctacctaaaaaaaatataaatcaattaggtttaactatagaagattctttagttgaggctggtagtggatcactacctgaaaaaaatatagaaagcatagctctgagatttattccagtttcactaagcgtaaacaaattatcttcagcatttagagatctagataatcccgtaatcgggtacatcaatagaaatagcttttttattgatttaaaggctgtcttgccctctcaaatatcaactctaattaaatcaattaaaaatttataga

SEQ ID NO: 259028 - DNA, 808 bp, Unknown
  Bacterial polypeptide expressing nucleotide sequence isolated from the Sargasso Sea
atgaataaattcacagctcaaaaaagcaatgctgatgatgcccgtcggaatattccatccgttgatgccattattaataaatctggaaaccttattgatcgatggggacaccaaagagttactgcagttactcgtaatatactcaatgatgtcagaataaagcgtggtttagacaatagcgatttagttagtgttgaattgcttgttgaagaagttgagcgaactctcaatgctgctgataaatcctcatttaaggagataattaatctaactggaaccgtgcttcataccaattttggccgcgctgtgctcccaagagaagcaatagatgcaattaatcgagtcgcggagtcaccgactaatttagaatacgatttaagcaatgctggcaggggcgagcgagatgatcatgttgagcaactagtgtgtgagctggttggaagtgaagctgcgactattgtaaataacaatgcagcagctttgttactcgtgcttaatactttagctgaaaatggtgaaattccagtttctcggggtgaactagttgaaataggtggatcatttcgaattcctgacataatgcagcggtctggttgctcactagttgaaataggtgccacgaacaggacacatttgaaggactactctcaagcgatcaattcccgaacttctttattaatgaaggtacacacaagtaactttaaaatagaaggttttacggcagaggttaaagagaaagagttagcgcaattagctaaaaaagagggaattccttttgtgtgtgatgtaggccagtggaaaatataat

SEQ ID NO: 259029 - DNA, 949 bp, Unknown
  Bacterial polypeptide expressing nucleotide sequence isolated from the Sargasso Sea
tcgtgagataatggaggacctaaggtctcggattttggcgggtgaggaaatttcaaaagacgtctcaatgagtgcaatttcggaagaagcctcccgccgcttaaaggcacttaccacgccaagtctgaaaacagttctaaacttaacaggaactgtattacatacgaacttgggccgcgccccacttccaatagaagccttagatgccatggttgacgtggcaaaaggagcatcaaatctcgaatacgaccttttgacaggcggtcgagggcaaagggatgatcacctctccaatctgatatgccgcctgaccggagcagaagcggcgtgtgcggtcaataataacgccgctgcagtgctcctaattctcaatacatttgctgttggaagagaagtgctcgtatctagaggtgaacttgttgaaattgggggggcttttcgtatacctgacattatgtctcaggcaggtgcagtactgcgtgaagttggaacgacaaatcgaacaaatgaaggagactatgagtcagccataaatgaaaacaccgctttaatcatgaaagtacacacaagtaattttgaaataagaggatttaccgcaagtgtctctgaggcgaagttagctcagatagctcatcgtcataagttgccagttattgttgatttaggaagtggaagtttggtagatttttctgctgacaacatcccgaaagaagtaacagtcagcgaatcatttcagaattctattgatctgatttgctttagcggtgacaagctgattggaggccctcaagctggatttatcgctgggagtgcctctatggttaaaaaaatcaatgcaaatcccatgaaaagagctatgcgattggataaaatacgaatagcaggcttaatggcagtgcttcagctctatttaaatccagagacattacctgcacgtttgcccgctctt

SEQ ID NO: 259030 - DNA, 872 bp, Unknown
  Bacterial polypeptide expressing nucleotide sequence isolated from the Sargasso Sea
cttgaaagattatgaaccggtccaaaaagtgatcaatgccacaggggtggtggttcataccaatctcggacgtgctccccttccaaaggatctttttgaaaaacttcttccacgtttgtgttcgtattccaacctcgaatttgaactggaaaccggaaaacgcggatcacgggattcggtcctcagaaatctgttgaggaacctctcaggagcggaagaagcaatggttgttaataacaacgcttctgccgttttcataatgctccgagcccttactgctggaaaagaggtgattgtttcaagaggtgaattggtagaaattgggggttctttccgtattccggacatcatgcgcgagtccggagcaacgctggttgaagtgggcaccaccaaccggactcgactttctgattatgagcaggccatttctgaaaatacagctgccattcttaaagttcatccatctaattatatcattgaaggttttaccgaatcagttgagatcccgaagcttgtggaacttgcaaaaagccatgggctctactgttttcacgactggggaagcggcaccttttatcagtttgctcaaaaaggattaagaagttaccccactgcccaaaaggaaatacagaaaggtatcgacattctctgtttcagtgctgacaaacttctgggatccgttcagggaggaatcattctgggtcgcaaaaaaccggtcgagaagatgcgaaagcatcctctttatcgtgcactccgagctgataaggttacccttgggctcttagagtcggttcttggagcttactttgaacctgagagcctcaaagaaaaggttacaggaatcaggttactcgaaagaagtaaagatgaga

SEQ ID NO: 259031 - DNA, 456 bp, Unknown
  Bacterial polypeptide expressing nucleotide sequence isolated from the Sargasso Sea
tgacgaagaacgtctctgccgattgaccggaggcgaagcggcaaccatcgtgaataataatgctgccgctgttatgctcttactgaattcactagcaaaccgcaaagaggtacccgtctcaaggggcgagttagtcgaaatcggcggtgccttccgtattcccgatatcatgtcacgatccggcagcaaactgattgaagttggtacgacgaaccgcacacatttgagagactatgcagctgccattggaccacgcacggcattgttgatgaaggtgcatacgagcaactatgaaattcagggatttacggcagaggtctcggagaaagccctcgccgaattggcgcacagccacgagttgccaatggtggtcgacctcggtagtggagcccttactgatatgactaggttcggcctaccccatgagcgaacgcccatggagacactcgctgatgg

SEQ ID NO: 259032 - DNA, 870 bp, Unknown
  Bacterial polypeptide expressing nucleotide sequence isolated from the Sargasso Sea
tttgaatgaattgaatgcggtgcttgcgcgcgtaccgtctgtcgagcgcgtgctgtcgtcggcgccgctgcaaccgctgctcgccgactatggccgcacgcgcgtgctgaacgccgtgcgtgccgagctcgagcgctggcgtaccgccgcgcagcacgatccggctgcggccgagccgctcgacgagccgcgcatcgccgcggccgtcgcgcatgcgctggccgcgcagagcgcgggcgcggtgcgcgccgtgttcaacctgaccggcaccgtgctgcacacgaacctcgggcgcgcgctgttgcccgacgacgcggtgcgcgcggtggtcgacgtgctgacgcggccggtcaacctcgaattcgacctcgccacgggccgccgcggcgatcgcgacgacctgatcgacgatctgttgtgcgaactgacgggcgcggaggccgcgaccgtcgtcaacaacaatgcggcggccgtgctgctggcgctgtcggcgctggcgacgaagcgggaagtcgtcgtgtcgcgcggcgagctggtcgagatcggcggcgcattccgcatccccgacatcatgagccgcgcgggcgccaggctgcgcgaagtcggcaccaccaaccgcacccatctgcgcgactacgcggacgccatcggcccgcgcaccgcgctgctgatgaaggttcactgcagcaactacgcgatcagcggcttcacgaaggaggcgacgctcgccgaactcgcgccgctcgcacgcgagcacgggctgccggtggccgtcgatctcggcagcggcacgctcgccgacctgtcgcaaatgggggtttgccgcacgagacgaccgtgcaggaaaccgttgccgccggcgcaaacgtt

SEQ ID NO: 259033 - DNA, 487 bp, Unknown
  Bacterial polypeptide expressing nucleotide sequence isolated from the Sargasso Sea
cttgaaggattttgaaccagtccaaaaagtaatcaatgctacaggggtcgtggttcataccaatcttggacgcgctccccttccaaaggatctttttgaaaaccttcttccacgtttgtgttcgtattctaaccttgaatttgaactggaaaccgggaaacgcggatcacgggattcggtcctcagaaatctgttgaggaacctctcaggagcagaagaagctatggttgtaaacaataacgcttctgccgttttcctaatgctcaaagcccttactgctggaaaagaggtgattgtttcaagaggagagttggtagaaattggaggttctttccgtattccagacatcatgcgagagtctggagcaacgctggttgaagtgggcaccaccaaccggactcgactttcagattatgagcaggccatttctgaaaatacagcagccattcttaaagttcatccatccaattatatcattgaaggtttt

SEQ ID NO: 259034 - DNA, 916 bp, Unknown
  Bacterial polypeptide expressing nucleotide sequence isolated from the Sargasso Sea
tctgattgccaaaggtgaaaaaacgttactccaggctataacttctgactcttaccttaatgaattttgttgcgaagttgcgaatgatgtgcgggcatctgtttccagttcattggtccccgttatcaatctcaccggcactgttgttcatacaaacttaggccgtgctcggcttccggaagaagctatcgcagcaatgacaaaagttgccacacaagcaaccaatctagaattcgatcttgaaactggtaagcggggagacagagactcacacatcgacgaaagtatttgtcagatcaccggtgctgaagcggcgaccgttgtcaataataatgcggctgctgttttattggttctaaatacactagcttttagaaaagatgttgtaatttcgaggggggagctagttgaaataggaggagcatttcgtataccggatgttatgaaaagtgcaggttgtactctagtagaaatcggcactactaatcgaacccatctgagagactatgaagctgcaatcaattccaatactgggatgttgatgaaagttcacactagtaattatgagattcgtggatttactaattcggtttctgaagaagagattagtcagctggcacaagaagcgggagtaacttttgtttccgatttgggtagtggcaccttagtggatttgaataagttcggattgccacatgagcccactgtaacggagacattggaaaaaggcgccgaagtcgtcactttcagtggagataaactcttaggcggtcctcaggcaggaatcatcgtcgggaagagagaattgatcgcggcgattaaaaaaaatccactgaagcgggcattacgggtggacaaaattacaatggcagcgttgtcttccgttgtaatttatatcgagatcctcagcgattaa

SEQ ID NO: 259035 - DNA, 913 bp, Unknown
  Bacterial polypeptide expressing nucleotide sequence isolated from the Sargasso Sea
aaagaggttttggttagtagaggtgaattgattgaaattggaggttcgtttaggttacctgaaattatgacaagcgctaattgtaaacttaaggaagttggcactacaaatagaactcatattgaagattttgaaagcgaaattaaaaaacaaactggattaattctaaaagcacacacaagcaattttgttattaaagggtttacctcaaacataaatcataaagatttagcaaagttatcaaaaaggcatggtctcccttttatggttgatcttggaagtggctcactaatagacttaaaacttttaggattgcccagagagagcatgccaaaagaagttttatctaatggagcagatatagtaacttttagtggggataaactcgttggaggcccccaatgtggcattattctagggaaaaaagatttaatacataaaataaataaaaacccactaaagcgtgcacttagatgtgacaaaatgacaatcgcagcatttgcatcaatacttaagttatataacgacactgataaagccatagaagaaattccaacattgagaatgctgaataggaaaaaaaaggaaatatatgatacagcaaaaagagtttttaaagatataaatactcaacttaaaaaaatagcaaaagttgaaatagtagattgtaaaagtcaaataggaagtggttcattaccagtggaattaattccaagctgtgcaataaagataagaatgaactcgaataagcatctgagtaaactttacactgagtttagaaagttacccattcctgtaattggtcgaattcataataatagtattttatttgatttacggtgccttgagaatgaaagtcaatttctatcgcaactcaagaaattaaatttaaaaatatttgaaattaaatgat

SEQ ID NO: 259036 - DNA, 742 bp, Unknown
  Bacterial polypeptide expressing nucleotide sequence isolated from the Sargasso Sea
cctggttcagctccgtcatcagattgccaacaagactcttcaaccagatctcctggattcgccgtccagggagtcttttcttcaatggattctcgaaaacttgaaagattatgcgccggtccaaaaagtgatcaatgccacaggggtggtggttcataccaatctcggacgtgctccacttccaaaggatctttttgaaaaccttcttccacgtttgtgttcgtattccaacctcgaatttgaactggaaaccggaaaacgcggatcacgggattcggtcctcagaaatatgttgaggaacctctcaggagcggaagaagcaatggttgttaataacaacgcttctgccgttttcctaatgctccgagcccttactgctggaaaagaggtgattgtttcaagaggtgaattggtagaaattgggggttctttccgtatcccggacatcatgcgcgagtccggagcaacgctggttgaagtgggcaccactaaccggactcgactttctgattatgagcaggccatttctgaaaatacagctgccattcttaaagttcatccatctaattttatcattgaaggatttaccgaatcagttgagatcccgaagcttgtggaacttgcaaaaagccatgggctctattgttttcacgattgggggaagcgggaccttttaccagtttgcacaaaaaggattaagaagttaccccactgcccaacaggaaatacagaaaggtattga

SEQ ID NO: 259037 - DNA, 1426 bp, Unknown
  Bacterial polypeptide expressing nucleotide sequence isolated from the Sargasso Sea
ttgaatgaattgaatgcggtgcttgcgcgcgtaccgtctgtcgagcgcgtgctgtcgtcggcgccgctgcaaccgctgctcgccgactatggccgcacgcgcgtgctgaacgccgtgcgtgccgagctcgagcgctggcgtaccgccgcgcagcacgatccggctgcggccgagccgctcgacgagccgcgcatcgccgcggccgtcgcgcatgcgctggccgcgcagagcgcgggcgcggtgcgcgccgtgttcaacctgaccggcaccgtgctgcacacgaacctcgggcgcgcgctgttgcccgacgacgcggtgcgcgcggtggtcgacgtgctgacgcggccggtcaacctcgaattcgacctcgccacgggccgccgcggcgatcgcgacgacctgatcgacgatctgttgtgcgaactgacgggcgcggaggccgcgaccgtcgtcaacaacaatgcggcggccgtgctgctggcgctgtcggcgctggcgacgaagcgggaagtcgtcgtgtcgcgcggcgagctggtcgagatcggcggcgcattccgcatccccgacatcatgagccgcgcgggcgccaggctgcgcgaagtcggcaccaccaaccgcacccatctgcgcgactacgcggacgccatcggcccgcgcaccgcgctgctgatgaaggttcactgcagcaactacgcgatcagcggcttcacgaaggaggcgacgctcgccgaactcgcgccgctcgcacgcgagcacgggctgccggtggccgtcgatctcggcagcggcacgctcgccgacctgtcgcaatggggtttgccgcacgagacgaccgtgcaggaaaccgttgccgccggcgcaaacgttgtcacgttcagcggcgacaaactgctcggcggcccgcaggccggcctgatcgtcggcgatcgcgcgctgatcgcgaagatcaagaagcatccgctcaagcgcgcgctgcgcgtcggcaagctgacgctcgcggcgctcgagccggtgctgcgcctctaccagtcgcccgagttcctgcgtgaccggctcacgacgctgcggctgctgacgcgcccgcagcgcgagatcgccgaggctgccgaacgcgtgcgtccggcgctgcaggccgcgctcggcagcggtttcgacgtgacggtcgagccgatgttcagccagatcggcagcggcgcgctgccggtcgaccagttgccgagcgccgggctcgtcgtgcgcacggcggacggcaagcgcggcggtcgcgcgctggcgcaactcgagaaacggctgcgcgcatggccgcgcccggtgatcgggcgcgtggccgacaatgcgctgcggctcgacctgcgctgcctcgaagccgccgacgaagcggtgttcgtcgcgcaatgcgtgccgctcgcggggcccgctgcatgat

SEQ ID NO: 259038 - DNA, 1420 bp, Unknown
  Bacterial polypeptide expressing nucleotide sequence isolated from the Sargasso Sea
atgacccaagtacccgatacaccccaagccctgtaccgcgcgctgccgtcgatggacagtctgctcgccgatgcggcgttagcccctttgctgcaacgctatggtaaagcagcagtaaaagcggtgctggatagccagttacgcacggcgcgcgagctgattgcccaggagcgacgtttacccgcttggtgtgctaatccggcgttattgaacggatatttggttgatcaattgtctaaggactatagccatagtctaaaacccgtgtggaacctcaccggaaccatcctgcacaccaatcttggccgtgcccagcagtctgaggcggccattcgggcggtgacctctgtgatgcgttatcccacgccgctagagtttgaattagccgccggtgagcgcggccatagagataatgccattagtggattaatccagcgcctaacaggcgctgaagcctgctgcgtggtgaataacaacgccgccgctgtgctgctgatgttgtcggcagtagccgcgggcaaagaagtgatagtctcccgcggtgagctggtggaaattggcggtgcctttcgcattccagacattatgcgccaagctggctgcaccttagtggaggtcggcagcactaaccgcactcacctcaaggattatgagcaggcgataaccgaaaataccgccgctattatgaaggtgcataccagtaactaccatatcagtggttttaccgcctcggtggatgaggccagattgggccaactctgccgcgatcgaggagtcgcgctgatctcggatcttggcagtggttcactcaccgacttacgccgttttggcctgaaacaagagccgacgccccaagccatgttggcggatggggtcgatttggttagcttctccggcgataaactcctcggcggcccgcaatcgggtttgattgttggcaaacaggcgctgatcaacaaacttcaaagtcatccgctcaagcgtgcattgcgctgcgacaagctgattctcgcggcgcttgaggcgacgctgatccactatttgaaccccgaaaccttggatcgagaactgccgattatggctaaatttgcccgcagccaagctgagttacgccaaatcggtgagcgtctgcagcgcgccttagcgccgctgtttgccccgagttatggcatcgaattagtggagtgccaaacccaagtcggcagcggctcgcagccagacacctttttaccctcaatcgccctgtgctttaacgcgcaagagggcggcagtttaacgctgctcgagcagcattttaagcaggcgcaacggcctgtaattggcagaatgacccaagatcaacttcgtctcgacctgcgcggtatcgatgatgaggccgaattgttagccgagctcagcactttaggtgtgcagctatgat

SEQ ID NO: 259039 - DNA, 952 bp, Unknown
  Bacterial polypeptide expressing nucleotide sequence isolated from the Sargasso Sea
tgttctaaacagcttagcaaaacgaaaagaagttctaataagtagaggggaattaattgaaattggaggttcgtttagacttccagaaataatgaaaagtgctggatgtaaaattttagaagtgggaacaacaaatcgaacacattttgaagattttgagaactctattggaaaaaaatctgcaatgatattcaaagctcataaaagtaatttttatgttgagggctatacatctgaggttgaagaaaaggagatagtaaagctttctaaaaagaatggtattccatttatgattgaccttggaagtggttctttaattgatctcaagtatatgggaataactaaagttcaatctcctgcagacacacttgctaaaggtgttgatttaataacatttagtggcgataagttacttggaggacctcaatgtggaataattgcaggaagaaaagatttaataactaaaattaagaaaaatcctttaaagcgcgctttacgttgcgataaaatgacaattgcagctttttcaactttactaaaattatacgaaaaccctgaaagagcaaaattagaaatacctaccttaagactattaaatagaaaagaaaaagatatttatgaagtagcagaaaaactttatccatcaataaaatctaagatttcaaatatagcagaggttaaaattataaagtgtaaaagtcagattggaagcggctcattacctgttgaactattgccaagctatggtatagaaataagcgctaaaaatttaaaaaggaattcaaataaattacttcaaagcatatctaaaaagtttagagaacttccaatccctataatcggaaggttgagcaaaaatagtttaatatttgattgccgttgtcttgaggatacgactttgattattaaacaacttgaaaaaataaattctaaatattttttaaatacatga

SEQ ID NO: 259040 - DNA, 904 bp, Unknown
  Bacterial polypeptide expressing nucleotide sequence isolated from the Sargasso Sea
gttggctcattttgatgatgagagtgaattatttatattcagaggtgttccatatgccaaaccacctgtggggaaccttcgttggaaatcaccggttccagttaaaagaaaaactcagattgatgcacgatcattcaaacctggatgcatgcaggacacctatatcactgagtggtatcacgatgtcattgactcttttggtcaagacaaatctttgtttcaacatgtcgagaatgtcagtgaagactgtctctatctaaatatttggacatcatctgtaaataaaaatgaaaaaaaacctgtgatggtatgggtacatggtggagcagacacaggcggatggtcatacgagcctgattatctcggtcatcatttggcaaaaaaagatgttgttgtggtctccattggttatcgattgaatgtctttggcttctttaaacatccagagatgaatgaagagacaggtaactttggattggaagatgaaatactcgcgctgaaatggatcaaagagaatattgcagattttggcggtgatccatcaaatgtcacatactttggtgaatcggccggaggtgctcatgtttcttatcttgccacatcacccgaggcgaaaggcctatttaaaagagggatcatccaaagtggtggttacaatttgttcaattggcgtagcattgatgaagcacatgagctcgcaattcgaacacaaagtatatcgggtacaattgatctaaatgatctcaaaagtctagatgagaatgcccttcttcaagcatcgaggaacctttaccatccttatagaccaatcattgatggaaaaatcatcactgataatcttgccaaaaaatatatcgaaggaagcatcaatgatgttgatctaatgattggcagcaataaaaac

SEQ ID NO: 259041 - DNA, 967 bp, Unknown
  Bacterial polypeptide expressing nucleotide sequence isolated from the Sargasso Sea
cgttacaatttttggagaatctgccggcggtcataatgtgactgcgctgttcgcttcaccattggcagcaggattatttcacaaagtaattgttcagagcggagtctcaagtgtgtcatctataacagcaagtgaaagctacttgccagacaatagagaagctcccactgatagttcattagatatttttaataaaatagttgtttctcaaaaactagctgataacttacaagaagctagatctgttcaagaaggtatgagtgaggctcaacaaaaagaatttctttacaaagcatcaccagaagaattaactcaagcacttttaaatgatagaccagcaaaagttggtatgcccagagtatttccagatggtcacgtaatcttaaaaggtggttttcaagaagcttacaccgattcaaattttaataaagtacccattatttttggaaccaacaaagacgaaaataagtttttcaattcgatgaaccctaattttgtagagtggaaacctgcaaaaggattattcaaaactgcaggcattgatgtaatgcccacgaaaataattgatccagattattatgatgcaataaacttttatggatcaggattttggaaaaactctgctgtagacattcctgctagcagtctcgtcaaaagtggacatttagacacctatgcttatcgattcgactgggacgaattgaaagaagtaaatggagttgaattgtctaaattagttggcgcagcgcatgcattggaaattttgtttgtttttggaacttttgaaaattttataattagaagttttttatttggccgaggttcttatgctcctgctgttcaactctcaaaagatattcagtcatattgggctgaatttgcttacacaggaaatccaggaaaaggtagagaaaaaaacctgccactttggagtagttggtcagaaactggtgataaatatttaatt

SEQ ID NO: 259042 - DNA, 928 bp, Unknown
  Bacterial polypeptide expressing nucleotide sequence isolated from the Sargasso Sea
agagagccaaatgagttggtcagaaccaaagaacgccactcagtttgggaaagcctgtccgcaaggagcgctagggctctcagggagtgaagattgtttatttttaaatatctggagctcccaatctgaaggttcgtcgaaaccagtcatgtttttcatccacggaggtggaaacgtaataggcagtgcggatcaaggcgggttatatgatggtcagcgtttcgcttctgagcatgaagtcgttcttgtctcaatcaattacagattgggtcccctgggttggttttctcatcctgcattgagagaaatagaatcgagagcctttgctgaggaagataattcggggaattacggaaccttggatattattgctgggctcaagtgggtgcagaagaatataagctcttttggtggcgacccagataacgtgactatttttggtgagtcggcgggtggttggaatgtaatgtcgatggtggtttctcctcttgctagtagtctctaccacaaggctatcgtccaaagtggcggtcttaaactaacggacatgggtgaagcgcaggaatatagagaagatggaggtttgccgagaagttcaagagaagaaatgaatcgaatccttcggctcgacggcagggccaccaactcagatgaggcagaacagatacaaaacgccatgagttcggcagaaatcagtgaatatcttcgtggagccgagctttcgcttgtttttggcactctaggtggagatcgggatttagcggaacaaaaggagcccagatccggaccggggaaaccctttatcctttggagcggaatggatgatatgcctcccaatctcttagccgatgggtacgtattgccagggaacactgatattttcgaggttctctccgacccgacgcaattcaacgctacgccaattatg

SEQ ID NO: 259043 - DNA, 685 bp, Unknown
  Bacterial polypeptide expressing nucleotide sequence isolated from the Sargasso Sea
ctgcgcgatcagttggcggcgctacaatgggtacaagagaatattgccgcttttgctggcgacgataagcaggtgacgatctttggtgagtctgctggtggtttcagcgtctgctcattactggcctgcccgcaggctgatgagttattccaagcggccattgtgcagtcagggggagcggattttgtgctagccccggatcaggtacgcaaggtcactaatgcgtttgtggcagccttgccgggcgacggcagcgccgccgaaaagctgctcagtgcggataacaagggctggattaaggcccaaaatgcggcggtgaaagtgttggtggatcgaggcttgcgtaccaccacacctcaatttgccatgaacttcttgcccatggtggatggtgacgtgctgccgcaattgccggttgatgccatcgctgcaggcgctgctgccaacaagcgtgtaatggctggcgtatgtcgtgatgaattcaacttcttccagtacgctggcgtgctggctggcacaaccaccatggacgccctgagggaaatcagcgatgaggaaattgtgagccgatttgagcgtgcgctgcccggtaatggccgccgtgcttttgattattaccagacagcggtggagccggatgcacggcgcagccgcctggactggttagcggctatgaatccgatcg

SEQ ID NO: 259044 - DNA, 921 bp, Unknown
  Bacterial polypeptide expressing nucleotide sequence isolated from the Sargasso Sea
catggctgcaaaagattttcataaccaatcagtcaatccaccagttgtaagagcttctacaattttatttaagaatcttcaagaaattgaaaaaacagaaaagaaatatttaaaagacccaagaagtggaaattttaactatggaagacaaggaactaccacaacatatgctctacaaaaaattttacaagaaatggaacaatgttataaagtctaccttactccaactggttttggagcagtgtttttagcagtcttaagtttagttgaaccaggtgatgaaattttagtaaccgattcagtttactcacctacgcgtctactaactcaagattatttaaaaaaatttaatataaaaagtattttttatgatcccaataaatttgatgatatcaaaaataaaataagcaagaaaactaaattaatttttgtagaaaatcctgggagcaatacttttgaatttcaagatttaaaaaaaattatctcattagcaaagaaatttaatatctatacagcaatagataacacatggggaactccatacttgattaaaccaattaaattaggttttgatatgtcaatagtttcagcaacaaaatattattcgggacattcagatgtaatggggggtactttagcaataaacaaaaaagtttttaaattggttgagtcaaccaacagagttactggtttaagattaagtcctgacgacgcatatttgattttaagaggtataagaacccttgatgtcagaatggacaaacatcattttaatgctttgaaagttgcaaaatttttatctaaacaaaaaaaaatatcaaaagtttattatccatacaaaaaaaattctcaatattataagttatggaaaaaatattattcaggtgcatctggattaatgggtttaaaaataaattcaaa

SEQ ID NO: 259045 - DNA, 801 bp, Unknown
  Bacterial polypeptide expressing nucleotide sequence isolated from the Sargasso Sea
aatgaagttacttttaacaattactatttgttttttaaatttaacaatttatgcaagtgaagttaaatttaaaatttctacaacaagtggagaagtagttgggtcaataaaaaagaacataatcatttatgaggatataccatatgcaaaaccaccagttgatcaactaagatggaaagcacctcgaagtattacaaacaaagttgagataaaaccaaaagaaaataatttttgtatccagagaccttcaaacttaggaggagttgatagcgaaaatttttatgttggctcagaagattgcctatatttagatatttttgttcctaaaaaagcaagcaaggatttgccagtaatgttttggattcatggtggtggtaatacttcgggtttaaaagacatatatgacttttcaaaaatggtatctaaacacgatgtaatagtagttaggatgaactatagacttggtccgtttggttggtttacacatccagcaatacaaaattaccaatatgacgaagataagtcgtcaaattttggaactcttgaccttataatggctctaaaatgggtaaataaaaacatttctagttttggaggagatgaagacaacgtaacaatttttggagaatctgctggtggtcataatgtattatctctattagtctcaagtaaggctaaaggacttttccataaggccatatcaatgtcaggatatacaacatcaatttcgatagacgatgcctacaaatcagatccaaaaacatcaacctcagcatactcaactcataatgttacaaaaaa

SEQ ID NO: 259046 - DNA, 679 bp, Unknown
  Bacterial polypeptide expressing nucleotide sequence isolated from the Sargasso Sea
tctgggcaaaatactttccatagcaaaaagtaaaaaaatctatacagcaatagataatacatgggggaccccttactttttaaaacccattaaattaggatttgatttatcaatagtttctgggactaaatattattcagggcattcagacgttatgggaggaagtctagcagtgagccaaagagtatttagaagagttttgcaagcacataatatgactggtttaagattaagtcctgatgatgcgtatctaattatgagagggttaagaacactagatgttagactagataaacaccaagaaaatacaaatagaatagcacgatttttatcccaaaaaaaaaatattgaggttttgtaccctttcaaaaaaaacacgaaaaattataaattatggaaaaaatattactcgggttcatcaggattaatgggattaaaaattacttcaaaaaataaaaagtcagtagataaatttgttaactctttgaatcattttggtcatggttatagctggggtggttttgaaagtcttgctttacatcaggaaataaaagaacaaggaaatagaaaatttttaaaattaaaaagtaacgaatatattgtcagattacatattggacttgaagatttggaagatcttataatagatttgaaaaaatctttaaaacatattagataa

SEQ ID NO: 259047 - DNA, 909 bp, Unknown
  Bacterial polypeptide expressing nucleotide sequence isolated from the Sargasso Sea
tgtcgtacttgtcacgattaattacagattgggagtttttgggtatctcgcccatccagagctgtcgaaagaatccaattcttccggaaattacggcacatctgaccaaatcgaggcgttgcgctgggtaaaagcgaatatttcagctttcggcggtgatccagaaaatgtaacgattttcggtgaatcggctggttcgtggagtgtgaaccacttagtagcttcccctaaagcagcggggctttttcaccgagcgattggccaaagtggcggtagttttcaggtgttacctcatctcaaaaagggggatggatccggcgaagaaagaggtaggcaatttcagaaaaagttaaagaaaagttcgatcctggaaatgcgcaacctcgatgcttcggaaatcctcaagaaatccgacgatcaatttcacggcgggatagtagacggacgttttatccctgatcagctataccgtctttttgacatagggcaattcaatcgggtgcccgttatgcttgggtacaatgccgaggagggaaccacaatgggtgcgcttcaaagtctgcccaagaatagcgcggattatgccaataaaatgaggcaaatattcggcaaaaacgcagagggcattttaggcctttatcctgcgtcgaattatcgggactcctatttgaggctctcttcagattcgggcttcggttggaacatgcactattgggcgacgcactccgctaaacatggggtaaaaacctttatgtattattttacccaccgaccacttggaaacgaattagcagcatttcacgctgctgaaattgtgtttgcctttaataacgctcagcacgttgagatgttcgatagtccaatcaaccgaaaactcgcagaggagatctcggacttttgggtgcaatt

SEQ ID NO: 259048 - DNA, 844 bp, Unknown
  Bacterial polypeptide expressing nucleotide sequence isolated from the Sargasso Sea
caaagatacgaaactcataggcagcttacatcagaataatgaagtagagatgtttcttggcataccttttgctgtcccgccatttaatgacctcagatgggaaaagcctgttgcttggactcctgaaaataaaaaagaaataactgctaataagtttagacctggatgtattcagaaccaaagaattgttaattggtataaaaggctaatttttgactttggtggcgatcctggaactttcgatattccagagtttagtgaggattgtttgtatttgaatttatggcgaccaaggggattaaaaaataatttacctgtaattgtttatatacatggtggaagcaataaagctggctggtcgtatgaacctaattatcttggtcataatattgctaacaaagactttatacttataagtattccatatcgccttggggtatttggctttttctctcatcctgatattgaaagccctaatcttgctttatatgatcagattttggcccttgaatggatacaaaaatatgtttctttctttggtggtgatccgtctaatgttactttagttggtgaatcagcaggtgccgggggaatcagtcatttaatggcttctcccttaagcaaaaatttatttcataaagcagtccatcaaagtggcggatcttcctttacctatccaacttcaagttcggacgtaagaaagctggcaaatagctttgcaaattcttttgaagatccatcacttaaaaatttaaaaaatatcagcgcagaagaaatactggaggtttcagaagaagtttatgctgagcactactttaactatgttgatgatggtatctctatg

SEQ ID NO: 259049 - DNA, 460 bp, Unknown
  Bacterial polypeptide expressing nucleotide sequence isolated from the Sargasso Sea
atgcagcaaaacattcttaaaatttttactttcctattaactatttcgcttaacgcttcgatagactcttatccaacagtaatagttcaagaaacaaaatttattggtgatatacatccagataataaagtggagatgtttctaggccttccttttgcaaaacctccaactggaaaatttagatggaaaaaaccagaggcttgggaacctctccaaagttcagaaatattagtaaaagacttcaagccagcttgttatcagaatcaacgaattgttgattggtataaaagactgatagaagattttggtggagatcccttgagttttgttatacctgaatttagtgaagattgcttatatcttaacttatggcggccaaagggatcacatactaatttaccagtaattgtatatatccacggcggcagcaacaaagctggatgggcatatgaacctaatt

SEQ ID NO: 259050 - DNA, 506 bp, Unknown
  Bacterial polypeptide expressing nucleotide sequence isolated from the Sargasso Sea
taaaaaagtttttaaattagtagaatctaccaataaagtaactggtttaagattaagcccagatgatgcgtaccttattttaagaggtattagaactttagatgttaggatggacaaacatcatgtaaacacaataaaagttgctaaatttttatctaaacatagaaaagttttaaacgtttattatccgtataaaaaaaattcacaaaattataaattatggaaaaaatattattcaggagcatctggattgatggggattaaaattaaatcaaaaaataaaaaatcagtgaaaaattttgtcaactctttaaaattatttggctatggatatagttggggtggttttgaaagtttagcattataccaaacagtaaatcaactaggtgtaagaagttttactaaattaaaaaatgatgaacatattattagacttcatataggccttgaagatactaaagatattattaatgatttaaaacaagcgctaaagaaaattaaatgag

SEQ ID NO: 259051 - DNA, 736 bp, Unknown
  Bacterial polypeptide expressing nucleotide sequence isolated from the Sargasso Sea
tgtttatttctaaatatctggagctcccaatctgaaagttcttcgaagccagtcatgtttttcatccacggaggtggaaacgtaataggtagtgcagatcaaggcgggttatatgatggccagcgtttcgcctctgagcatgaagtcgttcttgtttcaatcaattacagattgggtcctttgggttggttttctcatccggcattgatagaaatggaatcaagagcttttgccaaggaggataattcggggaattacggaacgctggatattattgctgcactcaagtgggtgcaaaaaaatataagttcttttggcggcgacccagataatgtgactatttttggtgagtcggcgggtggttggaatgtaatgtcaatggtcgtttctccgcttgctagtggtctctaccacaaggctattgtccaaagtggtggtcttaaactaatggacatgggtgaggcgcagggatatagggaagatggaggtttgccgagaagttcaaaagaagaaatgaatcgaatgctccaacttgacggcagggccgccaactcagatgaggcaaaacagacacaaaacgccatgagttcgacagaaatcattgaatatcttcgaggagccgatctttcgctcgtttttggagctctggctgcagatagggatttagcggaacaagaggagcccagatccggaccagggaaaccctttatcctatggagcggaatggatgatatgc

SEQ ID NO: 259052 - DNA, 860 bp, Unknown
  Bacterial polypeptide expressing nucleotide sequence isolated from the Sargasso Sea
aattgccgatcctatttatagtcccacaagaaacttaactgaaaactacttaaaagaatttaagataaaaactaatttttattatccacacgatctgagaacattacaacacagtataaataataaaacaaaattaatttttgttgaaaacccaggaagtaatacttttgaatttcaagatcttaaaaaaattttaactatcgcaaaaaaaaataagatttttacggccatagataatacttggggtacgccatactatttaaaaccaattaaacttggttttgatatgtctattgtgtctgcaacaaagtattattcgggccattctgatgtaatgggaggaagtcttgcagttaataaaaaggtttttttcaaagtaaaagctgccgaaaaaatattagggttgaggttaagtcctgatgatgcatacttaattacaagaggtttaagaactttagatgttaggttagatagacatcaacaaaatgcaagaaaagttgcagcttttttatcaaaaaataaaaaaattaaacttctttatccgtacaaaaaaaattcaataaattttagaatgtggaaaaagtattactctggcgcttcaggattaatgggactcaaaattaaatcaaagaatgtgaattcaattaggagatttgttaattcactaaaattatttggatatggctatagctggggtggctttgaaagtctagttttgcatcaagagataagagaaacaggaaaaagaaaatatattaatttagataaagacgaacatttggttagacttcatataggacttgaggatccaagcgaccttatcgcagatatgaaacaagcactcaaacatataaaataaa

SEQ ID NO: 259053 - DNA, 864 bp, Unknown
  Bacterial polypeptide expressing nucleotide sequence isolated from the Sargasso Sea
agtccgctggagcgaggattgcctgacattgaatatctccgtccctatagctgttagagacgaggaagaaaaaggcaatcgctcagtactcgtctggattcatgggggtggttatcgaactggtcagggtgcgattccgtggtacaacggcacgagttttgcgaaaaaccacgatgtcatagtggtctcgatgaattatcgccttggtgctcttgggtttgctgatctgacgcatcttggagagggatttgccacgtcgaatgtgaatgggatgcttgatcagatagctgcattggagtgggtgcgcgataatatcgctaatttcggaggagaccccaatcgagtcacgatcgcgggtgaatccgcgggtgggttcagcgtaggggctttaatgggttgtccatctgcaaaagggctattttgcagagcgattccccaaagtggagccgccagtcacacacttccccctcatgcggccgctacagttggcgcacactttcaaaaagagctgggggcaagatcttccatagaagtaatggcagcggatgtcgagtctattctgagcgcccaaacaaaaacagccgcctacttcgaaggtttcggtgacgagcaaaaatcgctcggcacaactgtatcacccttctatccaactcatggaaccaaattgctccctgagtctccacttacggccataagaggtggcctaagcaaagggatcgctctattgacaggtagcaacggtgacgagacgacactctggggttatggcaaagtcgatcaagacagactagacgccattatccaaatgtatcgagcccagcctgtgctggacgctctgaataaagaattgccgggcgcatcgct

SEQ ID NO: 259054 - DNA, 844 bp, Unknown
  Bacterial polypeptide expressing nucleotide sequence isolated from the Sargasso Sea
ccccgtaggcgaattacgctggcgtccacctcaaccggtaacgccatgggccggagttaaggaaaccaccgattacggtaacgattgtatgcagttgcctttcccaagcgacgcagcgccgctagggaaaatgccggcagaagattgcttgtacgccaatgtctgggcacctaaagatgccgatggttctacgccggtactggtgtggatctacggtggtggctttgttaatggcggcgcgtctccagcggtttatgatggcagcgaatttgccaaaaacggcgttatttttgtgagcttcaactatcgtctgggacgctttggtttctttgcccatccagcgcttacggcagaagccaaagccgctggcgatatgctggctaactacgcgtacatggaccaaatcgcagcgctgaaatgggtgaatgagaatattgctgcctttggtggcgatgtgaataacgtgaccattatgggcgaatcagccggtggtggctcggtacatgccatgatgcaagctgagcaggtcagagggctgtttgatcgggcgattatcatgtctggcggtggccgttcactgtttggtaatcgtaaggtcagcgaaccaacgccgggctctctggcgggtgagcagtatggccttaactatgccgaaaagcatggtatcacgggcacagatgccgaagccctagctgctctcagggagttaagcccggaagacatcgttgatgggtttaatctggccgcattatttaatcccacaccaacagacaaaccaacctgggcgggtggcccgatgcaggatggtgaaatcattacggcaactaccgaagaagcccttcgc

SEQ ID NO: 259055 - DNA, 853 bp, Unknown
  Bacterial polypeptide expressing nucleotide sequence isolated from the Sargasso Sea
aatgtatgttggaacagaagactgtctctatttagacatttcagcacctgcaagaagtatgtctgattcacttcctgtaatgttttggatacatgggggtggaaatacatcaggtttaaaagatttatatgattttaacaagatggtaaaaaagcatgacgtaatagttgtaagagctaattatagattgggcccatttggatggttttatcatccctctattcaaggatatcaagatggtttagacaaaacctcaaactttggcacattagatttaatagaagcactcaaatggatcaagacaaatatctcaaagtttggtggtaatccaaacaacgtaaccatctttggagaatctgccggtggtcacaatgtcctatctttacttgttgccgataagtcaaaagggctttttcataaagcaatttcaatgtcaggatataccacctcaattgaacaagctgacgcatacatacaagaagaaaaatcttctacgtctatgcatacaagctcggaaattgttaaaaatattattgaaaacttaaaaggctccatcagtgaatatactgatgatgaaattagaaatattttgttaggactttcaacagaagaattttttcaatattacgcagaaaggaaatcatatgaagaaattccacttcttgcttctgatggaatagtcataccaaagattggtcttaaagcagctctatctagtaaggattttgtcaatagtgttccaacgatagcaggctcaaatatagatgaagttaaactatggttggcaactgcagaatactttgttgagttggatttttcagctattggctctgtcttaatattccaaaagtaa

SEQ ID NO: 259056 - DNA, 418 bp, Unknown
  Bacterial polypeptide expressing nucleotide sequence isolated from the Sargasso Sea
tatgtcaaagatattaaataaaacaattgtagccttagtttttcttatgcttctgctagttaacacactttatgcagaagagtcatacatttttaaaacaaataaaactgaatttattggttcggtagcaaaagaaaagggagataaaaagacaatttcctttgttggaattccctttgcaaagcctccagtaggtgacctgagatggaaagctcccagggaattagatggctatcctgaaacatttaaagcaaccactctaccgaataggtgtatgcaagttagtaacttttatgattcaatggatggcattgaaggtgagtcaatcattggttcagaagattgtttgtatttaaatatatatctttctgaaaaagcatataagagcaaagagaagctgccagttgtttttttggat

SEQ ID NO: 259057 - DNA, 523 bp, Unknown
  Bacterial polypeptide expressing nucleotide sequence isolated from the Sargasso Sea
catgaagagtttaattaatttacttaccttattggttacaagttctgtacttgcagagattaatgagccaatagaaatctcctctggaaagattagtggtataacgttggacacaggagtccaagcgtttcttggtattccttatgccgccgcgcctgttggggaccttcgatggaaggcgcctcagcctgcgattccatggaaaggggtaaaagtagctgatcgtcatggtgccgcttgtatgcaacggggtgattcctacatgagcgaggactgtctgtttcttgatatttggacaaacggacaagatagcgacaaattacccgtaatggtgtggatccatgggggtgggtggacatttggatctaattcgcaagacatctatgatggtgaagccttcgcggaaaatggtgttgtactggtctctgtaaattatcgaatgaatagttttggttggatggcgcacccggaattatctcaagagtcagaagatggagtctcgggtaactatggaattttggat

SEQ ID NO: 259058 - DNA, 531 bp, Unknown
  Bacterial polypeptide expressing nucleotide sequence isolated from the Sargasso Sea
attggctaattatgacgaagaaaatgagttattaatctttcgaggcattccttatgctgagcctcctgtgggcaatctcagatggaaatcgcccgttccaattgagttgaaatctcaaatcgatgcccgctcatttaaacccgcatgcatgcaagacacctatatcactgattggtatcacgatgtgattgattctttcaatgaagacaaatctttatttcagcatgtagaagcggtgagtgaggactgtttgtatctaaacatatggacgtcatcaattgataggaatcaaaaaaaaccggtgatggtttgggtgcacggaggtgcagatacgggcggatggtcatatgagccagactatctgggacacaatctggctaaaaaagatgtcattgtggtttccatcggatacagactcaatgtctttggtttcttcaaacatcctgaaatgagtgatgagactggaaactttggattggaagatgaaattctggcgctgaaatggattcgggacaatatcgaagatttcgg

SEQ ID NO: 259059 - DNA, 917 bp, Unknown
  Bacterial polypeptide expressing nucleotide sequence isolated from the Sargasso Sea
gtggtggaatacttctggcctaaagatttatatgactttgataaaatggctagcaagcatcaagttataattgtgagaataaactatagattgggcccatttggatggtttacacatccagcaattcaagatcttcaggagggtattgataaaacttctaactttggaactttagatataattgctgcattaaaatgggttaagaataatataagtttatttggcggcgaccctaacaacgttacaatatttggtgagtcagctggcggtcataatgtttattcgctcattgcatcaaaaaaagccgatggcttatttcataaagccatatcaatgtcaggatatacaacctcaatatctactaaagatgcatataagcagtctaaaagatccgcaacttcagattttactagctgggaagttgtagaacgtctaacaaataataatcaatccaaccttagcaaaaaagaaataagagatatgttgttaaacatgcctgcaactgaattctttgaaatatacgctaacagagaaagctatcaagaaatacctttgttaactgctgataatattgttatttctgaaataggactaagaaagtcattgtcagaaactaatctaattaataatgtaccagttattgcaggctcaaatgcagatgaagttaaattatggcttgctacggctgaatactttgttgatctagattattcttttttaggctctatttttggaataccaaaagttgtcttaaacaacgaagaatcttttgaagcttttaattattacagaagctcagcatggaaaataagaggtgttgataatccgcttcaaagtttatcaaaagcaggaaataataaattatattcatacaggtttgactgggatgatcatacaaaatttatagttggagactt

SEQ ID NO: 259060 - DNA, 860 bp, Unknown
  Bacterial polypeptide expressing nucleotide sequence isolated from the Sargasso Sea
accatctaacttaggtggtgtcgaaggtaaagatttttttgttggatctgaagattgtttatatttagatatatttgcaccaaaaaaaacaaataataaaaaactcccagtgatgttttggattcatggtggtgggaatacatctggtttgaaagatttatatgatttttcaaaagttgtttcaaaacatgacgttattatcgtaagaattaattatagattagggccctttggttggtttacacatcctgctattcaaagatttcaaaatggtgaagataaaacttctaattttggaactttagatatagttatggctttaaaatgggtaaaagacaacatttcaaaatttggaggtgcgccagacaatgtaactatatttggtgaatctgcaggaggtcataatgtattttcgcttcttgtatctagcaaagcaaaaggtctttttcataaagcaatctctatgtcaggatataccacttcaatatctctagaaaatgcatataaacctaagaagacatcatcaacttcaaattattctagttctattgttgttgataaactaaacaaaaaatttaatacaagcgttgactcagttgaagatatacttcaaagagaaagaaaaatgcttttatctataagcgcgagagatttctttgaaatatactctcagagagacacatatgatgaaataccactattaacaaatgatgccatagtgattcctaaaataggtttgaaagaggctctttcaaataaagagcatttaaatattgttcccacaattgcaggctctaataaagacgaagttaagctttggttagcaactgctcgatattttgtggatctagactattcta

SEQ ID NO: 259061 - DNA, 788 bp, Unknown
  Bacterial polypeptide expressing nucleotide sequence isolated from the Sargasso Sea
aatgcccaaaaaacgactactaaaatggaaaaattcacattgcgtaatacacggtggtgctggtactattttaaagaaaaacatgacagaggaaaaggagctagaatatagaaagacactcaacgaatctttgatggctggatacaatatactatcagctggtggtgcaagcgaggatgctgttgaagctgctattgtggtgatggaggactctccgctttttaatgctggtcgtggttctgtttttaatagtgatgggaaaaatgagatggatgcatcgatcatggatgggaaaacacgaaatgccggtgcagttgcccaggtcaacaacattaaaaaccccatacaagctgctagggctgttatgaatcattctcctcatgtaatgatggtgggagatggtgccataacttttgccaaagagcaaaatttagaaatggttgatagcgcttatttttacgacgaaagaaggtggaaacaatgggaaaagctcagaggttctaatgagcagcaactggatcattcagaggaaagaagcgatgtaaatcaagaacaactagatattgaattcaatgagaaggtagaccataaatttggaactgtaggtgctgtagccattgatcagtctggtaatattactgcaggaacctcaacaggagggatgacaaataaaatgtatggaagaataggtgactctcccattattggctctggcacttatgcagacaacaatacctgcggtgtgtcatcaacgggtcacggtgagtttttcatgcgtgctgttgttg

SEQ ID NO: 259062 - DNA, 829 bp, Unknown
  Bacterial polypeptide expressing nucleotide sequence isolated from the Sargasso Sea
agtaaatcctccattggtaagaacatcaacaatggttttcaagtcaatgagtgacttaaggcaaacacaaaaaaaaagtttaaaaaatccaaggggtggttattttgattatggaaggcaaggcacttcgaccacacttgaattagagaaattattaaccaaactggaagaatcctatcatacttttttgacacctactggatttggtgcagtttttttgactttatttagtatattaagaccagaagatgaattaataattgctgatccagtttatagcccaactagaaatttaacagaaaaatatttaaaagattttaacatactcgcaaagttttataatccaaatgatttaagcacgatcaaaaaaaatatcacaaaaaaaactaaacttatttatgtagaaaacccgggaagcaatacttttgagtttcaagatctgggaaaaatactttccatagcaaaaagtaaaaaaatttatacagcaatagataatacctgggggaccccttactttttgaagcctataaaactaggatttgatttatcaatagtttctggaaccaaatattattctggacactcagatgtcatggggggaagtttagcagtgagccaaagagtatttggaagagttttacaagcacataatatgacaggtttaagattaagccccgatgatgcatacctaattatgagaggattaagaacattagatgttagattagataaacaccaggaaaatacaattaaaatagcacgatttttatcccaaaaaaaaaatattgaagttttatatcctttcaaaaaaaactcgaaaaattataag

SEQ ID NO: 259063 - DNA, 809 bp, Unknown
  Bacterial polypeptide expressing nucleotide sequence isolated from the Sargasso Sea
aaaagaatttgatattaaagcaaagttttatgatccaaataatttaaatactattaaaaccaacctaacgaaaaaaacaaaacttatttatgttgaaaatccaggaagtaatacatttgagtttcaagatttaggatcaattcttaaaattgctaagaaatttaatatttatacagcaatagataatacctggggtactccatattttttaaaaccaataaaactaggatttgatatgtcaattgtatcggcaacaaagtattactcaggtcattctgatgttatgggcggaagccttggtgtaagtaaaagaatttttaaaaaggttatggaggctcaaaatatgacaggtttgagattaagtccagatgatgcttatttaattatgagaggtattagaactcttgatgtgagattagacaagcatcaagagaatgcaaatattatagcaaaatttttgtcaaaaaaaaaaaatattaaagttttgtacccaatagtcaaaggatcaaaaaactttaaattatggaaaaaatattattcaggatcctctggtttaatgggtattaaaattaaagcaaaaaataaaaaatttgtagataaatttgtaaactcactcagtctgtttgggcacggctatagttggggaggttttgaaagtttagctttacatcaagagattagagaacaaggaaacagaaaatatttaaaattagataaaaatgagtacattgttaggttacatataggactagaggaccctaaagatcttattaatgatataagtaaatcattaaaacatattaaatgag

SEQ ID NO: 259064 - DNA, 762 bp, Unknown
  Bacterial polypeptide expressing nucleotide sequence isolated from the Sargasso Sea
attcattaaaaaaaaaaattaataaaaaaacaaaactaatctttgtggaatgtcccggaagtaattcatttgaatttcaagacttatctaaaattttatcgattgctaaaaaatataaattatttacggcaatagacaacacttgggcaacaccatatttttttaaaccaatttcattaggttttgatatgtccatagtttcagctactaaatattattcaggtcattcagatgtaatgggaggtagtttagctgttaataaaagagtatttaagcatgtgaaaaaggcaaacgatattgcaggtttacgcttaagcccagatgatgcttattttattataagaggtttacgaactttagatgttagactggataaacatcaagaaaacgcaagaaaagttgcagcttttttatcaagaaataaaaaagttaaactactttatccttacaaaaaagactcatttaattttagaatgtggaaaaaatattactcaggagcttcgggacttatgggattaaaaataaaagcaagaaacaaaagttcagtattaaaatttgttaactctttaaaattatttggatatggatatagttggggagggttcgaaagtttagcattacatcaaagtaaaagagaacaaggagatagacaatttcttaaattagagaaaaatgaacatttagtaaggctccatatagggttagaagattcaaaagatttaatcgatgatttaaaaaaatctttaaagtttattaaatgag

SEQ ID NO: 259065 - DNA, 631 bp, Unknown
  Bacterial polypeptide expressing nucleotide sequence isolated from the Sargasso Sea
gcgagatgtcccgggcgaatgcagcgaagattgcttatttttaaatatctacacaccggcgccagacaataaggcgcgtcccgttatggtctggattcacggaggcgcatttgtccgcggatccgcaatcgaatacgacggctcagtactcgcaatgcaaggggatattgttgttgtcacggttaactttcgtctgggtgtatttggcttctttgggctctcagactttggctccgagtatgccggttcggaatcaaatggcgttcgcgatgtcctcctcgcgctcgagtgggtccgggacaacatagccgattatggcggcgatcctggcaacgtcacgatatcgggtgaatcctccggtgccaccatggtcatgagcctgctcgctgtgccagcggcagactcgctctatcacaaggcgattgggcacagtgctacgtgtgtttttcgggaaaaaactgatcgcacggagcaattgagtgattgcattggagtcgagccgaatcagttgcttgataggctaaaaacaatgcccgccaatgaaatcgctaatataaatttccctattggagtgtacgttgacggcaacgtcatctcgcgctcgactatggatgccattcgtgatcggggt

SEQ ID NO: 259066 - DNA, 831 bp, Unknown
  Bacterial polypeptide expressing nucleotide sequence isolated from the Sargasso Sea
tctatttcagcatgcaaaagaggtgagtgaggactgtttgtatctaaacatatggacgtcatctattgacaggaatcaaaaaaaaccggtgatggtttgggtgcacggaggtgcagatacgggcggatggtcatatgagccagactatctgggacacaatctggctaaaaaagatgtcattgtggtttccatcggatacagactcaatgtctttggtttcttcaaacatcctgaaatgactgatgagactggaaactttggattggaagatgaaattctggcgctgaaatggattcgtgacaatatcgaagatttcggtggcgatcccacgaatatcacatactttggtgaatctgccggaggcgctcatgtttcctatctgactgcatcgccagaagctaaagggcttttcaaaagaggcatcattcaaagcggtgggtacaacctattcaattggcgaagcgttgatgaggcgcatgaacttgcgattcgaacgcaaaatatctcgggcacagttgacctcaatgatctcaaaagcttggatgagaacgcccttctgcaagcatcgagaaacctttatcatccatacagaccaatcattgatggaagaatcattaccgataatctagccaagaaatatatcgaaggaaatgtaaacgatgttgatctaatgattggtagcaataagaacgaggatctactttatgtcgatgatgatccgactctagaaaagttttcagaggaaatagctgagtattatccagaccgagtcgatgaaattctcgccatgttggatatgtctgatctacgtctggcaatggatcactttgg

SEQ ID NO: 259067 - DNA, 341 bp, Unknown
  Bacterial polypeptide expressing nucleotide sequence isolated from the Sargasso Sea
tttgaccgttggtgtttatgggtcaacagattatcaaccaacaacttttatcaaagatacgaaacttataggcagtttgcatcaaaataatgaagtagagatgtttcttggcatacctttcgctgtcccaccaattaatgacctcagatgggaaaagcctattgcttggactcctgaagataaaaaagaaataactgctaacaagtttagagccgcatgtattcagaaccaaagaattgttaattggtataaaaggttaattcttgactttggtagcgatcctaaaactttcgatattccagagtttagtgaggattgtttgtatttaaatttatggcgac

SEQ ID NO: 259068 - DNA, 896 bp, Unknown
  Bacterial polypeptide expressing nucleotide sequence isolated from the Sargasso Sea
gggaacttcaacaacgcatatacttgaaaaaatgctaacaaaaatggaggagtcataccatgttttcttaactccaactggtttcggttcagtattcttagcaatttttagtattgtaaggcctggagatgaaattctagtagcagatcctgtttataaccctactcgtattttaactgaagattttttaaaagattttaaaataaaaaccattttctatgatcctcacgatttagaaactttaaaaaagaaaataacaaaaaaaacaaaaatgatttttgttgaaaatccaggaagtaattcttttgaatttcaagatttgtcaaaaattgtttctatagcaaaaaaaaataaaatattttctgcaatagataatacttggggcaccccttattttttgaaacctataaaattaggatttgatatgtcgatcgtttcagctacaaagtattattcaggccattcagatgttatgggcggaagcttagcagttaataagaaagtttttaaatatgttcaaaaagctactaaaattacaggacttagactgagccctgatgatgcatattttattataagaggattaagaactttagatgttcgcttagatagacatcaagaaaatgcaaaaaaagttgccggatttttatcaaagaataaaaaagttaaattgttatatccacataaaaagggttcaataaattttaaaatgtggaaaaaatattattctggcgcctctggattaatgggtttaaaaataaaagcaaaaaataaaaaatccgtaattaaatttataaattcactaaaattatttggctatggttatagctggggaggattcgaaagtctcgcgcttcatcaagatctaatggaaagaggtgatagaaaattctgaa

SEQ ID NO: 259069 - DNA, 526 bp, Unknown
  Bacterial polypeptide expressing nucleotide sequence isolated from the Sargasso Sea
aatgggaggaagtttagcggtaaataaaaaattatttaaaaaggtgttaatagcacaaaatatgactggtttaagattaagccctgatgatgcatattttattatgagaggtatcaggactttggatgtcagattggataagcaccaagaaaatgcaaaaaaaattgcaaattttctctcaagaaaaaaaaatattgaagttttgtatcctatatctaacaaatcaaagaattatttattttggaagaaatattattcaggatcttctggtttaatggggattaaaattaaatctaaaaataagcaatcagttgatagatttgtcaattcacttaaattgtttggacatggttacagctggggtggatttgaaagtcttgctttacaccaagaaataaaagaacaaggacaaagaaaatatttaaatttgaaaaaaaatgaatatttagttagattgcatattggattagaagatatagaagatctcatcaaagatattaataaatctttaaaatatattaaatga

SEQ ID NO: 259070 - DNA, 874 bp, Unknown
  Bacterial polypeptide expressing nucleotide sequence isolated from the Sargasso Sea
ctcaggccctgttgttggatttcgagatcggggtgtagatgtttggttggggattccattcgctcgaccacccgagggtgatttgagatggcgggctcctcgccttccagttccatggtctgatgccaaggaggttttggattacgggcctgagtgtcctcagaatatgatgggcttgtcaggccaggaagattgtttgtatctcaatgtttggagtccctcagaagccgctgaacccttaccggtcatgttttttatccatggaggaggaaatcacattggtagtgcgaatgccggtggtctttatgacggacagaggtttgcgtctaatcatgatgttgtgatggtctcaattaattatcgcttaggccctctgggttggttttctcacccgagtcttgctgttgaagagacagatgaattttccaaaaaggataattctggtaactacggcaccttggatatcttagcggctttagagtgggtccaaggaaacattaagaattttggcggagatccaggcaatatcaccatttttggtgaatcggcgggtgcattcaatgttctgtctatgatggtatcgccccttgcagaaggcctgtatcacaaggccatctcgcaaagtggtggaatacgcttgatcccaatggaggtagcccaacattatcaggaggaagggtcgggtcatccgttaagtgctcgtgagataactagccggatgcttcttaaatctggacttgcagtagatcaggaggatgcgcgaggagttcaggagatgatgtcagacggtgctatccgaatatttctgcttaaccagtctgcagaatcgatactactagcacaggatgattcggaatcagacgcgaacgactca

SEQ ID NO: 259071 - DNA, 523 bp, Unknown
  Bacterial polypeptide expressing nucleotide sequence isolated from the Sargasso Sea
atgaagaattcgatactaatttttttacttgcggtaattcccgcatcgacttacgcatctctcgatgaaccaatccaactccaagcaggtcaaatatcaggtactttgctggctaacggagttcaggcttttctgggcgtgccctttgctgcccctccggttggcgaccttcgctggcgaccccctcagcctgcagtcccctggtctggaataagggagatggatcgaaaaggaccagattgtatgcaaggaaggaatactaacttcatgagtgaagattgcttgtatttgaatgtgtggacgaaagccgaatcttcgtctgacaagctaccggttttggtttggattcatggtggtggttggcgatttaaagcgacatatgacggagatgctttcgctgccaatggagcagtattggtatcagtaaattatcgaatgaacgcttttggttggatggctcatcccgctttgtctgatgaatcggaacacaacgtttctggaaattatggtgttctggatcatc

SEQ ID NO: 259072 - DNA, 943 bp, Unknown
  Bacterial polypeptide expressing nucleotide sequence isolated from the Sargasso Sea
tttaaaacaagtaggaaaagattatcaaaatcagtcagttaatccaccagtagtaagagcttcaacaataatatttaaaactcttcaagatataaagcaaacacaaagtaattataaaaaaaatcccttaagcaaaaattttgattatggtagaaaaggaacatcaacaacttttgcactacaagaactattaagaaaaattgaaaatgcttatcaagtttatttaacaccaacaggatttggtgcagtttttcttggagtgattagtgttgtaagacctggtgatgaaataattataacggactcagtctactctcccacaagatttttaaccgaagactatttaaaaaaattcaatattaaagcagtattttatgatccaaaaaacttagatgacttaaaaaaaaaaattacaaataagactaaacttatttttgttgaaaacccaggaagtaacacatttgaatttcaagatttaaaaaaaatattatcttttgctaagaataagaatatttatactgctattgataacacttggggaacaccttatttaatcaagcctttagacttaggttttgatatgtctatagtttcagcgacaaaatattattctggtcattcagatgttatgggtggcagtttagctattaaaaaaagactttttaaagaagtggaattaagtcaaaaagcagttggtttaagactaagtcccgatgatgcctatttaattatgagaggactaagaacattagatattaggttagacaagcatcaagataatacaatcaaggtagctaattttttgagtaaacaaaaaaaagttaaagaggttttttatccacttaaaaaaaatattaaacaatacaaaatgtggaaaaagtattacacaggatcatctgggttaatgggtgtaaaaatatttctaaaaataaaaactctgtaa

SEQ ID NO: 259073 - DNA, 811 bp, Unknown
  Bacterial polypeptide expressing nucleotide sequence isolated from the Sargasso Sea
ttgtatgttggcactgaagattgtttatatttagatatctcggctccagcaagaaaaaaatctgaacttcttccggtaatgttttggattcatggtggtggaaatacatctggattaaaagatctttatgattttaataaaatggtaagacgtcataatgttattgttgtaagaataaattatagattaggcccgtttggatggtttacacatccttcaattcaagattttcagaccgatttagataagacttcaaattttggaacattggacatcatagctgcacttcattgggtaaaagaaaatattagcctttttggtggggacccagacaatgtaacaatctttggagagtctgctggaggacacaatgttttttctttgcttgtatcagacaaatccaagggactttttcacaaagcaatttcaatgtcaggctatacaacatcaattagtcccaaagatgcatatgtccagaatgataagtcatcaacctcatcatatacgagttctgaaattgtaaaaaaaattattaaagagctatctaatgaaaaagaaacatattccaatgaagaaattagagatattttattgaacttatcaacgcaagagttttttgaacattatgctaacagagagacttatgaagaaatcccattacttacatctgataatattgttattcctgaagctggcctaagagcctctcttttcaacaaagatattgtaaataaagttccaactatcgctggttcaaatagagatgaagttaaattatggttagctaccgccagagtattttgtagaatta

SEQ ID NO: 259074 - DNA, 791 bp, Unknown
  Bacterial polypeptide expressing nucleotide sequence isolated from the Sargasso Sea
aaactcataggcagcttgcatcagaataatgaagtagagatgtttcttggcataccttttgctgtcccgccaattaatgacctcagatgggaaaagcctgttgcttggactcctgaaaataaaaaagaaataactgctaataagtttagacctggatgtattcagaaccaaagaattgttaattggtataaaaggctaattcttgactttggtggcgatcctggaactttcgatattccagagtttagtgaggattgtttgtatttgaatttatggcgaccaaggggattaaaaaataatttacctgtaattgtttatatacatggtggaagcaataaagctggctggtcgtatgaacctaattatcttggtcataatattgctaacaaaggctttatacttataagtattccatatcgccttggggtgtttggctttttttctcatcctgatcttgaaagccctaatcttgctttatatgaccagattttggcccttgaatggatacaaaaatatgtttctttctttggtggtgatccgtccaatgttactttagttggtgaatcagcaggtgctggaggaatcagtcatttaatagcttctcccttaagcaaaaatttatttcataaagcagtccatcaaagtggcggatcttcttttacctatccaacttcaggttcggatgtaagaaagttggcaaatagctttgcaaattcttttgaagatccgtcacttaaaaatctaaaaaatatcagcgcagaagaaatacttgaggtttcagaagaagttta

SEQ ID NO: 259075 - DNA, 786 bp, Unknown
  Bacterial polypeptide expressing nucleotide sequence isolated from the Sargasso Sea
attggtaagaacctcaactatggtctttaaatcaatgtctgatttaagaaaagttcagaggaaaaatttaaaaaatcctagaggaggacattttgaatatggaaggcaaggtactgcaacaacatttgaacttgaaaaaattttaactaatttagaagaatcttatcatacttttttaacaccaactggttttggatctgtttttttgtgtctatttagcattttaagaccaaatgatgaaattataatcgcagatccaatatatagcccaacaagattattaacagaaaattatttgaaagagtttgatattaaaactaaattttacgatccaaacaatttagatactataaaaaaaaatttcacaaaaaaaacaaaattaatttatgttgaaaacccaggaagcaatacttttgaattccaagatttaggtaaaatcatttcttttgcaaaaaaacataaagtcttaacagctatcgataatacctgggcaacaccatatttcttaaaacctataaaaatgggttttgatttatcaattgtatctgcaacaaaatattattcaggccattctgacgttatgggaggaagtctggcagtaagtaaaagagtatttaataaagtaattaaagctcagaatatgaccggtctaagattaagtcctgatgacgcttattttataatgcggggaattaggacactagatgtaagattagataaacatcaggataatgcaattaaaatagcaaagtttttatcgaaaaaaaagaatatagaagttttgta

SEQ ID NO: 259076 - DNA, 907 bp, Unknown
  Bacterial polypeptide expressing nucleotide sequence isolated from the Sargasso Sea
actggctgggtgtgcaacaaataaaaaccttgaaattagatcctcaaatcagagtgcgcacagaagtattccagttggcgaattaataggatatgtccatgaaaatagggctcatgcttggttggggattccctatgccaagcctccaatcggagatttaagatggaaagcaccaagaccaaaagcttcatgggaaggagttttaaatgcaactgaatttggcgctccctgcacacaaattggctcaacatttggagatccagaagcaaaagttggctctgttcatggttcagaggactgtctttatctaaatatttttgctccacttaatattggggaaaatgagaagcttccggtgatgttatggatacatggaggttctaataccattggcaccgcaaagttatatgatccaagtgtactggcatcttcccaaagagtgattgttgtcactctaaactatcgccttggaatatttggatggttttatcatcctagtattaaaaatctatcagaaagcccagaggatggatcaggtaattatggcactcttgatcaaattcaatctttaaaatggattagacaaaatatctctcactttgggggagataatgaaaatataactatttttggagagtctgctggtggtcataatgtttatacattgttattttcgcctttggcagagggtctttttcacaaagctatctcacaaagtggcagcacgaaaacactgtcgattgatcaggcagtaagtattgatgacgcaaccaaaaataattctgatggcacaagctcaaaagagatattaaatcaattaattattgctgggggattggctagagacagaaacagtgcaattgaaatgcaaaattctatgcaagatcatgagatagtgaatttcttc

SEQ ID NO: 259077 - DNA, 820 bp, Unknown
  Bacterial polypeptide expressing nucleotide sequence isolated from the Sargasso Sea
aatgaaaaaaattttagttacaattctaatcttatttgtttttaccggcgcacaatcattttcaaatgaggtcgttgatgagtcaaaagtagttttaggtgatgttgagattgttggcacaaaaataaatgaagaggatcaaaaagatatatatgcatggtatggaataccttatgccaaagcaccagaaggagatttaaggtggaaagctccacgtgattttgaatttacatcaaatcgttttgatgccactaaattacctaacagatgtgttcaagtatcgaatttttatgatgaattaattactggacaaaaagaagggacaatttttggatcagaagattgtttatatttgaatatatttgcacctgcagattcttttaaaagcaataaaaaactcccagttatgttttggattcatggaggtggaaatacttggggctactcagcatctcctatgtatatacctactaattttctaaaatttcatgatgttattctcgtatccattaactatagacttggacctttcggctggttttctgttccaaatttaaattccaattctaacgagccacttgatcaatcaccaaattttggaacccttgatatgataaaatctctagagtgggtaaatcaaaatattagctcttttggtggcgatccaaataatattacaatttttggtgagtctgccggcgctcgaaacgtactttcactttatcttgctgaaccagctaagaacttgtttcaaagaggaatagtgcaaagtggatacttagtttcagataatcttgaatactcaagaaataacccaaat

SEQ ID NO: 259078 - DNA, 874 bp, Unknown
  Bacterial polypeptide expressing nucleotide sequence isolated from the Sargasso Sea
gatgcttgcaaactatgatgacgagaatgggttattcatattcagaggcgttccttatgccaaaccgcctgtgggcaagctgcgatggaaatcacctcaaccagttgaagaaaaatcacagattgatgcacgctcttttaaaccggcctgcatgcaggatacctatatcactgattggtaccacgatgtgattgaatcttttggtcaagacaaatctttgtttcaacacgtcgagaatgtcagtgaagactgtctctatctaaatatttggacatcatctgtaaataaaaatgaaaaaaaacctgtgatggtatgggtacatggtggagcagacacaggcggatggtcatacgaacctgattatctcggtcatcatttggcaaaaaaagatgttgtagtggtctccattggctatcgattgaatgtctttggattctttaaacatccagagatgactgaagagactggtaactttggattggaagatgaaatactcgcgctgaaatggatcaaagagaatattgcagattttggcggtgatccatcaaatgtcacatactttggtgaatctgccggaggcgctcatgtttcttatcttgccacatcacctgaagcgaaaggcctatttaaaagaggcatcatccaaagtggtggttacaatctgttcaattggcgaagcgttgatgaggcgcatgaacttgcgattcgaacgcaaaatatctcgggcacagttgacctcaatgatctcaaaagcttggataagaacgcccttctgcaagcatcgagaaatctttaccatccttatagaccaatcattgatgggaaaataattaccgataatctagccaagaaatatatcgaaggaagcatcaat

SEQ ID NO: 259079 - DNA, 982 bp, Unknown
  Bacterial polypeptide expressing nucleotide sequence isolated from the Sargasso Sea
ccatcaagatttaagtctcgaatctggaaaatgtaccagtggcaactatggcacgctcgaccagatcgctgcattgcaatggatccaggaaaatatccaagagtttggaggagaccctaatcaggtgactattttcggggagtctgctggaggtgaatctgtcgcgcatatgctgacctcacccctcgctgacggacttttcgcacgagccattattcagagtggagccaattctggtcagatgcaccaccaaaaagagtctgttttgggtcacgaatctggtgaattacggggggaaagatttgcagataactttacttcgtcaccaaatcaaatagatgccttgcgacgcgtaccggcttctgaaattatggcccacatcagatctgaagacgatttcgagttgcgaagcttcttcccagtaattgacgggtacatcctcccaatgagtccttttgaatccttcagacaaggaaagcaatcaaatgtcccattgcttgtaggaagtaattcggacgagggatcattattcgcgccgcatattccaatcccgctcattgagtatcgaggacttgaaccttctcccgcagaaatggaccggttactttcacgagaatttcttgatgatgccgacttgataaaggaactctatccaggcatcgaggattctaactatctttccaaacaggagatgttaggagactcgttatttggagcgccagcattctactatgctcgattgcatgctcaaaagaatcccaatacgtttctctactatttcaatcagcaaccaccctctaaaacacaaacagcaggggcgtaccatgcggccgaacttggatacgtcttcgatcttcgttcaccgatatttcctaagtcgaagacagggaaacaattggccaaaaccatcaaccgaacttgggctgaatttgctagaagtggcggaccgaacaataaaacgctgcctactggccggctttgt

SEQ ID NO: 259080 - DNA, 774 bp, Unknown
  Bacterial polypeptide expressing nucleotide sequence isolated from the Sargasso Sea
tgtgcaacaaataaaaaccttgaaattagactcccaaatcagagtacgcacagaaatattccagttggcgaattaataggatatgtccatgaaaatagggctcatgcttggttggggattccctacgccaagcctccaataggagatttaaggtggaaagcaccaagaccaaaagcttcatgggaaggagttttaaatgcaaccgaatttggcgctccctgcacacaaattggctcaacatttggagatccagaagcaaaagttggctctgttcatggctcagaggactgcctttatctaaatatttttgctccacttaatatcggggaaaatgagaagcttccagtgatgttatggatacatggaggttccaataccattggtaccgcaaagttatatgatccaagtgtattggcatctacccaaagagtgattgttgtcactctaaactatcgcctcggaatatttggatggttttatcatcctagtattaaaaatctatcagaaagcccggaggatggatcaggcaattacggcactcttgatcaaattcaatctttaaaatggattagacaaaatatctctcactttgggggagataatgaaaacataactatttttggagagtcagccggtggccataatgtttatacattgttattttcgcctttggcagagggtctttttcataaagctatctcacaaagtggcagcacgaaaacactgtcgattgatcaggcagtaagtattgatgattcaatgaaaaacaattct

SEQ ID NO: 259081 - DNA, 940 bp, Unknown
  Bacterial polypeptide expressing nucleotide sequence isolated from the Sargasso Sea
attaatattaactttaattgtagctttttgttcttatgttgcattagcagatttcgtagtagagacttcatctggaattgttgatggatataaaaagaatagggccatatactgggatgatattccatatgcaaagccacctgtcggcaatctgagatggaaagcgccaagaaaaataattaattccaaaatagaaattatatctagagatgataacttttgtgttcaaaggccatcctcgctaggaggtgttgatggagatggtccatttgtagggtcagaggattgcttatacctggatattacagcccccaaaaaaactcaatccggtctttttccagtaatgttttggatacatggcggtggtaatacttcaggattaaaagatttgtatgactttaataagatagttaaaagacatgacgttattgttgtaagaataaactatagattgggtccctttggatggtttactcatccatcaatccaacaatatcaagatggcatagacaagtcatcaaattttggaacattggatataatagctgctcttgaatgggttcaagagaacataaaactttttggtggcgacccaaacaatgttacaatttttggagaatctgctggcggtcataatgttttgtctttgttggtgtcaaaaaggtctacaggattatttcataaagcaatatctatgtcaggctatacaacatctattaagccaattgatgcttacaatcagtctaaaaaatcttcaacttctgctcataccagctcagaaattgttaaaaagataattgaatcaaaaaattttgataacgtctcttattcagatatagatattagaaacatcttatacaatcttactacagatgaattctttcaacattattatgaaagagaatcatatgaagaaataccactattgacatcagatggt

SEQ ID NO: 259082 - DNA, 684 bp, Unknown
  Bacterial polypeptide expressing nucleotide sequence isolated from the Sargasso Sea
aatgcttaaagcctttgccaggattgttgttatcctttttgctgttggtgtttatgggtcaatagattatcaaccaacagcttttatcaaagatacgaaacttataggcagtttgcatcaaaataatgaagtagagatgtttcttggcataccttttgctgctccaccagtagatgacttaagatgggaaaagcctgttccttggattccatcattaaataaaaaaattattgctaatgaatttaagcccgcatgttttcaaaaccaaagaattgtaaattggtataaaaggttaattcttgacttcggtggcgaccctgaaacttttgatgttccagtatttagtgaagactgtttgtatttaaatttatggcgaccgaaggatgtaaaaaattatttacctgtaattgtttatatacatggcgggagcaacaaagctggatggtcatatgaacctaattatcttggtcataatattgctaacaaaggctatatattaataagtattccatatcgcctgggggtatttggctttttttctcatcctgatattgaaagccctaatcttgctttatatgatcagattttggcccttgagtggatacaaaaatatgtttctttctttggtggtgatccatctaatgttactttagttggtgaatcagcaggtgctgggggaattag

SEQ ID NO: 259083 - DNA, 492 bp, Unknown
  Bacterial polypeptide expressing nucleotide sequence isolated from the Sargasso Sea
ttaaaaaagtattacatgcacaaaatatgacgggtttaagattaagtcctgatgatgcttattttatcatgagaggaatacgtacgttagatgtaagattggataaacatcaacaaaatgcaaaacaaatagctaaattcctctcgacaaaaaaaaatattgaagttttatatccactcaagaagaactcaaaaaactataaactctggaataaatattattctggttcctctggattaatgggaataaaaataactgcaaaaatcaaaaagtctatagataaatttgtaaattctttaaaattatttggacatggttatagctggggaggatacgaaagtttagcattacatcaggaaattaaagaacaaggcaagagaaagtttcttaaattgaaaaaaaatgagcatattgtaagattacatattggattagaagattcaaatgaccttattcaagacttaagaaaatctctaaaatttattaaatgag

SEQ ID NO: 259084 - DNA, 337 bp, Unknown
  Bacterial polypeptide expressing nucleotide sequence isolated from the Sargasso Sea
ttggctaattacgacgcagagaatgagttattaatctttcgaggcattccatatgccgaacctcctgtgggcaatctcagatggaaatcgcccgttccaattgagttgaaatctcaaatcgatgcccgctcattcaagccggcgtgcatgcaagacacctatatcactgattggtatcacgatgtgattgattctttcgatgaagacaaatcactgtttcagcatgtaggagaggtgagtgaggactgtttgtatctaaacatatggacgtcatccattgataggaatcaaaaaaaaccggtgatggtttgggtgcacggaggtgcagatacgggcg

SEQ ID NO: 259085 - DNA, 931 bp, Unknown
  Bacterial polypeptide expressing nucleotide sequence isolated from the Sargasso Sea
ttgtttatatctagatgttttattccaaatgagtcatttgagaaacaacttcctgtaatgttttggattcatggtggtggaaatacttcaggtttaaaagatttatatgatttttctaaaatggtatcgaggcataacataattttagtaagaattaattataggcttggaccatttggatggttcactcatccagctatacaaggatttcaggagggtgatgataagtcttcaaattttggtaccctcgatattatcaaagctttagaatgggtaagtcttaacatttctgcttttggaggtgatccatcaaacgttacaatttttggagaatctgctggagggcataatgtcttatcactgctagtgtcaaaaaaagctaaaggtttattccataaagcaatatcaatgtcaggatataccacgacagtaacattggaggatgcatttaatccaaaaattgaatcttccacctcaaattattcaagcaaaaaaatagtccaagagatttttaaaaaatttaatgaaaaagatatatctgtcacacagtcagataataaaaccagacagatgctatatgagatttctacagaggatttttttagcatatattctcaaagggaaacatatgatgaaattcctcttttaactgcagatggtatagttattcctaaaattggactaaagaaggcattgtctgatgagaatcatttaaacatagttccaacaattgctggttataatcgcgatgaagttaaactttggcttgcaactgcgaaatatttcgtcgatcttgaattttcagtttttggatcagttctaaatataccaaaggtaaaacttaatgatgaagattcatttgaagcatttaattactacagaagtgctgcatggcagattagaggagttcaagaacctttaaatgcatgaa

SEQ ID NO: 259086 - DNA, 954 bp, Unknown
  Bacterial polypeptide expressing nucleotide sequence isolated from the Sargasso Sea
ctaaattacctaatagatgcgttcaagtatcgaatttttatgatgaattaattaatgaacaaaaagaaggaacaatctttggatctgaagattgtttgtatctgaatatattttcacccgcagattcttttaaaagtgataaaaagctcccagtgatgttttggattcatggaggtggaaatacttggggctattcagcctctcctatgtatatacctactaattttctaaaatttcatgatgttattctcgtttccattaactatagactcggaccttttggttggttttctgtaccagacttgaattccaattctaacgagccacttgatcaatcgccaaattttggaacccttgatatgataaaatctttggagtgggtcaatagaaatattagctcttttggtggcgatccaaataatattactatttttggggagtctgcaggtgctcgaaacgttctttcactttatcttgctgaatcagcagagaacttgtttcaaagaggaatagtacaaagtggatacctagtttcagatgatcttgaatattcaagaaataatccagtttcaggatcaatgacatttgttaaaagtagtttgaataaaaaaaattccaacatgaatccaatgactctaaaagagacattggaagatgtagataatttaggagattatttaagagatctatctaaagaagagatcataagtttttatcgtgttagagaagattctggaggtctaattgatgttcccaatgtaattccagatagaattataattccagaggagggtatttttgaatcatatgtcaggggaaaatttcaagataaagaaataattttaggaacaaaccgagacgagaataagctgtttataagtggagataaaagatttgtaaaaactgtactaccaggttttattgcaaatatgcatccaacactaggattatgac

SEQ ID NO: 259087 - DNA, 799 bp, Unknown
  Bacterial polypeptide expressing nucleotide sequence isolated from the Sargasso Sea
tcgcacatttataaaacatacagcaaaagattttcataaccaatcagtcaatccaccagttgttagagcttcaacaataatatttaaaaatttacaagaaatcgaaaaaacagaaaaaaaatatcttaaggatccaataagtggtaattttaattatggaaggcaaggaacttcaactacttttgctcttcaaaaaattcttcaagaaatggaggaatgctataaagtttacttaacccccacaggatttggagcagtttttttagcaattttaagcttggtagagccaggcgatgaaattttagtaacagactctgtttattctccaacaagattactaacacaaagttaccttaaaaaatttaatgtaaaaagtagtttttataatccttcaaatctcaatgatttaaaaaataaaattaacaaaaatactaggttaatttttgttgagaatccaggaagtaatacctttgagtttcaagatttgaaaaaaattatttcattagcaaaaaaaaataaaatttacacagcaatcgataatacatggggaacaccttatttactaaaacctataaaattaggtttcgatatgtcgattgtatctgcaaccaaatattattctggacactctgatgtgatgggtggaagtttagctataaataaaaaagtattcaaatttgttgaaccaacaaacagagttacaggattaagattaagtccagacgatgcttatcttgtcctaagaggcataagaactttagatgtaagaatggatcaacatcatttgaatgcaaaaaaa

SEQ ID NO: 259088 - DNA, 544 bp, Unknown
  Bacterial polypeptide expressing nucleotide sequence isolated from the Sargasso Sea
attgacgcttctaggcaatgatctaggactagagcgagataatgagcgtactgacgctcttttagttgttctggtcgatggaatgggagcagctaaaatattgccgaccccagtacggcgtgagttgatagagcactacattggttttgctgtttgggatgtgttgacgttctccatcactaattggagcgacttagatgaattcgatgagattcgtgttgatcgcttaagtccggatgatgcccaaacattgcgcaagggcgatgcgacggcgactctgaaaggtatacaattccatcacttcggtgcgtttttcagcagagcttaccgagaaaacgactacttatggggccggcttcatgctgtcgaccggctgatggacattgtccttgatgctgcacatatcgaaggtatcggcgatgatatcaatatcataaatcttaaagcccaggcttttagggcaattcttgataacgaacaacacaacttgcctggctgccgtgacttaatacatattctccagaaagaagctgccgaactctcg

SEQ ID NO: 259089 - DNA, 695 bp, Unknown
  Bacterial polypeptide expressing nucleotide sequence isolated from the Sargasso Sea
gatggttttcttattttcatttcctcagtacagcattgcttcaaaaaacctccagcaaataccaaagaagataatagaaaagtgtattgctaaagaaaatttagacaagatcaagattgcacagaggcaaagaaggccgggtccaagaggaggcatgggccaaagaggcagaatgtcgcgtccaagaggaggcatgggtccaagagggggcatgggccaaagaggcagaatgtcgcgtccaagaggaggcatgggtccaagagggggcatgggccaaaggggcagaatgtcgcgtccaagaggaggcatggggcgacagaatggcggaggggaagcgtctatgagtgaaagcgcaggaggagccagtgaaatgcaatccgatcaaagtatgggcgaagtcgaacccggctcatcctcacctacccgcggatcaaaatttcgcaacaagagaagaatgagaaacaggatgcgtcaaaggatgcaacgacgtggtagaggacctcaaagtcaggcattgggtcaagatggcggaggggaagcgtctatgagtgaaagcgcaggaggagccagtgaaatgcaatccgatcaaagtatgggcgaagtcgaacccggctcatcctcacctacccgcggatcaaaatttcgcaacaagagaagaatgagaaacaggatgcgtcaaaggatgcaacgacgtg

SEQ ID NO: 259090 - DNA, 1155 bp, Unknown
  Bacterial polypeptide expressing nucleotide sequence isolated from the Sargasso Sea
tatgaaaacaaatctgcgtacatttataaaacatactgcaaaagattttcataaccagtcggtaaatcctcctgttgtaagagcgtcaacgataatatttaagaatcttcaagaaattgaaaaaactgaaaagaaatatttaaaagacccaagaagtggaaattttaattacggtaggcaaggaacctccactacatatgctctacaaagaattttacaagaaatggaagaatgttataaagtttacttaactccaacaggctttggggctgtatttttagctgtattaagtgtggttgaaccaggtgatgaaattttagttacagattctgtttattctccaacaagattattaacacaagattatttaaaaaagtttaaagtaaaaagtatattttatgacccttcaaattttaatgatttaaaaagtaaagttacaaataaaaccaagctaatttttgttgaaaatcctggaagcaatacttttgagtttcaagatttaaaaaaaattatatcattggctaaaaaatataaaatttatacagcgatagacaatacttggggaacaccatatttaattaaaccaattaaattaggttttgatatgtcaattgtctctgcaacaaaatactattcaggacattcagatgtaatggggggcactttagcagttaacaaaaaagtatttaaattagttgagccaaccaacagagtaactgggttcagactaagtcctgatgacgcttatttaattttaagaggtataagaactcttgatgttaggatggataaacatcacataaatgctttgaaagttgctaaatttttagctaaacaaaaaaaagtagcaaaggtttattatccatataaaaaaaattcacagatatacaaattatggaaaaaatattactcaggagcatctggacttatgggcttaagaattaaatcaaaaaataaaaaatccgttaaaagttttgttaattctttaaaattattcggttacggttacagttggggaggtttcgaaagtttagcattatatcaaagccaaaaacaactaggtacaagaagttttgtaaatttaaaaaatgatgaacatattattaggcttcatattggtcttgaagatcctatggatataatcaatgatttaaa

SEQ ID NO: 259091 - DNA, 960 bp, Unknown
  Bacterial polypeptide expressing nucleotide sequence isolated from the Sargasso Sea
tatgagaccaattgtagatacgaatactggaccggtggagggcttagaagaagaatataatggaatcaaaggctattctttcaaagggataccctatgctgcagatacttctggtcaaaatagatggagagctcctcaagatgttgaaccgtggaccactcctttagacgctagttcgtttggacctcaatgtcctcagtttagaatgggagagggcggttttagaggatttatagcaggagcttacgaagcagaaataccggaagaagaaccaatccaagaatctgaagattgcttgagattgaatgtttactctccagatttaaatccgaaagagaaggctcctgtaatgttttggatacatggtggagctttgaggtatggatcaggagatgtatacctccctgatgggatcgtacctaagggtaatgttcttgtaacaattaattatagattaggggaattaggtttcttcgcacatccttcaattaatgatagcgatcaaaaatataagaccaatttcggtttactagatcaaattaaagccttgcattgggtaaaagaaaatatagaaaactttggtggtgatccttcaaatgtaactatattcggtgaatctgctggaggattttcagtagctgctttgcttgtttcacctccatccaaaggattattccacaaagcaatagtgcagagtggagggtttgcaagaatggctcttcattcatctgacaattcagataatggttactcagcttcagaccttggaacaagatttggagaactttgtgatataccaactggacctgatcaactaaaaaatatgagagatttacctgttgaaaagattatcgatgtaggaaaaataggtttttcatcttcattctttgtagatggacaatcgatcttatctccagtaatgaaaagctttgaagatggacttaaccataaagttccaac

SEQ ID NO: 259092 - DNA, 1180 bp, Unknown
  Bacterial polypeptide expressing nucleotide sequence isolated from the Sargasso Sea
tatggttaattcagttaaaacttttttaaaacaagtaggaaaagattatcaaaatcagtcagttaatccgccagtagtaagagcttcaacgataatatttaaaactcttcaagatataaagaaaacacaaagtaattataaaaaaaatcctttaagcaaaaattttgattatggtcgaaaaggaacatcgacaactttttcactacaagaactattaagaaaaattgaaaatgcttatcaagtgtatttaactccaacaggatttggtgcagtttttcttggagtgattagtgttgtaagacctggtgatgaaatcattattactgattcagtctactctcccacaagatttttaaccgaagactatttaaaaaaattcaatattaaagctgtattttatgatccaaaaaacttagatgacttaaaaaagaaaattacaaataagactaaacttatttttgttgaaaacccaggaagtaacacatttgaatttcaagatttaaaaaaaatattatcttttgctaagaataagaatatttatacagctattgataacacttggggaacaccttatttaatcaagcctttagacttaggttttgatatgtctatagtttcagcgacaaaatattattctggtcattcagatgttatgggtggtagtttagctataaaaaaaagactttttaagcaagtggaattaagtcaaaaagcagttggtctaagactaagtcctgacgatgcctatttaattatgagaggactaagaacattggatattaggttagacaaacatcaagaaaatacaatcaaggtagctaattttttgagcaaacaaaaaaaagttaaagaggttttttacccaattaaaaaaaatattaaacaatacaaaatgtggaaaaagtattactcaggatcatctgggttaatgggtgtaaaaattatttctaaaaataaaaactctgtaattaaatttttgaataaactaaaattatttgcccatggttacagctggggtggatttgaaagtcttgctttatatcaagacaaattggcactgggtaataggagctacacaaagctgagtaataacgaacatattataagattgcatattggtttagaagacccaaatgatttgattgctgacattaaacaggctattaaatctgtaagatga

SEQ ID NO: 259093 - DNA, 873 bp, Unknown
  Bacterial polypeptide expressing nucleotide sequence isolated from the Sargasso Sea
gatgcttgcaaactatgatgacgagaatgggttattcatattcagaggcgttccttatgccaaaccgcctgtgggcaagctgcgatggaaatcacctcaaccagttgaagaaaaatcacagattgatgcacgctcttttaaaccggcctgcatgcaggatacctatatcactgattggtaccacgatgtgattgaatcttttggtcaagacaaatctttgtttcaacacgtcgagaatgtcagtgaagactgtctctatctaaatatttggacatcatctgtaaataaaaatgaaaaaaaacctgtgatggtatgggtacatggtggagcagacacaggcggatggtcatacgaacctgattatctcggtcatcatttggcaaaaaaagatgttgtagtggtctccattggctatcgattgaatgtctttggattctttaaacatccagagatgactgaagagactggtaactttggattggaagatgaaatactcgcgctgaaatggatcaaagagaatattgcagattttggcggtgatccatcaaatgtcacatactttggtgaatctgccggaggcgctcatgtttcttatcttgccacatcacctgaagcgaaaggcctatttaaaagaggcatcatccaaagtggtggttacaatctgttcaattggcgtagcattgatgaagcacatgagctcgcaattcgaacgcaaagtatatcaggaacaattgatctcaatgacctcaaaagcctagatgagaatgcccttcttcaagcatcgaggaacctttaccatccttatagaccaatcattgatggaaaaatcatcactgataatcttgccaaaaaaatatatcgaaggaaaagtat

SEQ ID NO: 259094 - DNA, 1510 bp, Unknown
  Bacterial polypeptide expressing nucleotide sequence isolated from the Sargasso Sea
aatggggataaaaatcaaaagtaaattaattatatgtctttttgtaagtttcactgtatgcgctgattactctataaaaactgaatctggtataacagatggaaagttaaaaaataaagttatttactggtacgatattccatatgctcaaccacctgttggtgaacttagatggaaagccccaagagaaattatcaattcagatataaatattattccaagagatgacaatttctgtgtgcaaaaaacctcatctttaggaggttcagcccagctttcctctgagaatatttctggtactgaggattgcttatatttggatattttggcgcctaaaaataagaccagtaactccttgcctgtaatgttttggattcatggtggtgggaatacttctggcctaaaagatttgtatgactttgacaaaatggctagcaagcaccaagttgtaattgtaagaataaactatagattaggtccatttggttggtttacacatccagcaatacaagatcttcaggagggcattgataaaacttctaactttggaactttagacataattgctgcattaaaatgggttaagaataatataagtttatttggtggcgaccctaacaacgttacaatatttggcgagtcagctggtggtcataatgtttattcgctaatcgcatcaaaaaaagccaatggcttatttcataaagctatatcaatgtcaggatatacaacctcgatatctactcaagatgcatatatgcagtctaaaagatccgcaacttcagattttactagctgggaagttgtagaacgtctaacaaacaaaaatcaatccaaccttagcaaaaaagaaataagagatatattgttaaacatgcctgcgactgaattctttgaaatatatgctaacagagaaagctatcaagaaatacctttgttaactgctgacaatattgttatttctgaaataggacttagaaagtcattgtcagaaactaatctaattaataatgtaccagttattgcaggctcaaatgcagatgaagttaaattatggcttgctacggctgaatactttgttgatctagattattcttttttaggctctatttttggaataccaaaagttgtcttaaacaacgaaaagtcttttgaagcttttaattattacagaagctcagcatggaaaataagaggtgttgattatccgcttcaaagtttgtcaaaagcaggaaataataaattatattcatacaggtttgactgggatgatcatacaaaatttatagttggagactttaaaaagcttataggggctgcgcatgcaactgaaatacctttacttacaggcaattcaaagcttgttgatggttttccactttctttattaatttatccaccaagttcttcaaaaaggtatttatccaaaaatatgatgaagttttggagcaactttgcaaaatatggaaagccgggcgattcttcaaatttagtaacttggcaaagctaa

SEQ ID NO: 259095 - DNA, 851 bp, Unknown
  Bacterial polypeptide expressing nucleotide sequence isolated from the Sargasso Sea
tttgaccgttggtgtttatgggtcaacagattatcaaccaacaacttttatcaaagatacgaaacttataggcagtttgcatcaaaataatgaagtagagatgtttcttggcatacctttcgctgtcccaccaattaatgacctcagatgggaaaagcctattgcttggactcctgaagataaaaaagaaataactgctaacaagtttagagccgcatgtattcagaaccaaagaattgttaattggtataaaaggttaattcttgactttggtagcgatcctaaaactttcgatattccagagtttagtgaggattgtttgtatttaaatttatggcgaccaagggaattaaaaaataatttacctgtaattgtttatatacatggtggaagcaataaagctggctgggcatatgaacccaattatcatggtcataatattgctaacaaaggctttatacttataagtattccatatcgccttggagtatttggctttttttctcatcctgatattgaaagccctaatcttgctttatatgatcagattttggctcttaaatggatacaaaaatatgtttctttctttggcggtgatccatctaatgttactttagttggtgaatcagcaggtgctggggggattagtcatttaatagcttctcccttaagcaaaaatttatttcataaagcaatccatcaaagtgggggatcttcctttacctatccaacttcaggttcagatgttagaaagctagcaaatagttttgcaaattcttttaaagatccatcacttaaaaatttaaaaaatgttagcgcagaagaaatacttgaggtttcagagaaagttt

SEQ ID NO: 259096 - DNA, 727 bp, Unknown
  Bacterial polypeptide expressing nucleotide sequence isolated from the Sargasso Sea
aataaaaattcaccttataaactggatagaacctataattttggaacacttgatttaattaaggcattagaatgggtaaacaaaaacatagaaaattttggtggtgataaaaataatgtaacaatttttggtgagtctgccggcgcgaggaatgttatgtcacttatgatttcaccacaaagtgaaaatctattccacagagctatatcccaaagtggttacttaaatagtgatacacttgaattggcaatcaataaaacaagagctggatcaaaagaatttatttcacattcagttaaaaaaacctcacatcaaattacaaatgctgaattaaatgactttatgtctcaaactaataaggttgcaggacttttaagatcactctctactaaagatgttatttcattttatcgtataagagaaggtgttggaggtttaatagatgttccaaatgttattccggatgaagttgttattccaaaggcaggtctttacggcgcttataaaaaagggttagctcatgatattccaattatatttggaactaatagagatgaacacaagctgtttatgtttgataatccagagtttgttgaatcaaaaggatttttctttttagaaaaaatattcagagaactagattttagatatgttccgaaaggactcactctattatcaggcttattcaaaatacatgtcgatgtcttggaagataggtggtgctgat

SEQ ID NO: 259097 - DNA, 1180 bp, Unknown
  Bacterial polypeptide expressing nucleotide sequence isolated from the Sargasso Sea
tatggttaattcagttaaaacttttttaaaacaagtaggaaaagattatcaaaatcagtcagttaatccgccagtagtaagagcttcaacaataatatttaaaactcttcaagatataaagaaaacacaaagtaattataaaaaaaatcccttaagcaaaaattttgattatggtagaaaaggaacatcaacaacttttgcactacaagaactattaagaaaaattgaaaatgcttatcaagtttatttaacaccaacaggatttggtgcagtttttcttggagtgattagtgttgtaagacctggtgatgaaattattataacagactcggtatactcgcctacaagatttttaaccgaagactatttaaaaaaattcaatattaaagcagtattttatgatccaaaaaacttagatgacttaaaaaaaaaaattacaaataagactaaacttatttttgttgaaaacccaggaagtaatacatttgaatttcaagatttaaaaaaaatattatcttttgctaagaataagaatatttatacagctattgataacacctggggaacaccgtatttaattaaacctttagacttaggctttgatatgtctatagtttcagcgacaaaatattactctggtcattcagatgttatgggtggcagtttagctataaaaaaaagactttttaaacaggtggaattaagtcaaaaagcagttggtttaagactaagtcctgatgatgcctatttaattatgagaggattaagaacgttggatattaggttagacaaacatcaagaaaacaccatcaaggtagctaattttttgagcaaacaaaaaaaagttaaagaggttttttacccaattaaaaaaaatattaaacaatacaaaatgtggaaaaagtattattcaggatcatctgggttaatgggtgtaaaaattatttctaaaaataaaaactctgtaataaaatttttgaataaattaaaattatttgcccatggttacagttggggaggatttgaaagtcttgctttatatcaagacaaattggcactgggcaacaggagctacacaaagttgagtaataacgaacatattataagattacatattggtttagaagatccaaatgatttgattgatgacattaaacaggctattaaatctgtaagatga

SEQ ID NO: 259098 - DNA, 577 bp, Unknown
  Bacterial polypeptide expressing nucleotide sequence isolated from the Sargasso Sea
gcaacaattccgtatcgttgataaacagcttgagttatcttttttggctttatctactaaagatacgctgctgaatttaaccaaccattgttatttcaatctgaacaacgacagcagttcaattgaaaaccatcagttacagctgacagccactcattatttgccgacagatgagcacgctataccaacaggagagcgccgtgctgtagctggcaccgcctttgactttagcaaggctaaattagtggggccagcgcttcgtcaacaggatcagcagcttgcgcttgctaatggttttgaccactgctttatctggcaagaggctgatgctgcagagttaaaattgatggcggtgttaagttccagtcaaagtggtcgtcagcttgaagtactcagtactcagccgggtttacagctctatacaggtaattttctggcagcaccttttacgccacggcagggcatttgtctggaagctcagggctggcctgatgcgataaatcaacttggctttccaaccactcagctcaaagcaggtgagttgtatcagcaactaatagtgtataaattcagttag

SEQ ID NO: 259099 - DNA, 1330 bp, Unknown
  Bacterial polypeptide expressing nucleotide sequence isolated from the Sargasso Sea
tttcgtcatccagcaattcaatctcttcaggatgggattgataaatcttcaaattttggaactttggatatcattatggcacttaagtgggttcaaaaaaatatacataacttcgatggcgataaaaataatgtaacaatttttggggaatcagcaggcgggcataatgtaatgacaatgttggcaacgccactttccaatggactttttcataaagctatttctcaatcaggatatacaacttcttatacagctgaacaatctcttgggatctcaagcaacaattcagtaattaacgattttggctcattaaatgtatttagcaatgcttctgtttcgaggataactgacagtgttatcaaaaactttaatgaacttgatttgcaatctcaacgaaggtttttaaaaaaccttaaagcagaggattttctttcaatatatcttgaactagaaaaagaaacattcgactacattccattggttaatagagatggaattgtaattccaattgaaggaatactatctgctcttggaaataaaaaatatgcaaaaaatgtccctgtaatttttggttccaacaaagatgaattatctttgtggcttggcgtaaataattatttttctgaaagaacctatccattcacaagactcataccaatttcaaaaattgaattaaaaaatcccgagctatataggttatggctgagtgtcagatctgaggcttggaaactcagaggagttgacgagccgcttcttcaacttgaaaaagcaggctataaaaatacttatgcctatagatttgactgggatgatcaaaagaaaagtttttttgcagactttcctaacatgataggtgctgcacatggtcttgaaattgcttttctcacaacagaatataagtttggaccagtctctagttatgtttatccaaagactgacgaaagagatcagatggaagaaacttttttaagtgcatggtctaactttgcaaaaaaaggccaacctattattgaaaatactaaagttcagtgggaaaaatatacatcttctaaacaagtttttttggtccttgataatttaaatgaattacgttcaatatctgataaaaaaaatatggatgacatcttaagctttgcaaatacaaatgttgccactgacttagagaaatgtcttctggtgagagagacagtcattaatataggagatcctaatttgtcacttcttaataattggaataatggatcatgtaataggtttgatcttgaatttgagctgagaaagattgaagatgacttaatcagtaaatatggccaagtttcagtattctaag

SEQ ID NO: 259100 - DNA, 1081 bp, Unknown
  Bacterial polypeptide expressing nucleotide sequence isolated from the Sargasso Sea
atgtcttgctcatctttaacagatcgaccagacaagtcacttaaaaaagtttcagcaccttctggtgatttttttggtattgaaaatgaagagaattacatttttaaaggaatcccctatgctcaagcgcctgttggtgacttgagatggaaagcaccaagagaatacacacctactaaaagtatttacgccacggactttggtaatgaatgtgttcagcctggtgacgactatgttttaggggtataccgacgctcaaatactattggtgaagaagattgtttatatctcaatatctttatcccaaagaaaggcgaggtgctagaatcaaacagttttcctgttatgttttggatccatggtggtgcaaatatctatggctcagctaatacatatgattttcagaatttaattaaaaaagatgtcatcgttgtatcaattaattatcgacttggcccttttggttggttttcatcggattttataagagatgacgcttcaggattagatttaacctcaaattttgcacacctagacatgattcaagcacttaaatgggttaagcaaaacatttcaaagtttggtggtgatccaaataatattacgatttttggagaatctgccggcggtcacaacatccttgcattattggcatcaccattgtcgaaagggcttttccaaaaagcaatatcgcaatctggttactctagtacttactcattggaggaagctacatctctctcaactctttcgtctgaaaaagtttttgaagaggatataaaattcatgacgaagtctagtgaaattgtagagtaccttaaagaactttcacaccaggaaatttatgcacgttatgaagaagcaagtgacagagaagtttatccaattcttcctgtaaccgtaagagatggaatagtaattcctaagaaaggaatattaagatctttagagcaggtcgatccaaacgttactgtgttagctggaacaaaccgagatgaaatgaatttttattacattcgctcggattatttttatgacaccacattagaaatccgcagaaacttgaagcgaagcgaagaga

SEQ ID NO: 259101 - DNA, 1189 bp, Unknown
  Bacterial polypeptide expressing nucleotide sequence isolated from the Sargasso Sea
acttttagaccaaattaaagcacttgaatggttaagagataatatagaaaattttggtggtgatagtaataatattacaatatttggtgaaagtgcaggtggccaaaatgttatagcactatatgtttcacctatcgcaaaaggcttgttccacagagcaatatctcaatcaggtggaattactcttacttcaatcgctgatgcagaagatatagatagggtcgtatttcccttaaatggaaattataaatatagacataaaacaacaaaagaattcataaataatcttttaaatgaaggaataattaatacacatcttaatgagacaggaaatattgaagaattaattaatttgaaagctactgatttaatgctcagttggacaactggtggggtatgggaaggtgcaactcaaatggctagaattattggcgatggctatgttcttcctaaagatagtattctagatgcattaaaagataaaaatagacatgctaatgttccaattattctcggtgtcaataaagatgaaaacaaaacattcaatctttttaatgaagaattagttaccaacatccttaatcttactttcatagctaaggatccttttttctatgatttgaaatctgattatcaaagtttagcttggcgttcaaatgctgtagatacacctgcagatgcaatagttggaggaggttatccaaatgtctatgcctatcgatttgattgggatgaacagccaagtattctaggtatggatttttcttttttattaggtgcaggtcatggtttagaaatcccatttgttatgggtgattttgattttggaaggcaaactagatttctttttactaaaaaaaatgaacatgaaagaaataaattatccaaagtaattatgcagtattgggcgaactttgccaaagaaggttatccaagtagtgagtcagaaaatattactccttggaataaatggcctaaaggtggaattaatcaaaatagaataatgattttagatactgaacaatcaaatgcgccaagaatgagcaatggatatgtgcctcacaataaactagtcagtatttttgagagtgatgaaagatctctcaaggttgataacaaatgttattttttggaagatgtatattcttgggttgataattggaaaatcaaaaataatatttgtcagtaa

SEQ ID NO: 259102 - DNA, 842 bp, Unknown
  Bacterial polypeptide expressing nucleotide sequence isolated from the Sargasso Sea
tagtcccacaagaattcttacagaagactatttaaaagaatttaatataaacgccaagttttatgatccaaataatttagatactatcaaaaaaaattttacaaataaaactaaattgatttatgttgagaatccaggaagcaatacatttgaattccaagatttaggtaaaattatatcttttgcaaaaaaaaagaaaattttaacagctatagataacacatgggcaactccatattttttaaaacctataaaaataggttttgatttatcaatagtgtctgcaacaaagtattattcaggtcactcagatgtaatgggtggcagtcttgccgtaagtaaaagagtatttaaaagagtaattagagctcaaaatatgactggcttaagattgagtcctgatgatgcttactttataatgcgaggtattagaacgttagatgtgagattagaaaaacatcaagataatgcaattaaaatagcaaaatttttatcaaaaaaaaagaatatagaagtattatatccttttaaaaaaaataaaaaaaattataaattttggaaaaaatattattccggatcatctggattaatgggtttaaaaataaaagtaaaaaataaaaaatcagttgatagatttgttaattcacttaaattatttggccatggttacagttggggagggtatgaaagtttagctttacatcaagaaataaatgaacaaggaaatagaaaatatctaaatctagataaaaatgagtatattgtaagattgcacgttggattagaagacccaaaggacttgattaaagatataagtaactctttaaaatttttaaaatgac

SEQ ID NO: 259103 - DNA, 1120 bp, Unknown
  Bacterial polypeptide expressing nucleotide sequence isolated from the Sargasso Sea
ccttttggttttttcgcgcatcccgaactttcatcagagagtgccaatggggtatccggtaaccagggttttcgagatcagattgctgcgcttgagtgggttagagacaacatagagaactttggcggagaccccgacaatgtgactattttcggcgaatcagcaggttcctggagtgtgtcggtaatgcaagcgagtcctttggctcgaggtcttttccacaaagtaatcggtcaaagtggtgctcgatttattcccactccggatctgactgaagatcgctggggtattcccagcgcggagagttggggagagaagcttggttcgaaattcactaacaatgacggggctagcctagaaactctgcgatcgttgccagctcaggaaatcatggatgtttatgctaaggaccccgaggttcttatgaattttgactatctaacaattgttgatggagcagtattgccagaagaggtcgacaacattttcaagtcaggggctcaagccgatgtgccagcgttgataggatccaatgaggatgaggcgacaacctttgacccagcattgctcaacccacaggcgactgatcttgattacggagaggctcttcgggctcaggtcgctatgatgcttccggccggggacgcaaccatcttcgatctctactcaacagaaccagaagtagctcaaaattcctgggttgaattcagcactgatgcgatgtttacccaacccatgcgactttgggcagactatatgcaaaatgtatccagtccagcttacctttattggtggacctgggcgcctattgttgacggcagcgacaagtatggggcctttcatgccgccgaagtgccctttgtgttcggcgacttgtctggtttcagtatgacgtctaggcccgaagataaggaattttccgatttaatgatgacgatctggacgaacttcgcgaaaactggcgacccttctgttgatgggattcttgattggccggcttacgattctgaaagagcgaccaccgctgttcttggtaaggatcttacccttgaacccggtatacgcagcgaacgagtggaaaagataacggctgcatatactgctcaacgaaataagtaat

SEQ ID NO: 259104 - DNA, 1528 bp, Unknown
  Bacterial polypeptide expressing nucleotide sequence isolated from the Sargasso Sea
aatgcttaaagcctttgccaggattgtaattatcctttttactgttggtgtttatgggtcaacggattatcggccatcagcttttatcgaagatacaaaactcataggcagcttgcatcaaaataatgaagtagagatgtttcttggcataccttttgctgccccgccgataaatgaccttaggtgggaaaagcctgttgcttggattcctgaaaataaaaaagaaattattgctaataagtttaggccgggatgtgttcaaaaccaaagaattgttaattggtataaaaggttgattcttgactttggaggggatcctggaactttcgatattccagagtttagtgaggattgtttatatttgaatttatggcgaccaaagggattaaaaaataatttaccagtagttgtttatatacatggtggaagcaataaagctggctggtcatatgaacccaattatcttggtcacaatattgctaacaaaggctttattcttgtaagtattccatatcgcctgggagtgtttggctttttttctcaccctgatattgaaagccctaatcttgctttatatgatcagattttggctcttgaatggatacagaaatatgtttctttctttggtggcgatccatctaatgttactttagttggtgagtcagcaggtgctgggggaattagccatttaatagcttctcccttaagcaaaaatttgtttcataaagcagtccatcaaagtggcggatcttcctttacttatccaactttaggttcggatgtaagaaagctggcaaatagctttgcaaattcttttgaagatccatcacttaaaaatttaaaaaatattagcgcagaagaaatacttgaggtttcagaaaaagtttatgctgagcactactttaattatgttgatgatggtttctctatgatcggaaacctatctgatacttttaaaagtggaaatattgaaaatgttgatcttctaattggatcaaacaatgatgagtggtccttatattttgatgggaatgtaaatatcagtctgtggctcgataaagaaactactcctgagaaaaaaataaagcttttacagcttctagaccatattaaagatcctgttagaaagatggatttgttaattacagctaaaaattttgtttgtccttctttattcatggctgaagagttaatgaaaaaaggaggtaaaacctgggtttatcaatttaatagggttagagataatgagttggcaaaaaaatatggagcctttcatggtgctgagcttccttacgtttttgacactcatgatgagtggctaccaacaaatgagaaggacaaagaactaactagagagattcaatcttactggctatcttttgctaaaactgggaatcccaataatgatgatgcggtgctatggccagaatacgattcgtctaatgattcaactcttgttttagatgatgagatatatcagagaagtcatgagagttctgagatttgtaaagtattgaaattgttttag

SEQ ID NO: 259105 - DNA, 1177 bp, Unknown
  Bacterial polypeptide expressing nucleotide sequence isolated from the Sargasso Sea
atgaaaaaatcttttaaaactatactaaaacaaacatcaaaagactttaaaaatcgttcagtaaatccaccattggttagaacctcaactatggtttttaagtcaatgagtgatttgagacaaacacaaaaaaaaaatttacaaaatccaagaggtggttattttgattatggaaggcaaggcacctcaaccactcttgaattagaaaaattattaacccaactcgaggagtcctatcatacttttttgacacccactggatttggtgcagtttttttgactttattcagtatattaagaccaggtgatgaattaataattgctgatccagtttatagtccaactagaaatttaacagaaaaatatttaaaagattttcaaatacttgcaaagttttataatccaaatgatttaagtactataaaaaaaaatatcacaaaaaaaactaaacttatttatgtagaaaacccaggaagtaatacttttgaattccaagatctgggaaaaatactttccatagcaaaaactaaaaaaatctatacagcaatagataatacatgggggactccttactttttaaaacctgtaaaattaggattcgatttatcaatagtttctgggactaaatattattcaggacactcagatgttatgggaggaagtttggcagtgagccaacgagtatttagaagagttttacaagcgcatagtatgactggtttaagattaagccctgatgatgcatatctaattatgagaggattaagaacattagatgttagattagacaagcaccaagaaaatacgaataaaattgcaagaattttatcccaaaaaaaaaatattgaagttttatatcctttaaaaaaaaattcgaaaaattataaattatggaaaaaatattactcaggttcgtcaggattaatgggattaaaaattacttcaaaaaataaaaattctgtagataaatttgtaaactccctaaatcattttggtcatggttatagctggggtggttttgaaagtctcgctttacatcaagaaataaaagaacaaggaaatagaaaatttttaaatttaaaaagtaatgaatatatcgtaagattgcatatcggacttgaagatttagatgatcttataagagatttgaaaaaatctttaaaatacattagataag

SEQ ID NO: 259106 - DNA, 1537 bp, Unknown
  Bacterial polypeptide expressing nucleotide sequence isolated from the Sargasso Sea
gatgaacaataaaactgaaacaataactatttctacacatttaggagatgtggtgggagtaaaaaaatacaatggatcttattttaaaggcataccctatggtgcagatacttcaggcaagaacaggtggagatcaccacaagaacctgagatgtggtctgaaccttttgacgcttcatcttttggacctcaatgccctcaattcaggatgggagaagggggttttagagggagtatagctaaagcctatggtgtagaagttcctccagaagaaacaccagctgaatcagaagactgtttgcgtttaaatgtttttagtcccgatacaaattctaaagagaagttgcccgtaatgttttggatacacggaggtgctttgaggtatggttccggtgatccctatcttcctgaaggcatattgagtaaagatatagttttggtgagtattaactacaggttgggagagttagggttttttgctcatcccgctctaaaagaagagggcaatgtacctagaactaattttggtttattggatcagataaagggccttgaatgggttcaaaagaatattgaaaactttggaggagattcttcgaatgtaacaatattcggcgaatcggcaggaggtctctcggttgcagctttgctagtctcccctctatcaaaagggcttttccataaggcaatagttcaaagtggaggttttgcaaggatggctttgaatgcttatgaattaaatgaaatgggtgcaaccgggagcatggtcggtaagtcattttgtaatgtatgtggagtcgaggatggtcctgatcagatagataaaatgagagatttaccagtgcaagaaataatacaaaagggtataggatttccttcttctttatatgtggatgacatttctatgttatctcctgtcatacaaggatttgaagaaggaattaatcacaaagtccctaccataataggtactaatgcggatgagggtaccgcgctttattggggaagtcctttagccgatgaaacgcctccagtaaattcagttgagagatatttagatattatcaaagaaaggtttggagaagattcagagaagatgttatctatttatcctgcttccgataaagaagagatgatagattcaagcaaaagacttctaggtgattcattgtttggagcaccttcatattttgcttctaaagcaatggctgaaaggaatgaagaaatttacttttatcactttaaccaaaagccttcaggagaagctggagaactactcggatcatttcatgcttatgagataggttatgtttttggactgggaggtctaggacctatcgaaaatacagaattatcagattgtatgctttcatactggactaacttttctaagtttggtgatccgaatgactctaatttacctaattggagaaaaatgcaacccaataaagatacttggtatgagttaggaccttctataggagaaaaggatatttctagattagaaatctatgatcttctaaaaaaggtaatctaa

SEQ ID NO: 259107 - DNA, 724 bp, Unknown
  Bacterial polypeptide expressing nucleotide sequence isolated from the Sargasso Sea
atgaaattattttttatttttttaatcaatatttttttattaaattctttaaatttaaatgcttcgaatgattttgtttatacacaaagtggagttgtagaaggactaaaaaaaaatagatttgtcttatatcaagatataccatatgctcagcctcctgtaggaaacttaagatggaaagctcctcgaacattaaaatcatcagataagattctgccaaaagatgaaaatttttgtatacaaagaccatcaaatcttggaggcgcagagggtgatgatttctttgctggatctgaagattgcttatatttagatatttatactcctagtaaagtcaaaaatgacttacctgttatgttttggatacatggtggtggaaatacttcaggcttaaaagatctatatgacttttcaaaaatggtatcaaaacatgatgtaatagttgttgctattaattacagactgggtcctatggggtggtttactcatccagctattcaagaatttcaagatggggatgataaaacttctaactttggcacgcttgatattattcatgcactcaaatgggttaataataatatcagtaaatttggaggtaatcctgacaatgtaactatctttggtgagtcagcaggtggtcataatgttctatctcttttggtttctgataaggctaaaggactttttcataaagccatatcaatgtctggctacactacct

SEQ ID NO: 259108 - DNA, 1609 bp, Unknown
  Bacterial polypeptide expressing nucleotide sequence isolated from the Sargasso Sea
tatgtctaatattattgcagactatgaggttgcaacaaattcaggtattgttcaaggatataaaaaaaataatattgtttactgggatgatattccttatgcaaaaccaccaataaatgaacttaggtggaaagctcctagacaaataaatcaacctaagaaattaatattaccaagggataataatttttgtgttcaaagaccgtcttcacttggcggagctagcggagatggaatgtatgttggtacagaagattgcttatatttagatgtagttgctccagcaaataaaaattcagtattaaaacctgttatgttttggattcatgggggaggaaatacatcaggactaaaagatttatatgattttagcaagatggcaaagaaacatgatgtgttaatagtaagagttaattacagattaggtccttttggatggtttactcatccatctatacaagaattacaagaaggtttagataagtcatctaattatggaacactcgatatcatagaagctttgaggtgggtaaaagaaaatattcatttatttggaggtgatccaaataatgttactatttttggagaatctgctggaggccataatgtttattctttaatcgcctcgagtgaggcaagaggtctttttcataaagcaatctctatgtctggatatacaacatctgtaagtcctaaggatgcatacaaaccaagtaaacaatcttttacgtataatcattcaagttttaatgtagttaacaaaatattagaaagtcagattaaatctaacccttctaaaaaattctctaatgaggaaataagagacatattattaaatctttccaccgaggatttttttcaacaatattcagacaggaaatcatatgaagaaattccactattaactgcagatgacattgttatacctagtgtgggacttaagggcgcgcttagtgatccaacacttataaatatcgtgccaacaatagccggttctaatcgtgatgaggttaaactttggcttggaactgcagaatattttgtagaattagattattctttttttggatcgatgcttaatattcctaaagtagttataaaaaatgaggattcatttgaagcttttaattattatagaagttcagcatggaagattcgaggagttgatattccaataaacgctttacgtgaagctggaaataaaaatttatattcttatagatatgattgggatgatcatagaaaatatctggtagccgattttaaaaaactcattggggcagctcatgctacagaaataccgatactagctggaaattctttgctggtaggcgggtatcctctatctgatttaatttatcctcctggcaaatctaaattttatttgtctcgtaatatgatgattttttggactcaatttgcaaagtctggaacaccaggcgaatcaacaaattcaattgaatggaaaaaaaatatgatatctcaagaagctaattcaagctatttaattctagataataaaaaaaacttaagaatggaggctgataataatactcttaaatctttgtctgaagagctttattatgatgatcgattaactgaaatttga

SEQ ID NO: 259109 - DNA, 1249 bp, Unknown
  Bacterial polypeptide expressing nucleotide sequence isolated from the Sargasso Sea
gtagaaggcgatggtgattggggtggcagtgaagattgtctttatttaaatgtatggacacctgaattaacaccagaagaaatcaaagactctaagacccaattacctgtcatgatgtggattcacggaggagcgaacgttgtcggtagtgctcatgtttatgacccaagccttttggttgctaaacacaaggtagtggtagttacaatccaatacagaatgggtcctttaggatggtttagacacccggcactctctctagatggagcctcagaaaaagataaatcaggaaactatggaactcttgatactatcaaagcacttgaatggattaataaaaacataggaaacttcggaggagatccaaataatgtaaccgtttttggagagtctgcaggtggtcataatacagcagcaatttttgcttctccccttgcagaagggctttatcataaagccattgttcaaagtggaataatgtctactggttctattgatgctgcagaaagctttactcctgaggacagaatcgctcctacaaccagcggattagaagttttcagtcgtattttgatagctaatgacatggcatctgacatggaagaagcaaatgttcttcaatctgagatgactgatgaagaaatcagaagagttttttattcgcaagaagctagtgatttgtttggagctgcttcagattcaagtcctaaacgtaatggtatgactcgggtctttcctgatggtcatgttatacacaaaggaggtatacaagaatcatttactaattccaatttatcgcgagttccaataatcactggaaccaataaagacgaaaataagttttttaattctctaaatagaaattttgttgagtggggtccttctacagggctttataagacagccggaatagacgaaatgcctctcgaaattattgatcctgattactatgaagcacttaacttttatggttcatctttctggaaacaaagggcagtagatacaccttcaaagcaacttatcgattcaggacatcaaaatacttatgcttatagatttgattgggatgaactctcaacaattaacggcatggatttgtcccagttaatcggtgctgcacatgcaatggagatcttatttgtatttggttcttttgatagttacataattaaaaactttttatttggagagggagcatatcctgctggcaagaagctatctgaccaaattcaatcttactgggcagaat

SEQ ID NO: 259110 - DNA, 1095 bp, Unknown
  Bacterial polypeptide expressing nucleotide sequence isolated from the Sargasso Sea
aatgactgcaaacccaagtttttatgtcaataacacagaaatagttggaatcacagcagaggatgtagatatctatttaggtataccttatgcagagccaccaattgattcattgagatgggaagtaacacaaccaaaaatatttgaaacaaaaaaatatgtggcagataaatttgcacctgcatgtatgcaaggtccaagaattgtaaattggtataagggtgttgctgctggatttggaggcgatcctaattatataaaaacaccagaaatttctgaagattgtttatatttaaatatgtgggttcctaacaatcttgataataaagaaaaaattcctgtactcatatatatccatggtgggtcaaatagagctggctggtcatttgaaccaaattatattggaaaaaacttatctagaaagggcgtaattgttattactgtttcttatcggcttggagtttttggtttttactcacatcctaatttagatgcatctaattttgcattacttgatttgatagagtcattaaattgggttaaagaaaatattgctaaagttggaggagaccctgaaaatattacaatttcaggtgaatcagctggtgccacaaatgttgctcatttaattgcatctcctttagcaaaaggtttatttaataaagctattcatcagagcgcaggctggtctatagcagaaaaagatatagattatgatattcaaacagaactatcagataagctatctataaagctaattggcaaaactaataaatcaaataacttaaaagaattacgagcagttgattctgtaactttactttattcagctgaagatatatttggatatgttggttattatcctgtaatagataatttttctatttttgaacctctttataaatcctatgaacaaggaagttataatcatgttgatctaattattggtacaaattctgatgaagagcttatgtatctggataaggattattatttatacgatttttataatgaacgggaaagttggggcttttataccgaaacagaagaattagattcgcttacatcaaatatcaataagaaaaggagaaacta

SEQ ID NO: 259111 - DNA, 815 bp, Unknown
  Bacterial polypeptide expressing nucleotide sequence isolated from the Sargasso Sea
tttgaccttcggtgtttatgggtcaacagattatcaaccaacaacttttatcaaagacacgaaacttataggcagtttgcatcaaaataatgaagtagagatgtttcttggcataccttttgctgtcccaccaattaatgacctaagatgggaaaagcctattgcttggaatcctgaaaataaaaaagaaataaccgctaataagtttagagctgcatgtattcagaaccaaagaattgttaattggtataaaaggctaattcttgactttggtagcgatcctagaactttcgatattccagagtttagtgaggattgtttgtatttaaatttatggcgaccaagggaattaaaaaataatttacctgtaattgtttatatacatggtggaagcaataaagctggctgggcatatgaacctaattatcatggtcataatattgctaacaaaggctttatacttataagtattccatatcgccttggagtatttggctttttttctcatcctgatattgaaagccctaatcttgctttatatgatcagattttggcccttgaatggatacaaaaatatgtttctttctttggcggtgatccatctaatgttactttagttggtgaatcagcaggtgctggggggattagtcatttaatagcttctcccttaagcaaaaatttatttcataaagcaatccatcaaagtggtggatcttcttttacctatccaacttcaggttcagatgttagaaagctggcaaatagttttgcaaattcttttaaagatccatcacttaaaaatttaaaaaatatta

SEQ ID NO: 259112 - DNA, 1813 bp, Unknown
  Bacterial polypeptide expressing nucleotide sequence isolated from the Sargasso Sea
atggattccctaagatccacagatcaaggtgaactgataggtctaaatggtgaaaataatacttacacatggaaaggaataccattcgctacaccacctgtcgacgatttaaggtggaaagcaacacaagaagcaaaaccatggaacggaagactcgaagctactgaatttaggcaagcgtgttttcaaagaggatctgtttttgaaaatagcgaaagtcaatggagtggaagtgaagattgtttatatttaaatatatggacacctaaactttccaaggagcagattgaacagttttcagatcaattaccagttatgatgtggatacacggaggggctaatgtagtaggaagcgcacatacttatgaccctagttccttagtttcaaatcacaatgtaattgtagtaacgattcagtacagaatgggttctttaggttggtttaggcatccagcattacataatgaggattctagcctagaagatagatcgggaaattatgggactttggatactattatggcactgagatggataaacaaaaatattcatcactttgggggagaccctaacaatgttactgtgtttggagagtcagcaggcggtcataattctgctgcaatctttgcttctcctttagctcaaggactgtttcacaaagttattgtagagagtggaataatgtctgtttcttccatagaagctgctgagagttatttgcctgaagatggtatagcgccaacagttagtgggttagaaatattaaatcatctacttattcaagatggaaaagctaacaacattaaagcggcaaaagaaatccaactaaacatgactagagaagaaatcaaagctttcctttacgctcagcctcccgaagctttaatgaacgccatgaatgacgctggtccaaaaagagacggaatgacaagagtatttccagatggtttagttgttttgcaaggtggtatagaagaagcttttaataattctaatttcaaaagagtacctatcatcactggaacgaataaagatgagaataaattctttaattcgatgaataggaattttgtggagtggggaccggcgacaggtttatataaagctgcaggcatagaggaaatgccacttaaaataattgatttagactactacgaagcgataaatttttatggttcatctttttggaagcaaagagcagtggatacaccatctagattattagctgaatcaggccatgaaaatacctatgcttataggtttgattgggatgagctgagcactattgatgaaatggatttatctaaactaataggagctgctcatgccatggagatactatttgtattcggttcttttgacagttatctagttagaaattttttatttggagaagaggcctatccggctgcaaaaaagctttcagaacagattcaatcttattgggctgaatttgcatacacaggcagtcctggtaaaggaagaaataatgacttaccggaatggaaaaaatggtctttagccccaaaagaaaaatacattgttttcgattctgagaatgaccaaggtatcttcatggaagatactgagtattcgattgattatctattaaacaaattggaatctgacccaagactggataatcaacaaaagtgtgaaactttgtttggcttatcttatggagatggtaatggagtatccgatgaagaatttaattcttttatgaatggaagttgcgcaagtcgtgattattcttcaattcttgatatgattgaatctgttgaagaggagcttataaataaccaagattaat

SEQ ID NO: 259113 - DNA, 1537 bp, Unknown
  Bacterial polypeptide expressing nucleotide sequence isolated from the Sargasso Sea
gatgaacaataaaactgaaacaataactatttctacccatctaggagatattgctggaataaaagaatctaaggttttttcgtttagaggtataccttatggtgcagatacttcgggaaacaatagatggcgtgcgccgcaggaacccgagccttggtctgagccttttgatgcttcatcttttgggcctcaatgtcctcaattcaggatgggagagggaggatttagaggaagtattgctaaggcctatggcgctgaagttcctgcagaagaaacacccacagaatcagaagactgtttacgtttgaacgtttttactcctaatacgaaccctgaaaaaaaattacctgttatgttttggatacatggaggagccttaagatacggttctggtgacccctatcttcctgaaggcatattaagtaaagatgtagttttggtgagtattaactacaggttaggagaattgggattttttgctcatcctgctctaaaagaagagggcaatgtacccacaaccaattttggtttattggatcaaataaaaggtcttgagtgggttcaaaagaatattgaaaattttggaggagattcttcaaatgtaacaatattcggtgagtcggcaggaggtctttctgtggcagctttgctagtctcccctctatcaaaaggtcttttccataaggcaatagttcaaagtggaggttttgcaaggatggctttgaatgcttatgaattaaatgaaatgggtacaaccgggagcatggtcggtaagtcattttgtaatgtatgcggagtcgaggatggccctgatcagatagataaaatgagagatttaccagttcaagagataatacaaaagggcatagggtttccttcttctttatatgtggatgacatttctatgctttctccggtaatacaaggttttgaagaaggaataaatcataaagttcctaccatcataggcactaatgccgatgaaggaacagctctttattggggcagtcctttagctgacgaagctccgccagttaattcggtagagaagtatttaggtattattaaagaaaggtttggagatgacgaagagaaaatactttctatttatccagcttccgacaaggaagagatgatagattcaagtaaaagactattgggcgattcactgtttggtgcgccttcgtattttgcagcaaaagcaatggccgaaaggagcgaagaaatttatttttatcactttaaccaaaaaccttcaggagaagctggagaagtgctaggttcatttcatgcttatgaaattggatatgtcttcggagtgggtggcttaggccctattgaaaatcaagaattatcagattgcatgctttcgtactggacaaacttttctaaaggaggagatccaaatgattccggtttacctagttgggaaaaaatgcaatccgaaagggatacttggcatgaattaggaccttcaattggagaaaaggatatttctagattagaaatctatgatcttctaaaaaaggtaatctaa

SEQ ID NO: 259114 - DNA, 877 bp, Unknown
  Bacterial polypeptide expressing nucleotide sequence isolated from the Sargasso Sea
catgacacgattttttataattttccttcttcttatctgtcttccacttcaatcgggagaggttgatataacggtaaatgcaaacgatgcagaggtgttggctcattttgatgatgagagtgaattatttatattcagaggtgttccatacgccaaaccgcctgtgggcaagctgcgatggaaatcacctcaaccagttgaagaaaaatcacagattgatgcacgctcattcaaacctggatgcatgcaggatacctatatcactgattggtaccacgatgtgattgaatcttttgagcaagacacgtcattatttgagcacgtcaaagaagtcagtgaagactgtttgtacctgaatatttggacaccatcagtcgacaagacaaagaaaaagcctgtaatggtttgggtgcatggcggagcagatacaggcggatggtcatacgaacctgattatcttggtcataatttggcaaaaaaagatgttgttgtggtctccattggttatcgcttgaatgtttttggcttcttcaagcatccagaaatgtcagatgaaacaggcaacttcggattggaagatgaaattttggcactgaaatggatccaggaaaatatagaagattttggtggtgacccaaacaatgttacttactttggtgaatctgccggaggtgctcatgtttcttatcttgctgcatcacctgaggcgaaaggcctatttaaaagagggatcatccaaagtggtggttacaatttgttcaattggcgtagcattgatgaagcacatgagctcgcgattagaactcaaaatatttcgggaaccattgatctcaatgatcttaaacaactggatgcgaatgctctactgctggcatca

SEQ ID NO: 259115 - DNA, 782 bp, Unknown
  Bacterial polypeptide expressing nucleotide sequence isolated from the Sargasso Sea
aatgaaaaaaaatatttttaccactatatttctctcgatcttttttctcacaagttgtgaaacgattgattcgataaagccatctcgtgatattgtcaaaacatcacctgactcattacgattaactaactcaggtcctgttataggagttgatggtgaagaaggcattcacatatggtttggtgtgccctatgcagaagctcccgtagataaattaagatggaaagcgccaagaaatgtaaatagttgggataaagtttatgaggcaacaaattttagtagcccttgcttacaaatacaatcatctctcactggaggtggtttagctaaacccggagatataattggtgatgaagattgtttgtatctaaatatttatgcgccttcatatagtgtaacttctgtccctaaagaaataaataaacttccggtgatggtatggattcatggaggaggtaacaccagtggtatgacctcagaatataacccagaaagatttgtggcatcacaaaatataatagtggtaacaatttcctacagattaggtttatttggatggttttctcatccagaactaagaaataaatcagatggtattgatgtctcaccaaattttggactactagatcaaattaaagcgcttgaatggttaagagataatatagaaggttttggcggcgataaaaataatatcactatttttggtgaaagtgcaggcggtcaaaatgtgatagccttatatgtttcacctttagctaaaggtttatttcaccgagcgatat

SEQ ID NO: 259116 - DNA, 1033 bp, Unknown
  Bacterial polypeptide expressing nucleotide sequence isolated from the Sargasso Sea
agatggagagcaccaaaagatttaccaagaagcagtgaaccaatcttcgcagtagattataaaagttcatgtgtgcagcccggaggtggagattttaattttagctttactagagaggtatatagcggagatgaagattgcctttacctaaatatattcgttccacaaaatcagacagtttttgagaagaataattttcctgtaatgttctggattcatggtggagctaacatttatggtgctggaagtgattatgatttttctaaattagcaacttcacaacaagtcattatagtaacaatgaattatcgattagggctctttggttggtttacttctgaacatttaaaagatacctcagaaggattagataagtcatctaattttggccaattagacattataaaagcattggagtgggtgcaatcaaatattgattatttcggtggtgattcatctaatgtgacaattttcggtgaatctgctggaggccataatattttaactctattagcttcgccacttggaaaaggtttatttcatagagcaatttctcagtctggttacatagaatcttactccttagaatttgctaagagaggttcaccattatcatctgagaaattatttgaagatgatattaaatctttaattaattcagaagatatagcggagaagttaagagagattccggcaggagaaatttatgaaagagtaataaagatttcacaagaatctgattgggctgaaataccaaaaacaactagagatggcatagttgtaccttttaaaggtctttatagtggtttgagagatgttgaccctgatatagttatagtcgcaggtacaaatagagatgagcttaattattattttatacaatctgaatatttctatgacactacatttgatttaaaacgatctctaaaaagaagtgaagaaaatcttaaaagttggatcaaatacagaagcgaaatatggaggttcagaggtgctgaagaacccttaagagaaatgagtaaaaataataata

SEQ ID NO: 259117 - DNA, 600 bp, Unknown
  Bacterial polypeptide expressing nucleotide sequence isolated from the Sargasso Sea
tatgtttttagaccatataaaaaaattcatcataattatcctagcaagttatcttgcctcatgcagtattcccaagactgatctatcacttgatcaggcgactctattggaaatcaatgagggaaagattattggctcagataatgggaaaacttatcaatggctgggtattcaatatggatcaattcctgattcgagctatagatggaagagaggagctgaaacagaaaaatgggatggtgtttatgaggcgctggaatttggaaatacctgcgttcaaaaggggtcactaattaataccacaaaacgaagaaattggggtgacatcgtcggatctgaagactgtttatatctgaatgtttgggcgcctagagatgtatttgatgacttatcgcagagcaagccggtgatggtctggatccatggtggcagcaatgtttcaggtaatgcagatttttacgatccgagtgaattggttagcagtcaggatgtaatagttgtgtctattaattaccgtttggggccatttggttggttcagacatccagacataacttcaaatgctgagagtccagatgatcaatcaggcaactatggcaa

SEQ ID NO: 259118 - DNA, 826 bp, Unknown
  Bacterial polypeptide expressing nucleotide sequence isolated from the Sargasso Sea
atgtcggaagactgcctcctgctgaatgtccacaccagagcagacagagaagaggacgctttgccggtcatggtatggatacacggtggtgccttagtgactggttcggggagcgaatatcctggtgaattactcacctcaaagggggtggttttggtcaccattaactatcgattaggtagattcggttttaatgcgcatgaacttttaagccaagaaaacctctcaggagtgtcgggtaatcaaggccttcgtgatcaaatatttgcccttgagtgggtccgtgacaacatatcgaaatttggtggagatccacaaaacgtaactatttttggagagtcggctggatccttgagcgtgtccttgctgcaggcgagtccgctagcgaaaggtttgttccatcgtgtaatcggacaaagcggtggtgcctttcagccaatggctttcagagccgaggcgaggaacggacatcagtcagcagagtcgattggtgccgattgtgcggcggctatgttaggagattcggcagacgagacgagtttggaggctctgcgagctgtccctgcagcaagtattatagaaagaacaatgcaaaacgcagaaaacccgacatcactatgcaccgcttatgacagtctcgcgattgtggatggtgaagttataccggaagaagtggagtcaatttttaaccaggggttgcaatcagatgtgccgactatgattggttctaatgcagatgaggctacgacctttctccctatgttcaaggctttgtcagaagatccctcggacagtaaggcaggtatgatgatgcaagctaggattt

SEQ ID NO: 259119 - DNA, 857 bp, Unknown
  Bacterial polypeptide expressing nucleotide sequence isolated from the Sargasso Sea
tctggtattcctattcatatttggaggaggtccagataaagaaacaataagatctaccgattcaggaaaagtagtaggaagtgtagaaggagataattatgtttggagaggtattccttttgcgaaacctccagttggtgatctcagatggaaagcacctataaaaccagatggctgggaaggtactctagaggccctagaaagttctgaggcttgctttcaacctgatggaatgagtatgttagggcaaggtggaggatggagtggatcagaagattgtttgtatcttaatgtatggtctcctaaagatgccaatgacaaaaaacttccagtaatgatgtggattcatggaggaggtaatagaatgggatcagcttctgggtatgatcctcaggccatggtgtctaagcaagatgtagtcgtggtagtagttcaatacagaatgtccactttaggctggtttagacatccttcgctaagagataaaacaacaagcgaagaagataattctggaaattttggtactttagacactattatggctttgaggtggataaaggaaaatattagtgcctttgggggtgattcatctaatgtgaccatttttggagaatctgcaggaggtcataatgtcgcagctctttatgcctcacctcttgcacaaggtctatttcataaagcaattgtccaaagtggaattgtttctactgcctctgctgttcaagcagaaagttattacccagagacacgaatatctggaacggtgagctccaaagaaatggttaattctttattgattgcagataatttagcgtcttcggcagatgaggcaattaaagttcaagagtcaatgtcaa

SEQ ID NO: 259120 - DNA, 487 bp, Unknown
  Bacterial polypeptide expressing nucleotide sequence isolated from the Sargasso Sea
atgtttttagaccatataaaaaaattcatcatagttatcctagcaagttatcttgcctcatgcagtattcccaagactgatctatcacttgatcaggcgactttattagaaatcaaggaaggaaaaattattggctcaaacaatgggaaaacttaccaatggttgggtattcaatatggatcaatacctgattcgagctataggtggaaaagaggagccgaaatagaaaaatgggatggtgtttatgaggcgctagaatttggaaatacctgcgttcaaaagggatcgctaattaataccacaaaaagaagaaattggggcgacatcgtcggatctgaagattgtttatatctcaatgtttgggcgcctagtgatgtatttgatgacttatcgcagagtaagccagtgatggtctggatccatggtggcagcaatgtttccggtaatgcagatttttacgatccgagtggaattgttagcagtcagg

SEQ ID NO: 259121 - DNA, 703 bp, Unknown
  Bacterial polypeptide expressing nucleotide sequence isolated from the Sargasso Sea
gttgaaaaatataagaatttttaaatcagtatccatagggataattttttggataactacattagaaattgcatcggataatttacagttatcagtacaaacatcatcaggtttagttgctggttccaaagaatcaaagataatcctttttgaagatattccctatgctgagccaccagtaaatgaattacgctgggaaccgcctcaaccaatcaaaaatcctgggaaaagcatcgagccaaaagaatcaaatcactgttatcaagaaactgattcacttcaagatattcaaaattttggaacagaagattgcctttatctagatatcagagtcccacaaagtcaaaataaaaatcttccagttatgttttggatacatggtggtggtaatacatcaggaacaaaagatttttataatttttcaagattggtagcaaaaaaagaagttattgtagtctctataaattatcgattgggcatttttggtttttttacacattctgcaattcagactgctggtgttgaaccttctaatttcggcattttggatatcatcgaagctttaaaatgggttcaaaaaaatattaaaaattttggtggtgatcctgataatgtcactatattcggtgagtcagctggtggacataatgtttatgctttattggtttctaaacaagcaaaaggattattcacaaagcaattc

SEQ ID NO: 259122 - DNA, 661 bp, Unknown
  Bacterial polypeptide expressing nucleotide sequence isolated from the Sargasso Sea
gttgaaaaatataagaatttttaaatcattatccatagtgataattttctggatcacttccttagaaattgcatcggataatttacagttatctgttcaaacatcatcaggtttagttactggcatcaaagaatcaaagataatcctttttgaagatattccctatgccgagccaccagtaaatgaattacgttggcaaccacctcaaccaattaaaaattctgggaaaagtatcaagccaaaagaatctaatcattgttatcaagaaactgactcacttcaagatattcaaaattttggaacagaagattgcctttatcttgatatcagagtcccacaaacccaaaataaaaatcttcctattatgttttggattcatggaggcgggaatacatcaggaacaaaagatttttataatttttcaagattggtagcaaaaaaagaggtcattgtagtctctgtaaattatcgattaggtatttttggtttttttacacattctgcaattcagactgcaggcgttgaaccttctaatttcggcattttggatatcatcgaagctttaaaatgggttcaaaaaaatataaaaaattttggtggtgatcctgaaaatgtcactatattcggtgagtcagctggtgggcataatgtttatgcttta

SEQ ID NO: 259123 - DNA, 466 bp, Unknown
  Bacterial polypeptide expressing nucleotide sequence isolated from the Sargasso Sea
tttggaacaaccaatacaattagatgtagggcaaataaccgggacatcaacggaaagcggggtgcaggcttttttgggcataccattcgcatcccccccagttggtgatttacgttggagggaaccgcagcctgttattccatggtctggggtgaaggtcatggatcgtaaagggccagattgcatgcaatcgagaaatactaatctgatgagcgaggattgcctttacttaaatgtgtggactggcgctcaatcatctgcagataagctgccggttttggtatggattcatggaggtggttggcgattcaaggcaacgtatgatggagatgcgttcgctgataatggggcgatattggtttcagtaaactataggatgaatgcttttggatggatggctcatccagccttatctgaagagtcggaaaatggtgtttctgggaactacggcgttttagatcatctg

SEQ ID NO: 259124 - DNA, 862 bp, Unknown
  Bacterial polypeptide expressing nucleotide sequence isolated from the Sargasso Sea
aaacccggagatataattggtgatgaagattgtttgtatctaaatatttatgcgccttcatatagtgtaacttctgtccctaaagaaataaataaacttccagtgatggtatggattcatggaggaggtaacaccagtggtatgacctcagaatataacccagaaagatttgtagcatcacaaaatataatagtggtaacaatttcttacagattaggtttatttggatggttttctcatccagaactaagaaataaattagatggtattgatgtctcaccaaattttggactactagatcaaattaaagcgcttgaatggttaagagataatatagaagtttttggcggcgataaaaataatatcactatttttggtgaaagtgcaggcggtcaaaatgtgatagccttatatgtttcgccattagctaaaggtttatttcaccgatcgatatctcaatcaggcggaattacactcacttcaatagaggatgctgaagagatagatcgaaacattcatcctctaggcaaagattatagatacagacacaagacaacaaaagaattagtcaattctctcttgaatgaagggataattaatacacattttcatgagacgggtaatattgaagaattaatgaatttagattctcatgacctaatgagaaattggtcgaagggtaaagtttgggaaggcacaactcaattagcaaggataattggagatgattttgtcttacctaaagatagtattctagctgcattaagcgataaaaatagacatgcaaatgttccaattattcttggtgtcaataaagatgaaaataaaacatttaatctttttgacgaagaattagttacta

SEQ ID NO: 259125 - DNA, 880 bp, Unknown
  Bacterial polypeptide expressing nucleotide sequence isolated from the Sargasso Sea
ttggattcaggtgtgagagcgtacttaggaattccttacgccgcggcgcctgttggggaccttcgatggaaagcgccagagcctccgattccatggcgaggggtaaaagtcgttgatcgacatgggcccgcttgtattcaaagaagagatgtttacatgagcgaggattgcttgttccttgatatttggacgagtagccaaaaaggcaagaaattgcctgtcatggtttggatccatggcggaggatggaccttcggttcaaattcacaggatatttatgacggagaggcttttgctgacaatggggttgtgctggtttctgtgaattatcgaatgaatagttttgggtggatggcgcacccggaattgtcgcgagagtcgaaagagggcgtttcgggtaactacggtgtcctagatcatattgcggctctcaaatgggtacaggagaatatcgagagttttgggggagataaaaataatgtgacaatttttggagaatcggcgggtggggggagtatttatgctcttttagctaccccccaagccgacgggctcttccataaagctatatctgaaagtacttggattcatccgaataatgtaacaaatttgaaaaagcctaatggttttcaagatagtgcagagtctcttggaaagatagctatcgaaaaagtgcttggatcttctgacgaaaatatcttgactagaatgcgttcaatgtctcctgaagaggtgttgggtttggagcatagtgttgcattgattgtcgatggttggttgtttgaacaagatcctatagagacatttttggctggaaaacataataacgttccaataattagcggttacaatgatggtgagggtttgatgtttgtgaggc

SEQ ID NO: 259126 - DNA, 835 bp, Unknown
  Bacterial polypeptide expressing nucleotide sequence isolated from the Sargasso Sea
tcagacggaaaggacactgaaatcataagccttcctcaaggagatttagttggttttgcaaaaggcgaaactgattattttttaggcataccttatgctgagcctccaataggagctaatagatttgaaccgccaaaatctcataagggttggagcgatgttttaaaagcaaaggaagcggaaaagcagtgtatgcaacctcaaggcgaagaaggcgaattaagtgagttttttgaggtttttcttacaaaatctggaatgaagtggtgggaacaaatcattctagaaaatgctgcatggcttttcgcaagtttagattttgagaaacagcaatccgaagactgcttattcattaatatcatcaaaccgtcaaaaatagataacggttctttacctgttatggtgtggttccacggaggcggttataacttcggtaacggcgatggactatatataacagatagatttgcaaaacgtgacgttatcttggtaacaatgaactaccgattaggtccatttggattttttgcacatccgttattatctgaaacatcaaaaatgggtgtctcaggaaattatggaactttagatcaaatccaagccttaaaatgggtgcagaccaatatacatctttttgggggcgatccagataacgtaactattttcggtgaatccgccgggggagcaagcgttgaaaccttagtgtcaacaaaacttgcaaaagatctttttcataaagccatagctcaaagcggatacacagtcggaagagcaagaaatattagagagcaaagaggagatctaatttctgcagaatcgctcggggaaaagtttt

SEQ ID NO: 259127 - DNA, 829 bp, Unknown
  Bacterial polypeptide expressing nucleotide sequence isolated from the Sargasso Sea
ttggctcattttgatgatgagagtgaattatttatattcagaggtgttccatacgccgaaccacctgtggggaaccttcgttggaaatcacctgttccagttgaaataaaaaatcagattgatgcacgctcatacaaacctggatgcatgcaggacacctataccactgattggtatcacgatgtcattgactcttttggtcaagacaaatctttgtttcaacatatcgacaatgtcagtgaagactgtctctatctaaatatttggacatcatctgtaaataaaaatgaaaaaaaacctgtgatggtatgggtgcatggtggagcagacacaggcgggtggtcatacgagcctgattatctcggtcataatttggcaaaaaaagatgttgttgtggtctctattggttatcgattgaatgtctttggcttctttaaacatccagagatgactgaagagactggtaactttggattggaagatgaaatacttgcgctgaaatggatcaaagagaatattgcagattttggcggtgatccatcaaatgtcacatattttggtgaatctgcaggaggcgctcatgtttcttatcttgcctcatcacctgaggcgaaaggcctttttaaaagaggcatcatccaaagtggcggttacaatctattcaattggcgaagcgttgatgaggcgcatgaactcgcaattcgaacacaaagtatctccggtacgatcgatctcaatgatctcaaaagcctagatgagaatgcccttcttcaagcatcgaggaacctttatcatccttatagaccaatcattgaggaaaaatcatcac

SEQ ID NO: 259128 - DNA, 796 bp, Unknown
  Bacterial polypeptide expressing nucleotide sequence isolated from the Sargasso Sea
gatgacaggcaacgggttacttgagggaaagtgtgaagcgggtgttcgggtatggcgaggcgttccttatgccacgccacctgttggagcattacgctggcgtgcacctcaacccccttccaactggcagggcataaaacaggcatatgcgtatggcccggcaagttggcaggatgaagagtactgccgtgaactgggtggcggggacccgggcagttttagtgaagattgcctgtatttaaatatctgggcccccgcaacaccgtcagtgcatcctttgcctgttatggtctggctgcatggtggtgggtttaccattggtgccggtggcctgccgccttatgaaggccacggcctcacccggcgcggtgttatcctggttaccgtgaattaccgccttggacatctcggtttttttgctcacccggcgttagacggagaagatccccgtggcccggtacacaattttggtttgcttgaccaaattgcggcactggactgggtcagggataatattgcggcttttggcggagatgcgcagcaggtgacgttgttcggcgaatctgcaggtgcacgtagtgtaatgtcactgatgacctcaccactcgccagggggttgtttcacagagcgattattcaaagcggttacacgttacctgacactccccggccagacgcattacaaaatggtgaacaagtgtcggctgtgctggggttaaagcacgccactgctgaacagttgcgagaattaccaggcgatgccttctggcctctggccgcaccttattcacccaca

SEQ ID NO: 259129 - DNA, 905 bp, Unknown
  Bacterial polypeptide expressing nucleotide sequence isolated from the Sargasso Sea
gattactaactcaggtcccgttataggaattgaaggtgaagaaggcattcacatatggtttggtgtgccctatgcagaagctcctgtagataaattaagatggaaagcgccaagaaatgtaaatagttgggataaagtttatgaggcaaaaaattttggtagcccttgcgtacaaatacaatcatctctcactggaggtggtctagctaaacccggagatataattggtgatgaagattgtttgtatctaaatatttatgcgccttcatataatgtaacttctgtccctaaagaaataaataaacttccggtgatggtatggattcatggaggaggtaacaccagtggcatgacctcagaatataatccagagagatttgtggcatcacaaaatataatagtggtaacaatttcctacagattaggtttatttggatggttttctcatccagaactaagaaataaatcagatggtattgatgcttcagcaaattttggactattagatcaaattaaagcgcttgaatggttaagagataatatagaaggttttggcggcgataaaaataatatcactatttttggtgaaagtgcaggcggtcaaaatgtgatagccttatatgtttcacctttagctaaaggtttatttcaccgagcgatatctcaatcaggcggaattacactcacttcaatagaggatgctgaagagatagatcgaaacattcatcctctgggcaaagattatagatacagacacaagacaacaaaagaatttgttaattctctgctgaatgaaggaataattaatactcatcttcatgagacgggtaatattgaagaattaatgaatttggattcttatgacctaatgagaaattggtcgaagggtaaagtttgggaaggta

SEQ ID NO: 259130 - DNA, 706 bp, Unknown
  Bacterial polypeptide expressing nucleotide sequence isolated from the Sargasso Sea
tctgctagttagcacactttatgcagaagagtcatacatttttaaaacaaataaaactgaatttattggttcggtagcaaaagaaaagggagataaaaagacaatttcctttgttggaattccctttgcaaagcctccagtaggtgacctgagatggaaagctcccagggaattagatggctatcctgaaacatttaaagcaaccactctaccgaataggtgtatgcaagttagtaacttttatgattcaatggatggcattgagggtgagtcaatcataggttcagaagattgtttgtatttaaatatatatctttctgaaaaagcatataagagcaaagagaagctgccagttgttttttggattcatggtggcggcaatacctggggatattcagcttcaaatatatttacatcaggtgattttattttagatcacgacgtaatattagtcacaacaaactacaggcttgggccttttggatggtttgcgtacagcgggttaaatcaagactcagaaaaccctttagatagtactgctaattttggaacattagatattataaaatcccttgaatgggtgaataaatatatttccttttttaatggtgatccagagaacataacaatttttggcgagtctgctggagctcgaaatgtgatttctcttatgtcttcaccattaagcaaagatttgttttcaagg

SEQ ID NO: 259131 - DNA, 1501 bp, Unknown
  Bacterial polypeptide expressing nucleotide sequence isolated from the Sargasso Sea
aatgcttaaagcctttgccaggattgttattatcctttttgctgttggtatttatgggtcaacaaattatcaaccaacagcttttatcaaagatacgaaactcataggcagcttgcatcagaataatgaagtagagatgtttcttggcataccttttgctgtcccgccaattaatgacctcagatgggaaaagcctgttgcttggactcctgaaaataaaaaagaaataactgctaataagtttagacctggatgtattcagaaccaaagaattgttaattggtataaaaggctaattcttgactttggtggcgatcctggaactttcgatattccagagtttagtgaggattgtttgtatttgaatttatggcgaccaaggggattaaaaaataatttacctgtaattgtttatatacatggtggaagcaataaagctggctggtcgtatgaacctaattatcttggtcataatattgctaacaaaggctttatacttataagtattccatatcgccttggggtgtttggctttttttctcatcctgatcttgaaagccctaatcttgctttatatgaccagattttggcccttgaatggatacaaaaatatgtttctttctttggtggtgatccgtccaatgttactttagttggtgaatcagcaggtgctggaggaatcagtcatttaatagcttctcccttaagcaaaaatttatttcataaagcagtccatcaaagtggcggatcttcttttacctatccaacttcaggttcggatgtaagaaagttggcaaatagctttgcaaattcttttgaagatccgtcacttaaaaatctaaaaaatatcagcgcagaagaaatacttgaggtttcagaagaagtttatgctgagcactactttaactatgttgatgatggtttctctatgatcggaaacttatctgatacttttaaaagtcggaatgtccaagatgtagatcttctaattgggtccaataatgatgaatggtccttatattttgacgggaatgtgaatatcggtttgtggctcgatgaggaaacaactcctgagaaaaaaataaagctcttggagcttctagatgatattaaagatcctatcagaaagatggatttattaattacagctaaaaattttgtttgcccttctttgtttatggctgaagagttgaagaaaaaaggaggtagcacctgggtatatcaatttaatagggttagagataatgaattggcaaataaatatggagcctttcatggcgcagaacttccctatgtttttgatactcatgatgagtggctaccaacaaatgagactgacatagagcttaccagagagattcaatcttactggttatcctttgctagaactggtaatcctaacaatgatgatgcagtgctatggccagaatatgattcgtctgatgattcaactcttgttttagatgatgagatatatcaaagaagccatgagagttctgag

SEQ ID NO: 259132 - DNA, 1099 bp, Unknown
  Bacterial polypeptide expressing nucleotide sequence isolated from the Sargasso Sea
atggtatttcaatttatatttggaggaggtccagataaagaaactataaggtctactgattcaggagaagtaataggaagcatagaaggagataattatgtttggagaggaattccctttgcaaaacctccagtcggagacctcagatggaaggcacccataaagccagatagctgggaaggtactctagaggctttagaaagctccgaagcttgttttcagcctgacgggatgagcatgttaggacaaggtggaggatggagtggatcagaagattgtttgtatcttaatgtctggtctcccaaagaagccaatgacaaaaaacttccagtaatgatgtggattcatggagggggcaatagaatgggttcagcttccggatatgatcctcaagctatggtatctaagcaagatgtggtcgtagtggtagttcaatatagaatgtctactctgggctggtttagacatccttcattaagagatggcacaacaagtgcagaagatgattctggaaattttggtactttagacaccattatggctttgaggtggataaaggaaaatatcagtgcctttggtggcgattcatctaacgtgactatttttggagaatctgctgggggtcataatgttgctgctctttacgcttcacctcttgcgcaaggactatttcataaagcaattgttcaaagtggaatagtttctactgcctctgctgttcaagcagaaagttattacccagagacacgaatatctggaacggtgagctccaaagaaatggttaattccttgttaattgcagatgatttagcatcttctgcagatgaggcaagtaaagttcaagactctatgtctaatgaagaattatctgaatatttaagaaataagtctcctgcccaaattttagaagcagaagttaaagcagaacctagattagggggcatgactagagcatacaatgatggacatgtaatcagatctgacggaatagaagctatattttctgatgcttcagctacgagaggtcctattatttttggaacaaacagatatgaaacaaaactgtttaatatgtggaatccttctcttgtaagatcag

SEQ ID NO: 259133 - DNA, 1807 bp, Unknown
  Bacterial polypeptide expressing nucleotide sequence isolated from the Sargasso Sea
aatgaaaaaaaatattttaaccgttacatttctatcaatatttgcctttacgagctgtacgactattgattccataaaaccatcaagcgatattataaagacatcacctgatactgtaagatcaacaaattcaggtcctgttataggaactgaaggagaagaaggcattcacatgtggttagggatcccttatgcaaagccacctatagaaaaattaagatggaaagctccaagaaatgtaagttcatgggataaagtttatgaagccataaattttgctagcccttgtgtacaaattcaatcatctttaactggaggtgggttagctaaacctggagatatagttggaaatgaagattgtttgtatctcaatatatatgctccagcatttacaataaattctgttccaaatgaaaataataagcttcctgtgatggtatggattcatggaggaggtaataccagcggtatgacctctgaatacaatccacaaaaattagtagaatctcaaaatgtaatagtggttactatttcatatagattgggaatatttggatggttctctcatcctgaattaagaaatagatcggatggtcttgatgcctcagcaaattttggactattagaccaaattaaagcacttgaatggttaagagataatatagaaaattttggtggtgataataataatattacaatatttggtgaaagtgcaggtggccaaaatgttatagcgctatatgtttcacctatcgcaaaaggcttgttccacagagcgatatctcaatcaggtggaattactcttacttcaatcgctgatgcagaagatatagatagggccgcatatcccttaaatggaaattataaatatagacataaaacaacaaaagaattcataaataatcttttaaacaaaggaataatcaatactcatcttaatgagacaggaaatattgaagaattaattaatttgaaagctactgatttaatgctcagttggacaactggtgaagtgtgggaaggtacaactcaaatggctagaattattggcgatggctatgttcttcctaaagatagtattctagatgcattaaaagataaaaatagacatgctaatgtaccaattattctcggtgttaataaagatgaaaataaaacattcaatctttttaatgaagaattggttaccaatattcttaacattactttcatagctaaggatccttttttctatgatttgaaatctgattatcaaagtttagcttggcgttcaaatgctgtagatacacctgcagatgcaatagttgaaggaggttatccaaatgtatatgcctatcgatttgattgggatgaacaaccaagtattttaggtatggatttttcttttttattaggtgcaggtcatggtttagaaatcccatttgttatgggtgattttgattttggaaggcaaactagatttcttttcactaaaaaaaatgagcatgaaagaaataaattatccaaagtaattatgcagtattggacgaactttgccaaagaaggttatccaagtaatgagtcagaaaatattactccttggaataaatggcctaaaggtggaattaatcaaaatagaataatgattttagatactgaacaatcaaatgcgccaagaatgagcaatggatatgcgcctcacaataaactagtcagtatttttgagagtgatgaaagatctctcaaggttgataacaaatgttattttttggaagatgtatattcttgggttgataattggaaaataaaaaataatgtttgtcagtaa

SEQ ID NO: 259134 - DNA, 1180 bp, Unknown
  Bacterial polypeptide expressing nucleotide sequence isolated from the Sargasso Sea
atgtttttagaccatataaaaaaattcatcataataatcctagcaggatatcttgcctcctgcagtattcccaagactgatctatcacttgatcagtcgactctattagaaattaaggagggaaaaattattggctcaaacaatgggaaaacctaccaatggttaggcattcaatatggatcaattcctgattctagctatagatggaaaagagcagctgagacagaaaaatgggacggtgtttatgaggcgctagaatttggaaatacctgcgttcaaaaggggtcactaattaatactacaaaaagaagaaattggggcgacatcgtcggatctgaagattgtttatatctgaatgtttgggcacctaatgatgtatttgatgacttatcgcagagtaagccagtgatggtctggatccatggtggcagtaatgtttcaggtaatgcagatttttacgatccgagtgaattggttagcagtcaggatgtaatagttgtgtcgattaattaccgtttgggaccatttggttggtttagacatccagatataacttcaactgctaagaatccaaaagatcaatcaggcaactatggcaatattgattccattcaagcgcttgaatgggttcaaagaaacattggatttttcggtggcgattcttcaaatatcacaatttttggggaatctgctggtggttataacgtagcagctttattgtccgcaaaacaagcgaatggactttttcataaagccattatacaaagtggtggaatcagacccggtgatattgaacattctgagtcatatctaaagaaaaacttaccatggaagaattattcttcaagagaactcattaatgagttactggtaatgaatgaaatggcatcggatagaaattcagctgcaatattgcaagaaaatttgtctcaaaaagaaatcgaagctttaatgagaaatgcctcatccacagaaatttatgaagcatacctagcaacaaaggccaacaccgatgatatgttgagaccatttcctgatggtaatttattgagtgaactaggaattctgggttctttagagagtgggttcaatatagatgttccaataatgattggaacaaatcgagatgaaatgaaattgtttctcctcaataatcctcgattgacaagagagttctaag

SEQ ID NO: 259135 - DNA, 1171 bp, Unknown
  Bacterial polypeptide expressing nucleotide sequence isolated from the Sargasso Sea
atgaaaaaaaatatttttaccactatatttctctcgatcttttttctcacaagttgtgaaacgattgattccataaggccatctcgtgatattgtcaaaacatcacctgactcattacgattaactaactcaggtcccgttataggaattgaaggtgaagaaggcattcacatatggtttggtgtgccttatgcagaagctcctgtagataaattaagatggaaagcgccaagaaatgtaaatagttgggataaagtttatgaggcaaaaaattttggtagtccttgcgtacaaatacaatcatctctcactggaggtggtctagctaaacctggagatataattggtaatgaagattgtttgtatctaaatatttatgcgccttcatataatgtaaattctgtacctaaagaaataaatagacttccagtgatggtatggattcatggaggaggtaataccagtggcatgacttcagaatataacccagaaagatttgtggtatcacaaaatataatagtggtaacaatttcttatagattaggtttatttggatggttttctcacccagaactaagaaagaaatcagatgatatcgatgcttcagcaaattttggactattagatcaaattaaagcccttgaatggttaagagataatatagaagtttttggtggcgataaaaataatatcactatttttggtgaaagtgcaggcggtcaaaatgttatagccttatatgtttcgcctctagctaaaggtttatttcatcgagcgatatctcaatcaggcggaatttcacttacctcaatagaagatgctgaagagatagatcgaaatattcatcctttaggcaaagattatagatacagacacaagacaacaaaagaattagttaattccctcttgaatgaaggtataactaatacacattttcatgagacgggcaatattgaggaattaatgaatttggagtctcatgacttaatgagaaattggtcgaagggtaaagcttgggagggtactacacaattggcaaggataattggagatgatcttgtcttacctaaaggtagtattctagctgcactaagggatagagatagacatgcaaatgttccaattattcttggtgtcaataaagatgaaaataaaacatttatcttttgac

SEQ ID NO: 259136 - DNA, 1126 bp, Unknown
  Bacterial polypeptide expressing nucleotide sequence isolated from the Sargasso Sea
tatgaaatcgattattcaaattattttagcaatcttagtgctcgctgcatgttcaagtgggcttgccctcaaagattcttctagtttcattcaagtgaatgcgccagcgggaaattttttaggtgaggaagaagaaagtttctatgtctttagaggtgttccatatgcagaaccacctgtgggtgatctaagatggagagctccaagagctccatccgtaagcaacgatgttatcgatgccacaaaatttaagagtgaatgcatccagcctggcacagaaggactgataccaaatagaaatgtttctgtgggaaatgaagattgtctatatttgaatatttacattcccaaaaatcaaactgagataaataaaaataaattccctgttatgttttggattcatggaggttcaaatatttggggatctggagatttttatgatttctcaaaattagccactactcaacaagtaatcgttataactgttaattaccgtcttggtttatttggttggttttcttccgagcatttaagaaatacagccacaggccttgataaatcatccaactttggacagttagatttaattaaaggtcttgagtgggtacaagaaaatatttctgcttttggtggcgataaagaaaatgtaacaatttttggtgaatcagcaggcggtcataatgttcttacattattggcttcacctttaagcaaaggcttgtttcataaagcaatatcgcaatcaggttatgtctcatcttatactcaaaagtttgccgaagaggagtcagaattatcttcgaagaaaatttttgaggatgatataaaatttctggtgaacgatatcgaggttgctgattacttgagaagtctttcttctgaagagatttatcaaaaatttaaagccaaagctgaagagcatatctatccaattacgccgatcacaattaaggatggaattgtcgttcctttgtcaggaatacataagtcattggaaacaatagatgaaaatttagtagttgtagcgggtacaaataaagatgaaatgaacttttggtacgtcagatcaaattatttttataattccacaggaggagtcgtgctacgtctacagcgctcagaagaa

SEQ ID NO: 259137 - DNA, 1759 bp, Unknown
  Bacterial polypeptide expressing nucleotide sequence isolated from the Sargasso Sea
ttgacaatagataaagggtctatcattggttcaaataatggcaatacatatcaatggcttggcattcagtacggttcaattcctgattcgagctatagatggaaaagaggagctgaagcagaaaaatgggatggtgtttatgaggccctagaatttggcaatacctgcgttcaaaagggatcactaatcaatactacaaaaagaagaaattggggtgatatcgtcggatctgaagattgtttatatctcaatgtttgggcgcctaaagatgtatttgatgacttatcacagagtaagccagtgatggtctggatccatggtggcagtaacgtttccggtaacgcagatttttacgatccgagtgaattagttagcagccaggatgtaatagttgtgtcgataaattaccgtttgggaccatttggttggtttagacatccagatataacttcaactgctcagaatccagaagatcaatcaggcaactatggcaatattgattccattcaagcgcttgaatgggttcaaagaaacattgaatttttcggtggcgattcttcaaatatcacaatttttggtgaatccgctggtggttataatgtagcagctttattgtccgcaaagcaagcgaatggactttttcataaagcaatcatacaaagtggtggaatcagaccaggcgatattgagcattctgagtcatatctagagaaaaacttaccgtggaagaattactcttcaagagagcttgttaatgagttactggtaatgaatgaattggcatcggatagaaattcagctgcaacattacaagagaatttgtctcaaaaagaaatcgaagctttaatgagaaatgcctcaaccacagaaatttatgaagcatacctagcaacaaagaccaacaccgatgatatgttgagaccatttcctgatggtaatttattgagtgaactaggaatactgggttctttagagggcggcttcagtatggatgttccaataatgattggaacaaatcgagatgaaatgaaattgtttctcctcaataatcctcgattgacaagagagtttctaagaatacctcgaataagagatttggatttatggaatgcggtttcaaaacacagaagcaattcttggaaatacttggccgttgacgaacctgcccagaccttgacaagctctggtagatcaaacatctatgcttatcgatttgattgggatgatgagccaagaaaatatggagttgatctaaagaatttacttggtgcggcacatgcttttgagattcctttcgtgatgggtaattttgatgaagatgcacttacgaaatacatactcagtagaaaaaatctggaggaggtcaaaacactttctcagtcaatgatgagttattgggctgaatttgcttataacggagatccagataaaggaagagaaggaaatctaattgattggcaggcttgggatcccagagagggcagcgagaagtatattatattcgactccactcatgatgggggaataaggatgacgaaggactatctcacagaaggaaaactaattgaaatgttggccgcagataatcaaattaaagattataaatggaagtgtgagattcttgacgccgcaatcatgtttgatcatctcacgactcaaaatgtactaaatgactttaataataatcaatgcagtgatcttgatccttcgacagaatggagaaaatattggtacgatgaaaaggagcaacgctactagg

SEQ ID NO: 259138 - DNA, 1759 bp, Unknown
  Bacterial polypeptide expressing nucleotide sequence isolated from the Sargasso Sea
attggaaatcaatgagggaaagattattggctcagataatgggaaaacttatcaatggcttggtattcaatatggatcaattcctgattcgagctatagatggaagagaggagctgaaacagaaaaatgggatggtgtttatgaggcgctggaatttggaaatacctgcgttcaaaaggggtcactaatcaataccacaaaaagaagaaattggggtgacatcgtcggatctgaagattgtttatatctgaatgtttggtcgcctaaagatgtatttgatgacttatcgcagagcaagccagtaatggtctggatacatggtggcagtaatgtttctggtaatgcagatttttacgatccgagtgaattggttagcagtcaggatgtaatagttgtgtcgattaattaccgtttgggaccatttggttggttcagacatccagacataacttcaaatgctgagaaaccagatgatcaatcaggaaactatggcaatattgattccattcaagcgcttgagtgggttcaaagaaacattggatttttcggtggcgattcttcaaatatcacaatttttggggaatctgctggcggttataacgtagcagctttattgtccgcaaagcaagcgaatggactttttcataaagcaatcattcaaagcggtggaatcagacccggtgatattgagcattctgagtcgtatatagagaaaaacttaccttggaagaattactcttcaagagaactcgttaatgagttattggtaatgaatgaaatggcgtccgatagaaattcagccgcatcattgcaagaaaatttatctcaaaaagaaatcgaagctcttatgagaaatgcctcaaccacagaaatttatgaagcatacttagtaacaaagacgaataccgatgatatgttgagaccgtttcctgatggaaatgtattgagtgaactcggaattatgggctctttagagagcgggttcaattcgaatgttccaataatgattggaacaaatcgagatgaaatgaaattgtttctcctcaataatcctcgattgacaagagagtttctaagaatacctcgaataagagatttggacttatggaatgcggtttcaaaacacagaagcaattcgtggaaatacttggccgttgacgaacctgcccagagcttgacaagttctgggagatcaaacatctatgcttatcgatttgattgggatgatgagccaagaaaatatggagttgatctaaagaatttacttggtgcggcacatgcttttgagattccttttgttatgggtaattttgatgaagatgcacttacgagatatatactcagtagaaaaaatcttgaggaggtcaaaacactgtcccagtcaatgatgagttattgggctgaatttgctcacaacggagatccagataaaggcagagaaggaaatctaactgattggcaggcttgggatcccagagaaggaaacgagaagtatattatattcgactccactcatgatggggggataagaatgacaaaagattatctcacagaagaaaagctgattgagatgctggcatcagataatcaaattaaagattataaatggaagtgtgaaattcttgatgccgcaatcatgtttgatcatctcacgactcaaaatgtattaactgaatttaataataatcaatgcagtgatcttgatccttcgacagaatggagaaaatattggtacgatgaaaaggagcaacgctactag

SEQ ID NO: 259139 - DNA, 418 bp, Unknown
  Bacterial polypeptide expressing nucleotide sequence isolated from the Sargasso Sea
atggctttcgattataagccctctgatagcacaaatatacaaacacccgacactctttttactggaactattctagaggaaacaaataataataaattatacgcctattttggaataccctatgcacaaccacccgttggtgagctaagatggaaagcgccaagagatgtaaatgaatacgaggaaacaagactagcagtagaaagacctaatcgatgtccgcagttagctggaaccattgactcaattgaagagggttttaccgtgggcgaaattatcggaagtgaagactgtctgtatttaaatattttcgtatctgaaaaagcaaaaaattctgagactaaattacctgttatggtatggatccatggaggatcaaatgtgtctgggtatggggccgaatgtgatttatactgat

SEQ ID NO: 259140 - DNA, 1442 bp, Unknown
  Bacterial polypeptide expressing nucleotide sequence isolated from the Sargasso Sea
ttcgcagtagattataaaagttcatgtgtgcagcccggaggtggagattttaattttagctttactagagaggtatatagcggagatgaagattgcctttacctaaatatattcgttccacaaaatcagacagtttttgagaagaataattttcctgtaatgttctggattcatggtggagctaatatttatggtgctggaagtgattatgatttttctaaattagcaacttcacaacaagtcattatagtaacaatgaattatcgattagggctctttggttggtttacttctgaacatttaaaagataccacagaaggattagataagtcatctaattttggccaattagacattataaaagcattggagtgggtgcaatcaaatattgattatttcggtggtgattcatctaatgtgacaattttcggtgaatctgctggaggccataatattttaactctattagcttcaccacttggaaaaggtttatttcatagagcaatttctcagtctggttacatagaatcttactccttagaatttgctaagagaggttcaccattatcatctgagaaattatttgaagaagatattaaatctttaattaattcagaagacatagtacagaagttaagagagattcctgcaggagaaatttatgaaagagtaataaagatttcacaagaatctgattgggccgaaataccaaaaacaactagagatggcatagttgtgcctttaaaaggtctttatagcggtttgagagatgttgaccctgatatagttgtagtcgcaggcacaaatagagatgagcttaattattactttatacaatctgaatatttctatgacactacatttgatttaaaaagatctctaaaaagaagtgaagaaaatcttaaaagttggatcaaatacagaagtgaaatatggaggttcagaggtgctgaagaacccttaagagcaatgagtaaaaataataacaatctttattcatatcgttttgattgggatgaggaggcaaacagtaatttatttggaaattatcaacttttcttaggagctccacatggtatggacataccttttgtaagtggagaatttgatcttggacctataaatttttatatcaagcctattatttttccttctgaatcggaagagggcagattagctttaaatgatcttatgatgaaatattgggcaaatattgctaaatatggcgaccctaatgcttttctaaatggtccgaaatgggaaaagttctcaaaagataagcagcaatttttaattcttgataacccaatcgataatgaattgagcatggtgcaagaccctgtagatatcgatgttcttctttcggaagttgaatccgactcttcactagaaattgcagaaagatgcataataggctggatagcagctaatgagagaaatga

SEQ ID NO: 259141 - DNA, 832 bp, Unknown
  Bacterial polypeptide expressing nucleotide sequence isolated from the Sargasso Sea
atgaccagaacaataaccggattatttattatttttactctagcagcgttaggctgcgccgaaagacgagaacaagaaaccttaaccccgattcaatcgacgatcttggttagtggtggtctcattgaaggaaagattactgaaacaggattgagaactttcatgtcggttccctatgcggcaccgcctgtcggagaattacgatgggcgcctacggcatctgtcattccatggcagggggtcttgcttgccaaagaggcgggaccagcctgtatgcagcctgaaggtttgggtggagatttttatggcgaaactggtatcgagatggatgaagattgtttgctcctcaacgtttggactcgagcgaaaaatgaagaagatcaattacccgttatggtttggatacatggaggcggcttagtaataggtcagggatctacctaccccggagatttattaacatcaaaaggcgttgtgttagtcacggtcaattatcggttagggcgttttgggttttttgcgcacccggagctcactgatgaaaatccgaataaggtttctggtaatcaagggctgcgtgatcaaatcgcatcgctgaagtgggtaagggacaacatcgaacgatttggaggtgatcccgataacgtcaccatatttggcgagtccgcgggttcgttgagcatgtcattattacaagcaagcccgttagctaaagggctttttcacaaggttataggacagagcggtggtgctttccagcccatgacatatcgggaccaagtcagaagttattcaccgatgcacagtgaggcgattggagagaaattcggaa

SEQ ID NO: 259142 - DNA, 1680 bp, Unknown
  Bacterial polypeptide expressing nucleotide sequence isolated from the Sargasso Sea
taggaattccttttgcaaagcctccagtaggtgatttaagatggaaagctccaagagaattagatcaactccctaatacttttgaagctacaacattgccaaatcgatgtatgcaagtaagtaatttttatgatgctatggacggcattgaaggaggttcaatagttggttcagaggactgtctttatctaaatatttatctttcggaaaaagcatacaatagtaacgagaaattacctgtcatgttttggatacatggaggagggaatacatggggttattcagcttcaaacttattcacttctggcgattttataatggatcatgatgtcatcttagttactacaaattatagactaggaccttttggatggtttgcttatggcgacataaataaaaattcagacaatcaattagatcaaagtgcaaattttggaacactcgatatcatcaagtcacttgagtgggttaatgaaaatatttcagattttaatggtgatccaaataacataacaatctttggagaatcagcaggagcaagaaatgtaatttcacttatgacatcacctttaagtgaaaacttatttcaaagaggaatttctcaaagtggttatcttggctcagactcactagagtatgcagagaataatgatagagcggggtcaaaaagtttattgagacacttgattacatcaaagaatgcttcaatgtctgatgaggaaattttaaatattatggatgatcaaatgttatctatagatcttttaaaatctgcagatgcaaacgaaattatttcatattatagaccaagacctgatgccgctggtttaattgacgtccccaatgtaatacctgatggaatagtgattccaagcaaaggaatctatggagcttatcgagatggagatatgcatgacaagcctatgatatttggctcaacacgagatgaagataaattatttatgtttatgaatgatgaatttgtcaatcgaccattatccttcctaagtccaatctcagaatatcttgatttatacgtaaaaccaaaagatccaaaatattatgatatctacgctagatacatggctgaatcatggaaacatggagctgtagatttgccctctgattttacatctatttataaaaaatcaaatgtatacgcttatcgatttgattgggatgagcaaaatgtttatttaggtgttgatcttcccaatcttctgggtgccgcgcatgcgatggagttggcgttcatttttaaatcaggtggtctattaggtgaaagctctgatgccattaatgatataatgtataatgaaaacaatagggccaccgatttggatctttcaacaaaaataggacagtattgggtaaattttgctcacgatggagatccaaataatgtcccatatgatgtaccaactgagtggaaaccatggaataaaacaaataacaatgaaaggttcattgtatttgactcagttaacgacaagggaattgcaatgtttaataacactttatcagctaactctattctgcaaggaatatcaagtgagagcatagccgttgatcaaaagtgctatattattgatagaatgttcaatagaactactctaactgatgaagaagttgatgagatctatagaacttttatgagtggtaaatgcactagagcttaaa

SEQ ID NO: 259143 - DNA, 1578 bp, Unknown
  Bacterial polypeptide expressing nucleotide sequence isolated from the Sargasso Sea
tatgtttttagaccatataaaaaaattcatcataattatcctagcaagttatcttgcctcatgcagtattcccaagactgatctatcactcgatcaggcgactctattagaaattaaggaaggaaaaattattggatcaaataatgggaaaacatatcaatggttgggtattcaatatggatcaatacctgattcgagctatagatggaagagaggagctgaaacagaaaaatgggatggtgtttatgaggcgctggaatttggaaatacctgcgttcaaaaggggtcactaattaataccacaaaaagaagaaactggggtgacatcgtcggatctgaagactgtttatatctgaatgtttgggcacctagagatgtatttgatgacttatcgcagagtaagccggtgatggtctggatccatggtggcagcaatgtttccggtaatgcagatttttatgatccgagtgaattggttagtagtcaggatgtaatagttgtgtcgattaattaccgtttggggccatttggttggttcagacatccagatataacttcaaatgctgaggatccagatgatcaatcaggcaactatggcaatattgattccattcaagcgcttgaatgggttcaaagaaacattggatttttcggtggcgattcatcaaatatcacaatttttggtgaatctgctggcggttataacgtagcagctttattgtccgcaaagcaagcgaatggactttttcataaagcaatcattcaaagtggtggaatcagaccaggtgatattgagcattctgagtcatatgtagagaaaaacttaccttggaagagttactcttcaagagaactcgttaatgagttattggtaatgaatgaaatggcatccgatagaaactcagctgcatcattgcaagaaaatttatctcaaaaagaaatcgaagctctaatgagaaatgcctcaaccacagaaatttatgaagcatacttagtaacaaagactaataccgatgatatgttgagaccgtttcctgatggaaatgtattgagtgaacttggaattatgggctctttagagagtgggttcagttcgaatgttccaataatgattggaacaaatcgagatgaaatgaaattgtttctcctcaataatcctcgattgacaagagagtttctaagaatacctcgaataagagatttggacttatggaatgcggtttcaaaacacagaagcaattcgtggaaatacttggccgttgatgaacctgcccagagcttgacaagttccgggagatcaaacatctatgcttatcgattcgattgggatgatgagccaagaaaatatggagttgatctaaagaatttacttggtgcggcacatgcttttgagattccttttgtcatgggtaattttgatgaagatgcacttacgagatatatactcagtagaaaaaatcttgaggatgtcaaaacgctgtcccagtcaatgatgagttattgggctgaatttgctcacaacggagatccagataaaggcagagaaggaaatctaactgattggcaggcttgggatcc

SEQ ID NO: 259144 - DNA, 1135 bp, Unknown
  Bacterial polypeptide expressing nucleotide sequence isolated from the Sargasso Sea
cttggtaacaatgaactaccgattaggtccatttggattttttgcacatccgttattatctgaaacatcaaaaatgggtgtctcaggaaattatggaactttagatcaaatccaagccttaaaatgggtgcagaccaatatacatctatttgggggcgatccagataacgtaactattttcggtgaatccgccggaggagcaagcgttgaaaccttagtgtcaacaaaacttgcaaaagatctttttcataaagccatagctcaaagcggttacacagtaggaagagctagaaatatcagagagcaaaaaggtgatctaatttctgcagaatcgctcggggaaaagtttttttattcaatatctggaatagataatccttctgtagaagatattaaaaatctaccagcggatcttttttttgaaactgaaaaatttgaaaaggaaaacgatagtgaacaagctggatggtttcctatcgaggacaaatgggtttttgattcgccgacgcaaataagttttaccgaaggcaaaaccaatgatgttatttacgttgctggatttaatgcaaatgagggtaccaatttatctcctttcgtatttggtgaaaaacttaatgagaatgattggatcaaacaaacttgggagatgagtgacttctcttaccttcctttacctgatgatgtaaaagcatatggcgaaagtcttgaatattcgaaggaacgatctgccaatgaattgtggggcgatttagcatttggaggagatggttttttcatggttaatcagtttgcatccaatggcggagaagcttatttatattattttgaaaaaggcccgtcatcggatactcaaactcttgatgccgcgcacggcttagagttgttttatcttttcgataacatagtcccattttggccttggaaaaaaatagatgatgaaattagagataccatgcttaaggattggacggatattgcaaaatatgggaaaccacgaagtgattggcaaaaatttgatccgaataatcccaaggcaatgcattatgggcagagaattgaattcaaaactcccgaaaaactttctctttataagagtctagaaaaggtttatttagaagaaggaaaaaatttctag

SEQ ID NO: 259145 - DNA, 976 bp, Unknown
  Bacterial polypeptide expressing nucleotide sequence isolated from the Sargasso Sea
ctgctagttagtacactttatgcagaagagtcatacacttttaaaacaaatgaaactgaatttattggttcggtagcaaaagaaaagggagacaaaaagactatttcctttgtcggaattccctttgcaaagcctccagtaggtgacctgagatggaaagctcccagagaattagatagctatcctgatacatttaaagcaaccactctaccgaataggtgtatgcaagttagtaacttttatgattcaatggatggcattgagggtgagtcaatcataggttcagaagattgtttgtacttaaatatatatctttctgaaaaagcatataagagcaaaaagaagctgccagttgttttttggattcatggtggcggcaatacctggggatattcagcttcaaatatatttacatcaggtgattttattttagatcacgacgtaatattagtcacaacaaactacaggcttgggccttttggatggtttgcgtacagcgggttaaatcaagactcagaaaaccctttagatagtactgctaattttggaacattagatattataaaatcccttgaatgggtgaataaatatatttccttttttaatggtgatccagagaacataacaatttttggcgagtctgctggagctcgaaatgtgatttctcttatgtcttcaccattaagcaaagatttgtttcaaaggggtatttcgcaaagtggctatcttggatcagactcacttgaatactctgaaaacaatgaaagggctggttctttgagtttattaaaacaccttattaaatctgaaaatccaaatattgctgatgaagaactttctagttttatgggcaataaatttctgtccaaagaatttttaagatcagcaaatgcaaacgatataatttcttattatcgggtgagaaatgatactggtggattaatagacgttccaaatgtaatcccagacggtgttg

SEQ ID NO: 259146 - DNA, 1447 bp, Unknown
  Bacterial polypeptide expressing nucleotide sequence isolated from the Sargasso Sea
ttggctaattatgacgaagaaaatgagttattaatctttcgaggcattccttatgccgaacctcctgtgggcaatctcagatggaaatcgcccgttccaattgagttgaaatctcaaatcgatgcccgcttatttaaacccgcgtgcatgcaagacacctatatcactgattggtatcacgatgtgattgattctttcgatgaagacaaatcactgtttcagcatgtaggagaggtgagtgaggactgcttgtatctaaacatatggacgtcatcaattgataggaatcaaaaaaaaccggtgatggtttgggtgcacggaggtgcagatacgggcggatggtcatatgagccagactatctgggacacaatctggctaaaaaagatgtcattgtggtttccatcggatacagactcaatgtctttggtttcttcaaacatcctgaaatgattgatgaaactggaaactttggattggaagatgaaattctggcgctgaaatggattcgtgacaatatcgaagatttcggtggcgatcccacgaatatcacatactttggtgaatctgccggaggcgctcatgtttcctatctcaccgcatcaccagaggctaaagggcttttcaaaagaggcatcattcaaagcggtgggtacaacctattcaattggcgaagcgttgatgaggcgcatgaacttgcgattcgaactcaaaatatctcgggcacagttgacctcaatgatctcaaaagcttggatgagaacgcccttctgcaagcatcgagaaacctttatcatccatacagaccaatcattgatggaagagtcattaccgataatctagccaagaaatatatcgaaggaaatgtaaacgatgttgatctaatgattggcagcaataaaaacgaggatctactttatgtcgatgatgatccgactctagaaaagttctcagaggaaatagctgagtattatccagaccgagtcgatgaaattatcgccatgttggatatgtctgatctacgtctcgcaatggatcactttggctcaaatcaggaaacaacatgtccttctgttctgattgctcgatccatggcaaaaacagggaatcatgtgtatcaatacttctttactcgtgaaagagagggaagtgagaaaatacttgcttatcatggcgctgaaataccctacgtattcaatacgcatgatgcctatctgccgaccaatgaagatgatctcaagctgacagatcaaatgatggaatattggactcaatttgcaaagaaaggcacgccaaattctattgagaaccccattacttggtatgactttggtgaaaatgaaaactaccttattttagatactgaaattgaaaacggtcaacgtcttgagagcatgcttttgcacatcatgattgaagaattgactcaaagatctcaatctgaataga

SEQ ID NO: 259147 - DNA, 1822 bp, Unknown
  Bacterial polypeptide expressing nucleotide sequence isolated from the Sargasso Sea
ctgtatgcggaagtttcttacacctttaaagttaaaaatacagaatttattggttcagttgaaaaagaaaaagatggtaaaaagacaatctcgtttgtagggatcccttttgcaaagcctccagtaggcgatttaagatggaaggccccaagggaacttgatatatatcctgacacgtttgaagcaaccaccttaccaaacagatgcatgcaagtaagtaatttttatgatgagatggatggtattgaaggaggatcgattataggttcagaagattgtctgtatttaaatatttacctttctgaaaaagcttataacagcaaagaaaaactcccagttgttttttggatacatggtggaggcaatacatggggatattcagcctcaaatatattcacatcgggtgattttattttagatcacgatgtaatattggttactacaaactatagattaggaccctttggatggtttgcctatagtggactaaatcaagactcagataactcattagacaatacagctaattttgggacactagacattataaagtctcttgactgggttaatgagcatatttcacattttaatggagaccctgataacataactatttttggtgagtcagctggggctcgaaatgttatttctcttatgtcttcgcctttaagtaaggacttgtttcaaagaggtatttcacagagcggctacttagggtcagactcgctagaatattctgaaaataacgacagagcaggctctttgagcttgttaaagcatcttattaaatcaaaaaatccaaatgttttagatgaagagctatctaattttatgagcaataagatgatgtctacagattttttaagatcagcaagtgcaaaagatattatttcttattatcgcgttagaaacgatagtggaggattgatagatgtaccaaacgttattccagatggagtcgttattcctatgaaaggtatatacggagtatatcgtgatggtgaaatgcacgacaagccaatgatatttggatctacaagggatgaggataaactttttatgtttgcaaatgatgaatttgtagatagacctcttgcatttcttagacctgtctcagaatattttaatttatatgtaaagcccaaagatccgaaattttacgatgtatatgcaaggtacatggctgaatcatggaaatatggagccgttgatttgccttcagactttacgtctcttaacaaggagtcaaatgtatatgcatatagatttgactgggatgagcaaaatagagatttaggacttgatcaaataattggtattaatattccaggtattaatttaaacctggatcttccaagattattgggtgctgggcatgctatggaattagcttttgtatttaaatcaggcggattattaggtgagagttttgatgccattaatgatgttatgtatgatgaaaataatagagccacagatttagatttggcaacaaaaatgggcaagtattgggtcaatttcgcatatgatgggaatccaaactccttaccttataatgtagacacagaatggttgccctgggatgccaataatcaaaatgagagattcatggtttttgatacagtaaatgataaaggcattaaaatgtttaacaatactctatctgaagattctatactgcaaggaatagcaagcgaaaatatcactgttaatcagaaatgctacattatagataaaatgtttaacagaacaacgctcacaaatgaagaagttgatgaaatttacagaacatttatgagcggtaaatgtgctaaagcttaag

SEQ ID NO: 259148 - DNA, 1699 bp, Unknown
  Bacterial polypeptide expressing nucleotide sequence isolated from the Sargasso Sea
ttgtttgaacgtaatacagatagagattttcaagttgaaactaatgcagggacaatcatcggaattgatgagggagatcattattcttttaaaggcattccttatgctaaacctcctgttggagatttaagatggagagcaccaagagatttattaagaagcgatgaaccaatctatgcaattgactataaaagttcatgcgttcagcctggcgatggaagtttatctcttggatcaagtggaaaagtatatagtggtaatgaagattgtctttatctaaatgtgttcgttccacagaatgaaacgaaattcgaaaaaaataattttcctgtaatgttttggattcatggcggagcaaatatttttggcgctggaagtcaatatgatttttcagcattagcaacatcacaacaagtgataatagttacaatgaactatcgattaggaatattcggctggtttacctctaatcatttaagagacacatcagaaggcttggataaatcatctaattttggacaattggatattataaaagctctagaatgggtgaaatcaaatattaattatttcggtggagattcatccaatgtaacaatatttggtgaatcagctggaggtcacaatactttagccttattggcatcaccacttagtaagggtttgtttcatagagcaatttctcaatcaggttatgttgaatcttttcctataaaatttgctgaaaaagattcattgctgtcatcagaaaagctatttgaagaagatattaaatttttaattgattcagaagaaattgcagaaaagctaagagaagtttccgcagaagagatttttacaagaattgcaaaaattcgagaggaaaatatttgggctaaaatgcctttaacgactagagatggaatagtagtgcctaagaaaggtatctacagcggtctaagaaatgttgaccctgatatagtcgtagtagcaggcacaaataaagacgaactgaatctttattacatagactctgattatttctatgacactactcttgaattaggtaaatctttaaaaagaagtgaagagaaccttaaaagctggaataaatatcgaagtgaaatctggagattcaggggcgctgaagaacccctaagagctatgagtgagaataataataatctttattcatatcgttttgattgggatgagcaactaaacagcaatatattgggcaattaccaactttttgtaggtgctgcacatttcatggaaataccatttgtaagtggaaagtttgattatggacctattaattttgttctcaagccaattctttttccttctgaatcaacagaaggaagactagcattaagtgagcttatgatgaaatattgggcaaatatcgcaaaatatggagatcctaatgccttcactgatggccctaaatgggaaaaatttacaaaggaaaagcaacaatatttaactcttgataacccgatcaataataaattgagcatggtagaagaacctgtagatattaatcttcttcttacagaggttgaatctaattcatcgttagaaattgcagaaagatgtgtaataggatggatagcagctaatgacactaatgaattaaaacaggcacatagcttagatcaattacaagatccaccatacaattttgttcaaatttcgaaaatgaataccttttaaa

SEQ ID NO: 259149 - DNA, 892 bp, Unknown
  Bacterial polypeptide expressing nucleotide sequence isolated from the Sargasso Sea
attgctatttattagttcttgttctttattatttgaacgtaatacagatagagattttcaagttgaagcgaatgcagggacaataatcggtattgatgaaggagatcactattcttttaaaggtattccttatgctcaacctcctgttggagatttaagatggagagcaccaaaagatttaccaagaagcagtgaaccaatcttcgcagtagattataaaagttcatgtgtgcagcccggaggtggagattttaattttagctttactagagaggtatatagcggagatgaagattgcctttacctaaatatattcgttccacaaaatcagacagtttttgagaagaataattttcctgtaatgttctggattcatggtggagctaatatttatggtgctggaagtgattatgatttttctaaattagcaacttcacaacaagtcattatagtaacaatgaattatcgattagggctctttggttggtttacttctgaacatttaaaagataccacagaaggattagataagtcatctaattttggccaattagacattataaaagcattggagtgggtgcaatcaaatattgattatttcggtggtgattcatctaatgtgacaattttcggtgaatctgctggaggccataatattttaactctattagcttcaccacttggaaaaggtttatttcatagagcaatttctcagtctggttacatagaatcttactccttagaatttgctaagagaggttcaccattatcatctgagaaattatttgaagaagatattaaatctttaattaattcagaagacatagtacagaagttaagagagattcctgcaggagaaatttatgaaagagtaataaagatatcacaagaa

SEQ ID NO: 259150 - DNA, 856 bp, Unknown
  Bacterial polypeptide expressing nucleotide sequence isolated from the Sargasso Sea
tttttttctttcaagctggatgatcgcagctatagagttagataaacaattaaccattagggatgttgaatatcttgctaaatatcaaacagatagcaatactttcattttcagaggaataccttatgcagaacctcctattaataacctgagatggaagtccccaatccctgcaaagaaaaacttaaagattgatgcaagacaatttaaacctgcatgtatgcaagatagatacaatacgggttggtatcataatgtcataaaggcttttggaagcgatccatctctttttgagcacgtcaattcaatatcagaagattgcctctatctgaatatttggaccaaatcattagaaacttctgctagaaaacctgtaatggtatggatccatggtggaaatgataccgccggttggagttatgagcctgactatattggtcataatttgtctaataaagatgttgtagttgtatcaattggctataggttaaatatatttggtttttttaaacatccaaatatgagcaaacaaacaggtaattttggactagaagatcaaatcctttctttgcaatggttaaaggaaaacattaaatattttggaggcgatcctaataacataactatctttggagaatccgcaggaggtgctcatatttcataccatctagtctcgcctgcttcagaaggactatttgaaaaagctatcatacagagcggtggctataaccttattagctcttatagcttattagatattcaagaagcttataatttcgctaaagaggccacagatattactagtccaaacaattttgaaactttaagaaagatagaccctaataaattgttagat

SEQ ID NO: 259151 - DNA, 781 bp, Unknown
  Bacterial polypeptide expressing nucleotide sequence isolated from the Sargasso Sea
cgttaaggtgtgcaccgagtttagtgctgtctgcgctcaagaatcctttccagcagagatcgaaatgaagatcatggatgtccctggttctcaaagtgaagattgtctctatctgaatgtttggagcgaaagcgaaaccgataaaaagccggttatggtctggatacacggcgggggtttaggtttgggcgccgcgtcacagcccttatacgacggccaatatctggctcgcaaaggcgtcgtggtcgtcaccattaactatcggatgggagctctgggttttttgcatctaaatacggttaccgatggcgcgatccctgcgactggcaacgagggttttttggatcagatcgctgctttggagtgggtgcgggataacattgctgggtttgggggagatccgggaaacgtcacgatctttggagaatccgctggaggctggtcggtgaccgctttgatggccatgccacgggcaaaggggctgtttcacaaggcaatcgcccagagcggggtctctaatgctgctctatcgttaggtcacgctgcggatcttggtcgagaatttttaaacgatgttgcgaatgatccaactgacgccgaggctttgagggcgcttcctgccgacaaggtgttatctgcaggctcctcctttgtcagaagcatagcggctctaatgaccggacaaggagaggctaaccgttatcacagggcggtgatcgatggagatactctgcctgggtctgtgcttgatctgattgctgatggggcatcgagtgaggtc

SEQ ID NO: 259152 - DNA, 1231 bp, Unknown
  Bacterial polypeptide expressing nucleotide sequence isolated from the Sargasso Sea
atggctggaccgcaagtacagacgaaatacggaatcgtcgagggcgctagagagaatgaccagaatgttttcagaggcattccctttgcgaaacctccaataaatgaactgcgttggtgtgcccccgaagaaccagagtcttgggaaggcgttaaggtgtgcaccgagtttagtgctgtctgcgctcaagaatcctttccagcagagatcgaaatgaagatcatggatgtccctggttctcaaagtgaagattgtctctatctgaatgtttggagcgaaggcgataccgataaaaagccggttatggtctggatacacggcgggggtttaggtttgggcgccgcgtcacagcccttatacgacggccaatatctggcgcgcaaaggcgtcgtggtcgtcactatcaactatcggatgggtgctctgggttttttgcatctagacactgttactgatggcgcgatcccggcgactggtaatgagggttttctggatcagatcgctgctttggagtgggtgcgggataacattgctggatttgggggagacccgggaaacgtcactatttttggagaatccgctggaggttggtcggtgactgctttaatggccatgcctagggcaaagggattatttcataaggcaatcgctcagagtggagtctctaatgctgctttatcgctagatcatgccgcggatcttggccgagaatttttaaacgacgtcgcgaatgatccaactgacgccgaggctttgagggcgcttcctgccgacaaggtgttatctgcaggctcctcctttgtcaggagcatagcagctctaatgaccggacaaggagaggctaatcgttatcacagggcggtgatcgatggagatactctgcctgggtctgtgcttgatctgattgctgatggggcatcgagtgaggtcgtcctgatggccgggacaacacgtgatgagatggccgcggcagttgcgccgggtgcttctcaggaagaggtcgaagaagtagtcagcaagtccgcttatgggattgagacaaaggatatgatcgaactttatcggcagtccaggatgaaacgtttagccagagtaggggatgctgaggtggctagtgcgataattaccgatgcgactatgaggataccctgcataaggcttatcgaggctcaaagaaaatatcagccctcctatcactatattgtaacctggtcgactccggcgggcgatg

SEQ ID NO: 259153 - DNA, 1345 bp, Unknown
  Bacterial polypeptide expressing nucleotide sequence isolated from the Sargasso Sea
gatgatcgcagctatagagttagataaacaattaacgattagggatgttgaatatcttggtaaatatcaaacagatagcaatactttcattttcagaggaataccatatgcagaaccccctattaataacctgagatggaagtctccaatacctgcaaagaaaaacttaaagattgatgcaagacaatttaaacctgcatgcatgcaagatagatacaatacggattggtatcataatgtcataaaggcttttggaagcgatccatctctttttgagcacgtcaattcaatatcagaagattgtctctatctgaatatctggaccaaatcattagaaacttctgctagaaaacctgtaatggtatggatccatggtggaaatgataccgctggttggagttatgagcctgactacattggtcataatttgtccaataaagatgttgtagttgtatcaattggctataggttaaatatatttggtttttttaaacatccaaatatgagcaaacaaacaggtaattttggcctagaagatcaaattctttctttgcaatggttaaaggaaaacattaaatattttggaggcgatcctaataacataactatctttggagaatccgcaggaggtgctcatatttcataccatctagtttcgccagcttctgaagggctatttgaaaaagctattatacaaagcggtggttataaccttgttagcccatatagcttattagacattcaagaagcttataatttcgcaaaagaggccacagatattattagtccaaacaattttgaagctttaagaaacatagactcaaagagattattagatgtatctaaggccatgggttatccatttcatccaattatcgacgggaatttgatagaaaaacaaatcttaaatatttactcaagaggaaatttaaataaagttgatcttattattggaagtaataaaaatgaagaatacctttatatagacaaagagatgtctcttgaagacttgatcaaacaaattaaagaaagaaatcctgataaagccgataaaataatatctctactggatttatctgatatacctttagcatctgatagagttgggacaaaccaattgacagcttgtccttcaatttttattgcaagacaaatgactaaatctggcaacaaggtttatcaatatttatttagtaaacaaagaattaaaagtgaaaatattctctcttatcatggagctgagattccatatgttttcagtactcatgatgcatatctccctacaacaaataatgacctaaagcttactgacagcataatgaattattggacccaattttgctaa

SEQ ID NO: 259154 - DNA, 898 bp, Unknown
  Bacterial polypeptide expressing nucleotide sequence isolated from the Sargasso Sea
cgcgagcagggttggaggttgctgtattggcagcagaaactcagcgccgggcttgccgcggaatccatggccgacttcgtgcggcagcggcaacgctgggccaacggcaccctgcaaagcctgcggttaccccaggggccgctgcaggcccgtggcctcagcctgggccaacggctggcctacctggagggtgtggtccattggctgaacaacctgccgaggttggtgctgctgctgatgccgctgagctacggcctgcttggcatcacaccgatcctcctggaccagcgggccatcgtcgaattgatgctgccgctgtggggcacggtgctgctaagcatcggctggctgaatcgccacagccgctcagccctgctgacggaactaaccagttgggttctcaccgttccgctagtggtgaccctgatcagccacgtgctcggatcctccatgggcttccgggtcacccccaagcatcgccaccgttcccaaggcggctgggcctggtttctggcgctgcccctgatcctgctgagcctgctcaacctggcgaatctcttcgggctgatccaacagctgatcctccagggctgggacgaactcgggccgcttcagctggggctggtgtgggcggcgctgaacctgctggggaccgtggtggccctgcgcgcctgctgggatcctccccagagcgatccctccccctggctcagcctggatcacgccgccgagctgaccgatgccggggggcatcgccatccgtgccggatcactgccatcagtgagagcggtgtggagctggcttttgccacagccctgccacccttcgttgccagcagtcaattgcaatggacgcctaacgtgacgcctctaccggtcgtggtgctgaaggcccaac

SEQ ID NO: 259155 - DNA, 867 bp, Unknown
  Bacterial polypeptide expressing nucleotide sequence isolated from the Sargasso Sea
tatgccgccgcgcccatcggcgaacggcgatgggagcctccctgctgcggttgtcccatggcagggcgtgcgcagcaccgatacgttcggcgccgactgcatgcaggcggtgaacgagaacagcccggccgagcggccgcgctccgaagactgtcttttcctcaatgtctgggcgccggccaaatcggggcgccacccggtattcgtgtggatccatggtggcggatcgcgggtcgggtccggggcacaaccgacgttcgatggctccgccttcgcgcgcaaggggatcgtcgtggtgacgatcaactaccgcctcgggccgctgggcttcctgtccactccggaactgagcgcgcggagtggctacgatgcctcgggcaactacggcttcatggacgtgatcgctgcgctcgggtgggtccggcgcaacatcggccgcttcggcggcgagccgggccgggtcaccatcggcggggagtcctcgggttcggtggccaccagcgtcatgatggcttcgccgcttgcgaaggggctgttcgtgcaggcaatcggcgaaagcggctcatcgctgcgccgcgcggagcccgccagcatgggcgccacgaccctggcgttcgaggaaaagcgcggcaccgcgctgatgcaggacttgggggcgagcgatctcgccgcgctgcgccgggtacctgccgagcgcgtccttgccagcgccgcaaggctcgccaacggccagttctacaatctgccggtggtcgacgggcacctgctgcccgatgccccctggcgcatcttcgcctcgggaaaattcaacgacgtgccgctgctggcgggctggaacgcggacgaaggttcgctgacgctgcttgg

SEQ ID NO: 259156 - DNA, 954 bp, Unknown
  Bacterial polypeptide expressing nucleotide sequence isolated from the Sargasso Sea
ttaatgagtttagtgaaatccaaggccgaaagatttcagggattatttgaggatcattgtcatcaattttttggaatcccttatgcaaaatatgatcaaagatgggacgaatcgattcttattgaaaaagaattagactttaaagctttagaaaaaggaaattcagctcctcaaacaagatctgatgatcaaagccaaccaggaacaagtttttttcaagataactcattatcaaaacaatctgaagattgtctatctttaaatatttgtactcacgatatttcagcaaaaaatccagtaatgatttggatacatggcggagccctagtaactggtggctctagtagcattatgtatgatttaaagcatttagcaagaagaggggtagtcgccgtatccataaattatagattaggtccccttggatttctcaggcttgatgatgctacacagggtcaaatcaaatcatctggaaatgaaggtttaatagatcaaaggaatgcgataaggtgggtaaaagataacatttcttcttttggcggagatccaaataatattactatttttggtgagtctgcgggttcttggagttgcaatcttcaaattgcagcgagcgatgacggattatttcaaaaagctatttgtcaaagtggaggccttgatgccattgcaacaaaagaaaaagcaaatcaatgggctgagctatttattgaacagtttaaaagagatggccataaagtctctgatttaaaatcatgtgactgggagttgattactaatacagctaagaaattaaaacactcaaaattaagccatgggaagatatggatttttcctgaagtgggatttcttccagtcatagataacaaatttatcaaggatgattacatagaaacatattcatcttcaagtgttcatttaattgctgggacaactttggatgaatacaagctt

SEQ ID NO: 259157 - DNA, 622 bp, Unknown
  Bacterial polypeptide expressing nucleotide sequence isolated from the Sargasso Sea
atgagtttaatagaatgtaaggctggtcgatttgaagggctatttaaaaacgagtgctaccacttttacggcataccttatgcaacatatgaacatagatggagtgagtcaactcttattgaagatgaattaatttttaaagcttcagaaaaaggcaattctgcaccccaaactcgatctgatgatcaagctcagatgggaacaagcttttttcaagacaattctttatccaaacaatctgaagattgcttaactttaaatatctgctcaaatgatattaaagctaaaaatccagttatgatttggattcacggcggcgcattagttacaggcgggtcaagcagcataatgtatgacttgcagcacttagctaatagaggagtagtcgtggtatcaataaattatagattaggacctcttggatttttgaaacttgatgaagttacagatggtgagatcaaatcaacaggcaatgaaggacttatagatcagagaaatgcaatcaagtgggtaaaagaaaatatttcctcctttggaggtgatccaaataatattactatctttggcgagtctgcaggttcatggagctgtaatttacaaattgctgctggaaatgaaggct

SEQ ID NO: 259158 - DNA, 829 bp, Unknown
  Bacterial polypeptide expressing nucleotide sequence isolated from the Sargasso Sea
atgggaacaagcttttttcaggataattctttatcgaaacaatctgaagattgcttaactttaaatatttgctcaaatgatattaaagctaagaatccagtgatgatttggatacatggcggcgctctagttaccggaggctcaagcagcataatgtatgacttgcagcacttagctaatagagggatagtcgttgtgtcaataaattatagattaggaccactcggatttttaaaacttgatgaagttacgcatggtgagattaaatcaacaggcaatgaaggacttatagatcagagaaatgcaattaaatgggtgaaagaaaatatttcctcctttggaggtgatccaaataatatcactatctttggtgagtctgcaggttcgtggagctgtaatcttcaaattgctgcaggcaacgaaggcttatttcaaaaagcaatctgtcaaagcggtggtctcgatgcagtagcttcaaaagacaaggcaaatttgtgggctgaactttttattgaacagtttgaggaagatggccacaaagtttctgatttaaggtcatgccaatgggagttaataattgatacagctaagaaattaaaacactcagcattaagcgatgggaagagatggatttttcccgaagtaggctttcttcctgttgtagataataaatttattaaggatgattacttagcaacatattcatcttcaaacattcatttaattgctgggacaactcttgatgaatataagctctggagtgctttccatccaagaataggtaaaaatgatgaacgatatattactagaaggttatcaaaaatgttga

SEQ ID NO: 259159 - DNA, 526 bp, Unknown
  Bacterial polypeptide expressing nucleotide sequence isolated from the Sargasso Sea
ggtcgctcagtatttggctatgaatcaacaccctaatatgctggctttaattactattgcatcgactcctaagtttcaaatggctgacgcttggcctggtattaagcccgaagtattatcgatgtttacggaacagttatcacttaatcaccataaaacgctatcacgatttttagcgatccaaatgatgggtgtagaaaatgctaaggcgctgataaagcaaatttcagcatctattgattcattgcctacgcctcatcctagtgcacttgctgcggggctagaaatattacaacatgctgacttacgccaagatatagggcgaattgttgtacccactttacgactttatggtcgcctcgatagtcttgttccacattctgcaatcaatcaaattcaacatttgcagccaaacagccaaacgctcatttttaagcatgcttcacacgctccttttttaacggacgcgaaggttttcgctgagcacttgcgagggtttatctctgctatgctcttacacagctag

SEQ ID NO: 259160 - DNA, 947 bp, Unknown
  Bacterial polypeptide expressing nucleotide sequence isolated from the Sargasso Sea
aatgtatgacttgcagcacttagctaatagaggagtagtggttgtatcaataaattatagattaggaccccttggatttttaaaacttgatgaagttacagatggtgagatcaaatcaacaggcaatgaaggacttatagatcagagaaatgcaattaagtgggtaaaagagaatatttcttcctttggaggtgatccaaacaatattactatctttggcgagtctgcagggtcgtggagctgtaatttacaaattgctgcaggtaatgaaggcctatttcaaaaagcaatttgtcaaagcggtggtctcgatgcagtagcttcaaaagaaaaagcaaatcagtgggctgaattatttactgatcagtttaaaaaggatggcaataaactttctgacttaagatcttgtgattgggaattgataattaacacagctaaaaaattaaaacattcaaaattaagcgatggtaagagatggatctttcctgaagtgggctttcttccagttgtagataataaatttattaaggatgattacttggaaacatattcattttcaagtattcatttaattgctgggacaactctggatgaatataagctttggagtacattccatccaagaattggtaaaaatgatgaggaatatatcactagaaggctatcaaaaatgtttgaatctagtaaattatcagaaattatttctgcttatagagaatatctaaaaattaatgaattaggagaaatctattcagcgattctcacagatatttgttttggtataccaacacataatactcttcagaaaaaagaaggaaattcttttggatatttattctcaacacaaagtgaaattttaagggggaaactaggatgttttcatgcctcagaactaccatatgtatttggtggtcattccaaaaaaaccttattcaagttggggccca

SEQ ID NO: 259161 - DNA, 740 bp, Unknown
  Bacterial polypeptide expressing nucleotide sequence isolated from the Sargasso Sea
tttgcatacaaacggcgagcttgtcacccgtacaaagggtacaggcgtagatcttgtatttcttcatggatgggggatgaatagcggtgcgttcacatccttccttccctacttaagcgataactttcgcgtgactactattgatcttcccgggttcggagagaatgcgggtatcgttccttccccgtataacgcagattcgctggcgcaggctgtagtgaataaactaccagagcgatgcgtcgtggttggctggtctttaggcgggttggttgcgcagaagcttgccctattagcgcctgaaaaacttaccggtctcgtcaccatcgcctcaacgccgcgttttattgcagggccttgttggcctggtattgcagccgatttactctctatgtttgaagcgcagcttgagaaaaactatcaaaaaaccctagaacgcttcttggctatccaagcgatgggaagtgaaaccgctaagcaggatattaaagccattagggaacaggtaacccaattccctgctcctgcggaagaagcgcttaaaaaagggcttcgcatgttgtccaccgaagatatgcgacaagatgtggggcgcataactgtgccaacactgcgcctttacggaagattagacagcttagtgccgactagcggaattgacagaatatgtgagctgcatccgcaggctgatacggtggtgttgcctcatgcttctcatgcaccatttatttcccatcctc

SEQ ID NO: 259162 - DNA, 1075 bp, Unknown
  Bacterial polypeptide expressing nucleotide sequence isolated from the Sargasso Sea
tatgaatgaaaaaaaaataatccttggaattgagacaagttgcgatgaaacagcagtatcaatgatagaagaagataaaaacggtaagataaaaatattatctaatgtagtttcaagtcaatttgatattcataaagaatttggaggtgtggttcctgagcttgcagcacgatctcatgttgaaaaaattgatttaattgcaaaaaaagcaattagtgaaagcggtgtgaatttaaatgatgtttctgcaattgcttcaacatctggaccaggtttaattgtttgccttactgttggtttaaattttggcaaagcattatctgctagtctaaatgtaccttttattggtgtgaaccatcttgaagggcatgccttaagtccaaaacttagtacaagtttagatttcccatacttattattattaatttcaggaggtcacacacaatatcttagtgtgaatggacttggaaaatataaaagattaggaacaacaattgatgatgctttaggagaagcatttgacaaaactgcaaagcttttaggtattgaatttccaggaggaccaaagttagaaggttatgcaaaacagggagatgcaaataaatttaaacttccaaaaccaattataaataaagggggatgtaatttatcatttgcaggtcttaaaacggctattttaagaatatcaagcactttaaaatctaaacaagaaaaatatgatcttgcagcatcttttcaaaaaacaatagaagaaattttagaagtaaaaacacaaatagcatttgatgagttcaaaaagacttgtaaaaagaaaaataaaacttttgtaatcgctggaggtgttgctgctaataaaggtatcagaaaaaaattaataaaagtttgtaataaaaacgattttaaaccaattttccctgaaccaaaattatgtggggataatgcagctatgattgcacttgttggtcttgaaaagtataaaatcaaaaaatttgataatttaggtcttcctgcaagtccaagactaccacttgacgaaaaagcaaagtttttaaaaggagcgggagttagattataa

SEQ ID NO: 259163 - DNA, 1495 bp, Unknown
  Bacterial polypeptide expressing nucleotide sequence isolated from the Sargasso Sea
tatgagtatagtagagtgtgaggctggtcaatttcagggagtacttaaagacaactgccaccaattttttggaattcccttcgcaaaatataagcaaagatgggatgaatctttacttattgaaaaagaactaaatcttaaagtaacagaaataggaaattcagcccctcaaacaagatctgatgatcaaagtcaattaggaacaagtttttttcaggataattcattagcaaaacaatctgaggattgtttaactttaaatatttgttcaaatgatattaaagccagaaatccagtaatgatatggattcatggaggtgctttagtaactggtgggtccagtagtattatgtatgatttacaacacttagctaagagaggagttgttgttgtatcaataaattacaggttggggcctcttggttttcttaagcttgatgaagttacagctggtgaaattaactcaacaggtaatgaaggtttaatagatcagagaaatgcaattaagtgggtaaaacaaaatatttcctcatttggtggtgatccaaagaacattactatctttggtgagtctgcaggttcttggagttgcaatcttcaaattgcagcaggaaataataatctgttccaaaaagcaatttgccagagcggtggtcttgatgcaatagctacagaagaaaaagcaaatttatgggctgagctatttattgaacaatttgaaaatgatggtcataaaatttctgatttaagatcatgtgactgggagttgataattaatacagcaaagaaattaaaacactcagcattaagtgatggaaagaaatggattttccctgaagtaggctttctaccagttatagataataaatttattatggatgattacttagaaacatattcatcttcaagtactcatctaattgctggaacaactttagatgaatacaagctttggagtgctttccatccaaaaataggtaaaaatgatgaagggtatataactagaaggttatcaaaaatgtttgaatcaagtaaattaccagaattaatttctgcttatagtgaataccttaaaaatagtgagttaggagatatctattcagcgattcttacggatatttgttttggcatcccagtacataatactctccagaaaaaagagggaaattcttttggatacttgttctcaacacaaagcgaaatcttaaagggaaaattaggatgttttcatgcatcagaacttccatatgtatttggcgtccattcaaaaaaaccctattcaagctggggcccaatagaatctcaagaaatctctgataatttccaaataccatggacaaacttttctaaaacatctgatccaagttttggagatttctcatggaacaattataataattcgttcgaattagcacttattggtaataaagtaagagcattacggaacccttttttagaacgatatgaacttattgagaaatataaaatcttttag

SEQ ID NO: 259164 - DNA, 1267 bp, Unknown
  Bacterial polypeptide expressing nucleotide sequence isolated from the Sargasso Sea
atccaaacaatctgaagattgcttaactttgaatatttgctcaaatgatattaaagctaagaatccagttatgatttggattcacggtggcgcattagttacaggcgggtcaagtagcataatgtatgacttgcagcacttagctaatagaggagtagtcgtggtatcaataaattatagattaggacctcttggattcttaaaacttgatgaagttacagatggtgagatcaaatcaacaggcaatgaaggacttatagatcagagaaatgcaatcaagtgggtaaaagagaatatttcttcctttggaggtgatccagataatattactatctttggcgagtctgcaggttcatggagctgtaatttacaaattgctgcaggtaatgaaggcctatttcaaaaagcaatctgtcaaagcggtggtctcgatgcagtagcttcaaaagaaaaagcaaatcagtgggctgaactttttattgaacagtttgaagaagatggccataaagtttctgatttaaggtcgtgtgaatgggagttgataattgatacagccaaaaaattacaacattcaaaattaagcgatggtaagagatggatttttcctgaagtgggctttcttccagttgtagataataaatttattaaggatgattacttggaaacatattcatcttcaagtattcatttaattgctgggacaactctagatgaatataagctttggagtacattccatccaagaattggtaaaaatgatgaggaatatatcactagaaggctatcaaaaatgtttgaatctagtaaattatcagaaattatttctgcttatagagaatatctaaaaattaatgaattaggagaaatctattcagcgattctcacagatatttgttttggtataccaacacataatactcttcagaaaaaagaaggaaactcttttggatatttattctcaacgcaaagcgaaatcttaagaggaaaattaggttgctttcatgcctcagaactaccatatgtatttggtgttcattcaaaaaaaccttattcaagttggggtccaaaggaatctcaaaaaatctctgataattttcaaataccatggacaaacttttctaaaacaaatgatccaagttttggagatttctcatggagcaattataatgattcgttcgaattagcacttattggtaacaaagtaagggctttaagaaatccttttttagaacgttatgaacttattgagaaatataaaatcttttaa

SEQ ID NO: 259165 - DNA, 1237 bp, Unknown
  Bacterial polypeptide expressing nucleotide sequence isolated from the Sargasso Sea
tatgagtttagtagaatgcaaagctggtcaatttgagggagtacttcaagatgactgccaccaattttttgggattccttatgcaaaatatgagcaaagatgggatgaatcttttctgattgagaaagaactaaatctcaaagctatagaaataggaaactcagctcctcaaacaagatctgatgatcaaagccaatcaggaacaagtttttttcaggataattcattagcaaaacaatcagaggattgtttaactttaaatatttgttcaaataatattaaagccaaaaatccagtaatgatttggatacatggaggtgctttggtaaccggtggatctagcagcattatgtatgatttaaagtatttagctaggagaggagtggttgtagtatctataaactatagattgggaccacttgggtttcttaagcttgatgaagctacagatggtaagatcaactcatcaggtaatgaaggtctaattgatcagagaaatgcgattaagtgggtaaaagataatatttcatcctttggaggcgacccaaaaaatattactattttcggtgagtctgcgggttcttggagctgcaaccttcagattgccgcaggtgatgatggattatttcaaaaagcaatttgccagagtggaggtctagatgccatagcaacagaagataaggcaaattcatgggcgaaactatttattgagcagtttgaaaaagctggcaataaaatttctgatttaagatcatgtaaatgggaattgataataaactcagctaagaaattaaaacactcatcattaagtgatgggaagagatggatttttcctgaagtaggctttcttccggttatagataataaatttattaaggatgattacttggaaacatattcatcctcagatattcatttgattgctggaacaaccttggatgagtataagctttggagcacttttcatccaagaataggtagcaatgatgaaggatatatttctagaaggctatcaaaaatgtttgaatcgagtaaattatctgaactaatatctgcttatagcgattatctcaaaattaatgaattaggaaatatttattcggcaatcctaacagatatttgttttgggataccaacacataatattcttcaaaagaaatgcggaaattctttcggatatttatttacaacacaaagtgagattttgagagggaaattgggatgttttcatgcttcg

SEQ ID NO: 259166 - DNA, 711 bp, Unknown
  Bacterial polypeptide expressing nucleotide sequence isolated from the Sargasso Sea
attgagaaatataaaatcttttaaacttattatagttatattttgtggaactgttgtaggtgtccctgaagaaattactaatccgccaacttatgattattaccaagataaaggtgatagttttaactatattggaactaaaacctacaagggagattttattcaaactacatctgggaaggttctttctcagagagcagaagggattttgtattgggaggatatcccatttgcattacctcctttagggaacttaagatggaaggcaccagtagctttcgttgctgaagattttcacattaatccaaaagaaaataatttttgtcaccaagaaattgggggacaaattcaagaaataaatcaagctggctcggaggactgcctatatcttgatattagggcccctcatggaagtagagataatttgccagtaatgttttggatacatggaggaggtaatacttcagggcataaagatttttacaatttctcagaattggtaaaaaggaaagatgttatcgttgtttccccaaattatcgtttaggaccacttggcttttttactcatccagcaattcaagattaccattcaggcatagataagacctctaattttgggatcttagatctagtgcttgcactaaaatgggttaatgagaatatagcttcttttggaggcgatcctaataatattactatttttggtgagtc

SEQ ID NO: 259167 - DNA, 715 bp, Unknown
  Bacterial polypeptide expressing nucleotide sequence isolated from the Sargasso Sea
gttgcatggctggggtttaaaccatcaggtctggtcgcagcttgtgttggccttgccggcagagttaactattcatacgcctgatttacctggttttggtttatctccttgtccggtttcttatgatatcgatagcgtcttggcccaacttgctgaacaaatcccggatcaaagcactgtggttggatggtctttagggggcttactagccatagccttagccagccgttatccggataaagtgaaaaaactgggtttaattgccagttcgccctgctttatggcaaaagacaactggcctggcatggaaagccgggtgatgcagcaatttgcaggacagttgcagcgggatctggctttaactgtagagcgatttttagctattcaggccatgggcagcagcacagcgcggcaggatattaaaccattaaaacaagccgtattgagtttagctttgccatcagccacagcattacaaggtggactggagttattggcgacgttggatttgcggcaagagtttgccgctctaacgcagccggtttttagcattttagggcgtttggattccttagttcctgttgcaatagcccctttattacaaaatctactgcctgatttacagatagggatactgccaaaagcctcgcatgcaccttttatctctcatcaacaggagtttatttccctgttacagccacacctatccgcataa

SEQ ID NO: 259168 - DNA, 802 bp, Unknown
  Bacterial polypeptide expressing nucleotide sequence isolated from the Sargasso Sea
tttgcatacaaacggcgagcttgtcacccgtactcagggtacaggcgtagatgtggtatttcttcatggttggggtatgaacagcggagcgttcacatcctttatcccttatttaagcgataattttcgcgtcaccaccatagatcttcctgggtttggggaaaatgcagagttcgtcccgtcaccgtataacgtggaaacattggctcaatccattgtgaaccaacttccagaccagtgtgtgttggttgggtggtcattaggtggactagttgcgcaaaaattagcgctgttagcaccagaaaaacttaccggactggtaacgattgcttcaacacctcgatttatagcagggccttgttggccgggtattgctgccgatttactttcaatgttcgagactcagcttgaaaagaactatcagaaaacactggaacgttttttggcaattcaagcgatgggcagcgaaacggcaaagcaggatattaaggcgatcagagaacaggtaacccaattcccagatcccgccgaggaagcgcttaagaaaggtttacgcatattgtctactgaagacatgcgtcaagacgtggggcgaataactacacccacgttacgattgtatggcaggttggatagtctagtgccgaccagcggaatagatcgtatatgtgagctacatccgcaggctgataccgttgttctgcctcatgcgtcgcatgcgccgtttatttcacatcctcagcaaactgctgacattttatttcgctttgccgctggcgtttaccagcaaaaggcgtcttaa

SEQ ID NO: 259169 - DNA, 763 bp, Unknown
  Bacterial polypeptide expressing nucleotide sequence isolated from the Sargasso Sea
actgcatatcgaaaccattggccaagggccagatctagtgatgatccacggttggggggttaattgcgccgtgtttacgccgctgcatgagcaactgtctgagtatagagtgcactatgtcgatctgccgggttttggcttaagccaaccgatagcgggcgatttatctgcttgggtcgatgcgttaatcagtagcttacccgccaatgcaatttgggctggctggtcgctgggcggtttagtggcaactcaagctgccattcgctatccattgcagattaaaggattagtcactatcgcctcttccccctgttttatggcaagggaagaagaagcatggcccggtatcccgccacaagtactcagtatgtttggcgaacagcttgggcaaaatttaccaaaaaccattgagcgcttcttagcaattcaggccatgggcagtgaaactgccaaagacgatatcaaacagctacgggatttagtcttagctcgcccacttcccgatgctgcggcattaactcaaggccttgatatgctgaaccaaatcgatcttagaccgcagttatcggcgatacagcaaccttggctgcggatctggggcaggctcgatggactcgtgcccaaacgcgtgcaacctcaaatgcccaccgcaagccatatcacagatgtgatgctcgccaaggcatcccacgcaccgtttgtgtcccacaggaaagaattcttgcaagcaatcacaccttggctggcgcaattcaaggactag

SEQ ID NO: 259170 - DNA, 763 bp, Unknown
  Bacterial polypeptide expressing nucleotide sequence isolated from the Sargasso Sea
ctgcatatcgacatccgaggccaagggccggatctggtgatactccacggttggggcgttaatagcgccgtcttcacgccgctccatgagcagctttctgagtatagagtccactatgtcgatctgcccggctttggcttaagtcaaccaatcgcaggcaatttatcgacttgggtggatgccttaatccatgccttgcccgccaatgcgatttgggccggctggtcactgggtggcttagtggccacccaagccgccataagctatccctcccatgtcaaaggcttaatgactatcgcgtcctcgccctgttttatggcgagggaggaagaagcatggcctggcattccaccgcaggtgctcagcatgtttggcgagcagcttggacaaaatttaccaaagacgattgagcgctttttagcgattcaggcgatgggcagcgaaaccgctaaagacgatatcaagcagctgcgggatttagtgctagcgcgcccgctacctgatgcagccgccttaacgcaaggtcttgatatgttgaatcaaatcgatcttaggccgcaattatcggcgatacagcaaccttggctgcggatttggggtcgactcgatggactcgtgcccaaacgcgttcaacctaagatgcccacagcaagtcacatcacagatgtgatgctcgccaaggcatcccatgcaccgtttgtgtcccacagggaagaattcgtgcaggcaattacaccttggctggcgcaattcaaggactaac

SEQ ID NO: 259171 - DNA, 757 bp, Unknown
  Bacterial polypeptide expressing nucleotide sequence isolated from the Sargasso Sea
ttgagaaatataaaaccttttaaactttttattgtattattttgtggatctgttttaggtatccctgaagaaataactaatccgcctacttatgattattaccaagataaaggtgatagttttaactatattggagctaaaaccttcaagggagattttattcagacttcatctgggaaggtgctctctcaaagaacagaaggaattctgtattgggaggatattccatttgcacttcctcctttaggaaatctaagatggaaggcaccagtagcttttgttgctaaagattttcatattaatccgaaagaaaacaatttttgccatcaagaagttggtggtcaaattcaagaaataaatcaagctggcacggaggattgcttatatcttgatattagagcacctcatggagatagagataatttgccagttatgttttggatacatggaggtggtaatacttcaggacataaagatttttataatttctcagaattggtaaaaaagaaagacgttatcgttgtttctccaaattatcgtttaggacctcttggcttttttactcatccagcaattcaagactaccattcaggtatagataagacttctaattttgggatcttagatttagtgcttgcactaaaatgggtaaatgagaacatagcttcttttggcggtgatcctaataatattactatttttggtgagtctgctggtgggcataatgttttatcgctcttagtactcagcaagctaa

SEQ ID NO: 259172 - DNA, 796 bp, Unknown
  Bacterial polypeptide expressing nucleotide sequence isolated from the Sargasso Sea
aatgaactatgactatctaagagagaatggtgatgattttttcagccaaggagtagttacttataaaggtgattttattcaaacttcatctggtaaggttattactcaaagaaaagaagggattctttattgggaggatataccttttgcattacctccagtaggaaatctaagatggaaagcaccaattgcatttgtttctgaagattttaatatcaatccaaagaaaaataacttttgtcaccaagagattggtgggcaaattcaagcaatcaatcaaactgggtcagaggattgtttatatcttgatataagaggacctcacggaagaagagataatttgccagtgatgttttggatacacggtggaggcaatacttcaggacataaagacttttacaatttctcagaattggtaaaaagaaaagatattattgttgtttctccaaattatcgattaggaccacttggcttttttacacatccagcaattcaagacttcaattcagggacggatcagacctctaattttggtatcttagacatagtgcttgcactaaaatgggttaatgagaacatagcttcttttggaggtgatcccaataatattactatttttggtgagtctgctggtgggcataatgttttatcgcttttagttgctcagcaagctaaaggtttgttccataaagcaatctcccaatcaggctatacaaaatcatcatcactgcaaaatgcttacaggtccgaaaattttaatcaagagggcatatctgatagttggacagtgctaaat

SEQ ID NO: 259173 - DNA, 631 bp, Unknown
  Bacterial polypeptide expressing nucleotide sequence isolated from the Sargasso Sea
catgggtactaaaacttataagggagattttattcaaacttcatctgggaaggttctttcccaaagaacagaagggattttatattgggaggatattccatttgcattacctcctttaggaaatttaagatggaaggcgccagtagcttttgttgctgaagattttcatatcaatccaagagaaaataatttttgtcatcaagaaattggtgggcaaatccaagcaatcaatcaaactggctcagaagattgcttatatcttgatatcagagctcctcacggaaatagagacaatttaccagtaatgttttggatacacggaggaggtaatacttcaggacataaagacttttataatttttcagaattggtaaaaagaaaagatgtcattgttgtttcttcaaattatcgcttaggaccacttggtttttttacccatcctgcaattcaagactttcactcagacttaaataagacttcaaattttggaattttagatattgtgcttgcactaaaatgggttaatgaaaatatagcttcttttggaggtgatcccaagaatataactatttttggtgaatctgctggcgggcataatgttctatcgctattagttcaaagcaagcaaaag

SEQ ID NO: 259174 - DNA, 569 bp, Unknown
  Bacterial polypeptide expressing nucleotide sequence isolated from the Sargasso Sea
tttttgcatctagatacggtgacgaacggcgcgataccggcgactggaaacgagggttttctagaccaggtcgcggctttggaatgggttcgggacaacattgccgggtttggcggagacccagacaatgtcactatctttggagagtccgctggaggttggtcggtcaccgctttgatggctatgccaaaggcaaaggggttgtttcacaaggcgatcgctcagagcggggtctctaatgcggctttaaccctagatcatgctgcggatcttggtcgagaattcttaaacgaggtcgcgaatgatccaactgacgctgaggctttgagggcgattcctgccgacaaggtgttatctgctggctcttcctttgtcaggagcatagcagctctactgacagggcaaggagaggccaaccgttatcacagggcggtgatcgatggaaaggtgttaccgggctctgtgcttgatctgattggcgatggatcctcgagcgaggttttgcttatggcgggaacaacgcgcgatgagatggccgcggcagtcgcgccgggtgcttcttcagaaga

SEQ ID NO: 259175 - DNA, 889 bp, Unknown
  Bacterial polypeptide expressing nucleotide sequence isolated from the Sargasso Sea
ccaaaacaaaataatttttgtcatcaagaaattggtgggcaaattcaagaaatcaatcaatctggctcagaagactgcttatatcttgatattagggcacctcatggaaatagagataatttgccagtaatgttttggatacatggaggaggtaatacttcaggacataaagacttttacaatttctcagaattggtaaaaagaaaggatgttatcgttgtttctccaaattatcgtttaggacctcttggtttttttactcatccggctattcaagacttccattcagatatagataagacctctaattttgggatattagatatagtacttgcactaaaatgggttaatgagaatatagcctcttttggaggtgaccccaataacataactatttttggtgagtctgctggcgggcataatgttttatcacttttagtatctaagcaagctaaaggtctatttcataaagcaatatcccaatcaggttatacaaaatcatcatcactacaaaatgcttacaaatctaaaaattttaatgaagagggcatatctgatagctggacggtgctaaacaaaataattgttgataaacagttagcaaatgatctaaatgaagcaaatacatttcaattaaactctgataaagagactcttagaacaattctctacgaaactaatgctcaagagttggtgaacctatatggcgacacctttgaaacacctttgcttaccaatgatggtttggtaattcctgaaattggccttaaagaatctcttcgctctaaagaatatctaaataaggttccaacaattgctggatctaataaagatgaaataaagctttggcttggattttcaaaggtatttcatagaaaccaatcagagc

SEQ ID NO: 259176 - DNA, 226 bp, Unknown
  Bacterial polypeptide expressing nucleotide sequence isolated from the Sargasso Sea
gtggttctgcccggctttggcaaccgtccgctggcgggcggaatagagtacagtctgccctggctggctgaacaggttgaaaccttcctgccggagcagtgccatttgctggggtggtccctcggtggtctggtggcaagccagttggccttgagccttcccgagcgactgcactctctcatcacggtggccagctccccctgtttcatggcccgcggcgactggc

SEQ ID NO: 259177 - DNA, 559 bp, Unknown
  Bacterial polypeptide expressing nucleotide sequence isolated from the Sargasso Sea
aatgaacgaaaccattaaatctgattctccaatcgcaaatacaaaatatggcgaggtcgctggacgcttcaggaacggtgtggagttgttcgctggagttccttatgcatcgcctcccatcggagatttaagatttgccgcccctgcacctctagaaagttgggaaggtgttagggatgcgaaacgtttcagccccgcttcgcctcaactccccggcgaagggttgactgaccgatttcccgtactttgggacgaagactgtttgtatctaaacgttgtcactcccgcgtcagatgaaaaaaaacgccccgtctacgtttggatacatggcggagcttacaggagaggtcaaggtggagttgcgtggtatgacgggacttctttcgcctcgcgtggtgatgtggttgttgtaacaatcaactaccgcttaggagcttttggtttcacagaactaggaaaacactttggagaaaaattcgcttcttcaggcttaaacggttttctcgatcaaatagctgctcttcaatgggttaaagaaaatattgcctcctttggagga

SEQ ID NO: 259178 - DNA, 1741 bp, Unknown
  Bacterial polypeptide expressing nucleotide sequence isolated from the Sargasso Sea
tctgggtactaaaacttacaaaggagattttattcaaactacatctgggaaggttctctcccaaagaacagaagggattctatattgggaggatattccatttgctttacctcctttaggaaatttgagatggaaggcacctgtagcctttgtaagcgaagattttcatattaatccaaaagaaaataatttttgccatcaagaacttggtggacaaattcaagaaattaataaagctggctcggaggactgcttatatcttgatattagagcacctcatggaaagagagataatttaccagtaatgttttggatacatggaggaggaaacacttcaggacataaagacttttataatttctcagaattagttaaaagaaaaaatgtaattgttgtttctacaaattatcgtttaggaccgcttggcttttttactcatcctgcaattcaagacttccattcaggtacagataaaacctctaattttggaatcttagatatcgtccttgcacttaaatgggttaatgagaatatagcttcttttggaggagatccaaacaatattactattttcggtgagtctgctggtgggcataatgttttatcacttttagttgctcagcaagccaaaggattattccataaagcaatttcccaatcaggctatacaaaatcttcatcacttcaaaatgcttacaagtctgaaaattttaatgaggagggcatatctgatagttggacagtgctaaataagataattgtggataaaaagttagcaagtgatctaagtgaagcaaatacgtttcaattaaaatctaataaagaggtgcttagaaagattctttacgaaacaaatgcacaagagttggtaaatctatatggcgatacttttgagactcctttgcttactaatgatggtttagtaattcctgaaattggtcttaaagaatcccttcgctctgaagaatatttaaataaagttccaactattgccggatcgaataaggatgaaataaagctgtggctcggattttcaaaatatttcatagaaactaatcaatcttttctttctaaaggtatcggtatacctagagttgaaattaaggatgaagaaaaatatcaattttacaatggaattagatcaaaaggatggcaactaagaggagttcaagagccgctcgaaaatatgttcgttgcaggaaatgaagacctatatgcctacagatatgattgggataatctaagagatttctttgttggcgattttggaaagatcattggatctgctcatgcattagaaataccaatgataagtggagatttcagccttgccgaagaatttgcttggattatatatcctcgatctccttctaggcgttttgtttctaagaatatgatgagcttttggactgatttcgctaaaaatggtgtgcctggaaaatcctcaaacgatattatttggaataaatataatcctgaaacagataagagcattcttcatattgatgaaaagaaaaatctcagaatagataatcttgatttaagcatgcaagaattagtaaatgaaatattatcttcccaaataattgataatgaagaaaaatgcatacttttatatgaaactacaaactatattggtgataattcttttgacgattttgtgaaagatgtggattttaattgctcaagagatgaggcacttagaatttcaaagaaaaattcagaaactattgatttttaa

SEQ ID NO: 259179 - DNA, 1462 bp, Unknown
  Bacterial polypeptide expressing nucleotide sequence isolated from the Sargasso Sea
aatgaagagtgctctgaggaaaaccagactgggcatggtacggggtagcgaacgcgagggcgttgagcgttatcttgggctaccctacgcggcgccccccatcggtcatctgcggtggcgtgaaccgcaaccggcagaaccctggcgcggcacgttcgatgcctcgcaatttcccaatcgctgcttgcaagcgtctgcgccggatgtgctccacgatcgtgcaacaccgggtgagatgtcggaagactgcctgtatcttaacatctacacccccgccggagagggcgctggtcggcctgtgatgttctggattcatggcggtgcctttatcctcggaagcgccaacagttatgacggcactatgcttgcccgcgatcacgatgtggtggtggtcgctctgaattatcgtcttggaatttttggttttcagaacatcgctggccttgccgaggtctatcaaggcagcggtaaccggggtctgcaggatcaggtcgcggcattacgttgggtacatgacaacattgcagattatggcggcgataccaacaatgtcacgattttcggtgagagcgctggcggcacgtcagtgctgacaatgcacgctatccccagtgcccggggtctctttcatcgctcgatttgtttcagcggtactgacgtgaacgttggccctatagatggcatagcgccattgcatgaacattttgaactggaaggtgacgatttactagctgctgcacttgctgccagtcctaatgagcttcttgagatccagcagaagattggtggtcccgcttcgccacaagtagatggtgttgtggttacggagacggcgacacaagcgctgctggcctgcggtgctgtcggcccaccgttgattgctgggtgtaataaagatgaagggaccatgttctcgtcatataacgaagaggcgggtattgatgctgccatggtggagagcatgttgcccatgttctcggcccgggtgaacgcggatcacccagccgattacgaaacctgggtgaaaacggcgttgtcggatgtggctgttggtaaacagatggaacgatggtggtatgatgtttttcgcgccgctgccctgcgcaacgctgcggctgcccaccgggccggggccggaggctgggtattcaatttcaatgtaccgaccgacaatcctctcggcgtcgcccatggcagtgaaattgtctttacttttaacacctttgctgatgatcgagcaacgggtcttttcacccatgacaagtcggtaaccaatgaggaattagcgcgactgtggtcttccatgatggtgcagtttgcccgctctggaaatcctaatggtcccgacctacccgaatggccgcaatacggcgatgatgcagcgtgcctcattttcgatgatgctcctcatgtggttcacgacccggacggagctgaagtgcgtgctgcctacggtgtctga

SEQ ID NO: 259180 - DNA, 1346 bp, Unknown
  Bacterial polypeptide expressing nucleotide sequence isolated from the Sargasso Sea
gctgaaagatttcaacatcaatccaaaagaaaataatttttgtcatcaagaaattgtgggccaaatccaagaaatcagtgaagctggatcggaggactgcctatatcttgatattagagcaccacatggaaatagagataatttaccagtaatgttttggatacatggaggaggaaatacttcaggacataaagatttttataatttctcagaattggtaaaaagaaaagatgttattgttgtttctccaaattatcgtctaggaccacttggcttttttactcacccggctattcaagactttcattcaggtatagataagacctcaaactttgggatcctagacatagtacttgcactaaaatgggttaatgaaaatatagcttcttttggaggtgaccccaataatattactatttttggcgagtctgccggtgggcataatgttttatcgcttttagttgctaggcaagctaaaggcttattccataaagcaatctcccaatcaggctacacaaaatcctcatcactacaaaatgcttacaagtctgaaaatttcaatgaggagggcatatctgatagttggacagtgctaaacaaaataattttggataaacagttagcaagtgacctaagtgaagcaaattcatttcaattaaactccaataaagaggcgcttagagaaattctttatgaaacaaatgctcaagagttggtaaatctatatggcgatacttttgagactcctttgcttactaatgatggtttagtaattcctgaaatcggtcttaaagaatcccttcgctctaaagaatatttaaataaagttccgactattgctggatcaaataaagatgagataaagctgtggcttggattttcaaaatatttcatagaaactaatcaatcctttctttctaagggtatcggtataccaagagttgaaattaaagatgaagaaaaatatcaattctacaatggaattagatcaaaaggatggcaactaagaggagttcaagagccgcttgaaaatatgttcgttgcaggaaacgaagatctgtatgcctatagatatgattgggataatttaagagatttctttgttggcgattttggaaagattattgggtctgctcatgcattagaaataccaatgataagtggagatttcagccttgccgaagaatttgcttggattatctatcctcgatctccctctcggcgttttgtttctaagaatatgatgaatttttggtctgagtttgctaaaaatggtgtgcctgggaaatcctcaaacgatattatttgggaaaaatataatcctaagacagataaaagcattcttc

SEQ ID NO: 259181 - DNA, 748 bp, Unknown
  Bacterial polypeptide expressing nucleotide sequence isolated from the Sargasso Sea
gatgtctgacaaaccgacactggttttattgcatggctggggcatgaaccaaggcgtttggcgctctgttaccagccagtttgaacataaagtttcgctgctgactcctgacttaccgggttttggtttaagtcagcagtaccctataccttatcagctgaatgccgtgattgagctattggctgagcagatccctgatgacagctatttgtgtggctggtcacttggcggcttgctggcaataagtctggcgaagcgtttcccacacaaagtgaagcagttggggttggtggctgcttcgccgtgttttgttgctgacgcacactggccgggtatggcagagcatgtactgcagcagtttgcacaggcactgagcaataatctaacgcaaacgatagagcgctttttggcgattcaggctatgggtagtagtaacgcccgcgaggacatcaaagcgctgcggcaggcaataatggcttatcccgctgcgcagcctgaagcagtcgtcggagccttacagttattgaagctggatttgcgggccgagttcgctgcgttgacacaaccgatatctggtatattcggtcggctggatgcgttggtgctggctgatgtggttgacgcgttgcagctacttaaccgcaatgcgcagctttcagtgattgaacatgcctctcacgccccttttatctcccacccagaagcgtttaatcattggctaagtgattgggtaggcgtcaaattgtaa

SEQ ID NO: 259182 - DNA, 742 bp, Unknown
  Bacterial polypeptide expressing nucleotide sequence isolated from the Sargasso Sea
atgcaaaaagagttagtacttttacatggttggggaatgaatcaaggcgtttggcaacttatacagccagagcttgaaaacttatatacaggacaagtacgtagccttgatttacctgggtttggtaatagcgcaaccacattaccaaccccgtataatttgcatgatgccgctatgcaattaagccaacagttaaaacctcattctattttaatggggtggtctttaggtggtttgtttgctctatacattgcaaagcattggcctgaaaaagtatcgaaggttattttagtcgcatcgacaccttattttgcagagcagagtgaatggccgggaattagtgaaaaagtactaactcagtttaaagaccaattggttaatcatagagaaaaaaccattgaacgctttttggctattcaggctatgggaagtgagtcagcgagagatgacataaagcagcttaaacaattgctaaatcaatattcagcacccaatagtgaggcgttaaccgccggtttagatattttacaaaatgatgatttacgcgatttatttgcaacgtgtccggtaaaaattatgggtgtatttggtcgcttagatgcattagtgccgtataaagcaatagctaaaatgtcagtactaaatgctgagtttgaataccaagtaatagataaagcatctcatgctccgtttatttctcacaaaaatgagtttttatctatcgttaaatcaatgctttaaa

SEQ ID NO: 259183 - DNA, 766 bp, Unknown
  Bacterial polypeptide expressing nucleotide sequence isolated from the Sargasso Sea
atgagcgtgtcggttgagcggtttggtcaggggcccgatctggtgttgttgcacggatggggaatgaatggcgcggtctggcatggcattgtgccggccctggcgtctcgctatcgcgtccatctggtggatctgcccggctttggcaacagtccgctggcgggcggaatagagtacagtctgccctggctggctgaacaggttgaaaccatcctgccggagcagtgccatttgctggggtggtccctcggtggtctggtggcaagccagttggccttgagccatcccgagcgactgcactctctcatcacggtggccagctccccctgtttcatggcccgcggcgactggccggggatcgcccccaaggtactgaccggtttcaaccagatgctggcgggggacttcaagcagaccatcgaacgcttcctggcgatccaggccatgggtagcgaacacgccagggatgacatccgtcagttgcgccactggctggcggagcggccggctccccagctggccgcgctggaggccggactcggtttgctggccgaggttgatctgcgcgatgaactgatatcattgagcctgccttggctgcgggtctacggtaggctggattcgctggtgcccaaggcgtccatccctctactggacgagcgttacccaggcagccgcagtgttgtgctagaaaaggcctcacatgcaccctttatttcccatccacaacagttcattgaaatcattgaacattttgtaggttgaa

SEQ ID NO: 259184 - DNA, 562 bp, Unknown
  Bacterial polypeptide expressing nucleotide sequence isolated from the Sargasso Sea
atgcttttatttgtaggattgggtaatccaacaccagacagcgaaaataatcgacataatgttggttttaaaattattgacgcaataaacaaaaaatttagtttatcaaaacaaaaaccaaaatttaaaggcctattaaccactggcaatatagggaatgtaaaagtttatgccatcaaacctttgacatttatgaataattcaggaatttgtattagagagcttattgaatattttaaaattgatgctcaagacgtaatagtttttcatgatgatctagatgtggaatttggaaaaatcaaagctaaatttggaggatcaagcgcaggacacaatggaattgcctcgattgataagtttatcggcaaagattattctagagttagaataggtattggtaaacccaaaggaaacatcgaagttgcagattatgttttacaaaattttgacgaggatgagtcattaggtattgaaaaaatatcaaaccatataaatgactcaatttcttttcttgttgaaaaaaaattagatctattttctagtacagtaaataataaataat

SEQ ID NO: 259185 - DNA, 151 bp, Unknown
  Bacterial polypeptide expressing nucleotide sequence isolated from the Sargasso Sea
atgcttttacttgtagggttaggaaatcctggatccaattatactaatactagacacaatattggttttaaaatcatagacgcaataaataatcattttaaactatcaaaacaaaaaccaaaatttaaaggtttgctcacaaccaggtaac

SEQ ID NO: 259186 - DNA, 182 bp, Unknown
  Bacterial polypeptide expressing nucleotide sequence isolated from the Sargasso Sea
tatgcttttatttgtaggtctaggaaatccaacgcctgatagcgaaaataatagacacaatattggtttcaaaattattgatgctataaataaaaaatttagcctatcaaaacaaaaaccaaaatttaaaggattacttacaactggtaatattaatagtaaaaaagtttatgctattaaac

SEQ ID NO: 259187 - DNA, 450 bp, Unknown
  Bacterial polypeptide expressing nucleotide sequence isolated from the Sargasso Sea
tatgattttgcttgtagggttaggcaacccaactccagacagtaatgataataggcataacgttggattcaaaataatagatgctataaaccaaaaatttagtctttcaaaacaaaaaccaaaattcaaaggtttgcttactactggcaatatctcaaacaaaaaagtttatgcaattaaaccattaacatttatgaataactcaggaatttgcataagagaattaatcgaatactttaaaatagatgccgaagatgtgattgtttttcacgatgatttggatgtagattttaaaaagattaaagcaaaattcggtgggtcaagtgcaggacacaatggaattgaatcaattgataaatttataggcaaggaatactcaagagttagggttgggattggaaaaccagaaaataaaattgaagtttctgattttgttttaacaaatttctc

SEQ ID NO: 259188 - DNA, 193 bp, Unknown
  Bacterial polypeptide expressing nucleotide sequence isolated from the Sargasso Sea
atgatcttattcgtaggtctaggcaatccaacacctgatagtcaaaataatagacataatattggctttaaaattattgatgcaattaaccaaaatttgggcctatccaaacagaagccaaaatttaaaggtttattaacaacaggaaatataggtgaaagaaaaggtttacgctataaaacctcttacgttt

SEQ ID NO: 259189 - DNA, 562 bp, Unknown
  Bacterial polypeptide expressing nucleotide sequence isolated from the Sargasso Sea
tatgttgttacttgttggtttaggaaacccgactccaaatagtcaagataatagacataatgttggtttcaaggttgtagacgcaataaatcaaaaatttggattatcaaaacaaaaaccaaaatttaaaggattattaactacaggaaatattggagagaaaaaaatttatgcaataaagcctcttacattcatgaataattctggaatttgtattagggaattattagaatattttaaaattgatgcagaagatgtaattgtattccacgacgacttagatattgaatttggaaaaataaaagcaaaatttggtggatcagatgcaggacataatggaattgcatcaatagataaatttataggtaaagagtactctagggttagaattggaataggaaaaccagataattcaatatcaacttcagattatgttttaaacgattttaatgaagatgaaaaagaatatttaaaaacaatcacagataacattattgagtcaatttctatattgattgataaaaaattagacttattctctagcactgttaataacaattaa

SEQ ID NO: 259190 - DNA, 277 bp, Unknown
  Bacterial polypeptide expressing nucleotide sequence isolated from the Sargasso Sea
atgaaagaaatatttttaattggattaggaaatcctggaaaaaaatactcaaagagtagacataacattggttttttactgcttgaacaactctcgaaaaaatataattcaaattttttactaaaagataagcttaaaagttcctgctcagaatttcaaatcaatgattctactttcagattattcttaccaaatacgtttatgaataacagtggtgatgctgtccgcgcaattgttgattggtacaagataaatttagatcagattttcataatag

SEQ ID NO: 259191 - DNA, 132 bp, Unknown
  Bacterial polypeptide expressing nucleotide sequence isolated from the Sargasso Sea
tatggaaaactttttagtggttgggttaggaaatcctggctcaaggtatgctaatacaagacataatgctggaactgatttcgttcatatgctttgtgaaaagtatgatgttgagttaacagaaaagaaaaa

SEQ ID NO: 259192 - DNA, 562 bp, Unknown
  Bacterial polypeptide expressing nucleotide sequence isolated from the Sargasso Sea
atgctacttttagttggtctgggaaatcctaatccaaataattcaaataatagacataatgtagggtttttagtaattgatgcaattaatgaaaagtttaaattatctaaacaaaaaccaaagtttaagggtttattaactactggcaaaataaatgaacaaaaagtttttgcaattaaaccactaacttttatgaatagttctggggtctgtataaaagaattaattgattattttaaaataagcgtaaaagatgtttttgtatttcatgacgacatggatatcgatattggtaaagttaaagtaaaatttggtggaagtaatgcgggtcacaatggaattgactccattgataaaaatataggaaaaaattattcacgcataagaataggaattggaagacctacaaaaaattctactggtgccgatcatgtacttgacaacttttctagtgatgaaaaaggaaacgttgaagaagtaactaaaaatataattgaatccttatctatacttataaataaagacttagacctcttttctagcaaaattaatcaaaaataat

SEQ ID NO: 259193 - DNA, 556 bp, Unknown
  Bacterial polypeptide expressing nucleotide sequence isolated from the Sargasso Sea
atgattgcattaatcggattagggaatccaggcacaaagcataaaaataatagacataatgtgggctatttatttatcgaccaacttttggaagattataatgatgcaatgatagaaaagaaatttgatggagaattagcatcatttcttattggaaagaaaaaaatatacacctttaaatccaataattatatgaatgagtgtggtaaaagtattgcaacttttttaaattttttcaaaattaaatctaattttacttatgttattcacgatgatctggatatcactttaggaaagataaaaataaagttgggaggttcttccgcaggtcataatgggcttaaatcaatagatagtaaaattggaaaaaattataataggataaggataggtataaatcatccaggtaacaaagaaatggttaataaacatgtcttaagtaattttagaaaaagtgagttagaagttattaatgaattaaatataaaaatgtctgaaaatataaaaatattatttgatggcgaaaaatccaaatttattaacaatttaaaataat

SEQ ID NO: 259194 - DNA, 562 bp, Unknown
  Bacterial polypeptide expressing nucleotide sequence isolated from the Sargasso Sea
atgcttttattcgttggattaggtaatcccactcccgatagtgaaaacaatcgacataatgttggttttaagattatagactcaattaataaaaaatttggactttcaaaacaaaaaccaaaatttaaaggattattaacaactggaaatattggtaatgaaaagatttatgctatcaaacctttaactttcatgaataattctggaatttgtataagagaagtgattgaatattttaaaattaatgtagaggatgtaattgtttttcatgacgatcttgatgtagaatttggaaaaataaaaactaaatttagtggctcaagtgctggccacaatggaattgcttcaattgataaatttattggtaaggattattctagagtaagagtcgggattggaaaaccaaaaaataatattgaggttgctgattatgttttacaaaacttcgatgaggatgaaattgttggaattgaaaaaatttcaaaaaatataacaaattcaatatctattcttattgaaaaaaaattagatttgttttcgagtactataaataatcaataat

SEQ ID NO: 259195 - DNA, 562 bp, Unknown
  Bacterial polypeptide expressing nucleotide sequence isolated from the Sargasso Sea
atgcttttatttgtaggattgggtaatccaacaccagacagtgaaaataatcgacataatgttgggtttaaaattatagacgcaataaacaaaaaatttagtttatcaaaacaaaaaccaaaatttaaaggcctgttaactactggcaatataggaaatgttaaagtttatgccatcaaacctttaacctttatgaataattcaggaatttgtattagagagcttattgaatattttaaaattgatgctcaagatgtaatagtttttcatgatgatctagatgtggaatttggaaaaatcaaagctaagtttggaggatcaagcgcaggacacaatgggattgcctcgattgataagtttatcggcaaagattattctagagttagaataggtattggtaaacccaaaggaaacatcgaggttgcagattatgttttacaaaattttgatgaggatgagtcattaggtattgaaaaaatatcaaaccatataaatgactcaatttcatttcttgttgaaaaaaaattagatcttttttctagtacagtaaataataaataat

SEQ ID NO: 259196 - DNA, 562 bp, Unknown
  Bacterial polypeptide expressing nucleotide sequence isolated from the Sargasso Sea
gatgctcttagttggtttaggaaatccaaatccaaataatacaaacaacagacataatgtaggttttttagtaatagatgctattaatgagaagtacaaattatcaaaacaaaaaccaaaatttaaaggtttactaacaactggaaaaattgatgagcaaaaagtttttgctattaaaccactaacatttatgaatagttcaggtgtgtgtattaaagaacttactgaatattttaaaatagaaacgaaaaatgtttttgtttttcatgatgacatggatattggaataggaaaaattagggttaaatttggtggaagtaatgctggtcacaatggtatcgagtcaattgataaaaatataggtaaaaattattcacgtataagaatcggaataggtagaccaaagaaaaactctagtggagcagatcacgttttggataatttctctattgacgaaaaacaaagtgtagaagaagttacgggtagtataatcaatgcattatcaattttaataaaaaaagatttagaattattttctagtaaagttaatcaaaaatcataa

SEQ ID NO: 259197 - DNA, 274 bp, Unknown
  Bacterial polypeptide expressing nucleotide sequence isolated from the Sargasso Sea
atgcttttattcgtaggattaggcaatccaactcctgacagtgaaaataacaggcataatgttgggtttaaaataatcgattcaataaacaaaaaatttagtttatcaaaacaaaaaccaaaatttaaaggtctcctaactacaggaaatattggaagccaaaaagtttatgctattaaacctttaacatttatgaataattctggaatttgtataagagaattaattgaatattttaaaattgatgctgaagatgtaattgtttttcacgata

SEQ ID NO: 259198 - DNA, 244 bp, Unknown
  Bacterial polypeptide expressing nucleotide sequence isolated from the Sargasso Sea
catggcggtcataatggtcttagagatattactaacaaaattggttcagcaaactttttaagacttagaattggaattggccatccgggttctaaagatgaagttacgaattgggtgcttaataaatttactcctaatgaaaaaaggcatcttgctcaatcgtattccagatttgttgatgtatttgaattaattacttacaacaatataaaagaagcacaaaaacttcttcatactaaataat

SEQ ID NO: 259199 - DNA, 379 bp, Unknown
  Bacterial polypeptide expressing nucleotide sequence isolated from the Sargasso Sea
atgcttttatttgtaggattgggtaatccaacaccagacagtgaaaataatcgacataatgttgggtttaaaattatagacgcaataaacaaaaaatttagtttatcaaaacaaaaaccaaaatttaaaggcctgttaactactggcaatataggaaatgttaaagtttatgccatcaaacctttaacctttatgaataattcaggaatttgtattagagagcttattgaatattttaaaattgatgctcaagatgtaatagtttttcatgatgatctagatgtggaatttggaaaaatcaaagctaagtttggaggatcaagcgcaggacacaatgggattgcctcgattgataagtttatcggcaagagattattct

SEQ ID NO: 259200 - DNA, 367 bp, Unknown
  Bacterial polypeptide expressing nucleotide sequence isolated from the Sargasso Sea
catgaatgaatgtggtggaagtattgcaaaactcattaatttttacaaacttagtctagactcagtttatgtctttcatgatgaccttgatatttctcttggaaaagtaaaaataaaaaatggtggctcaccagctggtcataatggattaaaatcaatagactcatgtataggcaaaaattataacagagtaagggttggaattgatcacccagggagccgtgaattggttaacaggcatgtactaggcaactttaaaaaaaaggagttggaaattgttgaccaattaaagatcagtatttcatcgcacttaaaattactgatatcagagaataaatctcaattcttaaataatattaaattataa

SEQ ID NO: 259201 - DNA, 226 bp, Unknown
  Bacterial polypeptide expressing nucleotide sequence isolated from the Sargasso Sea
catgattttattagtcggccttggaaatccaacacctgatagtaacgacaatagacataatgttggttttaaaattattgatgcaataaatcacaaatttggattatcaaaacaaaaaccaaagtttaaaggtcttctaactacaggaaacattgctaacaaaaaagtatatgcaataaaaccacttacatttatgaataactcagggatatgtataagagaactt

SEQ ID NO: 259202 - DNA, 421 bp, Unknown
  Bacterial polypeptide expressing nucleotide sequence isolated from the Sargasso Sea
aatgactattgtaggtttaggtaaccctggtgagcaatactcaaacactaaacataatgctggttattgggtattagataaactagctaatgaacttaatttaaattttaaattaggaaaaggagagtacgttcattctaaaaatgcaaatattagattagtaaaacccttaggttttatgaataatagtggaattggactaaaaagttatatggattattttaatattgatatagatgacatattagttgtgtatgatgatgctgatttaccattaggtaagattaggtttaaaacacatggaacttctggtggtcagaaaggcattgattcaattatttatcaattaaaaaatgatcaatttttaagattaaaagttggtgtttctactgatagcaagcaaaaatcattagcatcatat

SEQ ID NO: 259203 - DNA, 426 bp, Unknown
  Bacterial polypeptide expressing nucleotide sequence isolated from the Sargasso Sea
catggagaaacttgccgtcattggtttggggaaccccggcccggaatacgagaaatcccgccacaatttgggattctggcttctcgatgccttggctgaacgggaagatctccgtttcaagaccaacactcgatttcatgcccaggtcgcccagatggaaagaaagtccaacaagtacctcttgatcaagccaatgaacttcatgaacgacagtgggcgattcctctcctcccttttgtcttatttcggttgtgcttccgggaggtcggtcgtggttcatgacgagatggcctttccccttgctcacctgaaaatttcccaaaacaagggagatggaggccacaatggcgtcaaaagcgtggtttcggctatcggttcctctctggttcgttttcggatcggaatagggacgaaacccgatcctca

SEQ ID NO: 259204 - DNA, 400 bp, Unknown
  Bacterial polypeptide expressing nucleotide sequence isolated from the Sargasso Sea
atgattttggtaggattaggtaatccagggacgaagtactcgtctactaaacataattttggttattgggttattgattctatgattgaaaaaagttctttgaaattaaaagcaggaaaaggtgattatctttatgcaaaacatggggaatcattatttattaaaccaacttcatatatgaataatagcggtttagcaattaaacaggttcttgattattataaagcatctattgaagacttaatagtaatctatgatgatattgatttaccattagggactatacgatttaagaataaaggtggtccagcaggccatagaggtattgaaaatattatttatcaattacaatcagaatcatttttacgattacgattggggattgcaatgaaggattgcg

SEQ ID NO: 259205 - DNA, 562 bp, Unknown
  Bacterial polypeptide expressing nucleotide sequence isolated from the Sargasso Sea
atgcttttattcgtaggtcttggaaatccaacaccagacagtgaaaataatcgacataatgttggttttaaaattattgatgcaataaataaaaaattcagtttatcaaaacaaaaacccaagtttaaaggattgttaacgactggcaacattgatggcatgaagatttatgcgatcaaaccattaacatttatgaataattcaggaatctgtatcagagaattattagaatatttcaaatttaatgctgaagatgtaattgtgtttcatgacgatcttgatgtagaatttggaaaaataaaagctaaatttggtggttctagtgcaggtcacaatggaattgcatctattgataaatttattggtaaagattactccagagttagagttggtattggaaaaccaaaaacctctatggaaataagtgattatgttttgcaaaattttgatgaagatgaacttatgcgtattgataagatttctgaaaatattactgagtcaattggagatcttattaaaaaaaaattagattcattttcaagtacagtaaataataaataat

SEQ ID NO: 259206 - DNA, 463 bp, Unknown
  Bacterial polypeptide expressing nucleotide sequence isolated from the Sargasso Sea
ctgcagaataattatcctgtgcaaaaggtatttattcttggtatcggaaatccagaagaaaaatataacaacaccaggcataacattggcaaagattgggttgaaaaaattgccaaagatcacgaactgactttcgtaaaaaaatcaaaattaaagtgtagtatttgtgaggtagagccccatgtttatttggtggttccagatgtgtatgtaaatgaaagtggcaaagttgcttcattgctcaaaagatatctaaatgctaaacctgagcacattttagtatttcatgatgatattgatatacagattggtgatgcaaaatttaaatctggtggcggagatggtggtcacaatggattaaaagatttatctaatgtgattggaaaagatttcaaaagattaaaaattggtgttggccatcccggtaaaaaaaatgaagttacaaattgggttttaggaaagt

SEQ ID NO: 259207 - DNA, 535 bp, Unknown
  Bacterial polypeptide expressing nucleotide sequence isolated from the Sargasso Sea
tatacaaatactagacacaacatcgggtttaaaataatcgatgcagttaatactcattttaaattatcgaaacaaaaacctaaatttaaaggattgctcacgacaggaaatatagagtctaaaaaaatttatgctattaagcctctaaccttcatgaataattcaggaacggcgataaaagaattaattgattattttaaaattgatgcgaaagatgtttttgtatttcacgacgacatggatatagacttcggaaaaatcaaagctaaatttggaggaagcagtgctggtcacaatggaatccagtctattgataaatttattggaaaagattactcaagagttcgaattggaataggccatcctaaacaaaagaaaaaagtaaataatcatgtgttagaagattttaaagaagatgaggaagaaagaattaaagaaattacagataatattgttaagcttctacctactctaattgaaaagaaaatagatcttttctcaagtaaagttaatcaaaatcttaatgggatttaaa

SEQ ID NO: 259208 - DNA, 327 bp, Unknown
  Bacterial polypeptide expressing nucleotide sequence isolated from the Sargasso Sea
aagaaaaaattcaaattaataacttaatagtcgttgtagatgatttaaatatcaattttggtaaatctaggcttaaagcatcaggttctgatggtggacacaacggattaaaagacatagtaaattcattaaatacttcaaattttacaaggttaagatttgggattggaaataattttaaaaagaaagatcaggttgattttgttctgagtaaatggaataatgaagagtctaataatcttagacaccttattgataaaaatgttgaaattattttttcatcaatcaaacaagggttagattttacaatgaataaatataattaga

SEQ ID NO: 259209 - DNA, 438 bp, Unknown
  Bacterial polypeptide expressing nucleotide sequence isolated from the Sargasso Sea
tatgcttcttttagttggtttgggaaatcctaatccgaacaataaagacaacagacataatgttggtttttttgtaatagatgctataaatcaaaaatttaaattatcaaaacaaaaaccaaaatttaaaggtttgctaactacaggcaccattgagcagcaaaaagtttacgctataaaaccattaacttttatgaatagttccggagtatgcatcaaagaacttactgaatatttcaaaattgatgcaaataatgttttcgtttttcatgatgatatggatattgatgttggaaaagtgaaggtaaaatttggaggaagtagcgctggccataacggaatagaatcaatagacaaaaatattggaaaaaattattctagaataaggataggtgttggtagacctaataataattcaaatgcagcagaccatgtatt

SEQ ID NO: 259210 - DNA, 259 bp, Unknown
  Bacterial polypeptide expressing nucleotide sequence isolated from the Sargasso Sea
aatgttgttacttgttggtttaggaaatcccactccaaatagtcaaaataatagacataatgttggttttaaaattgtagattcaatcaatcaaaaatttggattatcgaaacaaaaacctaaatttaaaggattgttaacaacaggaaacattggtgagaaaaaaatatatgcaataaaaccgctaacctttatgaataattctggaatttgtattagagaaatactagaatattttaaaatagaagcagaaaatgta

SEQ ID NO: 259211 - DNA, 478 bp, Unknown
  Bacterial polypeptide expressing nucleotide sequence isolated from the Sargasso Sea
tttaaattgtcaaagcaaaaacctaagtttaaaggtcttcttacaacaggaaacatagagtccaaaaaagtttacgcgattaaaccccttactttcatgaataactcgggaacagcaattaaagaattaattgattattttaaaatcgatgcaaaaaatgtgatagtttttcatgatgatcttgatatagattttggaaaagttaaagcaaaagtaggtggaacaagtgctggtcataacggtattaaatcaatagataagtttattggaacagattattcaagagtaagagttggcataggtcatccaaaagaaaaaaaaagagtaaatagccatgtgcttgaagattttaaagatgacgaagaggaaagaataaaagaaattactgaaaatattgtaaaacttgttccaactttaatagataagaagatcgatttattttcaagtaaagtaaatcagaatttaaatgggatttaaa

SEQ ID NO: 259212 - DNA, 562 bp, Unknown
  Bacterial polypeptide expressing nucleotide sequence isolated from the Sargasso Sea
atgttgctactagttggtttaggaaatccgactcctaatagtcaaaataatagacataacgtaggctttaaaattttagatgcgataaacctaaaatttggattatcaaaacaaaagccaaagtttaaaggattgcttacaaccggaaatattggagaaaaaaaaatatatgcaataaaacctcttacatttatgaataattcaggaatttgtataagagaattattagaatattttaaaatagatgcagaaaatgtaattgtatttcatgatgatttagatgttgaatttggaaagataaaagcaaaatttggaggatcaagtgcaggacataatggaatagcatctatagataaatttataggaaaagagtattcaagagtaagaattgggataggaaaacctgacaataaaatatcaacatcagattttgttttaaatgactttaatgatgatgaaaaagaacatttagaaactattacaaaaaatattatcgactctatatcaatattaattgataaaaaattagatctattttccagcacagttaacaataattaaa

SEQ ID NO: 259213 - DNA, 562 bp, Unknown
  Bacterial polypeptide expressing nucleotide sequence isolated from the Sargasso Sea
atgaaactattggccggcctgggaaatccaggcagagagtatgaatgtacacctcataatgttggatttcaggttttagacttacttacagaacatttgggaatttccactttccaatcaaagtttcaaagcgaaatctgcagtttaacaataagtggagagtcgtgctttttcataaaacctcagacctatatgaataaaagtggtgtggccatagccgaaattgtaaatttttataaaattcccttagacaaaattgtaattatttctgatgatgttgacctaatgccaggtaaggtacgttttagaaatgaaggaggccatggtggtcataatggtttacgttcaataattgaatcactgggaggtcgcaatttccatagaataagatttggagtgggaagaccggtgaaaaaagaaaatttggtaggacacgttcttggtcgttggtccgatgctgaaaaaaaattaactatcaatgctttcaatcttgttttaaaagagattgtaaactttttagaaacttctcaatttaagaatgtttctttttcagttacgtaaa

SEQ ID NO: 259214 - DNA, 533 bp, Unknown
  Bacterial polypeptide expressing nucleotide sequence isolated from the Sargasso Sea
aatccaaccacctgatagtcaaaacaacaggcacaatattgggtttaaaattatagatgcaattaatcaaaaattttgtttatcaaaacaaaaacctaaatttaaaggtttgctcacaatgggaaatattggtgaagaaaaagtatatgcaattaagcctttaacatttatgaataattcaggcacttgcgtaagagagcttatagaatattttaaaattgattcttcagatataattgttttccatgatgaccttgatattgaatttggaaaaattaaaactaaatttggaggatcagatgcaggtcataatggcatagcatcattggataaattcataggaaaagattattctagagtaagaataggaattggaaaatctgataaaattaaagtaaatgattttgttttaagcgactttaatgaagaagagcaaattaaacttaatgaaatttcaaaaaaaataatttcatcattaagtatattaatagaaaaaaaactcgatttattttcaagtaacgtaaataattaaa

SEQ ID NO: 259215 - DNA, 443 bp, Unknown
  Bacterial polypeptide expressing nucleotide sequence isolated from the Sargasso Sea
tatgttactttttgtaggattaggcaatccaaccccgaatagtgagaacaatagacataacgtaggttttaaagttatagattctattaataaacaatttggactatcaaaacaaaaaccaaaatttaaaggacttttaactactggaaatatttctaataaaaaaatatacgcaataaaacctttaacatttatgaacaattcaggaatttgcatcagagaattgctagaatactttaaaattgaaccagaaaatgtagtagtttttcacgatgatttagatatagaatttggaaaaataaaagcaaaaaaaggtggatcagacgcaggtcacaatggtattgcttctatagataagtttattggaaaagagtattcaagagtaagaattgggattggaaaccagagacaaaatatcatatcagattatgttcttacagatt

SEQ ID NO: 259216 - DNA, 460 bp, Unknown
  Bacterial polypeptide expressing nucleotide sequence isolated from the Sargasso Sea
atgcttttatttgtaggtttaggtaatcccacaccagatagtgaaaacaatagacataatgttggttttaaaattattgattcaataaacaaaaaatttcgtttatcaaagcaaaaaccaaaatttaaaggtttattaacaactggaaatgttgcggatcaaaaaatctatgcgattaaaccattaacatttatgaacaactctggaatttgtatcagagaacttattgaatattttaagatagatgctgaggatgttatagttttccatgatgatctagatatcgaatttggtaagatcaaagctaaatttggagggtcaagtgctggacataatggaattgcatcgattgataaatttattggtaaagattattcaagagtaagaattggaattggaaaaccaaaaaataatatcgaagctgctgattttgtgcttcaaaattttgacgaaagatgaa

SEQ ID NO: 259217 - DNA, 467 bp, Unknown
  Bacterial polypeptide expressing nucleotide sequence isolated from the Sargasso Sea
gacgaataaatttcgtggattactttgtgaatgccttcttaataaccaaaagttcttattgcttaagcccaatacatttatgaacaactcaggattagcagtaactgaaattgtaaaattctacaaaattaacctttccgatttaatcgtctttcaggacgaccttgacatcagttttggtaaaataaaaataaaaaaagatggtggtcacgcaggtcacaatgggattcgatctatccacctcggtcttggaccatcatacgtccgagtccggataggtattggtcgtcctagttcaaaaactatggtatcttcatatgtcctatctgactttagcgatcatgaacacccaaagctagatttaatttttcatgcttttcaaaccaacctagaacacttattgcacggggacctggaaagtttttcgactttatttaacaattccattaagcttttagaaaaataat

SEQ ID NO: 259218 - DNA, 304 bp, Unknown
  Bacterial polypeptide expressing nucleotide sequence isolated from the Sargasso Sea
ttaacttatgttattcatgatgatctagatatcactttaggaaaaataaaaatcaagttggggggttcttccgcaggtcataatgggctcaaatcaatagatagtaaaattggaaaaaattataatagaataagaataggtataaatcatccgggcaataaagacatggttaataaacatgtattaagtaattttaaaaaaagtgaattagaagttattaatgaattaaatataaaaatgtctgaaaacataaaagtacttttggatggagaaaaatccaaatttattaataatttaaaataat

SEQ ID NO: 259219 - DNA, 522 bp, Unknown
  Bacterial polypeptide expressing nucleotide sequence isolated from the Sargasso Sea
catgattttatttgtaggattaggtaatccaactcctgacagtgaaaataatagacacaatgttggtttcaaaattatagattgtattaataaaaaatttaatttgtctaaacaaaaacctaaatttaaaggtcttcttacaactggaaatatagccagtaaaaaagtttatgctattaaaccattgacatttatgaacaactcagggatttgtataagagaattgattgagtactttaagattgatgcacaagatgtaattgtttttcatgacgatttagatgtagaatttggaaagatcaaaactaaatttgggggatcaagcgcaggtcataacggagttgcctccatagataaatttattggtaaagattattcaagggttagaataggaattggtaaaccaaaagactcaatggaagttgcagattatgttctacaaaattttaatgatgatgaaactattggtatagacaaaattactgaaaacattactgaatcaatttctattcttgttgataa

SEQ ID NO: 259220 - DNA, 559 bp, Unknown
  Bacterial polypeptide expressing nucleotide sequence isolated from the Sargasso Sea
gatgcttttagttggattgggaaatccaaacccgaataactcaaacaatcgtcataacgttggtttcttgattattgatgcaattaatcaaaaatttaagctttctaaacaaaaaccaaaatttaaaggtttattaactactggaaaaatcaatgaacaaaaagtatatgcaataaaaccactaacttttatgaatagctcaggagtatgcattaaagagcttatcgaatattttaaaattgatgtaaaaaatgttttcgtatttcatgatgatatggatattgaccttggaaaaattaagacaaaatttggaggaagcagtgcgggacataatggtatagaatcgatagataaaaatattggaaaattctattccagaataagaattggcataggtagaccaaaggataattctactggagcagatcatgtattagataatttttcaaaagatgaaaaaaaaagcatagaagatgttacaaataacatattagaatctatgcccgttttaattaataaagatttagatcttttttcaagcaaaattaatcaaaaataa

SEQ ID NO: 259221 - DNA, 562 bp, Unknown
  Bacterial polypeptide expressing nucleotide sequence isolated from the Sargasso Sea
tatgcttctattcgtgggtttgggtaatcctaatccgaataacaaaaacaatcgtcataatgttggttttcatgttattgacgctattaatcaaaaatttaaactttcaaaacaaaaaccaaaatttaaaggcttgttaacaacaggaactattgaagaacaaaaagtttatgcaataaaacctcttacttttatgaatagttctggcgtttgtattaaggagcttgcagaatattttaaaatagaagtaaaaaatatttttgtttttcacgatgatatggatattgatgttggaaaagttaaagtaaaatttggaggaagcagcgcgggacacaatggcatagaatctatagacaaaaacataggaaaaaattattcaagaataagaatcggtgttggtcggccaaaaaacaattctactggagctgaacatgtgttggacaatttttcaactgaagagcagcaatctatggaagatgttacaaaaaatataattgaatcattatcttctctaataaaaaaagatttagatcttttttcaagcaaaattaatcaaaattaa

SEQ ID NO: 259222 - DNA, 241 bp, Unknown
  Bacterial polypeptide expressing nucleotide sequence isolated from the Sargasso Sea
atgcttttatttgtaggactaggtaatccaacacccgatagtgaaaataatagacataatgttggttttaaaattattgatacaataaataaagaatttaatctatcaaaacaaaaacctaaatttaaaggtctcttaacgactggaaacattaacaatcaaaaagtttacgcaataaagcctttaacatttatgaataattcaggtatctgtataagagaattaattgaatattttaaaa

SEQ ID NO: 259223 - DNA, 203 bp, Unknown
  Bacterial polypeptide expressing nucleotide sequence isolated from the Sargasso Sea
tatgtttttaatatgtggtctggggaatccgggtaaagagtacaataacacaagacacaatattggatttaacctagtcgataaacttgaaagcttttataattttgatccatttaaaaaagatactaaaaaagaaatttataaaggtattattgcaaataatacatgtttattaatgaaaccactaaattttatgaatttat

SEQ ID NO: 259224 - DNA, 526 bp, Unknown
  Bacterial polypeptide expressing nucleotide sequence isolated from the Sargasso Sea
caataatttaaacaacagacataatgtaggtttcttagtgattgatgctataaacgaaaaatataaattatctaaacaaaagccaaaattcaaaggattgttaaccactggaaaaattgaagaacaaaaagtcctagctataaaaccacttacttttatgaacaactcaggagtatgcataaaagaactaattgattattttaaaatagacataaaaaatgtatttgtctttcatgatgatatggatattgatatcggaaaagtaaaagcgaaaatgggcggaagcgacgctggtcacaatggaataggttctattgataaaaatattggtaaaaattactcacgtataagaataggtgtaggaagacctaaaaaaaattctactggagctgaacatgtcttggacaatttttcaggggatgagaaacaaacagtagaaaaggtaacaaaagatataatagagtctatatctattttgataaataaagatttagatcttttttcaagtaagattaatcaaaaataa

SEQ ID NO: 259225 - DNA, 345 bp, Unknown
  Bacterial polypeptide expressing nucleotide sequence isolated from the Sargasso Sea
tatgcttttatttgtaggtctaggcaatccaacagctgatagtgaaaataatagacacaatgttggttttaaaataattgattcaattaataaaaaatttagtctttcaaaacaaaaaccaaaattcaaaggcttattgaccactggtaacattgaaaaccaaaaagtttacgctattaagcctcttacttttatgaataactcaggggtttgtattagagagctaatagaatattttaaaattgatcctcaagatgtaatagtttttcacgatgatttagacatcgaatttggaaaaattaaagcaaagtttggtggttctgacgctggtcacaatggtgtagc

SEQ ID NO: 259226 - DNA, 190 bp, Unknown
  Bacterial polypeptide expressing nucleotide sequence isolated from the Sargasso Sea
gttgcttcattgctcagaagatatctaaatgctaaacctgagcacattttagtattgcatgatgatattgatttacagattggtgatgcaaaatttaaatccggtggcggagatggtggtcacaatggattgaaagacttatctaatgttattgagaaaagatttcaaaagattaaaaattggcgttagc

SEQ ID NO: 259227 - DNA, 146 bp, Unknown
  Bacterial polypeptide expressing nucleotide sequence isolated from the Sargasso Sea
tatgtttttaatatgtggtctgggaaatccaggtaaagagtacattaacacaagacacaatgttggatttaacctggtagataaacttgcaagtttttataattttgatccatttaaaaaagatactaaaaaagaaatttttaaag

SEQ ID NO: 259228 - DNA, 562 bp, Unknown
  Bacterial polypeptide expressing nucleotide sequence isolated from the Sargasso Sea
atgattttattagtcggccttggaaatccaacacctgatagtaacgataatagacataatgttggttttaaaattattgatgcaataaatcaaaaatttggattatcaaaacaaaaaccaaagtttaaaggtcttctaactacaggaaacattgctaacaaaaaagtatatgcaataaaaccacttacatttatgaataactctgggatatgtataagagaacttatggaatattttaaaatagacattgatgatgtgattgttttccatgacgatttagatgttgattttggaaaaataaaagcaaaatttggtggttcaagtgcaggtcataatggtattgagtcaatagataagtttattggcaaagaatattcaagagttagagttggaataggaaaaccagataaaaaaattcctgtttccgattatgttttaaataattttaatgaagaagaaaaaattcaattaggtcaaattacaatgaatattattgaatcaattcctattcttatagataaaaaattagatcttttttcaagtactgttaacaataaataaa

SEQ ID NO: 259229 - DNA, 538 bp, Unknown
  Bacterial polypeptide expressing nucleotide sequence isolated from the Sargasso Sea
aaataataacaacaatagacataatataggatttaaaattattgatgcaatcaataaacaatttaatctttcaaagcaaaaacctaaatttaaaggattattaacgactggtaatattgaagataaaaaagtatatgccatcaaaccactcactttcatgaacaattctggtacctgtattaaagaacttatagaatattttaaaattgactcaaaaaacgtaattgttttccacgatgatatggatattgatttagggaaagtaaaggcgaagtttggtgggagtagcgcaggtcataatggaatagagtcaatagataaatctataggaaaagattattccagagtaagagttggtattggtcacccaaaagaagataaaaaagtaaatagccatgttctagaagatttttcggataatgaggacgaaaaaattcaagatgttacaaaaaatattgttgatcttgttcctatgctcataaaagacaaaatagacgttttttcaagtaaggttaatcaaaacattaatgggatttaa

SEQ ID NO: 259230 - DNA, 422 bp, Unknown
  Bacterial polypeptide expressing nucleotide sequence isolated from the Sargasso Sea
catgcttttatttgtaggattgggtaatccaacaccagacagcgaaaataatcgacataatgttgggtttaaaattatagacgcaataaacaaaaaatttagtttatcaaaacaaaaaccaaaatttaaaggcctgttaactactggcaatataggaaatgttaaagtttatgccatcaaacctttgacatttatgaataattcaggaatttgtattagagagcttattgaatattttaagattgatgctcaagatgtaatagtttttcatgatgatctagatgtggaatttggaaaaatcaaagctaagtttggaggatcaagtgcggggcacaatggaattgcttcaattgataagtttattggtaaagattattctagagtgagaataggtattggtaaacccaaaggaaacatcgaag

SEQ ID NO: 259231 - DNA, 364 bp, Unknown
  Bacterial polypeptide expressing nucleotide sequence isolated from the Sargasso Sea
atgtttttaatttgtggtctgggtaacccaggtaaagactatatcaatactcgacataatgttggatttaatcttattgatgaacttatcaattattttgaattttctttattaaaaaaagacaacaaaaaagaaatatttaaaggaaaaattgatgaatattcatgtttgcttatgaaaccacaaagtttcatgaatttatcaggacaacctatacaagaagtaatgaatttttataaaattcaaaagaaaaatatttatgttattcatgatgacttagatttagagcttggaaaagtaaaaattaaattaggtgggggaaatggaggtcacaacggtctttcaaatatagatgcaatgatag

SEQ ID NO: 259232 - DNA, 530 bp, Unknown
  Bacterial polypeptide expressing nucleotide sequence isolated from the Sargasso Sea
taataccagacataacatcggttttaaaataattgatgctataaacgctcactttaaactttcaaaacaaaaaccaaaatttaaaggtttgctgactacaggaagcatagatgagaaaaaaatttacgctattaaaccattaacctttatgaataattctgggacagctataaaagaattaattgattattttaagatcgatgcaaaagatgtatttgtttttcacgatgacatggatattgattttggaaaaataaaagcaaagtttggaggaagtagtgcaggtcataatggaattgagtctatagataaatttattggcaaagattactccagggttcgcattggtatagggcatccaaaacaaaagaaaaaagtaaataatcatgttttagaggattttaaagaagacgaagaagacaaaattaacgagataacagaaaatattgtaaaacaattacctacgttaattgaaaaaaaaatagatcttttttcaagtaaggttaatcaagacctgaatgggatttaaa

SEQ ID NO: 259233 - DNA, 258 bp, Unknown
  Bacterial polypeptide expressing nucleotide sequence isolated from the Sargasso Sea
aagattcaggtgggcatggcggtcataatggtcttagggatattgctaacaaaattggttcagcaaactttttaagacttagaattggaattggccatccgggttctaaatatgaagttacaaattgggtgcttaataaatttactcctaatgaaatcaaacatcttgctcaaacgtattccagatttgttgatgtatttgaattaattacttcaaacaatataaaagaagcacaaaaacttcttcatactaaataat

SEQ ID NO: 259234 - DNA, 143 bp, Unknown
  Bacterial polypeptide expressing nucleotide sequence isolated from the Sargasso Sea
tatgtttctaatagtgggtctaggaaatcctggaaaatttcataaaaataacagacataatattgggtataaaattatagacaatattagagatatatataattttccaggtttctcaaaaaaatttaaatctgaattttcta

SEQ ID NO: 259235 - DNA, 562 bp, Unknown
  Bacterial polypeptide expressing nucleotide sequence isolated from the Sargasso Sea
catgattttatttgtaggattaggtaatccaactcctgacagtgaaaataatagacacaatgttggtttcaaaattatagattgtattaataaaaaatttaatttgtctaaacaaaaacctaaatttaaaggtcttcttacaactggaaatatagccagtaaaaaggtttatgctattaaaccattgacatttatgaacaactcggggatttgtataagagaattaattgagtattttaagattgatgcacaagatgtaattgtttttcatgacgatttagatgtagaatttggaaagatcaaagctaaatttgggggatcaagcgcaggtcataacggaattgcttccatcgataaatttattggtaaagattattcaagggttagaataggaattggtaaaccaaaaaactcaatggaagttgcagattatgttctacaaaattttaatgatgatgaaactattggtatagacaaaattactgaaaacattactgaatcaatttctattcttgttgataagaaattagacctgttttctagtacagttaataataaataa

SEQ ID NO: 259236 - DNA, 246 bp, Unknown
  Bacterial polypeptide expressing nucleotide sequence isolated from the Sargasso Sea
gtggctcaccagctggtcataatggattaaaatcaatagactcatgtatgggcaaaaattataacagagtaagggttggaattgatcatccagggagccgtgaattggttaataggcatgtactaggcaactttaaaaaaaaggagttggaaattgttgaccaattaaagatcagtatttcatcgcacttaaaattactgatatcaaataataaatctcaattcttaaataacattaaattataat

SEQ ID NO: 259237 - DNA, 397 bp, Unknown
  Bacterial polypeptide expressing nucleotide sequence isolated from the Sargasso Sea
atgcttttatttgtaggattgggtaatccaacaccagacagcgaaaataatcgacataatgttggatttaaaattatagacgcaataaacaaaaaatttagtttatcaaaacaaaaaccaaaatttaaaggcctattaaccactggcaatataggaaatgttaaagtttatgccattaaacctttgacctttatgaataattcaggaatttgtattagagagcttattgaatattttaaaattgatgctcaagatgtaatagtttttcatgatgatctagatgtagaattcggaaaaattaaagctaaatttggaggatcaagcgcaggacacaatggaattgcctcgattgataagtttatcggcaaagattattctagagttagaataggtattg

SEQ ID NO: 259238 - DNA, 562 bp, Unknown
  Bacterial polypeptide expressing nucleotide sequence isolated from the Sargasso Sea
tatgttattatttgtaggtctcggtaacccaactcccaatagtgaagataatcgacataatgtaggctttaaaatcatagatgcaataaatcaaaagtttagcctatcaaaacaaaaaccaaaatttaaggggttattaactactggaaaaatagaagagcacaaaatttacgcaattaaacctttaacatttatgaataattcaggaatttgtatcagagaactgattgagtatttcaaaattaatgcaagtgacgttgttgtttttcacgatgatcttgatatcgattttggaaaaattaaagcaaaatttggtggatctaacgcagggcataatggaattgcgtctattgataaatttataggaaaagactattcaagagttagagtgggaattgggaaaccaaataacaaaattgatgtctctgactatgttttaaataactttaatgaggaagaaaaggaaaaattaatttctatcacaaataacattttagattgtattccaatattaattgataaaaaattagaattattttctagtacagtaaataataaataa

SEQ ID NO: 259239 - DNA, 562 bp, Unknown
  Bacterial polypeptide expressing nucleotide sequence isolated from the Sargasso Sea
atgcttttactcgtaggattaggaaatccaacacctgacagtgaaaataatcggcataatgttggttttaaaattatagactctattaataaaaaatttaaactttcaaaacaaaaacctaaatttaagggtttattaacaacaggaaatattggaaataaaaaagtttatgccatcaaaccacttacattcatgaataattcaggaatttgtataagggaactgattgaatattttaaaattaatgctgaggatgtaattgtttttcatgatgacttagacgtagaatttggaaagattaaaacaaaatttggtggctcaagtgcaggtcataatggaatatcctcgatagataagtttatcggaaaggattattctagagtaagaataggaattggaaagccacaaggtaacatagaggtagctgactacgtactgcagaattttaatgaagaggaaaatcttggaattgaaaaaatttcagctcatataacagattcaattacaattttaattgaaaaaaaattggatttattttcaagcactgtgaataataaataat

SEQ ID NO: 259240 - DNA, 262 bp, Unknown
  Bacterial polypeptide expressing nucleotide sequence isolated from the Sargasso Sea
tatgtttttaatttgtggattaggaaatccaggtgttaaatattttaatacaagacataatgttggatttcaattaatcgataaattaatagtcaaatataattttgaaacttataaaaaagataaaaaaaaagaaatttttagaggatctattggaaagcacatctgccttttaataaaacctctaacttttatgaatttgtctggaatagccgttaaagaagtattagatttttataagattaaaaaaataatctgtatg

SEQ ID NO: 259241 - DNA, 398 bp, Unknown
  Bacterial polypeptide expressing nucleotide sequence isolated from the Sargasso Sea
agcgattgcagaatgcgcaagatacttcaagattctttcagaaaaaattcttgtgatcagtgatgacctggatcttccagccggaaaagcacgactgcgagtgtcaggagggcacgggggccataatgggctcagatccgttattcaatgcctgggcacggaccaattccttcgggccagaatcgggattggcaggcctgattcatcaagctctgggaaagaagcctcagtttcccaatatgtgctgggcaaaatggaggaaacgaaagcggaactttgtctgcaggcgatggaaaaagttgtggatatgctggtccattttgtacgtcagtcacgtttccaaagcacatcaatcagcattcccactccggctctgcctgcaacagggcaaggttgag

SEQ ID NO: 259242 - DNA, 334 bp, Unknown
  Bacterial polypeptide expressing nucleotide sequence isolated from the Sargasso Sea
tatgaataagtttttaattgtcgggattggtaatattggtgataaatatacaaatacaagacacaatataggttttctggtcatagatgaaatagcagaagttctaaaatcacccctctcatctgtaaaacatggacatagagctgaagctagctataaagggaaaaaggttattcttcttaaaccttcaaactatgttaataattcagggaaatctttattatactggaaaaataaagaaagaatcccaaataaaaatattttagttgtatgtgatgaccttaatctatattttggaaatataaaacttaaagcaaatggaacttcaggaggt

SEQ ID NO: 259243 - DNA, 562 bp, Unknown
  Bacterial polypeptide expressing nucleotide sequence isolated from the Sargasso Sea
atgcttttatttgtaggcttaggcaatccaacaccagatagtgaaaataacagacacaatgttggctttaaaattattgactcaataaataaaaaatttggtttatcaaaacaaaaaccaaaatttaaaggtttattgacaacaggaaatgttgcaaatcaaaaaatctatgcaattaaacctttaacgtttatgaataactctggaatttgtattagggaacttattgaatattttaaaatagatgctgaagacgtaatggtttttcatgatgatcttgatgttgaatttggcaaaataaaagcaaaatttggtggatcaagtgctggacacaatggaattgaatcaattgataaatttataggtaaagattattcaagaataagaattgggattggaaaaccaaaaaaaaacatagaaacagcagattatgttttacaaaattttgatgaagatgagacagctggaattgaaaaaatctcaaataatataaatgaatcaatttcaatcctaattgaaaaaaaattggatttattctctagtacagtaaataataaataat

SEQ ID NO: 259244 - DNA, 568 bp, Unknown
  Bacterial polypeptide expressing nucleotide sequence isolated from the Sargasso Sea
tatgcccgaggaaacattgctacttgtaggattaggaaatcctggtgaaaaatataaaaacaatcgtcataatgttggtttcatggttcttgattatgttaccaatcaattaaaatttggaagaagtagaacaaaattccttggaagaacatcaatgggttcttacgaaaatatcaagcttatatcatttaaacctcaaaccttcatgaatgaatctggaagagcagttagagaagcctctaatttttataaaataaatcctgaaagaatttttgtatttcatgatgatatagatttatcttttggtgatgttaaactaaaaaaaggcggaagtaatgcaggtcataatggtttagcatctatagacgaaaatattggaaataactatatacgcctaagaattggggttaaccatccaggtgataaagaaaaagttactgggcatgttcttggagatttctcaaaagaagaaaatgaagaatttgaaaagatacaaactaaaatagttaagaattttgatcttcttattgatactaatatcaaaaaatttcaatcaaatatgaaataa

SEQ ID NO: 259245 - DNA, 296 bp, Unknown
  Bacterial polypeptide expressing nucleotide sequence isolated from the Sargasso Sea
aaatttattttttggaaatattaaaataaaaccaaatggcacgtctggaggtcataatggcttaaaagacattgaagataatcttggaacttctaattatgctaggttaagggttggaatatctaataacaataagattcccaaatcagattatgttttaggaaagtggagtagctatgagatgtccaatataaatactcttacaattagctcaattgagattattttctcatttattcaaactggtattgaagagacaatgaatctctacaacaagaaaaattttattaaatgaa

SEQ ID NO: 259246 - DNA, 562 bp, Unknown
  Bacterial polypeptide expressing nucleotide sequence isolated from the Sargasso Sea
tatgcttttatttgtaggtttaggtaacccaactccagatagtgaaaataatagacataatgttgggtttaagattatagattccatcaataaaaaatttgggcttacaaaacaaaaaccaaaatttaaaggtttgttaacaactggtaatattgatagtaaaaaagtgtatgcaattaagccgttaacttttatgaataactctggaatatgtattagagaattaattgaatattttaaaattgaacctgaaaatgtaattgtttttcatgatgatcttgatgttgaatttggaaagataaaagcgaaatttggtggatcaagtgctggtcacaatggaatatcttctatagataaatttattggaaaagattactcaagggtaagaataggtataggaaaaccaaaaggaccccttgaagtatctgattatgttttgcaaaactttgatgatgaagaaattatgggtgtagaaaaaatatccaaaaatataactgagtcactttcgatactcgtagaaaaaaaattagatttattttccagcacagttaataataaataa

SEQ ID NO: 259247 - DNA, 470 bp, Unknown
  Bacterial polypeptide expressing nucleotide sequence isolated from the Sargasso Sea
ttcgaacaaaaaacctaaatttaagggtcttttaactactggaaatattgagtctaaaaaagtttatgcaattaaacctttaactttcatgaataattcaggcactgctattaaggaattaatagattattttaaaattgatgcgaaaaacgtaattgtttttcatgatgacctagatattgattttggaaaagttaaggctaaagttggaggatcaagtgctggtcacaacgggataaaatctatagataaatttattggaacagattattcaagggtaagagttggcataggccatcctaaggaaaaaagaagagttaatagtcatgttttggaagattttaaagatgacgaggaagaaaaaataaaagaaattactgaaagtattgtaaaattagttccaaccttaatagataaaaaaattgatttgttttcaagcaaagttaatcaaaatttaaatgggatttaag

SEQ ID NO: 259248 - DNA, 158 bp, Unknown
  Bacterial polypeptide expressing nucleotide sequence isolated from the Sargasso Sea
tatgcttttatttgtaggtctaggtaatccaacacccaattctgaaaacaacagacataatattggatttaaaattattgacgcaattaatcaaaaatttggactttcaaagcaaaaacctaaattcaaaggacttttaaccactggaacaattaatg

SEQ ID NO: 259249 - DNA, 574 bp, Unknown
  Bacterial polypeptide expressing nucleotide sequence isolated from the Sargasso Sea
tatgcttttacttgtcggattaggaaatcctggcgctaattatactaacaccagacataacatcggttataaaattatcgatgctattaacttacattttaaattatcaaaacaaaaaccaaagtttaaaggattgctaactactggaaatatagaatcaaaaaaaatatatgctattaaacctttaacttttatgaataattccggcacggcaattaaagaattaatagattattttaaaattgatgccaaagatgtatttgtttttcatgatgatatggatattgattttggaaagataaaagtaaagtttggcggtagtagtgctgggcataatggaattgattctatagataaatttatcggaaaggattactctagagtccgggttggaataggtcatcctaaacagaaaaagaaagttaacaatcatgttcttgaagattttaaggaagatgaacaagaaaaaattaaagaaatcactgataacattgtaaaattaatacctactcttatagaaaaaaaaatagatctattttcaagtaaggttaatcaaaaccttaatgggatttaa

SEQ ID NO: 259250 - DNA, 508 bp, Unknown
  Bacterial polypeptide expressing nucleotide sequence isolated from the Sargasso Sea
tctggacgccgtgcaacgtgtcgtttccttaccctggcggcccgagacgcggttttttggtgacctggctgatacgcgtgtgggccaacaaagagtccgatttttgaggcccgccagcttcatgaatgaatgcggcggagcggttgcatctgtctgcggttatttcgatatccctgccgaagcccttctggtcgtgcacgatgatcttgatttgcctcccggcaccgtcagagtcaaacagggtggaggtcatggaggacataatggccttcgcgacatcttctcgaagttgggttcccgcgaattcatccggctgcgcattggtatcggtcatccgggtaacagcgatgatgtcagcgactgggtgttgagaaaaccgtcatcgggagacaggacggccatccttgatgcgatcgatcgcgctttgggccagattgatccgatgatgagtggaaatctcgagccggtaatgaaggcattgcacacccagcctaaaggtcaatcctga

SEQ ID NO: 259251 - DNA, 577 bp, Unknown
  Bacterial polypeptide expressing nucleotide sequence isolated from the Sargasso Sea
attgcttcatctttgtattgttggtttaggcaatccaggcgataaatactcaaaaacaagacataatgcaggttatgatttccttgacataattgccaaagaattcacaacagattttaaatacttaaaaaaaattgatgctgattatgttgaaattgatttcaaagatcagaaaattgctttgataaaaccaagagaatttattaacagaagcggtaaaacactcgaacttgtaaggaaatataaggttaaagacactaaagatatattagtagtccatgatgatatggaccttgagccaggtgatgtgaagttaaagctatctggaggtcatgctggacacaatggtctaagagatattttaaaggcaataggaaatgattttgtcagattaagatttggtataggacatcctcctaataaagagcagacagattcttgggtaataaagaaaccaaatcctcaagaaaaaaaggaaatggctaatgcatttgagagggctataaacaatatcgacaaaatcttacttaaagactggatgattataatgaacgaccttcactctaatgagcattaa

SEQ ID NO: 259252 - DNA, 571 bp, Unknown
  Bacterial polypeptide expressing nucleotide sequence isolated from the Sargasso Sea
aatgactatttttgttggattgggcaaccatgagtcaaagtatcttgataccaaacataatgttggttattgggttttggatagctttgctgaaaaatatggacttgagttcaagcctgggaaaggtaattattttgttgctaaaaaaggctcaagtttcatgttaataaaaccaacaacaggtatgaataatagtggcgctattataaatgaagttttgagcttttataaggcaaaaaaagaagaccttgtcatcatttttgatgatgtagatcttccattaggcgaaataaggtttcgaactgatggcggagatggatgccataacggaatgaagtcagttttaaaatatgtttcaagtgaaaaaataaacaggttaaaagtaggtattgctgcagatgattataaaagaccatcagaaaaatacgttttaaaaccttttaataagcgttatcaatcacttgttcaagatgtaataatatttgcaaatgaagcaatgaagtcatttttagataatggccaagaattcacaatgaacaattataataatcaaactataggagtagcgtag

SEQ ID NO: 259253 - DNA, 601 bp, Unknown
  Bacterial polypeptide expressing nucleotide sequence isolated from the Sargasso Sea
atgaactcaacaaacaatcctccattattgattgttggcttaagaaacccggatcctaaatacctaaaaactagacacaatattggattctggttcttagacttatttgctgaaaagtacaatttatcattcaatgataacttgaaaaaaggttatttagattcaacttatcaggacgataacatcacaatcaagattctaaaaccaatgactttcataaatgatagcggctctcccttagtgaaatttataaagaacacaaatataagccctaaagatataattgtagcttatgatgatttagatttgtcacctggtaaagtaagattaaaattttcagggggcagtggtggtcataatggaattaaagacataacagaaaaaataggaacaaaagacttctggagattaaaaattggaattggtaaaccaatgcataaagatgatgtcatatcctatgtattaggtaaaccgtcgcctgaagacaaagcgagcataaattctggtattgataaaatattagctaactcaaaagatattatttctggaaattataaaaatttcatgaataacatcaatggtggcggtaatggggtttaag

SEQ ID NO: 259254 - DNA, 562 bp, Unknown
  Bacterial polypeptide expressing nucleotide sequence isolated from the Sargasso Sea
tatgcttttatttgtaggtttaggtaacccaactccagatagtgaaaataatagacataatgttggttttaaaataatcgactcaataaataaaaaatttagcttatcaaaacagaaaccaaaatttaaaggattactcaccactggtaatgttgcagatcaaaaaatttatgccattaagcccctaacttttatgaataattctggaatatgtattcgagaactcatagaatattttaaaattgatgctgaggacgtaatcgttttccatgatgatttggacgtagaatttggaaaaatcaaagcaaaatttgggggatccagtgcaggccataatggtattgcctcaatagataaatttattggcaaagattattccagagtgagagtgggaattggaaaaccaaaagataatatagaaataagtgactatgttttgcaaaattttgatgatgatgaaatgacaggattggaaaagattaccaatgacattacagactctatttcaatattggttgataaaaaattagatttattttcaagcacagtaaataataaataa

SEQ ID NO: 259255 - DNA, 568 bp, Unknown
  Bacterial polypeptide expressing nucleotide sequence isolated from the Sargasso Sea
atgcccgaggaaacattgctgcttgtaggattaggaaatcctggtgaaaaatataaaaataatcgtcataatgttggtttcatggttcttgattatgttaccaatcaattaaaatttggaagaagtagaacaaaattcctaggaagaacatcaatgggttcttatgaaaatatcaagcttatatcatttaaacctcaaaccttcatgaatgaatctggaagagcagttagagaagcctctaatttttataaaataaatcctgaaagaatttttgtgtttcatgatgatatagatctatcttttggtgatgttaaactaaaaaaaggcggaagtaatgcgggtcataatggcttagcatctatagacgaaaatattggaaataattatatacgcctaagaattggagttaaccatccaggtgataaagaaaaagttaccgggcatgttcttggagatttctcaaaagaagaaaatgaagaatttgaaaagatacaaactaaaatagttaagaactttgatcttcttattgatactaatatcaaaaaatttcagtcaaatatgaaataaa

SEQ ID NO: 259256 - DNA, 562 bp, Unknown
  Bacterial polypeptide expressing nucleotide sequence isolated from the Sargasso Sea
catgcttttatttgtaggattgggtaatccaacaccagacagcgaaaacaatagacataatgttgggtttaaaattatagacgctattaacaaaaaatttagtttatcaaaacaaaaaccaaaatttaaaggcctattaaccactggcaatatagaaaatgttaaagtttatgccatcaaacctttgacctttatgaataattcaggaatttgtattagagagcttattgaatattttaaaattgatgctcaagatgtaatagtttttcatgacgatctagatgtggaatttggaaaaatcaaagctaaatttggaggatcaagcgctggacataatggaattgcctcgattgataagtttatcggtaaagattattctagagttagaataggtataggtaaacccaaaggaaacatcgaggttgcagattatgttttacaaaattttgacgaagatgagtcattaggtattgaaaaaatatcaaaccatataaatgactcaatttcttttcttgttgaaaaaaaattagatcttttttctagtacagtaaataataaataa

SEQ ID NO: 259257 - DNA, 562 bp, Unknown
  Bacterial polypeptide expressing nucleotide sequence isolated from the Sargasso Sea
tatgcttttatttgtaggactaggtaacccaacgcctgatagtgaaaataatagacacaatgtaggttttaaaattatagactcgataaataaaaaatttggcctatcaaaacaaaaaccaaaatttaaaggtttgcttacaacaggaaatgttggagacaaaaaaatatatgcaattaaacctttaactttcatgaataattcaggaatttgtataagagaattaatagaatattttaaaattgatgccgaggatgtcatagtttttcatgatgatttagatgtagaatttggaaaaattaaagctaagtttggtggatctagcgcaggtcataatggtgtagcttcaatagataaatttattggtaaagattattctagagttagaattggtattggaaaaccaaaagacaatatggaagtaagtgattttgtacttgaaaattttgatgaagatgaaatggttggattagaaaaaattacaaataatattactgagtcaatttcaatattaattgaaaaaaaattagatctattttcaagtacagttaataataaataa

SEQ ID NO: 259258 - DNA, 562 bp, Unknown
  Bacterial polypeptide expressing nucleotide sequence isolated from the Sargasso Sea
tatgcttttatttgtaggattaggtaatccaactccagattgtgaaaacaatcgacataatgtaggatttaaaattatcgattctataaataaaaaatttggactttcaaaacaaaaaccaaaatttaaaggattattaactacggggaatataggagataaaaaagtttatgccatcaagccattaactttcatgaataattcaggtatttgcataagagagctgatagaatattttaaaattgacgtagaaaatgttatagtttttcatgatgatcttgatattgaatttggaaaaataaaaactaaatttggcggatcaaatgctggtcacaacggaattgcctctattgacaagtttataggtaaagattattcaagagttaggattggaattggaaaaccaaaaaataacattcaagtttcagattatgttttacaaaactttaatgaagatgaagctattagtattgaaaaaatttcagagaatatatcagaatcaatatcaattcttgtcgaaaaaaaattagatcttttttcaagtacagttaataataaataa

SEQ ID NO: 259259 - DNA, 562 bp, Unknown
  Bacterial polypeptide expressing nucleotide sequence isolated from the Sargasso Sea
catgcttttatttgtaggactaggtaacccaacgccagatagtgaaaataatagacataatgtaggtttcaaaattatcgactcaataaataaaaaatttggtctatcaaaacaaaaacctaaatttaaaggtttgctcacaacaggaaatgttggagacaaaaaaatatatgcaattaaacctttaactttcatgaataattcaggaatttgtataagagaattaattgaatattttaaaattgatgctgaagatgtaatagtttttcacgacgatttggatgtagaatttggaaaaataaaagctaagtttggtggatctagcgcaggtcataatggtatagcatcaatagataaatttattggtaaagaatattctagagttagaataggtattggaaaaccaaaagataatattgaaattagtgatttcgtacttcaaaattttgatgaagatgaaatggttggattagaaaaaattacaaataatattactgagtcaatttcaatattaattgaaaaaaaattagatctattttcaagtacagtaaataataaataa

SEQ ID NO: 259260 - DNA, 306 bp, Unknown
  Bacterial polypeptide expressing nucleotide sequence isolated from the Sargasso Sea
gactgcgagtctccggagggcacggcggccataatgggctcagatctgtcattcaatgcctgggcacggaccaattccttcgggccagaatcggaattggcaggcctgattcttcaagctctgggaaagaagcttcagtttcccaatatgtgctgggcaaaatggaagaaacaaaagcggaactttgtctgcaggcgatggaaaaagttgtggatatgctggtccgttttgtacgtcagtcacgtttccaaagcacatcaatcagcattcccactccggctctgcctgcaacagggcaaggttgag

SEQ ID NO: 259261 - DNA, 571 bp, Unknown
  Bacterial polypeptide expressing nucleotide sequence isolated from the Sargasso Sea
ttgttagatctttgtatagtcggtctaggcaatccaggagataagtataatcattccagacataatgctggctatgactatttagatttaatctgtaatcaactaagcgttgaattaaaaaaatcaaacaaaatagaaggtcttcttggtgaaacaacttacaaagatctacaaattggttttgttaagccaaatgaattcataaacaatagcggcagaactctaagtttaatcaaaaaatataaagttaaagaattgaatgatgttcttattattcatgatgatatggatttagagcctggtgaagtaaagttaaagataggtggaggtcacagcggccatagagggcttaaggacattattaataaggtaggagatgattttgtcaggcttagacttggtattggtcatcctccaatcaaagaggagacaaatgcctgggttattaagaaaccaaccccaagtgaaaaagaaggacttaataatgctttcacaaaagctaatgaatcacttgaccaactgctaaataaagaatggcttatcgccatgaatgatcttcatacaaaatgag

SEQ ID NO: 259262 - DNA, 562 bp, Unknown
  Bacterial polypeptide expressing nucleotide sequence isolated from the Sargasso Sea
atgttattatttgtaggtctcggtaatccaacgccaaacagtgaagataatcgccataatgtaggctttaaaatcatagatgcaataaatcaaaaatttagtctatcgaagcaaaaaccaaaatttaagggattattaactaccggaaaaatagaggagcacaaagtttacgctattaaaccattaacattcatgaataattcgggaatttgtattagagaattgattgagtatttcaaaattaatgcaaatgacgtcgttgtttttcatgatgatcttgatattgattttgggaagattaaagcaaaatttggtgggtctgacgcaggacataacggaattgcgtcaattgataaatttataggaaaagactattcaagagttagagtgggaattggtaaaccaaataacaaaattgatgtctctgactacgttttaaataactttaatgaagaagaaaaagaaaaattaatttctatcacaaataacatattagattgtattccaatattaattgataaaaaattagaattattttctagtaccgtaaataataaataat

SEQ ID NO: 259263 - DNA, 562 bp, Unknown
  Bacterial polypeptide expressing nucleotide sequence isolated from the Sargasso Sea
atgcttttatttgtaggattgggtaatccaacaccagacagcgaaaacaatcgacataatgttgggtttaaaattatagatgctattaataaaaaatttagtttatcaaaacaaaaaccaaaatttaaaggtctattaaccactggtaatataggaaatgtaaaagtttatgccatcaaacctttgacctttatgaataattcgggaatttgtattagagaacttattgaatattttaaaattgatgctcaagatgtaatagtttttcatgatgatctagatgtggaatttggaaaaatcaaagctaagtttggaggatcaagtgcgggacacaatggaattgcttcaattgataagtttattggcaaagattattctagagtgagaataggtattggtaaacctaaaggaaacatcgaggttgcagattacgttttacaaaattttgacgaagatgagtcgttaggtattgaaaaaatatcaaaccacataaatgactcaatttcttttcttgttgaaaaaaaattagatcttttttctagtacagtaaataataaataat

SEQ ID NO: 259264 - DNA, 601 bp, Unknown
  Bacterial polypeptide expressing nucleotide sequence isolated from the Sargasso Sea
ctgaagaatcagaagaaaaagaagaagctacagaataactatcctgtgcaaaaggtatttattcttggtatcggaaatccagaagaaaaatataacaataccaggcataacattggcaaagattgggttgaaaaaattgctaaagatcacgaactaactttcgtaaaaaaatcaaaattaaagtgtagtatttgtgaagtagagccccatgtttatttagtggtgccagatgtgtatgtaaatgaaagtggcaaagttgctgcattgctcaaaagatatctaaatgctaaacctgagcacattttagtattgcatgatgatattgatatacagattggtgatttaaaatttaaatctggtggcggagatggtggtcacaatggattaaaagatttatctaatgttattggaaaagatttcaaaagattaaaaattggtgttagccatcccggtagaaaaaatgaagttacaaattgggttttaggaaagttcaaaccagcagagactcaacttcttgaagagttatataaaaaagttatggttcacaaaaataaaatatttagccttgaaatagaaaatcttcaaaacttggtaaattaat

SEQ ID NO: 259265 - DNA, 562 bp, Unknown
  Bacterial polypeptide expressing nucleotide sequence isolated from the Sargasso Sea
tatgcttttatttgtaggtttaggtaatccaactccagatagtgaaaataatagacataatgttggttttaaaattatagattccatcaataaaaagtttgggcttacgaaacaaaaaccaaaattcaaaggtttgttaacaactggtaatattgatagtaaaaaagtttatgccatcaagcccttaactttcatgaataactctggaatatgtattagagaactaattgaatattttaaaattgaacctgaaaatgtaattgtttttcacgatgatcttgatgttgaatttggaaaaataaaagcgaaatttggtggatcaagtgccggccacaatggaatatcctctattgataaatttattggaaaagattactcaagagtaagaattggtataggaaaaccaaaaggacctattgaagtatctgattatgttttgcaaaattttgatgatgaagaaattatgggtgtagaaaaaatatccaaaaatataactgagtcactttcgatacttgtagaaaaaaaattagatttattttcaagcacagttaataataaataa

SEQ ID NO: 259266 - DNA, 562 bp, Unknown
  Bacterial polypeptide expressing nucleotide sequence isolated from the Sargasso Sea
tatgctcttattcgtaggtctaggaaatccaaatccaaatagtgaaaacaacagacataatgtaggattcaaaattattgatgccataaatcaaaaatttaaactatcaaaacaaaaaccaaagtttaaaggcttgctaacaacaggtaatattaatgataaaaaagtttatgctattaaaccactaacatttatgaataactcaggagtttgtattcgtgagttaatagaatattttaaaattgatgcgtcagatgtaattgtttttcacgatgatcttgatattgattttggaaaaattaaagctaaatttggtggatcaagtgctggtcacaatggcatcacatcaatagataagtttataggaaaagaatattcaagaataagaataggtattggaaaaccaacaacaaaatctgaaatagtagatcatgtattaaatgattttgatgaggaagaaataaaacaattagaaaagatcacaaatagtataacaacttcattgccgatcttacttgataaaaaattagatcttttttccagcactgtgaacaatcagtaa

SEQ ID NO: 259267 - DNA, 514 bp, Unknown
  Bacterial polypeptide expressing nucleotide sequence isolated from the Sargasso Sea
tctgaagaatcagaagaaaaagaagaagctacagaataattatcctgtgcaaaaggtatttattcttggtatcggaaatccagaagaaaaatataacaataccaggcataacattggcaaagattgggttgaaaaaattgccaaagatcacgaactaactttcgtaaaaaaatcaaaattaaagtgtagtatttgtgaggtagagccccatgtttatttggtggtgccagatgtgtatgtaaatgaaagtggcaaagttgcttcattgctaaaaagatatcttaatgctaaacctgagcaaattctagtattgcatgatgatattgacattcagattggtgatgcaaaatttaaatctggtggcggagatggtggtcataatggattaaaagatttatcaaatgttattggaaaagatttcaaaagattaaaaattggcgttagccatcccggtagaaaaaatgaagttacaaattgggttttaggtaagtttaaaccagcagagactcaactt

SEQ ID NO: 259268 - DNA, 293 bp, Unknown
  Bacterial polypeptide expressing nucleotide sequence isolated from the Sargasso Sea
tatgtttttaatatgtggtctgggaaatccaggtaaagaatacattaatacaagacacaatattgggtttaacctagtcgataaacttgaaagcttttataattttgaaccatttaaaaaagacactaaaaaagaaattttcaaaggtattattgctaataatgcatgtttattaatgaaacctctaaattttatgaatttatcaggacaaccaattagggatgtaattagtttttataaaatagaaaaaaataaaatatttataattcacgatgatttagacttagaattag

SEQ ID NO: 259269 - DNA, 562 bp, Unknown
  Bacterial polypeptide expressing nucleotide sequence isolated from the Sargasso Sea
tatgcttttattcgtaggattaggtaatccaacacctgacagtgaaaacaatagacacaacgttggattcaaaattatagacactatcaataaaaaatttagtctctcaaaacaaaaacccaagtttaaaggacttttaacaactggaaatattggagacaaaaaagtttatgcaattaagccattaacattcatgaacaactctggagtttgtattagagaattaattgagtattttaaaatagatgctgaagacgttatagtatttcacgatgatcttgatatagaatttggtaaaattaaagctaaatttggtggatcaagtgcaggccataatggaatcgcttctattgataaattcataggtaaagattactcaagggttagaatcggaattggaaaaccaaaaaatggtatcgaagttgcagattatgttttgcaaaattttgatgaggatgagtcaattggtattgaaaaaatatctaaagatataacagagtctatttctattcttgttgaaaaaaaattagatttattttcaagtgctgtaaataacaaataa

SEQ ID NO: 259270 - DNA, 601 bp, Unknown
  Bacterial polypeptide expressing nucleotide sequence isolated from the Sargasso Sea
ctgaagaatcagaagaaaaagaagaagcttcagaataattgctctgtgcaaaaggtatttattcttggtatcggaaatccagaagaaaaatataaaaataccaggcataacattggcaaagattgggttgaaaaaattgccaaagatcatgaactaactttcgtaaaaaaatcaaaattaaaatgtagtatttgtgaggtagagccccatgtttatttggtgtcgccagatgtgtatgtaaatgaaagtggcaaagttgcttcattgctcaaaagatatctaaatgctaaatctgatcacattttagtattgcatgatgatattgatacacagattggtgatgcaaaatttaaatctggtggcggagatggtggtcacaatggattaaaagatatatctaatgttattggaaaagatttcaaaagattaaaaattggcgttagccatcccggtagaaaaaatgaagttacaaattgggttttaggtaagtttagaccagcagagactcaacttcttgaagaattatttaaaaaagttatggttcacaaagataaaatatttagccttgaaatagaaaaccttcaaaacttggtaaattaaa

SEQ ID NO: 259271 - DNA, 568 bp, Unknown
  Bacterial polypeptide expressing nucleotide sequence isolated from the Sargasso Sea
atgtacaacctctgtattattggattaggtaatcctagtccaaaatatgataactctcgacataatattggaaaagactgggtaattaatgtatccaaaaaattctttaaagaatttaaagaaaagtcaaaacttgaagcactgattggagaatcacatgataataaaattttatgggttgtccctacaaattacatgaatgattctggaaagacaatttcaaagttattaaggtcaactaatatagaaattcaaaattgtattgttattcatgatgacttagacctaaatctaggctcaattaggcttaaagaaggtggaggacacggtggtcataacggtcttaaggatataatagaaaaaactggaaaaaacaatttcaatagaattaggataggtataagccatccgggtataaaagaagaagtaacaaattgggttttaaataaattctcgccagaagaaaaaattgcaatcaataacgcctatgttgcttttgagcaagtatttgaactgcttattgaaaaaaaatatcaagatgtacaaaaaatccttcatacaaaataaa

SEQ ID NO: 259272 - DNA, 556 bp, Unknown
  Bacterial polypeptide expressing nucleotide sequence isolated from the Sargasso Sea
atgattgcattaatcggattagggaatcctggtacaaagcataaaaataatagacataatgtgggctatttatttatcgatcagcttttacaagatcatgatgatgtaatgagagaaaagaaatttgatggggagttggcgtcgtttcttattggaaagaaaaaaatatacacctttaaatccaatgattatatgaatgagtgtggtaaaagtattgcaacttttttaaactttttcaaaattaaatcaaatttaacttatgttattcatgatgatctagatatcactttaggaaaaataaaaatcaagttggggggttcttccgcaggtcataatgggctcaaatcaatagatagtaaaattggaaaaaattataatagaataagaataggtataaatcatccgggcaataaagacatggttaataaacatgtattaagtaattttaaaaaaagtgaattagaagttattaatgaattaaatataaaaatgtctgaaaacataaaagtactattggatggagaaaaatccaaatttattaataatttaaaataat

SEQ ID NO: 259273 - DNA, 571 bp, Unknown
  Bacterial polypeptide expressing nucleotide sequence isolated from the Sargasso Sea
cttgttagatctttgtatagtcggtctaggtaatccaggagataagtataatcattccagacataatgctggctatgactatttagatttaatctgcaatcaactaagcgttgaattaaaaaaatcaaacaaaatagaaggccttcttggtgaaacaacttataaagatctaaaaattggttttgttaagccaaatgaattcataaataatagcggcagaactctaagtttaatcaaaaaatataaagttaaagaattaaatgatgttcttgttattcatgatgatatggatttagagcctggtgaagtaaagttaaagataggtggaggtcacagcggccatagaggacttaaggacattattaataaggtaggaaatgattttgtcagacttagacttggtattggtcatcctccagttaaagaggagacaaatgcctgggttatcaaaaaaccaactccaagtgaaaaagaaggacttaataacgctttcataaaagctaatgagtcacttgaccaactgctaaataaagaatggcttattgccatgaatgatcttcatacaaaatga

SEQ ID NO: 259274 - DNA, 577 bp, Unknown
  Bacterial polypeptide expressing nucleotide sequence isolated from the Sargasso Sea
ttgcttcatctttgtatcgttggtttaggcaacccaggcgataaatactcaaaaacaagacataatgctggttatgacttccttgacttaattgccgaagaattcaatgcagattttaagtacttaaagaaaattgatgcagattatgttgaaattgatttcgaagatcagaaaattgctttaataaaaccaagagaatttattaacagaagcggtagaacactgcaacttgtgaggaaatataaggttaaaaacactaaagatatattagtagtccatgatgatatggaccttgagccaggtgatgtaaagttaaagctatccggaggtcatgctggacacaatggactaagagatattttaaaggtaataggaaacgattttgtcagattaagatttggtataggacatcctcctaataaagatcagacagattcttgggtgataaagaaaccaaatcctcaagaaaaaaaagaaatggctaatgcatttgagagagctataaacaatatcgacaaaatcatgctcaaagactggatgattataatgaacgaccttcactctaatgagcattaaa

SEQ ID NO: 259275 - DNA, 413 bp, Unknown
  Bacterial polypeptide expressing nucleotide sequence isolated from the Sargasso Sea
tctgaagaatcagaagaaaaagaagaagctacagaataattatcctgtgcaaaaggtatttattcttggtatcggaaatccagaagaaaaatataacaacaccaggcataacattggcaaagattgggttgaaaaaattgccaaagatcacgaactaactttcgtaaaaaaatcaaaattaaaatgcagtatctgtgaggtaaaaccccatgtttatttggtggcgccagatgtcaatgtaaatgagagtggtaaagttgcttcattactcaaaagatatcttaatgctaaacccgagcacattttagtattacatgatgatattgatatacagattggtgatgcaaaatttaaatctggtggtggagatggtggtcacaatggattaaaagatttatctaatgttatggaaa

SEQ ID NO: 259276 - DNA, 526 bp, Unknown
  Bacterial polypeptide expressing nucleotide sequence isolated from the Sargasso Sea
tatgcttttatttgtaggtttaggtaacccaactccagatagtgaaaataacagacataatgttggtttcaaaataatcgactctattaataaaaaatttggcttatcaaaacaaaaaccaaaatttaaaggattacttacaacagggaatgttgcagatcataaaatttatgcgattaaaccgttaacatttatgaacaactcaggaatatgtattcgagaactcattgaatattttaaaattgatgctgaagatgtaattgttttccacgatgatttagatgttgaatttggaaaaattaaagcaaagtttggaggatcaagcgctggacataacggtatagcatccattgataaatttatcggtaaagattattcaagagtaagagtgggaattggcaaaccaaaagaaaatatggaagtaagcgattacgttttacaaaattttgatgaggatgaaatgatgggtttggaaaaaattacaaatgatattacagattccttttcgatattagtgaataaaaaa

SEQ ID NO: 259277 - DNA, 562 bp, Unknown
  Bacterial polypeptide expressing nucleotide sequence isolated from the Sargasso Sea
atgcttttattcgtaggtttaggtaaccccactccagacagtgaaaacaatagacataatgtagggttcaaaatcatagattctataaataaaaagtttgggctatcaaaacaaaagccaaaatttaaaggtttgcttacgactggaaacgtgggtgatcaaaaagtttatgctattaagcctctaacatttatgaataactctggaatttgtatcagagaactcattgaatactttaaaatagatgctgaagacgtaattgtatttcatgatgatttagatgttgagtttggaaagattaaagcaaaatacggtggatcaagtgcaggtcataatggaattgcatcaatcgataaatttattggcaaagaatattctagggtgagaattggaattggaaaaccaaaagagaatatagaagttggtgattttgtccttcaaaactttgatgaagatgaaatgccgggtatagaaaaaatttctaacaatattatagaatccatttcattgcttgttgataaaaaattagacttattttcaagcacagtaaataataaataat

SEQ ID NO: 259278 - DNA, 571 bp, Unknown
  Bacterial polypeptide expressing nucleotide sequence isolated from the Sargasso Sea
atgacaatttttgttggtcttgggaatcatgaaactaagtatcatagtactaaacataatgttgggtattgggtgttagacagttttgcgaaaaaatatggtttagagtttaagcctggtaaagggaattattttgttgcaaaaaaaggttctagttttatgctcataaaacccgcaactggtatgaataatagcggggctattattaatgaagtcttaagtttttacaaggcaaaaaaagaagatttggtaatcatttttgatgatgtagatctcccgcttggagaaataagatttcgtactgatggcggagacggatgtcacaatggaatgaaatctatcttacaatatgtatcaagcgataaagttaaaagattaaaagttggcattgcagcttctgattacaaaagaccttcagaaaaatatgttttaaagccatttaataagcgttttaatccattagttaatgaagttctgatttttgctaatgaagcaatgcaatcgcttttagacaatggtgaagaattcacaatgaataattataataatcaaactataggagtagcatagt

SEQ ID NO: 259279 - DNA, 571 bp, Unknown
  Bacterial polypeptide expressing nucleotide sequence isolated from the Sargasso Sea
ttgttagatctttgtatagtcggtctaggcaatccaggagataagtataatcattccagacataatgctggctatgactatttagatttgatctgtaatcaactaagcgttgaattaaaaaaatcaaacaaaatagaaggttttcttggcgaaacaacttacaaagatctacaaattggttttgttaagccaaatgaattcataaacaatagcggcagaactctaagtttaatcaaaaaatataaagttaaagaattaaatgatgttcttgttattcatgatgatatggatttagagcctggtgaagttaagttaaagataggtggaggtcacagcggccatagagggcttaaggacattattaataaggtaggagatgattttgtcagacttagacttggtattggtcatcctccagttaaagaggagacaaatgcctgggttattaagaagccaactccaagtgaaaaagaagggcttaataatgctttcacaaaagctaatgagtcacttgaccagttgctaaataaagaatggcttatcgccatgaatgatcttcatacaaaatgag

SEQ ID NO: 259280 - DNA, 562 bp, Unknown
  Bacterial polypeptide expressing nucleotide sequence isolated from the Sargasso Sea
atgcttttattcgtaggattaggtaaccccactccagacagtgaaaacaatagacataatgtaggtttcaaagtcatagactgtataaataaaaaatttggactttcaaaacaaaaaccaaaatttaaaggattgcttacaactggaagtgtaggagatcaaaaagtttatgcaattaagcctttaacatttatgaataactctggaatttgtataagagaacttattgaatactttaaaatagatgctgaagacgtaattgtatttcatgacgatttagatgttgagtttggtaaaattaaagcgaaatccggtggatctagcgcaggtcataacggaattgcatccatcgataaatttattggcaaagaatattcaagagtgagaattggaattggaaaaccaaaagagaatatagaagttagtgattttgtacttcaaaactttgatgatgatgaaatgctaggtatagaaaaaatttctaacaatattatagagtccatttcattacttgttgataaaaaattagacttattttcaagcacagtaaataataaataat

SEQ ID NO: 259281 - DNA, 505 bp, Unknown
  Bacterial polypeptide expressing nucleotide sequence isolated from the Sargasso Sea
aatgttggaaaagattggttaatagacatatctcaacaatactttaaagaatttcaaaataaaccaaaatatgaagctgaatttggtgaatcacataatgcagaaacattatggataaccccatcaaattttgtaaatgaatcaggaagaacaatctctaaaattttaagatctcataatttaaatacgaatatgtttttaattatccacgatgatttagatttagagcctggagaattgaaaattaaagaaggcggaggtcatggagggcacaatggtctaagagatataataaaaagaactggtaaaagtgattttattagattgagggtgggtatcggtcaccctggaatgaaaaatgaagtgactaattgggttttaaataaattctctccaaatgaaaaaaaatctatagataatgcttattctagatttgtagatgtatttgagctaattatcaataatcaattacaaaaagttcaaaaaattttacatacaaaataaa

SEQ ID NO: 259282 - DNA, 571 bp, Unknown
  Bacterial polypeptide expressing nucleotide sequence isolated from the Sargasso Sea
atgataatttttgtcggacttggtaatcatgaaactagataccataatactaaacataatgttggttattgggtgttagatagttttgcaaaaaaatatggtctagagtttaagcctgggaaaggaaattattttgttgcaaaaaaaggatctagttttatgctcatcaaacctacaactggtatgaataatagcggggctattattaatgaagtcttgaatttttataaggcaaaaaaagaagatctggtaataatttttgatgatgtagatcttccgcttggagaaataagatttcgtgctgatggaggagatggttgtcacaacggaatgaaatccgtcttacaatatgtatcaagcgataaagttaaaagattaaaagttggaatagcagcttctgattacaaaagaccttctgaaaaatatgttttaaaaccatttaacaagcgatttaattcattggttgatgaggtcttaatttttgcaaatgaagcaatgcagtcacttttagataatggtgaagaattcacaatgaataattataataatcaaactataggagtagcatagt

SEQ ID NO: 259283 - DNA, 562 bp, Unknown
  Bacterial polypeptide expressing nucleotide sequence isolated from the Sargasso Sea
atgcttttatttgttggattaggcaatcccactccaaatagtgaaaataacagacacaatgttggttttaaaattatagactcaatcaataaaaaatttggtctttctaaacaaaaaccaaaatttaaaggtttacttacaacaggcactatagctgagaaaaaagtttacgctatcaaaccactcacttttatgaataactcaggtgtatgcattagagaattattagaatattttaaaattgaggctgaaaatgttgtagtttttcatgatgatcttgatgttgaatttggaaaaataaaagcaaaatttggtggatctaatgccggccataatggtatagcatcaattgataaatttataggtaaagattattcaagagtaagagtaggcataggtaagccaaaaaaagaaatagaaatttctgactatgtacttcaaaacttcgaggatgaagaaattaataaattagagcttttaacaaataacattattaattcaatttcaattttaatcgaaaaaaaattagatttattttcaagtacagtaaataacaaataat

SEQ ID NO: 259284 - DNA, 400 bp, Unknown
  Bacterial polypeptide expressing nucleotide sequence isolated from the Sargasso Sea
actgaagagtcatagttctgtgtacaagctttgtatcatagggcttggtaatccaggatcaaaatataacaatactagacataacattggaaaagatttgttattaaatttatcaaagagttttgttgaagaatttaaaaataaatcaaagtttgaggctgatgttgcggaatcacataatggtgatattttatgggtagtaccagataattatgtaaataattctggtaaaactgtcataaaaattcttaaaaaaactagtttaaaaattacagacattttaataatacatgatgatcttgatcttgatataggtgaactaagattaaaggaagatggtggtcacggaggtcacaacggattgagagacatcataactaagcttggtgattataatttt

SEQ ID NO: 259285 - DNA, 601 bp, Unknown
  Bacterial polypeptide expressing nucleotide sequence isolated from the Sargasso Sea
gatgaatccggagaataacaaaactctatttgtcggtctctggaatccacaagataaatattcaaagacacgacacaatataggtgctgatattctgattcgtttttgtaagaaaaataatttagaattcaaactcgacaaaaatagtatttacaatttttcatttgccgaaattaatggatctaatgttgagattatcctaccgatggtctcgatgaacaatgctggagatgcactaaaaagttattttaaatataacaataaagaaaacacagaaatacttattgttcatgatgatattgatctggcattcgggcgtttaagaattaaaaaaggaagttcggatggtggtcataatggaattaaatcaacaaatagagttttaaatactgaggattattacaaactaaaagtaggagtagggagacctcctcaaggaattgacccagctgattttgtattatcaaagttttataatgaagaaaaggaagaggttgatttcttgatagaagattccgttgatattttaagtacctttctgaaggataaagaattagctattaaagatgcctctgagcgcagaattattgatgtgatttga

SEQ ID NO: 259286 - DNA, 571 bp, Unknown
  Bacterial polypeptide expressing nucleotide sequence isolated from the Sargasso Sea
aatgacaatttttgttggtcttggtaatcatgaaactaaataccataataccaaacataatgttgggtattgggtgttagatagttttgcaaaaaggtacggtttagaatttaagccagggaaaggaaattattttgttgcaaaaaaaggatccagtttcatgctcattaaaccaacaactggtatgaataatagcggagctattattaatgaagtcttaaatttttataaggcaaaaaaagaagatctggtaattattttcgatgatgtagatcttccccttggagaaataagattacgagctgatggtggagatggatgccacaatggaatgaaatctgtcttacaatatttatcaagcgataaggttacaagattaaaagttggaatagcagcctctgactacaaaagaccttctgaaaaatacgttttaaaaccatttaataagcgttttaatacattagtggatgaggttttaatttttgctaatgaagcaatgcagtcacttttagataatggtgcagaattcacaatgaataattataataatcaaactataggagtagcatag

SEQ ID NO: 259287 - DNA, 121 bp, Unknown
  Bacterial polypeptide expressing nucleotide sequence isolated from the Sargasso Sea
aatgttactttttgtaggtcttggtaatccttcccctaatagtgagaataaccgtcacaatatcggatttaaaattatagatgcaataaatcaaaaatttggtttatcaaaaacaaaaacc

SEQ ID NO: 259288 - DNA, 574 bp, Unknown
  Bacterial polypeptide expressing nucleotide sequence isolated from the Sargasso Sea
atgctcttacttgttggtttaggaaatccaggtccaaataatacaaataatagacacaatataggtttcaaaattattgatgcaataaattctcaattcagtttatcaaagcaaaaacctaaatttaaaggattattaacaacaggtaatattgaggataaaaaagtttatgctattaagcctttaacattcatgaataactcaggggtttgtattaaagaactaatcgattattttaaaattaatgcaaaagatgtaattgtttttcatgatgatatagatatcgatttaggaaaaattaaagctaaatttggtggtacaagtgctgggcataatggaattgaatcgatagataagtttattgggaaagattattcaagagtaagagtagggattggacgacctaaacaaaaaaacaaggtcaataatcatgttttggaagactttaatgagaacgaagaagaaatgataaaagatataacagagaatatagtaaaattagtacccactctaataaaaaaagaaattgacttattttcaagtaaagtaaatcaaaatctgaatgggatttaag

SEQ ID NO: 259289 - DNA, 562 bp, Unknown
  Bacterial polypeptide expressing nucleotide sequence isolated from the Sargasso Sea
atgttgttactcgtaggtttgggcaatccaaccccaaacagtcataataatcgtcataatataggttttaaagttgtagatgcgataaatcaaaaatttggtctttcgaagcaaaagccaaaatttaagggtttacttacaacaggtaatatcggggaaaagaaaatttatgctatcaaacctctaactttcatgaacaactctggaatatgtatcagagaattgcttgaatatttcaaaatagatgcagaggatgtcattgtttttcatgatgatctagatgtagagcttggaaaaataaaggcaaaatttggtggatcaaatgcaggtcacaatggagttgcttcaatagataaatttattggaaaagactattcaagagtgaggattgggattggaaagccagagaacaaaatgtctgtatcagactttgttttaaatgatttttctgatgatgagcaagaacacttagaaaaaattactcataatataatagactctattgctattttaatagataaaaaattagatttattctcaagcaaagttaataataattaaa

SEQ ID NO: 259290 - DNA, 253 bp, Unknown
  Bacterial polypeptide expressing nucleotide sequence isolated from the Sargasso Sea
tatgcttttacttgtaggattaggtaatccaaccccagatagtgaaaacaacaggcataatattggtttcaaaattatagatgctataaataaaaagtttggatttttaaaacaaaaaccaaaattcaaaggactactcacaactggaaatgttggggaccaaaaaatttacgctataaaacctttaacctttatgaataattctggtatttgtattagagaattaattgaatatttcaaaaatagactctga

SEQ ID NO: 259291 - DNA, 562 bp, Unknown
  Bacterial polypeptide expressing nucleotide sequence isolated from the Sargasso Sea
atgattctatttgtaggtctcggaaatccaacaccagataatgaaaataatagacacaatattggtttcaaagttatagatgcaattaataaaaaatttcaattgtcaaaacagaaacctaaattcaaaggattgcttaccactggaaaaattggagaaaaaaaaatatatgcaatcaaacctctaacttttatgaataattcaggtatttgcataagagaattaattgagtattttaaaattgatgcagaagatgtatttgtattccatgacgacttagatattaatgttggtaaggtaaaggcaaaatttggtggttcagatgctggacataatggaattgcttctttagataaatttattggcaaagagtattcaagaattcgaattggaataggtagaccaaatggaaagattgctgttgctgatcatgttttaaatgattttaacgatgaagaaaaagaactattagaattaataactaaaaatatacttagcagtattcagatacttttagatagaaaactagaattgttctcaagcacagtaaataataaatgag

SEQ ID NO: 259292 - DNA, 562 bp, Unknown
  Bacterial polypeptide expressing nucleotide sequence isolated from the Sargasso Sea
tatgattttgctcgtaggtttaggcaacccaactcctgacagtaatgataataggcacaatataggatttaaagttatagatgcaataaacaataaattttcgttatcaaaacaaaaaccaaaatttaaaggactcttaactacaggcaatatttcaaataaaaaggtttatgcaataaagcctttaacttttatgaataattctggaatttgtattagagaattaattgagtattttaaaataaattctgaagacgtaattgtttttcatgatgatttagatttagattttacaaaaataaaagcaaaatttggaggatctagtgctggccataatggaattgcatcaatagataaatttataggaaaagaatattctagagtgagaataggaatcggtaaacctgattcaaaaatagatgtatcggactttgttttaacaaattttactgatgaagaaaaagtaaaattagaaaatgtaatacaaaatataattgagtcaattccaatactaattgataaaaaattagatttattttctagcactgtgaacaatcaataa

SEQ ID NO: 259293 - DNA, 397 bp, Unknown
  Bacterial polypeptide expressing nucleotide sequence isolated from the Sargasso Sea
tatggtttcaatgaacaattctggggatgcactaaaaagttattttaaatacaataatcaagaaaatacagaaatagttgttgttcacgatgatattgatcttgcattcgggcgtttaagaattaaaaaaggaagttcagatggtggtcataatggtatcaaatcaacaaatagagttttaaatgctgaggattattacaaattaaaagtaggagtaggaagacctccacaaggaattgacccagctgattttgtattgtcaaagttttataatgaggaaaaggaagaggttgaattcttgatagaagattccgttgatattttaaatactttcttaaaggataaagaattagccattaaagatgcctcggagcgcagaattattgatgtgatttga

SEQ ID NO: 259294 - DNA, 448 bp, Unknown
  Bacterial polypeptide expressing nucleotide sequence isolated from the Sargasso Sea
tatgatttctgaagataatcctccagcattgattgtaggattaggtaatcctgatagtaaatttcttaatacaagacataacataggcttttggtttattgactctttggttgatagcctacgaatccacttcaacgataacttgaaaaaaggtttttgtgatactgattatcaatcagagggtatagatataaaattacttaaaccaatgacttttattaatgatagcgggacgcctttgaaaaacttcattaaaaataaaaatatcgtaccatctcagataattgtcgcttacgatgatttagatttagccgccggcaaaattagactcaaattttcaggtggaagcggcgggcacaatggtatcaaagatattatagaaaaaatcggtacaaaagatttttggagattaaaaataggaatcggtaagcctgcgcataaagatgat

SEQ ID NO: 259295 - DNA, 265 bp, Unknown
  Bacterial polypeptide expressing nucleotide sequence isolated from the Sargasso Sea
gggtggcggccatgctggtcacaatggtttaaaagacatcaccagtaaactgggcaataatgccaatttttatcgcctgcgactgggtattggccatcctggccacaaagatttagtcacaggttatgtgctgggcaaagcaccgcaatccgaacagaagctgatcgacgaagctctggatgaatcgatgcgttgttttgagctctggttaagcgatggcttaattaaagcgcagcacaggttacatagttttagcgcggcttaa

SEQ ID NO: 259296 - DNA, 435 bp, Unknown
  Bacterial polypeptide expressing nucleotide sequence isolated from the Sargasso Sea
tatgcttttactcgttggattaggaaatccaggatctaactataccaatactcgacataatataggtttcaaaataattgatgcaattaatgcacactttaagttatcaaaacaaaaacctaaatttaaaggcttattaacgacgggaaatatagatgaaaagaaaatttatgcgatcaaacctctaacttttatgaataattctggcacagccatcaaagagttaatagattattttaagattgatgctaaagatgtaattgtgttccatgacgatatggatattgattttgggaaagtcaaagctaagtttggaggcagtagcgccggacataatggaatagagtcaattgataaattcattggaaaggattattcgagagtacgtattggaataggtcatcctaagcaaaaaaagaaagtaaataatcatgt

SEQ ID NO: 259297 - DNA, 562 bp, Unknown
  Bacterial polypeptide expressing nucleotide sequence isolated from the Sargasso Sea
atgttgttactcgtaggtttgggcaatccaaccccaaacagtcataataatagacataatataggttttaaagttgtagatgctataaatcaaaaatttagtctttcaaagcaaaagccaaaatttaagggtttacttacaacaggtaatatcggggaaaagaaaatttatgctatcaaacctctgactttcatgaacaactcaggaatatgtatcagagaattgcttgaatatttcaaaatagatgcagaagatgttattgtttttcacgatgatttagatgtagagtttggaaaaataaaggcaaaatttggtggatcaagtgcaggtcacaatggagttgcttcaattgataaatttattggaaaagactattcaagagtgaggatcgggattggaaagccagagaataaaatgtctgtatcagactttgttttaaatgatttttctgatgatgaacaagaacacctagaaaaaattactcataatataatagactctattgctattttgatagataaaaaattagatttattctcaagcaaagttaacaataattaaa

SEQ ID NO: 259298 - DNA, 562 bp, Unknown
  Bacterial polypeptide expressing nucleotide sequence isolated from the Sargasso Sea
atgcttttatttgtaggcctaggtaatccaacacccaactctgaaaacaatagacataatattggatttaaaattattgatgcaattaatcaaaaatttgggctctcaaaacaaaaacctaaattcaagggtcttttaactactggaacaattaatggaaaaaaagtttatgcaattaaaccattaacattcatgaacaattctggagtttgtattagggagcttattgaatattttaaaattgatgcagataatgtaatagtttttcatgatgatttagatattgattttggaaaaattaaaacaaaatttggaggatctagcgctggtcacaatggaatagaatcaattgataaatttattggaaaagattattcaagagtaagaattggcattggtcatccaaagagtaaagtagaagtagccgatcatgtgctgaatgattttaatgatgaggaaaaaatagaacttaatacgataacaaaaagtattactgaatctctaccaattttattagataaaaaattagatcttttttcaagcacagtaaataataaataaa

SEQ ID NO: 259299 - DNA, 601 bp, Unknown
  Bacterial polypeptide expressing nucleotide sequence isolated from the Sargasso Sea
atgaatcaggagaataataaaactctcttagttggtctctggaatcctcaatcaaaatacttaaaaacaagacataatattggtgcggatattttagaaaagttttgtaataaaaattctatagaagtgaaattagacaaatcaggaagttttaagattggtcaagcatctattgaaaattcaaaaatagatatcatttttccgatggtttcaatgaacaactctggcgaggctctcaaaacttatttaaaatacagcaatgttgaagcctcagatatattagtgattcacgatgatatagatctcggttttggtagattgcgtttaaaaagtggaagttctgatggaggacacaacggtattaagtccataaattcttacttgcaatctaacgaatattttagattgaaagttggagttggtagaccccctaaagaagttaaccccgcagatttcgttttatctaggttttataataatgaagaagaggaagttgaatttttgatagaagattctgtagatattattgaaatgtttttaaatgacagagagtctgctgtgaaagcagcttctgagcgaagaataattgatgtgatttaat

SEQ ID NO: 259300 - DNA, 347 bp, Unknown
  Bacterial polypeptide expressing nucleotide sequence isolated from the Sargasso Sea
aatgttgttactcgtaggtttgggcaatccaaccccaaacagtcataataatagacataatattggttttaaagttgtagatgcgataaatcaaaaatttggtctttcaaagcaaaagccaaaatttaagggtttacttacaacaggtaatattggggaaaagaaaatttatgctatcaaacctctgactttcatgaacaactcagggatatgtatcagagaattgcttgaatatttcaaaatagatgcagaagatgtcattgtttttcatgatgatctagatgtagagtttggaaaaataaaggcaaaatttggtggatcaagtgcaggtcacaatggagttgctt

SEQ ID NO: 259301 - DNA, 233 bp, Unknown
  Bacterial polypeptide expressing nucleotide sequence isolated from the Sargasso Sea
gatgccggctttgagattgattgtcggattaggtaaccccggaaacgagtacttaaacaccagacacaatgttggggcggagtggttggatggccttgcgacatcatatgatgctcagtttaaggaaaactcaaagttagaaggttggtttgctaaagcgaagatcgaaggcattgaatgtctgttgcttaagcctatgacttatatgaacgggagcggttcatcggtaaggt

SEQ ID NO: 259302 - DNA, 359 bp, Unknown
  Bacterial polypeptide expressing nucleotide sequence isolated from the Sargasso Sea
gggtatttcaattaacaaaattctaaaaaccaataattttgatcttaaacaaataataattattcatgatgatttagatctacctcttggcactttgaaattaaaaattggtggtgggcatggtggacacaacggattaaaaagtatcatatcttacgcaggtaaatcatttataaggctaagagttggaattggtcatcctggcagtaaagttgatgtaacaaattgggttttaggcaaatttaaaaccgctgaaaaagacttagttataaaaagctattacgagttcaatcatatcattgagctcttgagcaacaacgatattcatacagcacaattaaaactgcatacagaataaa

SEQ ID NO: 259303 - DNA, 301 bp, Unknown
  Bacterial polypeptide expressing nucleotide sequence isolated from the Sargasso Sea
atgcttttacttgttggattaggaaatcctggctctaattatacaaatactcgacataatattggttttaaaataattgatgcaattaacgctcattttaaactttcaaaacaaaagccaaaatttaaaggattgctcacaacaggtaacattgatgaaaaaaaaatttacgcaataaaaccattaactttcatgaacaattctggaacagccatcaaagaactgatcgactattttaaaattgatgcgaaagacgtaatagtttttcatgatgatatggatatagatttggaaaaataaa

SEQ ID NO: 259304 - DNA, 331 bp, Unknown
  Bacterial polypeptide expressing nucleotide sequence isolated from the Sargasso Sea
atgttattattagtaggtttaggaaatcctggtccaaataacaccaacaacagacataacattggtttcaagataattgatgcaataaatcaacaatttaatttgtccaagcaaaaacctaaatttaaaggattattaacaaccggtaatataaataataaaaaagtttatgcaatcaaacctctgacttttatgaataattcaggaacatgtattagagaattaatagagtacttcaaaattgatgcgaaagatgtttttgtttttcatgacgatatggatatagatttaggaaaagtaaaagctaagtttggtggtagtagcgcagggc

SEQ ID NO: 259305 - DNA, 535 bp, Unknown
  Bacterial polypeptide expressing nucleotide sequence isolated from the Sargasso Sea
tatgctgttgtttgtaggtttaggtaacccaactccaaatagtcaaaataataggcacaatattggttttaaaatagttgatgctataaatttaaaatttggtctatctaaacaaaagccaaaatttaaaggtttgctaaccacaggaaatattaaagaaaaaaaaatatatgcaataaaacctttaacatttatgaataattcaggaatatgcataagagaactgatagaatattttaaaattgaagcagaagatgtaattgtctttcatgatgatttagatatcgaatttggaaaaataaaagcaaaatttggtgggtctgatgcgggtcataatggtatagcatcattagataaatttattggaaaagattactcaagggtaagaataggaataggaaaaccaaaagaaaaaatttctgcagctgattatgttttaaatgatttcagtgaggaagaaaaagaaaacttagaaaagattacaaataatattattgaatcaatatcaatattaattgacaaaaaattagaacta

SEQ ID NO: 259306 - DNA, 434 bp, Unknown
  Bacterial polypeptide expressing nucleotide sequence isolated from the Sargasso Sea
tatgaaaactaataaatggcttattattggattagggaacccagaaattaaatatgaaaataataggcacaatataggctataaattagtcgattatattttaaaaaagaatgaaacagaaaaaataaaaaataaatatagtcaactaaacaaattaattttagaaggcaatttaatttaccttgctaaaccttttttttatataaatgagtcagggatcccagtaaagaaattggttgatgaatttagtataaatttaaataatattttaataattgttgatgatatgaatcttgatataggaaatataagaattagagagaaaggtaaagatggtggacataatgggttgaaatctattgaatattatcttaacactaatgaatatccgagattaagaattggaataggaagcccaaatagtaagaaagatc

SEQ ID NO: 259307 - DNA, 418 bp, Unknown
  Bacterial polypeptide expressing nucleotide sequence isolated from the Sargasso Sea
aatgcttttacttgttggattaggaaatcctggctctaattatacaaatactcgacataacattggttttaaaataattgatgccattaacgctcattttaagctttctaaacaaaagccaaaatttaaaggactactcacaacaggtaatattgatgaaaaaaaaatttacgcaatcaaaccattaactttcatgaacaattctggaacagccatcaaagaactgattgactattttaaaattgatgcgaaagacgtaatagtttttcatgatgatatggatatagattttggaaaaataaaagctaaatttggagggacaagcgcggggcacaacggtatagagtcaatagataaatttataggcaaggattattctagagttaggataggtatcggtcatcaaaacaaaagaaga

SEQ ID NO: 259308 - DNA, 580 bp, Unknown
  Bacterial polypeptide expressing nucleotide sequence isolated from the Sargasso Sea
atggataattggataattttaggagtaggcaatccaggggataaatatgcaaatacaaagcataatgtaccttggtggatactagacaatttgcaaaaaaaattatcactttacaaaaaatatcaaaaaaaagaaaaaaactacttagaagtgagatttgatcttgatgaatatagtatttatacgatataccctactacttttgtaaataattcaggcttagctataaaagatcttcttgataaggataaattttctctagataaaacaattgttatatcagatgatataaacctagaagaaggaagaataagaataagaagaaaaggaagtagtgggggtcacaacggattaaaatctataattaaccatcttggaactgaaaattttgttcgattgagagttggtatcggtaagccacatcaaaatgaagatcaaataaagtatgtattatcaaaagtaaaaaatgaaaaattagtaaataaatcttgccaagatgcttcagatgcatgcataaatataattgaaaatggtataactaaatctatggaaaaatttaatggagaaatcgatgtctaaa

SEQ ID NO: 259309 - DNA, 562 bp, Unknown
  Bacterial polypeptide expressing nucleotide sequence isolated from the Sargasso Sea
tatgtatttatttgtaggtttaggtaatccaacgccaaatagtcaagataatcgtcacaatattggtttcaaaataattgatgcgataaatcaaaaatttaatttatcgaagcaaaaacccaaatttaaaggactgcttacaacaggaaatgtagaaaataaaaaagtttatgcaattaaaccattaacatttatgaataattcgggaatatgtataagggaactacttgaatattttaaaatggaggctcaaaatgtttttgtttttcatgatgatctagatattgattttggaaaaattaaagcaaagtttgggggctcaagcgctggtcataacggaattgagtctatagataaatttattggaaaagaatattcaagagtaaggataggaataggtaagcctgaaaataaaatgtcagtttcagattttgttctagataattttaacaatgaagaaaaggagatactagaaattataacaagtaatatagtcgaatattttccaattttgttagacaaaaaattagatttattttcaagtactgtaaataacaaataa

SEQ ID NO: 259310 - DNA, 601 bp, Unknown
  Bacterial polypeptide expressing nucleotide sequence isolated from the Sargasso Sea
atgaactcaacaaacaatcctccattattgattgttggcttaggaaacccggatcctaaataccttaaaactaggcataatattggattttggttcttggatttattagctgataagtataatttatcattcaatgataacttgaaaaaaggttatttagattcaacttatcaagacgataagtccacaattaagattttgaaaccaatgacttttataaatgatagcggttctcccttagtaaaatttattaagaatacaaatataagacctaacaatataatcgtagcttatgatgatttagacttgtcacccggcaaggtaagattacgattttcaggaggcagcggcggtcataacggagttaaagatataatagaaaaaattggaacaaaagatttctggagactaaagattggaattggcaaaccattgcataaagatgaggttgtatcttatgtactgggtaaaccttcacctgaagacagagagagtataaattctggtatcaataatatattaactaactcaaaagacattatttctgggaattacacgaacttcatgaacaacattaatggtgatagtaatggggtttaag

SEQ ID NO: 259311 - DNA, 212 bp, Unknown
  Bacterial polypeptide expressing nucleotide sequence isolated from the Sargasso Sea
tatgcttttacttgtaggattaggcaatccaaccccagatagtgaaaacaataggcacaatattggtttcaaaattattgatgcaataaataaaaaatttggactttcaaaacaaaaaccaaaattcaaaggacttctcacaactggtaatgtgggagaacaaaaagtttacgcaattaaacctttaacctttatgaacaattctggaatat

SEQ ID NO: 259312 - DNA, 172 bp, Unknown
  Bacterial polypeptide expressing nucleotide sequence isolated from the Sargasso Sea
atgcttttacttgtaggtttaggaaaccctggtcccaataatacaaacaacagacataatattggtttcaaaatcatagatgcaataaactctgaatttagtctttcaaaacaaaaacccaaatttaaaggtcttttaacaactggaaatattcaagacaaaaaagtttatg

SEQ ID NO: 259313 - DNA, 362 bp, Unknown
  Bacterial polypeptide expressing nucleotide sequence isolated from the Sargasso Sea
tatgtttttaatttgcggactgggtaaccctggtaaaaaatatgaaaatactaggcataatattggttttaagtttgtagacaaaataataaatcaattcgaacttaacaaattaaaaatagataaatttaaagaattatattctggagaaattaataattttaaaattttaattattaaaccacttacatttatgaatttatcaggccagcctattcaagaaattgtgaatttttataaaattaaattagataatgtatttgtagttcatgatgatcttgatttagattttggggaaaataaaataaagcaaggtggaggaaacggaagtcataatggtttatctagtattgatgattgtt

SEQ ID NO: 259314 - DNA, 517 bp, Unknown
  Bacterial polypeptide expressing nucleotide sequence isolated from the Sargasso Sea
tatgctattgttagttggtttaggaaatccaggtccgaataacgtaaataacagacataatattggttttaaaataattgacgctattaatcagcaatttagtttgtcaaaacaaaaaccaaaatttaaaggattacttacaacaggtaatataaataataaaaaagtttatgcaattaaacctctaacttttatgaataattcaggaacatgtatcagagagcttattgaatactttaaaatcgatgcgaaagatgtttttgtatttcatgatgatatggatattgacttaggaaaagtaaaagcaaaatttggcgggagtagcgctggccataacggaatagaatctattgataaatctattggaaaagattactcaagagtaagggttggcataggtcacccaaagactgataaaaaagtcaatacgcacgttttagaagattttagtgacaatgaggaagaacgaattcaaaatattactgagaatattgttaagcttttaccaaccttatag

SEQ ID NO: 259315 - DNA, 571 bp, Unknown
  Bacterial polypeptide expressing nucleotide sequence isolated from the Sargasso Sea
atgcttttgctagtagggttaggaaatccgggaccaaataatttaaataacagacataatattggttttaaaatcatcgacgcaattaaccagcagtttaacttatccaagcaaaaacctaaatttaaaggtcttttgacgacaggtaatattaataataaaaaagtttatgccatcaaacccttaacctttatgaataattcagggacatgtattagagaactgatagaatattttaagatcgatgcaaaagatgtttttgttttccatgatgacatggatattgatttaggaaaagtgaaggcaaaatttggtggtagtagtgctggtcataatggaattgagtcgatagacaaatctattggaaaagaatactcaagagttagaattggtataggtcacccaaaagaagagaagaaagtaaataatcatgttttagaagacttcaatgaaactgaggaagagaaaattcaagacattactgaaaatatcgtaaaactcataccaactctaatagataaaaaaattgatacattttctagcaaagtaaatcagaatcttaatgggattt

SEQ ID NO: 259316 - DNA, 487 bp, Unknown
  Bacterial polypeptide expressing nucleotide sequence isolated from the Sargasso Sea
atgttgttgtttgtaggtctaggtaacccaaccccaaatagtcaagataataggcataacattggctttaaaattgttgatgcaataaatttaaaatttggtctttcaaaacaaaaaccaaagtttaaaggtttgctaactacaggaaatataaaagaaaaaaaaatttatgccataaaaccattaacttttatgaataattctggaatatgtataagagaactattagaatatttcaaaattgatgctgaagatgtaatcgtttttcatgatgatttagacatagagtttgggaaaataaaagcaaaatttggtggatccagtgcaggccataatggtatagcatcaatagacaagtttattggaaaagattattcaagagtaagaataggaataggaaaaccaaaagataaaatatcagttgaagactatgtgctaaatgatttcaatgatgaagaaaaagaaaacttagaaaaaattacaacta

SEQ ID NO: 259317 - DNA, 562 bp, Unknown
  Bacterial polypeptide expressing nucleotide sequence isolated from the Sargasso Sea
tatgttgttgcttgtaggtttaggaaatccaacccccaatagtctaaataataggcataatattggttttaaaatagtagatgcaataaatcaaaaatttggcctttcaaaacaaaaaccaaaatttaaaggcctactcacaacaggaaatattaaagaaaaaaaaatatatgcaataaaacctctaacgtttatgaataattctggaatttgtgtaagggaattattagaatatttcaaaattgatgcagaagacgtaattgtttttcatgatgatttagatgttgagtttggaaaaataaaggcaaaatttggaggatcaaacgcaggtcataatggtatagcatcaatagataaatttattggaaaagattattcaagagtaagaataggaattggaaaaccaaaagataaaatacctgtggctgactatgtgctaaacgacttcagcgaagaagaaaaagaaaatttagaaaaaattataaataatattatcgattcaatatcgatattaattgataaaaaattagaacttttctccagcaaagtaaataattactaa

SEQ ID NO: 259318 - DNA, 302 bp, Unknown
  Bacterial polypeptide expressing nucleotide sequence isolated from the Sargasso Sea
catgttattatttgtaggattaggcaacccaacccctgacagtcaaaacaaccgtcacaacattggtttcaaagtcattgatgcaataaatcaaaagttcggattatcaaaacaaaaaccaaagtttaagggattattaaccacaggtaatattggtgataagaagatttatgctataaaaccactaacttttatgaataactctggaatatgtattagagagcttattgagtattttaaaatggatgctgcagatgtaattgtgttccatgatgaccttgatattgatgttggaaaaatta

SEQ ID NO: 259319 - DNA, 607 bp, Unknown
  Bacterial polypeptide expressing nucleotide sequence isolated from the Sargasso Sea
atgccggctttaagattgattgtcgggttaggtaaccccggaaacgaatacctaaataccagacacaatgttggggctgagtgggtagatggcctagcaacatcatatgatgcccggtttaaggaaaactcaaagttagaaggttggtttgctaaagcgatgatcgaaggcattgaatgcctgttgcttaagccgatgagttatatgaatgggagtggttcatcggtaaggttggccgcgcgctacttccaaatccccttagatgcaattctggttgctcacgatgagatggctttcaatccaggtaccgttcgaattaagctgggaggaggggcaaacggacacaacggattgagaagtttattttctgaattgagcaacaatcgcgaattttataggttgaggatcggggttgggcacccgggtgacgcttcgaaggttacaccttatctcaccagatataagattccgccagacgagcaactatcaattgccaatgcgcttgatttttcacctactttaatgagtgaaatagttaatgctgactgggagaaagcaatgacccgattgcattctgagccaacaagcatcaataggtcgttatagt

SEQ ID NO: 259320 - DNA, 331 bp, Unknown
  Bacterial polypeptide expressing nucleotide sequence isolated from the Sargasso Sea
atgtttttatttgttggactaggtaatcccacgccaaattcagagaacaatagacataatattggtttcaaaataattgatgctataaactcaaaatttaagttatcaaaacaaaaacctaaatttaaaggtctattaacaactggaaatatcaacgaaaaaaaagtttatgcgataaagccattaacatttatgaataactctgggatctgtataagagaacttatagagtattttaaaattgaagctgaaaatataatagtctttcatgacgatttaaatattgactttggtaagattaaaacaaagttggaggttctagtgcgggtca

SEQ ID NO: 259321 - DNA, 415 bp, Unknown
  Bacterial polypeptide expressing nucleotide sequence isolated from the Sargasso Sea
aaagaagatagttatcataaaaccaaataattatgtaaacaactcaggaagatcattattgtattggcaaaaaaaagaaaaagtttcgcctgaaaaaattctggttgtttgtgatgatttaaatttattttttggaaatattaaaataaaaccaaatggtacatctggaggtcataatggtttaaaagatattgaagctaagcttggaacctcaatatatcctcgtttaagaattggaatatcaaataacaataagatttctaaatcagattatgttttaggaaagtggagcagctatgaaatgtccaatataaataatcttacaattagctcaattgagattattttctcatttattcaaactggtattgaagagacaatgaatctctacaacaagaaaaattttattaaatga

SEQ ID NO: 259322 - DNA, 358 bp, Unknown
  Bacterial polypeptide expressing nucleotide sequence isolated from the Sargasso Sea
aaaataaatttagatcaaattttcataatagtcgacgataaagatcttccccttggaaaaataagatttagaagaaaaggaagctcaggtggacataacggtcttaaaagcatcattgaacaatttcagacacaaaactttaagagaataagaattggtattggctcacctcctcaaatacaagggaaaaataatttcaataccatttcacatgtactaggaaatatttccctagaagaaaaatcaatattggataaagtgtataagagagtaatagaatccctcgaacaactaaacattaaaaaagaagaatatataattaatgagttaaattcttttgacaaagaccaaccttaaa

SEQ ID NO: 259323 - DNA, 433 bp, Unknown
  Bacterial polypeptide expressing nucleotide sequence isolated from the Sargasso Sea
tatgcttttactcgtcggattaggaaatcctggatccaactatacaaatactagacataacattggttttaaaataattgatgctatcaacgcacactttaaactttcaaagcaaaaaccaaaattcaaaggcttgctcactacaggtaatatagatgaaaagaaaatctatgccatcaaaccattaacttttatgaataattcaggaacagctataaaagagctaatagattattttaagatcgatgcaaaagatgtttttgtttttcatgatgatatggatattgattttggaaaaataaaagcaaagtttgggggtagtagtgcaggacataacgggattgagtctatagataaatttattggtaaagattactctagagttcgtatagggatagggcatccaaaacaaaagaaaaaagttaataatcat

SEQ ID NO: 259324 - DNA, 260 bp, Unknown
  Bacterial polypeptide expressing nucleotide sequence isolated from the Sargasso Sea
catgcagcttattgcgggtttgggcaatccgggtgaaaaataccaagataatccccataacattggattcagaacactcgatcaactgatgaaggcactcgatcttgagggctttcaaagacgtttcaatagtgaattccagagaacattagaaaacggccaagtgactttgatgctccagcctgaaacctatatgaaccgcagcggcgaagcgattgcagaatgcgcaagatactttcagattccttcagaaaaaatct

SEQ ID NO: 259325 - DNA, 574 bp, Unknown
  Bacterial polypeptide expressing nucleotide sequence isolated from the Sargasso Sea
atgcttttattagtaggtttaggaaatccaggtccgaataatatcaacaacagacataatattggttttaaaattatagatgcgataaaccagcaatttaatttatcaaagcagaaacctaagtttaaaggtttattaacgaccggtaatataaataataaaaaagtttatgcaataaaaccactaacttttatgaataattcaggaacttgtattagagaactaattgaatattttaaaatagatgcaaaagatgtttttgtttttcacgatgatatggatatagatttagggaagataaaagccaagtttggtggcagcagtgccggacacaatggaattgagtcaattgataagtctataggtaaagattattcaagagtgagaataggtatcggtcaccctgttgataagaaaaaagttaataatcatgtcttagaagactttaatgagaatgaggaagaaaaaattcaagatattactgaaaatattgtaaaacttgttcctacgcttatagaaaaaaaaatagatactttttcaagcaaagtgaatcaaaatcttaatgggatttaag

SEQ ID NO: 259326 - DNA, 301 bp, Unknown
  Bacterial polypeptide expressing nucleotide sequence isolated from the Sargasso Sea
aaaataagatttagaaaaaaaggaagctcaggaggacataatggacttaaaagcatcattgaacaactacagacacaaaactttaagagaataagaattggtattggatcgcctccgttagtaaaagaaaaaaataatttcaatactatttcacatgtattaggaaatatttctatagaagaaaaatcaatattggataaagtgtataagagagtaatagagtcccttgaacaactcaatacaaaaaaagaagaatatataattaatgaattaaattcttttaataaagaccaaaactaag

SEQ ID NO: 259327 - DNA, 369 bp, Unknown
  Bacterial polypeptide expressing nucleotide sequence isolated from the Sargasso Sea
taaataaatcgggtatttcaattaacaaaattctaaaaactaataattttgaccttgaacaaataattattattcatgatgatttagatctacctcttggcactttgaaattaaaaattggtggcgggcatggtggacacaacggattgaaaagtatcatatctcatgcaggaaaatcatttataaggctaagagttggaattggtcatccaggaagtaaagttgatgtaaccaattgggttttaggcaaatttaaaactgctgaaaaagacttaattataaaaagctattatgagttcaatcatgtcattgagctcttaagcaataacgatattcatacagcgcaattaaaactgcatacagaataaa

SEQ ID NO: 259328 - DNA, 562 bp, Unknown
  Bacterial polypeptide expressing nucleotide sequence isolated from the Sargasso Sea
atgattttattcgtaggtttaggaaatccaactcctgatagtgaaaacaatagacataatataggttttaaaataattgatgcaattaatcaaaagtttagcttatcaaaacaaaaaccaaaatttaaaggactattgactactggaaaaatagggagccaaaaagtttatgcaataaaacctttaacttttatgaataattctggaatttgtataagagaacttatggaatattttaaaattgattcaaaagatgtaatagtttttcatgatgatttagatgtagattttggaaaaattaagacaaaatttggcggttcgagtgccggtcataacggaatagcatctatagataaattcatcggaaaagattactcaagagttagaattggtataggtaaacctaatgaaaaagacgatgctgcagatcatgttttaaaagattttaatgaagaagaaaaaactgaaatagaaaatatcacagaaaatataactaactctctacctattttgctagataacaaactagatttattttcaagtactgtaaataatatataat

SEQ ID NO: 259329 - DNA, 562 bp, Unknown
  Bacterial polypeptide expressing nucleotide sequence isolated from the Sargasso Sea
atgtttttaatatgtggtctgggtaatccaggtaaagagtacattaactcaaggcacaatattggatttaatctggtagataaacttgcaagcttttataattttgatcctttcaaaaaagattctaaaaaagaaattctcaaaggtataatttctaataattcatgtttattaatgaaacctctaaactttatgaatttatcaggcctacctattagagaagtagtcaatttttataaaatagaaaaaaataaaatatttataattcacgatgatttagacttagaattaagtaaaataaaaataaaatttggaggcggtaatggtggtcataatggtcttgctagtattgatgaaatgattggaaatgattattataggattcgtgtaggaattgaccatcccggaatgaaacatttggtttcaaactatgtgctaaataagtttaatgcagatgaaattaaaaaaattgataatctgcttaataatattacaaaaaactttgagacacttttaaatgatactggcctttttttaacaaaactagctgaagaaaaataat

SEQ ID NO: 259330 - DNA, 205 bp, Unknown
  Bacterial polypeptide expressing nucleotide sequence isolated from the Sargasso Sea
tatgcttttacttgtaggtttaggaaatcctggtccaaataatactaataaccgacataatattggttttaaaattatagatgcaatcaatgctgaatttcagctgtcaaaacaaaaaccaaagtttaaaggtctattaactacaggaaatatagaggacaaaaaagtatatgcaataaagcctttaacttttatgaacaactca

SEQ ID NO: 259331 - DNA, 181 bp, Unknown
  Bacterial polypeptide expressing nucleotide sequence isolated from the Sargasso Sea
atgcttttattagtaggtttaggaaacccaggaccaaattacgataacaatagacacaatataggttttaaagtgattgatgcaataaaccagcagttcagcctttcaaaacaaaaaccaaaatttaaaggacttttaactacaggtaatattgataacaaaaaaagtttatgcaattaag

SEQ ID NO: 259332 - DNA, 565 bp, Unknown
  Bacterial polypeptide expressing nucleotide sequence isolated from the Sargasso Sea
cttgtaggattaggaaatccaggttcaaactatacaaacactagacataatataggttttaaaataatcgacgctataaacttacattttaaactgtcaaaacaaaaaccaaaattcaaaggtcttctaaccacaggaaatatcgatgaccaaaaaatttatgctattaagcctctcacatttatgaataactcaggtactgctataaaagaactgatagattattttaaaatcgaagctaaagatgtaatcgtttttcacgatgatatggatattgattttggaaaaataaaagctaagtttggaggaagcagtgcaggtcacaacggaatagagtcaattgataaattcattggaaaagattattccagagttcgtattggaatagggcacccgaaacaaaagaaaaaagttaataatcatgttcttgaggactttaaagaggatgaagaagaaaaaataaaggaaattacagaaaatattgtaaaacaaataccaaccttgattgaaaaaaaaattgatctattctcaagtaaagtaaatcaaaaccttaatgggatttaaa

SEQ ID NO: 259333 - DNA, 555 bp, Unknown
  Bacterial polypeptide expressing nucleotide sequence isolated from the Sargasso Sea
aatggcttgtagttggtttaggaaatcctgaaccaaaatatgaaaaaaataggcataatattggcttctgggtaatggacttttcatacgataatctagaaaaagaaaaaataaaaaataaatattctggattatttaaatcaattgtaaattttaatgaagtgtatttttcaaaaccttttttctacataaatgagtcaggaattgcagtaaaaaaaattgcagatcaattaaacatagaacctagcaaaattatcattgtagttgatgatatgaatctagatttaggtgaaattagagttagaacaaagggaggccatggaggacataatggcctgagatcaattgaatatgaattaggaactaatgaatataatagattaaggataggaataggaaagcctggaagtaaaaatgaccatattgattatgttttaggtgatttttctaaaaatgaagaatcaattgctttaaaatctattgaatcagcttacttatgtattttagaaattataaataatggtttctcaaaagctatggaaaaatttaactaat

SEQ ID NO: 259334 - DNA, 476 bp, Unknown
  Bacterial polypeptide expressing nucleotide sequence isolated from the Sargasso Sea
tatgcttctacttgtaggattaggtaatccaaccccagacagtgaaaacaataggcacaatattggtttcaaaattatagatgcgataaataaaaaatttggtctctcaaagcaaaaaccaaaatttaaaggacttcttacaactggaaatgtaggagatcaaaaagtttatgctataaaacctttaacctttatgaacaattctggaatttgtattagagaattaattgaatattttaaaatagattctgaagatgtgatcgtttttcatgatgacttagatgtagagtttggaaaaataaaagcaaaatttagtggttctgatgcaggacataacggcattgcatcaatagataagtttataggaaaagattattctagagtgcgaataggaattggtaaaccaaaagataaaatggaagtaagtgattttgttcttcaaaattttgatgaggacgaagtacttggattagaaa

SEQ ID NO: 259335 - DNA, 294 bp, Unknown
  Bacterial polypeptide expressing nucleotide sequence isolated from the Sargasso Sea
tatgttgttacttgttggtttaggaaatccgactccaaatagtcaaaataatagacataatattggtttcaagattgtagatgcaattaaccaaaaatttggattgtctaagcaaaaaccaaaatttaagggattattaaccactggaaatattggagataaaaaaatctatgcaattaaacctcttacatttatgaataattctggaatttgcataagagagctacttgaatacttcaaaatagatgcagaagatgtgattgtatttcatgatgacctagatattgaatttga

SEQ ID NO: 259336 - DNA, 457 bp, Unknown
  Bacterial polypeptide expressing nucleotide sequence isolated from the Sargasso Sea
cttgaattcaaataaaagaacgtatgattcgtggatcggaaaactatacggtgaaacaattgtcattggcaaatcaaaaacgtatatgaacgatagcggtttggcggcacgagcattactaaaagattacaaagcgtcaccgaattgtctgttggtaatttacgatgacatggatatcgcacctggaaatattagattaaaaaagcaagggggacctgggggtcacaatggtatgaaatccattcaggaatatatcggaactaacgattttccaaggctaagaattggaattggacgcccatcaaaacatcaagatacagtatcttatgttttatctagccctagtttgactgaatcacaatcaatatcatcaatcttagaaaagactgatgaagttttgaactcaatcatatctcagggtttagatgcaactatggaatgggcaaatagatcctag

SEQ ID NO: 259337 - DNA, 256 bp, Unknown
  Bacterial polypeptide expressing nucleotide sequence isolated from the Sargasso Sea
tatgttattgatcgtaggtttaggaaatccaactcccaatagtcaaaataatagacataatattggatttaaaatagtagatgcgataaatcaagaatttggtctttcaaaacaaaaaccaaagtttaaaggtctattaacaacaggaaatattaaagaaaaaaaaatatatgcaataaaacctttaacatttatgaacaattctggaatttgcataagagaactattggaatattttaaaattgatgcagaagat

SEQ ID NO: 259338 - DNA, 487 bp, Unknown
  Bacterial polypeptide expressing nucleotide sequence isolated from the Sargasso Sea
atgctgctgatcgtaggtttaggcaacccaaccccaaatagtcaaaataatagacacaacattggatttaaagttgttgatgcaataaatcaaaaatttggtctttcaaaacaaaaaccaaaatttaaaggacttctcacaactggaaatattggaaataaaaaaatatacgttattaaacctctcacatttatgaataattccggaatatgcattagagagctacttgaatacttcaagattgatgcggaagacgtaattgtgtttcatgatgatttagacgttgagtttggaaaaataaaagcaaaatttggtggttctagcgctggtcataatggaatagcatcaatagataaatttataggaaaagagtactcaagagttagaattggaattggaaaacctcaaaataaaatatcagtttctgattatgtattaaatgactttagtgacgatgaacaagagcacttagaaaaaataactcaaa

SEQ ID NO: 259339 - DNA, 315 bp, Unknown
  Bacterial polypeptide expressing nucleotide sequence isolated from the Sargasso Sea
tatgcttttacttgtaggattaggaaatcctggatccagctacactaacactagacataatattggtttcaaaataattgatgcgatcaatgctcattttaaattatctaaacagaaaccaaaatttaaaggattgcttactactggaaatatcgatgaaaaaaaaatctacgcaataaaaccattaacttttatgaataattctggaacagctattaaggaactaattgattattttaaaattgatgcaaaagatgtttttgtatttcatgatgatatggatattgattttggaaaaataaaagctaaattcgg

SEQ ID NO: 259340 - DNA, 574 bp, Unknown
  Bacterial polypeptide expressing nucleotide sequence isolated from the Sargasso Sea
tatgcttttacttgttggattaggaaatccaggttctgactatactaatactagacacaatattggctttaagattattgatgcaataaatatacattttaaattatcaaaacaaaaaccaaaattcaaaggtttgcttacaactggaaatatcgaagagaaaaaaatttatgccattaagccattaacttttatgaataattctggaactgctataaaggagttaatagattattttaaaattgatgcaaaagacgtgatagtttttcatgatgatatggatattgattttggtaaaattaaagcaaagtttggtgggagcagtgctggtcacaatggaattgagtcgatagataaatttataggaaaagaatactcaagagttcgcatcggtattggacacccaaaacaaaagaagaaagttaacaatcatgtgctcgaagattttagagaggacgaggaagaaaagatcaaagaaattactgaaaatattgtaaagcagatacccacactcattgacaaaaagatggatttattttctagcaaagttaatcaaaacctaaatgggatttaa

SEQ ID NO: 259341 - DNA, 504 bp, Unknown
  Bacterial polypeptide expressing nucleotide sequence isolated from the Sargasso Sea
tatgatactgtttgtagggctaggcaacccaactcccgacagccaagataatagacacaatataggttttaaaattattgacgctataaataaaaaatttactctttcaaaacaaaaacctaaatttaaaggcttgttaactacaggcgatatagaaaacaaaaagatttatgcaattaaacctttaacttttatgaacaactcaggtatttgcataagagaattaattgagtattttaaaattgatgctgaagatgtgattgtttttcacgatgatcttgatgtagatatagggaaaataaaaacaaaatttggaggatcaagcgcaggtcataatggaattgagtctatagataaatttattggaaaagattactcaagagtaagaattggaattggcaaacctggtcctaaaatgtctacttcagactatgtattaaataattttaatgaagatgaaaaaaaagaacttgataaaattgtaagcaatataattaattcaat

SEQ ID NO: 259342 - DNA, 296 bp, Unknown
  Bacterial polypeptide expressing nucleotide sequence isolated from the Sargasso Sea
tatgcttttacttgttggcttgggtaaccctggctctaattatacaaatacaagacacaacatagggtttaaaattattgacgcaataaatgtgcacttcaagctgtcaaaacaaaaacctaaatttaaaggattgcttactacgggaaatatagagtcaaagaaaatctatgcaattaaaccactcacttttatgaataattcaggaacagcaatcaaagaactgatcgattattttaaaatcgatgcaaaagatgtgatcgtatttcatgatgatatggatattgatttcggaa

SEQ ID NO: 259343 - DNA, 528 bp, Unknown
  Bacterial polypeptide expressing nucleotide sequence isolated from the Sargasso Sea
tatgcttttacttgtaggactgggaaatccaggttccaattatactaatactagacataacattggttttaaaattatagacgctattaacttacattttaagctatctaagcaaaaacctaaatttaaaggtttgctgactactggtaatatagactcaaaaaaaatttacgcaattaagcctctaacctttatgaataattctggaacagcaattaaagaattaatagattattttaaaatagatgctaaggatgtctttgtattccacgatgatttagatatagattttggaaaaattaaagctaaatttggtggaagtagtgctggacataacggtattgagtccattgataaatttataggcactgactactctagagttagagttggaattggtcatcccaagacaaaaaaaaaggttagcaatcatgttttagaggattttaaagaagacgaggaagaaaaaattaaagaaattactgagaatatagttaaactaatccctactttaattgaaaaaaaaat

SEQ ID NO: 259344 - DNA, 481 bp, Unknown
  Bacterial polypeptide expressing nucleotide sequence isolated from the Sargasso Sea
tatgtatttatttgtaggtttaggtaacccaactccaaatagccaagataataggcataatataggatttaaagttatagatgcaataaatcaaaaatttaatttgtccaaacaaaaaccaaaatttaaaggacttttaacaactggaaatattgaaagtaaaaaagtttatgcgataaaacctttgacttttatgaataattcaggaatttgtataagagagctaattgaatactttaagatggaggcccaggacgtttttgttttccatgatgatttagatattgattttggtaaaataaaagctaagtttggtgggtctagtgctggtcataacggaatagagtcaatagataaatttataggaaaagattattctagggtgcgtataggtattggcaaacctgaaaataaaatgtctgtatcagatttcgttctagacaattttaacaatgaggaaaaagtagaattagagactatt

SEQ ID NO: 259345 - DNA, 274 bp, Unknown
  Bacterial polypeptide expressing nucleotide sequence isolated from the Sargasso Sea
atgcttttacttgtaggtttaggaaaccctggtcccaataatacaaacaatagacataatattggttggaaaattatagatgcaataaactctgaatttagtctttcgaaacaaaaacctaaatttaaaggacttttaacgacgggaaacattcaaaacaaaaaagtttatgcgataaagccattaacttttatgaataattctggagtttgtatcaaagagcttattgattattttaaaattgatgtaaaaaatggtaatagtttttcatgac

SEQ ID NO: 259346 - DNA, 211 bp, Unknown
  Bacterial polypeptide expressing nucleotide sequence isolated from the Sargasso Sea
atgaaatatctcattgtaggattaggaaatccaggagttaaatataaaaacacccgtcacaacataggttttaaagtattggacgagctagcaagttcgtccaatgttttttttaatacagatcgtttaggtgatattgcgagttttaaattcaaaggaaggtccatataccttttaaaaccaaaatacttttatgaatttgagcggtaaa

SEQ ID NO: 259347 - DNA, 343 bp, Unknown
  Bacterial polypeptide expressing nucleotide sequence isolated from the Sargasso Sea
tatgtttttaatatgtggtctgggaaatccaggtaaagaatatattgatacaaggcataacattggttttgccttaattgataaacttgttagtttttataattttgtttcatataaaaaagattcaaaaaaagaaatttttaagggtgttattaataataattcctgctttttattgaagcctttaaatttcatgaatttatctggacaaccaataagagaagtaatgaatttttataaaattgaaaaaaataaattatttataatacatgatgatttagatttagagttaggaaaggtaaaagtaaaagtaggtggaggtagtggtggtcataatggtctt

SEQ ID NO: 259348 - DNA, 562 bp, Unknown
  Bacterial polypeptide expressing nucleotide sequence isolated from the Sargasso Sea
atgcttctacttgtaggattaggtaatccaaccccagacagtgaaaacaataggcacaatattggtttcaagattatagatgcaataaataaaaaatttggactttcaaaacaaaaaccaaaattcaagggactacttacaactggtaatgtgggagatcaaaaggtttatgctattaaacctttaacatttatgaataattccggaatctgtattagagaattaattgaatatttcaaaatagatgctgaggatgttatcgtttttcatgacgatatagatgtggaatttggaaaaataaaatcaaaattgggtggctctgatgcaggacataacggaattgcatcaatagataaatttattggtaaagattattcaagagtgcgaataggaattggtaaaccaaaagataaaatggaagttagtgattttgttcttcaaaattttgatgaggatgaaatgcttggactggaaagaattataaataacatcacagattctatttcaatacttatcgacaaaaaattagatttattctctagcactgtaaataataaataat

SEQ ID NO: 259349 - DNA, 578 bp, Unknown
  Bacterial polypeptide expressing nucleotide sequence isolated from the Sargasso Sea
caccccccgcacagaatacgaaggcactcggcataacgccggtgccttttttgtgcgtctgttggcgaagcgacatggattgacgttcaccgcagatcgcaacgcgctgggtgaatcggcacgaggcgttattgccggacacgacctacgcttactcattccggaaactttcatgaatgagagcggacgctccgttgcagccatgtcgcgctattaccggattgaacccgacgcaattctgatcgcgcatgacgagttggacatccccgcgggggagtcacgcttcaaacgtgacggtggtcacgggggccacaacggactcaggcacatcattccggcactgggaggccatcgcaacttctggcgtctgcgcattggcatcggccacccgggttcagccaaagaagtgtcggcctgggtattgagcaaggcatcggcggaagatcaaacctctatcgaggccagcactgaggcagccatcagtgtgctaccgatgttgctagatggtgaagatgtaaaggccatgacggcgctgcacagcgagagctacgccgccacgccatctcaagaggattaat

SEQ ID NO: 259350 - DNA, 574 bp, Unknown
  Bacterial polypeptide expressing nucleotide sequence isolated from the Sargasso Sea
atgcttttgctagtaggtttaggaaatcctggtccaaataatagtcacaacagacacaatattggttttaaaattatagacgctattaatgaacaattcagtctttccaaacaaaaacctaaatttaaaggacttttaaccacaggtaatattgaaaataaaaaagtttatgcaattaaacctttaacttttatgaataattctggagtttgtattaaagaactaatcgagtatttcaaaattaatgcaaaagacgtaattgtttttcacgatgatatggacattgatctgggaaaggttaaagcaaaatttggtgggaccagtgctggtcataatggtatagaatctattgataaatcaattggcaaagattattcaagagtaagagttggaattggacatccaaaacaaaagggtaaggttaataatcatgttctagaagattttaatgaaaatgaagaagagagaatcaaagatgtaacagataatattgtgaaattaattcccacacttataaataaagagatggacttattctcaagcaaggtaaatcaaaatttgaatgggatttaag

SEQ ID NO: 259351 - DNA, 562 bp, Unknown
  Bacterial polypeptide expressing nucleotide sequence isolated from the Sargasso Sea
atgttactgcttgtaggtttaggcaacccaactccgaatagtcaaaacaatagacacaacattggttttaaaatagttgatgcaataaatatcaaatttggactttctaaacaaaaaccaaaatttaaaggtttacttacgactggaaatatcggtgaaaaaaaaatatatgcaataaaacctcttacttttatgaataactcaggaatttgtataagagaacttttagaatactttaaaataactgcagaaaatgtaattgtttttcatgatgacctagatgttgagctgggaaaaataaaagcaaaatttggcggatcaagtgcagggcataacggaattgcatcaatagataaatttataggtaaagattactcaagagtaagaataggaattggaaaaccagatagtaaaatttctatttcagattatgtgttaaatgattttaatgaagaagaaaacgaacatttagaaaaaattacaaataacataatagagtcaatatcaattctaattgataaaaaattggacttattttcaagtacagtaaataataactaat

SEQ ID NO: 259352 - DNA, 292 bp, Unknown
  Bacterial polypeptide expressing nucleotide sequence isolated from the Sargasso Sea
atgcttttacttgtaggtttaggaaatcctggtcccaataataccaacaacagacataacattggttttaaaattattgatgccatcaatcaacagttcagtctttcaaaacaaaagccaaaattcaagggccttttaacaacgggaaatattgaaaataaaaaagtatacgctatcaaaccattaacatttatgaataactctggtgtatgtattaaagaactaattgaatatttcaaaattgatgcaaaaaatgtaatcgtatttcatgatgatctagatattgatttag

SEQ ID NO: 259353 - DNA, 215 bp, Unknown
  Bacterial polypeptide expressing nucleotide sequence isolated from the Sargasso Sea
tatgcttttatttgtaggactgggaaatccaacgccaaatagtgaaaataatagacacaatataggtttcaaaattattgatgctataaatgaaaaatatggactatctaagcaaaaaccaaagtttaaaggtttacttacaactggaaatataaataataaaaaaatttatgcaattaaacctttaacttttatgaataactctggaatatgta

SEQ ID NO: 259354 - DNA, 569 bp, Unknown
  Bacterial polypeptide expressing nucleotide sequence isolated from the Sargasso Sea
tatgcttttacttgtcggattgggcaatcctgggtccaactatactaatactagacacaatattggttttaaaattatcgatgctataaacgctcacttcaaactctccaaacaaaaaccaaaattcaagggtttactcactactgggaatattgatgaaaaaaaaatttatgctattaagcctttaacttttatgaataactcaggaacagctataaaagagctaattgattactttaagattgatgcaaaagatgtaattgtttttcacgatgatatggatattgattttggaaagataaaagccaaatttggaggcagtagcgcaggtcataatggaattgaatctatagacaaatttattggtaaagattattcacgagtgcgtataggtataggtcatccaaaaaaaaagagaaaagtaaacaatcatgtgttggaagattttaaagaagatgaagaagaaaaaataaatgaaatttcagataatattgtaaaacaattaccgactttaatagaaaaaaaaatagatctcttttcaagcaaagtaaatcaagatcttaatggga

SEQ ID NO: 259355 - DNA, 562 bp, Unknown
  Bacterial polypeptide expressing nucleotide sequence isolated from the Sargasso Sea
tatgttactacttgttggtttaggaaatccgactccaaatagtcaaaataatcgtcacaatattggttttaaaattgtagatgcaattaatctgaaatttggcttatcaaagcaaaagcctaagtttaagggtttattaactacaggaaatattggtgacaaaaaaatatacgcaatcaaaccacttacatttatgaataattcaggaatatgtataagagaacttttagaatattttaaaattaatgctgaaaatgtaattgtatttcatgatgatttggatattgaatttggaaagattaaagcaaaatttggtggttcaagtgctggtcacaacggtattgcgtcaattgataagtttattggaaaagagtattcaagagttcgtattggaatcggaaaaccagaaagcaaaatatctgtttcagattatgtcttaaatgattttgatgaggatgagcagactcatttggagtcaatcactaataatataatagagtctttaaatatattaattgataaaaaattagatcttttttctagcacagttaataataattaa

SEQ ID NO: 259356 - DNA, 601 bp, Unknown
  Bacterial polypeptide expressing nucleotide sequence isolated from the Sargasso Sea
ttgagtcatattaaacttttagttggcttgggcaatccagaattacaatatggattgacgcgacataatgcagggttttggttgcttaattcattagctgagcaaaaaaacctcgtttggaaaacagattctaaatttaaagctgaacttactaattttagttctaatcatttggggattgaaaaattctggctgatgaaaccaagtctttacatgaatgaatcgggtatttcagtaagtagtttttgttccttttataaattaaaagtggatgaagtgttgattgtccatgatgagttggacttgaaaccaggggtattgagaataaaaaaaggtggcagtaatgcgggtcataggggcattcaagacatacaacaaagattaggagcagatgatttttggaggctgagattaggtataggccaccctagaactattgaatctcctataaagaatgtttcagattttgttttatcaaaaccttcagatgtagataaacttaatatacatagggcaataaattcatgcctaaataatttatgtgatttgttggattgcaatattgacaacatacaaaatgatttgagcaaggggagatgaa

SEQ ID NO: 259357 - DNA, 532 bp, Unknown
  Bacterial polypeptide expressing nucleotide sequence isolated from the Sargasso Sea
cctgggcaataaatataatggtacccgtcataatattggaaaagattgggtaaaaaatgttgcaatcgacactgatttaaatcttcaagtaaagaaaaaaattgaatccacagttggtttatctggtaatgaaaaaattctatggggatatcccaatcagtatgtaaatgaatcgggtatttcaattaacaaaattctaaaaaccaataattttgatcttaaacaaataataattattcatgatgatttagatctacctcttggcactttgaaattaaaaattggtggtgggcatggtggacacaacggattaaaaagtatcatatcttacgcaggtaaatcatttataaggctaagagttggaattggtcatcctggcagtaaagttgatgtaacaaattgggttttaggcaaatttaaaaccgctgaaaaagacttagttataaaaagctattacgagttcaatcatatcattgagctcttgagcaacaacgatattcatacagcacaattaaaactgcatacagaataa

SEQ ID NO: 259358 - DNA, 370 bp, Unknown
  Bacterial polypeptide expressing nucleotide sequence isolated from the Sargasso Sea
atgctcttacttgttggattaggaaatccaggctcagattacacaaatacacgacataatattggttttaaaattatcgacgctattaattctcattttaaattatcaaaacaaaaaccaaaatttaaaggcttgctcacaaccggtaatattgatgaaaaaaaaatttatgcaatcaaacctcttacttttatgaataactctggaactgcaatcaaagagcttattgattactttaaaatcgatgcgaaggatgtaatagtttttcacgatgacatggatatcgattttggaaaagttaaagcgaaatttggaggaactagcgctggacataatggaatagagtcaattgataagtttataggaaaag

SEQ ID NO: 259359 - DNA, 475 bp, Unknown
  Bacterial polypeptide expressing nucleotide sequence isolated from the Sargasso Sea
ctgatagggctaggtaatcctgagttaaaacacagatataaccgtcataatataggttttttaatagtcgataaaattgctcaagagttccaattcccaccctttagaaatcgctttaaaggcttactgagcgaaaatttgatgaatggtagcaacattaaattgttgaaaccctccacttatatgaataactccggtgagtccatagtccaggctatgcggttttttaaactcggtccttcccaagtttttgtattttacgacgatctcgacctttcaccagggaaatgcagaattcggttgggtggcggaacgggaggacacaatggtttacgaagcattgaacaacacattggccctgactactggcgagttcgtattggtataggccaccccggacgcaaagaattggtcctagcgcacgtattaaatgatttcagtgaacaagaaaagaatggatgggttgaaaaaatcc

SEQ ID NO: 259360 - DNA, 559 bp, Unknown
  Bacterial polypeptide expressing nucleotide sequence isolated from the Sargasso Sea
tatgtttttaatatgtggtctgggaaatcctggggttaaatatactaatacaagacacaatataggattcaaattagctgataaattaatttcatattttaattttaataaagttaaagaagataaaactaaaaaactatattctggtgaaataaataactgtaaaattttgattttaaaaccactcaattttatgaacttatcaggtagaccattattagaaactgttaatttctataaaataaaaaaaaataatatttttgtaatacatgatgatcttgatttggaattagcaaaaataaaaataaaaaatggtggtggtaatggagggcataatggcctagctagtatagatgaatatcttggagaaaattataatagaataagaattggaattggtcatcctggtgataaggatttagtatcgacttatgtgcttaataattttcttgaagaagagaaggaaatactagaaaaaaaacttacaataatgacaaataactttgatttagctttatctaacattcctctatttttaacaaaaattagcgagatttaa

SEQ ID NO: 259361 - DNA, 562 bp, Unknown
  Bacterial polypeptide expressing nucleotide sequence isolated from the Sargasso Sea
atgttattatttgtaggattaggtaacccaacccctgacagccaaaacaaccgtcacaacattggtttcaaaatcattgatgcgataaatcaaaagtttgggttatcaaaacaaaaaccaaagtttaagggattattaaccacaggtaatattggtgataaaaaggtttatgctataaaaccacttacctttatgaacaattctggaatttgtattagagagctgattgagtattttaaaatggatgccgcagatgtaatcgtgtttcatgatgaccttgatattgatattggaaaaattaaagctaagtttggtggctcaagcgctggacataatggaatagaatcgattgacaagtttattggaaaagattactcgagagtaagaataggtattgggaaacctgagtcaaaaatttcaatatctgactatgttttaaatgacttcaatgacgaggaaaaagagaaattagaaaatattactgagaatatcataacatccttaaatatacttctagataaaaaattagagttgttttctagcactgtgaataacaaataaa

SEQ ID NO: 259362 - DNA, 493 bp, Unknown
  Bacterial polypeptide expressing nucleotide sequence isolated from the Sargasso Sea
gatggcggcaatttctcttgtgtgcggtctgggcaatccgggtgcgcaatatgaagcgacacgccacaacgccggcttttggtttctggacgccctgcaacgtgtcgttcccttaccctggcgcccagaaacacggtttcttggtgacctggctgatacccgagtggagcaacagagagtccgctttttaaagcccgccacttttatgaatgaatgcggcggagccgtcgcatccgtctgtggctatttcgatatccctgccgaagctgtgctggtggtgcacgatgatcttgatttgcctcccggcacggtcagggtcaaacagggcggcggccatggaggacacaatggtctgcgcgatatcttctcgaaactgggttcccgtgaattcgtccgtctgcgtattggcattggtcatccgggaaacagcgatgacgtcagtgatttggtgttgagaaagccgtcagctgaggacaagacggccatccttgat

SEQ ID NO: 259363 - DNA, 601 bp, Unknown
  Bacterial polypeptide expressing nucleotide sequence isolated from the Sargasso Sea
catggaacctctgttaatcgcagggctgggaaatcctggagatgaatacgacggtactagacacaatgcaggaacggacttcattgatcttttatgtgaaaaatactctgttaacctaaaaaaacaaaaaaaaatatttgcccattcggctgaggtggtttttgatagttacaaactaatattacttaagccctcactatatatgaatgaaagtgggcttagtattaccaaagctaagcaattctataatctgaattgttctcaaatgttgattattcatgatgagttggacttacccaatgcgactattcgactaaaggaatcaggtggtcatggtggacataacggcattagaagcattattgatcatttaaatggagacaattcattcaaaagattgagagttggaattggccatcccggaaagggcaaagacattattgcctacgtgctaaaaaaagccccacctgaacaaagaaaagaattatttaatagcatgaatgaatttttagaaattggggaaaaaatcatgatagacggatggcagaaaactgttatgtattatcattctggtaatgaagaggaactaaatgagtcttaa

SEQ ID NO: 259364 - DNA, 166 bp, Unknown
  Bacterial polypeptide expressing nucleotide sequence isolated from the Sargasso Sea
atggctgatgtgctccggctggttgtcggcctcggcaatccaggtccgaagtacgaggggacccgtcacaacatcggcttcatggccctggagcggatgggctcccgcgaaggcttcagtttccgtcagcagaccaaattgcatggtttggcggcggagcaagggt

SEQ ID NO: 259365 - DNA, 334 bp, Unknown
  Bacterial polypeptide expressing nucleotide sequence isolated from the Sargasso Sea
tatgcttttatttgtaggtttaggaaatccaacacctgatagcgaaaataatagacacaatatcggttttaaaattattgatgcaataaataaaaaatttagcctgtcaaaacaaaagccaaaatttaagggactgcttacaactggtaatattaatagtaaaaaagtttatgctattaaacctttaacttttatgaataactcaggtatatgtattcgtgagttgattgagtatttcaaaatagatgctgaaaatgtaattgtatttcacgatgatttagatattggttttggcaaaataaaagcgaagttggcggatcaagtgctgggcaca

SEQ ID NO: 259366 - DNA, 574 bp, Unknown
  Bacterial polypeptide expressing nucleotide sequence isolated from the Sargasso Sea
tatgcttttacttgtcggattaggaaaccctggttctaatagcgttaacaatagacacaacattggcttcaaaattattgatgctataaacttacactttaaattatcaaaacaaaaaccaaaatttaaagggttgcttacaactgggaatatcgaatctaaaaaaatttatgcgatcaaacctcttacttttatgaataattctggcacagcgatcaaagagctgattgattattttaaaattgatgcaaaaaatgtttttgtatttcatgatgatttagatattgattttggaaaaataaaggtaaaatttggaggaagtagtgcaggacataatggaattgaatcaattgataaatttatagggaaagattattcaagagttagaattggcataggtcatcctaaagaaaaaaagaaagtcaataaccatgtgcttgaagattttaaagaagatgaggaagaaaagataaacgaaattactgaaaacattgttaaattgataccaactttaattgataaaaagatggacttgttttcaagtaaagttaatcaaaatcttaatgggatttaa

SEQ ID NO: 259367 - DNA, 529 bp, Unknown
  Bacterial polypeptide expressing nucleotide sequence isolated from the Sargasso Sea
catggaaccacttttaatattagggttaggcaatcctggtaaagattatgcgcttactcgacataatgctggtgcagattacgtcgatttgctttgcagcaaatactcattaactctaaaaaaagaaagacaaatccatggccaatttgctgaacttattaatgaaaaccagaaattaatctttgtaacaccttctacatttatgaatgaaagtggtttgtgcgtgtcaaaaacaaaaaaattttttaatcttagaacagaacaaattttaatcgcccatgatgaactggatctgccaaattcagaaataaagcttaaagaatcaggcggacatggtgggcataatggtcttagaaacataattgatcatttaaaaggagacagttcttttaaaagattaagaattggaataggtaaaccagataaagataaagatatcatttcatatgtcttaaaaaaggcttcagttgaagaaagagaaaaattaatgagtaatcttattaattacttagatctgggagaaaaataa

SEQ ID NO: 259368 - DNA, 562 bp, Unknown
  Bacterial polypeptide expressing nucleotide sequence isolated from the Sargasso Sea
atgcttttacttgtaggattaggcaatccaaccccagacagcgaaaacaatagacacaacataggtttcaaaattatagatgcaataaataaaaaatttggactttcaaaacaaaaaccaaaatttaaaggacttcttaccacaggaaatgtaggagaccaaaaaatttacgctataaagcctttgacttttatgaataattctggaatttgtattagagaattaattgaatattttaaaatagatgctgaggatgtaatagtttttcatgatgatctagatgtggagtttggaaaaataaaagcaaaatttggaggatctcatgctggtcataacggaattgcatcaatagataaatttattggtaaagattattcaagggttcggataggaattggtaaaccaaaagataaaatggaagtaagtgatttcgttcttcaaaattttgatgaggatgaaatgcttggattggaaaaaattacgaataacatcacagattctatttcaatacttatcgacaaaaaattaaatttattctctagtactgtaaataacaaataat

SEQ ID NO: 259369 - DNA, 430 bp, Unknown
  Bacterial polypeptide expressing nucleotide sequence isolated from the Sargasso Sea
tgaatccacagttggattatctggtaatgaaaaaattctatggggataccccaatcagtatgtaaatgaatcgggcatttcaataaacaaaattctaaaaaccaataattttgatcttgaacaaataattattattcatgatgatttagatctacctcttggcactttgaaattaaaaattggtggtgggcatggtggacacaacggattgaaaagcatcatatctcatgcaggtaaatcatttataaggctaagagttggaattggtcatccaggcagtaaagttgatgtaaccaattgggttttaggcaaatttaaaactgctgaaaaagacttaattataaaaagctattatgagttcaatcatatcattgagcttttaagcaacaacgatattcataaagcgcaattaaaactgcatacagaataa

SEQ ID NO: 259370 - DNA, 574 bp, Unknown
  Bacterial polypeptide expressing nucleotide sequence isolated from the Sargasso Sea
atgcttttacttgttggtttaggaaaccccggctcgaattatactaatactagacataatattggtttcaaaataattgatgctatcaatgcacattttaaactatctaaacaaaaacctaaatttaaaggattgcttactactggaaatatcgatgaaaaaaaaatttatgcaatcaaaccgcttacctttatgaataattctggaacagctattaaagagttaatagattactttaagatagacgctaaagatgtaattgtttttcatgatgatatggatattgacttcggaaaggttaaagcaaaatttggtggtactagtgctggacataatggaattgaatcaattgataagtttattggtaaagaatactcaagagtacgtgtaggaataggtcatcctaaacaaaagaaaaaagtaaataatcatgttttagaggattttaaagacgacgaagaagaaaaaattaatgagataactgaaaacattgtaaaacttataccaactttgattgacaagaagatcgatcttttttcaagtaaaattaatcaaaatcttaatgggatttaag

SEQ ID NO: 259371 - DNA, 272 bp, Unknown
  Bacterial polypeptide expressing nucleotide sequence isolated from the Sargasso Sea
tatgttactttttgtagggcttggaaacccaacacctgatagtcaaaataataggcataacattggatttaaaattatagatgcaattaatcaaaaattttcactttcaaaacaaaagccaaaatttaaaggattattaacaacgggaaatattggtgacaaaaaagtttatgctatcaaaccacttacgttcatgaataattcaggaatttgtattagagagcttttagaatattttaaaattgaccctgaaaatgtaattgtttttcatg

SEQ ID NO: 259372 - DNA, 574 bp, Unknown
  Bacterial polypeptide expressing nucleotide sequence isolated from the Sargasso Sea
tatgcttttacttgttggattaggaaatccaggttctaattacactaatactagacacaatataggttttaaaattattgacgctataaataatcattttaagctttcaaagcaaaagcctaaatttaaaggtttgttaacaactggtaatattgatgaaaaaaaaatttacgccattaaacctctgacatttatgaataactcgggaacagcaatcaaagagttaattgattattttaaaatagatgcaaaagatgtaattgtttttcatgatgatatggacattgactttgggaaaatcaaagcaaaatttggaggaacaagcgctggacacaacgggatagagtcaattgataagtttataggaaaagattattctagagtaagaattggtattggtcatccaaaacaaaaaaagaaggtaaataatcatgttctcgaagactttaaagaagatgaagaagaaaaaattaaagagataacagagaatatagtaaaacaaatacctactttgatagaaaaaaaaatagatctattttcaagtaaagttaatcaaaacttgaatgggatttaa

SEQ ID NO: 259373 - DNA, 562 bp, Unknown
  Bacterial polypeptide expressing nucleotide sequence isolated from the Sargasso Sea
atgcttttatttgtaggacttggaaacccatccccgaatagtgaaaataatagacacaatataggtttcaaaattattgatgctataaatgaaaaatatggtctatctaaacaaaaaccaaaatttaaaggtttgcttacaactggaaatataaataataaaaaaatttacgcaattaaaccattaacctttatgaataactctggaatatgtattcgtgaattaattgaatattttaaaattgatgctgaagacgttattgtatttcatgacgatctcgatgttgattttggcaaagtgaaagcaaaatttggaggaacaagtgcgggacataacggtatagaatcaattgataaatttatcggcaaagattattcaagggtaagaattggaattggaaaacctgcaacaaaaactgacgtgtctgaatacgtattaaaaaattttgatgaagaagaaataaaagaattaaaaaaaattacttcaaatattacagaatatttgtcaatccttgttgataaaaaattagatcttttttctagcacagttaacaataaataat

SEQ ID NO: 259374 - DNA, 574 bp, Unknown
  Bacterial polypeptide expressing nucleotide sequence isolated from the Sargasso Sea
atgcttttattagttggactaggaaatccaggaccaaatagtttaaacaatcggcacaatatcggtttcaaaattattgatgctatcaacaatcattttaaattatcaaaacaaaaaccaaagtttaaaggacttcttactacaggaaatatagattcaaaaaagatttacgcaattaaaccgctaacatttatgaacaattctggaactgcagtgaaagaacttatcgattattttaagattgatgccaaggacgtaattgtgtttcatgatgacttggatatagattttggaaaaatcaaagctaaatttgggggaagtagcgctggacacaacggtattgagtcaattgataaatttattggtaaagattattctagagtgagaataggtataggtcatcctaaagaaaaagcaaaagtaaataaacacgttttagaggattttaaagaagatgaagaagataaaataaaagagatcactgaaaatattgttaaatctattcctactttaataaataaaaaaattgatttattttcaagtcaagtgaaccaaaatctaaatgggatttaaa

SEQ ID NO: 259375 - DNA, 559 bp, Unknown
  Bacterial polypeptide expressing nucleotide sequence isolated from the Sargasso Sea
atgattgctcttattggtttaggaaaccccggtgaaaaacattccttaaatagacataatataggattcataattattgatgaactcattgataataatgaaattattaagagtgaaaaaaaattcaacggtgatttaacaactttatcaatcggaagaaaaaaaatagtcacatttaagtcatgcgattacatgaatgaatgtggtggaagtattgcaaaactcattaatttttacaaacttggtctagactcagtttatgtctttcatgatgaccttgatatttctcttggaaaagtaaaaataaaaaatggtggctcaccagctggtcataatggattaaaatcaatagactcatgtataggcaaaaattataacagagtaagggttggaattgatcacccagggagccgtgaattggttaacaggcatgtactaggcaactttaaaaaaaaggagttggaaattgttgaccaattaaagatcagtatttcatcgcacttaaaattactgatatcagaaaataaatctcaattcttaaataatattaaattataat

SEQ ID NO: 259376 - DNA, 268 bp, Unknown
  Bacterial polypeptide expressing nucleotide sequence isolated from the Sargasso Sea
atgcttttacttgtaggtttaggaaatcctggtccaaataacactaacaatagacataatattggtttcaaaattatagatgcaatcaactcagagttcagcctttcaaaacaaaaacctaaattcaaaggacttttaacaactggaaatattcaggataaaaaagtttatgcgataaagcctttgacatttatgaataattcaggagtttgtataaaagaacttattgattattttaaaattgatgcaaaaaatgtaatagtttttc

SEQ ID NO: 259377 - DNA, 574 bp, Unknown
  Bacterial polypeptide expressing nucleotide sequence isolated from the Sargasso Sea
atgcttttactagttggattaggaaatccaggatcggattatacaaatacaagacataacattggtttcaaaataattgatgcaatcaactcgcattttaagctttctaagcaaaaaccaaaatttaaaggcttgttaacgactggtaatatagatgaaaaaaaaatatatgccatcaaaccactaactttcatgaataattctggaacagcaataaaagaattaatagattactttaaaattgatgcaaaagatgtaattgtatttcatgatgacatggatattgatttcggaaagataaaagcaaaatttgggggtagtagcgccggtcataatgggattgagtccatagataaattcataggaaaagattactcaagagtaagaattggtataggccacccaaaacaaaaaaagaaggttaataatcatgtgcttgaagatttcaaagaagatgaagaagaaagaattaaagaaataactgaaaatattgtacaacaaatcccgacgctaatagataaaaaaatggatttattttcaagtaaagttaatcaaaaccttaatgggatttaag

SEQ ID NO: 259378 - DNA, 406 bp, Unknown
  Bacterial polypeptide expressing nucleotide sequence isolated from the Sargasso Sea
catgcagcttattgcgggtttgggcaatccgggtgaaaaatacaaagacaatccccataatatcggattcagaacactcgatcaactgatgaaggctctcgatcttgagggctttcaaagacgtttcaacagtgaattccagagaacattagaaaacggccaagtgactttgatgctcaagcctgaaacctatatgaaccgcagtggcgaagcgattgccgaatgcgcaagatacttcaagattccttcagaaaaaattcttgtgatcagtgatgacctggatcttccagccgggaaagcacgactgcgagtctccggagggcacggaggccacaatgggctcagatccgtcattcaatgtctgggcacggacaaattccttcgggccagaatcggaataggcagg

SEQ ID NO: 259379 - DNA, 409 bp, Unknown
  Bacterial polypeptide expressing nucleotide sequence isolated from the Sargasso Sea
tatgttcttgctagtaggtttaggaaaccccggtccaaataacaccaataatagacataacataggatttaaaattatagacgcaataaatcaacaatttagtctttcaaagcaaaaacctaagttcaagggactcttaacaactggaagcatagataataaaaaagtttatgctattaaaccactaacgtttatgaacaattccggtgtttgtattaaagaacttatcgaatattttaaaattgatgcaaaaaatgttattgtttttcatgacgacatcgacatagatttgggaaaaattaaagcaaaatttggtggaagtagcgctgggcacaatggaatagaatccatagataagtttattggcaaagactactcaagagtaagagttggaattggaaaacctgat

SEQ ID NO: 259380 - DNA, 212 bp, Unknown
  Bacterial polypeptide expressing nucleotide sequence isolated from the Sargasso Sea
gatgccggatcaaccaataaaactgattgtgggtttggggaacccaggcccacaacatgaaaaaaataggcataatgctggcgttatatttctgcatcatctttgcaaagcctatggcaacaatcttcgcgttgaggctaagttttttggcgaattttcctctatcgtcatcgatggagccgatataaagcttctttttcccgacaactttt

SEQ ID NO: 259381 - DNA, 562 bp, Unknown
  Bacterial polypeptide expressing nucleotide sequence isolated from the Sargasso Sea
tatgattttgcttgtagggttaggcaacccaactcctgacagtaatgacaatagacataatattggttttaaaataatagatgcaataaatcaaaaatttgggctatcaaaacaaaaacctaaatttaaaggtttattaactacaggaaatatttcaaataaaaaagtttatgctattaaacctttaacctttatgaataattcaggaatttgcataagggaattaattgaatattttaaaatagactcagagaatgtaatagtttttcatgatgatttagatgtagactttacaaaaataaaaactaaatttggtggatctagtgctggtcataatggaatagcgtccatagataaatttataggtaaagattattcaagagtaagaataggtattggaaaacctgaaaaaagaattgaaatttcagattttgttttaacaaatttttctgaagaagaaaaaactgaattagaaaaagttataaaaaatataatcgactcaatgcctatattaattgacaaaaaattagacttattttctagtacagtaaataacaaataa

SEQ ID NO: 259382 - DNA, 574 bp, Unknown
  Bacterial polypeptide expressing nucleotide sequence isolated from the Sargasso Sea
atgcttttacttgttggattaggaaatccaggctctaactatacgaatactcgacataacattggttttaagataattgatgctattaacaatcattttaagctttcaaaacaaaaaccaaaatttaaaggtttattaactactggaaacatagattctaaaaaaatttacgctattaaacctcttacttttatgaataattcaggtactgcaattaaagaattaattgattattttaaaattgatgcgaaaaatgtttttgtttttcatgacgacatggatattgattttggaaagattaaagttaagtttggcggtagtagcgcaggtcataatggaattgagtcaattgataagtttataggtaaagattattcaagagttcgtgtaggtatagggcatccaaagacaaagaaaaaagttaataaccatgtattagaagacttcaaagatgatgaagaggaaaaaattaaagagattactgagagtattgtaaaacttatacctacgcttattgacaaaaaaatagacttattttcaagtaaagttaatcagaatcttaatgggatttaaa

SEQ ID NO: 259383 - DNA, 403 bp, Unknown
  Bacterial polypeptide expressing nucleotide sequence isolated from the Sargasso Sea
atgttattattagtaggtttaggaaacccaggtccaaattacgacaacaacagacacaatattggatttaaagttattgacgcaatcaatcaacaacttagtctttcaaaacaaaaaccaaaatttaaaggtcttcttacaactggaaatattgacaataaaaaagtttatgcaataaaacctttaacatttatgaacaactcaggaacttgtattaaagagttaatagaatattttaaaatagacgcgaagaatgtttttgtttttcatgacgacttagacatagaccttggaaaagtaaaagcaaaattcggaggaagtagcgcaggtcaccacggtatagagtcaattgataaatcaataggaaaagattactcaagagtaagaataggaattggtcatc

SEQ ID NO: 259384 - DNA, 457 bp, Unknown
  Bacterial polypeptide expressing nucleotide sequence isolated from the Sargasso Sea
aaaaaagataaacaaaaagagatttataaaggtaaaataaaaaatataaatatatatattattaaacctttaacatttatgaatctatcaggcatacctataggaaattttttaaattattataaaattccaattaaaaatttgttagttgttcatgatgatattgatttaagtttgggtaaagtcaaaataaaaatcggtggaggaaatggtggtcataatggattacatagcgttgataaaatgataggtaaaatgtattacagattacgtattgggatcgggcgtcctaaatctaaagatttagtaaataaatatgtattaaagaaatttaaaaaagacgaaaaaaaaattattgaaacaatcttagatttttcattagattctattgatcttttattagaaaacaaagaattatttttaactaaaatatatacatttattcaaaaaatataat

SEQ ID NO: 259385 - DNA, 574 bp, Unknown
  Bacterial polypeptide expressing nucleotide sequence isolated from the Sargasso Sea
atgcttttattagtaggtttaggaaatcctggtccaaattacgacaacaacagacataatatcggttttaaagttatcgatgcaatcaaccaacaatttagcctttcaaaacaaaaaccaaaatttaaaggacttttaacaacggggaatattgataataaaaaagtctacgcaataaaacctttaacatttatgaataattcaggaacctgtataagagaattaatagaatattttaagatagatgctaaagatgtattcgtctttcacgatgatttggatattgatttaggaaaagtaaaagctaagtttggaggaagtagcgcaggtcatcacggaatagaatcgatagataagtcaatcggaaaagaatactcacgggttaggataggaattgggcatccaaaaaatggaaagaaagtggacaaccacgttttggatgattttaatgaaaacgaagaagaaaggatcaaagatataactgacaatatagttaaattaattcctacactcattgaaaaaaaaatggatactttctcaagcaaggtaaatcaaaatctggatgggatttaag

SEQ ID NO: 259386 - DNA, 478 bp, Unknown
  Bacterial polypeptide expressing nucleotide sequence isolated from the Sargasso Sea
gcaggatttctcatccttgatcttcttgcaaaagaactgaacgtagcttggtctaaaaataagcatggagcctttgaagccaaagctgagctttgggggcagaaggttctttttctaaagccccaagattttatgaatctaagtgggaaagctgtcgcaaagtttgttcactttcataagcttgaagaagaatccattgctattttacatgatgatgtggatgtcccagcagctaaggttaaaatgcgaaaaggggggagtcctggaggccataatgggattctcagtatacaaaaagagcttggtttttcagggttttatcgaataaaactaggtgttggaaaagctccaccctcaagctttttatccacctcaaactgggttcttgggaagtttactcaagaagagatagacattttatcagaagagatgtacttagcagtgaaagaaagactacggagtctatggtcctcatagg

SEQ ID NO: 259387 - DNA, 562 bp, Unknown
  Bacterial polypeptide expressing nucleotide sequence isolated from the Sargasso Sea
atgttattatttgtaggattaggtaacccaaccccagacagtcaaaacaaccgtcacaacattggtttcaaagtcattgatgcaataaatcaaaagtttgggttatcaaaacaaaaaccaaagtttaagggattattaaccactggtaatattggtgataagaaggtttatgctataaaaccacttacttttatgaacaactctggaatttgtattagagagctaattgagtattttaaaatggatgctgcagatgtaattgtgtttcatgatgaccttgatattgatattggaaaaattaaagctaagtttggtggctcaagtgctggacataatggaatagagtcgattgacaagtttattggaaaagattactcgagagtaagaataggtataggaaagcctgaatcaagaatttcaatttcagactatgttctaaatgatttcaatgacgaagaaaaagagaaattagaaaatattactgaaaatattataacgtccttaaatatacttcttgataaaaaattagaattattttctagcactgtaaataacaaataaa

SEQ ID NO: 259388 - DNA, 607 bp, Unknown
  Bacterial polypeptide expressing nucleotide sequence isolated from the Sargasso Sea
atgcagcttattgcgggtttaggcaatccgggtgaaaaatatcaagataatccccataacatcggattcagaacactcgatcaactgatgaaggcactcgatcttgagggctttcacagacgtttcaatagtgaattccagagaacattagaaaacggtcaagtgactttgatgctcaagcctgaaacctatatgaactgtagtggcgaagcgattgctgaatgcgcaagatacttcaagattccttcagaaaaaattcttgtgatcagtgatgacctagatcttccagccgggaaagcacgactgcgagtctctggagggcacggcggccataatgggctcagatccgtcattcaatgcctgggcacggaccaattccttcgggccagaatcggaattggcaggcctgattattcaagctctgggaaagaagcttcagtttcccaatatgtgctgggcaaaatggaagaaacgaaagcggaactttgtctgcaggctatggagaaagttgtggatatgctggtccgttttgttcgccagtcacgtttccaaagcacatcaatcagcattcccactccggctctgcctgcaacagggcaaggttgag

SEQ ID NO: 259389 - DNA, 501 bp, Unknown
  Bacterial polypeptide expressing nucleotide sequence isolated from the Sargasso Sea
tatgcttttacttgttggattaggaaatccaggctcaaattatactaatacaagacataacatcggtttcaaaattatcgatgctatcaacgcgcattttaaattatcaaaacaaaaaccaaagttcaaagggttacttactacaggaaatattgatgaaaaaaaaatttacgcaataaaacctcttacttttatgaacaattcagggacagcgattaaagaactgatcgattattttaaaattgaagcaaaagatgtaatagtatttcatgatgatatggatattgattttggaaaaattaaagcaaaatttggcggaacgagcgctggacataatggaatcgagtccatagataaatttataggaaaagactattcaagagttcgaattggtataggccatccaaaacaaaagaaaaaagttaataatcatgttttagaagattttaaagaagacgaagaagaaaaaataaaagagattactgaaaatattgtaaaaca

SEQ ID NO: 259390 - DNA, 562 bp, Unknown
  Bacterial polypeptide expressing nucleotide sequence isolated from the Sargasso Sea
atgattgcattggttggcttaggaaacccaggaaaaaaatataaatacaatagacataatattgggtacttggtattagacaaaatagttaaatcacttgatattgataaccaaaaaaccaaattcaatgggaaattttataaatcaagtattggtcagaaaaatattattctgtttaaatctaacgattatatgaatgaatgtgggtactcaattagtcaaattataagtttttttaaagtacaaaatgaagatttatatatctttcatgatgatttggatttagaggttggtaaaataagaattaaaaatggtgggagttcagctggtcataatggccttaaatcgatcgatacatatatcggcaagaattataatcgtgtaagaattggtattggtcacccaggagagaaaaaattggtagagaaatatgtcttgtcaaactttaaaaaggaagagtggtcaaatttatcccttattaaccaaaatatttcagagaatatagacctattagttaataacaaacattcatcattcttgaataagattaaattaagttaat

SEQ ID NO: 259391 - DNA, 562 bp, Unknown
  Bacterial polypeptide expressing nucleotide sequence isolated from the Sargasso Sea
tatgttactatttgtaggattagggaatccaacacctgaaagtgaaaataatcgtcacaacattggatttaaaataattgatgcaattaatcaaaaatttggattgtcaaaacaaaaacctaaattcaaaggtttacttactactggaaatataggagataaaaaagtttatgctattaaacctttaacctttatgaataattcaggaatctgcataagagaattactagagtacttcaaaattgaaagtgaagacgtaatagtttttcatgatgatttagatattaatgtgggaaaagtgaaagcaaaatttggtggttcaacagcaggccacaatgggatagagtctatagataaatttattggtaaagattattcaagagttagaattggtattggtaggcctgatgctaaaatttcagtttctgattatgtgttaaatgattttaatgaagaagaagaagaagaacttgaaaaaattacttccaatataactgattcaattgcaatattaattgataaaaaattagaacttttttccagtactgttaataataaatag

SEQ ID NO: 259392 - DNA, 362 bp, Unknown
  Bacterial polypeptide expressing nucleotide sequence isolated from the Sargasso Sea
tatgcttctacttgtaggattaggcaatccaaccccagacagtgaaaacaataggcacaatattggtttcaaaattatagatgcaataaataaaaaatttggactttcaaaacaaaaaccaaaattcaaaggacttcttacgactggcaatgtaggagaccaaaaagtttacgctattaaacctttaacatttatgaataattctggaatttgtattagagaattaattgaatatttcaaaatagatgctgaggatgttatcgtttttcatgacgatctagacatagaatttggtaagataaaagcaaaatttggtggctctgatgctggacataacggaattgcatcaatagataaattta

SEQ ID NO: 259393 - DNA, 601 bp, Unknown
  Bacterial polypeptide expressing nucleotide sequence isolated from the Sargasso Sea
aatgaattcaacaaacaatcctccattattgattgttggtctaggaaacccggatcctaaataccttaaaactagacacaatattggattttggctcttggatctattggctgaaaagtataatttatcattcaatgataacttgaaaaaaggttatttagattcaacttatcaggatgataacttcacaatcaagatactaaaaccaatgactttcataaatgatagcggttctcccttagttaaatttataaagaacacaaatataagtcctaaagatataattgtagcttatgatgatttagatttatcacctggtaaagtaagattaaaattttcagggggcagtggcggtcataatggaattaaagacataacagaaaaaataggaacaaaagacttctggagactaaaaattggaattggtaaaccaatgcataaagatgatgttatatcctatgtattgggtaaaccttcgcctgaagaaaaagcgagcataaattctggtatcaataaaatattagctaactcaaatgatattatctccggaaattacacaaacttcatgaacaacatcaacggtggcggtaatgggatttaa

SEQ ID NO: 259394 - DNA, 150 bp, Unknown
  Bacterial polypeptide expressing nucleotide sequence isolated from the Sargasso Sea
tctgatcgtgggactgggaaatcccggtcccaagtattatctgacccgtcacaatgccggtgctgagttggtacgaaccctagcagccaccctgcacagtcctctaaaacctgagagtaagttctttggtgagaccgccagagtgaatat

SEQ ID NO: 259395 - DNA, 462 bp, Unknown
  Bacterial polypeptide expressing nucleotide sequence isolated from the Sargasso Sea
tatgaataaatatcttattctaggtattggaaatattggtagcgagtatgatgatactagacataacataggctttcaaattgttgatgagcttgcaaaatgtcttgaaactaaatttgattccttaaaactagctcaaagggcagaaggtagtttcaaagggaaaaagatagttatcataaaaccaaataattatgtaaacaattcaggaagatcattagtgtattggcaaaaaaaagaaaaagtttcacttgaaaacattctggttgtttgtgatgatttaaatttattttttggaaatattaaaataaaaccaaatggtacatctggaggtcataatggtttaaaagacattgaagataatcttggaacttctaattatgctaggctaagggttggaatatcaaataacaataagatttccaaatcagactatgttttaggaaagtggaacagctttga

SEQ ID NO: 259396 - DNA, 336 bp, Unknown
  Bacterial polypeptide expressing nucleotide sequence isolated from the Sargasso Sea
tatgcttttattagtaggtttaggaaaccctggcccaaattacgacaataccagacacaatataggatttaaagttatagacgcaattaaccaacaatttagtctttcaaaacaaaaaccaaaatttaagggcttattaacaaccggtaacattgataataaaaaagtttatgcaataaaacctttaacttttatgaataactcaggaacttgtataaaagaattaatagaatattttaagatagatgcgaaggatgtttttgttttccatgatgatttagatattaatttaggcaaagtgaaagcaaaatttgggggaagtagtgctggtcacca

SEQ ID NO: 259397 - DNA, 467 bp, Unknown
  Bacterial polypeptide expressing nucleotide sequence isolated from the Sargasso Sea
aatgtttttaatatgtggccttgggaatccaggggagaatttcatcaacacaagacataacgtaggatttaaacttatagataaactatcaagcttttatagtgttttaccttttaaaaatgatagcaaaaaagtagttcttaaaggaaaaattaatcatcactcatgtatgttaatgaaaccattaaatttcatgaacttatctggtaaaccaattcaagaaatagtaaacttttataaaattgaaaaagaaaaaatatatataattcacgatgacctagatctagaattgggtaaagtgaaattgaagtttggtggaggaaacggtggtcacaatggcctttgcaatattgataaaatgataggaaatagttacaatagaattcgcataggtattgatcaccctggtacaaagaatttagtatctaattatgtttttaataaatttacaaatgatgaaatgaaat

SEQ ID NO: 259398 - DNA, 403 bp, Unknown
  Bacterial polypeptide expressing nucleotide sequence isolated from the Sargasso Sea
atgttgctggtcgtcggtcttggcaatccgggtgccaaatacgctaacaaccgtcataacattgggttcatggcggtggacgatatcgtccgccgccattccttttctaggtcgcgtgcgaagttccagagcgaaattgcggaagggaatatcgccggcgagaaaatcctggcgatgaaaccgagtacctatatgaatgaatcgggccgcagtgtgcaggcggccatggtgttctacaagctaccgcctgaagatgtcatcgtaattcatgacgagatcgatctggctggcggcaaggtccgggtgaagcgtggcggcggccatgcgggccataatgggctccggtccatccatgcgcgcattggggccaactacgcgcgtgttcgcctaggcgtggggcatc

SEQ ID NO: 259399 - DNA, 562 bp, Unknown
  Bacterial polypeptide expressing nucleotide sequence isolated from the Sargasso Sea
tatgcttttattcgtaggtttaggaaacccaacccctgatagtgaaaacaacaggcacaatataggtttcaaaatcattgatgctataaataaaaaatttggtctttcaaaacaaaaaccaaaatttaaaggattacttacaacaggaaatattaaaggcaaaaaagtttatgcgattaaacctctaacatttatgaataactcaggaatatgtattcgagaattgatagaatattttaagattgaagctgaaaatgtaattgtctttcatgatgatcttgatatcgactttggaaaaattaaagcaaaatttggcggatcaagtgctggacataatggaattgaatcaatagataaatttattggaaaagattattctagagtaagaataggaataggcaaaccaaaaaaaaactctgatgtgctggatcatgttcttaaagattttgatgaagaagaaattaaagacttaaaaaaaattactagtaacataactgaatctttatcaattctacttgataaaaaattagaccttttttcgagcacaataaataataagtaa

SEQ ID NO: 259400 - DNA, 217 bp, Unknown
  Bacterial polypeptide expressing nucleotide sequence isolated from the Sargasso Sea
catgacacatagccccctgaaactaattgttggcctaggtaacccagataaaaatctattaaaaactcgccataatgtcggtttctggtttgtggattattatgctgatttaatttctaagaaatttaaaattattaataaatatgaatcagagatattagagtcaggtgttcatgaaaatataaatataataaagccagtaaactatatcaataac

SEQ ID NO: 259401 - DNA, 258 bp, Unknown
  Bacterial polypeptide expressing nucleotide sequence isolated from the Sargasso Sea
tatgcttttattagttggattaggaaatcctggaccgagtagcacaaacaatcgacacaatattggatttagaattattgatgccataaataaacacttcaaattgtcaaaacaaaaaccaaagtttaaaggattgttaactacaggaaatattgagtctaaaaaagtttatgcgattaaaccattaactttcatgaataactcaggaactgcagtaaaagagattatcgattatttcaaaattgactctaaagatgt

SEQ ID NO: 259402 - DNA, 613 bp, Unknown
  Bacterial polypeptide expressing nucleotide sequence isolated from the Sargasso Sea
actgaagaagaaaccaaagaagataactcagaagaaagttaataaagtgtataaattatgtattgttggactaggaaatccaggcaataaatataatggtactcgtcataatgttggaaaagattggctaatagatatatctcaacaatactttaaagaatttcaaaataaaccaaaatatgaagctgaatttggtgaatcacataatgcagaaatattatggataaccccatcaaattttgtaaatgaatcaggaagaacaatctctaaaattttaagatctcataatttagatatgaatatgtttttaattatccacgatgatttagatttagagcctggagaattaaaaatcaaagaaggtggaggtcatggaggtcataatggtctaagagatataataaaaagcactggtaaaagtgattttatgagattgagggtgggtatcggtcaccctggaatgaaaaatgaagtgactaattgggttttaaataaattctctccaaatgaaaaaaaatctatagataatgcttattctaaatttgtagatgtatttgagctaattatcaataatcaattacaaaaagttcaaaaaattttacatacaaaataa

SEQ ID NO: 259403 - DNA, 562 bp, Unknown
  Bacterial polypeptide expressing nucleotide sequence isolated from the Sargasso Sea
atgctactacttgtaggattaggcaatccaaccccagacagtgaaaacaatagacacaatattggtttcaagattatagatgcaataaataaaaaatttggactttcaaaacaaaaaccaaaattcaaaggacttcttacaactggtaatgtgggagaacaaaaagtttatgcaattaaacctttaacatttatgaataattctggaatttgtattagagaattaattgaatatttcaaaatagatgctgaggatgttatcgtttttcatgacgatctagatgtagaatttggaaaaataaaagcaaaatttagtggctctgatgcaggacataacggaattgcatcaattgataaatttattggtaaagattattcaagagtgcgaataggaattggtaaaccaaaagataaaatggaagtaagtgattttgttcttcaaaattttgatgaggatgaaatgcttgaattggaaaaaattacaaataatatcacagattctatatcaattcttatcgataaaaaattagatttattctctagcactgtaaataataaataat

SEQ ID NO: 259404 - DNA, 574 bp, Unknown
  Bacterial polypeptide expressing nucleotide sequence isolated from the Sargasso Sea
tatgcttttattagtaggtttaggaaacccaggaccaaattacgacaacaacagacacaatataggttttaaagtaattgatgcaataaaccagcagttcagcctttcaaaacaaaaaccaaaatttaaaggacttttaactacaggtaatattgataacaaaaaagtttatgcaattaagcctttaacatttatgaataattcaggaacatgtattaaagagcttattgactattttaagatagatgcaaaaaacgtttttgttttccacgatgatttagatatagacttaggaaaagttaaagctaaatttggcggaagtagtgctggtcaccacggtattgagtcaattgataaatcaattggaaaagattattcaagagtgcgaattggtataggacatcctaaaaatgggaaaaaggttgatactcatgttttagaagattttaatgagaacgaggaagacagaattaaagacataactgagagtatagtaaaactcatacctactttaatcgaaaaaaaaatcgatattttttctagcaaggtaaacgaaaatttggatgggatttaa

SEQ ID NO: 259405 - DNA, 562 bp, Unknown
  Bacterial polypeptide expressing nucleotide sequence isolated from the Sargasso Sea
tatgattttgcttgtagggttaggcaacccaactcccgacagtaatgacaatagacataatattggttttaaaataattgatgctataaatcaaaaatttggtctatcaaaacaaaaacctaaatttaaaggtttattaactacaggaaatatttcaaataaaaaagtttatgctattaaacctttaactttcatgaacaattctggaatttgtataagagaattaattgagtattttaaaatagatgcagaagatgtaattgtttttcacgatgatttagatgtagactttaaaaaaattaaaactaaatttggtggatcaagtgctggtcataatggtatagcatcaatagacaaatttataggaaaagattattctagagtaagaataggtattggaaaacctgaaaaaaaaattgaaatttcagattttgttttaacaaatttttctgaagaagaaaaaacagaattagaaaaagttataaaaaatataattgactcaatgcctatattaattgataaaaaattagatttattttctagcacagttaataataaataa

SEQ ID NO: 259406 - DNA, 595 bp, Unknown
  Bacterial polypeptide expressing nucleotide sequence isolated from the Sargasso Sea
tatgtttttacatgttggtttaggcaaccctggctttgaacataaactaaatcgccataatattggttttatggctatcgatcatcttctaaatttttataaaattaatgatatatataaaaataagttcaatggtcattattataaattgtcccaaaaaaatagaagtattttttttctaaaacctcaaacttatatgaaccaatcaggaagttgtgtttcttcgctaattaagttcttttcaattaaaccttcttcagtaatcgtttggcatgacgaaattgatttagacaaaggcaaaataaaggccaaatttggtggcgggcacggtgggcacaatggaattagacatataattaagcatattggtgaaaactttttaagggtaagaattggtgttggcagacctgaaaacaatatagatccatcaaagtgggtattatcatcttttcataaaaatgattttgatggttgggttaatgatttattatcaattatggcttcagaagtagagctactccatttaaataatagtatagactttatgaataaagtttcaattttacgaaacaaacaaaatattgagataaaataa

SEQ ID NO: 259407 - DNA, 562 bp, Unknown
  Bacterial polypeptide expressing nucleotide sequence isolated from the Sargasso Sea
atgttgttacttgttggtttaggaaatccgactcccaatagtcaaaataatcgtcacaatattggttttaaaatagtagatgcaattaacaagaaatttagcttatcaaaacaaaaaccaaaatttaagggcttgttaactactgggaacattggtgaaaaaaaaatatatgcaatcaaacctcttacatttatgaataactctggaatctgcattagagaattgttagaatattttaagatagatgcagaaaatgtgattgtatttcatgatgacctagatgttgaatttggaaaagtaaaagcaaaatttggtggttcaagtgcaggtcataatggaattgcatcaattgacaagtttatagggaaagaatactcaagggttcgaattggtataggaaagccagaaaataaaatatctgtttcagattatgtcttaaacgattttaatgaggatgaacaaatacatttagatttaattactaataatataattaattcattaaatattttaattgataaaaaattagatttattttctagcacagttaataataattaaa

SEQ ID NO: 259408 - DNA, 562 bp, Unknown
  Bacterial polypeptide expressing nucleotide sequence isolated from the Sargasso Sea
atgttactttttgtaggattaggtaatccaacaccaaacagcgaaaataatcggcacaacataggttttaaaattatagactcgattaataagcaatttggattgtcgaaacaaaagcccaaatttaaaggattgttaacaactggcagcattgaaaatacaaaagtctacgcaattaaacctctgacattcatgaataactcagggatttgtattagagagttattagaatactttaaaattgaacctgataatgttgtagtttttcatgatgatcttgatattgaatttggaaaaattaaggcaaaaaaaggtggttccgatgcggggcataatggtattgcttcaatagataaatttattggtaaagattattcaagagtaagaattggtattggaaaaccagataacaaaatttctgtttcagactatgttcttgacaattttagtgaagaagagcaaaaaaaaattgaagaaataactgacaacattactgaatgcttatctatgcttatagacaagaaattagatttattttcaagttcagtaaataataaataat

SEQ ID NO: 259409 - DNA, 562 bp, Unknown
  Bacterial polypeptide expressing nucleotide sequence isolated from the Sargasso Sea
tatgttattacttgtaggtttaggaaatccgactcctaatagtcaaaataatagacataacattggttttaagattgtggatgcaattaatcaaaaatttggattgtctaaacaaaaaccaaagtttaagggattattaactactggaaatattggtgataagaaaatatatgcaattaaacctctcacatttatgaacaattcaggaatttgtattagagagctacttgaatacttcaaaatagatgcagaagatgtgattgtatttcatgatgatctagatattgaatttggaaaaattaaagcaaagtttggtggatcaagtgcaggtcacaatggaatagcatcaattgacaaatttataggcaaggaatattcgagggttcgtattggcataggaaagccagaaaataaaatatctgtttctgatcatgtgctaaacgactttaatgaggatgaacaagttcatttggactcgataacaagtaatataattgagtctttaactatattgattgataaaaaattagatttattttctagtactgttaacaacaattaa

SEQ ID NO: 259410 - DNA, 562 bp, Unknown
  Bacterial polypeptide expressing nucleotide sequence isolated from the Sargasso Sea
tatgttgttacttgttggtttaggaaatccgactcctaatagtcaaaataatagacataacattggttttaagattgtggatgcaattaaccaaaaatttggattgtctaagcaaaaaccaaagtttaaaggattattaactactgggaatattggtgataaaaaaatatatgcaattaaacctctcacatttatgaataattcaggaatttgtattagagagctacttgaatacttcaaaatagatgcagaagatgtgattgtatttcatgatgacctagatattgaatttggaaaaattaaagcaaagtttggtgggtcaagtgcaggtcacaacggtattgcatcaattgataagtttataggcaaagaatattcaagagttcgtattggtataggaaagccagaaaacaaaatatctgtttctgattatgtgctaaacgactttaatgaggatgaacaagttcatttggactcaataacaagtaatataattgagtctttaactatcttgattgataaaaaattagacttattttctagcactgttaacaacaattaa

SEQ ID NO: 259411 - DNA, 562 bp, Unknown
  Bacterial polypeptide expressing nucleotide sequence isolated from the Sargasso Sea
atgttgttactcgtaggtttgggcaatccaaccccaaacagtcataataatagacataatataggttttaaagttttagatgcgataaatcaaaaatttggtctttcaaaacaaaagccaaaatttaagggtttacttacaacaggtaatatcggtgaaaagaaaatttatgctatcaagcctctgactttcatgaacaactcgggaatatgtatcagagaattgcttgaatattttaaaattgatgcagaagatgtgattgtttttcatgatgatctagatgtagaatttggaaaaataaaggcaaaatttggtggatcaaatgcaggtcacaatggagttgcttcaatagataaatttattggaaaagactattctagagtaaggatcgggattggaaagccagagaataaaatgtctgtatcagattttgttttaaatgatttttctgatgatgaacaagaacacttagaaaaaattactcacaatataatagactctatcgctattttgatagataaaaaattagatttattctcaagcaaagttaacaataattaaa

SEQ ID NO: 259412 - DNA, 574 bp, Unknown
  Bacterial polypeptide expressing nucleotide sequence isolated from the Sargasso Sea
atgcttttattagtaggtttaggaaacccaggaccaaattacgacaacaacagacacaacataggtttcaaagtaattgatgcaataaaccatcaattcagcctctcaaaacaaaaaccaaaatttaaaggacttttaacaactggcaatattgataataaaaaagtttacgcgataaagcccttaacatttatgaataattcaggaacatgcattaaagagcttattgaatattttaagatagatgcaaaaaatgtttttgttttccatgacgatttagatatagatttaggcaaagttaaagctaaatttggtggcagtagtgctggtcaccacggtattgaatcaattgataaatctattggaaaagattactcgagggtaagaattggtattggacacccaaaaaacggtaaaaaggttgatgctcatgttttggaagattttaatgaaaacgaagaagatcgaattaaagatataactgagaatatagttaaactcatacctactttaatcgagaaaaaaattgatattttttctagtaaggtaaacgaaaatttggatgggatttaag

SEQ ID NO: 259413 - DNA, 388 bp, Unknown
  Bacterial polypeptide expressing nucleotide sequence isolated from the Sargasso Sea
atgtttttaatatgcggtcttggaaatccaggaataaaatatgctaataccagacataatattggctttaaattagcagacaaggtaatttcacattttgatatacctaaaatcaaagaagataactcaaaacaattatattctggacaaattagtggattaaaaatttttgttttaaaacctcttacttttatgaatttatcagggaaacctcttttagaaatagttaatttttataaaataataaaaagtaatatttttgttattcatgatgacctagatttagaattagcaaaaataaaaataaaaaaaggtggcagtaatggaggtcataatgggcttgctagtattgatggatatttaggagaaaattataacagaataagaa

SEQ ID NO: 259414 - DNA, 562 bp, Unknown
  Bacterial polypeptide expressing nucleotide sequence isolated from the Sargasso Sea
aatgttgttactcgtaggtttgggcaatccaaccccaaacagtcataataatagacataatataggttttaaagttgtagatgcaataaatcaaaaatttggtctttcaaagcaaaagccaaaatttaagggtttacttacaacaggtaatatcggtgaaaagaaaatttatgctatcaaacctctgactttcatgaacaactctggaatatgtatcagagaattgcttgaatatttcaaaatagatgcagaagatgtcattgtttttcatgatgatctagatgtagagtttggaaaaataaaggcaaaatttggtggatcaagcgcaggtcacaatggagttgcttcaatagataaatttattggaaaagactactcaagagtgaggattgggattggaaagccagagaataaaatgtctgtatcagactttgttttaaatgatttttcagatgatgaacaagaacacttagaaaaaattactcacaatataatcgactctattactattttgatagataaaaaattagatttattctcaagtaaagttaacaataattaa

SEQ ID NO: 259415 - DNA, 622 bp, Unknown
  Bacterial polypeptide expressing nucleotide sequence isolated from the Sargasso Sea
gctgaagaggaatcctcagaggaaagtggagaataaaaaaaactttacttttattggtctttggaatcctcaaaaaaaatatgaaaagactaggcacaatataggtgctgactgtttagttaagctttctgaaaaaaataacataagtttaaaaactcataaatcaggtaaatttcaattaggaagctatgaggaagatggctatgaaatagacatagtcataccaatggtttctatgaataattctggagaagcagttaaagaatatataaaaaataaaaatatggattacgaaaacttggttgttttacatgacgatatagatttaggttttggtagattaaggttaaaaaaaggtagtggtgatggaggtcataacggaattaaatctattaattatatcattaacgccacagactattttcgtttaaggattggtgtaggaagacctcctagtgggattgatccagcagaatacgtactttcacggtttttatcagatgaaatagaagaaattaagtttttagtagaagatgcaattgatattgttaaagtatttcctaaagataaagaaatggcaattaaacaagcttctgaacgaagaattatagatgtagtgtga

SEQ ID NO: 259416 - DNA, 574 bp, Unknown
  Bacterial polypeptide expressing nucleotide sequence isolated from the Sargasso Sea
atgcttttacttgtcggattaggaaatcctggtacaaatagtgttaataacagacacaacattggttttaaaatcattgatgcagtcaacgcacatttcaagttatcaaaacaaaaaccaaagttcaaaggattgttaacaacaggaaatatagagtccaaaaaaatttatgctattaagcctttaacttttatgaataattcagggacagctattaaagaattaatcgattattttaaaattgatgcaaaaaatgtttttgtttttcatgatgacatggatattgattttggaaagataaaggcaaaatttgggggaagtagcgcaggtcacaatgggatcaactcgatagataaatttataggaaaagactattcaagaattcgaattggaataggccaccctaaacaaaaaaataaagtcaataatcatgttttagaagatttcaaagaggatgaagaagaaaaaataaaagaaattgctgaaagtattgtgaaattaatacctacacttattgagaaaaaaatggacctattctcaagcaaagtaaatcaaaatcttaatgggatttaaa

SEQ ID NO: 259417 - DNA, 419 bp, Unknown
  Bacterial polypeptide expressing nucleotide sequence isolated from the Sargasso Sea
aatgttgttactcgtaggtttgggcaatccaaccccaaacagtcataataatagacataatataggttttaaagttgtagatgcgataaatcaaaaatttggtctttcaaagcaaaagccaaaatttaagggtttacttacaacaggtaatattggggaaaagaaaatttatgctatcaaacctctgactttcatgaacaactcaggaatatgtatcagagaattactagaatatttcaaaatagatgcagaggatgtgattgtttttcatgatgatctagatgtagaatttggaaaaataaaggcaaaatttggtggatcaagtgcaggtcacaatggagttgcttcaattgataaatttattggaaaagactattcaagagtgaggattgggattggaaagccagagaataaaatgt

SEQ ID NO: 259418 - DNA, 562 bp, Unknown
  Bacterial polypeptide expressing nucleotide sequence isolated from the Sargasso Sea
tatgttgttacttgttggtttaggaaatccgactccaaatagtcataacaatagacataacattggttttaagattgtagatgcaattaaccaaaaatttggattgtctaagcaaaaaccaaaatttaagggattattaactactggtaatattggtgataagaaaatatatgcaattaaacctctcacatttatgaataattcaggaatctgtattagagagctacttgaatatttcaaaatagatgcggaagatgtgattgtatttcatgacgacctagatattgaatttggaaaaattaaagcaaagtttggtggatcaagtgcaggtcataatggtattgcatcaattgataagtttataggcaaagaatattcaagagttcgtattggcataggaaagccagaaaataaaatatctgtttctgattatgtactaaacgactttaacgaagatgaacaagttcatttggattcgataacaagtaatataattgagtctttaactatattaattgataaaaaattagacttattctctagtactgttaacaacaattaa

SEQ ID NO: 259419 - DNA, 619 bp, Unknown
  Bacterial polypeptide expressing nucleotide sequence isolated from the Sargasso Sea
gatgcagaaccagcagaagaaagtggagaataaacctaactttgttttagttggactttggaatcctcaaccaaaatacatcaatactcgtcacaatatcggcgccgatatacttttctcttactgtcaaaaaaagggtaaagaatttcaattagatagttcaggaagttttcagtctacaaaatatgaatttgaagataaattagtaaatttattaatacctatgacctctatgaacaaatcaggacaaggattaaaagcgtttctaatgagtactggaataagagattatgaattagttgtaattcatgatgatattgatctagcatttggtagatttcgtataaaaaaggcaagttctgacggtggtcataacggcattaagtcgatggattcatctttaggacatagcaattattggaggttcaaaattggtcttggaagaccaccgtcaacggtagatcctgcagattatgttttatcaaagtttaataatgacgagacagaagaagttgagtttataattgaagacagcatggaaattattgactcatttttagaaaattcagaaaatggaataaaaaaagcatctgagcgaagaattattgatgtgatctaa

SEQ ID NO: 259420 - DNA, 250 bp, Unknown
  Bacterial polypeptide expressing nucleotide sequence isolated from the Sargasso Sea
atgttgctttttgttggactaggaaatcctacaccgaattctgaaaataatagacataacatcggttttaaaattattgatgcaataaataataaatttaaattatcaaaacaaaaaccaaaatttaaaggacttcttacaactggaagcatcaataataaaaaagtttatgcaataaaacctctaacctttatgaataattcagggatatgtatcagagaattaatggagtactttaaaattgatgcag

SEQ ID NO: 259421 - DNA, 562 bp, Unknown
  Bacterial polypeptide expressing nucleotide sequence isolated from the Sargasso Sea
atgttactttttgttggtcttggcaaccctactccaaatagtgaaaataatagacataatatagggtttaaaattattgatgcgattaatcaaaaatatggcctatcgaagcaaaaaccaaaatttaaaggtcttcttacgactggaacaatagatggaaaaaaagtttacgctattaagcctcttacatttatgaacaattcaggcatttgtattagagaattaattgaatattttaaaattgaagctgaaaacgtaatagtgtttcacgacgatttggatatagattttggaaaaattaaaacaaaatttgggggatcaagtgcaggacataatggtattgagtctatagataaatttattggtaaggaatattctagagtaagaattggcataggccacccaaaagaagacatagaagtatctgaccatgttttacaagatttcaatgaagatgaaaaagaggagatttcttcaattacagaaagtataactgagtccctatcaattctaattgataaaaaattggatttattttcaagcacagtcaataataaataaa

SEQ ID NO: 259422 - DNA, 562 bp, Unknown
  Bacterial polypeptide expressing nucleotide sequence isolated from the Sargasso Sea
actggttggcttgggaaaccccggagaaaaatatgaatccactagacataatattgggttctcctttctagattcttactctaagcaaattcaatgtcccatacttgacactaaatttgattcgtactatggaaattttagcaaggacggcaataaaatactattactcaaacctcagacattcatgaacgaaagtggattagcagtaaaaaaagcaaaaaatttttttaaaatcaatgatgaaaatattataataatttatgatgatttagatttacagattggtcagataaaaataaaaatgggtggtggatcaggaggccataacggaattaattctattatagaaaatattggaaacaacaatttctcaagaattagaattggaatcggaaaacccagggagaaatcaatgacaaataaatatgttctctcaaagtttactaaagaagaaggaaaaattgtcaacaatatcaataatttagccgaggatataatttctgccatagtttttcaatctatttcatttgcaatgaacacatttaacagtaaaattcaataa

SEQ ID NO: 259423 - DNA, 577 bp, Unknown
  Bacterial polypeptide expressing nucleotide sequence isolated from the Sargasso Sea
atgaataaatatcttattctaggtattggaaatattggtagcgagtatgatgatactaggcataatataggctttgaaattgttgatcaactttctcaaaatctagataccaagtttgaatctgtaaaactggctcaaagggcagaaggaagtttcaaaggaagaaagataattatcataaagccaaacaattatgttaataattcaggaagatcattagtgtattggcaaaaaaaagaaaaagtttcacttgaaaacattctggttgtttgtgatgatttaaatttattttttggaaatattaaaataaaaccaaatggtacatctggaggtcataatggtttaaaagatattgaagataatcttggaacttcaaattatgctaggttaagggttggaatatcgaataacaataagattcccaaatcagattatgttctaggaaagtggagcagctatgaaatatccaatataaatagtcttacaattagctcaattgagattattttctcatttattcaaattggtattgaagagacaatgaatctctacaacaagaaaaattttattaaatgaa

SEQ ID NO: 259424 - DNA, 562 bp, Unknown
  Bacterial polypeptide expressing nucleotide sequence isolated from the Sargasso Sea
tatgatactgtttgtagggttaggaaacccaactcctgacagccaagataataggcacaacataggttttaaaataattgatgctataaataaaaaatttactctttcaaaacagaaaccaaaatttaaaggactattaacaacgggagatattgaaaataaaaaaatatatgcaattaaacctttgactttcatgaataactcaggaatttgtataagagagttaatcgagtattttaaaattgatgcggaagacgtaattgtatttcatgatgatcttgatgtagatattggaaaaattaaagcaaaatttggtgggtcaagtgcaggtcataatggaattgaatctatagataaatttattggaaaagaatattcaagagtaagaataggaattggtaaacctggacctaaaatgtctacttcagattatgttttaaataattttaatgaagatgaaaaaaaagagcttgataaaattgtaaataatataattaattcaatatcaattttacttgatagaaaattagatttattttcaagtacagtaaataataaataa

SEQ ID NO: 259425 - DNA, 562 bp, Unknown
  Bacterial polypeptide expressing nucleotide sequence isolated from the Sargasso Sea
atgattctatttgtaggtctcggaaatccaacaccagataatgaaaataatagacacaatattggtttcaaggttatagatgcaattaataaaaaatttcaattgtcgaagcagaaacctaaattcaaaggattgcttaccaccggaaaaattggagaaaaaaaaatatacgcaatcaaacctctaacttttatgaataattcaggtatttgcataagagaattaattgaatattttaaaattgatgcagaagatgtatttgtattccatgatgacttagatattgatgttggtaaggtaaaggcaaaatttggtggttcagatgctggacataatggaattgcatctttagataaatttattggcaaagagtattcaagaattcgaattggaataggtagaccaaacggaaagattgctgttgctgatcatgttttaaataattttaacgatgaagaaaaagaactattagaattaataactaaaaatatacttaacagtattcagatacttttagatagaaaactagaattgttctcaagcacagtaaataataaatgag

SEQ ID NO: 259426 - DNA, 562 bp, Unknown
  Bacterial polypeptide expressing nucleotide sequence isolated from the Sargasso Sea
atgttattatttgtaggattaggtaacccaacccctgacagtcaaaataaccgtcacaacattggtttcaaagtcattgatgcaattaatcaaaagtttggattatcaaaacaaaaaccaaagtttaagggattattaactacaggtaatattggtgataagaaggtttatgctataaaaccactaacttttatgaataactctggaatttgtattagagagcttattgagtattttaaaatggatgctgcagatgtaattgtgttccatgatgaccttgatattgatgttggaaaaattaaagctaagtttggtggctcaagtgctggacataatggaatagagtcgattgacaagtttataggaaaagattactcaagagtaagaataggtatagggaaacctgagtcaaaaatttcaatttcagactatgtattaaatgatttcaacgacgaagaaaaagagaaattagaaaatattactgagaatattataacctccttaaatatacttcttgataaaaaattagagttattttcaagtactgtgaataacaaataaa

SEQ ID NO: 259427 - DNA, 568 bp, Unknown
  Bacterial polypeptide expressing nucleotide sequence isolated from the Sargasso Sea
tatgcccgaagaaacactattgctagtaggattgggaaatcctggggaaaagtataaaaataatcgccataatgttgggtttatggtccttgattatgtcactaaccagcttaaatttggtcgaagcagaacaaaattcttaggaagaacatcaatgggctcacatgaaaatattaaactcatatcttttaagcctcaaacttttatgaatgaatctggaagagctgttagagaagcttctaatttctataaaatcaatcctgaaagaatctttgtttttcatgatgatttggatttagcatttggtgatgtcaaattaaaaaaaggcggaagtaatgctggtcataatggattagcttctattgatgaaaatattggtaataactatatccgtctaagaattggaattaatcatccaggtgataaagaaaaggttaccggacatgttcttggagatttttccaaagaagaaaatgaggaatttgagaaaatattaaaaaaaatcgttaaaaattttgatcttctaattgatgcaaacataaaaaaatttcaatcaaatatgaaataa

SEQ ID NO: 259428 - DNA, 562 bp, Unknown
  Bacterial polypeptide expressing nucleotide sequence isolated from the Sargasso Sea
atgttactgcttgttggtctaggaaatccgactccaaatagtcaaaataatcgtcacaatattggttttaaaatagttgatgcaattaatcaaaaatttggtttatcaaaacaaaaaccaaagtttaaaggattactaacaaccggaaatattggcgataagaaaatatatgcaatcaaacctctaacatttatgaataactctgggatttgtatcagagagcttctagaatacttcaaaatagatgcagaagatgtaatagtatttcatgatgatttagacattgaatttgggaaaattaaagcaaaatttggaggatcaagtgcaggtcataacggaatagcatcaattgataagtttattggtaaagattattcaagagtacgtattggtataggaaaaccagaaaataaaatttctgtatcagattatgttttaaatgattttaacgatgatgagcaagttcatttggactcaataacaaataatattattgaatctctaagcatcttaattgacaaaaaattagatttattctcaagtacagttaataataattaaa

SEQ ID NO: 259429 - DNA, 616 bp, Unknown
  Bacterial polypeptide expressing nucleotide sequence isolated from the Sargasso Sea
actgaatcagcagaggaaagtggagaataaaccaaaaactattttagttggtctttggaatcctcaaccaaaatatatcaatactcgtcacaatattggtgcagatattcttttttcgtacattcaaaaaaataacttaaaaatagatttagataattcaggccagttccaatttggaaagtttgaaattatgaatcacgaaatattattagttattccaatgacgtctatgaataattcaggacagggcctcaaatcctttttaatagacgaaaacattaaagactttaatcttttggtaatacacgatgatattgatttagcatttggtagatttcgtttaaaaaaaggtatttcagatggaggacataatggcattaagtctttagacagtgctcttggaactaatgattattggagattaaaaattggtttgggaagaccacctacaagtcaagatccagcagattatgtattgtcgaaatttaataatgatcagaccgaggaagttgagtttataattgaggacagcatggagataattgacttattttttaaggacattgaatttgcaataaagaaagcatctgaaagaagaattattgatgtggtctaa

SEQ ID NO: 259430 - DNA, 589 bp, Unknown
  Bacterial polypeptide expressing nucleotide sequence isolated from the Sargasso Sea
aatgatcgctgggttaggcaaccctggcgaagaatatactctgacaagacataatgccggggctgattacgtaaagctgctatgtgacaaaaaatctcttgcgttaaaaaaagaaaagcaaataaatgggtctttcgctgaattaaccactgaaaaatataaactgatatttgttataccttcaacttacatgaatgagagtggcttaagtgttgcgaaatcaaaaaaattttttaatctagaaacagatcaaatactcatagcgcatgatgaattagatcttccaatatctgaaattcgacttaaagaatctggaggtcatggaggtcataacggattgcgaaatatcattgatcatctgcaaggagacaactctttcaaaagattaagaattggtattggaaaaccaaaaaataatatagatatgatctcttatgttttaaagaaagctccgaagaaagaccgagaagaattgatgttaaaacttcatcattaccttgatctaggagaaagaattattctagatggatggcaaaagacagtcatgaaatatcactcttcagaagaggaggaaagaaatgagtcttaa

SEQ ID NO: 259431 - DNA, 379 bp, Unknown
  Bacterial polypeptide expressing nucleotide sequence isolated from the Sargasso Sea
atgaaattgcttgtagggttaggtaacccaactcctgatagtcacgataatcgacacaatattggatttaaaattatagatgcaataaatctaaagtttaaactttctaaacaaaaaccaaaatttaaaggtttattaactactggaaatatatcagataaaaaagtttatgccatcaagcctttgacttttatgaataactctggaatttgtattagagaattgattgaatattttaaaatagattctgaaaatgtaattgtttttcatgatgatttagacgtagaatttgcaaaaataaaagcaaaatttggcggtttcagcgctggacataacggtattgaatcattagataaatttattggaaaagattattcta

SEQ ID NO: 259432 - DNA, 556 bp, Unknown
  Bacterial polypeptide expressing nucleotide sequence isolated from the Sargasso Sea
aatgattttatttgtaggtctaggcaacccaacacctgatagccataacaacagacacaatattggttttaaaattattgatgcaataaaccaaaagtttagtttatcgaagcaaaaacctaaatttaagggtttgctgactatgggaaatattggaaatgaaaaagtgtatgcgataaagcctttaacatttatgaataattcaggtacttgtataagagaactaatagaatatttcaaaatagactcttcagatataattgtttttcatgatgatcttgatatcgagtttggaaaaatcaaaactaaatttggaggatcggatgcgggccataatggtatcgcttcattagataaatttataggaaaagattattcaagagtcaggataggaattggaaagccagaaaaaattaaagtaaatgattttgttttaggagatttcaacgaagatgaaaaaattcaacttgatgaaatgtcaaaaaaaataatgtcatcattagaattattaatagaaaaaaaactcgaattattttcaagtaaaataaataattaa

SEQ ID NO: 259433 - DNA, 397 bp, Unknown
  Bacterial polypeptide expressing nucleotide sequence isolated from the Sargasso Sea
atgttgctacttgttggcctaggaaatccgactcctaatagtcaaaataatagacataacattggttttaaaattgtagatgcaataaaccaaaagtttggcttgtctaaacaaaaaccaaaatttaagggtttgttaaccactggaaatattggtgagaagaaaatttatgcaattaaaccacttacatttatgaataattctggaatttgcataagagaactacttgaatacttcaagatagatgtagaggatgtaatagtgtttcatgatgatttagatattgagtttggaaaaattaaagcaaaatttggggggtcaagtgcaggacataatggtattgaatccattgataaatttataggtaaagaatattcaagagttcgtatggcatagg

SEQ ID NO: 259434 - DNA, 574 bp, Unknown
  Bacterial polypeptide expressing nucleotide sequence isolated from the Sargasso Sea
atgctcttactagttggattaggaaatccaggttcaaattatactaatactaggcacaatatcggattcaagattattgatgcaattaactcacattttaaattatcaaagcaaaaaccaaagtttaaaggattattaacaacaggcaatatcgaatccaaaaaaatttatgcaataaaaccattaactttcatgaacaattcaggaacagcaataaaagagttaattgactattttaagattgatgccaaagatgtatttgtttttcatgacgacatggatatagattttggaaaaataaaagcaaagtttggcggtagtagtgccggtcataatggtattgactctattgataagtttatcggaaaagaatattcaagagtaagaattggaataggtcatccaaaacaaaaaaagaaagtaaacaatcacgttttagaagattttaaagaagatgaagaagaaaagattaaagaaattactgagaatattgttaagttaataccaacacttattgataaaaagatggatcttttctcaagtaaagttaatcagaaccttaatgggatttaaa

SEQ ID NO: 259435 - DNA, 589 bp, Unknown
  Bacterial polypeptide expressing nucleotide sequence isolated from the Sargasso Sea
atgaatgaaaatattcgtcttgtagtcggcttggggaaccctggcacaccttaccaatccactcgacataatgctggtcgctggtttgtagatctgttctcaaacgacctgtgcgcaagtgcaccgttagaatcaaagtttggatactataaagcatgtctctcccctcaaggagacaaagtgtatttctttgaatctaaaaaatatatgaatgaatgtggcctgagtattgctggttttgcaaaatattataaaattgcagcacaccaaatcttagtggcttatgatgaaatggacctccctcctggtgtcatacgtttgcgtcgaggaggaggctgtgctggtcataacggccttaaagattgtattaaacacatcaaaggcgatttttaccgtcttagaataggggtggggcgacctttaaagggtattgatcctgcaaattatgtgttatcatctccaacatatgacgagcaaaatcgtattaacgcgatcatcactgatgcatgtcatgatgcacgatacgttttagaaggctcgatagaattgtttatgaacaaattacataagattaatcatgggatttaaa

SEQ ID NO: 259436 - DNA, 562 bp, Unknown
  Bacterial polypeptide expressing nucleotide sequence isolated from the Sargasso Sea
atgcttttatttgtaggtctcggtaatccaacgcccaattctgaaaacaatagacataacattggatttaaaattattgatgcaattaatcaaaaatttggactttcaaaacaaaaacctaaattcaaaggacttttaactactggaactattaatggaaaaaaagtttatgcaattaaaccattaacattcatgaataattctggagtttgtattagagaacttattgaatattttaaaattgaagcagacaatgtaatagtttttcatgatgatttagatatcgattttggaaaaattaaaacaaaatttggaggatctagtgctggtcataatggaatagagtcaatagataaatttattggaaaagattattcaagagtaagaatcggaattggccatccaaaaaacaaagtagaagtagctgatcacgtactgcatgattttaatgatgaagaaaaaatagaacttgatactataactaaaagtattactgaatctctaccaattttattagataaaaaattagatcttttttcaagtacagtaaataataaataaa

SEQ ID NO: 259437 - DNA, 601 bp, Unknown
  Bacterial polypeptide expressing nucleotide sequence isolated from the Sargasso Sea
tctgaagaatcagaagataaagaagaagcctcagaataattactctgtgcaaaaagtatttattcttggaatcggaaatccagaagaaaaatataataacactaggcataatgttggcaaagattgggttgaaaaaattgccaaagatcacgaactaactttcgtaaaaaaatcaaaattaaagtgcggcatttgtgaggtagagccccatgtctatttggtgacgccggatgtgtatgttaatgaaactggcagagttgctttattgctcaaaagataccttaatgctaaaccagagcagattttggtattgcatgatgacattgatacacagattggtgaggcaaaatttaaatctggaggcggagatggcggtcacaatggattaaaagatttatcaaatgtcattgggaaagacttcaaaagattaaaaattggcgttagccatcctggtaggaaaaatgaagttacaaattgggttttaggtaagtttaaaccagcagagactcagcttcttgaggacttatataaaaaaatcatggttcacaaagatagaatatttagcctcgaaatagaaaaacttcaaaacttagtgaattaa

SEQ ID NO: 259438 - DNA, 586 bp, Unknown
  Bacterial polypeptide expressing nucleotide sequence isolated from the Sargasso Sea
tatgaataagtttttaattgtcgggattggtaatattggtgataaatatacaaatacaagacacaatataggttttctggtcatagatgaaatagcagaagttctaaagtcacccctctcatctgtaaaacatggacatagagctgaagctagctataaagggaaaaaggttattcttcttaaaccttcaaactatgttaataattcagggaaatctttattatactggaaaaataaagaaagaatcccaaataaaaatattttagttgtatgtgatgaccttaatctatattttggaaatataaaacttaaagcaaatggaacttcaggaggtcataatggattaaaagatattgaagaatacttgaagagcattaattaccctagacttagagttggaattcttaattcaaaaaactttaataagaccgattatgttcttggcgaatggactgacaaagaaaaagatgatttagttaatatcatctcaagcagttcagaaacagtcctatcatttattcataacggaatagatcaaacaatgaacactcataatactaaaaatctcattgatgagaatatttga

SEQ ID NO: 259439 - DNA, 622 bp, Unknown
  Bacterial polypeptide expressing nucleotide sequence isolated from the Sargasso Sea
gctgaagaggaatcctcagaggaaagtggagaataaaaaaaactttacttttattggtctttggaatcctcaaaaaaaatatgataagaccaggcataatataggtgctgactgtttatttaggctttctaaaagaaataacataaacttaaaaactcataaatcaggcaaatttcaattaggaagctatgaggaagatggttatgaaatagacatagtaattccaatggtttctatgaataattctggagaagcagttaaggaatatataaaaaataaaaatatggattacgaaaacttggttgttttacatgacgatatagatttaggttttggtagattaaggttaaaaaaaggcagtggtgatggaggtcataacggaattaaatctattaattatattattaacgcaacggactattttcgtttaaggataggcgtaggaagacctcctagtgggattgatccagcagagtatgtactttcaaggtttttatcagatgaaatagaagaaattaagtttttagtagaagatgcaattgatattgttaaagtatttcctaaagataaagaaatggcaattaaacaagcttctgaacgaagaattattgatgtagtgtga

SEQ ID NO: 259440 - DNA, 568 bp, Unknown
  Bacterial polypeptide expressing nucleotide sequence isolated from the Sargasso Sea
atgcccgaagaaacattgctgcttgtaggattaggaaaccctggtgaaaaatataaaaataatcgtcataatgttggtttcatggttcttgattatgttacaaatcaattaaaatttggaagaagtagaacaaaattcttaggaagaacctcaatgggttcatatgaaaatatcaaacttatatcatttaaacctcaaacctttatgaatgagtctggaagagcagttagagaggcctctaacttttataaaataaatcctgaaagaatttttgtgtttcatgatgatatagatttatcttttggtgatataaaactaaaaaagggcggaagtaatgcagggcataatggcttagcttctatagatgaaaacattggcaacaattatgtgcgtttaagaattggaattagtcatccaggtgataaagaaaaagttaccgggcatgttcttggtgatttctcaaaagaagaaaatgaagaatttgaaaagatacaaactaaaatagttaagaactttgatcttcttattgatactaatatcaaaaaatttcagtcaaacatgaaataaa

SEQ ID NO: 259441 - DNA, 556 bp, Unknown
  Bacterial polypeptide expressing nucleotide sequence isolated from the Sargasso Sea
atgatattatttgtaggacttggaaacccaacacctgacagtaaaaataataggcacaatattggttttaaaataattgatgcactaaatgttaaattctgtttatcaaaacaaaagcctaaatttaaaggcctgcttacaatgggcaatattttagacaaaaaagtatatgcaattaagcctcttactttcatgaataactctggtgcatgcgtaagagaattaatagaatactttaagatagacccgtcagatataattgtctttcacgatgatcttgatattgaatttggaaaaattaaagcaaaatttggaggatcagacgcaggacataatggaattgcatcattagataaatttataggtaaacattactctagggtaagaataggtattggaaaaccagaaaaaataaaagttaatgattttgttttaggtgattttaatgatgaggaaaatgttgagctcgacgaaatttttaaaaaaataatttcctctgttgatttattaatcgagaaaaaacttgatttattttccagtaaaataaacaactaaa

SEQ ID NO: 259442 - DNA, 601 bp, Unknown
  Bacterial polypeptide expressing nucleotide sequence isolated from the Sargasso Sea
atgaatctggagaataataaaactctcttagttggtctctggaatcctcaattaaaatacttaaaaacaagacacaatattggtgcggatattctagaaaagttctgtattaaaaattctatagaagtgaaattagataaatcaggcagttttaagataggtcaagtatcttttgaaaattcagatgtagatatcatctttccaatggtttccatgaataactctggtgaggctctcaaagcatactctaaatacaataatgttgaagccacaaatatattagtgattcacgatgatatagatctcggttttggtagattacgtttaaaaagtggaagttctgatggaggacacaatggaattaagtctataaatacttacttgcaatctaatgattattttagattaaaagttggagttggtagaccccctaaagaagtaaaccccgcagatttcgttttatctaggttttataataatgaagaagaagaagttgaatttttgatagaagattctgtagatattattgaaacatttttaaatgatagagaatctgctgtgaaagcagcttctgagcgaagaataattgatgtgatttaat

SEQ ID NO: 259443 - DNA, 562 bp, Unknown
  Bacterial polypeptide expressing nucleotide sequence isolated from the Sargasso Sea
atgcttttattcgtaggtctaggaaatccaacacctgatagcgaaaataatagacacaatataggtttcaaaattattgatgctataaataaaaaatttagtctttcaaaacaaaagcctaagtttaaaggtcttcttacaactggaaatattaataataaaaaagtttacgcaattaaaccattaacatttatgaataattcaggaatatgtattagagagttgattgaatattttaaaatagacgctgaagatgtaattgtatttcacgatgatttagatattaactttggaaaaataaaagctaagtttggtggatcaagtgctggacataacggggttgaatcaattgataagtttattgggaaagaatactcaagagttaggattggaataggaaagccaaaagcaaaatctagcgttgttgatcatgtgcttaaggattttgatgaggaagaaaaaatagaattagaaaaaataacagataatataacaagttctttagaaatattaatcgataaaaaattagatctattttcaagtgcagttaatagcaaataat

SEQ ID NO: 259444 - DNA, 607 bp, Unknown
  Bacterial polypeptide expressing nucleotide sequence isolated from the Sargasso Sea
atgccggctttgagattgattgtcgggttaggtaaccccggaaacgagtacctaaacaccagacacaatgttggggctgagtggttagatggccttgcaacatcatatgatgcccagtttaaggaaaactctaagttagaaggttggtttgcgaaagcgatgatcgaaggcattgaatgcttgttgcttaaaccgatgacttatatgaacgggagtggctcatcggtaaggttggccgctcgctactttcaaattcccttagattcaattctggttgctcatgatgagatggctttcaatcctggtaccgttcgaattaagctgggaggaggggcaaacggtcataacggattgagaagtttattttctgaattgagtaataatcgcgaattttataggttgaggatcggggttgggcacccgggtgaagcctcgaaagttacaccatatctcaccagatacaagattcccccagacgagcaactatcaattgccgatgcgcttaatttttcacctgctttaatgagtgaaatagttaatgctgactgggagaaagcaatgacccgactgcattctgagccaacaactatgaataggtcgttatagt

SEQ ID NO: 259445 - DNA, 300 bp, Unknown
  Bacterial polypeptide expressing nucleotide sequence isolated from the Sargasso Sea
aaataagatttagaagaaaaggaagctcagggggacataacgggcttaaaagcatcattgaacaatggcagacacaaaactttaaaagaataagaattggtattgggtcacctcctctcataaaaggaaaaaataattttaataccatttcacatgtattaggaaatatttctctagaagaaaaatcaatcttaaataaagtgtacaagagagtaattgaatctcttgaacaaataaatactaaaaaagaagaatatataattaatgaattaaattcttttgacaaagaccaaccttaag

SEQ ID NO: 259446 - DNA, 412 bp, Unknown
  Bacterial polypeptide expressing nucleotide sequence isolated from the Sargasso Sea
aatggttgttattcctatgacatcaatgaataattctggacagggcctaaaaacatttttgttagagaatgaattaaaagattatgaactctttgttgtacacgacgatattgacctaggatttggtagatttagaatcaagaaaagtagttcagatggtgggcacaatggaatcaaatctatagatttagctattggtaacaacgattactggagatttaaagttggtgttggaaggccaccatcaactaaggatcccgcagaatacgtactctcaaaatttaatagtgacgagactgaggaagtcgagtttataattgaagatagtatggaaatcattgatttatttctaaaagatgttgaatcagcaataaaaacagcctcggagagaagaataattgatgtggtctaa

SEQ ID NO: 259447 - DNA, 430 bp, Unknown
  Bacterial polypeptide expressing nucleotide sequence isolated from the Sargasso Sea
atgtacaaactttgttttgttggtcttggcaatcctggatcaaaatatcaaaacactcgtcataatattggaaaagattttcttaaaaaaatatcaattgaatattccttaaaattctcaaaaaaaattaaatttgaagctgaaatatcagaatcacattcaggtaacattttatgggtgattccagataattatgtcaatcaatccggtagaactgtttcgaagatacttaagtctacaaatcttacttcggagaacataattgttattcatgatgatttagatttaaaggttggagatctgcgtctaaaagagaatggaggtcatggaggccacaatggattgagagatattattgaaaaaataaactcaaaagatttttatagattaagggtaggaattgaccatcctggaaaaaagaggatgtaac

SEQ ID NO: 259448 - DNA, 586 bp, Unknown
  Bacterial polypeptide expressing nucleotide sequence isolated from the Sargasso Sea
tatgaataaatatctcatcttaggtattggaaatattggtcctgaatatcaaaacacaaggcacaatattggatttgacacactagataaacttgcaacagaactaaaagttagttttgatgctgttaaattagcattccgtgcagaagcaaaatataaagggaaaaaattaattttaattaaacccaataattatgttaataattctgggaagtcactttcttattggatgaaaaaagaaaaggttgatgcaaataatatattagtagtttgtgatgatctaaatctttactttgggaatataaaaatcaaatcaaaaggaaattccggaggacataacggcctgaaagatattgaagaataccttggaaactctaattattctaggataagaattggtatttcaaataacaagaatgtctctatgacagattatgtacttggtaaatggacagaagaagaacagtcaagaataccattattaacaaataaatccattgaaataattttttcatttctacagactggattagaaagaactatgaatttttataataagaagaactttatagatgaaaatttataa

SEQ ID NO: 259449 - DNA, 598 bp, Unknown
  Bacterial polypeptide expressing nucleotide sequence isolated from the Sargasso Sea
atgaatacacttttattagttggtctaggcaatcctggaaaagagtatgaaaatactagacataatgcaggatcagactttgtaagaatgctttgtaatgattatcaagtatctctagcaaaagaaaagttagtacatggttgttatgctaaatttataattaatgacttctctataatcttgtgcattcctgatactttcatgaatgagagtgggatttctgtctcaaaagctaagaaattctttaaagtagatagtcatgaaattttaattattcatgatgaattagatttacacaatggttgtataagacttaaagactctgggggtcacggcggtcataatggtcttaggagtattattgatcatctaaatggagattcatcctttaaaagaatgagaataggaattggtcatcctggtaaaaataaagacattgtctcttatgttttaaataaaccttctgaatctgaaagaaaaaatatggaagataaaatgaaaagcgctttgccattgatagaaagcttagttgttaatggttgggaaaaaaccataatgaaacttcactcctctgtggaaaagaaagatgagtcttaaa

SEQ ID NO: 259450 - DNA, 568 bp, Unknown
  Bacterial polypeptide expressing nucleotide sequence isolated from the Sargasso Sea
gatgtacaagctttgtattgttgggttaggtaatcctggcaaaaaatatgatagtacacggcataacattggcaaagactggttactaagactttcaaagtgctacaacatagattttatttcaaaattaaaatttgaagctgaaataggtgaatctcatagcggttcaattttatggattatacctactaattacgttaataattcaggcagaacattatctaaaattattaaatcaacaaatttaaaacctgagaattgtctgataatgcatgacgaacttgatctagacattggttcgttgcgtataaaagattcaggtgggcatggcggtcataatggtcttagggatattgctaacaaaattggttcagcaaactttttaagacttagaattggaattggccatccgggttctaaatatgaagttacaaattgggtgcttaataaatttactcctaatgaaatcaaacatcttgctcaaacgtattccagatttgttgatgtatttgaattaattacttcaaacaatataaaagaagcacaaaaacttcttcatactaaataa
